United States Patent Application Publication US 2014/0004565 A1 - sequence listing, part 62

SEQ ID NO: 1490465 - RNA, 19 nt, Artificial Sequence
  Description of Artificial Sequence: Synthetic oligonucleotide
cggugucguccugacgcua

SEQ ID NO: 1490466 - RNA, 19 nt, Artificial Sequence
  Description of Artificial Sequence: Synthetic oligonucleotide
ggcggggcuugcgcccggu

SEQ ID NO: 1490467 - RNA, 19 nt, Artificial Sequence
  Description of Artificial Sequence: Synthetic oligonucleotide
ccuccggguugagcaacuu

SEQ ID NO: 1490468 - RNA, 19 nt, Artificial Sequence
  Description of Artificial Sequence: Synthetic oligonucleotide
ugaaacaaaaguaauucgc

SEQ ID NO: 1490469 - RNA, 19 nt, Artificial Sequence
  Description of Artificial Sequence: Synthetic oligonucleotide
aaagaugagccacuggcac

SEQ ID NO: 1490470 - RNA, 19 nt, Artificial Sequence
  Description of Artificial Sequence: Synthetic oligonucleotide
agagaguuugcucaguccc

SEQ ID NO: 1490471 - RNA, 19 nt, Artificial Sequence
  Description of Artificial Sequence: Synthetic oligonucleotide
aaaguuggcaacccaagag

SEQ ID NO: 1490472 - RNA, 19 nt, Artificial Sequence
  Description of Artificial Sequence: Synthetic oligonucleotide
acuuuuagcaacucauagc

SEQ ID NO: 1490473 - RNA, 19 nt, Artificial Sequence
  Description of Artificial Sequence: Synthetic oligonucleotide
aaguaauucgcuuuauucu

SEQ ID NO: 1490474 - RNA, 19 nt, Artificial Sequence
  Description of Artificial Sequence: Synthetic oligonucleotide
aaguuggcaacccaagagg

SEQ ID NO: 1490475 - RNA, 19 nt, Artificial Sequence
  Description of Artificial Sequence: Synthetic oligonucleotide
caaaagaugagccacuggc

SEQ ID NO: 1490476 - RNA, 19 nt, Artificial Sequence
  Description of Artificial Sequence: Synthetic oligonucleotide
ucauaguagacagcgaugg

SEQ ID NO: 1490477 - RNA, 19 nt, Artificial Sequence
  Description of Artificial Sequence: Synthetic oligonucleotide
gaagccgaauuucugauag

SEQ ID NO: 1490478 - RNA, 19 nt, Artificial Sequence
  Description of Artificial Sequence: Synthetic oligonucleotide
ugaauacccagcaaaggcc

SEQ ID NO: 1490479 - RNA, 19 nt, Artificial Sequence
  Description of Artificial Sequence: Synthetic oligonucleotide
ugauauagguauccaaagc

SEQ ID NO: 1490480 - RNA, 19 nt, Artificial Sequence
  Description of Artificial Sequence: Synthetic oligonucleotide
uugauauagguauccaaag

SEQ ID NO: 1490481 - RNA, 19 nt, Artificial Sequence
  Description of Artificial Sequence: Synthetic oligonucleotide
aagaugagccacuggcacc

SEQ ID NO: 1490482 - RNA, 19 nt, Artificial Sequence
  Description of Artificial Sequence: Synthetic oligonucleotide
uggucuugcagguagaucu

SEQ ID NO: 1490483 - RNA, 19 nt, Artificial Sequence
  Description of Artificial Sequence: Synthetic oligonucleotide
uuuagcaacucauagcauc

SEQ ID NO: 1490484 - RNA, 19 nt, Artificial Sequence
  Description of Artificial Sequence: Synthetic oligonucleotide
ugauagaggugaaugagcu

SEQ ID NO: 1490485 - RNA, 19 nt, Artificial Sequence
  Description of Artificial Sequence: Synthetic oligonucleotide
uuagcaacucauagcaucc

SEQ ID NO: 1490486 - RNA, 19 nt, Artificial Sequence
  Description of Artificial Sequence: Synthetic oligonucleotide
aacucauagcauccaguac

SEQ ID NO: 1490487 - RNA, 19 nt, Artificial Sequence
  Description of Artificial Sequence: Synthetic oligonucleotide
ugugccauccaucugggca

SEQ ID NO: 1490488 - RNA, 19 nt, Artificial Sequence
  Description of Artificial Sequence: Synthetic oligonucleotide
uccagugucaccauaggac

SEQ ID NO: 1490489 - RNA, 19 nt, Artificial Sequence
  Description of Artificial Sequence: Synthetic oligonucleotide
gugaaacaaaaguaauucg

SEQ ID NO: 1490490 - RNA, 19 nt, Artificial Sequence
  Description of Artificial Sequence: Synthetic oligonucleotide
caaacgcaccacaagaggg

SEQ ID NO: 1490491 - RNA, 19 nt, Artificial Sequence
  Description of Artificial Sequence: Synthetic oligonucleotide
uuagcaaacgcaccacaag

SEQ ID NO: 1490492 - RNA, 19 nt, Artificial Sequence
  Description of Artificial Sequence: Synthetic oligonucleotide
uuuccuaggugaaacaaaa

SEQ ID NO: 1490493 - RNA, 19 nt, Artificial Sequence
  Description of Artificial Sequence: Synthetic oligonucleotide
aaaaguuggcaacccaaga

SEQ ID NO: 1490494 - RNA, 19 nt, Artificial Sequence
  Description of Artificial Sequence: Synthetic oligonucleotide
agaaaucuccuugucgugc

SEQ ID NO: 1490495 - RNA, 19 nt, Artificial Sequence
  Description of Artificial Sequence: Synthetic oligonucleotide
agugauguuacggauuggg

SEQ ID NO: 1490496 - RNA, 19 nt, Artificial Sequence
  Description of Artificial Sequence: Synthetic oligonucleotide
ucaaaagaugagccacugg

SEQ ID NO: 1490497 - RNA, 19 nt, Artificial Sequence
  Description of Artificial Sequence: Synthetic oligonucleotide
uuaggcuugggguaggaga

SEQ ID NO: 1490498 - RNA, 19 nt, Artificial Sequence
  Description of Artificial Sequence: Synthetic oligonucleotide
caacccaagagguuggugc

SEQ ID NO: 1490499 - RNA, 19 nt, Artificial Sequence
  Description of Artificial Sequence: Synthetic oligonucleotide
ugcagguagaucuccagcc

SEQ ID NO: 1490500 - RNA, 19 nt, Artificial Sequence
  Description of Artificial Sequence: Synthetic oligonucleotide
uagcaaacgcaccacaaga

SEQ ID NO: 1490501 - RNA, 19 nt, Artificial Sequence
  Description of Artificial Sequence: Synthetic oligonucleotide
auagagaguuugcucaguc

SEQ ID NO: 1490502 - RNA, 19 nt, Artificial Sequence
  Description of Artificial Sequence: Synthetic oligonucleotide
ucuggaagcuccaaugagu

SEQ ID NO: 1490503 - RNA, 19 nt, Artificial Sequence
  Description of Artificial Sequence: Synthetic oligonucleotide
uaauucgcuuuauucuggg

SEQ ID NO: 1490504 - RNA, 19 nt, Artificial Sequence
  Description of Artificial Sequence: Synthetic oligonucleotide
ggcccuaagagccaaaagg

SEQ ID NO: 1490505 - RNA, 19 nt, Artificial Sequence
  Description of Artificial Sequence: Synthetic oligonucleotide
aaaaguaauucgcuuuauu

SEQ ID NO: 1490506 - RNA, 19 nt, Artificial Sequence
  Description of Artificial Sequence: Synthetic oligonucleotide
cauagcauccaguacagca

SEQ ID NO: 1490507 - RNA, 19 nt, Artificial Sequence
  Description of Artificial Sequence: Synthetic oligonucleotide
gauggaacgaagcuuggga

SEQ ID NO: 1490508 - RNA, 19 nt, Artificial Sequence
  Description of Artificial Sequence: Synthetic oligonucleotide
uccuugucgugccaguggg

SEQ ID NO: 1490509 - RNA, 19 nt, Artificial Sequence
  Description of Artificial Sequence: Synthetic oligonucleotide
uguuaccccagucagcagu

SEQ ID NO: 1490510 - RNA, 19 nt, Artificial Sequence
  Description of Artificial Sequence: Synthetic oligonucleotide
cugauagaggugaaugagc

SEQ ID NO: 1490511 - RNA, 19 nt, Artificial Sequence
  Description of Artificial Sequence: Synthetic oligonucleotide
cuugauauagguauccaaa

SEQ ID NO: 1490512 - RNA, 19 nt, Artificial Sequence
  Description of Artificial Sequence: Synthetic oligonucleotide
aacagcagagucaggcccc

SEQ ID NO: 1490513 - RNA, 19 nt, Artificial Sequence
  Description of Artificial Sequence: Synthetic oligonucleotide
auggaacgaagcuugggag

SEQ ID NO: 1490514 - RNA, 19 nt, Artificial Sequence
  Description of Artificial Sequence: Synthetic oligonucleotide
ugauccagcacucacuguu

SEQ ID NO: 1490515 - RNA, 19 nt, Artificial Sequence
  Description of Artificial Sequence: Synthetic oligonucleotide
accucuggcacguagaaau

SEQ ID NO: 1490516 - RNA, 19 nt, Artificial Sequence
  Description of Artificial Sequence: Synthetic oligonucleotide
ugggguaggagaacucagg

SEQ ID NO: 1490517 - RNA, 19 nt, Artificial Sequence
  Description of Artificial Sequence: Synthetic oligonucleotide
auauagguauccaaagcag

SEQ ID NO: 1490518 - RNA, 19 nt, Artificial Sequence
  Description of Artificial Sequence: Synthetic oligonucleotide
gaaaucuccuugucgugcc

SEQ ID NO: 1490519 - RNA, 19 nt, Artificial Sequence
  Description of Artificial Sequence: Synthetic oligonucleotide
acauggaacuuguaggcca

SEQ ID NO: 1490520 - RNA, 19 nt, Artificial Sequence
  Description of Artificial Sequence: Synthetic oligonucleotide
accggcacuucucaggagg

SEQ ID NO: 1490521 - RNA, 19 nt, Artificial Sequence
  Description of Artificial Sequence: Synthetic oligonucleotide
uuggcaacccaagagguug

SEQ ID NO: 1490522 - RNA, 19 nt, Artificial Sequence
  Description of Artificial Sequence: Synthetic oligonucleotide
aaauggaucuggucuugca

SEQ ID NO: 1490523 - RNA, 19 nt, Artificial Sequence
  Description of Artificial Sequence: Synthetic oligonucleotide
uaggugaaacaaaaguaau

SEQ ID NO: 1490524 - RNA, 19 nt, Artificial Sequence
  Description of Artificial Sequence: Synthetic oligonucleotide
gaaugagcucaggugaggg

SEQ ID NO: 1490525 - RNA, 19 nt, Artificial Sequence
  Description of Artificial Sequence: Synthetic oligonucleotide
ucccuuagcaaacgcacca

SEQ ID NO: 1490526 - RNA, 19 nt, Artificial Sequence
  Description of Artificial Sequence: Synthetic oligonucleotide
acaaaaguaauucgcuuua

SEQ ID NO: 1490527 - RNA, 19 nt, Artificial Sequence
  Description of Artificial Sequence: Synthetic oligonucleotide
aaaagaugagccacuggca

SEQ ID NO: 1490528 - RNA, 19 nt, Artificial Sequence
  Description of Artificial Sequence: Synthetic oligonucleotide
cuugugguuacuccucacc

SEQ ID NO: 1490529 - RNA, 19 nt, Artificial Sequence
  Description of Artificial Sequence: Synthetic oligonucleotide
guuggugcagauaacaguc

SEQ ID NO: 1490530 - RNA, 19 nt, Artificial Sequence
  Description of Artificial Sequence: Synthetic oligonucleotide
uucgcuuuauucuggguuc

SEQ ID NO: 1490531 - RNA, 19 nt, Artificial Sequence
  Description of Artificial Sequence: Synthetic oligonucleotide
guagaaaucuccuugucgu

SEQ ID NO: 1490532 - RNA, 19 nt, Artificial Sequence
  Description of Artificial Sequence: Synthetic oligonucleotide
uguccagugucaccauagg

SEQ ID NO: 1490533 - RNA, 19 nt, Artificial Sequence
  Description of Artificial Sequence: Synthetic oligonucleotide
acagcgauggaacgaagcu

SEQ ID NO: 1490534 - RNA, 19 nt, Artificial Sequence
  Description of Artificial Sequence: Synthetic oligonucleotide
agugaggauguuuaggcuu

SEQ ID NO: 1490535 - RNA, 19 nt, Artificial Sequence
  Description of Artificial Sequence: Synthetic oligonucleotide
agcaggguggacucggcgg

SEQ ID NO: 1490536 - RNA, 19 nt, Artificial Sequence
  Description of Artificial Sequence: Synthetic oligonucleotide
aaugagcucaggugagggu

SEQ ID NO: 1490537 - RNA, 19 nt, Artificial Sequence
  Description of Artificial Sequence: Synthetic oligonucleotide
ggugaaugagcucagguga

SEQ ID NO: 1490538 - RNA, 19 nt, Artificial Sequence
  Description of Artificial Sequence: Synthetic oligonucleotide
aggagauccggcaugguuc

SEQ ID NO: 1490539 - RNA, 19 nt, Artificial Sequence
  Description of Artificial Sequence: Synthetic oligonucleotide
guaauucgcuuuauucugg

SEQ ID NO: 1490540 - RNA, 19 nt, Artificial Sequence
  Description of Artificial Sequence: Synthetic oligonucleotide
uccgugaaaagcuguccag

SEQ ID NO: 1490541 - RNA, 19 nt, Artificial Sequence
  Description of Artificial Sequence: Synthetic oligonucleotide
uuccuaggugaaacaaaag

SEQ ID NO: 1490542 - RNA, 19 nt, Artificial Sequence
  Description of Artificial Sequence: Synthetic oligonucleotide
uugggguaggagaacucag

SEQ ID NO: 1490543 - RNA, 19 nt, Artificial Sequence
  Description of Artificial Sequence: Synthetic oligonucleotide
gaaacaaaaguaauucgcu

SEQ ID NO: 1490544 - RNA, 19 nt, Artificial Sequence
  Description of Artificial Sequence: Synthetic oligonucleotide
cuccucaccccucucaggg

SEQ ID NO: 1490545 - RNA, 19 nt, Artificial Sequence
  Description of Artificial Sequence: Synthetic oligonucleotide
uggaacgaagcuugggaga

SEQ ID NO: 1490546 - RNA, 19 nt, Artificial Sequence
  Description of Artificial Sequence: Synthetic oligonucleotide
ugcugccuacugcacaccg

SEQ ID NO: 1490547 - RNA, 19 nt, Artificial Sequence
  Description of Artificial Sequence: Synthetic oligonucleotide
aauucgcuuuauucugggu

SEQ ID NO: 1490548 - RNA, 19 nt, Artificial Sequence
  Description of Artificial Sequence: Synthetic oligonucleotide
cuggaagcuccaaugaguc

SEQ ID NO: 1490549 - RNA, 19 nt, Artificial Sequence
  Description of Artificial Sequence: Synthetic oligonucleotide
ugagcacacagcuuccgcu

SEQ ID NO: 1490550 - RNA, 19 nt, Artificial Sequence
  Description of Artificial Sequence: Synthetic oligonucleotide
cuccuguuacuccuggucc

SEQ ID NO: 1490551 - RNA, 19 nt, Artificial Sequence
  Description of Artificial Sequence: Synthetic oligonucleotide
gaacucaggcuccuguuac

SEQ ID NO: 1490552 - RNA, 19 nt, Artificial Sequence
  Description of Artificial Sequence: Synthetic oligonucleotide
agucagcaguccugaauac

SEQ ID NO: 1490553 - RNA, 19 nt, Artificial Sequence
  Description of Artificial Sequence: Synthetic oligonucleotide
agcaacucauagcauccag

SEQ ID NO: 1490554 - RNA, 19 nt, Artificial Sequence
  Description of Artificial Sequence: Synthetic oligonucleotide
auaguagacagcgauggaa

SEQ ID NO: 1490555 - RNA, 19 nt, Artificial Sequence
  Description of Artificial Sequence: Synthetic oligonucleotide
ugagcucccggguagcccc

SEQ ID NO: 1490556 - RNA, 19 nt, Artificial Sequence
  Description of Artificial Sequence: Synthetic oligonucleotide
ugaaugagcucaggugagg

SEQ ID NO: 1490557 - RNA, 19 nt, Artificial Sequence
  Description of Artificial Sequence: Synthetic oligonucleotide
uagaaaucuccuugucgug

SEQ ID NO: 1490558 - RNA, 19 nt, Artificial Sequence
  Description of Artificial Sequence: Synthetic oligonucleotide
gggauagagaguuugcuca

SEQ ID NO: 1490559 - RNA, 19 nt, Artificial Sequence
  Description of Artificial Sequence: Synthetic oligonucleotide
uaggaccccacauggaacu

SEQ ID NO: 1490560 - RNA, 19 nt, Artificial Sequence
  Description of Artificial Sequence: Synthetic oligonucleotide
agcgauggaacgaagcuug

SEQ ID NO: 1490561 - RNA, 19 nt, Artificial Sequence
  Description of Artificial Sequence: Synthetic oligonucleotide
acguagaaaucuccuuguc

SEQ ID NO: 1490562 - RNA, 19 nt, Artificial Sequence
  Description of Artificial Sequence: Synthetic oligonucleotide
ucacuuuuagcaacucaua

SEQ ID NO: 1490563 - RNA, 19 nt, Artificial Sequence
  Description of Artificial Sequence: Synthetic oligonucleotide
gaagucucccggcugccag

SEQ ID NO: 1490564 - RNA, 19 nt, Artificial Sequence
  Description of Artificial Sequence: Synthetic oligonucleotide
gaagcuuggcuucagggcu

SEQ ID NO: 1490565 - RNA, 19 nt, Artificial Sequence
  Description of Artificial Sequence: Synthetic oligonucleotide
ucagucccuuagcaaacgc

SEQ ID NO: 1490566 - RNA, 19 nt, Artificial Sequence
  Description of Artificial Sequence: Synthetic oligonucleotide
aacuggcgucacuuguguc

SEQ ID NO: 1490567 - RNA, 19 nt, Artificial Sequence
  Description of Artificial Sequence: Synthetic oligonucleotide
uucugggacucccucucag

SEQ ID NO: 1490568 - RNA, 19 nt, Artificial Sequence
  Description of Artificial Sequence: Synthetic oligonucleotide
agcaguccugaauacccag

SEQ ID NO: 1490569 - RNA, 19 nt, Artificial Sequence
  Description of Artificial Sequence: Synthetic oligonucleotide
ucuggcacguagaaaucuc

SEQ ID NO: 1490570 - RNA, 19 nt, Artificial Sequence
  Description of Artificial Sequence: Synthetic oligonucleotide
gcaaacgcaccacaagagg

SEQ ID NO: 1490571 - RNA, 19 nt, Artificial Sequence
  Description of Artificial Sequence: Synthetic oligonucleotide
gaauacccagcaaaggcca

SEQ ID NO: 1490572 - RNA, 19 nt, Artificial Sequence
  Description of Artificial Sequence: Synthetic oligonucleotide
ucaccauaggaccccacau

SEQ ID NO: 1490573 - RNA, 19 nt, Artificial Sequence
  Description of Artificial Sequence: Synthetic oligonucleotide
cucgcugcgguuaucacca

SEQ ID NO: 1490574 - RNA, 19 nt, Artificial Sequence
  Description of Artificial Sequence: Synthetic oligonucleotide
gauccggcaugguucuggg

SEQ ID NO: 1490575 - RNA, 19 nt, Artificial Sequence
  Description of Artificial Sequence: Synthetic oligonucleotide
cugccuacugcacaccggc

SEQ ID NO: 1490576 - RNA, 19 nt, Artificial Sequence
  Description of Artificial Sequence: Synthetic oligonucleotide
uuccgcuccuugauauagg

SEQ ID NO: 1490577 - RNA, 19 nt, Artificial Sequence
  Description of Artificial Sequence: Synthetic oligonucleotide
uggcaacccaagagguugg

SEQ ID NO: 1490578 - RNA, 19 nt, Artificial Sequence
  Description of Artificial Sequence: Synthetic oligonucleotide
uggugcagauaacagucuc

SEQ ID NO: 1490579 - RNA, 19 nt, Artificial Sequence
  Description of Artificial Sequence: Synthetic oligonucleotide
gugauguuacggauugggg

SEQ ID NO: 1490580 - RNA, 19 nt, Artificial Sequence
  Description of Artificial Sequence: Synthetic oligonucleotide
gacagcgauggaacgaagc

SEQ ID NO: 1490581 - RNA, 19 nt, Artificial Sequence
  Description of Artificial Sequence: Synthetic oligonucleotide
uaucaccaucaucccagcc

SEQ ID NO: 1490582 - RNA, 19 nt, Artificial Sequence
  Description of Artificial Sequence: Synthetic oligonucleotide
ucacucaggaugcugccua

SEQ ID NO: 1490583 - RNA, 19 nt, Artificial Sequence
  Description of Artificial Sequence: Synthetic oligonucleotide
auacccagcaaaggccagc

SEQ ID NO: 1490584 - RNA, 19 nt, Artificial Sequence
  Description of Artificial Sequence: Synthetic oligonucleotide
uccuguuacuccuggucca

SEQ ID NO: 1490585 - RNA, 19 nt, Artificial Sequence
  Description of Artificial Sequence: Synthetic oligonucleotide
ggugauccagcacucacug

SEQ ID NO: 1490586 - RNA, 19 nt, Artificial Sequence
  Description of Artificial Sequence: Synthetic oligonucleotide
agcaaacgcaccacaagag

SEQ ID NO: 1490587 - RNA, 19 nt, Artificial Sequence
  Description of Artificial Sequence: Synthetic oligonucleotide
uggcacguagaaaucuccu

SEQ ID NO: 1490588 - RNA, 19 nt, Artificial Sequence
  Description of Artificial Sequence: Synthetic oligonucleotide
uuaucaccaucaucccagc

SEQ ID NO: 1490589 - RNA, 19 nt, Artificial Sequence
  Description of Artificial Sequence: Synthetic oligonucleotide
caggcucacuuuuagcaac

SEQ ID NO: 1490590 - RNA, 19 nt, Artificial Sequence
  Description of Artificial Sequence: Synthetic oligonucleotide
ugugguggcugaagucucc

SEQ ID NO: 1490591 - RNA, 19 nt, Artificial Sequence
  Description of Artificial Sequence: Synthetic oligonucleotide
aacuuguaggccacaguga

SEQ ID NO: 1490592 - RNA, 19 nt, Artificial Sequence
  Description of Artificial Sequence: Synthetic oligonucleotide
aacucaggcuccuguuacu

SEQ ID NO: 1490593 - RNA, 19 nt, Artificial Sequence
  Description of Artificial Sequence: Synthetic oligonucleotide
gagaagaccuugaagccga

SEQ ID NO: 1490594 - RNA, 19 nt, Artificial Sequence
  Description of Artificial Sequence: Synthetic oligonucleotide
gcccuaagagccaaaaggg

SEQ ID NO: 1490595 - RNA, 19 nt, Artificial Sequence
  Description of Artificial Sequence: Synthetic oligonucleotide
cauggaacuuguaggccac

SEQ ID NO: 1490596 - RNA, 19 nt, Artificial Sequence
  Description of Artificial Sequence: Synthetic oligonucleotide
gcacguagaaaucuccuug

SEQ ID NO: 1490597 - RNA, 19 nt, Artificial Sequence
  Description of Artificial Sequence: Synthetic oligonucleotide
uggcccuaagagccaaaag

SEQ ID NO: 1490598 - RNA, 19 nt, Artificial Sequence
  Description of Artificial Sequence: Synthetic oligonucleotide
cuuccgcuccuugauauag

SEQ ID NO: 1490599 - RNA, 19 nt, Artificial Sequence
  Description of Artificial Sequence: Synthetic oligonucleotide
uaggagauccggcaugguu

SEQ ID NO: 1490600 - RNA, 19 nt, Artificial Sequence
  Description of Artificial Sequence: Synthetic oligonucleotide
aaaucuccuugucgugcca

SEQ ID NO: 1490601 - RNA, 19 nt, Artificial Sequence
  Description of Artificial Sequence: Synthetic oligonucleotide
gugcagauaacagucucug

SEQ ID NO: 1490602 - RNA, 19 nt, Artificial Sequence
  Description of Artificial Sequence: Synthetic oligonucleotide
guuugcucagucccuuagc

SEQ ID NO: 1490603 - RNA, 19 nt, Artificial Sequence
  Description of Artificial Sequence: Synthetic oligonucleotide
ccacauggaacuuguaggc

SEQ ID NO: 1490604 - RNA, 19 nt, Artificial Sequence
  Description of Artificial Sequence: Synthetic oligonucleotide
acccgauucacuguagcug

SEQ ID NO: 1490605 - RNA, 19 nt, Artificial Sequence
  Description of Artificial Sequence: Synthetic oligonucleotide
acagaacuggcgucacuug

SEQ ID NO: 1490606 - RNA, 19 nt, Artificial Sequence
  Description of Artificial Sequence: Synthetic oligonucleotide
cuuagcaaacgcaccacaa

SEQ ID NO: 1490607 - RNA, 19 nt, Artificial Sequence
  Description of Artificial Sequence: Synthetic oligonucleotide
uagacagcgauggaacgaa

SEQ ID NO: 1490608 - RNA, 19 nt, Artificial Sequence
  Description of Artificial Sequence: Synthetic oligonucleotide
gguauccaaagcagggugg

SEQ ID NO: 1490609 - RNA, 19 nt, Artificial Sequence
  Description of Artificial Sequence: Synthetic oligonucleotide
cucaaaagaugagccacug

SEQ ID NO: 1490610 - RNA, 19 nt, Artificial Sequence
  Description of Artificial Sequence: Synthetic oligonucleotide
ugggcacaugaaauggauc

SEQ ID NO: 1490611 - RNA, 19 nt, Artificial Sequence
  Description of Artificial Sequence: Synthetic oligonucleotide
aauacccagcaaaggccag

SEQ ID NO: 1490612 - RNA, 19 nt, Artificial Sequence
  Description of Artificial Sequence: Synthetic oligonucleotide
cucacuuuuagcaacucau

SEQ ID NO: 1490613 - RNA, 19 nt, Artificial Sequence
  Description of Artificial Sequence: Synthetic oligonucleotide
aguuggcaacccaagaggu

SEQ ID NO: 1490614 - RNA, 19 nt, Artificial Sequence
  Description of Artificial Sequence: Synthetic oligonucleotide
ggugcuggaaaggagaaga

SEQ ID NO: 1490615 - RNA, 19 nt, Artificial Sequence
  Description of Artificial Sequence: Synthetic oligonucleotide
gggauuuccgcucugucuc

SEQ ID NO: 1490616 - RNA, 19 nt, Artificial Sequence
  Description of Artificial Sequence: Synthetic oligonucleotide
cauaggaccccacauggaa

SEQ ID NO: 1490617 - RNA, 19 nt, Artificial Sequence
  Description of Artificial Sequence: Synthetic oligonucleotide
ggauagagaguuugcucag

SEQ ID NO: 1490618 - RNA, 19 nt, Artificial Sequence
  Description of Artificial Sequence: Synthetic oligonucleotide
ggaacgaagcuugggagag

SEQ ID NO: 1490619 - RNA, 19 nt, Artificial Sequence
  Description of Artificial Sequence: Synthetic oligonucleotide
cucaggaugcugccuacug

SEQ ID NO: 1490620 - RNA, 19 nt, Artificial Sequence
  Description of Artificial Sequence: Synthetic oligonucleotide
caacucauagcauccagua

SEQ ID NO: 1490621 - RNA, 19 nt, Artificial Sequence
  Description of Artificial Sequence: Synthetic oligonucleotide
uccagcacucacuguuacc

SEQ ID NO: 1490622 - RNA, 19 nt, Artificial Sequence
  Description of Artificial Sequence: Synthetic oligonucleotide
agcuuccgcuccuugauau

SEQ ID NO: 1490623 - RNA, 19 nt, Artificial Sequence
  Description of Artificial Sequence: Synthetic oligonucleotide
uguuuaggcuugggguagg

SEQ ID NO: 1490624 - RNA, 19 nt, Artificial Sequence
  Description of Artificial Sequence: Synthetic oligonucleotide
caaucaggcccaguaguag

SEQ ID NO: 1490625 - RNA, 19 nt, Artificial Sequence
  Description of Artificial Sequence: Synthetic oligonucleotide
cacauggaacuuguaggcc

SEQ ID NO: 1490626 - RNA, 19 nt, Artificial Sequence
  Description of Artificial Sequence: Synthetic oligonucleotide
gugaaugagcucaggugag

SEQ ID NO: 1490627 - RNA, 19 nt, Artificial Sequence
  Description of Artificial Sequence: Synthetic oligonucleotide
uccuugauauagguaucca

SEQ ID NO: 1490628 - RNA, 19 nt, Artificial Sequence
  Description of Artificial Sequence: Synthetic oligonucleotide
aagccgaauuucugauaga

SEQ ID NO: 1490629 - RNA, 19 nt, Artificial Sequence
  Description of Artificial Sequence: Synthetic oligonucleotide
agaacucaggcuccuguua

SEQ ID NO: 1490630 - RNA, 19 nt, Artificial Sequence
  Description of Artificial Sequence: Synthetic oligonucleotide
ugaagccgaauuucugaua

SEQ ID NO: 1490631 - RNA, 19 nt, Artificial Sequence
  Description of Artificial Sequence: Synthetic oligonucleotide
uucucaggaggcaccguau

SEQ ID NO: 1490632 - RNA, 19 nt, Artificial Sequence
  Description of Artificial Sequence: Synthetic oligonucleotide
cacuguuaccccagucagc

SEQ ID NO: 1490633 - RNA, 19 nt, Artificial Sequence
  Description of Artificial Sequence: Synthetic oligonucleotide
uuacagaacuggcgucacu

SEQ ID NO: 1490634 - RNA, 19 nt, Artificial Sequence
  Description of Artificial Sequence: Synthetic oligonucleotide
auaacagucucuggcuccu

SEQ ID NO: 1490635 - RNA, 19 nt, Artificial Sequence
  Description of Artificial Sequence: Synthetic oligonucleotide
agggccgagggcuuguggu

SEQ ID NO: 1490636 - RNA, 19 nt, Artificial Sequence
  Description of Artificial Sequence: Synthetic oligonucleotide
ccagcacucacuguuaccc

SEQ ID NO: 1490637 - RNA, 19 nt, Artificial Sequence
  Description of Artificial Sequence: Synthetic oligonucleotide
gaggugaaugagcucaggu

SEQ ID NO: 1490638 - RNA, 19 nt, Artificial Sequence
  Description of Artificial Sequence: Synthetic oligonucleotide
aggugaaacaaaaguaauu

SEQ ID NO: 1490639 - RNA, 19 nt, Artificial Sequence
  Description of Artificial Sequence: Synthetic oligonucleotide
ugucgugccagugggcaca

SEQ ID NO: 1490640 - RNA, 19 nt, Artificial Sequence
  Description of Artificial Sequence: Synthetic oligonucleotide
gugagcacacagcuuccgc

SEQ ID NO: 1490641 - RNA, 19 nt, Artificial Sequence
  Description of Artificial Sequence: Synthetic oligonucleotide
gucagcaguccugaauacc

SEQ ID NO: 1490642 - RNA, 19 nt, Artificial Sequence
  Description of Artificial Sequence: Synthetic oligonucleotide
cucagucccuuagcaaacg

SEQ ID NO: 1490643 - RNA, 19 nt, Artificial Sequence
  Description of Artificial Sequence: Synthetic oligonucleotide
cagggcucaguugagguuc

SEQ ID NO: 1490644 - RNA, 19 nt, Artificial Sequence
  Description of Artificial Sequence: Synthetic oligonucleotide
ccgaauuucugauagaggu

SEQ ID NO: 1490645 - RNA, 19 nt, Artificial Sequence
  Description of Artificial Sequence: Synthetic oligonucleotide
gggacucccucucagcacc

SEQ ID NO: 1490646 - RNA, 19 nt, Artificial Sequence
  Description of Artificial Sequence: Synthetic oligonucleotide
guagacagcgauggaacga

SEQ ID NO: 1490647 - RNA, 19 nt, Artificial Sequence
  Description of Artificial Sequence: Synthetic oligonucleotide
uccaagguccaagcugggc

SEQ ID NO: 1490648 - RNA, 19 nt, Artificial Sequence
  Description of Artificial Sequence: Synthetic oligonucleotide
uggcugaagucucccggcu

SEQ ID NO: 1490649 - RNA, 19 nt, Artificial Sequence
  Description of Artificial Sequence: Synthetic oligonucleotide
gggcacaugaaauggaucu

SEQ ID NO: 1490650 - RNA, 19 nt, Artificial Sequence
  Description of Artificial Sequence: Synthetic oligonucleotide
aauuucugauagaggugaa

SEQ ID NO: 1490651 - RNA, 19 nt, Artificial Sequence
  Description of Artificial Sequence: Synthetic oligonucleotide
cuccucaaaagaugagcca

SEQ ID NO: 1490652 - RNA, 19 nt, Artificial Sequence
  Description of Artificial Sequence: Synthetic oligonucleotide
ggggauagagaguuugcuc

SEQ ID NO: 1490653 - RNA, 19 nt, Artificial Sequence
  Description of Artificial Sequence: Synthetic oligonucleotide
cuuacagaacuggcgucac

SEQ ID NO: 1490654 - RNA, 19 nt, Artificial Sequence
  Description of Artificial Sequence: Synthetic oligonucleotide
caguccugaauacccagca

SEQ ID NO: 1490655 - RNA, 19 nt, Artificial Sequence
  Description of Artificial Sequence: Synthetic oligonucleotide
cuugggguaggagaacuca

SEQ ID NO: 1490656 - RNA, 19 nt, Artificial Sequence
  Description of Artificial Sequence: Synthetic oligonucleotide
cuugucgugccagugggca

SEQ ID NO: 1490657 - RNA, 19 nt, Artificial Sequence
  Description of Artificial Sequence: Synthetic oligonucleotide
ugggacucccucucagcac

SEQ ID NO: 1490658 - RNA, 19 nt, Artificial Sequence
  Description of Artificial Sequence: Synthetic oligonucleotide
cagcacucacuguuacccc

SEQ ID NO: 1490659 - RNA, 19 nt, Artificial Sequence
  Description of Artificial Sequence: Synthetic oligonucleotide
aguccugaauacccagcaa

SEQ ID NO: 1490660 - RNA, 19 nt, Artificial Sequence
  Description of Artificial Sequence: Synthetic oligonucleotide
agguagaucuccagccgag

SEQ ID NO: 1490661 - RNA, 19 nt, Artificial Sequence
  Description of Artificial Sequence: Synthetic oligonucleotide
cgucacuugugucagcucc

SEQ ID NO: 1490662 - RNA, 19 nt, Artificial Sequence
  Description of Artificial Sequence: Synthetic oligonucleotide
uagcugugcucgcugcggu

SEQ ID NO: 1490663 - RNA, 19 nt, Artificial Sequence
  Description of Artificial Sequence: Synthetic oligonucleotide
guguaggggaagguggcug

SEQ ID NO: 1490664 - RNA, 19 nt, Artificial Sequence
  Description of Artificial Sequence: Synthetic oligonucleotide
gagggccgagggcuugugg

SEQ ID NO: 1490665 - RNA, 19 nt, Artificial Sequence
  Description of Artificial Sequence: Synthetic oligonucleotide
uggcacccgauucacugua

SEQ ID NO: 1490666 - RNA, 19 nt, Artificial Sequence
  Description of Artificial Sequence: Synthetic oligonucleotide
ccccacauggaacuuguag

SEQ ID NO: 1490667 - RNA, 19 nt, Artificial Sequence
  Description of Artificial Sequence: Synthetic oligonucleotide
gcaggguggacucggcggg

SEQ ID NO: 1490668 - RNA, 19 nt, Artificial Sequence
  Description of Artificial Sequence: Synthetic oligonucleotide
acgguugcuugccccagga

SEQ ID NO: 1490669 - RNA, 19 nt, Artificial Sequence
  Description of Artificial Sequence: Synthetic oligonucleotide
gcugccagggcgcaccucc

SEQ ID NO: 1490670 - RNA, 19 nt, Artificial Sequence
  Description of Artificial Sequence: Synthetic oligonucleotide
agggcagugaggauguuua

SEQ ID NO: 1490671 - RNA, 19 nt, Artificial Sequence
  Description of Artificial Sequence: Synthetic oligonucleotide
gagggcucagucgcggagc

SEQ ID NO: 1490672 - RNA, 19 nt, Artificial Sequence
  Description of Artificial Sequence: Synthetic oligonucleotide
uugccccucacgcucgcuc

SEQ ID NO: 1490673 - RNA, 19 nt, Artificial Sequence
  Description of Artificial Sequence: Synthetic oligonucleotide
cucccggcgcucagcagcg

SEQ ID NO: 1490674 - RNA, 19 nt, Artificial Sequence
  Description of Artificial Sequence: Synthetic oligonucleotide
gggguugucauaguagaca

SEQ ID NO: 1490675 - RNA, 19 nt, Artificial Sequence
  Description of Artificial Sequence: Synthetic oligonucleotide
ggagagaugcugcagcucu

SEQ ID NO: 1490676 - RNA, 19 nt, Artificial Sequence
  Description of Artificial Sequence: Synthetic oligonucleotide
agucucccggcugccaggg

SEQ ID NO: 1490677 - RNA, 19 nt, Artificial Sequence
  Description of Artificial Sequence: Synthetic oligonucleotide
cucgcuccgccccacucgc

SEQ ID NO: 1490678 - RNA, 19 nt, Artificial Sequence
  Description of Artificial Sequence: Synthetic oligonucleotide
gccgaauuucugauagagg

SEQ ID NO: 1490679 - RNA, 19 nt, Artificial Sequence
  Description of Artificial Sequence: Synthetic oligonucleotide
gcucgcugcgguuaucacc

SEQ ID NO: 1490680 - RNA, 19 nt, Artificial Sequence
  Description of Artificial Sequence: Synthetic oligonucleotide
agcuccaaugagucugcaa

SEQ ID NO: 1490681 - RNA, 19 nt, Artificial Sequence
  Description of Artificial Sequence: Synthetic oligonucleotide
cuccaaugagucugcaaaa

SEQ ID NO: 1490682 - RNA, 19 nt, Artificial Sequence
  Description of Artificial Sequence: Synthetic oligonucleotide
gaacuggcgucacuugugu

SEQ ID NO: 1490683 - RNA, 19 nt, Artificial Sequence
  Description of Artificial Sequence: Synthetic oligonucleotide
uugucgugccagugggcac

SEQ ID NO: 1490684 - RNA, 19 nt, Artificial Sequence
  Description of Artificial Sequence: Synthetic oligonucleotide
caccacaagagggccgagg

SEQ ID NO: 1490685 - RNA, 19 nt, Artificial Sequence
  Description of Artificial Sequence: Synthetic oligonucleotide
ucgcuuuauucuggguucu

SEQ ID NO: 1490686 - RNA, 19 nt, Artificial Sequence
  Description of Artificial Sequence: Synthetic oligonucleotide
ugccuacugcacaccggca

SEQ ID NO: 1490687 - RNA, 19 nt, Artificial Sequence
  Description of Artificial Sequence: Synthetic oligonucleotide
cagguagaucuccagccga

SEQ ID NO: 1490688 - RNA, 19 nt, Artificial Sequence
  Description of Artificial Sequence: Synthetic oligonucleotide
cauaguagacagcgaugga

SEQ ID NO: 1490689 - RNA, 19 nt, Artificial Sequence
  Description of Artificial Sequence: Synthetic oligonucleotide
ugaagucucccggcugcca

SEQ ID NO: 1490690 - RNA, 19 nt, Artificial Sequence
  Description of Artificial Sequence: Synthetic oligonucleotide
aucaggcccaguaguagga

SEQ ID NO: 1490691 - RNA, 19 nt, Artificial Sequence
  Description of Artificial Sequence: Synthetic oligonucleotide
augcugccuacugcacacc

SEQ ID NO: 1490692 - RNA, 19 nt, Artificial Sequence
  Description of Artificial Sequence: Synthetic oligonucleotide
ugucaccauaggaccccac

SEQ ID NO: 1490693 - RNA, 19 nt, Artificial Sequence
  Description of Artificial Sequence: Synthetic oligonucleotide
ccagccagauggauauggg

SEQ ID NO: 1490694 - RNA, 19 nt, Artificial Sequence
  Description of Artificial Sequence: Synthetic oligonucleotide
gcuuccgcgcgcuugcccc

SEQ ID NO: 1490695 - RNA, 19 nt, Artificial Sequence
  Description of Artificial Sequence: Synthetic oligonucleotide
gcccaguaguaggagaucc

SEQ ID NO: 1490696 - RNA, 19 nt, Artificial Sequence
  Description of Artificial Sequence: Synthetic oligonucleotide
agaguuugcucagucccuu

SEQ ID NO: 1490697 - RNA, 19 nt, Artificial Sequence
  Description of Artificial Sequence: Synthetic oligonucleotide
acucggcgggcagccagcc

SEQ ID NO: 1490698 - RNA, 19 nt, Artificial Sequence
  Description of Artificial Sequence: Synthetic oligonucleotide
agcucuccgugaaaagcug

SEQ ID NO: 1490699 - RNA, 19 nt, Artificial Sequence
  Description of Artificial Sequence: Synthetic oligonucleotide
cacgguugcuugccccagg

SEQ ID NO: 1490700 - RNA, 19 nt, Artificial Sequence
  Description of Artificial Sequence: Synthetic oligonucleotide
uuaccccagucagcagucc

SEQ ID NO: 1490701 - RNA, 19 nt, Artificial Sequence
  Description of Artificial Sequence: Synthetic oligonucleotide
ggggugauccagcacucac

SEQ ID NO: 1490702 - RNA, 19 nt, Artificial Sequence
  Description of Artificial Sequence: Synthetic oligonucleotide
gcucaggugagggugacuc

SEQ ID NO: 1490703 - RNA, 19 nt, Artificial Sequence
  Description of Artificial Sequence: Synthetic oligonucleotide
cuguuaccccagucagcag

SEQ ID NO: 1490704 - RNA, 19 nt, Artificial Sequence
  Description of Artificial Sequence: Synthetic oligonucleotide
cgcaccuccaggcuuacag

SEQ ID NO: 1490705 - RNA, 19 nt, Artificial Sequence
  Description of Artificial Sequence: Synthetic oligonucleotide
gccgagggugagcacacag

SEQ ID NO: 1490706 - RNA, 19 nt, Artificial Sequence
  Description of Artificial Sequence: Synthetic oligonucleotide
ucaccccucucaggggugc

SEQ ID NO: 1490707 - RNA, 19 nt, Artificial Sequence
  Description of Artificial Sequence: Synthetic oligonucleotide
ggugacuccucucccucac

SEQ ID NO: 1490708 - RNA, 19 nt, Artificial Sequence
  Description of Artificial Sequence: Synthetic oligonucleotide
ggcacaugaaauggaucug

SEQ ID NO: 1490709 - RNA, 19 nt, Artificial Sequence
  Description of Artificial Sequence: Synthetic oligonucleotide
aggcccaguaguaggagau

SEQ ID NO: 1490710 - RNA, 19 nt, Artificial Sequence
  Description of Artificial Sequence: Synthetic oligonucleotide
guaggccacagugauguua

SEQ ID NO: 1490711 - RNA, 19 nt, Artificial Sequence
  Description of Artificial Sequence: Synthetic oligonucleotide
gauagagaguuugcucagu

SEQ ID NO: 1490712 - RNA, 19 nt, Artificial Sequence
  Description of Artificial Sequence: Synthetic oligonucleotide
ugcucgcugcgguuaucac

SEQ ID NO: 1490713 - RNA, 19 nt, Artificial Sequence
  Description of Artificial Sequence: Synthetic oligonucleotide
gcucgcuccgccccacucg

SEQ ID NO: 1490714 - RNA, 19 nt, Artificial Sequence
  Description of Artificial Sequence: Synthetic oligonucleotide
aagagggccgagggcuugu

SEQ ID NO: 1490715 - RNA, 19 nt, Artificial Sequence
  Description of Artificial Sequence: Synthetic oligonucleotide
ggacucggcgggcagccag

SEQ ID NO: 1490716 - RNA, 19 nt, Artificial Sequence
  Description of Artificial Sequence: Synthetic oligonucleotide
ggcacuucucaggaggcac

SEQ ID NO: 1490717 - RNA, 19 nt, Artificial Sequence
  Description of Artificial Sequence: Synthetic oligonucleotide
gugcuggaaaggagaagac

SEQ ID NO: 1490718 - RNA, 19 nt, Artificial Sequence
  Description of Artificial Sequence: Synthetic oligonucleotide
ccuugauauagguauccaa

SEQ ID NO: 1490719 - RNA, 19 nt, Artificial Sequence
  Description of Artificial Sequence: Synthetic oligonucleotide
ucgcggagcuuccgcgcgc

SEQ ID NO: 1490720 - RNA, 19 nt, Artificial Sequence
  Description of Artificial Sequence: Synthetic oligonucleotide
ggcucagucgcggagcuuc

SEQ ID NO: 1490721 - RNA, 19 nt, Artificial Sequence
  Description of Artificial Sequence: Synthetic oligonucleotide
cuguuacuccugguccaag

SEQ ID NO: 1490722 - RNA, 19 nt, Artificial Sequence
  Description of Artificial Sequence: Synthetic oligonucleotide
ccgagggugagcacacagc

SEQ ID NO: 1490723 - RNA, 19 nt, Artificial Sequence
  Description of Artificial Sequence: Synthetic oligonucleotide
agaaagugugguggcugaa

SEQ ID NO: 1490724 - RNA, 19 nt, Artificial Sequence
  Description of Artificial Sequence: Synthetic oligonucleotide
acgcaccacaagagggccg

SEQ ID NO: 1490725 - RNA, 19 nt, Artificial Sequence
  Description of Artificial Sequence: Synthetic oligonucleotide
agacagcgauggaacgaag

SEQ ID NO: 1490726 - RNA, 19 nt, Artificial Sequence
  Description of Artificial Sequence: Synthetic oligonucleotide
ccucacucaggaugcugcc

SEQ ID NO: 1490727 - RNA, 19 nt, Artificial Sequence
  Description of Artificial Sequence: Synthetic oligonucleotide
cagaacuggcgucacuugu

SEQ ID NO: 1490728 - RNA, 19 nt, Artificial Sequence
  Description of Artificial Sequence: Synthetic oligonucleotide
gcgcgcuugccccucacgc

SEQ ID NO: 1490729 - RNA, 19 nt, Artificial Sequence
  Description of Artificial Sequence: Synthetic oligonucleotide
ggagaacucaggcuccugu

SEQ ID NO: 1490730 - RNA, 19 nt, Artificial Sequence
  Description of Artificial Sequence: Synthetic oligonucleotide
gcugccuacugcacaccgg

SEQ ID NO: 1490731 - RNA, 19 nt, Artificial Sequence
  Description of Artificial Sequence: Synthetic oligonucleotide
guccaagguccaagcuggg

SEQ ID NO: 1490732 - RNA, 19 nt, Artificial Sequence
  Description of Artificial Sequence: Synthetic oligonucleotide
ggcucaguugagguucccc

SEQ ID NO: 1490733 - RNA, 19 nt, Artificial Sequence
  Description of Artificial Sequence: Synthetic oligonucleotide
gugcucgcugcgguuauca

SEQ ID NO: 1490734 - RNA, 19 nt, Artificial Sequence
  Description of Artificial Sequence: Synthetic oligonucleotide
cacagugauguuacggauu

SEQ ID NO: 1490735 - RNA, 19 nt, Artificial Sequence
  Description of Artificial Sequence: Synthetic oligonucleotide
gaacgaagcuugggagaga

SEQ ID NO: 1490736 - RNA, 19 nt, Artificial Sequence
  Description of Artificial Sequence: Synthetic oligonucleotide
gcaugguucugggacuccc

SEQ ID NO: 1490737 - RNA, 19 nt, Artificial Sequence
  Description of Artificial Sequence: Synthetic oligonucleotide
caagagggccgagggcuug

SEQ ID NO: 1490738 - RNA, 19 nt, Artificial Sequence
  Description of Artificial Sequence: Synthetic oligonucleotide
cauccaucugggcaucacu

SEQ ID NO: 1490739 - RNA, 19 nt, Artificial Sequence
  Description of Artificial Sequence: Synthetic oligonucleotide
guuuaggcuugggguagga

SEQ ID NO: 1490740 - RNA, 19 nt, Artificial Sequence
  Description of Artificial Sequence: Synthetic oligonucleotide
cacccgauucacuguagcu

SEQ ID NO: 1490741 - RNA, 19 nt, Artificial Sequence
  Description of Artificial Sequence: Synthetic oligonucleotide
ccggcacuucucaggaggc

SEQ ID NO: 1490742 - RNA, 19 nt, Artificial Sequence
  Description of Artificial Sequence: Synthetic oligonucleotide
caccggcacuucucaggag

SEQ ID NO: 1490743 - RNA, 19 nt, Artificial Sequence
  Description of Artificial Sequence: Synthetic oligonucleotide
uggcgucacuugugucagc

SEQ ID NO: 1490744 - RNA, 19 nt, Artificial Sequence
  Description of Artificial Sequence: Synthetic oligonucleotide
gaccccacauggaacuugu

SEQ ID NO: 1490745 - RNA, 19 nt, Artificial Sequence
  Description of Artificial Sequence: Synthetic oligonucleotide
ccuuagcaaacgcaccaca

SEQ ID NO: 1490746 - RNA, 19 nt, Artificial Sequence
  Description of Artificial Sequence: Synthetic oligonucleotide
ggugcugagcucccgggua

SEQ ID NO: 1490747 - RNA, 19 nt, Artificial Sequence
  Description of Artificial Sequence: Synthetic oligonucleotide
ggaccccacauggaacuug

SEQ ID NO: 1490748 - RNA, 19 nt, Artificial Sequence
  Description of Artificial Sequence: Synthetic oligonucleotide
aucuggucuugcagguaga

SEQ ID NO: 1490749 - RNA, 19 nt, Artificial Sequence
  Description of Artificial Sequence: Synthetic oligonucleotide
gcuccaggacucccggcgc

SEQ ID NO: 1490750 - RNA, 19 nt, Artificial Sequence
  Description of Artificial Sequence: Synthetic oligonucleotide
cccucucagcaccccaagg

SEQ ID NO: 1490751 - RNA, 19 nt, Artificial Sequence
  Description of Artificial Sequence: Synthetic oligonucleotide
gaucuccagccgaggguga

SEQ ID NO: 1490752 - RNA, 19 nt, Artificial Sequence
  Description of Artificial Sequence: Synthetic oligonucleotide
cgcuccuugauauagguau

SEQ ID NO: 1490753 - RNA, 19 nt, Artificial Sequence
  Description of Artificial Sequence: Synthetic oligonucleotide
uccagccgagggugagcac

SEQ ID NO: 1490754 - RNA, 19 nt, Artificial Sequence
  Description of Artificial Sequence: Synthetic oligonucleotide
cuuuggcccuaagagccaa

SEQ ID NO: 1490755 - RNA, 19 nt, Artificial Sequence
  Description of Artificial Sequence: Synthetic oligonucleotide
gcgauggaacgaagcuugg

SEQ ID NO: 1490756 - RNA, 19 nt, Artificial Sequence
  Description of Artificial Sequence: Synthetic oligonucleotide
cuggaaaggagaagaccuu

SEQ ID NO: 1490757 - RNA, 19 nt, Artificial Sequence
  Description of Artificial Sequence: Synthetic oligonucleotide
gcaacccaagagguuggug

SEQ ID NO: 1490758 - RNA, 19 nt, Artificial Sequence
  Description of Artificial Sequence: Synthetic oligonucleotide
caggacucccggcgcucag

SEQ ID NO: 1490759 - RNA, 19 nt, Artificial Sequence
  Description of Artificial Sequence: Synthetic oligonucleotide
cugggcaucacuggccucu

SEQ ID NO: 1490760 - RNA, 19 nt, Artificial Sequence
  Description of Artificial Sequence: Synthetic oligonucleotide
ucgcuccgccccacucgcc

SEQ ID NO: 1490761 - RNA, 19 nt, Artificial Sequence
  Description of Artificial Sequence: Synthetic oligonucleotide
ccaaucaggcccaguagua

SEQ ID NO: 1490762 - RNA, 19 nt, Artificial Sequence
  Description of Artificial Sequence: Synthetic oligonucleotide
cgauggaacgaagcuuggg

SEQ ID NO: 1490763 - RNA, 19 nt, Artificial Sequence
  Description of Artificial Sequence: Synthetic oligonucleotide
caagagguuggugcagaua

SEQ ID NO: 1490764 - RNA, 19 nt, Artificial Sequence
  Description of Artificial Sequence: Synthetic oligonucleotide
gucacuugugucagcuccu

SEQ ID NO: 1490765 - RNA, 19 nt, Artificial Sequence
  Description of Artificial Sequence: Synthetic oligonucleotide
ugugcucgcugcgguuauc

SEQ ID NO: 1490766 - RNA, 19 nt, Artificial Sequence
  Description of Artificial Sequence: Synthetic oligonucleotide
gccacgguugcuugcccca

SEQ ID NO: 1490767 - RNA, 19 nt, Artificial Sequence
  Description of Artificial Sequence: Synthetic oligonucleotide
cccgauucacuguagcugu

SEQ ID NO: 1490768 - RNA, 19 nt, Artificial Sequence
  Description of Artificial Sequence: Synthetic oligonucleotide
gcaacucauagcauccagu

SEQ ID NO: 1490769 - RNA, 19 nt, Artificial Sequence
  Description of Artificial Sequence: Synthetic oligonucleotide
gggugagcacacagcuucc

SEQ ID NO: 1490770 - RNA, 19 nt, Artificial Sequence
  Description of Artificial Sequence: Synthetic oligonucleotide
agagggccgagggcuugug

SEQ ID NO: 1490771 - RNA, 19 nt, Artificial Sequence
  Description of Artificial Sequence: Synthetic oligonucleotide
uccgcgcgcuugccccuca

SEQ ID NO: 1490772 - RNA, 19 nt, Artificial Sequence
  Description of Artificial Sequence: Synthetic oligonucleotide
gcggacgcggaccggcgcc

SEQ ID NO: 1490773 - RNA, 19 nt, Artificial Sequence
  Description of Artificial Sequence: Synthetic oligonucleotide
ggcacccgauucacuguag

SEQ ID NO: 1490774 - RNA, 19 nt, Artificial Sequence
  Description of Artificial Sequence: Synthetic oligonucleotide
gugucaccauaggacccca

SEQ ID NO: 1490775 - RNA, 19 nt, Artificial Sequence
  Description of Artificial Sequence: Synthetic oligonucleotide
ggcacguagaaaucuccuu

SEQ ID NO: 1490776 - RNA, 19 nt, Artificial Sequence
  Description of Artificial Sequence: Synthetic oligonucleotide
gugccagugggcacaugaa

SEQ ID NO: 1490777 - RNA, 19 nt, Artificial Sequence
  Description of Artificial Sequence: Synthetic oligonucleotide
cuggcacccgauucacugu

SEQ ID NO: 1490778 - RNA, 19 nt, Artificial Sequence
  Description of Artificial Sequence: Synthetic oligonucleotide
cccuuagcaaacgcaccac

SEQ ID NO: 1490779 - RNA, 19 nt, Artificial Sequence
  Description of Artificial Sequence: Synthetic oligonucleotide
gaagaccuugaagccgaau

SEQ ID NO: 1490780 - RNA, 19 nt, Artificial Sequence
  Description of Artificial Sequence: Synthetic oligonucleotide
ggcgucacuugugucagcu

SEQ ID NO: 1490781 - RNA, 19 nt, Artificial Sequence
  Description of Artificial Sequence: Synthetic oligonucleotide
ccgauucacuguagcugug

SEQ ID NO: 1490782 - RNA, 19 nt, Artificial Sequence
  Description of Artificial Sequence: Synthetic oligonucleotide
cccaaucaggcccaguagu

SEQ ID NO: 1490783 - RNA, 19 nt, Artificial Sequence
  Description of Artificial Sequence: Synthetic oligonucleotide
cccagccacgguugcuugc

SEQ ID NO: 1490784 - RNA, 19 nt, Artificial Sequence
  Description of Artificial Sequence: Synthetic oligonucleotide
ccucaaaagaugagccacu

SEQ ID NO: 1490785 - RNA, 19 nt, Artificial Sequence
  Description of Artificial Sequence: Synthetic oligonucleotide
ccagccgagggugagcaca

SEQ ID NO: 1490786 - RNA, 19 nt, Artificial Sequence
  Description of Artificial Sequence: Synthetic oligonucleotide
gccagugggcacaugaaau

SEQ ID NO: 1490787 - RNA, 19 nt, Artificial Sequence
  Description of Artificial Sequence: Synthetic oligonucleotide
agaagaccuugaagccgaa

SEQ ID NO: 1490788 - RNA, 19 nt, Artificial Sequence
  Description of Artificial Sequence: Synthetic oligonucleotide
guuggcaacccaagagguu

SEQ ID NO: 1490789 - RNA, 19 nt, Artificial Sequence
  Description of Artificial Sequence: Synthetic oligonucleotide
gcgccggaggaggcgaggg

SEQ ID NO: 1490790 - RNA, 19 nt, Artificial Sequence
  Description of Artificial Sequence: Synthetic oligonucleotide
gcuugggguaggagaacuc

SEQ ID NO: 1490791 - RNA, 19 nt, Artificial Sequence
  Description of Artificial Sequence: Synthetic oligonucleotide
gccgagggcuugugguuac

SEQ ID NO: 1490792 - RNA, 19 nt, Artificial Sequence
  Description of Artificial Sequence: Synthetic oligonucleotide
gacgcggaccggcgccgga

SEQ ID NO: 1490793 - RNA, 19 nt, Artificial Sequence
  Description of Artificial Sequence: Synthetic oligonucleotide
cucacucaggaugcugccu

SEQ ID NO: 1490794 - RNA, 19 nt, Artificial Sequence
  Description of Artificial Sequence: Synthetic oligonucleotide
aggaccccacauggaacuu

SEQ ID NO: 1490795 - RNA, 19 nt, Artificial Sequence
  Description of Artificial Sequence: Synthetic oligonucleotide
gaccggcgccggaggaggc

SEQ ID NO: 1490796 - RNA, 19 nt, Artificial Sequence
  Description of Artificial Sequence: Synthetic oligonucleotide
ccgggauuuccgcucuguc

SEQ ID NO: 1490797 - RNA, 19 nt, Artificial Sequence
  Description of Artificial Sequence: Synthetic oligonucleotide
ccauccaucugggcaucac

SEQ ID NO: 1490798 - RNA, 19 nt, Artificial Sequence
  Description of Artificial Sequence: Synthetic oligonucleotide
cugccagggcgcaccucca

SEQ ID NO: 1490799 - RNA, 19 nt, Artificial Sequence
  Description of Artificial Sequence: Synthetic oligonucleotide
gggugauccagcacucacu

SEQ ID NO: 1490800 - RNA, 19 nt, Artificial Sequence
  Description of Artificial Sequence: Synthetic oligonucleotide
cccggcgcucagcagcggc

SEQ ID NO: 1490801 - RNA, 19 nt, Artificial Sequence
  Description of Artificial Sequence: Synthetic oligonucleotide
cucuggcuccuuuggcccu

SEQ ID NO: 1490802 - RNA, 19 nt, Artificial Sequence
  Description of Artificial Sequence: Synthetic oligonucleotide
ucgcugcgguuaucaccau

SEQ ID NO: 1490803 - RNA, 19 nt, Artificial Sequence
  Description of Artificial Sequence: Synthetic oligonucleotide
gcgucacuugugucagcuc

SEQ ID NO: 1490804 - RNA, 19 nt, Artificial Sequence
  Description of Artificial Sequence: Synthetic oligonucleotide
cagcgauggaacgaagcuu

SEQ ID NO: 1490805 - RNA, 19 nt, Artificial Sequence
  Description of Artificial Sequence: Synthetic oligonucleotide
caccucuggcacguagaaa

SEQ ID NO: 1490806 - RNA, 19 nt, Artificial Sequence
  Description of Artificial Sequence: Synthetic oligonucleotide
acgcucgcuccgccccacu

SEQ ID NO: 1490807 - RNA, 19 nt, Artificial Sequence
  Description of Artificial Sequence: Synthetic oligonucleotide
ggcgccggaggaggcgagg

SEQ ID NO: 1490808 - RNA, 19 nt, Artificial Sequence
  Description of Artificial Sequence: Synthetic oligonucleotide
gcugugcucgcugcgguua

SEQ ID NO: 1490809 - RNA, 19 nt, Artificial Sequence
  Description of Artificial Sequence: Synthetic oligonucleotide
uuccgcgcgcuugccccuc

SEQ ID NO: 1490810 - RNA, 19 nt, Artificial Sequence
  Description of Artificial Sequence: Synthetic oligonucleotide
cacgcucgcuccgccccac

SEQ ID NO: 1490811 - RNA, 19 nt, Artificial Sequence
  Description of Artificial Sequence: Synthetic oligonucleotide
gcgggcagccagccagaug

SEQ ID NO: 1490812 - RNA, 19 nt, Artificial Sequence
  Description of Artificial Sequence: Synthetic oligonucleotide
gcuuccgcuccuugauaua

SEQ ID NO: 1490813 - RNA, 19 nt, Artificial Sequence
  Description of Artificial Sequence: Synthetic oligonucleotide
agccgagggugagcacaca

SEQ ID NO: 1490814 - RNA, 19 nt, Artificial Sequence
  Description of Artificial Sequence: Synthetic oligonucleotide
ucgugccagugggcacaug

SEQ ID NO: 1490815 - RNA, 19 nt, Artificial Sequence
  Description of Artificial Sequence: Synthetic oligonucleotide
cccgcggacgcggaccggc

SEQ ID NO: 1490816 - RNA, 19 nt, Artificial Sequence
  Description of Artificial Sequence: Synthetic oligonucleotide
ggaucuggucuugcaggua

SEQ ID NO: 1490817 - RNA, 19 nt, Artificial Sequence
  Description of Artificial Sequence: Synthetic oligonucleotide
cucggcgggcagccagcca

SEQ ID NO: 1490818 - RNA, 19 nt, Artificial Sequence
  Description of Artificial Sequence: Synthetic oligonucleotide
ccgcggacgcggaccggcg

SEQ ID NO: 1490819 - RNA, 19 nt, Artificial Sequence
  Description of Artificial Sequence: Synthetic oligonucleotide
cuuccgcgcgcuugccccu

SEQ ID NO: 1490820 - RNA, 19 nt, Artificial Sequence
  Description of Artificial Sequence: Synthetic oligonucleotide
gcucuccgugaaaagcugu

SEQ ID NO: 1490821 - RNA, 19 nt, Artificial Sequence
  Description of Artificial Sequence: Synthetic oligonucleotide
ccgugaaaagcuguccagu

SEQ ID NO: 1490822 - RNA, 19 nt, Artificial Sequence
  Description of Artificial Sequence: Synthetic oligonucleotide
cugcgguuaucaccaucau

SEQ ID NO: 1490823 - RNA, 19 nt, Artificial Sequence
  Description of Artificial Sequence: Synthetic oligonucleotide
cuacugcacaccggcacuu

SEQ ID NO: 1490824 - RNA, 19 nt, Artificial Sequence
  Description of Artificial Sequence: Synthetic oligonucleotide
ccuguuacuccugguccaa

SEQ ID NO: 1490825 - RNA, 19 nt, Artificial Sequence
  Description of Artificial Sequence: Synthetic oligonucleotide
ccucaccccucucaggggu

SEQ ID NO: 1490826 - RNA, 19 nt, Artificial Sequence
  Description of Artificial Sequence: Synthetic oligonucleotide
ggccgagggcuugugguua

SEQ ID NO: 1490827 - RNA, 19 nt, Artificial Sequence
  Description of Artificial Sequence: Synthetic oligonucleotide
ccccagucagcaguccuga

SEQ ID NO: 1490828 - RNA, 19 nt, Artificial Sequence
  Description of Artificial Sequence: Synthetic oligonucleotide
cgcgcgcuugccccucacg

SEQ ID NO: 1490829 - RNA, 19 nt, Artificial Sequence
  Description of Artificial Sequence: Synthetic oligonucleotide
gcaccacaagagggccgag

SEQ ID NO: 1490830 - RNA, 19 nt, Artificial Sequence
  Description of Artificial Sequence: Synthetic oligonucleotide
cgcaccacaagagggccga

SEQ ID NO: 1490831 - RNA, 19 nt, Artificial Sequence
  Description of Artificial Sequence: Synthetic oligonucleotide
cgcggaccggcgccggagg

SEQ ID NO: 1490832 - RNA, 19 nt, Artificial Sequence
  Description of Artificial Sequence: Synthetic oligonucleotide
accccacauggaacuugua

SEQ ID NO: 1490833 - RNA, 19 nt, Artificial Sequence
  Description of Artificial Sequence: Synthetic oligonucleotide
gcggaccggcgccggagga

SEQ ID NO: 1490834 - RNA, 19 nt, Artificial Sequence
  Description of Artificial Sequence: Synthetic oligonucleotide
gggcgcaccuccaggcuua

SEQ ID NO: 1490835 - RNA, 19 nt, Artificial Sequence
  Description of Artificial Sequence: Synthetic oligonucleotide
gccauccaucugggcauca

SEQ ID NO: 1490836 - RNA, 19 nt, Artificial Sequence
  Description of Artificial Sequence: Synthetic oligonucleotide
ggcaacccaagagguuggu

SEQ ID NO: 1490837 - RNA, 19 nt, Artificial Sequence
  Description of Artificial Sequence: Synthetic oligonucleotide
ggcgcaccuccaggcuuac

SEQ ID NO: 1490838 - RNA, 19 nt, Artificial Sequence
  Description of Artificial Sequence: Synthetic oligonucleotide
ggcagccagccagauggau

SEQ ID NO: 1490839 - RNA, 19 nt, Artificial Sequence
  Description of Artificial Sequence: Synthetic oligonucleotide
cgcucgcuccgccccacuc

SEQ ID NO: 1490840 - RNA, 19 nt, Artificial Sequence
  Description of Artificial Sequence: Synthetic oligonucleotide
cuugccccucacgcucgcu

SEQ ID NO: 1490841 - RNA, 19 nt, Artificial Sequence
  Description of Artificial Sequence: Synthetic oligonucleotide
ccccgggauuuccgcucug

SEQ ID NO: 1490842 - RNA, 19 nt, Artificial Sequence
  Description of Artificial Sequence: Synthetic oligonucleotide
cgcgcuugccccucacgcu

SEQ ID NO: 1490843 - RNA, 19 nt, Artificial Sequence
  Description of Artificial Sequence: Synthetic oligonucleotide
cccgggauuuccgcucugu

SEQ ID NO: 1490844 - RNA, 19 nt, Artificial Sequence
  Description of Artificial Sequence: Synthetic oligonucleotide
gcgcaccuccaggcuuaca

SEQ ID NO: 1490845 - RNA, 19 nt, Artificial Sequence
  Description of Artificial Sequence: Synthetic oligonucleotide
ccccgcggacgcggaccgg

SEQ ID NO: 1490846 - RNA, 19 nt, Artificial Sequence
  Description of Artificial Sequence: Synthetic oligonucleotide
ggcgggcagccagccagau

SEQ ID NO: 1490847 - RNA, 19 nt, Artificial Sequence
  Description of Artificial Sequence: Synthetic oligonucleotide
gggcucagucgcggagcuu

SEQ ID NO: 1490848 - RNA, 19 nt, Artificial Sequence
  Description of Artificial Sequence: Synthetic oligonucleotide
uuuguguuaaauguuaugg

SEQ ID NO: 1490849 - RNA, 19 nt, Artificial Sequence
  Description of Artificial Sequence: Synthetic oligonucleotide
ugguauauauuuaauacag

SEQ ID NO: 1490850 - RNA, 19 nt, Artificial Sequence
  Description of Artificial Sequence: Synthetic oligonucleotide
uuuuacagccccaagaaag

SEQ ID NO: 1490851 - RNA, 19 nt, Artificial Sequence
  Description of Artificial Sequence: Synthetic oligonucleotide
uuugguauauauuuaauac

SEQ ID NO: 1490852 - RNA, 19 nt, Artificial Sequence
  Description of Artificial Sequence: Synthetic oligonucleotide
auuaauaggaagcggcacc

SEQ ID NO: 1490853 - RNA, 19 nt, Artificial Sequence
  Description of Artificial Sequence: Synthetic oligonucleotide
uaugggaucauuacuaacc

SEQ ID NO: 1490854 - RNA, 19 nt, Artificial Sequence
  Description of Artificial Sequence: Synthetic oligonucleotide
guaaaugaaagauaaguug

SEQ ID NO: 1490855 - RNA, 19 nt, Artificial Sequence
  Description of Artificial Sequence: Synthetic oligonucleotide
uaauuaucaaauuaugccu

SEQ ID NO: 1490856 - RNA, 19 nt, Artificial Sequence
  Description of Artificial Sequence: Synthetic oligonucleotide
uauuaauuaucaaauuaug

SEQ ID NO: 1490857 - RNA, 19 nt, Artificial Sequence
  Description of Artificial Sequence: Synthetic oligonucleotide
augucagaaaagcucaugc

SEQ ID NO: 1490858 - RNA, 19 nt, Artificial Sequence
  Description of Artificial Sequence: Synthetic oligonucleotide
cuugguuuuaucaaccagg

SEQ ID NO: 1490859 - RNA, 19 nt, Artificial Sequence
  Description of Artificial Sequence: Synthetic oligonucleotide
caugucauuaauaggaagc

SEQ ID NO: 1490860 - RNA, 19 nt, Artificial Sequence
  Description of Artificial Sequence: Synthetic oligonucleotide
uaagcaguuaucucgauga

SEQ ID NO: 1490861 - RNA, 19 nt, Artificial Sequence
  Description of Artificial Sequence: Synthetic oligonucleotide
ugcaucaacggcauguugg

SEQ ID NO: 1490862 - RNA, 19 nt, Artificial Sequence
  Description of Artificial Sequence: Synthetic oligonucleotide
aucaacggcauguuggugc

SEQ ID NO: 1490863 - RNA, 19 nt, Artificial Sequence
  Description of Artificial Sequence: Synthetic oligonucleotide
auaaaugcuguguugauga

SEQ ID NO: 1490864 - RNA, 19 nt, Artificial Sequence
  Description of Artificial Sequence: Synthetic oligonucleotide
aaccaugacauaaacgccc

SEQ ID NO: 1490865 - RNA, 19 nt, Artificial Sequence
  Description of Artificial Sequence: Synthetic oligonucleotide
uugguuuuaucaaccaggg

SEQ ID NO: 1490866 - RNA, 19 nt, Artificial Sequence
  Description of Artificial Sequence: Synthetic oligonucleotide
uguguuaaauguuauggga

SEQ ID NO: 1490867 - RNA, 19 nt, Artificial Sequence
  Description of Artificial Sequence: Synthetic oligonucleotide
gaaaaugcaacaucggcac

SEQ ID NO: 1490868 - RNA, 19 nt, Artificial Sequence
  Description of Artificial Sequence: Synthetic oligonucleotide
auuacuaaccucaccaggc

SEQ ID NO: 1490869 - RNA, 19 nt, Artificial Sequence
  Description of Artificial Sequence: Synthetic oligonucleotide
uguaguauuugguauauau

SEQ ID NO: 1490870 - RNA, 19 nt, Artificial Sequence
  Description of Artificial Sequence: Synthetic oligonucleotide
ucaaauuaugccuugcagu

SEQ ID NO: 1490871 - RNA, 19 nt, Artificial Sequence
  Description of Artificial Sequence: Synthetic oligonucleotide
cuucaugucauuaauagga

SEQ ID NO: 1490872 - RNA, 19 nt, Artificial Sequence
  Description of Artificial Sequence: Synthetic oligonucleotide
auaccauuuaccuguaguc

SEQ ID NO: 1490873 - RNA, 19 nt, Artificial Sequence
  Description of Artificial Sequence: Synthetic oligonucleotide
ucauugaugucuuauaaau

SEQ ID NO: 1490874 - RNA, 19 nt, Artificial Sequence
  Description of Artificial Sequence: Synthetic oligonucleotide
aaugaaagauaaguuguag

SEQ ID NO: 1490875 - RNA, 19 nt, Artificial Sequence
  Description of Artificial Sequence: Synthetic oligonucleotide
guaagguggaaauucaccc

SEQ ID NO: 1490876 - RNA, 19 nt, Artificial Sequence
  Description of Artificial Sequence: Synthetic oligonucleotide
gauguuuauagcguugagg

SEQ ID NO: 1490877 - RNA, 19 nt, Artificial Sequence
  Description of Artificial Sequence: Synthetic oligonucleotide
uuuaccuguagucugcugu

SEQ ID NO: 1490878 - RNA, 19 nt, Artificial Sequence
  Description of Artificial Sequence: Synthetic oligonucleotide
aaaugagacauaaaugcug

SEQ ID NO: 1490879 - RNA, 19 nt, Artificial Sequence
  Description of Artificial Sequence: Synthetic oligonucleotide
acagucaacaugcauaacu

SEQ ID NO: 1490880 - RNA, 19 nt, Artificial Sequence
  Description of Artificial Sequence: Synthetic oligonucleotide
aaacucauggcuucaguca

SEQ ID NO: 1490881 - RNA, 19 nt, Artificial Sequence
  Description of Artificial Sequence: Synthetic oligonucleotide
ccaaccaugacauaaacgc

SEQ ID NO: 1490882 - RNA, 19 nt, Artificial Sequence
  Description of Artificial Sequence: Synthetic oligonucleotide
uguuaugggaucauuacua

SEQ ID NO: 1490883 - RNA, 19 nt, Artificial Sequence
  Description of Artificial Sequence: Synthetic oligonucleotide
cuugcagucucaaagguac

SEQ ID NO: 1490884 - RNA, 19 nt, Artificial Sequence
  Description of Artificial Sequence: Synthetic oligonucleotide
ucaacuucucguaaacaag

SEQ ID NO: 1490885 - RNA, 19 nt, Artificial Sequence
  Description of Artificial Sequence: Synthetic oligonucleotide
acaaguuggauaucugggg

SEQ ID NO: 1490886 - RNA, 19 nt, Artificial Sequence
  Description of Artificial Sequence: Synthetic oligonucleotide
uuaucacauguaaucacag

SEQ ID NO: 1490887 - RNA, 19 nt, Artificial Sequence
  Description of Artificial Sequence: Synthetic oligonucleotide
ugugucugcaucaacggca

SEQ ID NO: 1490888 - RNA, 19 nt, Artificial Sequence
  Description of Artificial Sequence: Synthetic oligonucleotide
aauacagucaacaugcaua

SEQ ID NO: 1490889 - RNA, 19 nt, Artificial Sequence
  Description of Artificial Sequence: Synthetic oligonucleotide
uugaugauuauaaacucau

SEQ ID NO: 1490890 - RNA, 19 nt, Artificial Sequence
  Description of Artificial Sequence: Synthetic oligonucleotide
aacucauggcuucagucag

SEQ ID NO: 1490891 - RNA, 19 nt, Artificial Sequence
  Description of Artificial Sequence: Synthetic oligonucleotide
uuguaacaaauauaaaguc

SEQ ID NO: 1490892 - RNA, 19 nt, Artificial Sequence
  Description of Artificial Sequence: Synthetic oligonucleotide
aucaaauuaugccuugcag

SEQ ID NO: 1490893 - RNA, 19 nt, Artificial Sequence
  Description of Artificial Sequence: Synthetic oligonucleotide
aaaagcucaugcauuauug

SEQ ID NO: 1490894 - RNA, 19 nt, Artificial Sequence
  Description of Artificial Sequence: Synthetic oligonucleotide
uuuuggacaugucucgaag

SEQ ID NO: 1490895 - RNA, 19 nt, Artificial Sequence
  Description of Artificial Sequence: Synthetic oligonucleotide
ucaacaugcauaacugaug

SEQ ID NO: 1490896 - RNA, 19 nt, Artificial Sequence
  Description of Artificial Sequence: Synthetic oligonucleotide
caggauuaggaaaagcacc

SEQ ID NO: 1490897 - RNA, 19 nt, Artificial Sequence
  Description of Artificial Sequence: Synthetic oligonucleotide
uuaguaaaugaaagauaag

SEQ ID NO: 1490898 - RNA, 19 nt, Artificial Sequence
  Description of Artificial Sequence: Synthetic oligonucleotide
cuuugaauguaucgaagcc

SEQ ID NO: 1490899 - RNA, 19 nt, Artificial Sequence
  Description of Artificial Sequence: Synthetic oligonucleotide
ucagggauaccauuuaccu

SEQ ID NO: 1490900 - RNA, 19 nt, Artificial Sequence
  Description of Artificial Sequence: Synthetic oligonucleotide
gaggaaauccguguaauag

SEQ ID NO: 1490901 - RNA, 19 nt, Artificial Sequence
  Description of Artificial Sequence: Synthetic oligonucleotide
auacauuaguaaaugaaag

SEQ ID NO: 1490902 - RNA, 19 nt, Artificial Sequence
  Description of Artificial Sequence: Synthetic oligonucleotide
guuuauagcguugaggcgc

SEQ ID NO: 1490903 - RNA, 19 nt, Artificial Sequence
  Description of Artificial Sequence: Synthetic oligonucleotide
aaugagacauaaaugcugu

SEQ ID NO: 1490904 - RNA, 19 nt, Artificial Sequence
  Description of Artificial Sequence: Synthetic oligonucleotide
ucauuaauaggaagcggca

SEQ ID NO: 1490905 - RNA, 19 nt, Artificial Sequence
  Description of Artificial Sequence: Synthetic oligonucleotide
aaccucaccaggcuuuggg

SEQ ID NO: 1490906 - RNA, 19 nt, Artificial Sequence
  Description of Artificial Sequence: Synthetic oligonucleotide
gguuuuaucaaccagggaa

SEQ ID NO: 1490907 - RNA, 19 nt, Artificial Sequence
  Description of Artificial Sequence: Synthetic oligonucleotide
agguacgucuauuguaagc

SEQ ID NO: 1490908 - RNA, 19 nt, Artificial Sequence
  Description of Artificial Sequence: Synthetic oligonucleotide
ucuauuguaagcaguuauc

SEQ ID NO: 1490909 - RNA, 19 nt, Artificial Sequence
  Description of Artificial Sequence: Synthetic oligonucleotide
uaucaaauuaugccuugca

SEQ ID NO: 1490910 - RNA, 19 nt, Artificial Sequence
  Description of Artificial Sequence: Synthetic oligonucleotide
acauuaguaaaugaaagau

SEQ ID NO: 1490911 - RNA, 19 nt, Artificial Sequence
  Description of Artificial Sequence: Synthetic oligonucleotide
uguuaaauguuaugggauc

SEQ ID NO: 1490912 - RNA, 19 nt, Artificial Sequence
  Description of Artificial Sequence: Synthetic oligonucleotide
aauguaucgaagccaucca

SEQ ID NO: 1490913 - RNA, 19 nt, Artificial Sequence
  Description of Artificial Sequence: Synthetic oligonucleotide
augccuugcagucucaaag

SEQ ID NO: 1490914 - RNA, 19 nt, Artificial Sequence
  Description of Artificial Sequence: Synthetic oligonucleotide
uuaucaaccagggaaauuu

SEQ ID NO: 1490915 - RNA, 19 nt, Artificial Sequence
  Description of Artificial Sequence: Synthetic oligonucleotide
aagcucaugcauuauugga

SEQ ID NO: 1490916 - RNA, 19 nt, Artificial Sequence
  Description of Artificial Sequence: Synthetic oligonucleotide
cauuacuaaccucaccagg

SEQ ID NO: 1490917 - RNA, 19 nt, Artificial Sequence
  Description of Artificial Sequence: Synthetic oligonucleotide
gucauuaauaggaagcggc

SEQ ID NO: 1490918 - RNA, 19 nt, Artificial Sequence
  Description of Artificial Sequence: Synthetic oligonucleotide
uaugguguccuuugaaugu

SEQ ID NO: 1490919 - RNA, 19 nt, Artificial Sequence
  Description of Artificial Sequence: Synthetic oligonucleotide
aaacacggggaguguagac

SEQ ID NO: 1490920 - RNA, 19 nt, Artificial Sequence
  Description of Artificial Sequence: Synthetic oligonucleotide
ugcuugauauggcaacggg

SEQ ID NO: 1490921 - RNA, 19 nt, Artificial Sequence
  Description of Artificial Sequence: Synthetic oligonucleotide
aaccucacuggccaauauc

SEQ ID NO: 1490922 - RNA, 19 nt, Artificial Sequence
  Description of Artificial Sequence: Synthetic oligonucleotide
uuuuaggcuucauuaauau

SEQ ID NO: 1490923 - RNA, 19 nt, Artificial Sequence
  Description of Artificial Sequence: Synthetic oligonucleotide
uaugauuuccccagucaca

SEQ ID NO: 1490924 - RNA, 19 nt, Artificial Sequence
  Description of Artificial Sequence: Synthetic oligonucleotide
uccuuugaauguaucgaag

SEQ ID NO: 1490925 - RNA, 19 nt, Artificial Sequence
  Description of Artificial Sequence: Synthetic oligonucleotide
uuuacagccccaagaaagu

SEQ ID NO: 1490926 - RNA, 19 nt, Artificial Sequence
  Description of Artificial Sequence: Synthetic oligonucleotide
cacagggugaaacacgggg

SEQ ID NO: 1490927 - RNA, 19 nt, Artificial Sequence
  Description of Artificial Sequence: Synthetic oligonucleotide
aaaugcaacaucggcacca

SEQ ID NO: 1490928 - RNA, 19 nt, Artificial Sequence
  Description of Artificial Sequence: Synthetic oligonucleotide
aaugcuguguugaugauua

SEQ ID NO: 1490929 - RNA, 19 nt, Artificial Sequence
  Description of Artificial Sequence: Synthetic oligonucleotide
uuuggacaugucucgaagc

SEQ ID NO: 1490930 - RNA, 19 nt, Artificial Sequence
  Description of Artificial Sequence: Synthetic oligonucleotide
uuaauaggaagcggcaccc

SEQ ID NO: 1490931 - RNA, 19 nt, Artificial Sequence
  Description of Artificial Sequence: Synthetic oligonucleotide
uagguggaaacuugcuugg

SEQ ID NO: 1490932 - RNA, 19 nt, Artificial Sequence
  Description of Artificial Sequence: Synthetic oligonucleotide
aaagguacgucuauuguaa

SEQ ID NO: 1490933 - RNA, 19 nt, Artificial Sequence
  Description of Artificial Sequence: Synthetic oligonucleotide
cauuauuggaggagagagg

SEQ ID NO: 1490934 - RNA, 19 nt, Artificial Sequence
  Description of Artificial Sequence: Synthetic oligonucleotide
cugucggagacccauacag

SEQ ID NO: 1490935 - RNA, 19 nt, Artificial Sequence
  Description of Artificial Sequence: Synthetic oligonucleotide
uuguaagcaguuaucucga

SEQ ID NO: 1490936 - RNA, 19 nt, Artificial Sequence
  Description of Artificial Sequence: Synthetic oligonucleotide
aacaugcauaacugauguc

SEQ ID NO: 1490937 - RNA, 19 nt, Artificial Sequence
  Description of Artificial Sequence: Synthetic oligonucleotide
aaagucauugaugucuuau

SEQ ID NO: 1490938 - RNA, 19 nt, Artificial Sequence
  Description of Artificial Sequence: Synthetic oligonucleotide
guaugguguccuuugaaug

SEQ ID NO: 1490939 - RNA, 19 nt, Artificial Sequence
  Description of Artificial Sequence: Synthetic oligonucleotide
ucuugacugcaucucaacu

SEQ ID NO: 1490940 - RNA, 19 nt, Artificial Sequence
  Description of Artificial Sequence: Synthetic oligonucleotide
ugaugauuauaaacucaug

SEQ ID NO: 1490941 - RNA, 19 nt, Artificial Sequence
  Description of Artificial Sequence: Synthetic oligonucleotide
uaaacgcccuccuucaugu

SEQ ID NO: 1490942 - RNA, 19 nt, Artificial Sequence
  Description of Artificial Sequence: Synthetic oligonucleotide
auaucugggguuugcaugu

SEQ ID NO: 1490943 - RNA, 19 nt, Artificial Sequence
  Description of Artificial Sequence: Synthetic oligonucleotide
ucacccuugaaauacucuc

SEQ ID NO: 1490944 - RNA, 19 nt, Artificial Sequence
  Description of Artificial Sequence: Synthetic oligonucleotide
gauguaagccaggauuagg

SEQ ID NO: 1490945 - RNA, 19 nt, Artificial Sequence
  Description of Artificial Sequence: Synthetic oligonucleotide
caugacauaaacgcccucc

SEQ ID NO: 1490946 - RNA, 19 nt, Artificial Sequence
  Description of Artificial Sequence: Synthetic oligonucleotide
ugcaucucaacugauucug

SEQ ID NO: 1490947 - RNA, 19 nt, Artificial Sequence
  Description of Artificial Sequence: Synthetic oligonucleotide
cuugauauggcaacgggaa

SEQ ID NO: 1490948 - RNA, 19 nt, Artificial Sequence
  Description of Artificial Sequence: Synthetic oligonucleotide
ucuagggccgacgugaugu

SEQ ID NO: 1490949 - RNA, 19 nt, Artificial Sequence
  Description of Artificial Sequence: Synthetic oligonucleotide
aacaucggcaccaaccaug

SEQ ID NO: 1490950 - RNA, 19 nt, Artificial Sequence
  Description of Artificial Sequence: Synthetic oligonucleotide
caugcauaacugaugucag

SEQ ID NO: 1490951 - RNA, 19 nt, Artificial Sequence
  Description of Artificial Sequence: Synthetic oligonucleotide
auacagucaacaugcauaa

SEQ ID NO: 1490952 - RNA, 19 nt, Artificial Sequence
  Description of Artificial Sequence: Synthetic oligonucleotide
gaauagaacugugauggac

SEQ ID NO: 1490953 - RNA, 19 nt, Artificial Sequence
  Description of Artificial Sequence: Synthetic oligonucleotide
ucauaguugucugugugca

SEQ ID NO: 1490954 - RNA, 19 nt, Artificial Sequence
  Description of Artificial Sequence: Synthetic oligonucleotide
ugcauaacugaugucagaa

SEQ ID NO: 1490955 - RNA, 19 nt, Artificial Sequence
  Description of Artificial Sequence: Synthetic oligonucleotide
caggguaacgaggaaaucc

SEQ ID NO: 1490956 - RNA, 19 nt, Artificial Sequence
  Description of Artificial Sequence: Synthetic oligonucleotide
ugcuguugaggaaucugag

SEQ ID NO: 1490957 - RNA, 19 nt, Artificial Sequence
  Description of Artificial Sequence: Synthetic oligonucleotide
acauguaaucacaggcucc

SEQ ID NO: 1490958 - RNA, 19 nt, Artificial Sequence
  Description of Artificial Sequence: Synthetic oligonucleotide
aguaaaugaaagauaaguu

SEQ ID NO: 1490959 - RNA, 19 nt, Artificial Sequence
  Description of Artificial Sequence: Synthetic oligonucleotide
cugauagguggaaacuugc

SEQ ID NO: 1490960 - RNA, 19 nt, Artificial Sequence
  Description of Artificial Sequence: Synthetic oligonucleotide
ggacaaguuggauaucugg

SEQ ID NO: 1490961 - RNA, 19 nt, Artificial Sequence
  Description of Artificial Sequence: Synthetic oligonucleotide
gaucauuacuaaccucacc

SEQ ID NO: 1490962 - RNA, 19 nt, Artificial Sequence
  Description of Artificial Sequence: Synthetic oligonucleotide
uuaucucgaugaugguugg

SEQ ID NO: 1490963 - RNA, 19 nt, Artificial Sequence
  Description of Artificial Sequence: Synthetic oligonucleotide
ugauguuuauagcguugag

SEQ ID NO: 1490964 - RNA, 19 nt, Artificial Sequence
  Description of Artificial Sequence: Synthetic oligonucleotide
auguuaugggaucauuacu

SEQ ID NO: 1490965 - RNA, 19 nt, Artificial Sequence
  Description of Artificial Sequence: Synthetic oligonucleotide
aagguggaaauucacccuu

SEQ ID NO: 1490966 - RNA, 19 nt, Artificial Sequence
  Description of Artificial Sequence: Synthetic oligonucleotide
ucaugcauuauuggaggag

SEQ ID NO: 1490967 - RNA, 19 nt, Artificial Sequence
  Description of Artificial Sequence: Synthetic oligonucleotide
caaccaugacauaaacgcc

SEQ ID NO: 1490968 - RNA, 19 nt, Artificial Sequence
  Description of Artificial Sequence: Synthetic oligonucleotide
uacgucuauuguaagcagu

SEQ ID NO: 1490969 - RNA, 19 nt, Artificial Sequence
  Description of Artificial Sequence: Synthetic oligonucleotide
auguaucgaagccauccag

SEQ ID NO: 1490970 - RNA, 19 nt, Artificial Sequence
  Description of Artificial Sequence: Synthetic oligonucleotide
cuuccugauagguggaaac

SEQ ID NO: 1490971 - RNA, 19 nt, Artificial Sequence
  Description of Artificial Sequence: Synthetic oligonucleotide
auaaacgcccuccuucaug

SEQ ID NO: 1490972 - RNA, 19 nt, Artificial Sequence
  Description of Artificial Sequence: Synthetic oligonucleotide
uuacuaaccucaccaggcu

SEQ ID NO: 1490973 - RNA, 19 nt, Artificial Sequence
  Description of Artificial Sequence: Synthetic oligonucleotide
gauaccauuuaccuguagu

SEQ ID NO: 1490974 - RNA, 19 nt, Artificial Sequence
  Description of Artificial Sequence: Synthetic oligonucleotide
aacgggaauucuucugcug

SEQ ID NO: 1490975 - RNA, 19 nt, Artificial Sequence
  Description of Artificial Sequence: Synthetic oligonucleotide
aggguaacgaggaaauccg

SEQ ID NO: 1490976 - RNA, 19 nt, Artificial Sequence
  Description of Artificial Sequence: Synthetic oligonucleotide
acacggggaguguagacag

SEQ ID NO: 1490977 - RNA, 19 nt, Artificial Sequence
  Description of Artificial Sequence: Synthetic oligonucleotide
aagguacgucuauuguaag

SEQ ID NO: 1490978 - RNA, 19 nt, Artificial Sequence
  Description of Artificial Sequence: Synthetic oligonucleotide
gauccccucaccacgaacc

SEQ ID NO: 1490979 - RNA, 19 nt, Artificial Sequence
  Description of Artificial Sequence: Synthetic oligonucleotide
uuaugggaucauuacuaac

SEQ ID NO: 1490980 - RNA, 19 nt, Artificial Sequence
  Description of Artificial Sequence: Synthetic oligonucleotide
acauaaacgcccuccuuca

SEQ ID NO: 1490981 - RNA, 19 nt, Artificial Sequence
  Description of Artificial Sequence: Synthetic oligonucleotide
ugauagguggaaacuugcu

SEQ ID NO: 1490982 - RNA, 19 nt, Artificial Sequence
  Description of Artificial Sequence: Synthetic oligonucleotide
uuuauagcguugaggcgcu

SEQ ID NO: 1490983 - RNA, 19 nt, Artificial Sequence
  Description of Artificial Sequence: Synthetic oligonucleotide
augggaucauuacuaaccu

SEQ ID NO: 1490984 - RNA, 19 nt, Artificial Sequence
  Description of Artificial Sequence: Synthetic oligonucleotide
auagcguugaggcgcuccg

SEQ ID NO: 1490985 - RNA, 19 nt, Artificial Sequence
  Description of Artificial Sequence: Synthetic oligonucleotide
aacgcccuccuucauguca

SEQ ID NO: 1490986 - RNA, 19 nt, Artificial Sequence
  Description of Artificial Sequence: Synthetic oligonucleotide
agauaaguuguaguauuug

SEQ ID NO: 1490987 - RNA, 19 nt, Artificial Sequence
  Description of Artificial Sequence: Synthetic oligonucleotide
auaggaagcggcacccugc

SEQ ID NO: 1490988 - RNA, 19 nt, Artificial Sequence
  Description of Artificial Sequence: Synthetic oligonucleotide
uggccaauaucucuuccac

SEQ ID NO: 1490989 - RNA, 19 nt, Artificial Sequence
  Description of Artificial Sequence: Synthetic oligonucleotide
gcucaugcauuauuggagg

SEQ ID NO: 1490990 - RNA, 19 nt, Artificial Sequence
  Description of Artificial Sequence: Synthetic oligonucleotide
aaauuuugcaccagucaau

SEQ ID NO: 1490991 - RNA, 19 nt, Artificial Sequence
  Description of Artificial Sequence: Synthetic oligonucleotide
aaauuaugccuugcagucu

SEQ ID NO: 1490992 - RNA, 19 nt, Artificial Sequence
  Description of Artificial Sequence: Synthetic oligonucleotide
uaccauuuaccuguagucu

SEQ ID NO: 1490993 - RNA, 19 nt, Artificial Sequence
  Description of Artificial Sequence: Synthetic oligonucleotide
caacuucucguaaacaaga

SEQ ID NO: 1490994 - RNA, 19 nt, Artificial Sequence
  Description of Artificial Sequence: Synthetic oligonucleotide
aaaugaaagauaaguugua

SEQ ID NO: 1490995 - RNA, 19 nt, Artificial Sequence
  Description of Artificial Sequence: Synthetic oligonucleotide
agcugucggagacccauac

SEQ ID NO: 1490996 - RNA, 19 nt, Artificial Sequence
  Description of Artificial Sequence: Synthetic oligonucleotide
gccgacgugauguuuauag

SEQ ID NO: 1490997 - RNA, 19 nt, Artificial Sequence
  Description of Artificial Sequence: Synthetic oligonucleotide
uuguacuccccaccaucgg

SEQ ID NO: 1490998 - RNA, 19 nt, Artificial Sequence
  Description of Artificial Sequence: Synthetic oligonucleotide
auaaacucauggcuucagu

SEQ ID NO: 1490999 - RNA, 19 nt, Artificial Sequence
  Description of Artificial Sequence: Synthetic oligonucleotide
ccuuugaauguaucgaagc

SEQ ID NO: 1491000 - RNA, 19 nt, Artificial Sequence
  Description of Artificial Sequence: Synthetic oligonucleotide
uguaaucacaggcuccauu

SEQ ID NO: 1491001 - RNA, 19 nt, Artificial Sequence
  Description of Artificial Sequence: Synthetic oligonucleotide
gaugaagaauucugcuuga

SEQ ID NO: 1491002 - RNA, 19 nt, Artificial Sequence
  Description of Artificial Sequence: Synthetic oligonucleotide
cauaaaugcuguguugaug

SEQ ID NO: 1491003 - RNA, 19 nt, Artificial Sequence
  Description of Artificial Sequence: Synthetic oligonucleotide
aaguuggauaucugggguu

SEQ ID NO: 1491004 - RNA, 19 nt, Artificial Sequence
  Description of Artificial Sequence: Synthetic oligonucleotide
augacauaaacgcccuccu

SEQ ID NO: 1491005 - RNA, 19 nt, Artificial Sequence
  Description of Artificial Sequence: Synthetic oligonucleotide
ugguagauuucugaauaga

SEQ ID NO: 1491006 - RNA, 19 nt, Artificial Sequence
  Description of Artificial Sequence: Synthetic oligonucleotide
gauauggcaacgggaauuc

SEQ ID NO: 1491007 - RNA, 19 nt, Artificial Sequence
  Description of Artificial Sequence: Synthetic oligonucleotide
ugauauggcaacgggaauu

SEQ ID NO: 1491008 - RNA, 19 nt, Artificial Sequence
  Description of Artificial Sequence: Synthetic oligonucleotide
uguaauagucccugcuuuu

SEQ ID NO: 1491009 - RNA, 19 nt, Artificial Sequence
  Description of Artificial Sequence: Synthetic oligonucleotide
uggacaaguuggauaucug

SEQ ID NO: 1491010 - RNA, 19 nt, Artificial Sequence
  Description of Artificial Sequence: Synthetic oligonucleotide
auggacaaguuggauaucu

SEQ ID NO: 1491011 - RNA, 19 nt, Artificial Sequence
  Description of Artificial Sequence: Synthetic oligonucleotide
ucgaugaugguugguuucc

SEQ ID NO: 1491012 - RNA, 19 nt, Artificial Sequence
  Description of Artificial Sequence: Synthetic oligonucleotide
cauuaauaggaagcggcac

SEQ ID NO: 1491013 - RNA, 19 nt, Artificial Sequence
  Description of Artificial Sequence: Synthetic oligonucleotide
uugcagucucaaagguacg

SEQ ID NO: 1491014 - RNA, 19 nt, Artificial Sequence
  Description of Artificial Sequence: Synthetic oligonucleotide
acccauacagaaccccauc

SEQ ID NO: 1491015 - RNA, 19 nt, Artificial Sequence
  Description of Artificial Sequence: Synthetic oligonucleotide
ucucguaaacaagaagaaa

SEQ ID NO: 1491016 - RNA, 19 nt, Artificial Sequence
  Description of Artificial Sequence: Synthetic oligonucleotide
guacgucuauuguaagcag

SEQ ID NO: 1491017 - RNA, 19 nt, Artificial Sequence
  Description of Artificial Sequence: Synthetic oligonucleotide
cacuguaugguguccuuug

SEQ ID NO: 1491018 - RNA, 19 nt, Artificial Sequence
  Description of Artificial Sequence: Synthetic oligonucleotide
ugaauagaacugugaugga

SEQ ID NO: 1491019 - RNA, 19 nt, Artificial Sequence
  Description of Artificial Sequence: Synthetic oligonucleotide
agauccccucaccacgaac

SEQ ID NO: 1491020 - RNA, 19 nt, Artificial Sequence
  Description of Artificial Sequence: Synthetic oligonucleotide
gauuauaaacucauggcuu

SEQ ID NO: 1491021 - RNA, 19 nt, Artificial Sequence
  Description of Artificial Sequence: Synthetic oligonucleotide
ccaaaacaugaacaaagag

SEQ ID NO: 1491022 - RNA, 19 nt, Artificial Sequence
  Description of Artificial Sequence: Synthetic oligonucleotide
ugucggagacccauacaga

SEQ ID NO: 1491023 - RNA, 19 nt, Artificial Sequence
  Description of Artificial Sequence: Synthetic oligonucleotide
uauagcguugaggcgcucc

SEQ ID NO: 1491024 - RNA, 19 nt, Artificial Sequence
  Description of Artificial Sequence: Synthetic oligonucleotide
uuaaauguuaugggaucau

SEQ ID NO: 1491025 - RNA, 19 nt, Artificial Sequence
  Description of Artificial Sequence: Synthetic oligonucleotide
gggaucauuacuaaccuca

SEQ ID NO: 1491026 - RNA, 19 nt, Artificial Sequence
  Description of Artificial Sequence: Synthetic oligonucleotide
uuuaggcuucauuaauauu

SEQ ID NO: 1491027 - RNA, 19 nt, Artificial Sequence
  Description of Artificial Sequence: Synthetic oligonucleotide
gaaaugagacauaaaugcu

SEQ ID NO: 1491028 - RNA, 19 nt, Artificial Sequence
  Description of Artificial Sequence: Synthetic oligonucleotide
ucaacggcauguuggugcu

SEQ ID NO: 1491029 - RNA, 19 nt, Artificial Sequence
  Description of Artificial Sequence: Synthetic oligonucleotide
ugguuuuaucaaccaggga

SEQ ID NO: 1491030 - RNA, 19 nt, Artificial Sequence
  Description of Artificial Sequence: Synthetic oligonucleotide
aagauaaguuguaguauuu

SEQ ID NO: 1491031 - RNA, 19 nt, Artificial Sequence
  Description of Artificial Sequence: Synthetic oligonucleotide
acccauuaaauuuguguua

SEQ ID NO: 1491032 - RNA, 19 nt, Artificial Sequence
  Description of Artificial Sequence: Synthetic oligonucleotide
gguacgucuauuguaagca

SEQ ID NO: 1491033 - RNA, 19 nt, Artificial Sequence
  Description of Artificial Sequence: Synthetic oligonucleotide
ucggcaacacaugauguaa

SEQ ID NO: 1491034 - RNA, 19 nt, Artificial Sequence
  Description of Artificial Sequence: Synthetic oligonucleotide
uugauauggcaacgggaau

SEQ ID NO: 1491035 - RNA, 19 nt, Artificial Sequence
  Description of Artificial Sequence: Synthetic oligonucleotide
uuuuaucaaccagggaaau

SEQ ID NO: 1491036 - RNA, 19 nt, Artificial Sequence
  Description of Artificial Sequence: Synthetic oligonucleotide
ucggagacccauacagaac

SEQ ID NO: 1491037 - RNA, 19 nt, Artificial Sequence
  Description of Artificial Sequence: Synthetic oligonucleotide
caaagguacgucuauugua

SEQ ID NO: 1491038 - RNA, 19 nt, Artificial Sequence
  Description of Artificial Sequence: Synthetic oligonucleotide
uaucgaagccauccagguc

SEQ ID NO: 1491039 - RNA, 19 nt, Artificial Sequence
  Description of Artificial Sequence: Synthetic oligonucleotide
ggcaacacaugauguaagc

SEQ ID NO: 1491040 - RNA, 19 nt, Artificial Sequence
  Description of Artificial Sequence: Synthetic oligonucleotide
ccaggauuaggaaaagcac

SEQ ID NO: 1491041 - RNA, 19 nt, Artificial Sequence
  Description of Artificial Sequence: Synthetic oligonucleotide
aguuaucucgaugaugguu

SEQ ID NO: 1491042 - RNA, 19 nt, Artificial Sequence
  Description of Artificial Sequence: Synthetic oligonucleotide
uuauuggaggagagaggaa

SEQ ID NO: 1491043 - RNA, 19 nt, Artificial Sequence
  Description of Artificial Sequence: Synthetic oligonucleotide
ggacaugucucgaagcucc

SEQ ID NO: 1491044 - RNA, 19 nt, Artificial Sequence
  Description of Artificial Sequence: Synthetic oligonucleotide
uuggauaucugggguuugc

SEQ ID NO: 1491045 - RNA, 19 nt, Artificial Sequence
  Description of Artificial Sequence: Synthetic oligonucleotide
ugcagucucaaagguacgu

SEQ ID NO: 1491046 - RNA, 19 nt, Artificial Sequence
  Description of Artificial Sequence: Synthetic oligonucleotide
caugcauuauuggaggaga

SEQ ID NO: 1491047 - RNA, 19 nt, Artificial Sequence
  Description of Artificial Sequence: Synthetic oligonucleotide
gucggagacccauacagaa

SEQ ID NO: 1491048 - RNA, 19 nt, Artificial Sequence
  Description of Artificial Sequence: Synthetic oligonucleotide
aggggagguaugauuuccc

SEQ ID NO: 1491049 - RNA, 19 nt, Artificial Sequence
  Description of Artificial Sequence: Synthetic oligonucleotide
uaaauguuaugggaucauu

SEQ ID NO: 1491050 - RNA, 19 nt, Artificial Sequence
  Description of Artificial Sequence: Synthetic oligonucleotide
auuuaccuguagucugcug

SEQ ID NO: 1491051 - RNA, 19 nt, Artificial Sequence
  Description of Artificial Sequence: Synthetic oligonucleotide
gagacauaaaugcuguguu

SEQ ID NO: 1491052 - RNA, 19 nt, Artificial Sequence
  Description of Artificial Sequence: Synthetic oligonucleotide
caacaugcauaacugaugu

SEQ ID NO: 1491053 - RNA, 19 nt, Artificial Sequence
  Description of Artificial Sequence: Synthetic oligonucleotide
gagacccauacagaacccc

SEQ ID NO: 1491054 - RNA, 19 nt, Artificial Sequence
  Description of Artificial Sequence: Synthetic oligonucleotide
cauguaaucacaggcucca

SEQ ID NO: 1491055 - RNA, 19 nt, Artificial Sequence
  Description of Artificial Sequence: Synthetic oligonucleotide
uuuaucaaccagggaaauu

SEQ ID NO: 1491056 - RNA, 19 nt, Artificial Sequence
  Description of Artificial Sequence: Synthetic oligonucleotide
uuaccuguagucugcuguu

SEQ ID NO: 1491057 - RNA, 19 nt, Artificial Sequence
  Description of Artificial Sequence: Synthetic oligonucleotide
auccguguaauagucccug

SEQ ID NO: 1491058 - RNA, 19 nt, Artificial Sequence
  Description of Artificial Sequence: Synthetic oligonucleotide
aacuucucguaaacaagaa

SEQ ID NO: 1491059 - RNA, 19 nt, Artificial Sequence
  Description of Artificial Sequence: Synthetic oligonucleotide
guaaucacaggcuccauuu

SEQ ID NO: 1491060 - RNA, 19 nt, Artificial Sequence
  Description of Artificial Sequence: Synthetic oligonucleotide
uggaaacuugcuugguuuu

SEQ ID NO: 1491061 - RNA, 19 nt, Artificial Sequence
  Description of Artificial Sequence: Synthetic oligonucleotide
gaugguugguuuccccaca

SEQ ID NO: 1491062 - RNA, 19 nt, Artificial Sequence
  Description of Artificial Sequence: Synthetic oligonucleotide
augcauaacugaugucaga

SEQ ID NO: 1491063 - RNA, 19 nt, Artificial Sequence
  Description of Artificial Sequence: Synthetic oligonucleotide
ucucgaugaugguugguuu

SEQ ID NO: 1491064 - RNA, 19 nt, Artificial Sequence
  Description of Artificial Sequence: Synthetic oligonucleotide
ggaaauccguguaauaguc

SEQ ID NO: 1491065 - RNA, 19 nt, Artificial Sequence
  Description of Artificial Sequence: Synthetic oligonucleotide
ucccgucggcaacacauga

SEQ ID NO: 1491066 - RNA, 19 nt, Artificial Sequence
  Description of Artificial Sequence: Synthetic oligonucleotide
uacuaaccucaccaggcuu

SEQ ID NO: 1491067 - RNA, 19 nt, Artificial Sequence
  Description of Artificial Sequence: Synthetic oligonucleotide
guccuuugaauguaucgaa

SEQ ID NO: 1491068 - RNA, 19 nt, Artificial Sequence
  Description of Artificial Sequence: Synthetic oligonucleotide
gugauguuuauagcguuga

SEQ ID NO: 1491069 - RNA, 19 nt, Artificial Sequence
  Description of Artificial Sequence: Synthetic oligonucleotide
gucuauuguaagcaguuau

SEQ ID NO: 1491070 - RNA, 19 nt, Artificial Sequence
  Description of Artificial Sequence: Synthetic oligonucleotide
cugcuugauauggcaacgg

SEQ ID NO: 1491071 - RNA, 19 nt, Artificial Sequence
  Description of Artificial Sequence: Synthetic oligonucleotide
ugggaucauuacuaaccuc

SEQ ID NO: 1491072 - RNA, 19 nt, Artificial Sequence
  Description of Artificial Sequence: Synthetic oligonucleotide
ugacauaaacgcccuccuu

SEQ ID NO: 1491073 - RNA, 19 nt, Artificial Sequence
  Description of Artificial Sequence: Synthetic oligonucleotide
gaagcggcacccugccacc

SEQ ID NO: 1491074 - RNA, 19 nt, Artificial Sequence
  Description of Artificial Sequence: Synthetic oligonucleotide
agucaauguaaaacugagu

SEQ ID NO: 1491075 - RNA, 19 nt, Artificial Sequence
  Description of Artificial Sequence: Synthetic oligonucleotide
uggauaucugggguuugca

SEQ ID NO: 1491076 - RNA, 19 nt, Artificial Sequence
  Description of Artificial Sequence: Synthetic oligonucleotide
acucauggcuucagucagc

SEQ ID NO: 1491077 - RNA, 19 nt, Artificial Sequence
  Description of Artificial Sequence: Synthetic oligonucleotide
uucccgucggcaacacaug

SEQ ID NO: 1491078 - RNA, 19 nt, Artificial Sequence
  Description of Artificial Sequence: Synthetic oligonucleotide
gguagauuucugaauagaa

SEQ ID NO: 1491079 - RNA, 19 nt, Artificial Sequence
  Description of Artificial Sequence: Synthetic oligonucleotide
gcuuuucaaagacucagaa

SEQ ID NO: 1491080 - RNA, 19 nt, Artificial Sequence
  Description of Artificial Sequence: Synthetic oligonucleotide
uccugauagguggaaacuu

SEQ ID NO: 1491081 - RNA, 19 nt, Artificial Sequence
  Description of Artificial Sequence: Synthetic oligonucleotide
guaucgaagccauccaggu

SEQ ID NO: 1491082 - RNA, 19 nt, Artificial Sequence
  Description of Artificial Sequence: Synthetic oligonucleotide
uuuggguaagguggaaauu

SEQ ID NO: 1491083 - RNA, 19 nt, Artificial Sequence
  Description of Artificial Sequence: Synthetic oligonucleotide
auguaaaacugaguucgaa

SEQ ID NO: 1491084 - RNA, 19 nt, Artificial Sequence
  Description of Artificial Sequence: Synthetic oligonucleotide
gcaacaucggcaccaacca

SEQ ID NO: 1491085 - RNA, 19 nt, Artificial Sequence
  Description of Artificial Sequence: Synthetic oligonucleotide
aucucgaugaugguugguu

SEQ ID NO: 1491086 - RNA, 19 nt, Artificial Sequence
  Description of Artificial Sequence: Synthetic oligonucleotide
cuggccaauaucucuucca

SEQ ID NO: 1491087 - RNA, 19 nt, Artificial Sequence
  Description of Artificial Sequence: Synthetic oligonucleotide
gcaacacaugauguaagcc

SEQ ID NO: 1491088 - RNA, 19 nt, Artificial Sequence
  Description of Artificial Sequence: Synthetic oligonucleotide
uguaagcaguuaucucgau

SEQ ID NO: 1491089 - RNA, 19 nt, Artificial Sequence
  Description of Artificial Sequence: Synthetic oligonucleotide
cugucuagggccgacguga

SEQ ID NO: 1491090 - RNA, 19 nt, Artificial Sequence
  Description of Artificial Sequence: Synthetic oligonucleotide
gaaacacggggaguguaga

SEQ ID NO: 1491091 - RNA, 19 nt, Artificial Sequence
  Description of Artificial Sequence: Synthetic oligonucleotide
aguuggauaucugggguuu

SEQ ID NO: 1491092 - RNA, 19 nt, Artificial Sequence
  Description of Artificial Sequence: Synthetic oligonucleotide
agcggcacccugccacccc

SEQ ID NO: 1491093 - RNA, 19 nt, Artificial Sequence
  Description of Artificial Sequence: Synthetic oligonucleotide
gacgugauguuuauagcgu

SEQ ID NO: 1491094 - RNA, 19 nt, Artificial Sequence
  Description of Artificial Sequence: Synthetic oligonucleotide
augcaacaucggcaccaac

SEQ ID NO: 1491095 - RNA, 19 nt, Artificial Sequence
  Description of Artificial Sequence: Synthetic oligonucleotide
ugggguuugcauguuucuc

SEQ ID NO: 1491096 - RNA, 19 nt, Artificial Sequence
  Description of Artificial Sequence: Synthetic oligonucleotide
acuaaccucaccaggcuuu

SEQ ID NO: 1491097 - RNA, 19 nt, Artificial Sequence
  Description of Artificial Sequence: Synthetic oligonucleotide
agacccauacagaacccca

SEQ ID NO: 1491098 - RNA, 19 nt, Artificial Sequence
  Description of Artificial Sequence: Synthetic oligonucleotide
ucucaaagguacgucuauu

SEQ ID NO: 1491099 - RNA, 19 nt, Artificial Sequence
  Description of Artificial Sequence: Synthetic oligonucleotide
cuuuggguaagguggaaau

SEQ ID NO: 1491100 - RNA, 19 nt, Artificial Sequence
  Description of Artificial Sequence: Synthetic oligonucleotide
gggaguguagacaggggcc

SEQ ID NO: 1491101 - RNA, 19 nt, Artificial Sequence
  Description of Artificial Sequence: Synthetic oligonucleotide
gggugaaacacggggagug

SEQ ID NO: 1491102 - RNA, 19 nt, Artificial Sequence
  Description of Artificial Sequence: Synthetic oligonucleotide
cucaugcauuauuggagga

SEQ ID NO: 1491103 - RNA, 19 nt, Artificial Sequence
  Description of Artificial Sequence: Synthetic oligonucleotide
caagauccccucaccacga

SEQ ID NO: 1491104 - RNA, 19 nt, Artificial Sequence
  Description of Artificial Sequence: Synthetic oligonucleotide
acgaggaaauccguguaau

SEQ ID NO: 1491105 - RNA, 19 nt, Artificial Sequence
  Description of Artificial Sequence: Synthetic oligonucleotide
acgucuauuguaagcaguu

SEQ ID NO: 1491106 - RNA, 19 nt, Artificial Sequence
  Description of Artificial Sequence: Synthetic oligonucleotide
uaccuguagucugcuguug

SEQ ID NO: 1491107 - RNA, 19 nt, Artificial Sequence
  Description of Artificial Sequence: Synthetic oligonucleotide
gucaacaugcauaacugau

SEQ ID NO: 1491108 - RNA, 19 nt, Artificial Sequence
  Description of Artificial Sequence: Synthetic oligonucleotide
cuucccgucggcaacacau

SEQ ID NO: 1491109 - RNA, 19 nt, Artificial Sequence
  Description of Artificial Sequence: Synthetic oligonucleotide
cacugccgagggcacagcc

SEQ ID NO: 1491110 - RNA, 19 nt, Artificial Sequence
  Description of Artificial Sequence: Synthetic oligonucleotide
cuaaccucaccaggcuuug

SEQ ID NO: 1491111 - RNA, 19 nt, Artificial Sequence
  Description of Artificial Sequence: Synthetic oligonucleotide
uaaccucaccaggcuuugg

SEQ ID NO: 1491112 - RNA, 19 nt, Artificial Sequence
  Description of Artificial Sequence: Synthetic oligonucleotide
uccacuccuucccgucggc

SEQ ID NO: 1491113 - RNA, 19 nt, Artificial Sequence
  Description of Artificial Sequence: Synthetic oligonucleotide
uuaugccuugcagucucaa

SEQ ID NO: 1491114 - RNA, 19 nt, Artificial Sequence
  Description of Artificial Sequence: Synthetic oligonucleotide
cugcaucaacggcauguug

SEQ ID NO: 1491115 - RNA, 19 nt, Artificial Sequence
  Description of Artificial Sequence: Synthetic oligonucleotide
uagcguugaggcgcuccgg

SEQ ID NO: 1491116 - RNA, 19 nt, Artificial Sequence
  Description of Artificial Sequence: Synthetic oligonucleotide
ugucuagggccgacgugau

SEQ ID NO: 1491117 - RNA, 19 nt, Artificial Sequence
  Description of Artificial Sequence: Synthetic oligonucleotide
aucacuguaugguguccuu

SEQ ID NO: 1491118 - RNA, 19 nt, Artificial Sequence
  Description of Artificial Sequence: Synthetic oligonucleotide
caucgggcaagauccccuc

SEQ ID NO: 1491119 - RNA, 19 nt, Artificial Sequence
  Description of Artificial Sequence: Synthetic oligonucleotide
ggggcuuguacuccccacc

SEQ ID NO: 1491120 - RNA, 19 nt, Artificial Sequence
  Description of Artificial Sequence: Synthetic oligonucleotide
gucggcaacacaugaugua

SEQ ID NO: 1491121 - RNA, 19 nt, Artificial Sequence
  Description of Artificial Sequence: Synthetic oligonucleotide
guguaauagucccugcuuu

SEQ ID NO: 1491122 - RNA, 19 nt, Artificial Sequence
  Description of Artificial Sequence: Synthetic oligonucleotide
cacggggaguguagacagg

SEQ ID NO: 1491123 - RNA, 19 nt, Artificial Sequence
  Description of Artificial Sequence: Synthetic oligonucleotide
guuggauaucugggguuug

SEQ ID NO: 1491124 - RNA, 19 nt, Artificial Sequence
  Description of Artificial Sequence: Synthetic oligonucleotide
gguggaaauucacccuuga

SEQ ID NO: 1491125 - RNA, 19 nt, Artificial Sequence
  Description of Artificial Sequence: Synthetic oligonucleotide
agccaggguaacgaggaaa

SEQ ID NO: 1491126 - RNA, 19 nt, Artificial Sequence
  Description of Artificial Sequence: Synthetic oligonucleotide
ccccaagaaagucuccaag

SEQ ID NO: 1491127 - RNA, 19 nt, Artificial Sequence
  Description of Artificial Sequence: Synthetic oligonucleotide
gcuugauauggcaacggga

SEQ ID NO: 1491128 - RNA, 19 nt, Artificial Sequence
  Description of Artificial Sequence: Synthetic oligonucleotide
ucacuguaugguguccuuu

SEQ ID NO: 1491129 - RNA, 19 nt, Artificial Sequence
  Description of Artificial Sequence: Synthetic oligonucleotide
guuguaguauuugguauau

SEQ ID NO: 1491130 - RNA, 19 nt, Artificial Sequence
  Description of Artificial Sequence: Synthetic oligonucleotide
uaucucgaugaugguuggu

SEQ ID NO: 1491131 - RNA, 19 nt, Artificial Sequence
  Description of Artificial Sequence: Synthetic oligonucleotide
uacagucaacaugcauaac

SEQ ID NO: 1491132 - RNA, 19 nt, Artificial Sequence
  Description of Artificial Sequence: Synthetic oligonucleotide
ggaucauuacuaaccucac

SEQ ID NO: 1491133 - RNA, 19 nt, Artificial Sequence
  Description of Artificial Sequence: Synthetic oligonucleotide
ccgacgugauguuuauagc

SEQ ID NO: 1491134 - RNA, 19 nt, Artificial Sequence
  Description of Artificial Sequence: Synthetic oligonucleotide
ggauaccauuuaccuguag

SEQ ID NO: 1491135 - RNA, 19 nt, Artificial Sequence
  Description of Artificial Sequence: Synthetic oligonucleotide
ccgucggcaacacaugaug

SEQ ID NO: 1491136 - RNA, 19 nt, Artificial Sequence
  Description of Artificial Sequence: Synthetic oligonucleotide
aucgggcaagauccccuca

SEQ ID NO: 1491137 - RNA, 19 nt, Artificial Sequence
  Description of Artificial Sequence: Synthetic oligonucleotide
cgugauguuuauagcguug

SEQ ID NO: 1491138 - RNA, 19 nt, Artificial Sequence
  Description of Artificial Sequence: Synthetic oligonucleotide
acggcauguuggugcuguc

SEQ ID NO: 1491139 - RNA, 19 nt, Artificial Sequence
  Description of Artificial Sequence: Synthetic oligonucleotide
uuguaguauuugguauaua

SEQ ID NO: 1491140 - RNA, 19 nt, Artificial Sequence
  Description of Artificial Sequence: Synthetic oligonucleotide
cgaaccacuuccugauagg

SEQ ID NO: 1491141 - RNA, 19 nt, Artificial Sequence
  Description of Artificial Sequence: Synthetic oligonucleotide
caccaucgggcaagauccc

SEQ ID NO: 1491142 - RNA, 19 nt, Artificial Sequence
  Description of Artificial Sequence: Synthetic oligonucleotide
agggugaaacacggggagu

SEQ ID NO: 1491143 - RNA, 19 nt, Artificial Sequence
  Description of Artificial Sequence: Synthetic oligonucleotide
ucgaagcuccuugguagau

SEQ ID NO: 1491144 - RNA, 19 nt, Artificial Sequence
  Description of Artificial Sequence: Synthetic oligonucleotide
ggaguguagacaggggcca

SEQ ID NO: 1491145 - RNA, 19 nt, Artificial Sequence
  Description of Artificial Sequence: Synthetic oligonucleotide
acugccgagggcacagcca

SEQ ID NO: 1491146 - RNA, 19 nt, Artificial Sequence
  Description of Artificial Sequence: Synthetic oligonucleotide
cagccccaagaaagucucc

SEQ ID NO: 1491147 - RNA, 19 nt, Artificial Sequence
  Description of Artificial Sequence: Synthetic oligonucleotide
cccauuaaauuuguguuaa

SEQ ID NO: 1491148 - RNA, 19 nt, Artificial Sequence
  Description of Artificial Sequence: Synthetic oligonucleotide
cugcaucucaacugauucu

SEQ ID NO: 1491149 - RNA, 19 nt, Artificial Sequence
  Description of Artificial Sequence: Synthetic oligonucleotide
cccauacagaaccccauca

SEQ ID NO: 1491150 - RNA, 19 nt, Artificial Sequence
  Description of Artificial Sequence: Synthetic oligonucleotide
cugucuggguaacccauua

SEQ ID NO: 1491151 - RNA, 19 nt, Artificial Sequence
  Description of Artificial Sequence: Synthetic oligonucleotide
cacuccuucccgucggcaa

SEQ ID NO: 1491152 - RNA, 19 nt, Artificial Sequence
  Description of Artificial Sequence: Synthetic oligonucleotide
gucuagggccgacgugaug

SEQ ID NO: 1491153 - RNA, 19 nt, Artificial Sequence
  Description of Artificial Sequence: Synthetic oligonucleotide
uccccucaccacgaaccac

SEQ ID NO: 1491154 - RNA, 19 nt, Artificial Sequence
  Description of Artificial Sequence: Synthetic oligonucleotide
guguggcaaguucugcugu

SEQ ID NO: 1491155 - RNA, 19 nt, Artificial Sequence
  Description of Artificial Sequence: Synthetic oligonucleotide
ggcaaguucugcugugucu

SEQ ID NO: 1491156 - RNA, 19 nt, Artificial Sequence
  Description of Artificial Sequence: Synthetic oligonucleotide
agggccgacgugauguuua

SEQ ID NO: 1491157 - RNA, 19 nt, Artificial Sequence
  Description of Artificial Sequence: Synthetic oligonucleotide
accccugucuagggccgac

SEQ ID NO: 1491158 - RNA, 19 nt, Artificial Sequence
  Description of Artificial Sequence: Synthetic oligonucleotide
caacgggaauucuucugcu

SEQ ID NO: 1491159 - RNA, 19 nt, Artificial Sequence
  Description of Artificial Sequence: Synthetic oligonucleotide
gcaucaacggcauguuggu

SEQ ID NO: 1491160 - RNA, 19 nt, Artificial Sequence
  Description of Artificial Sequence: Synthetic oligonucleotide
gguaacccauuaaauuugu

SEQ ID NO: 1491161 - RNA, 19 nt, Artificial Sequence
  Description of Artificial Sequence: Synthetic oligonucleotide
cggcaacacaugauguaag

SEQ ID NO: 1491162 - RNA, 19 nt, Artificial Sequence
  Description of Artificial Sequence: Synthetic oligonucleotide
auguaaucacaggcuccau

SEQ ID NO: 1491163 - RNA, 19 nt, Artificial Sequence
  Description of Artificial Sequence: Synthetic oligonucleotide
cagaaccccaucacuguau

SEQ ID NO: 1491164 - RNA, 19 nt, Artificial Sequence
  Description of Artificial Sequence: Synthetic oligonucleotide
uggcuucagucagcuuucu

SEQ ID NO: 1491165 - RNA, 19 nt, Artificial Sequence
  Description of Artificial Sequence: Synthetic oligonucleotide
gccacugccgagggcacag

SEQ ID NO: 1491166 - RNA, 19 nt, Artificial Sequence
  Description of Artificial Sequence: Synthetic oligonucleotide
cucaacugauucuguggau

SEQ ID NO: 1491167 - RNA, 19 nt, Artificial Sequence
  Description of Artificial Sequence: Synthetic oligonucleotide
caucggcaccaaccaugac

SEQ ID NO: 1491168 - RNA, 19 nt, Artificial Sequence
  Description of Artificial Sequence: Synthetic oligonucleotide
uugaggcgcuccgguugcc

SEQ ID NO: 1491169 - RNA, 19 nt, Artificial Sequence
  Description of Artificial Sequence: Synthetic oligonucleotide
ggaaacuugcuugguuuua

SEQ ID NO: 1491170 - RNA, 19 nt, Artificial Sequence
  Description of Artificial Sequence: Synthetic oligonucleotide
gacccauacagaaccccau

SEQ ID NO: 1491171 - RNA, 19 nt, Artificial Sequence
  Description of Artificial Sequence: Synthetic oligonucleotide
gcugucggagacccauaca

SEQ ID NO: 1491172 - RNA, 19 nt, Artificial Sequence
  Description of Artificial Sequence: Synthetic oligonucleotide
uccuucccgucggcaacac

SEQ ID NO: 1491173 - RNA, 19 nt, Artificial Sequence
  Description of Artificial Sequence: Synthetic oligonucleotide
ccugucuagggccgacgug

SEQ ID NO: 1491174 - RNA, 19 nt, Artificial Sequence
  Description of Artificial Sequence: Synthetic oligonucleotide
uuauagcguugaggcgcuc

SEQ ID NO: 1491175 - RNA, 19 nt, Artificial Sequence
  Description of Artificial Sequence: Synthetic oligonucleotide
uagggccgacgugauguuu

SEQ ID NO: 1491176 - RNA, 19 nt, Artificial Sequence
  Description of Artificial Sequence: Synthetic oligonucleotide
gucugugugcaggggaggu

SEQ ID NO: 1491177 - RNA, 19 nt, Artificial Sequence
  Description of Artificial Sequence: Synthetic oligonucleotide
ggggccaugcaaucucucu

SEQ ID NO: 1491178 - RNA, 19 nt, Artificial Sequence
  Description of Artificial Sequence: Synthetic oligonucleotide
caguuaucucgaugauggu

SEQ ID NO: 1491179 - RNA, 19 nt, Artificial Sequence
  Description of Artificial Sequence: Synthetic oligonucleotide
cauaaacgcccuccuucau

SEQ ID NO: 1491180 - RNA, 19 nt, Artificial Sequence
  Description of Artificial Sequence: Synthetic oligonucleotide
caacggcauguuggugcug

SEQ ID NO: 1491181 - RNA, 19 nt, Artificial Sequence
  Description of Artificial Sequence: Synthetic oligonucleotide
ccaugacauaaacgcccuc

SEQ ID NO: 1491182 - RNA, 19 nt, Artificial Sequence
  Description of Artificial Sequence: Synthetic oligonucleotide
caacaucggcaccaaccau

SEQ ID NO: 1491183 - RNA, 19 nt, Artificial Sequence
  Description of Artificial Sequence: Synthetic oligonucleotide
ggugaaacacggggagugu

SEQ ID NO: 1491184 - RNA, 19 nt, Artificial Sequence
  Description of Artificial Sequence: Synthetic oligonucleotide
ccaggguaacgaggaaauc

SEQ ID NO: 1491185 - RNA, 19 nt, Artificial Sequence
  Description of Artificial Sequence: Synthetic oligonucleotide
gaguguagacaggggccau

SEQ ID NO: 1491186 - RNA, 19 nt, Artificial Sequence
  Description of Artificial Sequence: Synthetic oligonucleotide
ccguguaauagucccugcu

SEQ ID NO: 1491187 - RNA, 19 nt, Artificial Sequence
  Description of Artificial Sequence: Synthetic oligonucleotide
ccucaccacgaaccacuuc

SEQ ID NO: 1491188 - RNA, 19 nt, Artificial Sequence
  Description of Artificial Sequence: Synthetic oligonucleotide
ggguaacgaggaaauccgu

SEQ ID NO: 1491189 - RNA, 19 nt, Artificial Sequence
  Description of Artificial Sequence: Synthetic oligonucleotide
ccccugucuagggccgacg

SEQ ID NO: 1491190 - RNA, 19 nt, Artificial Sequence
  Description of Artificial Sequence: Synthetic oligonucleotide
cuagggccgacgugauguu

SEQ ID NO: 1491191 - RNA, 19 nt, Artificial Sequence
  Description of Artificial Sequence: Synthetic oligonucleotide
cgucggcaacacaugaugu

SEQ ID NO: 1491192 - RNA, 19 nt, Artificial Sequence
  Description of Artificial Sequence: Synthetic oligonucleotide
cgucuauuguaagcaguua

SEQ ID NO: 1491193 - RNA, 19 nt, Artificial Sequence
  Description of Artificial Sequence: Synthetic oligonucleotide
gggccgacgugauguuuau

SEQ ID NO: 1491194 - RNA, 19 nt, Artificial Sequence
  Description of Artificial Sequence: Synthetic oligonucleotide
caccccugucuagggccga

SEQ ID NO: 1491195 - RNA, 19 nt, Artificial Sequence
  Description of Artificial Sequence: Synthetic oligonucleotide
cccugucuagggccgacgu

SEQ ID NO: 1491196 - RNA, 19 nt, Artificial Sequence
  Description of Artificial Sequence: Synthetic oligonucleotide
ccuucccgucggcaacaca

SEQ ID NO: 1491197 - RNA, 19 nt, Artificial Sequence
  Description of Artificial Sequence: Synthetic oligonucleotide
ccacuccuucccgucggca

SEQ ID NO: 1491198 - RNA, 19 nt, Artificial Sequence
  Description of Artificial Sequence: Synthetic oligonucleotide
cccgucggcaacacaugau

SEQ ID NO: 1491199 - RNA, 19 nt, Artificial Sequence
  Description of Artificial Sequence: Synthetic oligonucleotide
gcguugaggcgcuccgguu

SEQ ID NO: 1491200 - RNA, 19 nt, Artificial Sequence
  Description of Artificial Sequence: Synthetic oligonucleotide
ggccgacgugauguuuaua

SEQ ID NO: 1491201 - RNA, 19 nt, Artificial Sequence
  Description of Artificial Sequence: Synthetic oligonucleotide
gcuccgguugccacacauu

SEQ ID NO: 1491202 - RNA, 19 nt, Artificial Sequence
  Description of Artificial Sequence: Synthetic oligonucleotide
cgcuccgguugccacacau

SEQ ID NO: 1491203 - RNA, 19 nt, Artificial Sequence
  Description of Artificial Sequence: Synthetic oligonucleotide
cccucaccacgaaccacuu

SEQ ID NO: 1491204 - RNA, 19 nt, Artificial Sequence
  Description of Artificial Sequence: Synthetic oligonucleotide
aaauccaacacgcucaagc

SEQ ID NO: 1491205 - RNA, 19 nt, Artificial Sequence
  Description of Artificial Sequence: Synthetic oligonucleotide
aaguuauugaccuauuuuc

SEQ ID NO: 1491206 - RNA, 19 nt, Artificial Sequence
  Description of Artificial Sequence: Synthetic oligonucleotide
aaauuaaagguuuguuucc

SEQ ID NO: 1491207 - RNA, 19 nt, Artificial Sequence
  Description of Artificial Sequence: Synthetic oligonucleotide
aaguuuuggauauaugugg

SEQ ID NO: 1491208 - RNA, 19 nt, Artificial Sequence
  Description of Artificial Sequence: Synthetic oligonucleotide
aacaucuguuaucagaucg

SEQ ID NO: 1491209 - RNA, 19 nt, Artificial Sequence
  Description of Artificial Sequence: Synthetic oligonucleotide
aacaucugcaguuuugggc

SEQ ID NO: 1491210 - RNA, 19 nt, Artificial Sequence
  Description of Artificial Sequence: Synthetic oligonucleotide
accacuuccaauuagacag

SEQ ID NO: 1491211 - RNA, 19 nt, Artificial Sequence
  Description of Artificial Sequence: Synthetic oligonucleotide
uauaaagcuguaaauaucu

SEQ ID NO: 1491212 - RNA, 19 nt, Artificial Sequence
  Description of Artificial Sequence: Synthetic oligonucleotide
aauuaccucguucauucgc

SEQ ID NO: 1491213 - RNA, 19 nt, Artificial Sequence
  Description of Artificial Sequence: Synthetic oligonucleotide
aaaucuucccacuugucuc

SEQ ID NO: 1491214 - RNA, 19 nt, Artificial Sequence
  Description of Artificial Sequence: Synthetic oligonucleotide
acaauuaccucguucauuc

SEQ ID NO: 1491215 - RNA, 19 nt, Artificial Sequence
  Description of Artificial Sequence: Synthetic oligonucleotide
uuuugaacaucuuugguug

SEQ ID NO: 1491216 - RNA, 19 nt, Artificial Sequence
  Description of Artificial Sequence: Synthetic oligonucleotide
aaggcaauugguaacagac

SEQ ID NO: 1491217 - RNA, 19 nt, Artificial Sequence
  Description of Artificial Sequence: Synthetic oligonucleotide
uaaguuuuggauauaugug

SEQ ID NO: 1491218 - RNA, 19 nt, Artificial Sequence
  Description of Artificial Sequence: Synthetic oligonucleotide
ucuguuaucagaucgcagc

SEQ ID NO: 1491219 - RNA, 19 nt, Artificial Sequence
  Description of Artificial Sequence: Synthetic oligonucleotide
gaaugcauacgauaucugg

SEQ ID NO: 1491220 - RNA, 19 nt, Artificial Sequence
  Description of Artificial Sequence: Synthetic oligonucleotide
auauauguggcguagagaa

SEQ ID NO: 1491221 - RNA, 19 nt, Artificial Sequence
  Description of Artificial Sequence: Synthetic oligonucleotide
uucauuagccauaaagagc

SEQ ID NO: 1491222 - RNA, 19 nt, Artificial Sequence
  Description of Artificial Sequence: Synthetic oligonucleotide
aaugugcucacucgagagc

SEQ ID NO: 1491223 - RNA, 19 nt, Artificial Sequence
  Description of Artificial Sequence: Synthetic oligonucleotide
uucuucaaauccaacacgc

SEQ ID NO: 1491224 - RNA, 19 nt, Artificial Sequence
  Description of Artificial Sequence: Synthetic oligonucleotide
aaagguuuguuuccaacug

SEQ ID NO: 1491225 - RNA, 19 nt, Artificial Sequence
  Description of Artificial Sequence: Synthetic oligonucleotide
uguaaauaucuaaagacuu

SEQ ID NO: 1491226 - RNA, 19 nt, Artificial Sequence
  Description of Artificial Sequence: Synthetic oligonucleotide
acaaagcucagacagcaac

SEQ ID NO: 1491227 - RNA, 19 nt, Artificial Sequence
  Description of Artificial Sequence: Synthetic oligonucleotide
auuauugacuccucuggac

SEQ ID NO: 1491228 - RNA, 19 nt, Artificial Sequence
  Description of Artificial Sequence: Synthetic oligonucleotide
uguaucuggcccaaugggg

SEQ ID NO: 1491229 - RNA, 19 nt, Artificial Sequence
  Description of Artificial Sequence: Synthetic oligonucleotide
ucuaucuuguaugacacag

SEQ ID NO: 1491230 - RNA, 19 nt, Artificial Sequence
  Description of Artificial Sequence: Synthetic oligonucleotide
auggaaucaguucacuucg

SEQ ID NO: 1491231 - RNA, 19 nt, Artificial Sequence
  Description of Artificial Sequence: Synthetic oligonucleotide
caagugaugcaucauaagc

SEQ ID NO: 1491232 - RNA, 19 nt, Artificial Sequence
  Description of Artificial Sequence: Synthetic oligonucleotide
aauacagagucaaacaggu

SEQ ID NO: 1491233 - RNA, 19 nt, Artificial Sequence
  Description of Artificial Sequence: Synthetic oligonucleotide
uucucauuaacauggcaag

SEQ ID NO: 1491234 - RNA, 19 nt, Artificial Sequence
  Description of Artificial Sequence: Synthetic oligonucleotide
uccauuaagaaauccacaa

SEQ ID NO: 1491235 - RNA, 19 nt, Artificial Sequence
  Description of Artificial Sequence: Synthetic oligonucleotide
ugaccuauuuuccauuaag

SEQ ID NO: 1491236 - RNA, 19 nt, Artificial Sequence
  Description of Artificial Sequence: Synthetic oligonucleotide
acuaucuuguccuuuucuc

SEQ ID NO: 1491237 - RNA, 19 nt, Artificial Sequence
  Description of Artificial Sequence: Synthetic oligonucleotide
ucggauagaaguuauugac

SEQ ID NO: 1491238 - RNA, 19 nt, Artificial Sequence
  Description of Artificial Sequence: Synthetic oligonucleotide
cauuaagaaauccacaaca

SEQ ID NO: 1491239 - RNA, 19 nt, Artificial Sequence
  Description of Artificial Sequence: Synthetic oligonucleotide
uauggaaucaguucacuuc

SEQ ID NO: 1491240 - RNA, 19 nt, Artificial Sequence
  Description of Artificial Sequence: Synthetic oligonucleotide
aucaacgaggccuguaugg

SEQ ID NO: 1491241 - RNA, 19 nt, Artificial Sequence
  Description of Artificial Sequence: Synthetic oligonucleotide
ucugucuuaaguuuuggau

SEQ ID NO: 1491242 - RNA, 19 nt, Artificial Sequence
  Description of Artificial Sequence: Synthetic oligonucleotide
ucauuaacauggcaaguga

SEQ ID NO: 1491243 - RNA, 19 nt, Artificial Sequence
  Description of Artificial Sequence: Synthetic oligonucleotide
aguuuuggauauauguggc

SEQ ID NO: 1491244 - RNA, 19 nt, Artificial Sequence
  Description of Artificial Sequence: Synthetic oligonucleotide
uguaaucacaaugacuucu

SEQ ID NO: 1491245 - RNA, 19 nt, Artificial Sequence
  Description of Artificial Sequence: Synthetic oligonucleotide
uuaauagacgacuucucuc

SEQ ID NO: 1491246 - RNA, 19 nt, Artificial Sequence
  Description of Artificial Sequence: Synthetic oligonucleotide
uuuccaacuggaagcagag

SEQ ID NO: 1491247 - RNA, 19 nt, Artificial Sequence
  Description of Artificial Sequence: Synthetic oligonucleotide
ucgaccaggugucuguugg

SEQ ID NO: 1491248 - RNA, 19 nt, Artificial Sequence
  Description of Artificial Sequence: Synthetic oligonucleotide
uccacaaccucauguaaag

SEQ ID NO: 1491249 - RNA, 19 nt, Artificial Sequence
  Description of Artificial Sequence: Synthetic oligonucleotide
uguaaagcaacaucuguua

SEQ ID NO: 1491250 - RNA, 19 nt, Artificial Sequence
  Description of Artificial Sequence: Synthetic oligonucleotide
ucaacuucgaccagguguc

SEQ ID NO: 1491251 - RNA, 19 nt, Artificial Sequence
  Description of Artificial Sequence: Synthetic oligonucleotide
aagugaugcaucauaagcu

SEQ ID NO: 1491252 - RNA, 19 nt, Artificial Sequence
  Description of Artificial Sequence: Synthetic oligonucleotide
ugugcaaagugccuuuuga

SEQ ID NO: 1491253 - RNA, 19 nt, Artificial Sequence
  Description of Artificial Sequence: Synthetic oligonucleotide
ugucuuaaguuuuggauau

SEQ ID NO: 1491254 - RNA, 19 nt, Artificial Sequence
  Description of Artificial Sequence: Synthetic oligonucleotide
ucacuucccacaauuaccu

SEQ ID NO: 1491255 - RNA, 19 nt, Artificial Sequence
  Description of Artificial Sequence: Synthetic oligonucleotide
ugcaucauaagcucugaac

SEQ ID NO: 1491256 - RNA, 19 nt, Artificial Sequence
  Description of Artificial Sequence: Synthetic oligonucleotide
uauggaaguguauccuagg

SEQ ID NO: 1491257 - RNA, 19 nt, Artificial Sequence
  Description of Artificial Sequence: Synthetic oligonucleotide
agcuguaaauaucuaaaga

SEQ ID NO: 1491258 - RNA, 19 nt, Artificial Sequence
  Description of Artificial Sequence: Synthetic oligonucleotide
aauggggcugucaacuucg

SEQ ID NO: 1491259 - RNA, 19 nt, Artificial Sequence
  Description of Artificial Sequence: Synthetic oligonucleotide
gcggguaccaaauuaaagg

SEQ ID NO: 1491260 - RNA, 19 nt, Artificial Sequence
  Description of Artificial Sequence: Synthetic oligonucleotide
aaugcauacgauaucuggu

SEQ ID NO: 1491261 - RNA, 19 nt, Artificial Sequence
  Description of Artificial Sequence: Synthetic oligonucleotide
ggauuauugacuccucugg

SEQ ID NO: 1491262 - RNA, 19 nt, Artificial Sequence
  Description of Artificial Sequence: Synthetic oligonucleotide
ugaugcaucauaagcucug

SEQ ID NO: 1491263 - RNA, 19 nt, Artificial Sequence
  Description of Artificial Sequence: Synthetic oligonucleotide
ggaaguguauccuagggug

SEQ ID NO: 1491264 - RNA, 19 nt, Artificial Sequence
  Description of Artificial Sequence: Synthetic oligonucleotide
uguggcguagagaaucugc

SEQ ID NO: 1491265 - RNA, 19 nt, Artificial Sequence
  Description of Artificial Sequence: Synthetic oligonucleotide
ucuuacuagguauggaauc

SEQ ID NO: 1491266 - RNA, 19 nt, Artificial Sequence
  Description of Artificial Sequence: Synthetic oligonucleotide
uucggauagaaguuauuga

SEQ ID NO: 1491267 - RNA, 19 nt, Artificial Sequence
  Description of Artificial Sequence: Synthetic oligonucleotide
uggauuauugacuccucug

SEQ ID NO: 1491268 - RNA, 19 nt, Artificial Sequence
  Description of Artificial Sequence: Synthetic oligonucleotide
gauggaucccuuaaugacc

SEQ ID NO: 1491269 - RNA, 19 nt, Artificial Sequence
  Description of Artificial Sequence: Synthetic oligonucleotide
ugauggguggauuauugac

SEQ ID NO: 1491270 - RNA, 19 nt, Artificial Sequence
  Description of Artificial Sequence: Synthetic oligonucleotide
caacuuguguaucuggccc

SEQ ID NO: 1491271 - RNA, 19 nt, Artificial Sequence
  Description of Artificial Sequence: Synthetic oligonucleotide
aaucugggcugaugggugg

SEQ ID NO: 1491272 - RNA, 19 nt, Artificial Sequence
  Description of Artificial Sequence: Synthetic oligonucleotide
agagucaaacaggugggcc

SEQ ID NO: 1491273 - RNA, 19 nt, Artificial Sequence
  Description of Artificial Sequence: Synthetic oligonucleotide
caauugguaacagacacuc

SEQ ID NO: 1491274 - RNA, 19 nt, Artificial Sequence
  Description of Artificial Sequence: Synthetic oligonucleotide
accuauuuuccauuaagaa

SEQ ID NO: 1491275 - RNA, 19 nt, Artificial Sequence
  Description of Artificial Sequence: Synthetic oligonucleotide
ucugaccacuuccaauuag

SEQ ID NO: 1491276 - RNA, 19 nt, Artificial Sequence
  Description of Artificial Sequence: Synthetic oligonucleotide
caggaugagccaaugacug

SEQ ID NO: 1491277 - RNA, 19 nt, Artificial Sequence
  Description of Artificial Sequence: Synthetic oligonucleotide
agagcagagucccucuuuc

SEQ ID NO: 1491278 - RNA, 19 nt, Artificial Sequence
  Description of Artificial Sequence: Synthetic oligonucleotide
uuauugaccuauuuuccau

SEQ ID NO: 1491279 - RNA, 19 nt, Artificial Sequence
  Description of Artificial Sequence: Synthetic oligonucleotide
cuaucuuguaugacacagg

SEQ ID NO: 1491280 - RNA, 19 nt, Artificial Sequence
  Description of Artificial Sequence: Synthetic oligonucleotide
uggaaguguauccuagggu

SEQ ID NO: 1491281 - RNA, 19 nt, Artificial Sequence
  Description of Artificial Sequence: Synthetic oligonucleotide
cuucggauagaaguuauug

SEQ ID NO: 1491282 - RNA, 19 nt, Artificial Sequence
  Description of Artificial Sequence: Synthetic oligonucleotide
caugaguuggucacuuccc

SEQ ID NO: 1491283 - RNA, 19 nt, Artificial Sequence
  Description of Artificial Sequence: Synthetic oligonucleotide
caauccucugaccacuucc

SEQ ID NO: 1491284 - RNA, 19 nt, Artificial Sequence
  Description of Artificial Sequence: Synthetic oligonucleotide
guuaucagaucgcagcuca

SEQ ID NO: 1491285 - RNA, 19 nt, Artificial Sequence
  Description of Artificial Sequence: Synthetic oligonucleotide
uucacuucggauagaaguu

SEQ ID NO: 1491286 - RNA, 19 nt, Artificial Sequence
  Description of Artificial Sequence: Synthetic oligonucleotide
aagucaagucugucauccg

SEQ ID NO: 1491287 - RNA, 19 nt, Artificial Sequence
  Description of Artificial Sequence: Synthetic oligonucleotide
acguuguugcagaugacgc

SEQ ID NO: 1491288 - RNA, 19 nt, Artificial Sequence
  Description of Artificial Sequence: Synthetic oligonucleotide
cucauuaacauggcaagug

SEQ ID NO: 1491289 - RNA, 19 nt, Artificial Sequence
  Description of Artificial Sequence: Synthetic oligonucleotide
guuuucuuacuagguaugg

SEQ ID NO: 1491290 - RNA, 19 nt, Artificial Sequence
  Description of Artificial Sequence: Synthetic oligonucleotide
aauagacgacuucucucca

SEQ ID NO: 1491291 - RNA, 19 nt, Artificial Sequence
  Description of Artificial Sequence: Synthetic oligonucleotide
gauuauugacuccucugga

SEQ ID NO: 1491292 - RNA, 19 nt, Artificial Sequence
  Description of Artificial Sequence: Synthetic oligonucleotide
acgauaucugguuucauuu

SEQ ID NO: 1491293 - RNA, 19 nt, Artificial Sequence
  Description of Artificial Sequence: Synthetic oligonucleotide
cucaagcagguucagcggg

SEQ ID NO: 1491294 - RNA, 19 nt, Artificial Sequence
  Description of Artificial Sequence: Synthetic oligonucleotide
uuggauauauguggcguag

SEQ ID NO: 1491295 - RNA, 19 nt, Artificial Sequence
  Description of Artificial Sequence: Synthetic oligonucleotide
auucgcuuagcuuuggcuu

SEQ ID NO: 1491296 - RNA, 19 nt, Artificial Sequence
  Description of Artificial Sequence: Synthetic oligonucleotide
ugacugagcccuuaauaga

SEQ ID NO: 1491297 - RNA, 19 nt, Artificial Sequence
  Description of Artificial Sequence: Synthetic oligonucleotide
aggauggaucccuuaauga

SEQ ID NO: 1491298 - RNA, 19 nt, Artificial Sequence
  Description of Artificial Sequence: Synthetic oligonucleotide
cuugaaaggcauuccagca

SEQ ID NO: 1491299 - RNA, 19 nt, Artificial Sequence
  Description of Artificial Sequence: Synthetic oligonucleotide
ucuucaaauccaacacgcu

SEQ ID NO: 1491300 - RNA, 19 nt, Artificial Sequence
  Description of Artificial Sequence: Synthetic oligonucleotide
aacugguucuauacuaucu

SEQ ID NO: 1491301 - RNA, 19 nt, Artificial Sequence
  Description of Artificial Sequence: Synthetic oligonucleotide
agaugggcaucaacgaggc

SEQ ID NO: 1491302 - RNA, 19 nt, Artificial Sequence
  Description of Artificial Sequence: Synthetic oligonucleotide
aacgaggccuguauggaag

SEQ ID NO: 1491303 - RNA, 19 nt, Artificial Sequence
  Description of Artificial Sequence: Synthetic oligonucleotide
gcaguuuugggcccaaagg

SEQ ID NO: 1491304 - RNA, 19 nt, Artificial Sequence
  Description of Artificial Sequence: Synthetic oligonucleotide
uucuuccacgaugacagag

SEQ ID NO: 1491305 - RNA, 19 nt, Artificial Sequence
  Description of Artificial Sequence: Synthetic oligonucleotide
gaaugcuggaagucaaguc

SEQ ID NO: 1491306 - RNA, 19 nt, Artificial Sequence
  Description of Artificial Sequence: Synthetic oligonucleotide
ugguuguaaucacaaugac

SEQ ID NO: 1491307 - RNA, 19 nt, Artificial Sequence
  Description of Artificial Sequence: Synthetic oligonucleotide
ucacucgagagcagagucc

SEQ ID NO: 1491308 - RNA, 19 nt, Artificial Sequence
  Description of Artificial Sequence: Synthetic oligonucleotide
agucaagucugucauccga

SEQ ID NO: 1491309 - RNA, 19 nt, Artificial Sequence
  Description of Artificial Sequence: Synthetic oligonucleotide
uucagcggguaccaaauua

SEQ ID NO: 1491310 - RNA, 19 nt, Artificial Sequence
  Description of Artificial Sequence: Synthetic oligonucleotide
uguauggaaguguauccua

SEQ ID NO: 1491311 - RNA, 19 nt, Artificial Sequence
  Description of Artificial Sequence: Synthetic oligonucleotide
uugguaacagacacucuau

SEQ ID NO: 1491312 - RNA, 19 nt, Artificial Sequence
  Description of Artificial Sequence: Synthetic oligonucleotide
gucaacuucgaccaggugu

SEQ ID NO: 1491313 - RNA, 19 nt, Artificial Sequence
  Description of Artificial Sequence: Synthetic oligonucleotide
gacugagcccuuaauagac

SEQ ID NO: 1491314 - RNA, 19 nt, Artificial Sequence
  Description of Artificial Sequence: Synthetic oligonucleotide
uuuucuuacuagguaugga

SEQ ID NO: 1491315 - RNA, 19 nt, Artificial Sequence
  Description of Artificial Sequence: Synthetic oligonucleotide
uuguaugacacaggaugag

SEQ ID NO: 1491316 - RNA, 19 nt, Artificial Sequence
  Description of Artificial Sequence: Synthetic oligonucleotide
ggggcugucaacuucgacc

SEQ ID NO: 1491317 - RNA, 19 nt, Artificial Sequence
  Description of Artificial Sequence: Synthetic oligonucleotide
cugguucuauacuaucuug

SEQ ID NO: 1491318 - RNA, 19 nt, Artificial Sequence
  Description of Artificial Sequence: Synthetic oligonucleotide
uauugacuccucuggacaa

SEQ ID NO: 1491319 - RNA, 19 nt, Artificial Sequence
  Description of Artificial Sequence: Synthetic oligonucleotide
ggauauauguggcguagag

SEQ ID NO: 1491320 - RNA, 19 nt, Artificial Sequence
  Description of Artificial Sequence: Synthetic oligonucleotide
cuguaaauaucuaaagacu

SEQ ID NO: 1491321 - RNA, 19 nt, Artificial Sequence
  Description of Artificial Sequence: Synthetic oligonucleotide
ugguuucauuuucaucuug

SEQ ID NO: 1491322 - RNA, 19 nt, Artificial Sequence
  Description of Artificial Sequence: Synthetic oligonucleotide
aucagaucgcagcucagga

SEQ ID NO: 1491323 - RNA, 19 nt, Artificial Sequence
  Description of Artificial Sequence: Synthetic oligonucleotide
guuuugggcccaaaggaag

SEQ ID NO: 1491324 - RNA, 19 nt, Artificial Sequence
  Description of Artificial Sequence: Synthetic oligonucleotide
uauguggcguagagaaucu

SEQ ID NO: 1491325 - RNA, 19 nt, Artificial Sequence
  Description of Artificial Sequence: Synthetic oligonucleotide
cauaaggagccaaggucag

SEQ ID NO: 1491326 - RNA, 19 nt, Artificial Sequence
  Description of Artificial Sequence: Synthetic oligonucleotide
ucuggacaaagcucagaca

SEQ ID NO: 1491327 - RNA, 19 nt, Artificial Sequence
  Description of Artificial Sequence: Synthetic oligonucleotide
uacuagguauggaaucagu

SEQ ID NO: 1491328 - RNA, 19 nt, Artificial Sequence
  Description of Artificial Sequence: Synthetic oligonucleotide
uuaucagaucgcagcucag

SEQ ID NO: 1491329 - RNA, 19 nt, Artificial Sequence
  Description of Artificial Sequence: Synthetic oligonucleotide
ggauggaucccuuaaugac

SEQ ID NO: 1491330 - RNA, 19 nt, Artificial Sequence
  Description of Artificial Sequence: Synthetic oligonucleotide
gaaguguauccuagggugc

SEQ ID NO: 1491331 - RNA, 19 nt, Artificial Sequence
  Description of Artificial Sequence: Synthetic oligonucleotide
gauauauguggcguagaga

SEQ ID NO: 1491332 - RNA, 19 nt, Artificial Sequence
  Description of Artificial Sequence: Synthetic oligonucleotide
acugguucuauacuaucuu

SEQ ID NO: 1491333 - RNA, 19 nt, Artificial Sequence
  Description of Artificial Sequence: Synthetic oligonucleotide
gaguuggucacuucccaca

SEQ ID NO: 1491334 - RNA, 19 nt, Artificial Sequence
  Description of Artificial Sequence: Synthetic oligonucleotide
guaucuggcccaauggggc

SEQ ID NO: 1491335 - RNA, 19 nt, Artificial Sequence
  Description of Artificial Sequence: Synthetic oligonucleotide
cucacucgagagcagaguc

SEQ ID NO: 1491336 - RNA, 19 nt, Artificial Sequence
  Description of Artificial Sequence: Synthetic oligonucleotide
gaccacuuccaauuagaca

SEQ ID NO: 1491337 - RNA, 19 nt, Artificial Sequence
  Description of Artificial Sequence: Synthetic oligonucleotide
auugaccuauuuuccauua

SEQ ID NO: 1491338 - RNA, 19 nt, Artificial Sequence
  Description of Artificial Sequence: Synthetic oligonucleotide
cacuccaaugaagucacgc

SEQ ID NO: 1491339 - RNA, 19 nt, Artificial Sequence
  Description of Artificial Sequence: Synthetic oligonucleotide
caaucugggcugaugggug

SEQ ID NO: 1491340 - RNA, 19 nt, Artificial Sequence
  Description of Artificial Sequence: Synthetic oligonucleotide
cugucuuaaguuuuggaua

SEQ ID NO: 1491341 - RNA, 19 nt, Artificial Sequence
  Description of Artificial Sequence: Synthetic oligonucleotide
uauugaccuauuuuccauu

SEQ ID NO: 1491342 - RNA, 19 nt, Artificial Sequence
  Description of Artificial Sequence: Synthetic oligonucleotide
ugcucacucgagagcagag

SEQ ID NO: 1491343 - RNA, 19 nt, Artificial Sequence
  Description of Artificial Sequence: Synthetic oligonucleotide
uucgcuuagcuuuggcuuc

SEQ ID NO: 1491344 - RNA, 19 nt, Artificial Sequence
  Description of Artificial Sequence: Synthetic oligonucleotide
uggcguagagaaucugcag

SEQ ID NO: 1491345 - RNA, 19 nt, Artificial Sequence
  Description of Artificial Sequence: Synthetic oligonucleotide
augcauacgauaucugguu

SEQ ID NO: 1491346 - RNA, 19 nt, Artificial Sequence
  Description of Artificial Sequence: Synthetic oligonucleotide
cuuacuagguauggaauca

SEQ ID NO: 1491347 - RNA, 19 nt, Artificial Sequence
  Description of Artificial Sequence: Synthetic oligonucleotide
gaacugguucuauacuauc

SEQ ID NO: 1491348 - RNA, 19 nt, Artificial Sequence
  Description of Artificial Sequence: Synthetic oligonucleotide
ucauucgcuuagcuuuggc

SEQ ID NO: 1491349 - RNA, 19 nt, Artificial Sequence
  Description of Artificial Sequence: Synthetic oligonucleotide
ugaguuggucacuucccac

SEQ ID NO: 1491350 - RNA, 19 nt, Artificial Sequence
  Description of Artificial Sequence: Synthetic oligonucleotide
augaguuggucacuuccca

SEQ ID NO: 1491351 - RNA, 19 nt, Artificial Sequence
  Description of Artificial Sequence: Synthetic oligonucleotide
ggauagaaguuauugaccu

SEQ ID NO: 1491352 - RNA, 19 nt, Artificial Sequence
  Description of Artificial Sequence: Synthetic oligonucleotide
acuucgaccaggugucugu

SEQ ID NO: 1491353 - RNA, 19 nt, Artificial Sequence
  Description of Artificial Sequence: Synthetic oligonucleotide
ccuguauggaaguguaucc

SEQ ID NO: 1491354 - RNA, 19 nt, Artificial Sequence
  Description of Artificial Sequence: Synthetic oligonucleotide
auagcagcgcaccugugau

SEQ ID NO: 1491355 - RNA, 19 nt, Artificial Sequence
  Description of Artificial Sequence: Synthetic oligonucleotide
uaccaaauuaaagguuugu

SEQ ID NO: 1491356 - RNA, 19 nt, Artificial Sequence
  Description of Artificial Sequence: Synthetic oligonucleotide
gcuucauuagccauaaaga

SEQ ID NO: 1491357 - RNA, 19 nt, Artificial Sequence
  Description of Artificial Sequence: Synthetic oligonucleotide
ucucauuaacauggcaagu

SEQ ID NO: 1491358 - RNA, 19 nt, Artificial Sequence
  Description of Artificial Sequence: Synthetic oligonucleotide
ucaaacaggugggccagcc

SEQ ID NO: 1491359 - RNA, 19 nt, Artificial Sequence
  Description of Artificial Sequence: Synthetic oligonucleotide
aagucacgcugcuccacug

SEQ ID NO: 1491360 - RNA, 19 nt, Artificial Sequence
  Description of Artificial Sequence: Synthetic oligonucleotide
agcaguagagaugggcauc

SEQ ID NO: 1491361 - RNA, 19 nt, Artificial Sequence
  Description of Artificial Sequence: Synthetic oligonucleotide
cacucgagagcagaguccc

SEQ ID NO: 1491362 - RNA, 19 nt, Artificial Sequence
  Description of Artificial Sequence: Synthetic oligonucleotide
ucaagcagguucagcgggu

SEQ ID NO: 1491363 - RNA, 19 nt, Artificial Sequence
  Description of Artificial Sequence: Synthetic oligonucleotide
caauuaccucguucauucg

SEQ ID NO: 1491364 - RNA, 19 nt, Artificial Sequence
  Description of Artificial Sequence: Synthetic oligonucleotide
uauauguggcguagagaau

SEQ ID NO: 1491365 - RNA, 19 nt, Artificial Sequence
  Description of Artificial Sequence: Synthetic oligonucleotide
auuaccucguucauucgcu

SEQ ID NO: 1491366 - RNA, 19 nt, Artificial Sequence
  Description of Artificial Sequence: Synthetic oligonucleotide
augugcucacucgagagca

SEQ ID NO: 1491367 - RNA, 19 nt, Artificial Sequence
  Description of Artificial Sequence: Synthetic oligonucleotide
uuguaaucacaaugacuuc

SEQ ID NO: 1491368 - RNA, 19 nt, Artificial Sequence
  Description of Artificial Sequence: Synthetic oligonucleotide
ugcauacgauaucugguuu

SEQ ID NO: 1491369 - RNA, 19 nt, Artificial Sequence
  Description of Artificial Sequence: Synthetic oligonucleotide
cuuaauagacgacuucucu

SEQ ID NO: 1491370 - RNA, 19 nt, Artificial Sequence
  Description of Artificial Sequence: Synthetic oligonucleotide
ucccacaauuaccucguuc

SEQ ID NO: 1491371 - RNA, 19 nt, Artificial Sequence
  Description of Artificial Sequence: Synthetic oligonucleotide
agguauggaaucaguucac

SEQ ID NO: 1491372 - RNA, 19 nt, Artificial Sequence
  Description of Artificial Sequence: Synthetic oligonucleotide
uuagacaguccuugauguc

SEQ ID NO: 1491373 - RNA, 19 nt, Artificial Sequence
  Description of Artificial Sequence: Synthetic oligonucleotide
uugaccuauuuuccauuaa

SEQ ID NO: 1491374 - RNA, 19 nt, Artificial Sequence
  Description of Artificial Sequence: Synthetic oligonucleotide
agcagcgcaccugugaucu

SEQ ID NO: 1491375 - RNA, 19 nt, Artificial Sequence
  Description of Artificial Sequence: Synthetic oligonucleotide
uccgcucccuucucaauca

SEQ ID NO: 1491376 - RNA, 19 nt, Artificial Sequence
  Description of Artificial Sequence: Synthetic oligonucleotide
auguaaagcaacaucuguu

SEQ ID NO: 1491377 - RNA, 19 nt, Artificial Sequence
  Description of Artificial Sequence: Synthetic oligonucleotide
uccuagggugcuucugcag

SEQ ID NO: 1491378 - RNA, 19 nt, Artificial Sequence
  Description of Artificial Sequence: Synthetic oligonucleotide
gguucuauacuaucuuguc

SEQ ID NO: 1491379 - RNA, 19 nt, Artificial Sequence
  Description of Artificial Sequence: Synthetic oligonucleotide
auggaucccuuaaugacca

SEQ ID NO: 1491380 - RNA, 19 nt, Artificial Sequence
  Description of Artificial Sequence: Synthetic oligonucleotide
ugugcucacucgagagcag

SEQ ID NO: 1491381 - RNA, 19 nt, Artificial Sequence
  Description of Artificial Sequence: Synthetic oligonucleotide
aagugccuuuugaacaucu

SEQ ID NO: 1491382 - RNA, 19 nt, Artificial Sequence
  Description of Artificial Sequence: Synthetic oligonucleotide
auaucugguuucauuuuca

SEQ ID NO: 1491383 - RNA, 19 nt, Artificial Sequence
  Description of Artificial Sequence: Synthetic oligonucleotide
uguauccuagggugcuucu

SEQ ID NO: 1491384 - RNA, 19 nt, Artificial Sequence
  Description of Artificial Sequence: Synthetic oligonucleotide
uucauucgcuuagcuuugg

SEQ ID NO: 1491385 - RNA, 19 nt, Artificial Sequence
  Description of Artificial Sequence: Synthetic oligonucleotide
acacucuaucuuguaugac

SEQ ID NO: 1491386 - RNA, 19 nt, Artificial Sequence
  Description of Artificial Sequence: Synthetic oligonucleotide
aguuggucacuucccacaa

SEQ ID NO: 1491387 - RNA, 19 nt, Artificial Sequence
  Description of Artificial Sequence: Synthetic oligonucleotide
uguggacauagcagcgcac

SEQ ID NO: 1491388 - RNA, 19 nt, Artificial Sequence
  Description of Artificial Sequence: Synthetic oligonucleotide
acugagcccuuaauagacg

SEQ ID NO: 1491389 - RNA, 19 nt, Artificial Sequence
  Description of Artificial Sequence: Synthetic oligonucleotide
aacuucgaccaggugucug

SEQ ID NO: 1491390 - RNA, 19 nt, Artificial Sequence
  Description of Artificial Sequence: Synthetic oligonucleotide
gaaucaguucacuucggau

SEQ ID NO: 1491391 - RNA, 19 nt, Artificial Sequence
  Description of Artificial Sequence: Synthetic oligonucleotide
ccaugaguuggucacuucc

SEQ ID NO: 1491392 - RNA, 19 nt, Artificial Sequence
  Description of Artificial Sequence: Synthetic oligonucleotide
ucguucauucgcuuagcuu

SEQ ID NO: 1491393 - RNA, 19 nt, Artificial Sequence
  Description of Artificial Sequence: Synthetic oligonucleotide
ucuauacuaucuuguccuu

SEQ ID NO: 1491394 - RNA, 19 nt, Artificial Sequence
  Description of Artificial Sequence: Synthetic oligonucleotide
acaaccucauguaaagcaa

SEQ ID NO: 1491395 - RNA, 19 nt, Artificial Sequence
  Description of Artificial Sequence: Synthetic oligonucleotide
cauaagcucugaacagguc

SEQ ID NO: 1491396 - RNA, 19 nt, Artificial Sequence
  Description of Artificial Sequence: Synthetic oligonucleotide
uuccaacuggaagcagagg

SEQ ID NO: 1491397 - RNA, 19 nt, Artificial Sequence
  Description of Artificial Sequence: Synthetic oligonucleotide
agguccacaaccucaugua

SEQ ID NO: 1491398 - RNA, 19 nt, Artificial Sequence
  Description of Artificial Sequence: Synthetic oligonucleotide
gcaucauaaggagccaagg

SEQ ID NO: 1491399 - RNA, 19 nt, Artificial Sequence
  Description of Artificial Sequence: Synthetic oligonucleotide
aguuuugggcccaaaggaa

SEQ ID NO: 1491400 - RNA, 19 nt, Artificial Sequence
  Description of Artificial Sequence: Synthetic oligonucleotide
ccaacuuguguaucuggcc

SEQ ID NO: 1491401 - RNA, 19 nt, Artificial Sequence
  Description of Artificial Sequence: Synthetic oligonucleotide
agucugcuucauuagccau

SEQ ID NO: 1491402 - RNA, 19 nt, Artificial Sequence
  Description of Artificial Sequence: Synthetic oligonucleotide
auagacgacuucucuccaa

SEQ ID NO: 1491403 - RNA, 19 nt, Artificial Sequence
  Description of Artificial Sequence: Synthetic oligonucleotide
cugagcccuuaauagacga

SEQ ID NO: 1491404 - RNA, 19 nt, Artificial Sequence
  Description of Artificial Sequence: Synthetic oligonucleotide
uggguggauuauugacucc

SEQ ID NO: 1491405 - RNA, 19 nt, Artificial Sequence
  Description of Artificial Sequence: Synthetic oligonucleotide
gcugucaacuucgaccagg

SEQ ID NO: 1491406 - RNA, 19 nt, Artificial Sequence
  Description of Artificial Sequence: Synthetic oligonucleotide
gaucccuuaaugaccagcu

SEQ ID NO: 1491407 - RNA, 19 nt, Artificial Sequence
  Description of Artificial Sequence: Synthetic oligonucleotide
aggaugagccaaugacuga

SEQ ID NO: 1491408 - RNA, 19 nt, Artificial Sequence
  Description of Artificial Sequence: Synthetic oligonucleotide
ucacuucggauagaaguua

SEQ ID NO: 1491409 - RNA, 19 nt, Artificial Sequence
  Description of Artificial Sequence: Synthetic oligonucleotide
ccauuaagaaauccacaac

SEQ ID NO: 1491410 - RNA, 19 nt, Artificial Sequence
  Description of Artificial Sequence: Synthetic oligonucleotide
cauacgauaucugguuuca

SEQ ID NO: 1491411 - RNA, 19 nt, Artificial Sequence
  Description of Artificial Sequence: Synthetic oligonucleotide
uggauauauguggcguaga

SEQ ID NO: 1491412 - RNA, 19 nt, Artificial Sequence
  Description of Artificial Sequence: Synthetic oligonucleotide
gcucaagcagguucagcgg

SEQ ID NO: 1491413 - RNA, 19 nt, Artificial Sequence
  Description of Artificial Sequence: Synthetic oligonucleotide
cggauagaaguuauugacc

SEQ ID NO: 1491414 - RNA, 19 nt, Artificial Sequence
  Description of Artificial Sequence: Synthetic oligonucleotide
guucauucgcuuagcuuug

SEQ ID NO: 1491415 - RNA, 19 nt, Artificial Sequence
  Description of Artificial Sequence: Synthetic oligonucleotide
uguucaggacucagaucuc

SEQ ID NO: 1491416 - RNA, 19 nt, Artificial Sequence
  Description of Artificial Sequence: Synthetic oligonucleotide
uucgaccaggugucuguug

SEQ ID NO: 1491417 - RNA, 19 nt, Artificial Sequence
  Description of Artificial Sequence: Synthetic oligonucleotide
uggucacuucccacaauua

SEQ ID NO: 1491418 - RNA, 19 nt, Artificial Sequence
  Description of Artificial Sequence: Synthetic oligonucleotide
agacgacuucucuccaacu

SEQ ID NO: 1491419 - RNA, 19 nt, Artificial Sequence
  Description of Artificial Sequence: Synthetic oligonucleotide
agguucagcggguaccaaa

SEQ ID NO: 1491420 - RNA, 19 nt, Artificial Sequence
  Description of Artificial Sequence: Synthetic oligonucleotide
gauguccgcucccuucuca

SEQ ID NO: 1491421 - RNA, 19 nt, Artificial Sequence
  Description of Artificial Sequence: Synthetic oligonucleotide
caggaaugcauacgauauc

SEQ ID NO: 1491422 - RNA, 19 nt, Artificial Sequence
  Description of Artificial Sequence: Synthetic oligonucleotide
gacgcugcccuggauuuug

SEQ ID NO: 1491423 - RNA, 19 nt, Artificial Sequence
  Description of Artificial Sequence: Synthetic oligonucleotide
uagccauaaagagcagccu

SEQ ID NO: 1491424 - RNA, 19 nt, Artificial Sequence
  Description of Artificial Sequence: Synthetic oligonucleotide
auucugugcaaagugccuu

SEQ ID NO: 1491425 - RNA, 19 nt, Artificial Sequence
  Description of Artificial Sequence: Synthetic oligonucleotide
auccuagggugcuucugca

SEQ ID NO: 1491426 - RNA, 19 nt, Artificial Sequence
  Description of Artificial Sequence: Synthetic oligonucleotide
cugauggguggauuauuga

SEQ ID NO: 1491427 - RNA, 19 nt, Artificial Sequence
  Description of Artificial Sequence: Synthetic oligonucleotide
acauggcaagugaugcauc

SEQ ID NO: 1491428 - RNA, 19 nt, Artificial Sequence
  Description of Artificial Sequence: Synthetic oligonucleotide
gacucagaucuccaugagu

SEQ ID NO: 1491429 - RNA, 19 nt, Artificial Sequence
  Description of Artificial Sequence: Synthetic oligonucleotide
gcugauggguggauuauug

SEQ ID NO: 1491430 - RNA, 19 nt, Artificial Sequence
  Description of Artificial Sequence: Synthetic oligonucleotide
ggaaucaguucacuucgga

SEQ ID NO: 1491431 - RNA, 19 nt, Artificial Sequence
  Description of Artificial Sequence: Synthetic oligonucleotide
acagacacucuaucuugua

SEQ ID NO: 1491432 - RNA, 19 nt, Artificial Sequence
  Description of Artificial Sequence: Synthetic oligonucleotide
acgcucaagcagguucagc

SEQ ID NO: 1491433 - RNA, 19 nt, Artificial Sequence
  Description of Artificial Sequence: Synthetic oligonucleotide
ccuuaauagacgacuucuc

SEQ ID NO: 1491434 - RNA, 19 nt, Artificial Sequence
  Description of Artificial Sequence: Synthetic oligonucleotide
caucuguuaucagaucgca

SEQ ID NO: 1491435 - RNA, 19 nt, Artificial Sequence
  Description of Artificial Sequence: Synthetic oligonucleotide
guggcguagagaaucugca

SEQ ID NO: 1491436 - RNA, 19 nt, Artificial Sequence
  Description of Artificial Sequence: Synthetic oligonucleotide
gagcccuuaauagacgacu

SEQ ID NO: 1491437 - RNA, 19 nt, Artificial Sequence
  Description of Artificial Sequence: Synthetic oligonucleotide
cuagggugcuucugcagga

SEQ ID NO: 1491438 - RNA, 19 nt, Artificial Sequence
  Description of Artificial Sequence: Synthetic oligonucleotide
acgaggccuguauggaagu

SEQ ID NO: 1491439 - RNA, 19 nt, Artificial Sequence
  Description of Artificial Sequence: Synthetic oligonucleotide
aguucaugagaaggcaauu

SEQ ID NO: 1491440 - RNA, 19 nt, Artificial Sequence
  Description of Artificial Sequence: Synthetic oligonucleotide
guaaagcaacaucuguuau

SEQ ID NO: 1491441 - RNA, 19 nt, Artificial Sequence
  Description of Artificial Sequence: Synthetic oligonucleotide
augcaucauaagcucugaa

SEQ ID NO: 1491442 - RNA, 19 nt, Artificial Sequence
  Description of Artificial Sequence: Synthetic oligonucleotide
gaagucacgcugcuccacu

SEQ ID NO: 1491443 - RNA, 19 nt, Artificial Sequence
  Description of Artificial Sequence: Synthetic oligonucleotide
guccgcucccuucucaauc

SEQ ID NO: 1491444 - RNA, 19 nt, Artificial Sequence
  Description of Artificial Sequence: Synthetic oligonucleotide
auaaagcuguaaauaucua

SEQ ID NO: 1491445 - RNA, 19 nt, Artificial Sequence
  Description of Artificial Sequence: Synthetic oligonucleotide
uccaugaguuggucacuuc

SEQ ID NO: 1491446 - RNA, 19 nt, Artificial Sequence
  Description of Artificial Sequence: Synthetic oligonucleotide
uggggcugucaacuucgac

SEQ ID NO: 1491447 - RNA, 19 nt, Artificial Sequence
  Description of Artificial Sequence: Synthetic oligonucleotide
acacgcucaagcagguuca

SEQ ID NO: 1491448 - RNA, 19 nt, Artificial Sequence
  Description of Artificial Sequence: Synthetic oligonucleotide
uuaccucguucauucgcuu

SEQ ID NO: 1491449 - RNA, 19 nt, Artificial Sequence
  Description of Artificial Sequence: Synthetic oligonucleotide
auacagagucaaacaggug

SEQ ID NO: 1491450 - RNA, 19 nt, Artificial Sequence
  Description of Artificial Sequence: Synthetic oligonucleotide
gaugggcaucaacgaggcc

SEQ ID NO: 1491451 - RNA, 19 nt, Artificial Sequence
  Description of Artificial Sequence: Synthetic oligonucleotide
caaagugccuuuugaacau

SEQ ID NO: 1491452 - RNA, 19 nt, Artificial Sequence
  Description of Artificial Sequence: Synthetic oligonucleotide
guggauuauugacuccucu

SEQ ID NO: 1491453 - RNA, 19 nt, Artificial Sequence
  Description of Artificial Sequence: Synthetic oligonucleotide
cuguuaucagaucgcagcu

SEQ ID NO: 1491454 - RNA, 19 nt, Artificial Sequence
  Description of Artificial Sequence: Synthetic oligonucleotide
cagcgcaccugugaucuag

SEQ ID NO: 1491455 - RNA, 19 nt, Artificial Sequence
  Description of Artificial Sequence: Synthetic oligonucleotide
ggaaugcauacgauaucug

SEQ ID NO: 1491456 - RNA, 19 nt, Artificial Sequence
  Description of Artificial Sequence: Synthetic oligonucleotide
auguccgcucccuucucaa

SEQ ID NO: 1491457 - RNA, 19 nt, Artificial Sequence
  Description of Artificial Sequence: Synthetic oligonucleotide
ggcguagagaaucugcagu

SEQ ID NO: 1491458 - RNA, 19 nt, Artificial Sequence
  Description of Artificial Sequence: Synthetic oligonucleotide
ucgcuuagcuuuggcuuca

SEQ ID NO: 1491459 - RNA, 19 nt, Artificial Sequence
  Description of Artificial Sequence: Synthetic oligonucleotide
gccuguauggaaguguauc

SEQ ID NO: 1491460 - RNA, 19 nt, Artificial Sequence
  Description of Artificial Sequence: Synthetic oligonucleotide
guauggaaucaguucacuu

SEQ ID NO: 1491461 - RNA, 19 nt, Artificial Sequence
  Description of Artificial Sequence: Synthetic oligonucleotide
ucacgcugcuccacuguuu

SEQ ID NO: 1491462 - RNA, 19 nt, Artificial Sequence
  Description of Artificial Sequence: Synthetic oligonucleotide
guccacaaccucauguaaa

SEQ ID NO: 1491463 - RNA, 19 nt, Artificial Sequence
  Description of Artificial Sequence: Synthetic oligonucleotide
gaucgcagcucaggaccag

SEQ ID NO: 1491464 - RNA, 19 nt, Artificial Sequence
  Description of Artificial Sequence: Synthetic oligonucleotide
ucaguucacuucggauaga

SEQ ID NO: 1491465 - RNA, 19 nt, Artificial Sequence
  Description of Artificial Sequence: Synthetic oligonucleotide
ucucuccaacuuguguauc

SEQ ID NO: 1491466 - RNA, 19 nt, Artificial Sequence
  Description of Artificial Sequence: Synthetic oligonucleotide
ccaaauuaaagguuuguuu

SEQ ID NO: 1491467 - RNA, 19 nt, Artificial Sequence
  Description of Artificial Sequence: Synthetic oligonucleotide
auugacuccucuggacaaa

SEQ ID NO: 1491468 - RNA, 19 nt, Artificial Sequence
  Description of Artificial Sequence: Synthetic oligonucleotide
agaucgcagcucaggacca

SEQ ID NO: 1491469 - RNA, 19 nt, Artificial Sequence
  Description of Artificial Sequence: Synthetic oligonucleotide
ucugugcaaagugccuuuu

SEQ ID NO: 1491470 - RNA, 19 nt, Artificial Sequence
  Description of Artificial Sequence: Synthetic oligonucleotide
guuggcuuccauguagagu

SEQ ID NO: 1491471 - RNA, 19 nt, Artificial Sequence
  Description of Artificial Sequence: Synthetic oligonucleotide
gcaacaucuguuaucagau

SEQ ID NO: 1491472 - RNA, 19 nt, Artificial Sequence
  Description of Artificial Sequence: Synthetic oligonucleotide
uguccgcucccuucucaau

SEQ ID NO: 1491473 - RNA, 19 nt, Artificial Sequence
  Description of Artificial Sequence: Synthetic oligonucleotide
gugccuuuugaacaucuuu

SEQ ID NO: 1491474 - RNA, 19 nt, Artificial Sequence
  Description of Artificial Sequence: Synthetic oligonucleotide
aucuggcccaauggggcug

SEQ ID NO: 1491475 - RNA, 19 nt, Artificial Sequence
  Description of Artificial Sequence: Synthetic oligonucleotide
agcucaggaccagcacauc

SEQ ID NO: 1491476 - RNA, 19 nt, Artificial Sequence
  Description of Artificial Sequence: Synthetic oligonucleotide
agccaacaucugcaguuuu

SEQ ID NO: 1491477 - RNA, 19 nt, Artificial Sequence
  Description of Artificial Sequence: Synthetic oligonucleotide
agagucccucuuucaugau

SEQ ID NO: 1491478 - RNA, 19 nt, Artificial Sequence
  Description of Artificial Sequence: Synthetic oligonucleotide
agcccuuaauagacgacuu

SEQ ID NO: 1491479 - RNA, 19 nt, Artificial Sequence
  Description of Artificial Sequence: Synthetic oligonucleotide
cagcggguaccaaauuaaa

SEQ ID NO: 1491480 - RNA, 19 nt, Artificial Sequence
  Description of Artificial Sequence: Synthetic oligonucleotide
auacgauaucugguuucau

SEQ ID NO: 1491481 - RNA, 19 nt, Artificial Sequence
  Description of Artificial Sequence: Synthetic oligonucleotide
gcccuuaauagacgacuuc

SEQ ID NO: 1491482 - RNA, 19 nt, Artificial Sequence
  Description of Artificial Sequence: Synthetic oligonucleotide
cguucauucgcuuagcuuu

SEQ ID NO: 1491483 - RNA, 19 nt, Artificial Sequence
  Description of Artificial Sequence: Synthetic oligonucleotide
uagggugcuucugcaggau

SEQ ID NO: 1491484 - RNA, 19 nt, Artificial Sequence
  Description of Artificial Sequence: Synthetic oligonucleotide
ggcccaauggggcugucaa

SEQ ID NO: 1491485 - RNA, 19 nt, Artificial Sequence
  Description of Artificial Sequence: Synthetic oligonucleotide
cagacacucuaucuuguau

SEQ ID NO: 1491486 - RNA, 19 nt, Artificial Sequence
  Description of Artificial Sequence: Synthetic oligonucleotide
acuucggauagaaguuauu

SEQ ID NO: 1491487 - RNA, 19 nt, Artificial Sequence
  Description of Artificial Sequence: Synthetic oligonucleotide
acgcugcccuggauuuugc

SEQ ID NO: 1491488 - RNA, 19 nt, Artificial Sequence
  Description of Artificial Sequence: Synthetic oligonucleotide
cacgcucaagcagguucag

SEQ ID NO: 1491489 - RNA, 19 nt, Artificial Sequence
  Description of Artificial Sequence: Synthetic oligonucleotide
cucguucauucgcuuagcu

SEQ ID NO: 1491490 - RNA, 19 nt, Artificial Sequence
  Description of Artificial Sequence: Synthetic oligonucleotide
uucccacaauuaccucguu

SEQ ID NO: 1491491 - RNA, 19 nt, Artificial Sequence
  Description of Artificial Sequence: Synthetic oligonucleotide
ccauguagagucccaaugu

SEQ ID NO: 1491492 - RNA, 19 nt, Artificial Sequence
  Description of Artificial Sequence: Synthetic oligonucleotide
cacuucggauagaaguuau

SEQ ID NO: 1491493 - RNA, 19 nt, Artificial Sequence
  Description of Artificial Sequence: Synthetic oligonucleotide
gcaaucugggcugaugggu

SEQ ID NO: 1491494 - RNA, 19 nt, Artificial Sequence
  Description of Artificial Sequence: Synthetic oligonucleotide
gguauggaaucaguucacu

SEQ ID NO: 1491495 - RNA, 19 nt, Artificial Sequence
  Description of Artificial Sequence: Synthetic oligonucleotide
ggcuuguucaggacucaga

SEQ ID NO: 1491496 - RNA, 19 nt, Artificial Sequence
  Description of Artificial Sequence: Synthetic oligonucleotide
ggaacugguucuauacuau

SEQ ID NO: 1491497 - RNA, 19 nt, Artificial Sequence
  Description of Artificial Sequence: Synthetic oligonucleotide
cccuuaauagacgacuucu

SEQ ID NO: 1491498 - RNA, 19 nt, Artificial Sequence
  Description of Artificial Sequence: Synthetic oligonucleotide
ggcugucaacuucgaccag

SEQ ID NO: 1491499 - RNA, 19 nt, Artificial Sequence
  Description of Artificial Sequence: Synthetic oligonucleotide
gguaccugccuguuggcuu

SEQ ID NO: 1491500 - RNA, 19 nt, Artificial Sequence
  Description of Artificial Sequence: Synthetic oligonucleotide
gcguagagaaucugcaguu

SEQ ID NO: 1491501 - RNA, 19 nt, Artificial Sequence
  Description of Artificial Sequence: Synthetic oligonucleotide
cacaauuaccucguucauu

SEQ ID NO: 1491502 - RNA, 19 nt, Artificial Sequence
  Description of Artificial Sequence: Synthetic oligonucleotide
cuauacuaucuuguccuuu

SEQ ID NO: 1491503 - RNA, 19 nt, Artificial Sequence
  Description of Artificial Sequence: Synthetic oligonucleotide
gcaauugguaacagacacu

SEQ ID NO: 1491504 - RNA, 19 nt, Artificial Sequence
  Description of Artificial Sequence: Synthetic oligonucleotide
gguucagcggguaccaaau

SEQ ID NO: 1491505 - RNA, 19 nt, Artificial Sequence
  Description of Artificial Sequence: Synthetic oligonucleotide
ccuuaaugaccagcucuuc

SEQ ID NO: 1491506 - RNA, 19 nt, Artificial Sequence
  Description of Artificial Sequence: Synthetic oligonucleotide
ccucguucauucgcuuagc

SEQ ID NO: 1491507 - RNA, 19 nt, Artificial Sequence
  Description of Artificial Sequence: Synthetic oligonucleotide
gcuuccauguagaguccca

SEQ ID NO: 1491508 - RNA, 19 nt, Artificial Sequence
  Description of Artificial Sequence: Synthetic oligonucleotide
gucuuaaguuuuggauaua

SEQ ID NO: 1491509 - RNA, 19 nt, Artificial Sequence
  Description of Artificial Sequence: Synthetic oligonucleotide
gcccaauggggcugucaac

SEQ ID NO: 1491510 - RNA, 19 nt, Artificial Sequence
  Description of Artificial Sequence: Synthetic oligonucleotide
auggggcugucaacuucga

SEQ ID NO: 1491511 - RNA, 19 nt, Artificial Sequence
  Description of Artificial Sequence: Synthetic oligonucleotide
cccaauggggcugucaacu

SEQ ID NO: 1491512 - RNA, 19 nt, Artificial Sequence
  Description of Artificial Sequence: Synthetic oligonucleotide
guucagcggguaccaaauu

SEQ ID NO: 1491513 - RNA, 19 nt, Artificial Sequence
  Description of Artificial Sequence: Synthetic oligonucleotide
cccuuaaugaccagcucuu

SEQ ID NO: 1491514 - RNA, 19 nt, Artificial Sequence
  Description of Artificial Sequence: Synthetic oligonucleotide
cuccaugaguuggucacuu

SEQ ID NO: 1491515 - RNA, 19 nt, Artificial Sequence
  Description of Artificial Sequence: Synthetic oligonucleotide
gcucacucgagagcagagu

SEQ ID NO: 1491516 - RNA, 19 nt, Artificial Sequence
  Description of Artificial Sequence: Synthetic oligonucleotide
gccuguuggcuuccaugua

SEQ ID NO: 1491517 - RNA, 19 nt, Artificial Sequence
  Description of Artificial Sequence: Synthetic oligonucleotide
ccgcucccuucucaaucac

SEQ ID NO: 1491518 - RNA, 19 nt, Artificial Sequence
  Description of Artificial Sequence: Synthetic oligonucleotide
cagguucagcggguaccaa

SEQ ID NO: 1491519 - RNA, 19 nt, Artificial Sequence
  Description of Artificial Sequence: Synthetic oligonucleotide
ccucaggaaugcauacgau

SEQ ID NO: 1491520 - RNA, 19 nt, Artificial Sequence
  Description of Artificial Sequence: Synthetic oligonucleotide
caacuucgaccaggugucu

SEQ ID NO: 1491521 - RNA, 19 nt, Artificial Sequence
  Description of Artificial Sequence: Synthetic oligonucleotide
cuucgaccaggugucuguu

SEQ ID NO: 1491522 - RNA, 19 nt, Artificial Sequence
  Description of Artificial Sequence: Synthetic oligonucleotide
ccaauggggcugucaacuu

SEQ ID NO: 1491523 - RNA, 19 nt, Artificial Sequence
  Description of Artificial Sequence: Synthetic oligonucleotide
ggccuguauggaaguguau

SEQ ID NO: 1491524 - RNA, 19 nt, Artificial Sequence
  Description of Artificial Sequence: Synthetic oligonucleotide
caacacgcucaagcagguu

SEQ ID NO: 1491525 - RNA, 19 nt, Artificial Sequence
  Description of Artificial Sequence: Synthetic oligonucleotide
gcagcgcaccugugaucua

SEQ ID NO: 1491526 - RNA, 19 nt, Artificial Sequence
  Description of Artificial Sequence: Synthetic oligonucleotide
ccugccuguuggcuuccau

SEQ ID NO: 1491527 - RNA, 19 nt, Artificial Sequence
  Description of Artificial Sequence: Synthetic oligonucleotide
cgcuuagcuuuggcuucaa

SEQ ID NO: 1491528 - RNA, 19 nt, Artificial Sequence
  Description of Artificial Sequence: Synthetic oligonucleotide
aauagcaucuccuggaugc

SEQ ID NO: 1491529 - RNA, 19 nt, Artificial Sequence
  Description of Artificial Sequence: Synthetic oligonucleotide
uccaacucaaacuugaugg

SEQ ID NO: 1491530 - RNA, 19 nt, Artificial Sequence
  Description of Artificial Sequence: Synthetic oligonucleotide
ucuaacaugcuccaagcag

SEQ ID NO: 1491531 - RNA, 19 nt, Artificial Sequence
  Description of Artificial Sequence: Synthetic oligonucleotide
agcauggacacacugaggg

SEQ ID NO: 1491532 - RNA, 19 nt, Artificial Sequence
  Description of Artificial Sequence: Synthetic oligonucleotide
gauauacucauccugcggc

SEQ ID NO: 1491533 - RNA, 19 nt, Artificial Sequence
  Description of Artificial Sequence: Synthetic oligonucleotide
acgaagaacucaaagaggc

SEQ ID NO: 1491534 - RNA, 19 nt, Artificial Sequence
  Description of Artificial Sequence: Synthetic oligonucleotide
gauggcaucauacugguca

SEQ ID NO: 1491535 - RNA, 19 nt, Artificial Sequence
  Description of Artificial Sequence: Synthetic oligonucleotide
gaagaacucaaagaggcgg

SEQ ID NO: 1491536 - RNA, 19 nt, Artificial Sequence
  Description of Artificial Sequence: Synthetic oligonucleotide
uagaacgaagaacucaaag

SEQ ID NO: 1491537 - RNA, 19 nt, Artificial Sequence
  Description of Artificial Sequence: Synthetic oligonucleotide
ugguacaaguagaagaacc

SEQ ID NO: 1491538 - RNA, 19 nt, Artificial Sequence
  Description of Artificial Sequence: Synthetic oligonucleotide
agaguuguuguugaggucg

SEQ ID NO: 1491539 - RNA, 19 nt, Artificial Sequence
  Description of Artificial Sequence: Synthetic oligonucleotide
aguauuccacgauauacuc

SEQ ID NO: 1491540 - RNA, 19 nt, Artificial Sequence
  Description of Artificial Sequence: Synthetic oligonucleotide
auacuggucagccagccac

SEQ ID NO: 1491541 - RNA, 19 nt, Artificial Sequence
  Description of Artificial Sequence: Synthetic oligonucleotide
agaacgaagaacucaaaga

SEQ ID NO: 1491542 - RNA, 19 nt, Artificial Sequence
  Description of Artificial Sequence: Synthetic oligonucleotide
uacaaguagaagaaccuca

SEQ ID NO: 1491543 - RNA, 19 nt, Artificial Sequence
  Description of Artificial Sequence: Synthetic oligonucleotide
uguacugcccguugaagcg

SEQ ID NO: 1491544 - RNA, 19 nt, Artificial Sequence
  Description of Artificial Sequence: Synthetic oligonucleotide
cuagauaagaugugcgugc

SEQ ID NO: 1491545 - RNA, 19 nt, Artificial Sequence
  Description of Artificial Sequence: Synthetic oligonucleotide
gaaugcuggaugaagagcc

SEQ ID NO: 1491546 - RNA, 19 nt, Artificial Sequence
  Description of Artificial Sequence: Synthetic oligonucleotide
acgaagaguacaaacaggg

SEQ ID NO: 1491547 - RNA, 19 nt, Artificial Sequence
  Description of Artificial Sequence: Synthetic oligonucleotide
uguagcagguccacgauga

SEQ ID NO: 1491548 - RNA, 19 nt, Artificial Sequence
  Description of Artificial Sequence: Synthetic oligonucleotide
gacaaaggcggcuagauaa

SEQ ID NO: 1491549 - RNA, 19 nt, Artificial Sequence
  Description of Artificial Sequence: Synthetic oligonucleotide
auauacucauccugcggcc

SEQ ID NO: 1491550 - RNA, 19 nt, Artificial Sequence
  Description of Artificial Sequence: Synthetic oligonucleotide
aagagcgcguggaagagcc

SEQ ID NO: 1491551 - RNA, 19 nt, Artificial Sequence
  Description of Artificial Sequence: Synthetic oligonucleotide
cacgauauacucauccugc

SEQ ID NO: 1491552 - RNA, 19 nt, Artificial Sequence
  Description of Artificial Sequence: Synthetic oligonucleotide
aaacucguccagcaacagg

SEQ ID NO: 1491553 - RNA, 19 nt, Artificial Sequence
  Description of Artificial Sequence: Synthetic oligonucleotide
ugaccaugaugacaaaggc

SEQ ID NO: 1491554 - RNA, 19 nt, Artificial Sequence
  Description of Artificial Sequence: Synthetic oligonucleotide
aaggcggcuagauaagaug

SEQ ID NO: 1491555 - RNA, 19 nt, Artificial Sequence
  Description of Artificial Sequence: Synthetic oligonucleotide
uacgccagcacgaagagua

SEQ ID NO: 1491556 - RNA, 19 nt, Artificial Sequence
  Description of Artificial Sequence: Synthetic oligonucleotide
aaagcgguccccgaagcac

SEQ ID NO: 1491557 - RNA, 19 nt, Artificial Sequence
  Description of Artificial Sequence: Synthetic oligonucleotide
gauggcuuccauuccgacg

SEQ ID NO: 1491558 - RNA, 19 nt, Artificial Sequence
  Description of Artificial Sequence: Synthetic oligonucleotide
ucucuaacaugcuccaagc

SEQ ID NO: 1491559 - RNA, 19 nt, Artificial Sequence
  Description of Artificial Sequence: Synthetic oligonucleotide
guggauguacgccagcacg

SEQ ID NO: 1491560 - RNA, 19 nt, Artificial Sequence
  Description of Artificial Sequence: Synthetic oligonucleotide
uggccggcaacucauagug

SEQ ID NO: 1491561 - RNA, 19 nt, Artificial Sequence
  Description of Artificial Sequence: Synthetic oligonucleotide
uaagaugugcgugccaucc

SEQ ID NO: 1491562 - RNA, 19 nt, Artificial Sequence
  Description of Artificial Sequence: Synthetic oligonucleotide
cuugaguagaacgaagaac

SEQ ID NO: 1491563 - RNA, 19 nt, Artificial Sequence
  Description of Artificial Sequence: Synthetic oligonucleotide
aacucauagugguggaaga

SEQ ID NO: 1491564 - RNA, 19 nt, Artificial Sequence
  Description of Artificial Sequence: Synthetic oligonucleotide
agaugugcgugccauccac

SEQ ID NO: 1491565 - RNA, 19 nt, Artificial Sequence
  Description of Artificial Sequence: Synthetic oligonucleotide
uuccauuccgacgagggcc

SEQ ID NO: 1491566 - RNA, 19 nt, Artificial Sequence
  Description of Artificial Sequence: Synthetic oligonucleotide
gugcgugccauccacaugc

SEQ ID NO: 1491567 - RNA, 19 nt, Artificial Sequence
  Description of Artificial Sequence: Synthetic oligonucleotide
ucugguggugcgaguagcg

SEQ ID NO: 1491568 - RNA, 19 nt, Artificial Sequence
  Description of Artificial Sequence: Synthetic oligonucleotide
agggugaccaccaugacug

SEQ ID NO: 1491569 - RNA, 19 nt, Artificial Sequence
  Description of Artificial Sequence: Synthetic oligonucleotide
cacgaagaguacaaacagg

SEQ ID NO: 1491570 - RNA, 19 nt, Artificial Sequence
  Description of Artificial Sequence: Synthetic oligonucleotide
acgauauacucauccugcg

SEQ ID NO: 1491571 - RNA, 19 nt, Artificial Sequence
  Description of Artificial Sequence: Synthetic oligonucleotide
guugaagcgguagugguag

SEQ ID NO: 1491572 - RNA, 19 nt, Artificial Sequence
  Description of Artificial Sequence: Synthetic oligonucleotide
gacaaagcgguagugcucc

SEQ ID NO: 1491573 - RNA, 19 nt, Artificial Sequence
  Description of Artificial Sequence: Synthetic oligonucleotide
ugaugggcgaccgagagaa

SEQ ID NO: 1491574 - RNA, 19 nt, Artificial Sequence
  Description of Artificial Sequence: Synthetic oligonucleotide
accgagagaagacaaugug

SEQ ID NO: 1491575 - RNA, 19 nt, Artificial Sequence
  Description of Artificial Sequence: Synthetic oligonucleotide
uccaagcaguugaugggcg

SEQ ID NO: 1491576 - RNA, 19 nt, Artificial Sequence
  Description of Artificial Sequence: Synthetic oligonucleotide
uagaucauggaaugcugga

SEQ ID NO: 1491577 - RNA, 19 nt, Artificial Sequence
  Description of Artificial Sequence: Synthetic oligonucleotide
acgaagaucugguggugcg

SEQ ID NO: 1491578 - RNA, 19 nt, Artificial Sequence
  Description of Artificial Sequence: Synthetic oligonucleotide
uguacgccagcacgaagag

SEQ ID NO: 1491579 - RNA, 19 nt, Artificial Sequence
  Description of Artificial Sequence: Synthetic oligonucleotide
guagaucauggaaugcugg

SEQ ID NO: 1491580 - RNA, 19 nt, Artificial Sequence
  Description of Artificial Sequence: Synthetic oligonucleotide
guugaugggcgaccgagag

SEQ ID NO: 1491581 - RNA, 19 nt, Artificial Sequence
  Description of Artificial Sequence: Synthetic oligonucleotide
aacaggcgcgaguagguga

SEQ ID NO: 1491582 - RNA, 19 nt, Artificial Sequence
  Description of Artificial Sequence: Synthetic oligonucleotide
gaagcgguagugguaggcg

SEQ ID NO: 1491583 - RNA, 19 nt, Artificial Sequence
  Description of Artificial Sequence: Synthetic oligonucleotide
gugacagccgcagaaagcc

SEQ ID NO: 1491584 - RNA, 19 nt, Artificial Sequence
  Description of Artificial Sequence: Synthetic oligonucleotide
gacaccacauuccucagaa

SEQ ID NO: 1491585 - RNA, 19 nt, Artificial Sequence
  Description of Artificial Sequence: Synthetic oligonucleotide
ucauccugcggccauacuu

SEQ ID NO: 1491586 - RNA, 19 nt, Artificial Sequence
  Description of Artificial Sequence: Synthetic oligonucleotide
agguccacgaugaagacga

SEQ ID NO: 1491587 - RNA, 19 nt, Artificial Sequence
  Description of Artificial Sequence: Synthetic oligonucleotide
aguagaacgaagaacucaa

SEQ ID NO: 1491588 - RNA, 19 nt, Artificial Sequence
  Description of Artificial Sequence: Synthetic oligonucleotide
uccgacgagggccaagaug

SEQ ID NO: 1491589 - RNA, 19 nt, Artificial Sequence
  Description of Artificial Sequence: Synthetic oligonucleotide
ggcgaagugguacaaguag

SEQ ID NO: 1491590 - RNA, 19 nt, Artificial Sequence
  Description of Artificial Sequence: Synthetic oligonucleotide
aguuguggcgcaccuccac

SEQ ID NO: 1491591 - RNA, 19 nt, Artificial Sequence
  Description of Artificial Sequence: Synthetic oligonucleotide
auaagaugugcgugccauc

SEQ ID NO: 1491592 - RNA, 19 nt, Artificial Sequence
  Description of Artificial Sequence: Synthetic oligonucleotide
uagaaggcgaagugguaca

SEQ ID NO: 1491593 - RNA, 19 nt, Artificial Sequence
  Description of Artificial Sequence: Synthetic oligonucleotide
ugacggucagcaagggugc

SEQ ID NO: 1491594 - RNA, 19 nt, Artificial Sequence
  Description of Artificial Sequence: Synthetic oligonucleotide
uccacgauauacucauccu

SEQ ID NO: 1491595 - RNA, 19 nt, Artificial Sequence
  Description of Artificial Sequence: Synthetic oligonucleotide
cauggaaugcuggaugaag

SEQ ID NO: 1491596 - RNA, 19 nt, Artificial Sequence
  Description of Artificial Sequence: Synthetic oligonucleotide
agcacgaagaguacaaaca

SEQ ID NO: 1491597 - RNA, 19 nt, Artificial Sequence
  Description of Artificial Sequence: Synthetic oligonucleotide
gaaguagaucauggaaugc

SEQ ID NO: 1491598 - RNA, 19 nt, Artificial Sequence
  Description of Artificial Sequence: Synthetic oligonucleotide
gcggccauacuuuuguugg

SEQ ID NO: 1491599 - RNA, 19 nt, Artificial Sequence
  Description of Artificial Sequence: Synthetic oligonucleotide
ucguucagggcaucugugc

SEQ ID NO: 1491600 - RNA, 19 nt, Artificial Sequence
  Description of Artificial Sequence: Synthetic oligonucleotide
ugcggccauacuuuuguug

SEQ ID NO: 1491601 - RNA, 19 nt, Artificial Sequence
  Description of Artificial Sequence: Synthetic oligonucleotide
cacccagcgagccaggccc

SEQ ID NO: 1491602 - RNA, 19 nt, Artificial Sequence
  Description of Artificial Sequence: Synthetic oligonucleotide
uagcccagaaacucgucca

SEQ ID NO: 1491603 - RNA, 19 nt, Artificial Sequence
  Description of Artificial Sequence: Synthetic oligonucleotide
gaguagaacgaagaacuca

SEQ ID NO: 1491604 - RNA, 19 nt, Artificial Sequence
  Description of Artificial Sequence: Synthetic oligonucleotide
gaagcacuggucccgugug

SEQ ID NO: 1491605 - RNA, 19 nt, Artificial Sequence
  Description of Artificial Sequence: Synthetic oligonucleotide
cuaaagcgguccccgaagc

SEQ ID NO: 1491606 - RNA, 19 nt, Artificial Sequence
  Description of Artificial Sequence: Synthetic oligonucleotide
guagaaggcgaagugguac

SEQ ID NO: 1491607 - RNA, 19 nt, Artificial Sequence
  Description of Artificial Sequence: Synthetic oligonucleotide
gaugauguagaaggccgug

SEQ ID NO: 1491608 - RNA, 19 nt, Artificial Sequence
  Description of Artificial Sequence: Synthetic oligonucleotide
gauguacgccagcacgaag

SEQ ID NO: 1491609 - RNA, 19 nt, Artificial Sequence
  Description of Artificial Sequence: Synthetic oligonucleotide
uggccaucggucucuaaca

SEQ ID NO: 1491610 - RNA, 19 nt, Artificial Sequence
  Description of Artificial Sequence: Synthetic oligonucleotide
aguagaucauggaaugcug

SEQ ID NO: 1491611 - RNA, 19 nt, Artificial Sequence
  Description of Artificial Sequence: Synthetic oligonucleotide
ccgagagaagacaaugugg

SEQ ID NO: 1491612 - RNA, 19 nt, Artificial Sequence
  Description of Artificial Sequence: Synthetic oligonucleotide
uaaagcgguccccgaagca

SEQ ID NO: 1491613 - RNA, 19 nt, Artificial Sequence
  Description of Artificial Sequence: Synthetic oligonucleotide
guagugguaggcguagaag

SEQ ID NO: 1491614 - RNA, 19 nt, Artificial Sequence
  Description of Artificial Sequence: Synthetic oligonucleotide
agaacgcccucccguggcc

SEQ ID NO: 1491615 - RNA, 19 nt, Artificial Sequence
  Description of Artificial Sequence: Synthetic oligonucleotide
ugguggugcgaguagcgca

SEQ ID NO: 1491616 - RNA, 19 nt, Artificial Sequence
  Description of Artificial Sequence: Synthetic oligonucleotide
cuaacaugcuccaagcagu

SEQ ID NO: 1491617 - RNA, 19 nt, Artificial Sequence
  Description of Artificial Sequence: Synthetic oligonucleotide
aagaugugcgugccaucca

SEQ ID NO: 1491618 - RNA, 19 nt, Artificial Sequence
  Description of Artificial Sequence: Synthetic oligonucleotide
guggccaucggucucuaac

SEQ ID NO: 1491619 - RNA, 19 nt, Artificial Sequence
  Description of Artificial Sequence: Synthetic oligonucleotide
gaguagcgcagcagcaugg

SEQ ID NO: 1491620 - RNA, 19 nt, Artificial Sequence
  Description of Artificial Sequence: Synthetic oligonucleotide
gacgagggccaagaugacg

SEQ ID NO: 1491621 - RNA, 19 nt, Artificial Sequence
  Description of Artificial Sequence: Synthetic oligonucleotide
agugaguauuccacgauau

SEQ ID NO: 1491622 - RNA, 19 nt, Artificial Sequence
  Description of Artificial Sequence: Synthetic oligonucleotide
auguacgccagcacgaaga

SEQ ID NO: 1491623 - RNA, 19 nt, Artificial Sequence
  Description of Artificial Sequence: Synthetic oligonucleotide
agaaacucguccagcaaca

SEQ ID NO: 1491624 - RNA, 19 nt, Artificial Sequence
  Description of Artificial Sequence: Synthetic oligonucleotide
uaggcguagaaggcgaagu

SEQ ID NO: 1491625 - RNA, 19 nt, Artificial Sequence
  Description of Artificial Sequence: Synthetic oligonucleotide
ugggcgaccgagagaagac

SEQ ID NO: 1491626 - RNA, 19 nt, Artificial Sequence
  Description of Artificial Sequence: Synthetic oligonucleotide
ugaggcggcagcacccagc

SEQ ID NO: 1491627 - RNA, 19 nt, Artificial Sequence
  Description of Artificial Sequence: Synthetic oligonucleotide
caguugaugggcgaccgag

SEQ ID NO: 1491628 - RNA, 19 nt, Artificial Sequence
  Description of Artificial Sequence: Synthetic oligonucleotide
gcuagauaagaugugcgug

SEQ ID NO: 1491629 - RNA, 19 nt, Artificial Sequence
  Description of Artificial Sequence: Synthetic oligonucleotide
gugcgaguagcgcagcagc

SEQ ID NO: 1491630 - RNA, 19 nt, Artificial Sequence
  Description of Artificial Sequence: Synthetic oligonucleotide
gagcgcguggaagagccgg

SEQ ID NO: 1491631 - RNA, 19 nt, Artificial Sequence
  Description of Artificial Sequence: Synthetic oligonucleotide
gagccggucgcgcacguug

SEQ ID NO: 1491632 - RNA, 19 nt, Artificial Sequence
  Description of Artificial Sequence: Synthetic oligonucleotide
cuuccauuccgacgagggc

SEQ ID NO: 1491633 - RNA, 19 nt, Artificial Sequence
  Description of Artificial Sequence: Synthetic oligonucleotide
aggcguagaaggcgaagug

SEQ ID NO: 1491634 - RNA, 19 nt, Artificial Sequence
  Description of Artificial Sequence: Synthetic oligonucleotide
uaacaugcuccaagcaguu

SEQ ID NO: 1491635 - RNA, 19 nt, Artificial Sequence
  Description of Artificial Sequence: Synthetic oligonucleotide
guuguggcgcaccuccacc

SEQ ID NO: 1491636 - RNA, 19 nt, Artificial Sequence
  Description of Artificial Sequence: Synthetic oligonucleotide
ucacacuggacaugaggau

SEQ ID NO: 1491637 - RNA, 19 nt, Artificial Sequence
  Description of Artificial Sequence: Synthetic oligonucleotide
uguugguguggcagcagau

SEQ ID NO: 1491638 - RNA, 19 nt, Artificial Sequence
  Description of Artificial Sequence: Synthetic oligonucleotide
acaggcgcgaguaggugac

SEQ ID NO: 1491639 - RNA, 19 nt, Artificial Sequence
  Description of Artificial Sequence: Synthetic oligonucleotide
gauaagaugugcgugccau

SEQ ID NO: 1491640 - RNA, 19 nt, Artificial Sequence
  Description of Artificial Sequence: Synthetic oligonucleotide
gaguauuccacgauauacu

SEQ ID NO: 1491641 - RNA, 19 nt, Artificial Sequence
  Description of Artificial Sequence: Synthetic oligonucleotide
aaaggcggcuagauaagau

SEQ ID NO: 1491642 - RNA, 19 nt, Artificial Sequence
  Description of Artificial Sequence: Synthetic oligonucleotide
agauaagaugugcgugcca

SEQ ID NO: 1491643 - RNA, 19 nt, Artificial Sequence
  Description of Artificial Sequence: Synthetic oligonucleotide
caauagcaucuccuggaug

SEQ ID NO: 1491644 - RNA, 19 nt, Artificial Sequence
  Description of Artificial Sequence: Synthetic oligonucleotide
aagaucugguggugcgagu

SEQ ID NO: 1491645 - RNA, 19 nt, Artificial Sequence
  Description of Artificial Sequence: Synthetic oligonucleotide
agacaugauggcuuccauu

SEQ ID NO: 1491646 - RNA, 19 nt, Artificial Sequence
  Description of Artificial Sequence: Synthetic oligonucleotide
ugacaaaggcggcuagaua

SEQ ID NO: 1491647 - RNA, 19 nt, Artificial Sequence
  Description of Artificial Sequence: Synthetic oligonucleotide
uugaagcgguagugguagg

SEQ ID NO: 1491648 - RNA, 19 nt, Artificial Sequence
  Description of Artificial Sequence: Synthetic oligonucleotide
caccuccacccgcagaacg

SEQ ID NO: 1491649 - RNA, 19 nt, Artificial Sequence
  Description of Artificial Sequence: Synthetic oligonucleotide
ugcuguacugcccguugaa

SEQ ID NO: 1491650 - RNA, 19 nt, Artificial Sequence
  Description of Artificial Sequence: Synthetic oligonucleotide
aagcgguagugcuccccag

SEQ ID NO: 1491651 - RNA, 19 nt, Artificial Sequence
  Description of Artificial Sequence: Synthetic oligonucleotide
gcuaaagcgguccccgaag

SEQ ID NO: 1491652 - RNA, 19 nt, Artificial Sequence
  Description of Artificial Sequence: Synthetic oligonucleotide
ggcguagaaggcgaagugg

SEQ ID NO: 1491653 - RNA, 19 nt, Artificial Sequence
  Description of Artificial Sequence: Synthetic oligonucleotide
augacaaaggcggcuagau

SEQ ID NO: 1491654 - RNA, 19 nt, Artificial Sequence
  Description of Artificial Sequence: Synthetic oligonucleotide
augcugacaaagcgguagu

SEQ ID NO: 1491655 - RNA, 19 nt, Artificial Sequence
  Description of Artificial Sequence: Synthetic oligonucleotide
ugugggaucuagggugacc

SEQ ID NO: 1491656 - RNA, 19 nt, Artificial Sequence
  Description of Artificial Sequence: Synthetic oligonucleotide
augcucaggcgcuggcgcg

SEQ ID NO: 1491657 - RNA, 19 nt, Artificial Sequence
  Description of Artificial Sequence: Synthetic oligonucleotide
ugauggcuuccauuccgac

SEQ ID NO: 1491658 - RNA, 19 nt, Artificial Sequence
  Description of Artificial Sequence: Synthetic oligonucleotide
aggcggcuagauaagaugu

SEQ ID NO: 1491659 - RNA, 19 nt, Artificial Sequence
  Description of Artificial Sequence: Synthetic oligonucleotide
agaucauggaaugcuggau

SEQ ID NO: 1491660 - RNA, 19 nt, Artificial Sequence
  Description of Artificial Sequence: Synthetic oligonucleotide
ccgacgagggccaagauga

SEQ ID NO: 1491661 - RNA, 19 nt, Artificial Sequence
  Description of Artificial Sequence: Synthetic oligonucleotide
uugaggucgucaggcagug

SEQ ID NO: 1491662 - RNA, 19 nt, Artificial Sequence
  Description of Artificial Sequence: Synthetic oligonucleotide
cuguagcagguccacgaug

SEQ ID NO: 1491663 - RNA, 19 nt, Artificial Sequence
  Description of Artificial Sequence: Synthetic oligonucleotide
ugacagccgcagaaagcca

SEQ ID NO: 1491664 - RNA, 19 nt, Artificial Sequence
  Description of Artificial Sequence: Synthetic oligonucleotide
acucauccugcggccauac

SEQ ID NO: 1491665 - RNA, 19 nt, Artificial Sequence
  Description of Artificial Sequence: Synthetic oligonucleotide
auuccgacgagggccaaga

SEQ ID NO: 1491666 - RNA, 19 nt, Artificial Sequence
  Description of Artificial Sequence: Synthetic oligonucleotide
guacugcccguugaagcgg

SEQ ID NO: 1491667 - RNA, 19 nt, Artificial Sequence
  Description of Artificial Sequence: Synthetic oligonucleotide
gaugacaaaggcggcuaga

SEQ ID NO: 1491668 - RNA, 19 nt, Artificial Sequence
  Description of Artificial Sequence: Synthetic oligonucleotide
gcugacaaagcgguagugc

SEQ ID NO: 1491669 - RNA, 19 nt, Artificial Sequence
  Description of Artificial Sequence: Synthetic oligonucleotide
caagcaguugaugggcgac

SEQ ID NO: 1491670 - RNA, 19 nt, Artificial Sequence
  Description of Artificial Sequence: Synthetic oligonucleotide
augugcgugccauccacau

SEQ ID NO: 1491671 - RNA, 19 nt, Artificial Sequence
  Description of Artificial Sequence: Synthetic oligonucleotide
cagaacgcccucccguggc

SEQ ID NO: 1491672 - RNA, 19 nt, Artificial Sequence
  Description of Artificial Sequence: Synthetic oligonucleotide
cgagagaagacaaugugga

SEQ ID NO: 1491673 - RNA, 19 nt, Artificial Sequence
  Description of Artificial Sequence: Synthetic oligonucleotide
gaaccucagccagugccgc

SEQ ID NO: 1491674 - RNA, 19 nt, Artificial Sequence
  Description of Artificial Sequence: Synthetic oligonucleotide
ccacgauauacucauccug

SEQ ID NO: 1491675 - RNA, 19 nt, Artificial Sequence
  Description of Artificial Sequence: Synthetic oligonucleotide
gcugaggugucugcaauag

SEQ ID NO: 1491676 - RNA, 19 nt, Artificial Sequence
  Description of Artificial Sequence: Synthetic oligonucleotide
aaggccgugguggugucau

SEQ ID NO: 1491677 - RNA, 19 nt, Artificial Sequence
  Description of Artificial Sequence: Synthetic oligonucleotide
uccugcggccauacuuuug

SEQ ID NO: 1491678 - RNA, 19 nt, Artificial Sequence
  Description of Artificial Sequence: Synthetic oligonucleotide
uacugcccguugaagcggu

SEQ ID NO: 1491679 - RNA, 19 nt, Artificial Sequence
  Description of Artificial Sequence: Synthetic oligonucleotide
cucuaacaugcuccaagca

SEQ ID NO: 1491680 - RNA, 19 nt, Artificial Sequence
  Description of Artificial Sequence: Synthetic oligonucleotide
cuggacaugaggaugucau

SEQ ID NO: 1491681 - RNA, 19 nt, Artificial Sequence
  Description of Artificial Sequence: Synthetic oligonucleotide
auacucauccugcggccau

SEQ ID NO: 1491682 - RNA, 19 nt, Artificial Sequence
  Description of Artificial Sequence: Synthetic oligonucleotide
cauagugguggaagaagua

SEQ ID NO: 1491683 - RNA, 19 nt, Artificial Sequence
  Description of Artificial Sequence: Synthetic oligonucleotide
agccagaguuguuguugag

SEQ ID NO: 1491684 - RNA, 19 nt, Artificial Sequence
  Description of Artificial Sequence: Synthetic oligonucleotide
gguuccggggcccagcuga

SEQ ID NO: 1491685 - RNA, 19 nt, Artificial Sequence
  Description of Artificial Sequence: Synthetic oligonucleotide
gaacaggcgcgaguaggug

SEQ ID NO: 1491686 - RNA, 19 nt, Artificial Sequence
  Description of Artificial Sequence: Synthetic oligonucleotide
aggcgcgaguaggugaccg

SEQ ID NO: 1491687 - RNA, 19 nt, Artificial Sequence
  Description of Artificial Sequence: Synthetic oligonucleotide
uggugcgaguagcgcagca

SEQ ID NO: 1491688 - RNA, 19 nt, Artificial Sequence
  Description of Artificial Sequence: Synthetic oligonucleotide
gugguacaaguagaagaac

SEQ ID NO: 1491689 - RNA, 19 nt, Artificial Sequence
  Description of Artificial Sequence: Synthetic oligonucleotide
ugaccgccaucuugaagaa

SEQ ID NO: 1491690 - RNA, 19 nt, Artificial Sequence
  Description of Artificial Sequence: Synthetic oligonucleotide
cgauauacucauccugcgg

SEQ ID NO: 1491691 - RNA, 19 nt, Artificial Sequence
  Description of Artificial Sequence: Synthetic oligonucleotide
ggcuugaacaccuuggguu

SEQ ID NO: 1491692 - RNA, 19 nt, Artificial Sequence
  Description of Artificial Sequence: Synthetic oligonucleotide
gguacaaguagaagaaccu

SEQ ID NO: 1491693 - RNA, 19 nt, Artificial Sequence
  Description of Artificial Sequence: Synthetic oligonucleotide
gcggcuagauaagaugugc

SEQ ID NO: 1491694 - RNA, 19 nt, Artificial Sequence
  Description of Artificial Sequence: Synthetic oligonucleotide
gucguucagggcaucugug

SEQ ID NO: 1491695 - RNA, 19 nt, Artificial Sequence
  Description of Artificial Sequence: Synthetic oligonucleotide
ggugaccgccaucuugaag

SEQ ID NO: 1491696 - RNA, 19 nt, Artificial Sequence
  Description of Artificial Sequence: Synthetic oligonucleotide
uggcgcguggccugugaca

SEQ ID NO: 1491697 - RNA, 19 nt, Artificial Sequence
  Description of Artificial Sequence: Synthetic oligonucleotide
cugguggugcgaguagcgc

SEQ ID NO: 1491698 - RNA, 19 nt, Artificial Sequence
  Description of Artificial Sequence: Synthetic oligonucleotide
aguagcgcagcagcaugga

SEQ ID NO: 1491699 - RNA, 19 nt, Artificial Sequence
  Description of Artificial Sequence: Synthetic oligonucleotide
gaugacggucagcaagggu

SEQ ID NO: 1491700 - RNA, 19 nt, Artificial Sequence
  Description of Artificial Sequence: Synthetic oligonucleotide
uggcuuccauuccgacgag

SEQ ID NO: 1491701 - RNA, 19 nt, Artificial Sequence
  Description of Artificial Sequence: Synthetic oligonucleotide
gaugugcgugccauccaca

SEQ ID NO: 1491702 - RNA, 19 nt, Artificial Sequence
  Description of Artificial Sequence: Synthetic oligonucleotide
gagagaagacaauguggau

SEQ ID NO: 1491703 - RNA, 19 nt, Artificial Sequence
  Description of Artificial Sequence: Synthetic oligonucleotide
cggcuagauaagaugugcg

SEQ ID NO: 1491704 - RNA, 19 nt, Artificial Sequence
  Description of Artificial Sequence: Synthetic oligonucleotide
gcggcuaaagcgguccccg

SEQ ID NO: 1491705 - RNA, 19 nt, Artificial Sequence
  Description of Artificial Sequence: Synthetic oligonucleotide
ggcgcguggccugugacag

SEQ ID NO: 1491706 - RNA, 19 nt, Artificial Sequence
  Description of Artificial Sequence: Synthetic oligonucleotide
cuccacccgcagaacgccc

SEQ ID NO: 1491707 - RNA, 19 nt, Artificial Sequence
  Description of Artificial Sequence: Synthetic oligonucleotide
acuggcgcccggcucgagu

SEQ ID NO: 1491708 - RNA, 19 nt, Artificial Sequence
  Description of Artificial Sequence: Synthetic oligonucleotide
ggcuagauaagaugugcgu

SEQ ID NO: 1491709 - RNA, 19 nt, Artificial Sequence
  Description of Artificial Sequence: Synthetic oligonucleotide
gaccgagagaagacaaugu

SEQ ID NO: 1491710 - RNA, 19 nt, Artificial Sequence
  Description of Artificial Sequence: Synthetic oligonucleotide
ugcgugccauccacaugcu

SEQ ID NO: 1491711 - RNA, 19 nt, Artificial Sequence
  Description of Artificial Sequence: Synthetic oligonucleotide
cugucguucagggcaucug

SEQ ID NO: 1491712 - RNA, 19 nt, Artificial Sequence
  Description of Artificial Sequence: Synthetic oligonucleotide
aacgcccucccguggccau

SEQ ID NO: 1491713 - RNA, 19 nt, Artificial Sequence
  Description of Artificial Sequence: Synthetic oligonucleotide
cgugccauccacaugcuga

SEQ ID NO: 1491714 - RNA, 19 nt, Artificial Sequence
  Description of Artificial Sequence: Synthetic oligonucleotide
gaugccccgccugcgggug

SEQ ID NO: 1491715 - RNA, 19 nt, Artificial Sequence
  Description of Artificial Sequence: Synthetic oligonucleotide
ccauacuuuuguuggcguc

SEQ ID NO: 1491716 - RNA, 19 nt, Artificial Sequence
  Description of Artificial Sequence: Synthetic oligonucleotide
gcagaacgcccucccgugg

SEQ ID NO: 1491717 - RNA, 19 nt, Artificial Sequence
  Description of Artificial Sequence: Synthetic oligonucleotide
cccggcucgaguuguggcg

SEQ ID NO: 1491718 - RNA, 19 nt, Artificial Sequence
  Description of Artificial Sequence: Synthetic oligonucleotide
gccuugaguagaacgaaga

SEQ ID NO: 1491719 - RNA, 19 nt, Artificial Sequence
  Description of Artificial Sequence: Synthetic oligonucleotide
gcguggaagagccggucgc

SEQ ID NO: 1491720 - RNA, 19 nt, Artificial Sequence
  Description of Artificial Sequence: Synthetic oligonucleotide
cccguugaagcgguagugg

SEQ ID NO: 1491721 - RNA, 19 nt, Artificial Sequence
  Description of Artificial Sequence: Synthetic oligonucleotide
agugccgcuugcugguguu

SEQ ID NO: 1491722 - RNA, 19 nt, Artificial Sequence
  Description of Artificial Sequence: Synthetic oligonucleotide
acaccacauuccucagaaa

SEQ ID NO: 1491723 - RNA, 19 nt, Artificial Sequence
  Description of Artificial Sequence: Synthetic oligonucleotide
gucccgugugggaucuagg

SEQ ID NO: 1491724 - RNA, 19 nt, Artificial Sequence
  Description of Artificial Sequence: Synthetic oligonucleotide
guagaacgaagaacucaaa

SEQ ID NO: 1491725 - RNA, 19 nt, Artificial Sequence
  Description of Artificial Sequence: Synthetic oligonucleotide
cauuccgacgagggccaag

SEQ ID NO: 1491726 - RNA, 19 nt, Artificial Sequence
  Description of Artificial Sequence: Synthetic oligonucleotide
gcgaagugguacaaguaga

SEQ ID NO: 1491727 - RNA, 19 nt, Artificial Sequence
  Description of Artificial Sequence: Synthetic oligonucleotide
ggccacuaaggccaccauc

SEQ ID NO: 1491728 - RNA, 19 nt, Artificial Sequence
  Description of Artificial Sequence: Synthetic oligonucleotide
gcgguagugcuccccagac

SEQ ID NO: 1491729 - RNA, 19 nt, Artificial Sequence
  Description of Artificial Sequence: Synthetic oligonucleotide
ggcaacucauaguggugga

SEQ ID NO: 1491730 - RNA, 19 nt, Artificial Sequence
  Description of Artificial Sequence: Synthetic oligonucleotide
cggcaacucauaguggugg

SEQ ID NO: 1491731 - RNA, 19 nt, Artificial Sequence
  Description of Artificial Sequence: Synthetic oligonucleotide
ugaacaccuuggguucaau

SEQ ID NO: 1491732 - RNA, 19 nt, Artificial Sequence
  Description of Artificial Sequence: Synthetic oligonucleotide
cauccugcggccauacuuu

SEQ ID NO: 1491733 - RNA, 19 nt, Artificial Sequence
  Description of Artificial Sequence: Synthetic oligonucleotide
uuccgacgagggccaagau

SEQ ID NO: 1491734 - RNA, 19 nt, Artificial Sequence
  Description of Artificial Sequence: Synthetic oligonucleotide
ucgaguuguggcgcaccuc

SEQ ID NO: 1491735 - RNA, 19 nt, Artificial Sequence
  Description of Artificial Sequence: Synthetic oligonucleotide
ggucccgugugggaucuag

SEQ ID NO: 1491736 - RNA, 19 nt, Artificial Sequence
  Description of Artificial Sequence: Synthetic oligonucleotide
cuggcgcguggccugugac

SEQ ID NO: 1491737 - RNA, 19 nt, Artificial Sequence
  Description of Artificial Sequence: Synthetic oligonucleotide
ccuugaguagaacgaagaa

SEQ ID NO: 1491738 - RNA, 19 nt, Artificial Sequence
  Description of Artificial Sequence: Synthetic oligonucleotide
ggccgugguggugucauug

SEQ ID NO: 1491739 - RNA, 19 nt, Artificial Sequence
  Description of Artificial Sequence: Synthetic oligonucleotide
gacagccgcagaaagccau

SEQ ID NO: 1491740 - RNA, 19 nt, Artificial Sequence
  Description of Artificial Sequence: Synthetic oligonucleotide
auccugcggccauacuuuu

SEQ ID NO: 1491741 - RNA, 19 nt, Artificial Sequence
  Description of Artificial Sequence: Synthetic oligonucleotide
gccggcaacucauaguggu

SEQ ID NO: 1491742 - RNA, 19 nt, Artificial Sequence
  Description of Artificial Sequence: Synthetic oligonucleotide
ugaggucgucaggcagugc

SEQ ID NO: 1491743 - RNA, 19 nt, Artificial Sequence
  Description of Artificial Sequence: Synthetic oligonucleotide
ggcggcuagauaagaugug

SEQ ID NO: 1491744 - RNA, 19 nt, Artificial Sequence
  Description of Artificial Sequence: Synthetic oligonucleotide
ccgccugcgggugaggagg

SEQ ID NO: 1491745 - RNA, 19 nt, Artificial Sequence
  Description of Artificial Sequence: Synthetic oligonucleotide
cgaagugguacaaguagaa

SEQ ID NO: 1491746 - RNA, 19 nt, Artificial Sequence
  Description of Artificial Sequence: Synthetic oligonucleotide
ggcuaaagcgguccccgaa

SEQ ID NO: 1491747 - RNA, 19 nt, Artificial Sequence
  Description of Artificial Sequence: Synthetic oligonucleotide
ggcgcgaguaggugaccgc

SEQ ID NO: 1491748 - RNA, 19 nt, Artificial Sequence
  Description of Artificial Sequence: Synthetic oligonucleotide
uacucauccugcggccaua

SEQ ID NO: 1491749 - RNA, 19 nt, Artificial Sequence
  Description of Artificial Sequence: Synthetic oligonucleotide
ggcgucucagggaauggga

SEQ ID NO: 1491750 - RNA, 19 nt, Artificial Sequence
  Description of Artificial Sequence: Synthetic oligonucleotide
aggccacuaaggccaccau

SEQ ID NO: 1491751 - RNA, 19 nt, Artificial Sequence
  Description of Artificial Sequence: Synthetic oligonucleotide
ccuggcugucguucagggc

SEQ ID NO: 1491752 - RNA, 19 nt, Artificial Sequence
  Description of Artificial Sequence: Synthetic oligonucleotide
ccggcaacucauaguggug

SEQ ID NO: 1491753 - RNA, 19 nt, Artificial Sequence
  Description of Artificial Sequence: Synthetic oligonucleotide
gaacgcccucccguggcca

SEQ ID NO: 1491754 - RNA, 19 nt, Artificial Sequence
  Description of Artificial Sequence: Synthetic oligonucleotide
gcgcgaguaggugaccgcc

SEQ ID NO: 1491755 - RNA, 19 nt, Artificial Sequence
  Description of Artificial Sequence: Synthetic oligonucleotide
ccgccaucuugaagaagag

SEQ ID NO: 1491756 - RNA, 19 nt, Artificial Sequence
  Description of Artificial Sequence: Synthetic oligonucleotide
cucaggcgcuggcgcgugg

SEQ ID NO: 1491757 - RNA, 19 nt, Artificial Sequence
  Description of Artificial Sequence: Synthetic oligonucleotide
ccauauuccagugaguauu

SEQ ID NO: 1491758 - RNA, 19 nt, Artificial Sequence
  Description of Artificial Sequence: Synthetic oligonucleotide
ggcccagaugccccgccug

SEQ ID NO: 1491759 - RNA, 19 nt, Artificial Sequence
  Description of Artificial Sequence: Synthetic oligonucleotide
gcccguugaagcgguagug

SEQ ID NO: 1491760 - RNA, 19 nt, Artificial Sequence
  Description of Artificial Sequence: Synthetic oligonucleotide
ggccggcaacucauagugg

SEQ ID NO: 1491761 - RNA, 19 nt, Artificial Sequence
  Description of Artificial Sequence: Synthetic oligonucleotide
agcgguccccgaagcacug

SEQ ID NO: 1491762 - RNA, 19 nt, Artificial Sequence
  Description of Artificial Sequence: Synthetic oligonucleotide
cgcguggaagagccggucg

SEQ ID NO: 1491763 - RNA, 19 nt, Artificial Sequence
  Description of Artificial Sequence: Synthetic oligonucleotide
ggcgaccgagagaagacaa

SEQ ID NO: 1491764 - RNA, 19 nt, Artificial Sequence
  Description of Artificial Sequence: Synthetic oligonucleotide
cucgaguuguggcgcaccu

SEQ ID NO: 1491765 - RNA, 19 nt, Artificial Sequence
  Description of Artificial Sequence: Synthetic oligonucleotide
agcgcguggaagagccggu

SEQ ID NO: 1491766 - RNA, 19 nt, Artificial Sequence
  Description of Artificial Sequence: Synthetic oligonucleotide
gcccggcucgaguuguggc

SEQ ID NO: 1491767 - RNA, 19 nt, Artificial Sequence
  Description of Artificial Sequence: Synthetic oligonucleotide
gccauacuuuuguuggcgu

SEQ ID NO: 1491768 - RNA, 19 nt, Artificial Sequence
  Description of Artificial Sequence: Synthetic oligonucleotide
guggugcgaguagcgcagc

SEQ ID NO: 1491769 - RNA, 19 nt, Artificial Sequence
  Description of Artificial Sequence: Synthetic oligonucleotide
ggaacaggcgcgaguaggu

SEQ ID NO: 1491770 - RNA, 19 nt, Artificial Sequence
  Description of Artificial Sequence: Synthetic oligonucleotide
cgcguggccugugacagcc

SEQ ID NO: 1491771 - RNA, 19 nt, Artificial Sequence
  Description of Artificial Sequence: Synthetic oligonucleotide
gcucgaguuguggcgcacc

SEQ ID NO: 1491772 - RNA, 19 nt, Artificial Sequence
  Description of Artificial Sequence: Synthetic oligonucleotide
cgcagaacgcccucccgug

SEQ ID NO: 1491773 - RNA, 19 nt, Artificial Sequence
  Description of Artificial Sequence: Synthetic oligonucleotide
ggauguacgccagcacgaa

SEQ ID NO: 1491774 - RNA, 19 nt, Artificial Sequence
  Description of Artificial Sequence: Synthetic oligonucleotide
ccacacgaugaggaugaug

SEQ ID NO: 1491775 - RNA, 19 nt, Artificial Sequence
  Description of Artificial Sequence: Synthetic oligonucleotide
ggcccuucacacuggacau

SEQ ID NO: 1491776 - RNA, 19 nt, Artificial Sequence
  Description of Artificial Sequence: Synthetic oligonucleotide
cgucaggcagugccguggg

SEQ ID NO: 1491777 - RNA, 19 nt, Artificial Sequence
  Description of Artificial Sequence: Synthetic oligonucleotide
ccggcucgaguuguggcgc

SEQ ID NO: 1491778 - RNA, 19 nt, Artificial Sequence
  Description of Artificial Sequence: Synthetic oligonucleotide
agccggucgcgcacguuga

SEQ ID NO: 1491779 - RNA, 19 nt, Artificial Sequence
  Description of Artificial Sequence: Synthetic oligonucleotide
cggucgcgcacguugauga

SEQ ID NO: 1491780 - RNA, 19 nt, Artificial Sequence
  Description of Artificial Sequence: Synthetic oligonucleotide
gcgugccauccacaugcug

SEQ ID NO: 1491781 - RNA, 19 nt, Artificial Sequence
  Description of Artificial Sequence: Synthetic oligonucleotide
caggcgcgaguaggugacc

SEQ ID NO: 1491782 - RNA, 19 nt, Artificial Sequence
  Description of Artificial Sequence: Synthetic oligonucleotide
caucggucucuaacaugcu

SEQ ID NO: 1491783 - RNA, 19 nt, Artificial Sequence
  Description of Artificial Sequence: Synthetic oligonucleotide
gcaguugaugggcgaccga

SEQ ID NO: 1491784 - RNA, 19 nt, Artificial Sequence
  Description of Artificial Sequence: Synthetic oligonucleotide
gcgucucagggaaugggaa

SEQ ID NO: 1491785 - RNA, 19 nt, Artificial Sequence
  Description of Artificial Sequence: Synthetic oligonucleotide
gccagugccgcuugcuggu

SEQ ID NO: 1491786 - RNA, 19 nt, Artificial Sequence
  Description of Artificial Sequence: Synthetic oligonucleotide
gggcgaccgagagaagaca

SEQ ID NO: 1491787 - RNA, 19 nt, Artificial Sequence
  Description of Artificial Sequence: Synthetic oligonucleotide
augccccgccugcggguga

SEQ ID NO: 1491788 - RNA, 19 nt, Artificial Sequence
  Description of Artificial Sequence: Synthetic oligonucleotide
caggcgggaacaggcgcga

SEQ ID NO: 1491789 - RNA, 19 nt, Artificial Sequence
  Description of Artificial Sequence: Synthetic oligonucleotide
ccguugaagcgguaguggu

SEQ ID NO: 1491790 - RNA, 19 nt, Artificial Sequence
  Description of Artificial Sequence: Synthetic oligonucleotide
ccaagaugacggucagcaa

SEQ ID NO: 1491791 - RNA, 19 nt, Artificial Sequence
  Description of Artificial Sequence: Synthetic oligonucleotide
ggccaucggucucuaacau

SEQ ID NO: 1491792 - RNA, 19 nt, Artificial Sequence
  Description of Artificial Sequence: Synthetic oligonucleotide
cugccaggcccuucacacu

SEQ ID NO: 1491793 - RNA, 19 nt, Artificial Sequence
  Description of Artificial Sequence: Synthetic oligonucleotide
cggucucuaacaugcucca

SEQ ID NO: 1491794 - RNA, 19 nt, Artificial Sequence
  Description of Artificial Sequence: Synthetic oligonucleotide
cguugaagcgguaguggua

SEQ ID NO: 1491795 - RNA, 19 nt, Artificial Sequence
  Description of Artificial Sequence: Synthetic oligonucleotide
cccgccugcgggugaggag

SEQ ID NO: 1491796 - RNA, 19 nt, Artificial Sequence
  Description of Artificial Sequence: Synthetic oligonucleotide
gacggucagcaagggugcu

SEQ ID NO: 1491797 - RNA, 19 nt, Artificial Sequence
  Description of Artificial Sequence: Synthetic oligonucleotide
guacgccagcacgaagagu

SEQ ID NO: 1491798 - RNA, 19 nt, Artificial Sequence
  Description of Artificial Sequence: Synthetic oligonucleotide
cagcgagccaggcccagau

SEQ ID NO: 1491799 - RNA, 19 nt, Artificial Sequence
  Description of Artificial Sequence: Synthetic oligonucleotide
ggguuccggggcccagcug

SEQ ID NO: 1491800 - RNA, 19 nt, Artificial Sequence
  Description of Artificial Sequence: Synthetic oligonucleotide
gcgguccccgaagcacugg

SEQ ID NO: 1491801 - RNA, 19 nt, Artificial Sequence
  Description of Artificial Sequence: Synthetic oligonucleotide
gggcuagcggagggccagg

SEQ ID NO: 1491802 - RNA, 19 nt, Artificial Sequence
  Description of Artificial Sequence: Synthetic oligonucleotide
aggccgugguggugucauu

SEQ ID NO: 1491803 - RNA, 19 nt, Artificial Sequence
  Description of Artificial Sequence: Synthetic oligonucleotide
ccggucgcgcacguugaug

SEQ ID NO: 1491804 - RNA, 19 nt, Artificial Sequence
  Description of Artificial Sequence: Synthetic oligonucleotide
ccagugaguauuccacgau

SEQ ID NO: 1491805 - RNA, 19 nt, Artificial Sequence
  Description of Artificial Sequence: Synthetic oligonucleotide
cagugccgcuugcuggugu

SEQ ID NO: 1491806 - RNA, 19 nt, Artificial Sequence
  Description of Artificial Sequence: Synthetic oligonucleotide
agagccggucgcgcacguu

SEQ ID NO: 1491807 - RNA, 19 nt, Artificial Sequence
  Description of Artificial Sequence: Synthetic oligonucleotide
ggcuagcggagggccagga

SEQ ID NO: 1491808 - RNA, 19 nt, Artificial Sequence
  Description of Artificial Sequence: Synthetic oligonucleotide
ccgaagcacuggucccgug

SEQ ID NO: 1491809 - RNA, 19 nt, Artificial Sequence
  Description of Artificial Sequence: Synthetic oligonucleotide
gcucaggcgcuggcgcgug

SEQ ID NO: 1491810 - RNA, 19 nt, Artificial Sequence
  Description of Artificial Sequence: Synthetic oligonucleotide
ggaccacuggcgcccggcu

SEQ ID NO: 1491811 - RNA, 19 nt, Artificial Sequence
  Description of Artificial Sequence: Synthetic oligonucleotide
cgacgagggccaagaugac

SEQ ID NO: 1491812 - RNA, 19 nt, Artificial Sequence
  Description of Artificial Sequence: Synthetic oligonucleotide
gcguggccugugacagccg

SEQ ID NO: 1491813 - RNA, 19 nt, Artificial Sequence
  Description of Artificial Sequence: Synthetic oligonucleotide
cgaagcacuggucccgugu

SEQ ID NO: 1491814 - RNA, 19 nt, Artificial Sequence
  Description of Artificial Sequence: Synthetic oligonucleotide
cgcgaguaggugaccgcca

SEQ ID NO: 1491815 - RNA, 19 nt, Artificial Sequence
  Description of Artificial Sequence: Synthetic oligonucleotide
gcgcguggaagagccgguc

SEQ ID NO: 1491816 - RNA, 19 nt, Artificial Sequence
  Description of Artificial Sequence: Synthetic oligonucleotide
cgcccucccguggccaucg

SEQ ID NO: 1491817 - RNA, 19 nt, Artificial Sequence
  Description of Artificial Sequence: Synthetic oligonucleotide
cacuggcgcccggcucgag

SEQ ID NO: 1491818 - RNA, 19 nt, Artificial Sequence
  Description of Artificial Sequence: Synthetic oligonucleotide
gcuagcggagggccaggau

SEQ ID NO: 1491819 - RNA, 19 nt, Artificial Sequence
  Description of Artificial Sequence: Synthetic oligonucleotide
cugcggccauacuuuuguu

SEQ ID NO: 1491820 - RNA, 19 nt, Artificial Sequence
  Description of Artificial Sequence: Synthetic oligonucleotide
gcccucccguggccaucgg

SEQ ID NO: 1491821 - RNA, 19 nt, Artificial Sequence
  Description of Artificial Sequence: Synthetic oligonucleotide
gcgaccgagagaagacaau

SEQ ID NO: 1491822 - RNA, 19 nt, Artificial Sequence
  Description of Artificial Sequence: Synthetic oligonucleotide
uggucccgugugggaucua

SEQ ID NO: 1491823 - RNA, 19 nt, Artificial Sequence
  Description of Artificial Sequence: Synthetic oligonucleotide
cggcuaaagcgguccccga

SEQ ID NO: 1491824 - RNA, 19 nt, Artificial Sequence
  Description of Artificial Sequence: Synthetic oligonucleotide
cggcucgaguuguggcgca

SEQ ID NO: 1491825 - RNA, 19 nt, Artificial Sequence
  Description of Artificial Sequence: Synthetic oligonucleotide
gccggucgcgcacguugau

SEQ ID NO: 1491826 - RNA, 19 nt, Artificial Sequence
  Description of Artificial Sequence: Synthetic oligonucleotide
cccucccguggccaucggu

SEQ ID NO: 1491827 - RNA, 19 nt, Artificial Sequence
  Description of Artificial Sequence: Synthetic oligonucleotide
ccacuggcgcccggcucga

SEQ ID NO: 1491828 - RNA, 19 nt, Artificial Sequence
  Description of Artificial Sequence: Synthetic oligonucleotide
ccauuccgacgagggccaa

SEQ ID NO: 1491829 - RNA, 19 nt, Artificial Sequence
  Description of Artificial Sequence: Synthetic oligonucleotide
gcgcuggcgcguggccugu

SEQ ID NO: 1491830 - RNA, 19 nt, Artificial Sequence
  Description of Artificial Sequence: Synthetic oligonucleotide
aaagaugugaguccgaccc

SEQ ID NO: 1491831 - RNA, 19 nt, Artificial Sequence
  Description of Artificial Sequence: Synthetic oligonucleotide
aaucuuaaagaugugaguc

SEQ ID NO: 1491832 - RNA, 19 nt, Artificial Sequence
  Description of Artificial Sequence: Synthetic oligonucleotide
aaucggguaagcuaaacuc

SEQ ID NO: 1491833 - RNA, 19 nt, Artificial Sequence
  Description of Artificial Sequence: Synthetic oligonucleotide
uuuauuucgguccacacca

SEQ ID NO: 1491834 - RNA, 19 nt, Artificial Sequence
  Description of Artificial Sequence: Synthetic oligonucleotide
uuuaauaccagugagcuca

SEQ ID NO: 1491835 - RNA, 19 nt, Artificial Sequence
  Description of Artificial Sequence: Synthetic oligonucleotide
uuuaucugcagccaggucc

SEQ ID NO: 1491836 - RNA, 19 nt, Artificial Sequence
  Description of Artificial Sequence: Synthetic oligonucleotide
aauuguacgucauguagcg

SEQ ID NO: 1491837 - RNA, 19 nt, Artificial Sequence
  Description of Artificial Sequence: Synthetic oligonucleotide
ucuuucaacacucauugag

SEQ ID NO: 1491838 - RNA, 19 nt, Artificial Sequence
  Description of Artificial Sequence: Synthetic oligonucleotide
ugaaucuuaaagaugugag

SEQ ID NO: 1491839 - RNA, 19 nt, Artificial Sequence
  Description of Artificial Sequence: Synthetic oligonucleotide
aacaaaucucucuggaugg

SEQ ID NO: 1491840 - RNA, 19 nt, Artificial Sequence
  Description of Artificial Sequence: Synthetic oligonucleotide
agaacuuugauguugccuc

SEQ ID NO: 1491841 - RNA, 19 nt, Artificial Sequence
  Description of Artificial Sequence: Synthetic oligonucleotide
gauccaaagugucaggucg

SEQ ID NO: 1491842 - RNA, 19 nt, Artificial Sequence
  Description of Artificial Sequence: Synthetic oligonucleotide
uaacaaaucucucuggaug

SEQ ID NO: 1491843 - RNA, 19 nt, Artificial Sequence
  Description of Artificial Sequence: Synthetic oligonucleotide
agaguaaguacucugacca

SEQ ID NO: 1491844 - RNA, 19 nt, Artificial Sequence
  Description of Artificial Sequence: Synthetic oligonucleotide
ucuaaaucggguaagcuaa

SEQ ID NO: 1491845 - RNA, 19 nt, Artificial Sequence
  Description of Artificial Sequence: Synthetic oligonucleotide
ucacugauuacacagcacc

SEQ ID NO: 1491846 - RNA, 19 nt, Artificial Sequence
  Description of Artificial Sequence: Synthetic oligonucleotide
ugauugaucaguuccaaca

SEQ ID NO: 1491847 - RNA, 19 nt, Artificial Sequence
  Description of Artificial Sequence: Synthetic oligonucleotide
uugauaauguauuuggggu

SEQ ID NO: 1491848 - RNA, 19 nt, Artificial Sequence
  Description of Artificial Sequence: Synthetic oligonucleotide
uuguacgucauguagcggg

SEQ ID NO: 1491849 - RNA, 19 nt, Artificial Sequence
  Description of Artificial Sequence: Synthetic oligonucleotide
aguaggugccaccugaucg

SEQ ID NO: 1491850 - RNA, 19 nt, Artificial Sequence
  Description of Artificial Sequence: Synthetic oligonucleotide
aguccgacccucuaaaucg

SEQ ID NO: 1491851 - RNA, 19 nt, Artificial Sequence
  Description of Artificial Sequence: Synthetic oligonucleotide
ucugucuagaguaaguacu

SEQ ID NO: 1491852 - RNA, 19 nt, Artificial Sequence
  Description of Artificial Sequence: Synthetic oligonucleotide
ucaacacucauugagcgcg

SEQ ID NO: 1491853 - RNA, 19 nt, Artificial Sequence
  Description of Artificial Sequence: Synthetic oligonucleotide
aguagcacugaauuuggcg

SEQ ID NO: 1491854 - RNA, 19 nt, Artificial Sequence
  Description of Artificial Sequence: Synthetic oligonucleotide
gacacuucuaauuuccgcc

SEQ ID NO: 1491855 - RNA, 19 nt, Artificial Sequence
  Description of Artificial Sequence: Synthetic oligonucleotide
agcaguucaaaccuaaugu

SEQ ID NO: 1491856 - RNA, 19 nt, Artificial Sequence
  Description of Artificial Sequence: Synthetic oligonucleotide
ucuguacgagcucagaccc

SEQ ID NO: 1491857 - RNA, 19 nt, Artificial Sequence
  Description of Artificial Sequence: Synthetic oligonucleotide
uccacaccaacucucaucc

SEQ ID NO: 1491858 - RNA, 19 nt, Artificial Sequence
  Description of Artificial Sequence: Synthetic oligonucleotide
uucacauugauaauguauu

SEQ ID NO: 1491859 - RNA, 19 nt, Artificial Sequence
  Description of Artificial Sequence: Synthetic oligonucleotide
ucuagaguaaguacucuga

SEQ ID NO: 1491860 - RNA, 19 nt, Artificial Sequence
  Description of Artificial Sequence: Synthetic oligonucleotide
cuuucaacacucauugagc

SEQ ID NO: 1491861 - RNA, 19 nt, Artificial Sequence
  Description of Artificial Sequence: Synthetic oligonucleotide
aaagugucaggucgguuag

SEQ ID NO: 1491862 - RNA, 19 nt, Artificial Sequence
  Description of Artificial Sequence: Synthetic oligonucleotide
aaaucggguaagcuaaacu

SEQ ID NO: 1491863 - RNA, 19 nt, Artificial Sequence
  Description of Artificial Sequence: Synthetic oligonucleotide
ucaacuacuucucucaauu

SEQ ID NO: 1491864 - RNA, 19 nt, Artificial Sequence
  Description of Artificial Sequence: Synthetic oligonucleotide
uguacagacacuucuaauu

SEQ ID NO: 1491865 - RNA, 19 nt, Artificial Sequence
  Description of Artificial Sequence: Synthetic oligonucleotide
gacccaauaacucggauga

SEQ ID NO: 1491866 - RNA, 19 nt, Artificial Sequence
  Description of Artificial Sequence: Synthetic oligonucleotide
cauugauaauguauuuggg

SEQ ID NO: 1491867 - RNA, 19 nt, Artificial Sequence
  Description of Artificial Sequence: Synthetic oligonucleotide
cucacgaaccauucgagcc

SEQ ID NO: 1491868 - RNA, 19 nt, Artificial Sequence
  Description of Artificial Sequence: Synthetic oligonucleotide
ugucuguuuaucugcagcc

SEQ ID NO: 1491869 - RNA, 19 nt, Artificial Sequence
  Description of Artificial Sequence: Synthetic oligonucleotide
ugucaggucgguuagucgc

SEQ ID NO: 1491870 - RNA, 19 nt, Artificial Sequence
  Description of Artificial Sequence: Synthetic oligonucleotide
aguccuguuagcaacugcc

SEQ ID NO: 1491871 - RNA, 19 nt, Artificial Sequence
  Description of Artificial Sequence: Synthetic oligonucleotide
aucugucuagaguaaguac

SEQ ID NO: 1491872 - RNA, 19 nt, Artificial Sequence
  Description of Artificial Sequence: Synthetic oligonucleotide
uaaguagucgggcauugug

SEQ ID NO: 1491873 - RNA, 19 nt, Artificial Sequence
  Description of Artificial Sequence: Synthetic oligonucleotide
uucuguacgagcucagacc

SEQ ID NO: 1491874 - RNA, 19 nt, Artificial Sequence
  Description of Artificial Sequence: Synthetic oligonucleotide
agguuaacaaaucucucug

SEQ ID NO: 1491875 - RNA, 19 nt, Artificial Sequence
  Description of Artificial Sequence: Synthetic oligonucleotide
uagucgggcauugugaggg

SEQ ID NO: 1491876 - RNA, 19 nt, Artificial Sequence
  Description of Artificial Sequence: Synthetic oligonucleotide
aauaacucggaugaagcaa

SEQ ID NO: 1491877 - RNA, 19 nt, Artificial Sequence
  Description of Artificial Sequence: Synthetic oligonucleotide
uuaucugcagccagguccc

SEQ ID NO: 1491878 - RNA, 19 nt, Artificial Sequence
  Description of Artificial Sequence: Synthetic oligonucleotide
caccugaucgcugagaucc

SEQ ID NO: 1491879 - RNA, 19 nt, Artificial Sequence
  Description of Artificial Sequence: Synthetic oligonucleotide
uuaucuucguacaccuugc

SEQ ID NO: 1491880 - RNA, 19 nt, Artificial Sequence
  Description of Artificial Sequence: Synthetic oligonucleotide
ucuaauuuccgccccagua

SEQ ID NO: 1491881 - RNA, 19 nt, Artificial Sequence
  Description of Artificial Sequence: Synthetic oligonucleotide
ugucagacucuuuaauacc

SEQ ID NO: 1491882 - RNA, 19 nt, Artificial Sequence
  Description of Artificial Sequence: Synthetic oligonucleotide
uguaugugacaucagguuu

SEQ ID NO: 1491883 - RNA, 19 nt, Artificial Sequence
  Description of Artificial Sequence: Synthetic oligonucleotide
uuuucaauaaggcgauguc

SEQ ID NO: 1491884 - RNA, 19 nt, Artificial Sequence
  Description of Artificial Sequence: Synthetic oligonucleotide
agcagaacacccuucggag

SEQ ID NO: 1491885 - RNA, 19 nt, Artificial Sequence
  Description of Artificial Sequence: Synthetic oligonucleotide
cucagacccaauaacucgg

SEQ ID NO: 1491886 - RNA, 19 nt, Artificial Sequence
  Description of Artificial Sequence: Synthetic oligonucleotide
ugauaauguauuugggguc

SEQ ID NO: 1491887 - RNA, 19 nt, Artificial Sequence
  Description of Artificial Sequence: Synthetic oligonucleotide
ugaccauaaguuuucaaua

SEQ ID NO: 1491888 - RNA, 19 nt, Artificial Sequence
  Description of Artificial Sequence: Synthetic oligonucleotide
aucagaacuuugauguugc

SEQ ID NO: 1491889 - RNA, 19 nt, Artificial Sequence
  Description of Artificial Sequence: Synthetic oligonucleotide
uguacgucauguagcgggg

SEQ ID NO: 1491890 - RNA, 19 nt, Artificial Sequence
  Description of Artificial Sequence: Synthetic oligonucleotide
cuucguacaccuugcaacc

SEQ ID NO: 1491891 - RNA, 19 nt, Artificial Sequence
  Description of Artificial Sequence: Synthetic oligonucleotide
ugaaucagcauugauuauc

SEQ ID NO: 1491892 - RNA, 19 nt, Artificial Sequence
  Description of Artificial Sequence: Synthetic oligonucleotide
ugccucgaggaucaaaacc

SEQ ID NO: 1491893 - RNA, 19 nt, Artificial Sequence
  Description of Artificial Sequence: Synthetic oligonucleotide
accgacguauuucuguacg

SEQ ID NO: 1491894 - RNA, 19 nt, Artificial Sequence
  Description of Artificial Sequence: Synthetic oligonucleotide
cuaauuuccgccccaguac

SEQ ID NO: 1491895 - RNA, 19 nt, Artificial Sequence
  Description of Artificial Sequence: Synthetic oligonucleotide
aaccgagccccuccaaugg

SEQ ID NO: 1491896 - RNA, 19 nt, Artificial Sequence
  Description of Artificial Sequence: Synthetic oligonucleotide
aaaccgagccccuccaaug

SEQ ID NO: 1491897 - RNA, 19 nt, Artificial Sequence
  Description of Artificial Sequence: Synthetic oligonucleotide
cacuguaugugacaucagg

SEQ ID NO: 1491898 - RNA, 19 nt, Artificial Sequence
  Description of Artificial Sequence: Synthetic oligonucleotide
gacuugaugaccuuauuua

SEQ ID NO: 1491899 - RNA, 19 nt, Artificial Sequence
  Description of Artificial Sequence: Synthetic oligonucleotide
caccuugcaaccuguagcg

SEQ ID NO: 1491900 - RNA, 19 nt, Artificial Sequence
  Description of Artificial Sequence: Synthetic oligonucleotide
ucuggggcucaauuguacg

SEQ ID NO: 1491901 - RNA, 19 nt, Artificial Sequence
  Description of Artificial Sequence: Synthetic oligonucleotide
ugauuacacagcaccuucc

SEQ ID NO: 1491902 - RNA, 19 nt, Artificial Sequence
  Description of Artificial Sequence: Synthetic oligonucleotide
uaauuuccgccccaguacu

SEQ ID NO: 1491903 - RNA, 19 nt, Artificial Sequence
  Description of Artificial Sequence: Synthetic oligonucleotide
ggucucacugauuacacag

SEQ ID NO: 1491904 - RNA, 19 nt, Artificial Sequence
  Description of Artificial Sequence: Synthetic oligonucleotide
agacccaauaacucggaug

SEQ ID NO: 1491905 - RNA, 19 nt, Artificial Sequence
  Description of Artificial Sequence: Synthetic oligonucleotide
ugaccuuauuuacagcuuc

SEQ ID NO: 1491906 - RNA, 19 nt, Artificial Sequence
  Description of Artificial Sequence: Synthetic oligonucleotide
uacaccuugcaaccuguag

SEQ ID NO: 1491907 - RNA, 19 nt, Artificial Sequence
  Description of Artificial Sequence: Synthetic oligonucleotide
ucuguacagacacuucuaa

SEQ ID NO: 1491908 - RNA, 19 nt, Artificial Sequence
  Description of Artificial Sequence: Synthetic oligonucleotide
caagcgucaguccuguuag

SEQ ID NO: 1491909 - RNA, 19 nt, Artificial Sequence
  Description of Artificial Sequence: Synthetic oligonucleotide
uguuuggacacagucgggc

SEQ ID NO: 1491910 - RNA, 19 nt, Artificial Sequence
  Description of Artificial Sequence: Synthetic oligonucleotide
uacucugaccauaaguuuu

SEQ ID NO: 1491911 - RNA, 19 nt, Artificial Sequence
  Description of Artificial Sequence: Synthetic oligonucleotide
uccgcaccuaaguagucgg

SEQ ID NO: 1491912 - RNA, 19 nt, Artificial Sequence
  Description of Artificial Sequence: Synthetic oligonucleotide
augaagcaagcgucagucc

SEQ ID NO: 1491913 - RNA, 19 nt, Artificial Sequence
  Description of Artificial Sequence: Synthetic oligonucleotide
cauugagcgcgcaugaauc

SEQ ID NO: 1491914 - RNA, 19 nt, Artificial Sequence
  Description of Artificial Sequence: Synthetic oligonucleotide
cucacucaaagccucuggg

SEQ ID NO: 1491915 - RNA, 19 nt, Artificial Sequence
  Description of Artificial Sequence: Synthetic oligonucleotide
auaacucggaugaagcaag

SEQ ID NO: 1491916 - RNA, 19 nt, Artificial Sequence
  Description of Artificial Sequence: Synthetic oligonucleotide
augaaucuuaaagauguga

SEQ ID NO: 1491917 - RNA, 19 nt, Artificial Sequence
  Description of Artificial Sequence: Synthetic oligonucleotide
cuagaguaaguacucugac

SEQ ID NO: 1491918 - RNA, 19 nt, Artificial Sequence
  Description of Artificial Sequence: Synthetic oligonucleotide
ugaucgcugagauccacca

SEQ ID NO: 1491919 - RNA, 19 nt, Artificial Sequence
  Description of Artificial Sequence: Synthetic oligonucleotide
aguacucugaccauaaguu

SEQ ID NO: 1491920 - RNA, 19 nt, Artificial Sequence
  Description of Artificial Sequence: Synthetic oligonucleotide
gaccauaaguuuucaauaa

SEQ ID NO: 1491921 - RNA, 19 nt, Artificial Sequence
  Description of Artificial Sequence: Synthetic oligonucleotide
cuguuuaucugcagccagg

SEQ ID NO: 1491922 - RNA, 19 nt, Artificial Sequence
  Description of Artificial Sequence: Synthetic oligonucleotide
ucauguagcggggaguagc

SEQ ID NO: 1491923 - RNA, 19 nt, Artificial Sequence
  Description of Artificial Sequence: Synthetic oligonucleotide
cucggaugaagcaagcguc

SEQ ID NO: 1491924 - RNA, 19 nt, Artificial Sequence
  Description of Artificial Sequence: Synthetic oligonucleotide
caucaucaaaccgagcccc

SEQ ID NO: 1491925 - RNA, 19 nt, Artificial Sequence
  Description of Artificial Sequence: Synthetic oligonucleotide
aacucggaugaagcaagcg

SEQ ID NO: 1491926 - RNA, 19 nt, Artificial Sequence
  Description of Artificial Sequence: Synthetic oligonucleotide
ucaauaaggcgaugucccc

SEQ ID NO: 1491927 - RNA, 19 nt, Artificial Sequence
  Description of Artificial Sequence: Synthetic oligonucleotide
gguuaacaaaucucucugg

SEQ ID NO: 1491928 - RNA, 19 nt, Artificial Sequence
  Description of Artificial Sequence: Synthetic oligonucleotide
aaucucucuggauggagua

SEQ ID NO: 1491929 - RNA, 19 nt, Artificial Sequence
  Description of Artificial Sequence: Synthetic oligonucleotide
uucucucaauuucucaauc

SEQ ID NO: 1491930 - RNA, 19 nt, Artificial Sequence
  Description of Artificial Sequence: Synthetic oligonucleotide
ucccaagguuaacaaaucu

SEQ ID NO: 1491931 - RNA, 19 nt, Artificial Sequence
  Description of Artificial Sequence: Synthetic oligonucleotide
ucauugagcgcgcaugaau

SEQ ID NO: 1491932 - RNA, 19 nt, Artificial Sequence
  Description of Artificial Sequence: Synthetic oligonucleotide
gucuagaguaaguacucug

SEQ ID NO: 1491933 - RNA, 19 nt, Artificial Sequence
  Description of Artificial Sequence: Synthetic oligonucleotide
uuagucgccaucagaacuu

SEQ ID NO: 1491934 - RNA, 19 nt, Artificial Sequence
  Description of Artificial Sequence: Synthetic oligonucleotide
uacgucauguagcggggag

SEQ ID NO: 1491935 - RNA, 19 nt, Artificial Sequence
  Description of Artificial Sequence: Synthetic oligonucleotide
uuuuccgcugguccgcacc

SEQ ID NO: 1491936 - RNA, 19 nt, Artificial Sequence
  Description of Artificial Sequence: Synthetic oligonucleotide
ccaauaacucggaugaagc

SEQ ID NO: 1491937 - RNA, 19 nt, Artificial Sequence
  Description of Artificial Sequence: Synthetic oligonucleotide
uuucgccgugcucggaugg

SEQ ID NO: 1491938 - RNA, 19 nt, Artificial Sequence
  Description of Artificial Sequence: Synthetic oligonucleotide
guacuguuuggacacaguc

SEQ ID NO: 1491939 - RNA, 19 nt, Artificial Sequence
  Description of Artificial Sequence: Synthetic oligonucleotide
ucgggcauugugagggccg

SEQ ID NO: 1491940 - RNA, 19 nt, Artificial Sequence
  Description of Artificial Sequence: Synthetic oligonucleotide
cauugugagggccgcaagc

SEQ ID NO: 1491941 - RNA, 19 nt, Artificial Sequence
  Description of Artificial Sequence: Synthetic oligonucleotide
cugauuacacagcaccuuc

SEQ ID NO: 1491942 - RNA, 19 nt, Artificial Sequence
  Description of Artificial Sequence: Synthetic oligonucleotide
agugucaggucgguuaguc

SEQ ID NO: 1491943 - RNA, 19 nt, Artificial Sequence
  Description of Artificial Sequence: Synthetic oligonucleotide
aaguuuucaauaaggcgau

SEQ ID NO: 1491944 - RNA, 19 nt, Artificial Sequence
  Description of Artificial Sequence: Synthetic oligonucleotide
ucggguaagcuaaacucaa

SEQ ID NO: 1491945 - RNA, 19 nt, Artificial Sequence
  Description of Artificial Sequence: Synthetic oligonucleotide
cugguccgcaccuaaguag

SEQ ID NO: 1491946 - RNA, 19 nt, Artificial Sequence
  Description of Artificial Sequence: Synthetic oligonucleotide
gcucagacccaauaacucg

SEQ ID NO: 1491947 - RNA, 19 nt, Artificial Sequence
  Description of Artificial Sequence: Synthetic oligonucleotide
aaguagucgggcauuguga

SEQ ID NO: 1491948 - RNA, 19 nt, Artificial Sequence
  Description of Artificial Sequence: Synthetic oligonucleotide
aaaucucucuggauggagu

SEQ ID NO: 1491949 - RNA, 19 nt, Artificial Sequence
  Description of Artificial Sequence: Synthetic oligonucleotide
guaggugccaccugaucgc

SEQ ID NO: 1491950 - RNA, 19 nt, Artificial Sequence
  Description of Artificial Sequence: Synthetic oligonucleotide
caaaccuaaugucucuuuc

SEQ ID NO: 1491951 - RNA, 19 nt, Artificial Sequence
  Description of Artificial Sequence: Synthetic oligonucleotide
ugggucaaucuuuggaggu

SEQ ID NO: 1491952 - RNA, 19 nt, Artificial Sequence
  Description of Artificial Sequence: Synthetic oligonucleotide
ucguacaccuugcaaccug

SEQ ID NO: 1491953 - RNA, 19 nt, Artificial Sequence
  Description of Artificial Sequence: Synthetic oligonucleotide
cugucuagaguaaguacuc

SEQ ID NO: 1491954 - RNA, 19 nt, Artificial Sequence
  Description of Artificial Sequence: Synthetic oligonucleotide
uauuucgguccacaccaac

SEQ ID NO: 1491955 - RNA, 19 nt, Artificial Sequence
  Description of Artificial Sequence: Synthetic oligonucleotide
cagcaguucaaaccuaaug

SEQ ID NO: 1491956 - RNA, 19 nt, Artificial Sequence
  Description of Artificial Sequence: Synthetic oligonucleotide
aagcgucaguccuguuagc

SEQ ID NO: 1491957 - RNA, 19 nt, Artificial Sequence
  Description of Artificial Sequence: Synthetic oligonucleotide
ugguccgcaccuaaguagu

SEQ ID NO: 1491958 - RNA, 19 nt, Artificial Sequence
  Description of Artificial Sequence: Synthetic oligonucleotide
uuuggagguaguggaaugu

SEQ ID NO: 1491959 - RNA, 19 nt, Artificial Sequence
  Description of Artificial Sequence: Synthetic oligonucleotide
ucgguuagucgccaucaga

SEQ ID NO: 1491960 - RNA, 19 nt, Artificial Sequence
  Description of Artificial Sequence: Synthetic oligonucleotide
guuuggacacagucgggcc

SEQ ID NO: 1491961 - RNA, 19 nt, Artificial Sequence
  Description of Artificial Sequence: Synthetic oligonucleotide
agcucagacccaauaacuc

SEQ ID NO: 1491962 - RNA, 19 nt, Artificial Sequence
  Description of Artificial Sequence: Synthetic oligonucleotide
ucugaagugucuguuuauc

SEQ ID NO: 1491963 - RNA, 19 nt, Artificial Sequence
  Description of Artificial Sequence: Synthetic oligonucleotide
ugugaguccgacccucuaa

SEQ ID NO: 1491964 - RNA, 19 nt, Artificial Sequence
  Description of Artificial Sequence: Synthetic oligonucleotide
ugaucaguuccaacauggu

SEQ ID NO: 1491965 - RNA, 19 nt, Artificial Sequence
  Description of Artificial Sequence: Synthetic oligonucleotide
auugagcgcgcaugaaucu

SEQ ID NO: 1491966 - RNA, 19 nt, Artificial Sequence
  Description of Artificial Sequence: Synthetic oligonucleotide
aauuuggcguaggacuuga

SEQ ID NO: 1491967 - RNA, 19 nt, Artificial Sequence
  Description of Artificial Sequence: Synthetic oligonucleotide
gcgcgcaugaaucuuaaag

SEQ ID NO: 1491968 - RNA, 19 nt, Artificial Sequence
  Description of Artificial Sequence: Synthetic oligonucleotide
aagaugugaguccgacccu

SEQ ID NO: 1491969 - RNA, 19 nt, Artificial Sequence
  Description of Artificial Sequence: Synthetic oligonucleotide
caucaaaccgagccccucc

SEQ ID NO: 1491970 - RNA, 19 nt, Artificial Sequence
  Description of Artificial Sequence: Synthetic oligonucleotide
agcacagagugucuugccu

SEQ ID NO: 1491971 - RNA, 19 nt, Artificial Sequence
  Description of Artificial Sequence: Synthetic oligonucleotide
agaugugaguccgacccuc

SEQ ID NO: 1491972 - RNA, 19 nt, Artificial Sequence
  Description of Artificial Sequence: Synthetic oligonucleotide
gaguccgacccucuaaauc

SEQ ID NO: 1491973 - RNA, 19 nt, Artificial Sequence
  Description of Artificial Sequence: Synthetic oligonucleotide
ucagacccaauaacucgga

SEQ ID NO: 1491974 - RNA, 19 nt, Artificial Sequence
  Description of Artificial Sequence: Synthetic oligonucleotide
guagagggguuucaacuac

SEQ ID NO: 1491975 - RNA, 19 nt, Artificial Sequence
  Description of Artificial Sequence: Synthetic oligonucleotide
uaacucggaugaagcaagc

SEQ ID NO: 1491976 - RNA, 19 nt, Artificial Sequence
  Description of Artificial Sequence: Synthetic oligonucleotide
cucuaaaucggguaagcua

SEQ ID NO: 1491977 - RNA, 19 nt, Artificial Sequence
  Description of Artificial Sequence: Synthetic oligonucleotide
guuagucgccaucagaacu

SEQ ID NO: 1491978 - RNA, 19 nt, Artificial Sequence
  Description of Artificial Sequence: Synthetic oligonucleotide
uccgacccucuaaaucggg

SEQ ID NO: 1491979 - RNA, 19 nt, Artificial Sequence
  Description of Artificial Sequence: Synthetic oligonucleotide
caauaacucggaugaagca

SEQ ID NO: 1491980 - RNA, 19 nt, Artificial Sequence
  Description of Artificial Sequence: Synthetic oligonucleotide
uucgguccacaccaacucu

SEQ ID NO: 1491981 - RNA, 19 nt, Artificial Sequence
  Description of Artificial Sequence: Synthetic oligonucleotide
cugauugaucaguuccaac

SEQ ID NO: 1491982 - RNA, 19 nt, Artificial Sequence
  Description of Artificial Sequence: Synthetic oligonucleotide
ucugaccauaaguuuucaa

SEQ ID NO: 1491983 - RNA, 19 nt, Artificial Sequence
  Description of Artificial Sequence: Synthetic oligonucleotide
uugauguugccucgaggau

SEQ ID NO: 1491984 - RNA, 19 nt, Artificial Sequence
  Description of Artificial Sequence: Synthetic oligonucleotide
uguacgagcucagacccaa

SEQ ID NO: 1491985 - RNA, 19 nt, Artificial Sequence
  Description of Artificial Sequence: Synthetic oligonucleotide
ucaaaccuaaugucucuuu

SEQ ID NO: 1491986 - RNA, 19 nt, Artificial Sequence
  Description of Artificial Sequence: Synthetic oligonucleotide
uaaaucggguaagcuaaac

SEQ ID NO: 1491987 - RNA, 19 nt, Artificial Sequence
  Description of Artificial Sequence: Synthetic oligonucleotide
agguaguggaaugugaauu

SEQ ID NO: 1491988 - RNA, 19 nt, Artificial Sequence
  Description of Artificial Sequence: Synthetic oligonucleotide
accgagccccuccaauggc

SEQ ID NO: 1491989 - RNA, 19 nt, Artificial Sequence
  Description of Artificial Sequence: Synthetic oligonucleotide
gaagcaagcgucaguccug

SEQ ID NO: 1491990 - RNA, 19 nt, Artificial Sequence
  Description of Artificial Sequence: Synthetic oligonucleotide
cugaucgcugagauccacc

SEQ ID NO: 1491991 - RNA, 19 nt, Artificial Sequence
  Description of Artificial Sequence: Synthetic oligonucleotide
ucacuguaugugacaucag

SEQ ID NO: 1491992 - RNA, 19 nt, Artificial Sequence
  Description of Artificial Sequence: Synthetic oligonucleotide
cucacugauuacacagcac

SEQ ID NO: 1491993 - RNA, 19 nt, Artificial Sequence
  Description of Artificial Sequence: Synthetic oligonucleotide
aaugugaauuugguauuua

SEQ ID NO: 1491994 - RNA, 19 nt, Artificial Sequence
  Description of Artificial Sequence: Synthetic oligonucleotide
guagucgggcauugugagg

SEQ ID NO: 1491995 - RNA, 19 nt, Artificial Sequence
  Description of Artificial Sequence: Synthetic oligonucleotide
aucggguaagcuaaacuca

SEQ ID NO: 1491996 - RNA, 19 nt, Artificial Sequence
  Description of Artificial Sequence: Synthetic oligonucleotide
cucacggucucacugauua

SEQ ID NO: 1491997 - RNA, 19 nt, Artificial Sequence
  Description of Artificial Sequence: Synthetic oligonucleotide
uacgagcucagacccaaua

SEQ ID NO: 1491998 - RNA, 19 nt, Artificial Sequence
  Description of Artificial Sequence: Synthetic oligonucleotide
acccuucggaggcucaauc

SEQ ID NO: 1491999 - RNA, 19 nt, Artificial Sequence
  Description of Artificial Sequence: Synthetic oligonucleotide
ggguaagcuaaacucaauc

SEQ ID NO: 1492000 - RNA, 19 nt, Artificial Sequence
  Description of Artificial Sequence: Synthetic oligonucleotide
cacuucuaauuuccgcccc

SEQ ID NO: 1492001 - RNA, 19 nt, Artificial Sequence
  Description of Artificial Sequence: Synthetic oligonucleotide
guaguggaaugugaauuug

SEQ ID NO: 1492002 - RNA, 19 nt, Artificial Sequence
  Description of Artificial Sequence: Synthetic oligonucleotide
gugucaggucgguuagucg

SEQ ID NO: 1492003 - RNA, 19 nt, Artificial Sequence
  Description of Artificial Sequence: Synthetic oligonucleotide
uuuucgccgugcucggaug

SEQ ID NO: 1492004 - RNA, 19 nt, Artificial Sequence
  Description of Artificial Sequence: Synthetic oligonucleotide
ucaucccuucuucaauguc

SEQ ID NO: 1492005 - RNA, 19 nt, Artificial Sequence
  Description of Artificial Sequence: Synthetic oligonucleotide
ucaaugucaguaggugcca

SEQ ID NO: 1492006 - RNA, 19 nt, Artificial Sequence
  Description of Artificial Sequence: Synthetic oligonucleotide
guaagcuaaacucaaucuu

SEQ ID NO: 1492007 - RNA, 19 nt, Artificial Sequence
  Description of Artificial Sequence: Synthetic oligonucleotide
gcucggauggcaaacauac

SEQ ID NO: 1492008 - RNA, 19 nt, Artificial Sequence
  Description of Artificial Sequence: Synthetic oligonucleotide
gguaagcuaaacucaaucu

SEQ ID NO: 1492009 - RNA, 19 nt, Artificial Sequence
  Description of Artificial Sequence: Synthetic oligonucleotide
uguagcggcuguucacucu

SEQ ID NO: 1492010 - RNA, 19 nt, Artificial Sequence
  Description of Artificial Sequence: Synthetic oligonucleotide
ucaccgacguauuucugua

SEQ ID NO: 1492011 - RNA, 19 nt, Artificial Sequence
  Description of Artificial Sequence: Synthetic oligonucleotide
acgagcucagacccaauaa

SEQ ID NO: 1492012 - RNA, 19 nt, Artificial Sequence
  Description of Artificial Sequence: Synthetic oligonucleotide
auuguacgucauguagcgg

SEQ ID NO: 1492013 - RNA, 19 nt, Artificial Sequence
  Description of Artificial Sequence: Synthetic oligonucleotide
aggucgguuagucgccauc

SEQ ID NO: 1492014 - RNA, 19 nt, Artificial Sequence
  Description of Artificial Sequence: Synthetic oligonucleotide
cuguuagcaacugcccuag

SEQ ID NO: 1492015 - RNA, 19 nt, Artificial Sequence
  Description of Artificial Sequence: Synthetic oligonucleotide
gaauuuggcguaggacuug

SEQ ID NO: 1492016 - RNA, 19 nt, Artificial Sequence
  Description of Artificial Sequence: Synthetic oligonucleotide
ucggaugggcuugucgucc

SEQ ID NO: 1492017 - RNA, 19 nt, Artificial Sequence
  Description of Artificial Sequence: Synthetic oligonucleotide
agucgggcauugugagggc

SEQ ID NO: 1492018 - RNA, 19 nt, Artificial Sequence
  Description of Artificial Sequence: Synthetic oligonucleotide
guugccucgaggaucaaaa

SEQ ID NO: 1492019 - RNA, 19 nt, Artificial Sequence
  Description of Artificial Sequence: Synthetic oligonucleotide
cuguuuggacacagucggg

SEQ ID NO: 1492020 - RNA, 19 nt, Artificial Sequence
  Description of Artificial Sequence: Synthetic oligonucleotide
ugagcgcgcaugaaucuua

SEQ ID NO: 1492021 - RNA, 19 nt, Artificial Sequence
  Description of Artificial Sequence: Synthetic oligonucleotide
ucgccaucagaacuuugau

SEQ ID NO: 1492022 - RNA, 19 nt, Artificial Sequence
  Description of Artificial Sequence: Synthetic oligonucleotide
cacucauugagcgcgcaug

SEQ ID NO: 1492023 - RNA, 19 nt, Artificial Sequence
  Description of Artificial Sequence: Synthetic oligonucleotide
uauuugggguccucugaau

SEQ ID NO: 1492024 - RNA, 19 nt, Artificial Sequence
  Description of Artificial Sequence: Synthetic oligonucleotide
ccuugcaaccuguagcggc

SEQ ID NO: 1492025 - RNA, 19 nt, Artificial Sequence
  Description of Artificial Sequence: Synthetic oligonucleotide
uagcacugaauuuggcgua

SEQ ID NO: 1492026 - RNA, 19 nt, Artificial Sequence
  Description of Artificial Sequence: Synthetic oligonucleotide
aaccugcuugaucugucua

SEQ ID NO: 1492027 - RNA, 19 nt, Artificial Sequence
  Description of Artificial Sequence: Synthetic oligonucleotide
cugcuugaucugucuagag

SEQ ID NO: 1492028 - RNA, 19 nt, Artificial Sequence
  Description of Artificial Sequence: Synthetic oligonucleotide
uuauuucgguccacaccaa

SEQ ID NO: 1492029 - RNA, 19 nt, Artificial Sequence
  Description of Artificial Sequence: Synthetic oligonucleotide
guccgcaccuaaguagucg

SEQ ID NO: 1492030 - RNA, 19 nt, Artificial Sequence
  Description of Artificial Sequence: Synthetic oligonucleotide
gcagaacacccuucggagg

SEQ ID NO: 1492031 - RNA, 19 nt, Artificial Sequence
  Description of Artificial Sequence: Synthetic oligonucleotide
guaaguacucugaccauaa

SEQ ID NO: 1492032 - RNA, 19 nt, Artificial Sequence
  Description of Artificial Sequence: Synthetic oligonucleotide
ggucaaucuuuggagguag

SEQ ID NO: 1492033 - RNA, 19 nt, Artificial Sequence
  Description of Artificial Sequence: Synthetic oligonucleotide
cccaagguuaacaaaucuc

SEQ ID NO: 1492034 - RNA, 19 nt, Artificial Sequence
  Description of Artificial Sequence: Synthetic oligonucleotide
aagcaagcgucaguccugu

SEQ ID NO: 1492035 - RNA, 19 nt, Artificial Sequence
  Description of Artificial Sequence: Synthetic oligonucleotide
guagcggggaguagcacug

SEQ ID NO: 1492036 - RNA, 19 nt, Artificial Sequence
  Description of Artificial Sequence: Synthetic oligonucleotide
ugcucggauggcaaacaua

SEQ ID NO: 1492037 - RNA, 19 nt, Artificial Sequence
  Description of Artificial Sequence: Synthetic oligonucleotide
agcaacugcccuagcacag

SEQ ID NO: 1492038 - RNA, 19 nt, Artificial Sequence
  Description of Artificial Sequence: Synthetic oligonucleotide
cuguccaaucucccuggcc

SEQ ID NO: 1492039 - RNA, 19 nt, Artificial Sequence
  Description of Artificial Sequence: Synthetic oligonucleotide
caacugcccuagcacagag

SEQ ID NO: 1492040 - RNA, 19 nt, Artificial Sequence
  Description of Artificial Sequence: Synthetic oligonucleotide
cucggauggcaaacauacc

SEQ ID NO: 1492041 - RNA, 19 nt, Artificial Sequence
  Description of Artificial Sequence: Synthetic oligonucleotide
ucgcugagauccaccacaa

SEQ ID NO: 1492042 - RNA, 19 nt, Artificial Sequence
  Description of Artificial Sequence: Synthetic oligonucleotide
agcgucaguccuguuagca

SEQ ID NO: 1492043 - RNA, 19 nt, Artificial Sequence
  Description of Artificial Sequence: Synthetic oligonucleotide
cuugaucugucuagaguaa

SEQ ID NO: 1492044 - RNA, 19 nt, Artificial Sequence
  Description of Artificial Sequence: Synthetic oligonucleotide
gucgccaucagaacuuuga

SEQ ID NO: 1492045 - RNA, 19 nt, Artificial Sequence
  Description of Artificial Sequence: Synthetic oligonucleotide
ugguuuuccgcugguccgc

SEQ ID NO: 1492046 - RNA, 19 nt, Artificial Sequence
  Description of Artificial Sequence: Synthetic oligonucleotide
uugccucgaggaucaaaac

SEQ ID NO: 1492047 - RNA, 19 nt, Artificial Sequence
  Description of Artificial Sequence: Synthetic oligonucleotide
gaucgcugagauccaccac

SEQ ID NO: 1492048 - RNA, 19 nt, Artificial Sequence
  Description of Artificial Sequence: Synthetic oligonucleotide
ucaguccuguuagcaacug

SEQ ID NO: 1492049 - RNA, 19 nt, Artificial Sequence
  Description of Artificial Sequence: Synthetic oligonucleotide
gcacagagugucuugccug

SEQ ID NO: 1492050 - RNA, 19 nt, Artificial Sequence
  Description of Artificial Sequence: Synthetic oligonucleotide
ccuucggaggcucaauccc

SEQ ID NO: 1492051 - RNA, 19 nt, Artificial Sequence
  Description of Artificial Sequence: Synthetic oligonucleotide
caguccuguuagcaacugc

SEQ ID NO: 1492052 - RNA, 19 nt, Artificial Sequence
  Description of Artificial Sequence: Synthetic oligonucleotide
ggaguagagggguuucaac

SEQ ID NO: 1492053 - RNA, 19 nt, Artificial Sequence
  Description of Artificial Sequence: Synthetic oligonucleotide
ccaagguuaacaaaucucu

SEQ ID NO: 1492054 - RNA, 19 nt, Artificial Sequence
  Description of Artificial Sequence: Synthetic oligonucleotide
caacacucauugagcgcgc

SEQ ID NO: 1492055 - RNA, 19 nt, Artificial Sequence
  Description of Artificial Sequence: Synthetic oligonucleotide
uggaguagagggguuucaa

SEQ ID NO: 1492056 - RNA, 19 nt, Artificial Sequence
  Description of Artificial Sequence: Synthetic oligonucleotide
uccuuacagccaccaacau

SEQ ID NO: 1492057 - RNA, 19 nt, Artificial Sequence
  Description of Artificial Sequence: Synthetic oligonucleotide
acccucuaaaucggguaag

SEQ ID NO: 1492058 - RNA, 19 nt, Artificial Sequence
  Description of Artificial Sequence: Synthetic oligonucleotide
gaguagcacugaauuuggc

SEQ ID NO: 1492059 - RNA, 19 nt, Artificial Sequence
  Description of Artificial Sequence: Synthetic oligonucleotide
ugaguccgacccucuaaau

SEQ ID NO: 1492060 - RNA, 19 nt, Artificial Sequence
  Description of Artificial Sequence: Synthetic oligonucleotide
uccaaagugucaggucggu

SEQ ID NO: 1492061 - RNA, 19 nt, Artificial Sequence
  Description of Artificial Sequence: Synthetic oligonucleotide
gguuagucgccaucagaac

SEQ ID NO: 1492062 - RNA, 19 nt, Artificial Sequence
  Description of Artificial Sequence: Synthetic oligonucleotide
ugcaaccuguagcggcugu

SEQ ID NO: 1492063 - RNA, 19 nt, Artificial Sequence
  Description of Artificial Sequence: Synthetic oligonucleotide
ucggaggcucaaucccaag

SEQ ID NO: 1492064 - RNA, 19 nt, Artificial Sequence
  Description of Artificial Sequence: Synthetic oligonucleotide
gagcucagacccaauaacu

SEQ ID NO: 1492065 - RNA, 19 nt, Artificial Sequence
  Description of Artificial Sequence: Synthetic oligonucleotide
uucguacaccuugcaaccu

SEQ ID NO: 1492066 - RNA, 19 nt, Artificial Sequence
  Description of Artificial Sequence: Synthetic oligonucleotide
ggccgcaagcgccucacgg

SEQ ID NO: 1492067 - RNA, 19 nt, Artificial Sequence
  Description of Artificial Sequence: Synthetic oligonucleotide
ggcucaauuguacgucaug

SEQ ID NO: 1492068 - RNA, 19 nt, Artificial Sequence
  Description of Artificial Sequence: Synthetic oligonucleotide
ucaucaaaccgagccccuc

SEQ ID NO: 1492069 - RNA, 19 nt, Artificial Sequence
  Description of Artificial Sequence: Synthetic oligonucleotide
cucggaugggcuugucguc

SEQ ID NO: 1492070 - RNA, 19 nt, Artificial Sequence
  Description of Artificial Sequence: Synthetic oligonucleotide
cacaccaacucucaucccu

SEQ ID NO: 1492071 - RNA, 19 nt, Artificial Sequence
  Description of Artificial Sequence: Synthetic oligonucleotide
ucacggucucacugauuac

SEQ ID NO: 1492072 - RNA, 19 nt, Artificial Sequence
  Description of Artificial Sequence: Synthetic oligonucleotide
guccgacccucuaaaucgg

SEQ ID NO: 1492073 - RNA, 19 nt, Artificial Sequence
  Description of Artificial Sequence: Synthetic oligonucleotide
cucaccgacguauuucugu

SEQ ID NO: 1492074 - RNA, 19 nt, Artificial Sequence
  Description of Artificial Sequence: Synthetic oligonucleotide
gucaggucgguuagucgcc

SEQ ID NO: 1492075 - RNA, 19 nt, Artificial Sequence
  Description of Artificial Sequence: Synthetic oligonucleotide
accuugcaaccuguagcgg

SEQ ID NO: 1492076 - RNA, 19 nt, Artificial Sequence
  Description of Artificial Sequence: Synthetic oligonucleotide
cuuucuguccaaucucccu

SEQ ID NO: 1492077 - RNA, 19 nt, Artificial Sequence
  Description of Artificial Sequence: Synthetic oligonucleotide
uguugccucgaggaucaaa

SEQ ID NO: 1492078 - RNA, 19 nt, Artificial Sequence
  Description of Artificial Sequence: Synthetic oligonucleotide
cgcaugaaucuuaaagaug

SEQ ID NO: 1492079 - RNA, 19 nt, Artificial Sequence
  Description of Artificial Sequence: Synthetic oligonucleotide
cuguaugugacaucagguu

SEQ ID NO: 1492080 - RNA, 19 nt, Artificial Sequence
  Description of Artificial Sequence: Synthetic oligonucleotide
caccgacguauuucuguac

SEQ ID NO: 1492081 - RNA, 19 nt, Artificial Sequence
  Description of Artificial Sequence: Synthetic oligonucleotide
cuugcaaccuguagcggcu

SEQ ID NO: 1492082 - RNA, 19 nt, Artificial Sequence
  Description of Artificial Sequence: Synthetic oligonucleotide
ucaggucgguuagucgcca

SEQ ID NO: 1492083 - RNA, 19 nt, Artificial Sequence
  Description of Artificial Sequence: Synthetic oligonucleotide
uacccaagagcaggaaguu

SEQ ID NO: 1492084 - RNA, 19 nt, Artificial Sequence
  Description of Artificial Sequence: Synthetic oligonucleotide
gagguaguggaaugugaau

SEQ ID NO: 1492085 - RNA, 19 nt, Artificial Sequence
  Description of Artificial Sequence: Synthetic oligonucleotide
cuaaaucggguaagcuaaa

SEQ ID NO: 1492086 - RNA, 19 nt, Artificial Sequence
  Description of Artificial Sequence: Synthetic oligonucleotide
caaccuguagcggcuguuc

SEQ ID NO: 1492087 - RNA, 19 nt, Artificial Sequence
  Description of Artificial Sequence: Synthetic oligonucleotide
cucuuucaacacucauuga

SEQ ID NO: 1492088 - RNA, 19 nt, Artificial Sequence
  Description of Artificial Sequence: Synthetic oligonucleotide
cagagcucggaugggcuug

SEQ ID NO: 1492089 - RNA, 19 nt, Artificial Sequence
  Description of Artificial Sequence: Synthetic oligonucleotide
cgucaguccuguuagcaac

SEQ ID NO: 1492090 - RNA, 19 nt, Artificial Sequence
  Description of Artificial Sequence: Synthetic oligonucleotide
ggagguaguggaaugugaa

SEQ ID NO: 1492091 - RNA, 19 nt, Artificial Sequence
  Description of Artificial Sequence: Synthetic oligonucleotide
aagugucaggucgguuagu

SEQ ID NO: 1492092 - RNA, 19 nt, Artificial Sequence
  Description of Artificial Sequence: Synthetic oligonucleotide
gcaccuaaguagucgggca

SEQ ID NO: 1492093 - RNA, 19 nt, Artificial Sequence
  Description of Artificial Sequence: Synthetic oligonucleotide
uugagcgcgcaugaaucuu

SEQ ID NO: 1492094 - RNA, 19 nt, Artificial Sequence
  Description of Artificial Sequence: Synthetic oligonucleotide
caccaacucucaucccuuc

SEQ ID NO: 1492095 - RNA, 19 nt, Artificial Sequence
  Description of Artificial Sequence: Synthetic oligonucleotide
ggaggcucaaucccaaggu

SEQ ID NO: 1492096 - RNA, 19 nt, Artificial Sequence
  Description of Artificial Sequence: Synthetic oligonucleotide
guaugugacaucagguuuu

SEQ ID NO: 1492097 - RNA, 19 nt, Artificial Sequence
  Description of Artificial Sequence: Synthetic oligonucleotide
ggcguaggacuugaugacc

SEQ ID NO: 1492098 - RNA, 19 nt, Artificial Sequence
  Description of Artificial Sequence: Synthetic oligonucleotide
gguaguggaaugugaauuu

SEQ ID NO: 1492099 - RNA, 19 nt, Artificial Sequence
  Description of Artificial Sequence: Synthetic oligonucleotide
accagugagcucauugauu

SEQ ID NO: 1492100 - RNA, 19 nt, Artificial Sequence
  Description of Artificial Sequence: Synthetic oligonucleotide
aaagccucuggggcucaau

SEQ ID NO: 1492101 - RNA, 19 nt, Artificial Sequence
  Description of Artificial Sequence: Synthetic oligonucleotide
aucaucaaaccgagccccu

SEQ ID NO: 1492102 - RNA, 19 nt, Artificial Sequence
  Description of Artificial Sequence: Synthetic oligonucleotide
uagcggcuguucacucuga

SEQ ID NO: 1492103 - RNA, 19 nt, Artificial Sequence
  Description of Artificial Sequence: Synthetic oligonucleotide
gcaagcgucaguccuguua

SEQ ID NO: 1492104 - RNA, 19 nt, Artificial Sequence
  Description of Artificial Sequence: Synthetic oligonucleotide
uucgccgugcucggauggc

SEQ ID NO: 1492105 - RNA, 19 nt, Artificial Sequence
  Description of Artificial Sequence: Synthetic oligonucleotide
uuuccgccccaguacuguu

SEQ ID NO: 1492106 - RNA, 19 nt, Artificial Sequence
  Description of Artificial Sequence: Synthetic oligonucleotide
aacacccuucggaggcuca

SEQ ID NO: 1492107 - RNA, 19 nt, Artificial Sequence
  Description of Artificial Sequence: Synthetic oligonucleotide
gcucaauuguacgucaugu

SEQ ID NO: 1492108 - RNA, 19 nt, Artificial Sequence
  Description of Artificial Sequence: Synthetic oligonucleotide
accuaaguagucgggcauu

SEQ ID NO: 1492109 - RNA, 19 nt, Artificial Sequence
  Description of Artificial Sequence: Synthetic oligonucleotide
agcggggaguagcacugaa

SEQ ID NO: 1492110 - RNA, 19 nt, Artificial Sequence
  Description of Artificial Sequence: Synthetic oligonucleotide
agcggcuguucacucugaa

SEQ ID NO: 1492111 - RNA, 19 nt, Artificial Sequence
  Description of Artificial Sequence: Synthetic oligonucleotide
agagggguuucaacuacuu

SEQ ID NO: 1492112 - RNA, 19 nt, Artificial Sequence
  Description of Artificial Sequence: Synthetic oligonucleotide
cggaggcucaaucccaagg

SEQ ID NO: 1492113 - RNA, 19 nt, Artificial Sequence
  Description of Artificial Sequence: Synthetic oligonucleotide
ggggcucaauuguacguca

SEQ ID NO: 1492114 - RNA, 19 nt, Artificial Sequence
  Description of Artificial Sequence: Synthetic oligonucleotide
gcgcaugaaucuuaaagau

SEQ ID NO: 1492115 - RNA, 19 nt, Artificial Sequence
  Description of Artificial Sequence: Synthetic oligonucleotide
gaacacccuucggaggcuc

SEQ ID NO: 1492116 - RNA, 19 nt, Artificial Sequence
  Description of Artificial Sequence: Synthetic oligonucleotide
augugaguccgacccucua

SEQ ID NO: 1492117 - RNA, 19 nt, Artificial Sequence
  Description of Artificial Sequence: Synthetic oligonucleotide
caggaaguucucacucaaa

SEQ ID NO: 1492118 - RNA, 19 nt, Artificial Sequence
  Description of Artificial Sequence: Synthetic oligonucleotide
agcgccucacggucucacu

SEQ ID NO: 1492119 - RNA, 19 nt, Artificial Sequence
  Description of Artificial Sequence: Synthetic oligonucleotide
cuggggcucaauuguacgu

SEQ ID NO: 1492120 - RNA, 19 nt, Artificial Sequence
  Description of Artificial Sequence: Synthetic oligonucleotide
gaggcucaaucccaagguu

SEQ ID NO: 1492121 - RNA, 19 nt, Artificial Sequence
  Description of Artificial Sequence: Synthetic oligonucleotide
acaccaacucucaucccuu

SEQ ID NO: 1492122 - RNA, 19 nt, Artificial Sequence
  Description of Artificial Sequence: Synthetic oligonucleotide
ccuaaguagucgggcauug

SEQ ID NO: 1492123 - RNA, 19 nt, Artificial Sequence
  Description of Artificial Sequence: Synthetic oligonucleotide
ggcucaaucccaagguuaa

SEQ ID NO: 1492124 - RNA, 19 nt, Artificial Sequence
  Description of Artificial Sequence: Synthetic oligonucleotide
cccucuaaaucggguaagc

SEQ ID NO: 1492125 - RNA, 19 nt, Artificial Sequence
  Description of Artificial Sequence: Synthetic oligonucleotide
cgguuagucgccaucagaa

SEQ ID NO: 1492126 - RNA, 19 nt, Artificial Sequence
  Description of Artificial Sequence: Synthetic oligonucleotide
cuguacgagcucagaccca

SEQ ID NO: 1492127 - RNA, 19 nt, Artificial Sequence
  Description of Artificial Sequence: Synthetic oligonucleotide
uagucgccaucagaacuuu

SEQ ID NO: 1492128 - RNA, 19 nt, Artificial Sequence
  Description of Artificial Sequence: Synthetic oligonucleotide
gccccaguacuguuuggac

SEQ ID NO: 1492129 - RNA, 19 nt, Artificial Sequence
  Description of Artificial Sequence: Synthetic oligonucleotide
agagcucggaugggcuugu

SEQ ID NO: 1492130 - RNA, 19 nt, Artificial Sequence
  Description of Artificial Sequence: Synthetic oligonucleotide
agcgcgcaugaaucuuaaa

SEQ ID NO: 1492131 - RNA, 19 nt, Artificial Sequence
  Description of Artificial Sequence: Synthetic oligonucleotide
agucgccaucagaacuuug

SEQ ID NO: 1492132 - RNA, 19 nt, Artificial Sequence
  Description of Artificial Sequence: Synthetic oligonucleotide
aggccagugucagacucuu

SEQ ID NO: 1492133 - RNA, 19 nt, Artificial Sequence
  Description of Artificial Sequence: Synthetic oligonucleotide
ggaugaagcaagcgucagu

SEQ ID NO: 1492134 - RNA, 19 nt, Artificial Sequence
  Description of Artificial Sequence: Synthetic oligonucleotide
guacgucauguagcgggga

SEQ ID NO: 1492135 - RNA, 19 nt, Artificial Sequence
  Description of Artificial Sequence: Synthetic oligonucleotide
ccaaacagcagaacacccu

SEQ ID NO: 1492136 - RNA, 19 nt, Artificial Sequence
  Description of Artificial Sequence: Synthetic oligonucleotide
gucaguccuguuagcaacu

SEQ ID NO: 1492137 - RNA, 19 nt, Artificial Sequence
  Description of Artificial Sequence: Synthetic oligonucleotide
ccgcaccuaaguagucggg

SEQ ID NO: 1492138 - RNA, 19 nt, Artificial Sequence
  Description of Artificial Sequence: Synthetic oligonucleotide
cgcaccuaaguagucgggc

SEQ ID NO: 1492139 - RNA, 19 nt, Artificial Sequence
  Description of Artificial Sequence: Synthetic oligonucleotide
gcgucaguccuguuagcaa

SEQ ID NO: 1492140 - RNA, 19 nt, Artificial Sequence
  Description of Artificial Sequence: Synthetic oligonucleotide
caacuacuucucucaauuu

SEQ ID NO: 1492141 - RNA, 19 nt, Artificial Sequence
  Description of Artificial Sequence: Synthetic oligonucleotide
gauuaucuucguacaccuu

SEQ ID NO: 1492142 - RNA, 19 nt, Artificial Sequence
  Description of Artificial Sequence: Synthetic oligonucleotide
caccuaaguagucgggcau

SEQ ID NO: 1492143 - RNA, 19 nt, Artificial Sequence
  Description of Artificial Sequence: Synthetic oligonucleotide
acacccuucggaggcucaa

SEQ ID NO: 1492144 - RNA, 19 nt, Artificial Sequence
  Description of Artificial Sequence: Synthetic oligonucleotide
gcaagcgccucacggucuc

SEQ ID NO: 1492145 - RNA, 19 nt, Artificial Sequence
  Description of Artificial Sequence: Synthetic oligonucleotide
ccgacguauuucuguacga

SEQ ID NO: 1492146 - RNA, 19 nt, Artificial Sequence
  Description of Artificial Sequence: Synthetic oligonucleotide
ccugcaucaugguaacugu

SEQ ID NO: 1492147 - RNA, 19 nt, Artificial Sequence
  Description of Artificial Sequence: Synthetic oligonucleotide
gccagcaguucaaaccuaa

SEQ ID NO: 1492148 - RNA, 19 nt, Artificial Sequence
  Description of Artificial Sequence: Synthetic oligonucleotide
accugaucgcugagaucca

SEQ ID NO: 1492149 - RNA, 19 nt, Artificial Sequence
  Description of Artificial Sequence: Synthetic oligonucleotide
ccgcaagcgccucacgguc

SEQ ID NO: 1492150 - RNA, 19 nt, Artificial Sequence
  Description of Artificial Sequence: Synthetic oligonucleotide
ccugaucgcugagauccac

SEQ ID NO: 1492151 - RNA, 19 nt, Artificial Sequence
  Description of Artificial Sequence: Synthetic oligonucleotide
gcguaggacuugaugaccu

SEQ ID NO: 1492152 - RNA, 19 nt, Artificial Sequence
  Description of Artificial Sequence: Synthetic oligonucleotide
gcucaaucccaagguuaac

SEQ ID NO: 1492153 - RNA, 19 nt, Artificial Sequence
  Description of Artificial Sequence: Synthetic oligonucleotide
gcaacugcccuagcacaga

SEQ ID NO: 1492154 - RNA, 19 nt, Artificial Sequence
  Description of Artificial Sequence: Synthetic oligonucleotide
ccucaccgacguauuucug

SEQ ID NO: 1492155 - RNA, 19 nt, Artificial Sequence
  Description of Artificial Sequence: Synthetic oligonucleotide
ggggaguagcacugaauuu

SEQ ID NO: 1492156 - RNA, 19 nt, Artificial Sequence
  Description of Artificial Sequence: Synthetic oligonucleotide
ccccucaccgacguauuuc

SEQ ID NO: 1492157 - RNA, 19 nt, Artificial Sequence
  Description of Artificial Sequence: Synthetic oligonucleotide
guacaccuugcaaccugua

SEQ ID NO: 1492158 - RNA, 19 nt, Artificial Sequence
  Description of Artificial Sequence: Synthetic oligonucleotide
cggaugaagcaagcgucag

SEQ ID NO: 1492159 - RNA, 19 nt, Artificial Sequence
  Description of Artificial Sequence: Synthetic oligonucleotide
agcaagcgucaguccuguu

SEQ ID NO: 1492160 - RNA, 19 nt, Artificial Sequence
  Description of Artificial Sequence: Synthetic oligonucleotide
cugcccuagcacagagugu

SEQ ID NO: 1492161 - RNA, 19 nt, Artificial Sequence
  Description of Artificial Sequence: Synthetic oligonucleotide
cagacccaauaacucggau

SEQ ID NO: 1492162 - RNA, 19 nt, Artificial Sequence
  Description of Artificial Sequence: Synthetic oligonucleotide
gccgcaagcgccucacggu

SEQ ID NO: 1492163 - RNA, 19 nt, Artificial Sequence
  Description of Artificial Sequence: Synthetic oligonucleotide
cccucaccgacguauuucu

SEQ ID NO: 1492164 - RNA, 19 nt, Artificial Sequence
  Description of Artificial Sequence: Synthetic oligonucleotide
ccgagccccuccaauggca

SEQ ID NO: 1492165 - RNA, 19 nt, Artificial Sequence
  Description of Artificial Sequence: Synthetic oligonucleotide
uuccgcugguccgcaccua

SEQ ID NO: 1492166 - RNA, 19 nt, Artificial Sequence
  Description of Artificial Sequence: Synthetic oligonucleotide
gguccgcaccuaaguaguc

SEQ ID NO: 1492167 - RNA, 19 nt, Artificial Sequence
  Description of Artificial Sequence: Synthetic oligonucleotide
ccgcugguccgcaccuaag

SEQ ID NO: 1492168 - RNA, 19 nt, Artificial Sequence
  Description of Artificial Sequence: Synthetic oligonucleotide
cgacccucuaaaucgggua

SEQ ID NO: 1492169 - RNA, 19 nt, Artificial Sequence
  Description of Artificial Sequence: Synthetic oligonucleotide
ggauggaguagagggguuu

SEQ ID NO: 1492170 - RNA, 19 nt, Artificial Sequence
  Description of Artificial Sequence: Synthetic oligonucleotide
ccgccccaguacuguuugg

SEQ ID NO: 1492171 - RNA, 19 nt, Artificial Sequence
  Description of Artificial Sequence: Synthetic oligonucleotide
cggggaguagcacugaauu

SEQ ID NO: 1492172 - RNA, 19 nt, Artificial Sequence
  Description of Artificial Sequence: Synthetic oligonucleotide
cguacaccuugcaaccugu

SEQ ID NO: 1492173 - RNA, 19 nt, Artificial Sequence
  Description of Artificial Sequence: Synthetic oligonucleotide
caagcgccucacggucuca

SEQ ID NO: 1492174 - RNA, 19 nt, Artificial Sequence
  Description of Artificial Sequence: Synthetic oligonucleotide
ccgacccucuaaaucgggu

SEQ ID NO: 1492175 - RNA, 19 nt, Artificial Sequence
  Description of Artificial Sequence: Synthetic oligonucleotide
caggucgguuagucgccau

SEQ ID NO: 1492176 - RNA, 19 nt, Artificial Sequence
  Description of Artificial Sequence: Synthetic oligonucleotide
ggccagcaguucaaaccua

SEQ ID NO: 1492177 - RNA, 19 nt, Artificial Sequence
  Description of Artificial Sequence: Synthetic oligonucleotide
cgccccaguacuguuugga

SEQ ID NO: 1492178 - RNA, 19 nt, Artificial Sequence
  Description of Artificial Sequence: Synthetic oligonucleotide
guacgagcucagacccaau

SEQ ID NO: 1492179 - RNA, 19 nt, Artificial Sequence
  Description of Artificial Sequence: Synthetic oligonucleotide
gggcucaauuguacgucau

SEQ ID NO: 1492180 - RNA, 19 nt, Artificial Sequence
  Description of Artificial Sequence: Synthetic oligonucleotide
gcggggaguagcacugaau

SEQ ID NO: 1492181 - RNA, 19 nt, Artificial Sequence
  Description of Artificial Sequence: Synthetic oligonucleotide
cacccuucggaggcucaau

SEQ ID NO: 1492182 - RNA, 19 nt, Artificial Sequence
  Description of Artificial Sequence: Synthetic oligonucleotide
gcaaccuguagcggcuguu

SEQ ID NO: 1492183 - RNA, 19 nt, Artificial Sequence
  Description of Artificial Sequence: Synthetic oligonucleotide
cggguaagcuaaacucaau

SEQ ID NO: 1492184 - RNA, 19 nt, Artificial Sequence
  Description of Artificial Sequence: Synthetic oligonucleotide
cgccgugcucggauggcaa

SEQ ID NO: 1492185 - RNA, 19 nt, Artificial Sequence
  Description of Artificial Sequence: Synthetic oligonucleotide
cgcaagcgccucacggucu

SEQ ID NO: 1492186 - RNA, 19 nt, Artificial Sequence
  Description of Artificial Sequence: Synthetic oligonucleotide
ccaaagugucaggucgguu

SEQ ID NO: 1492187 - RNA, 19 nt, Artificial Sequence
  Description of Artificial Sequence: Synthetic oligonucleotide
cgcugagauccaccacaaa

SEQ ID NO: 1492188 - RNA, 19 nt, Artificial Sequence
  Description of Artificial Sequence: Synthetic oligonucleotide
cccuagcacagagugucuu

SEQ ID NO: 1492189 - RNA, 19 nt, Artificial Sequence
  Description of Artificial Sequence: Synthetic oligonucleotide
ggccagugucagacucuuu

SEQ ID NO: 1492190 - RNA, 19 nt, Artificial Sequence
  Description of Artificial Sequence: Synthetic oligonucleotide
  modified_base (7)..(7): a, c, u, g, unknown or other
aauguunucauguuccauc

SEQ ID NO: 1492191 - RNA, 19 nt, Artificial Sequence
  Description of Artificial Sequence: Synthetic oligonucleotide
aaacagcuaauacagagac

SEQ ID NO: 1492192 - RNA, 19 nt, Artificial Sequence
  Description of Artificial Sequence: Synthetic oligonucleotide
aauuaguucgaccaccuuc

SEQ ID NO: 1492193 - RNA, 19 nt, Artificial Sequence
  Description of Artificial Sequence: Synthetic oligonucleotide
uauggagucuucaagaucc

SEQ ID NO: 1492194 - RNA, 19 nt, Artificial Sequence
  Description of Artificial Sequence: Synthetic oligonucleotide
aaaugaaugagguggacug

SEQ ID NO: 1492195 - RNA, 19 nt, Artificial Sequence
  Description of Artificial Sequence: Synthetic oligonucleotide
agauccagagaauugggcc

SEQ ID NO: 1492196 - RNA, 19 nt, Artificial Sequence
  Description of Artificial Sequence: Synthetic oligonucleotide
  modified_base (10)..(10): a, c, u, g, unknown or other
agcaauguunucauguucc

SEQ ID NO: 1492197 - RNA, 19 nt, Artificial Sequence
  Description of Artificial Sequence: Synthetic oligonucleotide
ucaucucaacuauaaaucg

SEQ ID NO: 1492198 - RNA, 19 nt, Artificial Sequence
  Description of Artificial Sequence: Synthetic oligonucleotide
ucuccuauagucaaaggug

SEQ ID NO: 1492199 - RNA, 19 nt, Artificial Sequence
  Description of Artificial Sequence: Synthetic oligonucleotide
  modified_base (16)..(16): a, c, u, g, unknown or other
aaaucgagcaauguunuca

SEQ ID NO: 1492200 - RNA, 19 nt, Artificial Sequence
  Description of Artificial Sequence: Synthetic oligonucleotide
cuaauacagagacugaugc

SEQ ID NO: 1492201 - RNA, 19 nt, Artificial Sequence
  Description of Artificial Sequence: Synthetic oligonucleotide
agauauaguggucaugccg

SEQ ID NO: 1492202 - RNA, 19 nt, Artificial Sequence
  Description of Artificial Sequence: Synthetic oligonucleotide
ucgauuaaaugaaugaggu

SEQ ID NO: 1492203 - RNA, 19 nt, Artificial Sequence
  Description of Artificial Sequence: Synthetic oligonucleotide
gauauaguggucaugccgg

SEQ ID NO: 1492204 - RNA, 19 nt, Artificial Sequence
  Description of Artificial Sequence: Synthetic oligonucleotide
aauuaauugaauuccgguu

SEQ ID NO: 1492205 - RNA, 19 nt, Artificial Sequence
  Description of Artificial Sequence: Synthetic oligonucleotide
gacugugcaacauuugugg

SEQ ID NO: 1492206 - RNA, 19 nt, Artificial Sequence
  Description of Artificial Sequence: Synthetic oligonucleotide
uauacugcugccauccagg

SEQ ID NO: 1492207 - RNA, 19 nt, Artificial Sequence
  Description of Artificial Sequence: Synthetic oligonucleotide
gaucuuuucaccugauccg

SEQ ID NO: 1492208 - RNA, 19 nt, Artificial Sequence
  Description of Artificial Sequence: Synthetic oligonucleotide
gaaagauccagagaauugg

SEQ ID NO: 1492209 - RNA, 19 nt, Artificial Sequence
  Description of Artificial Sequence: Synthetic oligonucleotide
cucgauuaaaugaaugagg

SEQ ID NO: 1492210 - RNA, 19 nt, Artificial Sequence
  Description of Artificial Sequence: Synthetic oligonucleotide
uucagauuauccaagucca

SEQ ID NO: 1492211 - RNA, 19 nt, Artificial Sequence
  Description of Artificial Sequence: Synthetic oligonucleotide
ucagauauaguggucaugc

SEQ ID NO: 1492212 - RNA, 19 nt, Artificial Sequence
  Description of Artificial Sequence: Synthetic oligonucleotide
ucaacuauaaaucgagcaa

SEQ ID NO: 1492213 - RNA, 19 nt, Artificial Sequence
  Description of Artificial Sequence: Synthetic oligonucleotide
  modified_base (2)..(2): a, c, u, g, unknown or other
unucauguuccaucaaagg

SEQ ID NO: 1492214 - RNA, 19 nt, Artificial Sequence
  Description of Artificial Sequence: Synthetic oligonucleotide
ggaauugauauucagucgg

SEQ ID NO: 1492215 - RNA, 19 nt, Artificial Sequence
  Description of Artificial Sequence: Synthetic oligonucleotide
ucucaguaaagguucaugc

SEQ ID NO: 1492216 - RNA, 19 nt, Artificial Sequence
  Description of Artificial Sequence: Synthetic oligonucleotide
ugauaaagcaagcuagaac

SEQ ID NO: 1492217 - RNA, 19 nt, Artificial Sequence
  Description of Artificial Sequence: Synthetic oligonucleotide
agauuauccaaguccagag

SEQ ID NO: 1492218 - RNA, 19 nt, Artificial Sequence
  Description of Artificial Sequence: Synthetic oligonucleotide
ucaccuaucuguauacugc

SEQ ID NO: 1492219 - RNA, 19 nt, Artificial Sequence
  Description of Artificial Sequence: Synthetic oligonucleotide
ucaguaaagguucaugcuc

SEQ ID NO: 1492220 - RNA, 19 nt, Artificial Sequence
  Description of Artificial Sequence: Synthetic oligonucleotide
uggaauugauauucagucg

SEQ ID NO: 1492221 - RNA, 19 nt, Artificial Sequence
  Description of Artificial Sequence: Synthetic oligonucleotide
uccaugacaagcaaauacu

SEQ ID NO: 1492222 - RNA, 19 nt, Artificial Sequence
  Description of Artificial Sequence: Synthetic oligonucleotide
auaguggucaugccgguac

SEQ ID NO: 1492223 - RNA, 19 nt, Artificial Sequence
  Description of Artificial Sequence: Synthetic oligonucleotide
ucucgauuaaaugaaugag

SEQ ID NO: 1492224 - RNA, 19 nt, Artificial Sequence
  Description of Artificial Sequence: Synthetic oligonucleotide
uugauauucagucggguau

SEQ ID NO: 1492225 - RNA, 19 nt, Artificial Sequence
  Description of Artificial Sequence: Synthetic oligonucleotide
uguuguaucaggaggugga

SEQ ID NO: 1492226 - RNA, 19 nt, Artificial Sequence
  Description of Artificial Sequence: Synthetic oligonucleotide
auaaaauucugacgguuug

SEQ ID NO: 1492227 - RNA, 19 nt, Artificial Sequence
  Description of Artificial Sequence: Synthetic oligonucleotide
auguucauacugugaaggc

SEQ ID NO: 1492228 - RNA, 19 nt, Artificial Sequence
  Description of Artificial Sequence: Synthetic oligonucleotide
auaauuaauugaauuccgg

SEQ ID NO: 1492229 - RNA, 19 nt, Artificial Sequence
  Description of Artificial Sequence: Synthetic oligonucleotide
uauccucaccaauaaauug

SEQ ID NO: 1492230 - RNA, 19 nt, Artificial Sequence
  Description of Artificial Sequence: Synthetic oligonucleotide
aguacaucuuguucugaac

SEQ ID NO: 1492231 - RNA, 19 nt, Artificial Sequence
  Description of Artificial Sequence: Synthetic oligonucleotide
aucucgauuaaaugaauga

SEQ ID NO: 1492232 - RNA, 19 nt, Artificial Sequence
  Description of Artificial Sequence: Synthetic oligonucleotide
aaacauaaggcgacuauca

SEQ ID NO: 1492233 - RNA, 19 nt, Artificial Sequence
  Description of Artificial Sequence: Synthetic oligonucleotide
acauuacauaaaucuguac

SEQ ID NO: 1492234 - RNA, 19 nt, Artificial Sequence
  Description of Artificial Sequence: Synthetic oligonucleotide
uauaaaauucugacgguuu

SEQ ID NO: 1492235 - RNA, 19 nt, Artificial Sequence
  Description of Artificial Sequence: Synthetic oligonucleotide
uguaucaggagguggaaaa

SEQ ID NO: 1492236 - RNA, 19 nt, Artificial Sequence
  Description of Artificial Sequence: Synthetic oligonucleotide
accaauaaauugguuuugc

SEQ ID NO: 1492237 - RNA, 19 nt, Artificial Sequence
  Description of Artificial Sequence: Synthetic oligonucleotide
auauuuguggcugaaagau

SEQ ID NO: 1492238 - RNA, 19 nt, Artificial Sequence
  Description of Artificial Sequence: Synthetic oligonucleotide
agaguguuccaugagguuc

SEQ ID NO: 1492239 - RNA, 19 nt, Artificial Sequence
  Description of Artificial Sequence: Synthetic oligonucleotide
gagaauugggccucugugc

SEQ ID NO: 1492240 - RNA, 19 nt, Artificial Sequence
  Description of Artificial Sequence: Synthetic oligonucleotide
aaaauucugacgguuugca

SEQ ID NO: 1492241 - RNA, 19 nt, Artificial Sequence
  Description of Artificial Sequence: Synthetic oligonucleotide
uccaucauguucauacugu

SEQ ID NO: 1492242 - RNA, 19 nt, Artificial Sequence
  Description of Artificial Sequence: Synthetic oligonucleotide
gucagcuguaagcagacag

SEQ ID NO: 1492243 - RNA, 19 nt, Artificial Sequence
  Description of Artificial Sequence: Synthetic oligonucleotide
auguauggagucuucaaga

SEQ ID NO: 1492244 - RNA, 19 nt, Artificial Sequence
  Description of Artificial Sequence: Synthetic oligonucleotide
uucaccuaucuguauacug

SEQ ID NO: 1492245 - RNA, 19 nt, Artificial Sequence
  Description of Artificial Sequence: Synthetic oligonucleotide
auccucaccaauaaauugg

SEQ ID NO: 1492246 - RNA, 19 nt, Artificial Sequence
  Description of Artificial Sequence: Synthetic oligonucleotide
cauaaggcgacuaucaaaa

SEQ ID NO: 1492247 - RNA, 19 nt, Artificial Sequence
  Description of Artificial Sequence: Synthetic oligonucleotide
uauuggaauuaguucgacc

SEQ ID NO: 1492248 - RNA, 19 nt, Artificial Sequence
  Description of Artificial Sequence: Synthetic oligonucleotide
auccaaggaaccuuuauau

SEQ ID NO: 1492249 - RNA, 19 nt, Artificial Sequence
  Description of Artificial Sequence: Synthetic oligonucleotide
ugggauaauacuccaugac

SEQ ID NO: 1492250 - RNA, 19 nt, Artificial Sequence
  Description of Artificial Sequence: Synthetic oligonucleotide
aaaacagcuaauacagaga

SEQ ID NO: 1492251 - RNA, 19 nt, Artificial Sequence
  Description of Artificial Sequence: Synthetic oligonucleotide
ugacugugcaacauuugug

SEQ ID NO: 1492252 - RNA, 19 nt, Artificial Sequence
  Description of Artificial Sequence: Synthetic oligonucleotide
agcuuauuagucuccaagu

SEQ ID NO: 1492253 - RNA, 19 nt, Artificial Sequence
  Description of Artificial Sequence: Synthetic oligonucleotide
auaucgaccccguccaauc

SEQ ID NO: 1492254 - RNA, 19 nt, Artificial Sequence
  Description of Artificial Sequence: Synthetic oligonucleotide
ugucucaucucgauuaaau

SEQ ID NO: 1492255 - RNA, 19 nt, Artificial Sequence
  Description of Artificial Sequence: Synthetic oligonucleotide
uacggcaccucagauauag

SEQ ID NO: 1492256 - RNA, 19 nt, Artificial Sequence
  Description of Artificial Sequence: Synthetic oligonucleotide
guaaaguugacauuacaua

SEQ ID NO: 1492257 - RNA, 19 nt, Artificial Sequence
  Description of Artificial Sequence: Synthetic oligonucleotide
agcccuaugugacacuagg

SEQ ID NO: 1492258 - RNA, 19 nt, Artificial Sequence
  Description of Artificial Sequence: Synthetic oligonucleotide
guggcugaaagauccagag

SEQ ID NO: 1492259 - RNA, 19 nt, Artificial Sequence
  Description of Artificial Sequence: Synthetic oligonucleotide
aguaaaguugacauuacau

SEQ ID NO: 1492260 - RNA, 19 nt, Artificial Sequence
  Description of Artificial Sequence: Synthetic oligonucleotide
aacuauaaaucgagcaaug

SEQ ID NO: 1492261 - RNA, 19 nt, Artificial Sequence
  Description of Artificial Sequence: Synthetic oligonucleotide
  modified_base (6)..(6): a, c, u, g, unknown or other
auguunucauguuccauca

SEQ ID NO: 1492262 - RNA, 19 nt, Artificial Sequence
  Description of Artificial Sequence: Synthetic oligonucleotide
uguaacacccuguguaagu

SEQ ID NO: 1492263 - RNA, 19 nt, Artificial Sequence
  Description of Artificial Sequence: Synthetic oligonucleotide
uuuugggucuagcuuauua

SEQ ID NO: 1492264 - RNA, 19 nt, Artificial Sequence
  Description of Artificial Sequence: Synthetic oligonucleotide
cugcuuaagagaguguucc

SEQ ID NO: 1492265 - RNA, 19 nt, Artificial Sequence
  Description of Artificial Sequence: Synthetic oligonucleotide
uggcaugcaaauuugucuc

SEQ ID NO: 1492266 - RNA, 19 nt, Artificial Sequence
  Description of Artificial Sequence: Synthetic oligonucleotide
  modified_base (4)..(4): a, c, u, g, unknown or other
guunucauguuccaucaaa

SEQ ID NO: 1492267 - RNA, 19 nt, Artificial Sequence
  Description of Artificial Sequence: Synthetic oligonucleotide
cuuggagugaggccagugg

SEQ ID NO: 1492268 - RNA, 19 nt, Artificial Sequence
  Description of Artificial Sequence: Synthetic oligonucleotide
caucucgauuaaaugaaug

SEQ ID NO: 1492269 - RNA, 19 nt, Artificial Sequence
  Description of Artificial Sequence: Synthetic oligonucleotide
uggaauuaguucgaccacc

SEQ ID NO: 1492270 - RNA, 19 nt, Artificial Sequence
  Description of Artificial Sequence: Synthetic oligonucleotide
aacgauccagaaccccuuc

SEQ ID NO: 1492271 - RNA, 19 nt, Artificial Sequence
  Description of Artificial Sequence: Synthetic oligonucleotide
cuguauacugcugccaucc

SEQ ID NO: 1492272 - RNA, 19 nt, Artificial Sequence
  Description of Artificial Sequence: Synthetic oligonucleotide
ccaaggaaccuuuauauac

SEQ ID NO: 1492273 - RNA, 19 nt, Artificial Sequence
  Description of Artificial Sequence: Synthetic oligonucleotide
aauugauauucagucgggu

SEQ ID NO: 1492274 - RNA, 19 nt, Artificial Sequence
  Description of Artificial Sequence: Synthetic oligonucleotide
agguggaaaauucucagua

SEQ ID NO: 1492275 - RNA, 19 nt, Artificial Sequence
  Description of Artificial Sequence: Synthetic oligonucleotide
uccggauuugccaucuugu

SEQ ID NO: 1492276 - RNA, 19 nt, Artificial Sequence
  Description of Artificial Sequence: Synthetic oligonucleotide
ucugacgguuugcaaaaga

SEQ ID NO: 1492277 - RNA, 19 nt, Artificial Sequence
  Description of Artificial Sequence: Synthetic oligonucleotide
auaaggcgacuaucaaaac

SEQ ID NO: 1492278 - RNA, 19 nt, Artificial Sequence
  Description of Artificial Sequence: Synthetic oligonucleotide
uugggucuagcuuauuagu

SEQ ID NO: 1492279 - RNA, 19 nt, Artificial Sequence
  Description of Artificial Sequence: Synthetic oligonucleotide
uuuucgguucuccugucaa

SEQ ID NO: 1492280 - RNA, 19 nt, Artificial Sequence
  Description of Artificial Sequence: Synthetic oligonucleotide
auugauauucagucgggua

SEQ ID NO: 1492281 - RNA, 19 nt, Artificial Sequence
  Description of Artificial Sequence: Synthetic oligonucleotide
caagcuagaacugguacug

SEQ ID NO: 1492282 - RNA, 19 nt, Artificial Sequence
  Description of Artificial Sequence: Synthetic oligonucleotide
ugacgguuugcaaaagaaa

SEQ ID NO: 1492283 - RNA, 19 nt, Artificial Sequence
  Description of Artificial Sequence: Synthetic oligonucleotide
uaguucgaccaccuucuag

SEQ ID NO: 1492284 - RNA, 19 nt, Artificial Sequence
  Description of Artificial Sequence: Synthetic oligonucleotide
ugggucuagcuuauuaguc

SEQ ID NO: 1492285 - RNA, 19 nt, Artificial Sequence
  Description of Artificial Sequence: Synthetic oligonucleotide
acauaaggcgacuaucaaa

SEQ ID NO: 1492286 - RNA, 19 nt, Artificial Sequence
  Description of Artificial Sequence: Synthetic oligonucleotide
aauugggccucugugcucu

SEQ ID NO: 1492287 - RNA, 19 nt, Artificial Sequence
  Description of Artificial Sequence: Synthetic oligonucleotide
uuuacagcaacuggacgcu

SEQ ID NO: 1492288 - RNA, 19 nt, Artificial Sequence
  Description of Artificial Sequence: Synthetic oligonucleotide
gaaaauucucaguaaaguu

SEQ ID NO: 1492289 - RNA, 19 nt, Artificial Sequence
  Description of Artificial Sequence: Synthetic oligonucleotide
uggacgcucauccaaggaa

SEQ ID NO: 1492290 - RNA, 19 nt, Artificial Sequence
  Description of Artificial Sequence: Synthetic oligonucleotide
aaauucugacgguuugcaa

SEQ ID NO: 1492291 - RNA, 19 nt, Artificial Sequence
  Description of Artificial Sequence: Synthetic oligonucleotide
aaauacuccaugcgaccau

SEQ ID NO: 1492292 - RNA, 19 nt, Artificial Sequence
  Description of Artificial Sequence: Synthetic oligonucleotide
uguguaaguacaucuuguu

SEQ ID NO: 1492293 - RNA, 19 nt, Artificial Sequence
  Description of Artificial Sequence: Synthetic oligonucleotide
gauuauccaaguccagaga

SEQ ID NO: 1492294 - RNA, 19 nt, Artificial Sequence
  Description of Artificial Sequence: Synthetic oligonucleotide
acuagguuagcugccugac

SEQ ID NO: 1492295 - RNA, 19 nt, Artificial Sequence
  Description of Artificial Sequence: Synthetic oligonucleotide
aacauuuguggcaugcaaa

SEQ ID NO: 1492296 - RNA, 19 nt, Artificial Sequence
  Description of Artificial Sequence: Synthetic oligonucleotide
caugcgaccaucugcugug

SEQ ID NO: 1492297 - RNA, 19 nt, Artificial Sequence
  Description of Artificial Sequence: Synthetic oligonucleotide
ucuagcuuauuagucucca

SEQ ID NO: 1492298 - RNA, 19 nt, Artificial Sequence
  Description of Artificial Sequence: Synthetic oligonucleotide
gugcucagaggauauauuc

SEQ ID NO: 1492299 - RNA, 19 nt, Artificial Sequence
  Description of Artificial Sequence: Synthetic oligonucleotide
acuauaaaucgagcaaugu

SEQ ID NO: 1492300 - RNA, 19 nt, Artificial Sequence
  Description of Artificial Sequence: Synthetic oligonucleotide
uguaagcagacagggguug

SEQ ID NO: 1492301 - RNA, 19 nt, Artificial Sequence
  Description of Artificial Sequence: Synthetic oligonucleotide
cuaccaaacgauccagaac

SEQ ID NO: 1492302 - RNA, 19 nt, Artificial Sequence
  Description of Artificial Sequence: Synthetic oligonucleotide
uucgguucuccugucaaca

SEQ ID NO: 1492303 - RNA, 19 nt, Artificial Sequence
  Description of Artificial Sequence: Synthetic oligonucleotide
ucggguauccucaccaaua

SEQ ID NO: 1492304 - RNA, 19 nt, Artificial Sequence
  Description of Artificial Sequence: Synthetic oligonucleotide
  modified_base (18)..(18): a, c, u, g, unknown or other
auaaaucgagcaauguunu

SEQ ID NO: 1492305 - RNA, 19 nt, Artificial Sequence
  Description of Artificial Sequence: Synthetic oligonucleotide
gauauucagucggguaucc

SEQ ID NO: 1492306 - RNA, 19 nt, Artificial Sequence
  Description of Artificial Sequence: Synthetic oligonucleotide
aggaaccuuuauauacugc

SEQ ID NO: 1492307 - RNA, 19 nt, Artificial Sequence
  Description of Artificial Sequence: Synthetic oligonucleotide
ggacauugagugcucagag

SEQ ID NO: 1492308 - RNA, 19 nt, Artificial Sequence
  Description of Artificial Sequence: Synthetic oligonucleotide
caguaaagguucaugcuca

SEQ ID NO: 1492309 - RNA, 19 nt, Artificial Sequence
  Description of Artificial Sequence: Synthetic oligonucleotide
uuauugucucaucucgauu

SEQ ID NO: 1492310 - RNA, 19 nt, Artificial Sequence
  Description of Artificial Sequence: Synthetic oligonucleotide
uucugucagcuguaagcag

SEQ ID NO: 1492311 - RNA, 19 nt, Artificial Sequence
  Description of Artificial Sequence: Synthetic oligonucleotide
uccaucaaaggcacucuau

SEQ ID NO: 1492312 - RNA, 19 nt, Artificial Sequence
  Description of Artificial Sequence: Synthetic oligonucleotide
gggauaauacuccaugaca

SEQ ID NO: 1492313 - RNA, 19 nt, Artificial Sequence
  Description of Artificial Sequence: Synthetic oligonucleotide
cuuauuagucuccaagucu

SEQ ID NO: 1492314 - RNA, 19 nt, Artificial Sequence
  Description of Artificial Sequence: Synthetic oligonucleotide
uugcucucgucucaguaaa

SEQ ID NO: 1492315 - RNA, 19 nt, Artificial Sequence
  Description of Artificial Sequence: Synthetic oligonucleotide
ugaugccaaagcaaugauu

SEQ ID NO: 1492316 - RNA, 19 nt, Artificial Sequence
  Description of Artificial Sequence: Synthetic oligonucleotide
ucaucucgauuaaaugaau

SEQ ID NO: 1492317 - RNA, 19 nt, Artificial Sequence
  Description of Artificial Sequence: Synthetic oligonucleotide
gguacuuggagugaggcca

SEQ ID NO: 1492318 - RNA, 19 nt, Artificial Sequence
  Description of Artificial Sequence: Synthetic oligonucleotide
cagaggauauauucuucac

SEQ ID NO: 1492319 - RNA, 19 nt, Artificial Sequence
  Description of Artificial Sequence: Synthetic oligonucleotide
aacuggacgcucauccaag

SEQ ID NO: 1492320 - RNA, 19 nt, Artificial Sequence
  Description of Artificial Sequence: Synthetic oligonucleotide
uggacauugagugcucaga

SEQ ID NO: 1492321 - RNA, 19 nt, Artificial Sequence
  Description of Artificial Sequence: Synthetic oligonucleotide
gauggcacugauaaagcaa

SEQ ID NO: 1492322 - RNA, 19 nt, Artificial Sequence
  Description of Artificial Sequence: Synthetic oligonucleotide
ugugauguauggagucuuc

SEQ ID NO: 1492323 - RNA, 19 nt, Artificial Sequence
  Description of Artificial Sequence: Synthetic oligonucleotide
cucagaggauauauucuuc

SEQ ID NO: 1492324 - RNA, 19 nt, Artificial Sequence
  Description of Artificial Sequence: Synthetic oligonucleotide
ggcaccucagauauagugg

SEQ ID NO: 1492325 - RNA, 19 nt, Artificial Sequence
  Description of Artificial Sequence: Synthetic oligonucleotide
acugcuuaagagaguguuc

SEQ ID NO: 1492326 - RNA, 19 nt, Artificial Sequence
  Description of Artificial Sequence: Synthetic oligonucleotide
uugagugcucagaggauau

SEQ ID NO: 1492327 - RNA, 19 nt, Artificial Sequence
  Description of Artificial Sequence: Synthetic oligonucleotide
auggauugcuguuauuguu

SEQ ID NO: 1492328 - RNA, 19 nt, Artificial Sequence
  Description of Artificial Sequence: Synthetic oligonucleotide
  modified_base (5)..(5): a, c, u, g, unknown or other
uguunucauguuccaucaa

SEQ ID NO: 1492329 - RNA, 19 nt, Artificial Sequence
  Description of Artificial Sequence: Synthetic oligonucleotide
ugauauucagucggguauc

SEQ ID NO: 1492330 - RNA, 19 nt, Artificial Sequence
  Description of Artificial Sequence: Synthetic oligonucleotide
uuguguuuguggacaggcu

SEQ ID NO: 1492331 - RNA, 19 nt, Artificial Sequence
  Description of Artificial Sequence: Synthetic oligonucleotide
gcuuuguuggcccaggauc

SEQ ID NO: 1492332 - RNA, 19 nt, Artificial Sequence
  Description of Artificial Sequence: Synthetic oligonucleotide
ccugucuaccaaacgaucc

SEQ ID NO: 1492333 - RNA, 19 nt, Artificial Sequence
  Description of Artificial Sequence: Synthetic oligonucleotide
  modified_base (17)..(17): a, c, u, g, unknown or other
uaaaucgagcaauguunuc

SEQ ID NO: 1492334 - RNA, 19 nt, Artificial Sequence
  Description of Artificial Sequence: Synthetic oligonucleotide
ccugucaacauucuguauc

SEQ ID NO: 1492335 - RNA, 19 nt, Artificial Sequence
  Description of Artificial Sequence: Synthetic oligonucleotide
uccugucuaccaaacgauc

SEQ ID NO: 1492336 - RNA, 19 nt, Artificial Sequence
  Description of Artificial Sequence: Synthetic oligonucleotide
cagugugauguauggaguc

SEQ ID NO: 1492337 - RNA, 19 nt, Artificial Sequence
  Description of Artificial Sequence: Synthetic oligonucleotide
uggcugaaagauccagaga

SEQ ID NO: 1492338 - RNA, 19 nt, Artificial Sequence
  Description of Artificial Sequence: Synthetic oligonucleotide
cagauauaguggucaugcc

SEQ ID NO: 1492339 - RNA, 19 nt, Artificial Sequence
  Description of Artificial Sequence: Synthetic oligonucleotide
ggauaauacuccaugacaa

SEQ ID NO: 1492340 - RNA, 19 nt, Artificial Sequence
  Description of Artificial Sequence: Synthetic oligonucleotide
agcuaauacagagacugau

SEQ ID NO: 1492341 - RNA, 19 nt, Artificial Sequence
  Description of Artificial Sequence: Synthetic oligonucleotide
ggagauucgagcuugugcu

SEQ ID NO: 1492342 - RNA, 19 nt, Artificial Sequence
  Description of Artificial Sequence: Synthetic oligonucleotide
ugguuguguuuguggacag

SEQ ID NO: 1492343 - RNA, 19 nt, Artificial Sequence
  Description of Artificial Sequence: Synthetic oligonucleotide
gaaccuuuauauacugcuc

SEQ ID NO: 1492344 - RNA, 19 nt, Artificial Sequence
  Description of Artificial Sequence: Synthetic oligonucleotide
uaucgaccccguccaauca

SEQ ID NO: 1492345 - RNA, 19 nt, Artificial Sequence
  Description of Artificial Sequence: Synthetic oligonucleotide
uuguggcaugcaaauuugu

SEQ ID NO: 1492346 - RNA, 19 nt, Artificial Sequence
  Description of Artificial Sequence: Synthetic oligonucleotide
cuuguguugauucaccuau

SEQ ID NO: 1492347 - RNA, 19 nt, Artificial Sequence
  Description of Artificial Sequence: Synthetic oligonucleotide
guauggagucuucaagauc

SEQ ID NO: 1492348 - RNA, 19 nt, Artificial Sequence
  Description of Artificial Sequence: Synthetic oligonucleotide
aucgaccccguccaaucag

SEQ ID NO: 1492349 - RNA, 19 nt, Artificial Sequence
  Description of Artificial Sequence: Synthetic oligonucleotide
ugcuuaagagaguguucca

SEQ ID NO: 1492350 - RNA, 19 nt, Artificial Sequence
  Description of Artificial Sequence: Synthetic oligonucleotide
uguauacugcugccaucca

SEQ ID NO: 1492351 - RNA, 19 nt, Artificial Sequence
  Description of Artificial Sequence: Synthetic oligonucleotide
cucaccaauaaauugguuu

SEQ ID NO: 1492352 - RNA, 19 nt, Artificial Sequence
  Description of Artificial Sequence: Synthetic oligonucleotide
uuucgguucuccugucaac

SEQ ID NO: 1492353 - RNA, 19 nt, Artificial Sequence
  Description of Artificial Sequence: Synthetic oligonucleotide
gacgccgcugcuuccauca

SEQ ID NO: 1492354 - RNA, 19 nt, Artificial Sequence
  Description of Artificial Sequence: Synthetic oligonucleotide
cuuguaacacccuguguaa

SEQ ID NO: 1492355 - RNA, 19 nt, Artificial Sequence
  Description of Artificial Sequence: Synthetic oligonucleotide
ugccaaagcaaugauuauu

SEQ ID NO: 1492356 - RNA, 19 nt, Artificial Sequence
  Description of Artificial Sequence: Synthetic oligonucleotide
guggcaugcaaauuugucu

SEQ ID NO: 1492357 - RNA, 19 nt, Artificial Sequence
  Description of Artificial Sequence: Synthetic oligonucleotide
cugacgguuugcaaaagaa

SEQ ID NO: 1492358 - RNA, 19 nt, Artificial Sequence
  Description of Artificial Sequence: Synthetic oligonucleotide
ucgaccccguccaaucagc

SEQ ID NO: 1492359 - RNA, 19 nt, Artificial Sequence
  Description of Artificial Sequence: Synthetic oligonucleotide
gucaacauucuguauccaa

SEQ ID NO: 1492360 - RNA, 19 nt, Artificial Sequence
  Description of Artificial Sequence: Synthetic oligonucleotide
acacuuguuucagggcugg

SEQ ID NO: 1492361 - RNA, 19 nt, Artificial Sequence
  Description of Artificial Sequence: Synthetic oligonucleotide
caugcaaauuugucucauc

SEQ ID NO: 1492362 - RNA, 19 nt, Artificial Sequence
  Description of Artificial Sequence: Synthetic oligonucleotide
uaagcagacagggguuggc

SEQ ID NO: 1492363 - RNA, 19 nt, Artificial Sequence
  Description of Artificial Sequence: Synthetic oligonucleotide
auugagugcucagaggaua

SEQ ID NO: 1492364 - RNA, 19 nt, Artificial Sequence
  Description of Artificial Sequence: Synthetic oligonucleotide
uaaguacaucuuguucuga

SEQ ID NO: 1492365 - RNA, 19 nt, Artificial Sequence
  Description of Artificial Sequence: Synthetic oligonucleotide
uuccaucaaaggcacucua

SEQ ID NO: 1492366 - RNA, 19 nt, Artificial Sequence
  Description of Artificial Sequence: Synthetic oligonucleotide
ugcucucgucucaguaaag

SEQ ID NO: 1492367 - RNA, 19 nt, Artificial Sequence
  Description of Artificial Sequence: Synthetic oligonucleotide
cuguacuacagcagcaaaa

SEQ ID NO: 1492368 - RNA, 19 nt, Artificial Sequence
  Description of Artificial Sequence: Synthetic oligonucleotide
gcuaauacagagacugaug

SEQ ID NO: 1492369 - RNA, 19 nt, Artificial Sequence
  Description of Artificial Sequence: Synthetic oligonucleotide
cuuguugcucucgucucag

SEQ ID NO: 1492370 - RNA, 19 nt, Artificial Sequence
  Description of Artificial Sequence: Synthetic oligonucleotide
ucaccugauccggauuugc

SEQ ID NO: 1492371 - RNA, 19 nt, Artificial Sequence
  Description of Artificial Sequence: Synthetic oligonucleotide
guugcucucgucucaguaa

SEQ ID NO: 1492372 - RNA, 19 nt, Artificial Sequence
  Description of Artificial Sequence: Synthetic oligonucleotide
cuuuguuggcccaggaucu

SEQ ID NO: 1492373 - RNA, 19 nt, Artificial Sequence
  Description of Artificial Sequence: Synthetic oligonucleotide
aguaaagguucaugcucau

SEQ ID NO: 1492374 - RNA, 19 nt, Artificial Sequence
  Description of Artificial Sequence: Synthetic oligonucleotide
aggcgacuaucaaaacagc

SEQ ID NO: 1492375 - RNA, 19 nt, Artificial Sequence
  Description of Artificial Sequence: Synthetic oligonucleotide
guucucgucagagcucucc

SEQ ID NO: 1492376 - RNA, 19 nt, Artificial Sequence
  Description of Artificial Sequence: Synthetic oligonucleotide
ugcuccauaucgaccccgu

SEQ ID NO: 1492377 - RNA, 19 nt, Artificial Sequence
  Description of Artificial Sequence: Synthetic oligonucleotide
gacgcucauccaaggaacc

SEQ ID NO: 1492378 - RNA, 19 nt, Artificial Sequence
  Description of Artificial Sequence: Synthetic oligonucleotide
ucgucagagcucuccuuga

SEQ ID NO: 1492379 - RNA, 19 nt, Artificial Sequence
  Description of Artificial Sequence: Synthetic oligonucleotide
ggucuagcuuauuagucuc

SEQ ID NO: 1492380 - RNA, 19 nt, Artificial Sequence
  Description of Artificial Sequence: Synthetic oligonucleotide
cacaaugcugucaguguga

SEQ ID NO: 1492381 - RNA, 19 nt, Artificial Sequence
  Description of Artificial Sequence: Synthetic oligonucleotide
cugccugaccagauggcac

SEQ ID NO: 1492382 - RNA, 19 nt, Artificial Sequence
  Description of Artificial Sequence: Synthetic oligonucleotide
agguucucgucagagcucu

SEQ ID NO: 1492383 - RNA, 19 nt, Artificial Sequence
  Description of Artificial Sequence: Synthetic oligonucleotide
caaacgauccagaaccccu

SEQ ID NO: 1492384 - RNA, 19 nt, Artificial Sequence
  Description of Artificial Sequence: Synthetic oligonucleotide
caguaaaguugacauuaca

SEQ ID NO: 1492385 - RNA, 19 nt, Artificial Sequence
  Description of Artificial Sequence: Synthetic oligonucleotide
uuguaucaggagguggaaa

SEQ ID NO: 1492386 - RNA, 19 nt, Artificial Sequence
  Description of Artificial Sequence: Synthetic oligonucleotide
aacauggauugcuguuauu

SEQ ID NO: 1492387 - RNA, 19 nt, Artificial Sequence
  Description of Artificial Sequence: Synthetic oligonucleotide
uaaauugguuuugcagcau

SEQ ID NO: 1492388 - RNA, 19 nt, Artificial Sequence
  Description of Artificial Sequence: Synthetic oligonucleotide
gguacggcaccucagauau

SEQ ID NO: 1492389 - RNA, 19 nt, Artificial Sequence
  Description of Artificial Sequence: Synthetic oligonucleotide
acacuagguuagcugccug

SEQ ID NO: 1492390 - RNA, 19 nt, Artificial Sequence
  Description of Artificial Sequence: Synthetic oligonucleotide
cucaguaaagguucaugcu

SEQ ID NO: 1492391 - RNA, 19 nt, Artificial Sequence
  Description of Artificial Sequence: Synthetic oligonucleotide
acgguuugcaaaagaaaau

SEQ ID NO: 1492392 - RNA, 19 nt, Artificial Sequence
  Description of Artificial Sequence: Synthetic oligonucleotide
uaguggucaugccgguacu

SEQ ID NO: 1492393 - RNA, 19 nt, Artificial Sequence
  Description of Artificial Sequence: Synthetic oligonucleotide
ugggcuuuguuggcccagg

SEQ ID NO: 1492394 - RNA, 19 nt, Artificial Sequence
  Description of Artificial Sequence: Synthetic oligonucleotide
ucugacgccgcugcuucca

SEQ ID NO: 1492395 - RNA, 19 nt, Artificial Sequence
  Description of Artificial Sequence: Synthetic oligonucleotide
aucuguacuacagcagcaa

SEQ ID NO: 1492396 - RNA, 19 nt, Artificial Sequence
  Description of Artificial Sequence: Synthetic oligonucleotide
uucagucggguauccucac

SEQ ID NO: 1492397 - RNA, 19 nt, Artificial Sequence
  Description of Artificial Sequence: Synthetic oligonucleotide
ucauacugugaaggccuug

SEQ ID NO: 1492398 - RNA, 19 nt, Artificial Sequence
  Description of Artificial Sequence: Synthetic oligonucleotide
aaacgauccagaaccccuu

SEQ ID NO: 1492399 - RNA, 19 nt, Artificial Sequence
  Description of Artificial Sequence: Synthetic oligonucleotide
gaauugggccucugugcuc

SEQ ID NO: 1492400 - RNA, 19 nt, Artificial Sequence
  Description of Artificial Sequence: Synthetic oligonucleotide
uucugacgguuugcaaaag

SEQ ID NO: 1492401 - RNA, 19 nt, Artificial Sequence
  Description of Artificial Sequence: Synthetic oligonucleotide
uggguacggcaccucagau

SEQ ID NO: 1492402 - RNA, 19 nt, Artificial Sequence
  Description of Artificial Sequence: Synthetic oligonucleotide
augccaaagcaaugauuau

SEQ ID NO: 1492403 - RNA, 19 nt, Artificial Sequence
  Description of Artificial Sequence: Synthetic oligonucleotide
gugagucucucaucucaac

SEQ ID NO: 1492404 - RNA, 19 nt, Artificial Sequence
  Description of Artificial Sequence: Synthetic oligonucleotide
auucaccuaucuguauacu

SEQ ID NO: 1492405 - RNA, 19 nt, Artificial Sequence
  Description of Artificial Sequence: Synthetic oligonucleotide
guuuucgguucuccuguca

SEQ ID NO: 1492406 - RNA, 19 nt, Artificial Sequence
  Description of Artificial Sequence: Synthetic oligonucleotide
cacuagguuagcugccuga

SEQ ID NO: 1492407 - RNA, 19 nt, Artificial Sequence
  Description of Artificial Sequence: Synthetic oligonucleotide
gaacauggauugcuguuau

SEQ ID NO: 1492408 - RNA, 19 nt, Artificial Sequence
  Description of Artificial Sequence: Synthetic oligonucleotide
uccugucaacauucuguau

SEQ ID NO: 1492409 - RNA, 19 nt, Artificial Sequence
  Description of Artificial Sequence: Synthetic oligonucleotide
uuaguucgaccaccuucua

SEQ ID NO: 1492410 - RNA, 19 nt, Artificial Sequence
  Description of Artificial Sequence: Synthetic oligonucleotide
caacuauaaaucgagcaau

SEQ ID NO: 1492411 - RNA, 19 nt, Artificial Sequence
  Description of Artificial Sequence: Synthetic oligonucleotide
gaaggcucugacgccgcug

SEQ ID NO: 1492412 - RNA, 19 nt, Artificial Sequence
  Description of Artificial Sequence: Synthetic oligonucleotide
gcacugauaaagcaagcua

SEQ ID NO: 1492413 - RNA, 19 nt, Artificial Sequence
  Description of Artificial Sequence: Synthetic oligonucleotide
uauaguggucaugccggua

SEQ ID NO: 1492414 - RNA, 19 nt, Artificial Sequence
  Description of Artificial Sequence: Synthetic oligonucleotide
ugcuggacauugagugcuc

SEQ ID NO: 1492415 - RNA, 19 nt, Artificial Sequence
  Description of Artificial Sequence: Synthetic oligonucleotide
guaaagguucaugcucauc

SEQ ID NO: 1492416 - RNA, 19 nt, Artificial Sequence
  Description of Artificial Sequence: Synthetic oligonucleotide
ccuaugugacacuagguua

SEQ ID NO: 1492417 - RNA, 19 nt, Artificial Sequence
  Description of Artificial Sequence: Synthetic oligonucleotide
guaacacccuguguaagua

SEQ ID NO: 1492418 - RNA, 19 nt, Artificial Sequence
  Description of Artificial Sequence: Synthetic oligonucleotide
ggacgcucauccaaggaac

SEQ ID NO: 1492419 - RNA, 19 nt, Artificial Sequence
  Description of Artificial Sequence: Synthetic oligonucleotide
cugauccggauuugccauc

SEQ ID NO: 1492420 - RNA, 19 nt, Artificial Sequence
  Description of Artificial Sequence: Synthetic oligonucleotide
agucggguauccucaccaa

SEQ ID NO: 1492421 - RNA, 19 nt, Artificial Sequence
  Description of Artificial Sequence: Synthetic oligonucleotide
uugagcccuaugugacacu

SEQ ID NO: 1492422 - RNA, 19 nt, Artificial Sequence
  Description of Artificial Sequence: Synthetic oligonucleotide
uugucucaucucgauuaaa

SEQ ID NO: 1492423 - RNA, 19 nt, Artificial Sequence
  Description of Artificial Sequence: Synthetic oligonucleotide
ccuucuagaggccguuccc

SEQ ID NO: 1492424 - RNA, 19 nt, Artificial Sequence
  Description of Artificial Sequence: Synthetic oligonucleotide
uaauugaauuccgguucuu

SEQ ID NO: 1492425 - RNA, 19 nt, Artificial Sequence
  Description of Artificial Sequence: Synthetic oligonucleotide
gggucuagcuuauuagucu

SEQ ID NO: 1492426 - RNA, 19 nt, Artificial Sequence
  Description of Artificial Sequence: Synthetic oligonucleotide
gguuguguuuguggacagg

SEQ ID NO: 1492427 - RNA, 19 nt, Artificial Sequence
  Description of Artificial Sequence: Synthetic oligonucleotide
cucucgucucaguaaaggu

SEQ ID NO: 1492428 - RNA, 19 nt, Artificial Sequence
  Description of Artificial Sequence: Synthetic oligonucleotide
ggcuggagauucgagcuug

SEQ ID NO: 1492429 - RNA, 19 nt, Artificial Sequence
  Description of Artificial Sequence: Synthetic oligonucleotide
gagguucucgucagagcuc

SEQ ID NO: 1492430 - RNA, 19 nt, Artificial Sequence
  Description of Artificial Sequence: Synthetic oligonucleotide
cauacugugaaggccuugu

SEQ ID NO: 1492431 - RNA, 19 nt, Artificial Sequence
  Description of Artificial Sequence: Synthetic oligonucleotide
ggcaugcaaauuugucuca

SEQ ID NO: 1492432 - RNA, 19 nt, Artificial Sequence
  Description of Artificial Sequence: Synthetic oligonucleotide
gaaggccuuguuuucgguu

SEQ ID NO: 1492433 - RNA, 19 nt, Artificial Sequence
  Description of Artificial Sequence: Synthetic oligonucleotide
guuguaucaggagguggaa

SEQ ID NO: 1492434 - RNA, 19 nt, Artificial Sequence
  Description of Artificial Sequence: Synthetic oligonucleotide
gcgacuaucaaaacagcua

SEQ ID NO: 1492435 - RNA, 19 nt, Artificial Sequence
  Description of Artificial Sequence: Synthetic oligonucleotide
gcuagaacugguacugcuc

SEQ ID NO: 1492436 - RNA, 19 nt, Artificial Sequence
  Description of Artificial Sequence: Synthetic oligonucleotide
gcaccucagauauaguggu

SEQ ID NO: 1492437 - RNA, 19 nt, Artificial Sequence
  Description of Artificial Sequence: Synthetic oligonucleotide
ccggauuugccaucuugug

SEQ ID NO: 1492438 - RNA, 19 nt, Artificial Sequence
  Description of Artificial Sequence: Synthetic oligonucleotide
cggcaccucagauauagug

SEQ ID NO: 1492439 - RNA, 19 nt, Artificial Sequence
  Description of Artificial Sequence: Synthetic oligonucleotide
cagggguuggccccauuga

SEQ ID NO: 1492440 - RNA, 19 nt, Artificial Sequence
  Description of Artificial Sequence: Synthetic oligonucleotide
agguggacugagugguguu

SEQ ID NO: 1492441 - RNA, 19 nt, Artificial Sequence
  Description of Artificial Sequence: Synthetic oligonucleotide
ccgguacuuggagugaggc

SEQ ID NO: 1492442 - RNA, 19 nt, Artificial Sequence
  Description of Artificial Sequence: Synthetic oligonucleotide
gcuuguugcucucgucuca

SEQ ID NO: 1492443 - RNA, 19 nt, Artificial Sequence
  Description of Artificial Sequence: Synthetic oligonucleotide
auucgagcuugugcuugcu

SEQ ID NO: 1492444 - RNA, 19 nt, Artificial Sequence
  Description of Artificial Sequence: Synthetic oligonucleotide
gcucagaggauauauucuu

SEQ ID NO: 1492445 - RNA, 19 nt, Artificial Sequence
  Description of Artificial Sequence: Synthetic oligonucleotide
ggcacugauaaagcaagcu

SEQ ID NO: 1492446 - RNA, 19 nt, Artificial Sequence
  Description of Artificial Sequence: Synthetic oligonucleotide
cccacugaacugcuuaaga

SEQ ID NO: 1492447 - RNA, 19 nt, Artificial Sequence
  Description of Artificial Sequence: Synthetic oligonucleotide
aguggucaugccgguacuu

SEQ ID NO: 1492448 - RNA, 19 nt, Artificial Sequence
  Description of Artificial Sequence: Synthetic oligonucleotide
ggcgacuaucaaaacagcu

SEQ ID NO: 1492449 - RNA, 19 nt, Artificial Sequence
  Description of Artificial Sequence: Synthetic oligonucleotide
gccauccaggauauuugug

SEQ ID NO: 1492450 - RNA, 19 nt, Artificial Sequence
  Description of Artificial Sequence: Synthetic oligonucleotide
gagauucgagcuugugcuu

SEQ ID NO: 1492451 - RNA, 19 nt, Artificial Sequence
  Description of Artificial Sequence: Synthetic oligonucleotide
cauugagugcucagaggau

SEQ ID NO: 1492452 - RNA, 19 nt, Artificial Sequence
  Description of Artificial Sequence: Synthetic oligonucleotide
cuucuagaggccguucccu

SEQ ID NO: 1492453 - RNA, 19 nt, Artificial Sequence
  Description of Artificial Sequence: Synthetic oligonucleotide
cuagaggccguucccuccu

SEQ ID NO: 1492454 - RNA, 19 nt, Artificial Sequence
  Description of Artificial Sequence: Synthetic oligonucleotide
cucauccaaggaaccuuua

SEQ ID NO: 1492455 - RNA, 19 nt, Artificial Sequence
  Description of Artificial Sequence: Synthetic oligonucleotide
guaucaggagguggaaaau

SEQ ID NO: 1492456 - RNA, 19 nt, Artificial Sequence
  Description of Artificial Sequence: Synthetic oligonucleotide
  modified_base (8)..(8): a, c, u, g, unknown or other
caauguunucauguuccau

SEQ ID NO: 1492457 - RNA, 19 nt, Artificial Sequence
  Description of Artificial Sequence: Synthetic oligonucleotide
gcaugucuugagcccuaug

SEQ ID NO: 1492458 - RNA, 19 nt, Artificial Sequence
  Description of Artificial Sequence: Synthetic oligonucleotide
ggguacggcaccucagaua

SEQ ID NO: 1492459 - RNA, 19 nt, Artificial Sequence
  Description of Artificial Sequence: Synthetic oligonucleotide
gcccacugaacugcuuaag

SEQ ID NO: 1492460 - RNA, 19 nt, Artificial Sequence
  Description of Artificial Sequence: Synthetic oligonucleotide
gucggguauccucaccaau

SEQ ID NO: 1492461 - RNA, 19 nt, Artificial Sequence
  Description of Artificial Sequence: Synthetic oligonucleotide
ccguccaaucagcuccagc

SEQ ID NO: 1492462 - RNA, 19 nt, Artificial Sequence
  Description of Artificial Sequence: Synthetic oligonucleotide
gccgguacuuggagugagg

SEQ ID NO: 1492463 - RNA, 19 nt, Artificial Sequence
  Description of Artificial Sequence: Synthetic oligonucleotide
ggccccauugacugugcaa

SEQ ID NO: 1492464 - RNA, 19 nt, Artificial Sequence
  Description of Artificial Sequence: Synthetic oligonucleotide
cauaucgaccccguccaau

SEQ ID NO: 1492465 - RNA, 19 nt, Artificial Sequence
  Description of Artificial Sequence: Synthetic oligonucleotide
cccuaugugacacuagguu

SEQ ID NO: 1492466 - RNA, 19 nt, Artificial Sequence
  Description of Artificial Sequence: Synthetic oligonucleotide
cagcaacuggacgcucauc

SEQ ID NO: 1492467 - RNA, 19 nt, Artificial Sequence
  Description of Artificial Sequence: Synthetic oligonucleotide
ggccguucccuccugucua

SEQ ID NO: 1492468 - RNA, 19 nt, Artificial Sequence
  Description of Artificial Sequence: Synthetic oligonucleotide
ggcacucuauaaauguuuu

SEQ ID NO: 1492469 - RNA, 19 nt, Artificial Sequence
  Description of Artificial Sequence: Synthetic oligonucleotide
ccugauccggauuugccau

SEQ ID NO: 1492470 - RNA, 19 nt, Artificial Sequence
  Description of Artificial Sequence: Synthetic oligonucleotide
gccguucccuccugucuac

SEQ ID NO: 1492471 - RNA, 19 nt, Artificial Sequence
  Description of Artificial Sequence: Synthetic oligonucleotide
gcuggacauugagugcuca

SEQ ID NO: 1492472 - RNA, 19 nt, Artificial Sequence
  Description of Artificial Sequence: Synthetic oligonucleotide
ccaaaacauaaggcgacua

SEQ ID NO: 1492473 - RNA, 19 nt, Artificial Sequence
  Description of Artificial Sequence: Synthetic oligonucleotide
acggcaccucagauauagu

SEQ ID NO: 1492474 - RNA, 19 nt, Artificial Sequence
  Description of Artificial Sequence: Synthetic oligonucleotide
ggcuuuguuggcccaggau

SEQ ID NO: 1492475 - RNA, 19 nt, Artificial Sequence
  Description of Artificial Sequence: Synthetic oligonucleotide
gcugaaagauccagagaau

SEQ ID NO: 1492476 - RNA, 19 nt, Artificial Sequence
  Description of Artificial Sequence: Synthetic oligonucleotide
acgccgcugcuuccaucau

SEQ ID NO: 1492477 - RNA, 19 nt, Artificial Sequence
  Description of Artificial Sequence: Synthetic oligonucleotide
cggguauccucaccaauaa

SEQ ID NO: 1492478 - RNA, 19 nt, Artificial Sequence
  Description of Artificial Sequence: Synthetic oligonucleotide
cggauuugccaucuugugu

SEQ ID NO: 1492479 - RNA, 19 nt, Artificial Sequence
  Description of Artificial Sequence: Synthetic oligonucleotide
gauccggauuugccaucuu

SEQ ID NO: 1492480 - RNA, 19 nt, Artificial Sequence
  Description of Artificial Sequence: Synthetic oligonucleotide
ccucagauauaguggucau

SEQ ID NO: 1492481 - RNA, 19 nt, Artificial Sequence
  Description of Artificial Sequence: Synthetic oligonucleotide
ggccuuguuuucgguucuc

SEQ ID NO: 1492482 - RNA, 19 nt, Artificial Sequence
  Description of Artificial Sequence: Synthetic oligonucleotide
gcccuaugugacacuaggu

SEQ ID NO: 1492483 - RNA, 19 nt, Artificial Sequence
  Description of Artificial Sequence: Synthetic oligonucleotide
ccguucccuccugucuacc

SEQ ID NO: 1492484 - RNA, 19 nt, Artificial Sequence
  Description of Artificial Sequence: Synthetic oligonucleotide
gguucucgucagagcucuc

SEQ ID NO: 1492485 - RNA, 19 nt, Artificial Sequence
  Description of Artificial Sequence: Synthetic oligonucleotide
guacggcaccucagauaua

SEQ ID NO: 1492486 - RNA, 19 nt, Artificial Sequence
  Description of Artificial Sequence: Synthetic oligonucleotide
cugacgccgcugcuuccau

SEQ ID NO: 1492487 - RNA, 19 nt, Artificial Sequence
  Description of Artificial Sequence: Synthetic oligonucleotide
caagauccauugggauaau

SEQ ID NO: 1492488 - RNA, 19 nt, Artificial Sequence
  Description of Artificial Sequence: Synthetic oligonucleotide
gcuggagauucgagcuugu

SEQ ID NO: 1492489 - RNA, 19 nt, Artificial Sequence
  Description of Artificial Sequence: Synthetic oligonucleotide
ccucaccaauaaauugguu

SEQ ID NO: 1492490 - RNA, 19 nt, Artificial Sequence
  Description of Artificial Sequence: Synthetic oligonucleotide
cccguccaaucagcuccag

SEQ ID NO: 1492491 - RNA, 19 nt, Artificial Sequence
  Description of Artificial Sequence: Synthetic oligonucleotide
auaaagaccgccuuuauac

SEQ ID NO: 1492492 - RNA, 19 nt, Artificial Sequence
  Description of Artificial Sequence: Synthetic oligonucleotide
auaaauacuccauagauca

SEQ ID NO: 1492493 - RNA, 19 nt, Artificial Sequence
  Description of Artificial Sequence: Synthetic oligonucleotide
acuuuaucaguucagauuc

SEQ ID NO: 1492494 - RNA, 19 nt, Artificial Sequence
  Description of Artificial Sequence: Synthetic oligonucleotide
aauuuuagugcuuucaaga

SEQ ID NO: 1492495 - RNA, 19 nt, Artificial Sequence
  Description of Artificial Sequence: Synthetic oligonucleotide
aaagaccgccuuuauaccc

SEQ ID NO: 1492496 - RNA, 19 nt, Artificial Sequence
  Description of Artificial Sequence: Synthetic oligonucleotide
uuugguuuaauggaggcgg

SEQ ID NO: 1492497 - RNA, 19 nt, Artificial Sequence
  Description of Artificial Sequence: Synthetic oligonucleotide
aagguuaugacguuugaca

SEQ ID NO: 1492498 - RNA, 19 nt, Artificial Sequence
  Description of Artificial Sequence: Synthetic oligonucleotide
aacucuguaguaugcaaac

SEQ ID NO: 1492499 - RNA, 19 nt, Artificial Sequence
  Description of Artificial Sequence: Synthetic oligonucleotide
aauaaauacuccauagauc

SEQ ID NO: 1492500 - RNA, 19 nt, Artificial Sequence
  Description of Artificial Sequence: Synthetic oligonucleotide
ucuguaaagaggaucuagg

SEQ ID NO: 1492501 - RNA, 19 nt, Artificial Sequence
  Description of Artificial Sequence: Synthetic oligonucleotide
uuuccuauagcucaucucu

SEQ ID NO: 1492502 - RNA, 19 nt, Artificial Sequence
  Description of Artificial Sequence: Synthetic oligonucleotide
aaaguucucaauuggugag

SEQ ID NO: 1492503 - RNA, 19 nt, Artificial Sequence
  Description of Artificial Sequence: Synthetic oligonucleotide
ucgucauucauauacagga

SEQ ID NO: 1492504 - RNA, 19 nt, Artificial Sequence
  Description of Artificial Sequence: Synthetic oligonucleotide
gauugccucauaaagaccg

SEQ ID NO: 1492505 - RNA, 19 nt, Artificial Sequence
  Description of Artificial Sequence: Synthetic oligonucleotide
aaucuuccgagcuuucucg

SEQ ID NO: 1492506 - RNA, 19 nt, Artificial Sequence
  Description of Artificial Sequence: Synthetic oligonucleotide
acccuaaguacucauauuc

SEQ ID NO: 1492507 - RNA, 19 nt, Artificial Sequence
  Description of Artificial Sequence: Synthetic oligonucleotide
uucucaauuggugagaggc

SEQ ID NO: 1492508 - RNA, 19 nt, Artificial Sequence
  Description of Artificial Sequence: Synthetic oligonucleotide
ucugaguuguagacgaagg

SEQ ID NO: 1492509 - RNA, 19 nt, Artificial Sequence
  Description of Artificial Sequence: Synthetic oligonucleotide
aguaauucgguucugaaua

SEQ ID NO: 1492510 - RNA, 19 nt, Artificial Sequence
  Description of Artificial Sequence: Synthetic oligonucleotide
ugcuguuaaauccucucgg

SEQ ID NO: 1492511 - RNA, 19 nt, Artificial Sequence
  Description of Artificial Sequence: Synthetic oligonucleotide
acaggagugcacuauaguc

SEQ ID NO: 1492512 - RNA, 19 nt, Artificial Sequence
  Description of Artificial Sequence: Synthetic oligonucleotide
ucauagccaaauuuuagug

SEQ ID NO: 1492513 - RNA, 19 nt, Artificial Sequence
  Description of Artificial Sequence: Synthetic oligonucleotide
uggcccuucacauagagcu

SEQ ID NO: 1492514 - RNA, 19 nt, Artificial Sequence
  Description of Artificial Sequence: Synthetic oligonucleotide
auagccaaauuuuagugcu

SEQ ID NO: 1492515 - RNA, 19 nt, Artificial Sequence
  Description of Artificial Sequence: Synthetic oligonucleotide
ucugcagcugacuuuauca

SEQ ID NO: 1492516 - RNA, 19 nt, Artificial Sequence
  Description of Artificial Sequence: Synthetic oligonucleotide
uguuaaauccucucgggcu

SEQ ID NO: 1492517 - RNA, 19 nt, Artificial Sequence
  Description of Artificial Sequence: Synthetic oligonucleotide
uagguagucguaaugcaag

SEQ ID NO: 1492518 - RNA, 19 nt, Artificial Sequence
  Description of Artificial Sequence: Synthetic oligonucleotide
auggauucugggucaaugc

SEQ ID NO: 1492519 - RNA, 19 nt, Artificial Sequence
  Description of Artificial Sequence: Synthetic oligonucleotide
ucacauauucaccaacucu

SEQ ID NO: 1492520 - RNA, 19 nt, Artificial Sequence
  Description of Artificial Sequence: Synthetic oligonucleotide
ucgcugaugucauagaaca

SEQ ID NO: 1492521 - RNA, 19 nt, Artificial Sequence
  Description of Artificial Sequence: Synthetic oligonucleotide
aaauacuccauagaucacu

SEQ ID NO: 1492522 - RNA, 19 nt, Artificial Sequence
  Description of Artificial Sequence: Synthetic oligonucleotide
ugcaagggaagaaaguucu

SEQ ID NO: 1492523 - RNA, 19 nt, Artificial Sequence
  Description of Artificial Sequence: Synthetic oligonucleotide
cauagccaaauuuuagugc

SEQ ID NO: 1492524 - RNA, 19 nt, Artificial Sequence
  Description of Artificial Sequence: Synthetic oligonucleotide
gaaauaggauuccacaauc

SEQ ID NO: 1492525 - RNA, 19 nt, Artificial Sequence
  Description of Artificial Sequence: Synthetic oligonucleotide
uucauagccaaauuuuagu

SEQ ID NO: 1492526 - RNA, 19 nt, Artificial Sequence
  Description of Artificial Sequence: Synthetic oligonucleotide
gaaaguucucaauugguga

SEQ ID NO: 1492527 - RNA, 19 nt, Artificial Sequence
  Description of Artificial Sequence: Synthetic oligonucleotide
uauucaccaacucuguagu

SEQ ID NO: 1492528 - RNA, 19 nt, Artificial Sequence
  Description of Artificial Sequence: Synthetic oligonucleotide
uucauuggguguauggggc

SEQ ID NO: 1492529 - RNA, 19 nt, Artificial Sequence
  Description of Artificial Sequence: Synthetic oligonucleotide
ucaaagucgucauucauau

SEQ ID NO: 1492530 - RNA, 19 nt, Artificial Sequence
  Description of Artificial Sequence: Synthetic oligonucleotide
uaauauucaguccaugcuu

SEQ ID NO: 1492531 - RNA, 19 nt, Artificial Sequence
  Description of Artificial Sequence: Synthetic oligonucleotide
uaggucucgaccuaucuug

SEQ ID NO: 1492532 - RNA, 19 nt, Artificial Sequence
  Description of Artificial Sequence: Synthetic oligonucleotide
uucucuuaggucucgaccu

SEQ ID NO: 1492533 - RNA, 19 nt, Artificial Sequence
  Description of Artificial Sequence: Synthetic oligonucleotide
uuagcuucgggauccaaca

SEQ ID NO: 1492534 - RNA, 19 nt, Artificial Sequence
  Description of Artificial Sequence: Synthetic oligonucleotide
cagauucaagguuaugacg

SEQ ID NO: 1492535 - RNA, 19 nt, Artificial Sequence
  Description of Artificial Sequence: Synthetic oligonucleotide
uucaagguuaugacguuug

SEQ ID NO: 1492536 - RNA, 19 nt, Artificial Sequence
  Description of Artificial Sequence: Synthetic oligonucleotide
uucgguucugaauauaaaa

SEQ ID NO: 1492537 - RNA, 19 nt, Artificial Sequence
  Description of Artificial Sequence: Synthetic oligonucleotide
aaugcaagggaagaaaguu

SEQ ID NO: 1492538 - RNA, 19 nt, Artificial Sequence
  Description of Artificial Sequence: Synthetic oligonucleotide
aauggaggcggucacaguu

SEQ ID NO: 1492539 - RNA, 19 nt, Artificial Sequence
  Description of Artificial Sequence: Synthetic oligonucleotide
ucucaauuggugagaggcg

SEQ ID NO: 1492540 - RNA, 19 nt, Artificial Sequence
  Description of Artificial Sequence: Synthetic oligonucleotide
ugaguuguagacgaaggug

SEQ ID NO: 1492541 - RNA, 19 nt, Artificial Sequence
  Description of Artificial Sequence: Synthetic oligonucleotide
aauggauucugggucaaug

SEQ ID NO: 1492542 - RNA, 19 nt, Artificial Sequence
  Description of Artificial Sequence: Synthetic oligonucleotide
caggagugcacuauagucc

SEQ ID NO: 1492543 - RNA, 19 nt, Artificial Sequence
  Description of Artificial Sequence: Synthetic oligonucleotide
agauucaagguuaugacgu

SEQ ID NO: 1492544 - RNA, 19 nt, Artificial Sequence
  Description of Artificial Sequence: Synthetic oligonucleotide
uccuauagcucaucucugg

SEQ ID NO: 1492545 - RNA, 19 nt, Artificial Sequence
  Description of Artificial Sequence: Synthetic oligonucleotide
ugcgauugccucauaaaga

SEQ ID NO: 1492546 - RNA, 19 nt, Artificial Sequence
  Description of Artificial Sequence: Synthetic oligonucleotide
uaggacguugucuaggaga

SEQ ID NO: 1492547 - RNA, 19 nt, Artificial Sequence
  Description of Artificial Sequence: Synthetic oligonucleotide
uuccucaaaucucuguggc

SEQ ID NO: 1492548 - RNA, 19 nt, Artificial Sequence
  Description of Artificial Sequence: Synthetic oligonucleotide
ucauauacaggagugcacu

SEQ ID NO: 1492549 - RNA, 19 nt, Artificial Sequence
  Description of Artificial Sequence: Synthetic oligonucleotide
ugauccaguaauucgguuc

SEQ ID NO: 1492550 - RNA, 19 nt, Artificial Sequence
  Description of Artificial Sequence: Synthetic oligonucleotide
uaaagaggaucuaggguga

SEQ ID NO: 1492551 - RNA, 19 nt, Artificial Sequence
  Description of Artificial Sequence: Synthetic oligonucleotide
cuuuauacccuaaguacuc

SEQ ID NO: 1492552 - RNA, 19 nt, Artificial Sequence
  Description of Artificial Sequence: Synthetic oligonucleotide
agugaucugcgauugccuc

SEQ ID NO: 1492553 - RNA, 19 nt, Artificial Sequence
  Description of Artificial Sequence: Synthetic oligonucleotide
agggacccgguucucaucc

SEQ ID NO: 1492554 - RNA, 19 nt, Artificial Sequence
  Description of Artificial Sequence: Synthetic oligonucleotide
aggagaacccgcugagucc

SEQ ID NO: 1492555 - RNA, 19 nt, Artificial Sequence
  Description of Artificial Sequence: Synthetic oligonucleotide
uucuccguaacugauccag

SEQ ID NO: 1492556 - RNA, 19 nt, Artificial Sequence
  Description of Artificial Sequence: Synthetic oligonucleotide
ugcucuuccgauaggacgu

SEQ ID NO: 1492557 - RNA, 19 nt, Artificial Sequence
  Description of Artificial Sequence: Synthetic oligonucleotide
guuguucugaguuguagac

SEQ ID NO: 1492558 - RNA, 19 nt, Artificial Sequence
  Description of Artificial Sequence: Synthetic oligonucleotide
uucaauggauucuggguca

SEQ ID NO: 1492559 - RNA, 19 nt, Artificial Sequence
  Description of Artificial Sequence: Synthetic oligonucleotide
uguagguagucguaaugca

SEQ ID NO: 1492560 - RNA, 19 nt, Artificial Sequence
  Description of Artificial Sequence: Synthetic oligonucleotide
uuucccucgguauccauca

SEQ ID NO: 1492561 - RNA, 19 nt, Artificial Sequence
  Description of Artificial Sequence: Synthetic oligonucleotide
uguucucauagaguagagg

SEQ ID NO: 1492562 - RNA, 19 nt, Artificial Sequence
  Description of Artificial Sequence: Synthetic oligonucleotide
uaaagaccgccuuuauacc

SEQ ID NO: 1492563 - RNA, 19 nt, Artificial Sequence
  Description of Artificial Sequence: Synthetic oligonucleotide
uucauauacaggagugcac

SEQ ID NO: 1492564 - RNA, 19 nt, Artificial Sequence
  Description of Artificial Sequence: Synthetic oligonucleotide
gucuagcaggcuuucauag

SEQ ID NO: 1492565 - RNA, 19 nt, Artificial Sequence
  Description of Artificial Sequence: Synthetic oligonucleotide
ucauagaacaagcgugcac

SEQ ID NO: 1492566 - RNA, 19 nt, Artificial Sequence
  Description of Artificial Sequence: Synthetic oligonucleotide
ucugggucaaugcugucgu

SEQ ID NO: 1492567 - RNA, 19 nt, Artificial Sequence
  Description of Artificial Sequence: Synthetic oligonucleotide
aagaaaguucucaauuggu

SEQ ID NO: 1492568 - RNA, 19 nt, Artificial Sequence
  Description of Artificial Sequence: Synthetic oligonucleotide
auagaacaagcgugcacuc

SEQ ID NO: 1492569 - RNA, 19 nt, Artificial Sequence
  Description of Artificial Sequence: Synthetic oligonucleotide
cugcgauugccucauaaag

SEQ ID NO: 1492570 - RNA, 19 nt, Artificial Sequence
  Description of Artificial Sequence: Synthetic oligonucleotide
uggauucugggucaaugcu

SEQ ID NO: 1492571 - RNA, 19 nt, Artificial Sequence
  Description of Artificial Sequence: Synthetic oligonucleotide
auacccuaaguacucauau

SEQ ID NO: 1492572 - RNA, 19 nt, Artificial Sequence
  Description of Artificial Sequence: Synthetic oligonucleotide
auuagcuucgggauccaac

SEQ ID NO: 1492573 - RNA, 19 nt, Artificial Sequence
  Description of Artificial Sequence: Synthetic oligonucleotide
ucauuggguguauggggcg

SEQ ID NO: 1492574 - RNA, 19 nt, Artificial Sequence
  Description of Artificial Sequence: Synthetic oligonucleotide
uccgauaggacguugucua

SEQ ID NO: 1492575 - RNA, 19 nt, Artificial Sequence
  Description of Artificial Sequence: Synthetic oligonucleotide
aauucgguucugaauauaa

SEQ ID NO: 1492576 - RNA, 19 nt, Artificial Sequence
  Description of Artificial Sequence: Synthetic oligonucleotide
uagucguaaugcaagggaa

SEQ ID NO: 1492577 - RNA, 19 nt, Artificial Sequence
  Description of Artificial Sequence: Synthetic oligonucleotide
uagucuacauuguccagga

SEQ ID NO: 1492578 - RNA, 19 nt, Artificial Sequence
  Description of Artificial Sequence: Synthetic oligonucleotide
acucuuuaguggcacucgg

SEQ ID NO: 1492579 - RNA, 19 nt, Artificial Sequence
  Description of Artificial Sequence: Synthetic oligonucleotide
ugggguuaauauucagucc

SEQ ID NO: 1492580 - RNA, 19 nt, Artificial Sequence
  Description of Artificial Sequence: Synthetic oligonucleotide
augagaagcugaucauccg

SEQ ID NO: 1492581 - RNA, 19 nt, Artificial Sequence
  Description of Artificial Sequence: Synthetic oligonucleotide
acuguagguagucguaaug

SEQ ID NO: 1492582 - RNA, 19 nt, Artificial Sequence
  Description of Artificial Sequence: Synthetic oligonucleotide
cugcauguagugaucugcg

SEQ ID NO: 1492583 - RNA, 19 nt, Artificial Sequence
  Description of Artificial Sequence: Synthetic oligonucleotide
agaccauguguguauagga

SEQ ID NO: 1492584 - RNA, 19 nt, Artificial Sequence
  Description of Artificial Sequence: Synthetic oligonucleotide
uugucuaggagaacccgcu

SEQ ID NO: 1492585 - RNA, 19 nt, Artificial Sequence
  Description of Artificial Sequence: Synthetic oligonucleotide
uugaguucagcaugaaaua

SEQ ID NO: 1492586 - RNA, 19 nt, Artificial Sequence
  Description of Artificial Sequence: Synthetic oligonucleotide
ggcggucacaguuuuagcg

SEQ ID NO: 1492587 - RNA, 19 nt, Artificial Sequence
  Description of Artificial Sequence: Synthetic oligonucleotide
gauaggacguugucuagga

SEQ ID NO: 1492588 - RNA, 19 nt, Artificial Sequence
  Description of Artificial Sequence: Synthetic oligonucleotide
ucucgaccuaucuugggca

SEQ ID NO: 1492589 - RNA, 19 nt, Artificial Sequence
  Description of Artificial Sequence: Synthetic oligonucleotide
cucgguauccaucaccaac

SEQ ID NO: 1492590 - RNA, 19 nt, Artificial Sequence
  Description of Artificial Sequence: Synthetic oligonucleotide
agguagucguaaugcaagg

SEQ ID NO: 1492591 - RNA, 19 nt, Artificial Sequence
  Description of Artificial Sequence: Synthetic oligonucleotide
agugcuuucaagacaguug

SEQ ID NO: 1492592 - RNA, 19 nt, Artificial Sequence
  Description of Artificial Sequence: Synthetic oligonucleotide
agguuaugacguuugacaa

SEQ ID NO: 1492593 - RNA, 19 nt, Artificial Sequence
  Description of Artificial Sequence: Synthetic oligonucleotide
guagucguaaugcaaggga

SEQ ID NO: 1492594 - RNA, 19 nt, Artificial Sequence
  Description of Artificial Sequence: Synthetic oligonucleotide
aacuucugcucccuccgug

SEQ ID NO: 1492595 - RNA, 19 nt, Artificial Sequence
  Description of Artificial Sequence: Synthetic oligonucleotide
uccuaaagggacccgguuc

SEQ ID NO: 1492596 - RNA, 19 nt, Artificial Sequence
  Description of Artificial Sequence: Synthetic oligonucleotide
auauuccucaaaucucugu

SEQ ID NO: 1492597 - RNA, 19 nt, Artificial Sequence
  Description of Artificial Sequence: Synthetic oligonucleotide
gccuuuauacccuaaguac

SEQ ID NO: 1492598 - RNA, 19 nt, Artificial Sequence
  Description of Artificial Sequence: Synthetic oligonucleotide
cauucauauacaggagugc

SEQ ID NO: 1492599 - RNA, 19 nt, Artificial Sequence
  Description of Artificial Sequence: Synthetic oligonucleotide
uuccuauagcucaucucug

SEQ ID NO: 1492600 - RNA, 19 nt, Artificial Sequence
  Description of Artificial Sequence: Synthetic oligonucleotide
gggguuaauauucagucca

SEQ ID NO: 1492601 - RNA, 19 nt, Artificial Sequence
  Description of Artificial Sequence: Synthetic oligonucleotide
acaagcgugcacucuuuag

SEQ ID NO: 1492602 - RNA, 19 nt, Artificial Sequence
  Description of Artificial Sequence: Synthetic oligonucleotide
ucucgcugaugucauagaa

SEQ ID NO: 1492603 - RNA, 19 nt, Artificial Sequence
  Description of Artificial Sequence: Synthetic oligonucleotide
ucaagguuaugacguuuga

SEQ ID NO: 1492604 - RNA, 19 nt, Artificial Sequence
  Description of Artificial Sequence: Synthetic oligonucleotide
uacaggagugcacuauagu

SEQ ID NO: 1492605 - RNA, 19 nt, Artificial Sequence
  Description of Artificial Sequence: Synthetic oligonucleotide
uacucauauuccucaaauc

SEQ ID NO: 1492606 - RNA, 19 nt, Artificial Sequence
  Description of Artificial Sequence: Synthetic oligonucleotide
guugaguucagcaugaaau

SEQ ID NO: 1492607 - RNA, 19 nt, Artificial Sequence
  Description of Artificial Sequence: Synthetic oligonucleotide
auagagcucggcaugccac

SEQ ID NO: 1492608 - RNA, 19 nt, Artificial Sequence
  Description of Artificial Sequence: Synthetic oligonucleotide
agcgugcacucuuuagugg

SEQ ID NO: 1492609 - RNA, 19 nt, Artificial Sequence
  Description of Artificial Sequence: Synthetic oligonucleotide
accauguguguauaggaaa

SEQ ID NO: 1492610 - RNA, 19 nt, Artificial Sequence
  Description of Artificial Sequence: Synthetic oligonucleotide
uauacccuaaguacucaua

SEQ ID NO: 1492611 - RNA, 19 nt, Artificial Sequence
  Description of Artificial Sequence: Synthetic oligonucleotide
ggcaaguucccucacacac

SEQ ID NO: 1492612 - RNA, 19 nt, Artificial Sequence
  Description of Artificial Sequence: Synthetic oligonucleotide
aguugucugcaugaauggg

SEQ ID NO: 1492613 - RNA, 19 nt, Artificial Sequence
  Description of Artificial Sequence: Synthetic oligonucleotide
uuuucccucgguauccauc

SEQ ID NO: 1492614 - RNA, 19 nt, Artificial Sequence
  Description of Artificial Sequence: Synthetic oligonucleotide
cucgcugaugucauagaac

SEQ ID NO: 1492615 - RNA, 19 nt, Artificial Sequence
  Description of Artificial Sequence: Synthetic oligonucleotide
uccguaacugauccaguaa

SEQ ID NO: 1492616 - RNA, 19 nt, Artificial Sequence
  Description of Artificial Sequence: Synthetic oligonucleotide
caugcugacagaccagcac

SEQ ID NO: 1492617 - RNA, 19 nt, Artificial Sequence
  Description of Artificial Sequence: Synthetic oligonucleotide
caggguugaguucagcaug

SEQ ID NO: 1492618 - RNA, 19 nt, Artificial Sequence
  Description of Artificial Sequence: Synthetic oligonucleotide
aacaucagguaggcuuugg

SEQ ID NO: 1492619 - RNA, 19 nt, Artificial Sequence
  Description of Artificial Sequence: Synthetic oligonucleotide
ugggcggguggcaaguucc

SEQ ID NO: 1492620 - RNA, 19 nt, Artificial Sequence
  Description of Artificial Sequence: Synthetic oligonucleotide
uuucuucuauccugcugcc

SEQ ID NO: 1492621 - RNA, 19 nt, Artificial Sequence
  Description of Artificial Sequence: Synthetic oligonucleotide
augaaugggaugacugagg

SEQ ID NO: 1492622 - RNA, 19 nt, Artificial Sequence
  Description of Artificial Sequence: Synthetic oligonucleotide
agaacaagcgugcacucuu

SEQ ID NO: 1492623 - RNA, 19 nt, Artificial Sequence
  Description of Artificial Sequence: Synthetic oligonucleotide
gucucgaccuaucuugggc

SEQ ID NO: 1492624 - RNA, 19 nt, Artificial Sequence
  Description of Artificial Sequence: Synthetic oligonucleotide
acacuuugguuuaauggag

SEQ ID NO: 1492625 - RNA, 19 nt, Artificial Sequence
  Description of Artificial Sequence: Synthetic oligonucleotide
uccucaaaucucuguggcc

SEQ ID NO: 1492626 - RNA, 19 nt, Artificial Sequence
  Description of Artificial Sequence: Synthetic oligonucleotide
aaagggacccgguucucau

SEQ ID NO: 1492627 - RNA, 19 nt, Artificial Sequence
  Description of Artificial Sequence: Synthetic oligonucleotide
augcaagggaagaaaguuc

SEQ ID NO: 1492628 - RNA, 19 nt, Artificial Sequence
  Description of Artificial Sequence: Synthetic oligonucleotide
cucgccaccagaugagaag

SEQ ID NO: 1492629 - RNA, 19 nt, Artificial Sequence
  Description of Artificial Sequence: Synthetic oligonucleotide
auuggugagaggcggccug

SEQ ID NO: 1492630 - RNA, 19 nt, Artificial Sequence
  Description of Artificial Sequence: Synthetic oligonucleotide
ugccucauaaagaccgccu

SEQ ID NO: 1492631 - RNA, 19 nt, Artificial Sequence
  Description of Artificial Sequence: Synthetic oligonucleotide
cagaccauguguguauagg

SEQ ID NO: 1492632 - RNA, 19 nt, Artificial Sequence
  Description of Artificial Sequence: Synthetic oligonucleotide
ucggcaugccacaucuuca

SEQ ID NO: 1492633 - RNA, 19 nt, Artificial Sequence
  Description of Artificial Sequence: Synthetic oligonucleotide
cuuuccuauagcucaucuc

SEQ ID NO: 1492634 - RNA, 19 nt, Artificial Sequence
  Description of Artificial Sequence: Synthetic oligonucleotide
uuauacccuaaguacucau

SEQ ID NO: 1492635 - RNA, 19 nt, Artificial Sequence
  Description of Artificial Sequence: Synthetic oligonucleotide
ucgggauccaacaggcagu

SEQ ID NO: 1492636 - RNA, 19 nt, Artificial Sequence
  Description of Artificial Sequence: Synthetic oligonucleotide
ugcagcugacuuuaucagu

SEQ ID NO: 1492637 - RNA, 19 nt, Artificial Sequence
  Description of Artificial Sequence: Synthetic oligonucleotide
ucuagcaggcuuucauagu

SEQ ID NO: 1492638 - RNA, 19 nt, Artificial Sequence
  Description of Artificial Sequence: Synthetic oligonucleotide
ucgucuagcaggcuuucau

SEQ ID NO: 1492639 - RNA, 19 nt, Artificial Sequence
  Description of Artificial Sequence: Synthetic oligonucleotide
gcgauugccucauaaagac

SEQ ID NO: 1492640 - RNA, 19 nt, Artificial Sequence
  Description of Artificial Sequence: Synthetic oligonucleotide
uuaggucucgaccuaucuu

SEQ ID NO: 1492641 - RNA, 19 nt, Artificial Sequence
  Description of Artificial Sequence: Synthetic oligonucleotide
guuuaauggaggcggucac

SEQ ID NO: 1492642 - RNA, 19 nt, Artificial Sequence
  Description of Artificial Sequence: Synthetic oligonucleotide
gcauucauuagcuucggga

SEQ ID NO: 1492643 - RNA, 19 nt, Artificial Sequence
  Description of Artificial Sequence: Synthetic oligonucleotide
agucguaaugcaagggaag

SEQ ID NO: 1492644 - RNA, 19 nt, Artificial Sequence
  Description of Artificial Sequence: Synthetic oligonucleotide
accgccuuuauacccuaag

SEQ ID NO: 1492645 - RNA, 19 nt, Artificial Sequence
  Description of Artificial Sequence: Synthetic oligonucleotide
aauccucucgggcuucaau

SEQ ID NO: 1492646 - RNA, 19 nt, Artificial Sequence
  Description of Artificial Sequence: Synthetic oligonucleotide
ugucuaggagaacccgcug

SEQ ID NO: 1492647 - RNA, 19 nt, Artificial Sequence
  Description of Artificial Sequence: Synthetic oligonucleotide
auugccucauaaagaccgc

SEQ ID NO: 1492648 - RNA, 19 nt, Artificial Sequence
  Description of Artificial Sequence: Synthetic oligonucleotide
ucgccaccagaugagaagc

SEQ ID NO: 1492649 - RNA, 19 nt, Artificial Sequence
  Description of Artificial Sequence: Synthetic oligonucleotide
aauacaggguugaguucag

SEQ ID NO: 1492650 - RNA, 19 nt, Artificial Sequence
  Description of Artificial Sequence: Synthetic oligonucleotide
agucccguucaguuguucu

SEQ ID NO: 1492651 - RNA, 19 nt, Artificial Sequence
  Description of Artificial Sequence: Synthetic oligonucleotide
uuaugacguuugacaaaug

SEQ ID NO: 1492652 - RNA, 19 nt, Artificial Sequence
  Description of Artificial Sequence: Synthetic oligonucleotide
acguugucuaggagaaccc

SEQ ID NO: 1492653 - RNA, 19 nt, Artificial Sequence
  Description of Artificial Sequence: Synthetic oligonucleotide
aagucgucauucauauaca

SEQ ID NO: 1492654 - RNA, 19 nt, Artificial Sequence
  Description of Artificial Sequence: Synthetic oligonucleotide
auagaguagagggccaccu

SEQ ID NO: 1492655 - RNA, 19 nt, Artificial Sequence
  Description of Artificial Sequence: Synthetic oligonucleotide
uugguuuaauggaggcggu

SEQ ID NO: 1492656 - RNA, 19 nt, Artificial Sequence
  Description of Artificial Sequence: Synthetic oligonucleotide
ugcauguagugaucugcga

SEQ ID NO: 1492657 - RNA, 19 nt, Artificial Sequence
  Description of Artificial Sequence: Synthetic oligonucleotide
gaucuagggugaaccacag

SEQ ID NO: 1492658 - RNA, 19 nt, Artificial Sequence
  Description of Artificial Sequence: Synthetic oligonucleotide
caagguuaugacguuugac

SEQ ID NO: 1492659 - RNA, 19 nt, Artificial Sequence
  Description of Artificial Sequence: Synthetic oligonucleotide
guagacgaaggugauguuc

SEQ ID NO: 1492660 - RNA, 19 nt, Artificial Sequence
  Description of Artificial Sequence: Synthetic oligonucleotide
cucggcaugccacaucuuc

SEQ ID NO: 1492661 - RNA, 19 nt, Artificial Sequence
  Description of Artificial Sequence: Synthetic oligonucleotide
auaggacguugucuaggag

SEQ ID NO: 1492662 - RNA, 19 nt, Artificial Sequence
  Description of Artificial Sequence: Synthetic oligonucleotide
aggcggucacaguuuuagc

SEQ ID NO: 1492663 - RNA, 19 nt, Artificial Sequence
  Description of Artificial Sequence: Synthetic oligonucleotide
caaacuuuucauugggugu

SEQ ID NO: 1492664 - RNA, 19 nt, Artificial Sequence
  Description of Artificial Sequence: Synthetic oligonucleotide
gaagcugaucauccgccca

SEQ ID NO: 1492665 - RNA, 19 nt, Artificial Sequence
  Description of Artificial Sequence: Synthetic oligonucleotide
aagaccgccuuuauacccu

SEQ ID NO: 1492666 - RNA, 19 nt, Artificial Sequence
  Description of Artificial Sequence: Synthetic oligonucleotide
uuccgauaggacguugucu

SEQ ID NO: 1492667 - RNA, 19 nt, Artificial Sequence
  Description of Artificial Sequence: Synthetic oligonucleotide
acauagagcucggcaugcc

SEQ ID NO: 1492668 - RNA, 19 nt, Artificial Sequence
  Description of Artificial Sequence: Synthetic oligonucleotide
auacaggagugcacuauag

SEQ ID NO: 1492669 - RNA, 19 nt, Artificial Sequence
  Description of Artificial Sequence: Synthetic oligonucleotide
cauagaacaagcgugcacu

SEQ ID NO: 1492670 - RNA, 19 nt, Artificial Sequence
  Description of Artificial Sequence: Synthetic oligonucleotide
ucuuaggucucgaccuauc

SEQ ID NO: 1492671 - RNA, 19 nt, Artificial Sequence
  Description of Artificial Sequence: Synthetic oligonucleotide
gcuuuggcacacuccaagg

SEQ ID NO: 1492672 - RNA, 19 nt, Artificial Sequence
  Description of Artificial Sequence: Synthetic oligonucleotide
gguagucguaaugcaaggg

SEQ ID NO: 1492673 - RNA, 19 nt, Artificial Sequence
  Description of Artificial Sequence: Synthetic oligonucleotide
agucuacauuguccaggac

SEQ ID NO: 1492674 - RNA, 19 nt, Artificial Sequence
  Description of Artificial Sequence: Synthetic oligonucleotide
ucuuccgagcuuucucgcu

SEQ ID NO: 1492675 - RNA, 19 nt, Artificial Sequence
  Description of Artificial Sequence: Synthetic oligonucleotide
augcugucgucuagcaggc

SEQ ID NO: 1492676 - RNA, 19 nt, Artificial Sequence
  Description of Artificial Sequence: Synthetic oligonucleotide
cacuccuaaagggacccgg

SEQ ID NO: 1492677 - RNA, 19 nt, Artificial Sequence
  Description of Artificial Sequence: Synthetic oligonucleotide
auauacaggagugcacuau

SEQ ID NO: 1492678 - RNA, 19 nt, Artificial Sequence
  Description of Artificial Sequence: Synthetic oligonucleotide
guuaugacguuugacaaau

SEQ ID NO: 1492679 - RNA, 19 nt, Artificial Sequence
  Description of Artificial Sequence: Synthetic oligonucleotide
aacaagcgugcacucuuua

SEQ ID NO: 1492680 - RNA, 19 nt, Artificial Sequence
  Description of Artificial Sequence: Synthetic oligonucleotide
uagagcucggcaugccaca

SEQ ID NO: 1492681 - RNA, 19 nt, Artificial Sequence
  Description of Artificial Sequence: Synthetic oligonucleotide
gguucucgccaccagauga

SEQ ID NO: 1492682 - RNA, 19 nt, Artificial Sequence
  Description of Artificial Sequence: Synthetic oligonucleotide
uugccucauaaagaccgcc

SEQ ID NO: 1492683 - RNA, 19 nt, Artificial Sequence
  Description of Artificial Sequence: Synthetic oligonucleotide
agacaguugcuccuucaaa

SEQ ID NO: 1492684 - RNA, 19 nt, Artificial Sequence
  Description of Artificial Sequence: Synthetic oligonucleotide
cuucuauccugcugcccag

SEQ ID NO: 1492685 - RNA, 19 nt, Artificial Sequence
  Description of Artificial Sequence: Synthetic oligonucleotide
ucugcagaccaugugugua

SEQ ID NO: 1492686 - RNA, 19 nt, Artificial Sequence
  Description of Artificial Sequence: Synthetic oligonucleotide
ggggcgauguuuucccucg

SEQ ID NO: 1492687 - RNA, 19 nt, Artificial Sequence
  Description of Artificial Sequence: Synthetic oligonucleotide
cacauagagcucggcaugc

SEQ ID NO: 1492688 - RNA, 19 nt, Artificial Sequence
  Description of Artificial Sequence: Synthetic oligonucleotide
ugccguucuccguaacuga

SEQ ID NO: 1492689 - RNA, 19 nt, Artificial Sequence
  Description of Artificial Sequence: Synthetic oligonucleotide
gaaugggaugacugagguc

SEQ ID NO: 1492690 - RNA, 19 nt, Artificial Sequence
  Description of Artificial Sequence: Synthetic oligonucleotide
cucugggguuaauauucag

SEQ ID NO: 1492691 - RNA, 19 nt, Artificial Sequence
  Description of Artificial Sequence: Synthetic oligonucleotide
guauggggcgauguuuucc

SEQ ID NO: 1492692 - RNA, 19 nt, Artificial Sequence
  Description of Artificial Sequence: Synthetic oligonucleotide
ucucgccaccagaugagaa

SEQ ID NO: 1492693 - RNA, 19 nt, Artificial Sequence
  Description of Artificial Sequence: Synthetic oligonucleotide
uagaacaagcgugcacucu

SEQ ID NO: 1492694 - RNA, 19 nt, Artificial Sequence
  Description of Artificial Sequence: Synthetic oligonucleotide
cagcaugauuccacuggcc

SEQ ID NO: 1492695 - RNA, 19 nt, Artificial Sequence
  Description of Artificial Sequence: Synthetic oligonucleotide
gucccguucaguuguucug

SEQ ID NO: 1492696 - RNA, 19 nt, Artificial Sequence
  Description of Artificial Sequence: Synthetic oligonucleotide
gucguaaugcaagggaaga

SEQ ID NO: 1492697 - RNA, 19 nt, Artificial Sequence
  Description of Artificial Sequence: Synthetic oligonucleotide
uucucgcugaugucauaga

SEQ ID NO: 1492698 - RNA, 19 nt, Artificial Sequence
  Description of Artificial Sequence: Synthetic oligonucleotide
ccuauagcucaucucuggg

SEQ ID NO: 1492699 - RNA, 19 nt, Artificial Sequence
  Description of Artificial Sequence: Synthetic oligonucleotide
cauagaguagagggccacc

SEQ ID NO: 1492700 - RNA, 19 nt, Artificial Sequence
  Description of Artificial Sequence: Synthetic oligonucleotide
ugaucugcgauugccucau

SEQ ID NO: 1492701 - RNA, 19 nt, Artificial Sequence
  Description of Artificial Sequence: Synthetic oligonucleotide
ucguaaugcaagggaagaa

SEQ ID NO: 1492702 - RNA, 19 nt, Artificial Sequence
  Description of Artificial Sequence: Synthetic oligonucleotide
ucgaccuaucuugggcagg

SEQ ID NO: 1492703 - RNA, 19 nt, Artificial Sequence
  Description of Artificial Sequence: Synthetic oligonucleotide
ucucuuaggucucgaccua

SEQ ID NO: 1492704 - RNA, 19 nt, Artificial Sequence
  Description of Artificial Sequence: Synthetic oligonucleotide
gauccaacaggcaguuguc

SEQ ID NO: 1492705 - RNA, 19 nt, Artificial Sequence
  Description of Artificial Sequence: Synthetic oligonucleotide
uguauggggcgauguuuuc

SEQ ID NO: 1492706 - RNA, 19 nt, Artificial Sequence
  Description of Artificial Sequence: Synthetic oligonucleotide
aggacguugucuaggagaa

SEQ ID NO: 1492707 - RNA, 19 nt, Artificial Sequence
  Description of Artificial Sequence: Synthetic oligonucleotide
guucucgccaccagaugag

SEQ ID NO: 1492708 - RNA, 19 nt, Artificial Sequence
  Description of Artificial Sequence: Synthetic oligonucleotide
augauuccacuggccacac

SEQ ID NO: 1492709 - RNA, 19 nt, Artificial Sequence
  Description of Artificial Sequence: Synthetic oligonucleotide
cauaaagaccgccuuuaua

SEQ ID NO: 1492710 - RNA, 19 nt, Artificial Sequence
  Description of Artificial Sequence: Synthetic oligonucleotide
uacccuaaguacucauauu

SEQ ID NO: 1492711 - RNA, 19 nt, Artificial Sequence
  Description of Artificial Sequence: Synthetic oligonucleotide
uggcaaguucccucacaca

SEQ ID NO: 1492712 - RNA, 19 nt, Artificial Sequence
  Description of Artificial Sequence: Synthetic oligonucleotide
guagguagucguaaugcaa

SEQ ID NO: 1492713 - RNA, 19 nt, Artificial Sequence
  Description of Artificial Sequence: Synthetic oligonucleotide
gaccauguguguauaggaa

SEQ ID NO: 1492714 - RNA, 19 nt, Artificial Sequence
  Description of Artificial Sequence: Synthetic oligonucleotide
cguucuccguaacugaucc

SEQ ID NO: 1492715 - RNA, 19 nt, Artificial Sequence
  Description of Artificial Sequence: Synthetic oligonucleotide
gguuaauauucaguccaug

SEQ ID NO: 1492716 - RNA, 19 nt, Artificial Sequence
  Description of Artificial Sequence: Synthetic oligonucleotide
gugaucugcgauugccuca

SEQ ID NO: 1492717 - RNA, 19 nt, Artificial Sequence
  Description of Artificial Sequence: Synthetic oligonucleotide
gguauccaucaccaaccag

SEQ ID NO: 1492718 - RNA, 19 nt, Artificial Sequence
  Description of Artificial Sequence: Synthetic oligonucleotide
ggagaacccgcugaguccc

SEQ ID NO: 1492719 - RNA, 19 nt, Artificial Sequence
  Description of Artificial Sequence: Synthetic oligonucleotide
cugccguucuccguaacug

SEQ ID NO: 1492720 - RNA, 19 nt, Artificial Sequence
  Description of Artificial Sequence: Synthetic oligonucleotide
ugcacucuuuaguggcacu

SEQ ID NO: 1492721 - RNA, 19 nt, Artificial Sequence
  Description of Artificial Sequence: Synthetic oligonucleotide
gcgugcacucuuuaguggc

SEQ ID NO: 1492722 - RNA, 19 nt, Artificial Sequence
  Description of Artificial Sequence: Synthetic oligonucleotide
uuaaauccucucgggcuuc

SEQ ID NO: 1492723 - RNA, 19 nt, Artificial Sequence
  Description of Artificial Sequence: Synthetic oligonucleotide
uaauucgguucugaauaua

SEQ ID NO: 1492724 - RNA, 19 nt, Artificial Sequence
  Description of Artificial Sequence: Synthetic oligonucleotide
cacucucuuuccuauagcu

SEQ ID NO: 1492725 - RNA, 19 nt, Artificial Sequence
  Description of Artificial Sequence: Synthetic oligonucleotide
ugaggucguuucuucuauc

SEQ ID NO: 1492726 - RNA, 19 nt, Artificial Sequence
  Description of Artificial Sequence: Synthetic oligonucleotide
gacguuugacaaaugcugu

SEQ ID NO: 1492727 - RNA, 19 nt, Artificial Sequence
  Description of Artificial Sequence: Synthetic oligonucleotide
uaauggaggcggucacagu

SEQ ID NO: 1492728 - RNA, 19 nt, Artificial Sequence
  Description of Artificial Sequence: Synthetic oligonucleotide
ucccucacacacucaugcu

SEQ ID NO: 1492729 - RNA, 19 nt, Artificial Sequence
  Description of Artificial Sequence: Synthetic oligonucleotide
gcccuucacauagagcucg

SEQ ID NO: 1492730 - RNA, 19 nt, Artificial Sequence
  Description of Artificial Sequence: Synthetic oligonucleotide
agccaaauuuuagugcuuu

SEQ ID NO: 1492731 - RNA, 19 nt, Artificial Sequence
  Description of Artificial Sequence: Synthetic oligonucleotide
uguauccgcuccacuucuc

SEQ ID NO: 1492732 - RNA, 19 nt, Artificial Sequence
  Description of Artificial Sequence: Synthetic oligonucleotide
cauagagcucggcaugcca

SEQ ID NO: 1492733 - RNA, 19 nt, Artificial Sequence
  Description of Artificial Sequence: Synthetic oligonucleotide
agugcacuauagucccgga

SEQ ID NO: 1492734 - RNA, 19 nt, Artificial Sequence
  Description of Artificial Sequence: Synthetic oligonucleotide
ucacuccuaaagggacccg

SEQ ID NO: 1492735 - RNA, 19 nt, Artificial Sequence
  Description of Artificial Sequence: Synthetic oligonucleotide
uggggcgauguuuucccuc

SEQ ID NO: 1492736 - RNA, 19 nt, Artificial Sequence
  Description of Artificial Sequence: Synthetic oligonucleotide
uagccaaauuuuagugcuu

SEQ ID NO: 1492737 - RNA, 19 nt, Artificial Sequence
  Description of Artificial Sequence: Synthetic oligonucleotide
uggguguauggggcgaugu

SEQ ID NO: 1492738 - RNA, 19 nt, Artificial Sequence
  Description of Artificial Sequence: Synthetic oligonucleotide
ucaauggauucugggucaa

SEQ ID NO: 1492739 - RNA, 19 nt, Artificial Sequence
  Description of Artificial Sequence: Synthetic oligonucleotide
cuggauggaacaucaggua

SEQ ID NO: 1492740 - RNA, 19 nt, Artificial Sequence
  Description of Artificial Sequence: Synthetic oligonucleotide
caugaggguucucgccacc

SEQ ID NO: 1492741 - RNA, 19 nt, Artificial Sequence
  Description of Artificial Sequence: Synthetic oligonucleotide
gcaugaaugggaugacuga

SEQ ID NO: 1492742 - RNA, 19 nt, Artificial Sequence
  Description of Artificial Sequence: Synthetic oligonucleotide
gacccgguucucauccugc

SEQ ID NO: 1492743 - RNA, 19 nt, Artificial Sequence
  Description of Artificial Sequence: Synthetic oligonucleotide
ggaucuagggugaaccaca

SEQ ID NO: 1492744 - RNA, 19 nt, Artificial Sequence
  Description of Artificial Sequence: Synthetic oligonucleotide
gcaugaaauaggauuccac

SEQ ID NO: 1492745 - RNA, 19 nt, Artificial Sequence
  Description of Artificial Sequence: Synthetic oligonucleotide
acacacucaugcugacaga

SEQ ID NO: 1492746 - RNA, 19 nt, Artificial Sequence
  Description of Artificial Sequence: Synthetic oligonucleotide
gaacaucagguaggcuuug

SEQ ID NO: 1492747 - RNA, 19 nt, Artificial Sequence
  Description of Artificial Sequence: Synthetic oligonucleotide
gcugagucccguucaguug

SEQ ID NO: 1492748 - RNA, 19 nt, Artificial Sequence
  Description of Artificial Sequence: Synthetic oligonucleotide
ggucucgaccuaucuuggg

SEQ ID NO: 1492749 - RNA, 19 nt, Artificial Sequence
  Description of Artificial Sequence: Synthetic oligonucleotide
ugguuuaauggaggcgguc

SEQ ID NO: 1492750 - RNA, 19 nt, Artificial Sequence
  Description of Artificial Sequence: Synthetic oligonucleotide
caugcuucccaugcugcuc

SEQ ID NO: 1492751 - RNA, 19 nt, Artificial Sequence
  Description of Artificial Sequence: Synthetic oligonucleotide
auccaacaggcaguugucu

SEQ ID NO: 1492752 - RNA, 19 nt, Artificial Sequence
  Description of Artificial Sequence: Synthetic oligonucleotide
uguagacgaaggugauguu

SEQ ID NO: 1492753 - RNA, 19 nt, Artificial Sequence
  Description of Artificial Sequence: Synthetic oligonucleotide
aguucagauucaagguuau

SEQ ID NO: 1492754 - RNA, 19 nt, Artificial Sequence
  Description of Artificial Sequence: Synthetic oligonucleotide
auucgguucugaauauaaa

SEQ ID NO: 1492755 - RNA, 19 nt, Artificial Sequence
  Description of Artificial Sequence: Synthetic oligonucleotide
ggaugacugaggucguuuc

SEQ ID NO: 1492756 - RNA, 19 nt, Artificial Sequence
  Description of Artificial Sequence: Synthetic oligonucleotide
cauauacaggagugcacua

SEQ ID NO: 1492757 - RNA, 19 nt, Artificial Sequence
  Description of Artificial Sequence: Synthetic oligonucleotide
aucuagggugaaccacagu

SEQ ID NO: 1492758 - RNA, 19 nt, Artificial Sequence
  Description of Artificial Sequence: Synthetic oligonucleotide
uucucgccaccagaugaga

SEQ ID NO: 1492759 - RNA, 19 nt, Artificial Sequence
  Description of Artificial Sequence: Synthetic oligonucleotide
cugagucccguucaguugu

SEQ ID NO: 1492760 - RNA, 19 nt, Artificial Sequence
  Description of Artificial Sequence: Synthetic oligonucleotide
guaauucgguucugaauau

SEQ ID NO: 1492761 - RNA, 19 nt, Artificial Sequence
  Description of Artificial Sequence: Synthetic oligonucleotide
ccuuuauacccuaaguacu

SEQ ID NO: 1492762 - RNA, 19 nt, Artificial Sequence
  Description of Artificial Sequence: Synthetic oligonucleotide
gucauagaacaagcgugca

SEQ ID NO: 1492763 - RNA, 19 nt, Artificial Sequence
  Description of Artificial Sequence: Synthetic oligonucleotide
cuuuaguggcacucggccu

SEQ ID NO: 1492764 - RNA, 19 nt, Artificial Sequence
  Description of Artificial Sequence: Synthetic oligonucleotide
uucuauccugcugcccaga

SEQ ID NO: 1492765 - RNA, 19 nt, Artificial Sequence
  Description of Artificial Sequence: Synthetic oligonucleotide
cuccguaacugauccagua

SEQ ID NO: 1492766 - RNA, 19 nt, Artificial Sequence
  Description of Artificial Sequence: Synthetic oligonucleotide
gcagaccauguguguauag

SEQ ID NO: 1492767 - RNA, 19 nt, Artificial Sequence
  Description of Artificial Sequence: Synthetic oligonucleotide
cugaguuguagacgaaggu

SEQ ID NO: 1492768 - RNA, 19 nt, Artificial Sequence
  Description of Artificial Sequence: Synthetic oligonucleotide
cuuaggucucgaccuaucu

SEQ ID NO: 1492769 - RNA, 19 nt, Artificial Sequence
  Description of Artificial Sequence: Synthetic oligonucleotide
gguugaguucagcaugaaa

SEQ ID NO: 1492770 - RNA, 19 nt, Artificial Sequence
  Description of Artificial Sequence: Synthetic oligonucleotide
acccgcugagucccguuca

SEQ ID NO: 1492771 - RNA, 19 nt, Artificial Sequence
  Description of Artificial Sequence: Synthetic oligonucleotide
acucggccuucauagccaa

SEQ ID NO: 1492772 - RNA, 19 nt, Artificial Sequence
  Description of Artificial Sequence: Synthetic oligonucleotide
accaaccagcaugauucca

SEQ ID NO: 1492773 - RNA, 19 nt, Artificial Sequence
  Description of Artificial Sequence: Synthetic oligonucleotide
uuggguguauggggcgaug

SEQ ID NO: 1492774 - RNA, 19 nt, Artificial Sequence
  Description of Artificial Sequence: Synthetic oligonucleotide
ugcagaccauguguguaua

SEQ ID NO: 1492775 - RNA, 19 nt, Artificial Sequence
  Description of Artificial Sequence: Synthetic oligonucleotide
ccuguauccgcuccacuuc

SEQ ID NO: 1492776 - RNA, 19 nt, Artificial Sequence
  Description of Artificial Sequence: Synthetic oligonucleotide
ccuaaguacucauauuccu

SEQ ID NO: 1492777 - RNA, 19 nt, Artificial Sequence
  Description of Artificial Sequence: Synthetic oligonucleotide
cccacacuuugguuuaaug

SEQ ID NO: 1492778 - RNA, 19 nt, Artificial Sequence
  Description of Artificial Sequence: Synthetic oligonucleotide
uucccucgguauccaucac

SEQ ID NO: 1492779 - RNA, 19 nt, Artificial Sequence
  Description of Artificial Sequence: Synthetic oligonucleotide
ugucgucuagcaggcuuuc

SEQ ID NO: 1492780 - RNA, 19 nt, Artificial Sequence
  Description of Artificial Sequence: Synthetic oligonucleotide
cagguaggcuuuggcacac

SEQ ID NO: 1492781 - RNA, 19 nt, Artificial Sequence
  Description of Artificial Sequence: Synthetic oligonucleotide
gccaaauuuuagugcuuuc

SEQ ID NO: 1492782 - RNA, 19 nt, Artificial Sequence
  Description of Artificial Sequence: Synthetic oligonucleotide
gguggcaaguucccucaca

SEQ ID NO: 1492783 - RNA, 19 nt, Artificial Sequence
  Description of Artificial Sequence: Synthetic oligonucleotide
cuaaagggacccgguucuc

SEQ ID NO: 1492784 - RNA, 19 nt, Artificial Sequence
  Description of Artificial Sequence: Synthetic oligonucleotide
auccaucaccaaccagcau

SEQ ID NO: 1492785 - RNA, 19 nt, Artificial Sequence
  Description of Artificial Sequence: Synthetic oligonucleotide
ggacccgguucucauccug

SEQ ID NO: 1492786 - RNA, 19 nt, Artificial Sequence
  Description of Artificial Sequence: Synthetic oligonucleotide
cauuggguguauggggcga

SEQ ID NO: 1492787 - RNA, 19 nt, Artificial Sequence
  Description of Artificial Sequence: Synthetic oligonucleotide
ugcucccuccguguucacu

SEQ ID NO: 1492788 - RNA, 19 nt, Artificial Sequence
  Description of Artificial Sequence: Synthetic oligonucleotide
cuucgggauccaacaggca

SEQ ID NO: 1492789 - RNA, 19 nt, Artificial Sequence
  Description of Artificial Sequence: Synthetic oligonucleotide
ugaccgccuucaccccaug

SEQ ID NO: 1492790 - RNA, 19 nt, Artificial Sequence
  Description of Artificial Sequence: Synthetic oligonucleotide
cgauugccucauaaagacc

SEQ ID NO: 1492791 - RNA, 19 nt, Artificial Sequence
  Description of Artificial Sequence: Synthetic oligonucleotide
gccaccagaugagaagcug

SEQ ID NO: 1492792 - RNA, 19 nt, Artificial Sequence
  Description of Artificial Sequence: Synthetic oligonucleotide
uccugccguucuccguaac

SEQ ID NO: 1492793 - RNA, 19 nt, Artificial Sequence
  Description of Artificial Sequence: Synthetic oligonucleotide
cguugucuaggagaacccg

SEQ ID NO: 1492794 - RNA, 19 nt, Artificial Sequence
  Description of Artificial Sequence: Synthetic oligonucleotide
ccaccagaugagaagcuga

SEQ ID NO: 1492795 - RNA, 19 nt, Artificial Sequence
  Description of Artificial Sequence: Synthetic oligonucleotide
ugagucccguucaguuguu

SEQ ID NO: 1492796 - RNA, 19 nt, Artificial Sequence
  Description of Artificial Sequence: Synthetic oligonucleotide
auggaacaucagguaggcu

SEQ ID NO: 1492797 - RNA, 19 nt, Artificial Sequence
  Description of Artificial Sequence: Synthetic oligonucleotide
ccacagugccacagcacag

SEQ ID NO: 1492798 - RNA, 19 nt, Artificial Sequence
  Description of Artificial Sequence: Synthetic oligonucleotide
cucuuccgauaggacguug

SEQ ID NO: 1492799 - RNA, 19 nt, Artificial Sequence
  Description of Artificial Sequence: Synthetic oligonucleotide
cuguauccgcuccacuucu

SEQ ID NO: 1492800 - RNA, 19 nt, Artificial Sequence
  Description of Artificial Sequence: Synthetic oligonucleotide
cugggucaaugcugucguc

SEQ ID NO: 1492801 - RNA, 19 nt, Artificial Sequence
  Description of Artificial Sequence: Synthetic oligonucleotide
ccgauaggacguugucuag

SEQ ID NO: 1492802 - RNA, 19 nt, Artificial Sequence
  Description of Artificial Sequence: Synthetic oligonucleotide
ggagugcacuauagucccg

SEQ ID NO: 1492803 - RNA, 19 nt, Artificial Sequence
  Description of Artificial Sequence: Synthetic oligonucleotide
ggguucucgccaccagaug

SEQ ID NO: 1492804 - RNA, 19 nt, Artificial Sequence
  Description of Artificial Sequence: Synthetic oligonucleotide
cgagcuuucucgcugaugu

SEQ ID NO: 1492805 - RNA, 19 nt, Artificial Sequence
  Description of Artificial Sequence: Synthetic oligonucleotide
auggaggcggucacaguuu

SEQ ID NO: 1492806 - RNA, 19 nt, Artificial Sequence
  Description of Artificial Sequence: Synthetic oligonucleotide
ccuaaagggacccgguucu

SEQ ID NO: 1492807 - RNA, 19 nt, Artificial Sequence
  Description of Artificial Sequence: Synthetic oligonucleotide
ggcuuucauaguagucuac

SEQ ID NO: 1492808 - RNA, 19 nt, Artificial Sequence
  Description of Artificial Sequence: Synthetic oligonucleotide
gcugaucauccgcccacac

SEQ ID NO: 1492809 - RNA, 19 nt, Artificial Sequence
  Description of Artificial Sequence: Synthetic oligonucleotide
cgaccuaucuugggcaggg

SEQ ID NO: 1492810 - RNA, 19 nt, Artificial Sequence
  Description of Artificial Sequence: Synthetic oligonucleotide
accuucucuuaggucucga

SEQ ID NO: 1492811 - RNA, 19 nt, Artificial Sequence
  Description of Artificial Sequence: Synthetic oligonucleotide
cugaggucguuucuucuau

SEQ ID NO: 1492812 - RNA, 19 nt, Artificial Sequence
  Description of Artificial Sequence: Synthetic oligonucleotide
ggugaccgccuucacccca

SEQ ID NO: 1492813 - RNA, 19 nt, Artificial Sequence
  Description of Artificial Sequence: Synthetic oligonucleotide
gcgauguuuucccucggua

SEQ ID NO: 1492814 - RNA, 19 nt, Artificial Sequence
  Description of Artificial Sequence: Synthetic oligonucleotide
auccugccguucuccguaa

SEQ ID NO: 1492815 - RNA, 19 nt, Artificial Sequence
  Description of Artificial Sequence: Synthetic oligonucleotide
gcggguggcaaguucccuc

SEQ ID NO: 1492816 - RNA, 19 nt, Artificial Sequence
  Description of Artificial Sequence: Synthetic oligonucleotide
cugcagaccauguguguau

SEQ ID NO: 1492817 - RNA, 19 nt, Artificial Sequence
  Description of Artificial Sequence: Synthetic oligonucleotide
cguaaugcaagggaagaaa

SEQ ID NO: 1492818 - RNA, 19 nt, Artificial Sequence
  Description of Artificial Sequence: Synthetic oligonucleotide
gggcgauguuuucccucgg

SEQ ID NO: 1492819 - RNA, 19 nt, Artificial Sequence
  Description of Artificial Sequence: Synthetic oligonucleotide
gagucccguucaguuguuc

SEQ ID NO: 1492820 - RNA, 19 nt, Artificial Sequence
  Description of Artificial Sequence: Synthetic oligonucleotide
guguauggggcgauguuuu

SEQ ID NO: 1492821 - RNA, 19 nt, Artificial Sequence
  Description of Artificial Sequence: Synthetic oligonucleotide
cuccguguucacuccuaaa

SEQ ID NO: 1492822 - RNA, 19 nt, Artificial Sequence
  Description of Artificial Sequence: Synthetic oligonucleotide
cucucgggcuucaauggau

SEQ ID NO: 1492823 - RNA, 19 nt, Artificial Sequence
  Description of Artificial Sequence: Synthetic oligonucleotide
cccguucaguuguucugag

SEQ ID NO: 1492824 - RNA, 19 nt, Artificial Sequence
  Description of Artificial Sequence: Synthetic oligonucleotide
ccguucuccguaacugauc

SEQ ID NO: 1492825 - RNA, 19 nt, Artificial Sequence
  Description of Artificial Sequence: Synthetic oligonucleotide
ugggaugacugaggucguu

SEQ ID NO: 1492826 - RNA, 19 nt, Artificial Sequence
  Description of Artificial Sequence: Synthetic oligonucleotide
cuuucucgcugaugucaua

SEQ ID NO: 1492827 - RNA, 19 nt, Artificial Sequence
  Description of Artificial Sequence: Synthetic oligonucleotide
cgccuuuauacccuaagua

SEQ ID NO: 1492828 - RNA, 19 nt, Artificial Sequence
  Description of Artificial Sequence: Synthetic oligonucleotide
gguguauggggcgauguuu

SEQ ID NO: 1492829 - RNA, 19 nt, Artificial Sequence
  Description of Artificial Sequence: Synthetic oligonucleotide
gucgucuagcaggcuuuca

SEQ ID NO: 1492830 - RNA, 19 nt, Artificial Sequence
  Description of Artificial Sequence: Synthetic oligonucleotide
uaguggcacucggccuuca

SEQ ID NO: 1492831 - RNA, 19 nt, Artificial Sequence
  Description of Artificial Sequence: Synthetic oligonucleotide
ggugaaccacagugccaca

SEQ ID NO: 1492832 - RNA, 19 nt, Artificial Sequence
  Description of Artificial Sequence: Synthetic oligonucleotide
ugcugucgucuagcaggcu

SEQ ID NO: 1492833 - RNA, 19 nt, Artificial Sequence
  Description of Artificial Sequence: Synthetic oligonucleotide
gaacaagcgugcacucuuu

SEQ ID NO: 1492834 - RNA, 19 nt, Artificial Sequence
  Description of Artificial Sequence: Synthetic oligonucleotide
gccuguauccgcuccacuu

SEQ ID NO: 1492835 - RNA, 19 nt, Artificial Sequence
  Description of Artificial Sequence: Synthetic oligonucleotide
caccugcauguagugaucu

SEQ ID NO: 1492836 - RNA, 19 nt, Artificial Sequence
  Description of Artificial Sequence: Synthetic oligonucleotide
ccguaacugauccaguaau

SEQ ID NO: 1492837 - RNA, 19 nt, Artificial Sequence
  Description of Artificial Sequence: Synthetic oligonucleotide
cugcaugaaugggaugacu

SEQ ID NO: 1492838 - RNA, 19 nt, Artificial Sequence
  Description of Artificial Sequence: Synthetic oligonucleotide
gcccagacagggcuguucu

SEQ ID NO: 1492839 - RNA, 19 nt, Artificial Sequence
  Description of Artificial Sequence: Synthetic oligonucleotide
cuaggagaacccgcugagu

SEQ ID NO: 1492840 - RNA, 19 nt, Artificial Sequence
  Description of Artificial Sequence: Synthetic oligonucleotide
cccgcugagucccguucag

SEQ ID NO: 1492841 - RNA, 19 nt, Artificial Sequence
  Description of Artificial Sequence: Synthetic oligonucleotide
ggcgauguuuucccucggu

SEQ ID NO: 1492842 - RNA, 19 nt, Artificial Sequence
  Description of Artificial Sequence: Synthetic oligonucleotide
gccucauaaagaccgccuu

SEQ ID NO: 1492843 - RNA, 19 nt, Artificial Sequence
  Description of Artificial Sequence: Synthetic oligonucleotide
ccaugcugcucuugaucca

SEQ ID NO: 1492844 - RNA, 19 nt, Artificial Sequence
  Description of Artificial Sequence: Synthetic oligonucleotide
ccucucgggcuucaaugga

SEQ ID NO: 1492845 - RNA, 19 nt, Artificial Sequence
  Description of Artificial Sequence: Synthetic oligonucleotide
gaucugcgauugccucaua

SEQ ID NO: 1492846 - RNA, 19 nt, Artificial Sequence
  Description of Artificial Sequence: Synthetic oligonucleotide
ggguuaauauucaguccau

SEQ ID NO: 1492847 - RNA, 19 nt, Artificial Sequence
  Description of Artificial Sequence: Synthetic oligonucleotide
gaccgccuuuauacccuaa

SEQ ID NO: 1492848 - RNA, 19 nt, Artificial Sequence
  Description of Artificial Sequence: Synthetic oligonucleotide
cucuuaggucucgaccuau

SEQ ID NO: 1492849 - RNA, 19 nt, Artificial Sequence
  Description of Artificial Sequence: Synthetic oligonucleotide
cgauguuuucccucgguau

SEQ ID NO: 1492850 - RNA, 19 nt, Artificial Sequence
  Description of Artificial Sequence: Synthetic oligonucleotide
gaacccgcugagucccguu

SEQ ID NO: 1492851 - RNA, 19 nt, Artificial Sequence
  Description of Artificial Sequence: Synthetic oligonucleotide
gggcggguggcaaguuccc

SEQ ID NO: 1492852 - RNA, 19 nt, Artificial Sequence
  Description of Artificial Sequence: Synthetic oligonucleotide
cucggccuucauagccaaa

SEQ ID NO: 1492853 - RNA, 19 nt, Artificial Sequence
  Description of Artificial Sequence: Synthetic oligonucleotide
cgucuagcaggcuuucaua

SEQ ID NO: 1492854 - RNA, 19 nt, Artificial Sequence
  Description of Artificial Sequence: Synthetic oligonucleotide
gggauccaacaggcaguug

SEQ ID NO: 1492855 - RNA, 19 nt, Artificial Sequence
  Description of Artificial Sequence: Synthetic oligonucleotide
ccgagcuuucucgcugaug

SEQ ID NO: 1492856 - RNA, 19 nt, Artificial Sequence
  Description of Artificial Sequence: Synthetic oligonucleotide
ccgccuuuauacccuaagu

SEQ ID NO: 1492857 - RNA, 19 nt, Artificial Sequence
  Description of Artificial Sequence: Synthetic oligonucleotide
ucaccccaugaggguucuc

SEQ ID NO: 1492858 - RNA, 19 nt, Artificial Sequence
  Description of Artificial Sequence: Synthetic oligonucleotide
gggaugacugaggucguuu

SEQ ID NO: 1492859 - RNA, 19 nt, Artificial Sequence
  Description of Artificial Sequence: Synthetic oligonucleotide
ggguguauggggcgauguu

SEQ ID NO: 1492860 - RNA, 19 nt, Artificial Sequence
  Description of Artificial Sequence: Synthetic oligonucleotide
ccugccguucuccguaacu

SEQ ID NO: 1492861 - RNA, 19 nt, Artificial Sequence
  Description of Artificial Sequence: Synthetic oligonucleotide
gugaccgccuucaccccau

SEQ ID NO: 1492862 - RNA, 19 nt, Artificial Sequence
  Description of Artificial Sequence: Synthetic oligonucleotide
ggguugaguucagcaugaa

SEQ ID NO: 1492863 - RNA, 19 nt, Artificial Sequence
  Description of Artificial Sequence: Synthetic oligonucleotide
ggcaugccacaucuucauu

SEQ ID NO: 1492864 - RNA, 19 nt, Artificial Sequence
  Description of Artificial Sequence: Synthetic oligonucleotide
cccagacccucugcagcug

SEQ ID NO: 1492865 - RNA, 19 nt, Artificial Sequence
  Description of Artificial Sequence: Synthetic oligonucleotide
ccguucaguuguucugagu

SEQ ID NO: 1492866 - RNA, 19 nt, Artificial Sequence
  Description of Artificial Sequence: Synthetic oligonucleotide
ggcggguggcaaguucccu

SEQ ID NO: 1492867 - RNA, 19 nt, Artificial Sequence
  Description of Artificial Sequence: Synthetic oligonucleotide
gccugggcggguggcaagu

SEQ ID NO: 1492868 - RNA, 19 nt, Artificial Sequence
  Description of Artificial Sequence: Synthetic oligonucleotide
gcucuuccgauaggacguu

SEQ ID NO: 1492869 - RNA, 19 nt, Artificial Sequence
  Description of Artificial Sequence: Synthetic oligonucleotide
cggcacugcucuuccgaua

SEQ ID NO: 1492870 - RNA, 19 nt, Artificial Sequence
  Description of Artificial Sequence: Synthetic oligonucleotide
cgggauccaacaggcaguu

SEQ ID NO: 1492871 - RNA, 19 nt, Artificial Sequence
  Description of Artificial Sequence: Synthetic oligonucleotide
ccugggcggguggcaaguu

SEQ ID NO: 1492872 - RNA, 19 nt, Artificial Sequence
  Description of Artificial Sequence: Synthetic oligonucleotide
aaaguggaagccucuaacc

SEQ ID NO: 1492873 - RNA, 19 nt, Artificial Sequence
  Description of Artificial Sequence: Synthetic oligonucleotide
aaguggaagccucuaaccc

SEQ ID NO: 1492874 - RNA, 19 nt, Artificial Sequence
  Description of Artificial Sequence: Synthetic oligonucleotide
caaaacucagaauaguccc

SEQ ID NO: 1492875 - RNA, 19 nt, Artificial Sequence
  Description of Artificial Sequence: Synthetic oligonucleotide
uccuuagucuuucuuaaug

SEQ ID NO: 1492876 - RNA, 19 nt, Artificial Sequence
  Description of Artificial Sequence: Synthetic oligonucleotide
uaaaguggaagccucuaac

SEQ ID NO: 1492877 - RNA, 19 nt, Artificial Sequence
  Description of Artificial Sequence: Synthetic oligonucleotide
aacaaaaccaaaacucaga

SEQ ID NO: 1492878 - RNA, 19 nt, Artificial Sequence
  Description of Artificial Sequence: Synthetic oligonucleotide
uguuuuaaaguggaagccu

SEQ ID NO: 1492879 - RNA, 19 nt, Artificial Sequence
  Description of Artificial Sequence: Synthetic oligonucleotide
uuuuaaaguggaagccucu

SEQ ID NO: 1492880 - RNA, 19 nt, Artificial Sequence
  Description of Artificial Sequence: Synthetic oligonucleotide
accaaaacucagaauaguc

SEQ ID NO: 1492881 - RNA, 19 nt, Artificial Sequence
  Description of Artificial Sequence: Synthetic oligonucleotide
uguuccuuagucuuucuua

SEQ ID NO: 1492882 - RNA, 19 nt, Artificial Sequence
  Description of Artificial Sequence: Synthetic oligonucleotide
cuguuuuaaaguggaagcc

SEQ ID NO: 1492883 - RNA, 19 nt, Artificial Sequence
  Description of Artificial Sequence: Synthetic oligonucleotide
uuaaaguggaagccucuaa

SEQ ID NO: 1492884 - RNA, 19 nt, Artificial Sequence
  Description of Artificial Sequence: Synthetic oligonucleotide
ccaaaacucagaauagucc

SEQ ID NO: 1492885 - RNA, 19 nt, Artificial Sequence
  Description of Artificial Sequence: Synthetic oligonucleotide
aguggaagccucuaacccu

SEQ ID NO: 1492886 - RNA, 19 nt, Artificial Sequence
  Description of Artificial Sequence: Synthetic oligonucleotide
aaccaaaacucagaauagu

SEQ ID NO: 1492887 - RNA, 19 nt, Artificial Sequence
  Description of Artificial Sequence: Synthetic oligonucleotide
aagucggggucacuggaug

SEQ ID NO: 1492888 - RNA, 19 nt, Artificial Sequence
  Description of Artificial Sequence: Synthetic oligonucleotide
guuuuaaaguggaagccuc

SEQ ID NO: 1492889 - RNA, 19 nt, Artificial Sequence
  Description of Artificial Sequence: Synthetic oligonucleotide
guuccuuagucuuucuuaa

SEQ ID NO: 1492890 - RNA, 19 nt, Artificial Sequence
  Description of Artificial Sequence: Synthetic oligonucleotide
cuuagucuuucuuaaugaa

SEQ ID NO: 1492891 - RNA, 19 nt, Artificial Sequence
  Description of Artificial Sequence: Synthetic oligonucleotide
uuuaaaguggaagccucua

SEQ ID NO: 1492892 - RNA, 19 nt, Artificial Sequence
  Description of Artificial Sequence: Synthetic oligonucleotide
ucuuguuccuuagucuuuc

SEQ ID NO: 1492893 - RNA, 19 nt, Artificial Sequence
  Description of Artificial Sequence: Synthetic oligonucleotide
uuguuccuuagucuuucuu

SEQ ID NO: 1492894 - RNA, 19 nt, Artificial Sequence
  Description of Artificial Sequence: Synthetic oligonucleotide
uucuuguuccuuagucuuu

SEQ ID NO: 1492895 - RNA, 19 nt, Artificial Sequence
  Description of Artificial Sequence: Synthetic oligonucleotide
aacgccgaagucgggguca

SEQ ID NO: 1492896 - RNA, 19 nt, Artificial Sequence
  Description of Artificial Sequence: Synthetic oligonucleotide
uuccuuagucuuucuuaau

SEQ ID NO: 1492897 - RNA, 19 nt, Artificial Sequence
  Description of Artificial Sequence: Synthetic oligonucleotide
agucggggucacuggauga

SEQ ID NO: 1492898 - RNA, 19 nt, Artificial Sequence
  Description of Artificial Sequence: Synthetic oligonucleotide
ccuuagucuuucuuaauga

SEQ ID NO: 1492899 - RNA, 19 nt, Artificial Sequence
  Description of Artificial Sequence: Synthetic oligonucleotide
uggaagccucuaacccuac

SEQ ID NO: 1492900 - RNA, 19 nt, Artificial Sequence
  Description of Artificial Sequence: Synthetic oligonucleotide
ggaagccucuaacccuacc

SEQ ID NO: 1492901 - RNA, 19 nt, Artificial Sequence
  Description of Artificial Sequence: Synthetic oligonucleotide
gccgaagucggggucacug

SEQ ID NO: 1492902 - RNA, 19 nt, Artificial Sequence
  Description of Artificial Sequence: Synthetic oligonucleotide
guggaagccucuaacccua

SEQ ID NO: 1492903 - RNA, 19 nt, Artificial Sequence
  Description of Artificial Sequence: Synthetic oligonucleotide
ccgaagucggggucacugg

SEQ ID NO: 1492904 - RNA, 19 nt, Artificial Sequence
  Description of Artificial Sequence: Synthetic oligonucleotide
ucggggucacuggaugaau

SEQ ID NO: 1492905 - RNA, 19 nt, Artificial Sequence
  Description of Artificial Sequence: Synthetic oligonucleotide
acgccgaagucggggucac

SEQ ID NO: 1492906 - RNA, 19 nt, Artificial Sequence
  Description of Artificial Sequence: Synthetic oligonucleotide
cuuguuccuuagucuuucu

SEQ ID NO: 1492907 - RNA, 19 nt, Artificial Sequence
  Description of Artificial Sequence: Synthetic oligonucleotide
gucggggucacuggaugaa

SEQ ID NO: 1492908 - RNA, 19 nt, Artificial Sequence
  Description of Artificial Sequence: Synthetic oligonucleotide
gaagucggggucacuggau

SEQ ID NO: 1492909 - RNA, 19 nt, Artificial Sequence
  Description of Artificial Sequence: Synthetic oligonucleotide
cgaagucggggucacugga

SEQ ID NO: 1492910 - RNA, 19 nt, Artificial Sequence
  Description of Artificial Sequence: Synthetic oligonucleotide
cgccgaagucggggucacu

SEQ ID NO: 1492911 - RNA, 19 nt, Artificial Sequence
  Description of Artificial Sequence: Synthetic oligonucleotide
aauauauauacauauauau

SEQ ID NO: 1492912 - RNA, 19 nt, Artificial Sequence
  Description of Artificial Sequence: Synthetic oligonucleotide
uauauauacauauauauac

SEQ ID NO: 1492913 - RNA, 19 nt, Artificial Sequence
  Description of Artificial Sequence: Synthetic oligonucleotide
aauccaaagaaccaacccc

SEQ ID NO: 1492914 - RNA, 19 nt, Artificial Sequence
  Description of Artificial Sequence: Synthetic oligonucleotide
aaaugguugaucuuaaguc

SEQ ID NO: 1492915 - RNA, 19 nt, Artificial Sequence
  Description of Artificial Sequence: Synthetic oligonucleotide
uuaaacaaagcgaucaugg

SEQ ID NO: 1492916 - RNA, 19 nt, Artificial Sequence
  Description of Artificial Sequence: Synthetic oligonucleotide
uuaaauaugagcugaaaag

SEQ ID NO: 1492917 - RNA, 19 nt, Artificial Sequence
  Description of Artificial Sequence: Synthetic oligonucleotide
uuaccgaggacuaagaccg

SEQ ID NO: 1492918 - RNA, 19 nt, Artificial Sequence
  Description of Artificial Sequence: Synthetic oligonucleotide
aaugaaaugggccauggag

SEQ ID NO: 1492919 - RNA, 19 nt, Artificial Sequence
  Description of Artificial Sequence: Synthetic oligonucleotide
aaauccaaagaaccaaccc

SEQ ID NO: 1492920 - RNA, 19 nt, Artificial Sequence
  Description of Artificial Sequence: Synthetic oligonucleotide
aguuacaagaaucauuuuc

SEQ ID NO: 1492921 - RNA, 19 nt, Artificial Sequence
  Description of Artificial Sequence: Synthetic oligonucleotide
aaacaaagcgaucaugguc

SEQ ID NO: 1492922 - RNA, 19 nt, Artificial Sequence
  Description of Artificial Sequence: Synthetic oligonucleotide
uuacaaaucauuaaauuaa

SEQ ID NO: 1492923 - RNA, 19 nt, Artificial Sequence
  Description of Artificial Sequence: Synthetic oligonucleotide
aaaauugguaauuuauugu

SEQ ID NO: 1492924 - RNA, 19 nt, Artificial Sequence
  Description of Artificial Sequence: Synthetic oligonucleotide
acagagguuaaauaugagc

SEQ ID NO: 1492925 - RNA, 19 nt, Artificial Sequence
  Description of Artificial Sequence: Synthetic oligonucleotide
aaugguugaucuuaagucu

SEQ ID NO: 1492926 - RNA, 19 nt, Artificial Sequence
  Description of Artificial Sequence: Synthetic oligonucleotide
uguacaguuacaagaauca

SEQ ID NO: 1492927 - RNA, 19 nt, Artificial Sequence
  Description of Artificial Sequence: Synthetic oligonucleotide
aaauugguaauuuauuguu

SEQ ID NO: 1492928 - RNA, 19 nt, Artificial Sequence
  Description of Artificial Sequence: Synthetic oligonucleotide
uucuccgagacuuugagug

SEQ ID NO: 1492929 - RNA, 19 nt, Artificial Sequence
  Description of Artificial Sequence: Synthetic oligonucleotide
acagaaaaugaaaugggcc

SEQ ID NO: 1492930 - RNA, 19 nt, Artificial Sequence
  Description of Artificial Sequence: Synthetic oligonucleotide
aauagugaggauggggucg

SEQ ID NO: 1492931 - RNA, 19 nt, Artificial Sequence
  Description of Artificial Sequence: Synthetic oligonucleotide
uauuguugucauuauuagg

SEQ ID NO: 1492932 - RNA, 19 nt, Artificial Sequence
  Description of Artificial Sequence: Synthetic oligonucleotide
agaacgggacucuaggagc

SEQ ID NO: 1492933 - RNA, 19 nt, Artificial Sequence
  Description of Artificial Sequence: Synthetic oligonucleotide
guuacaagaaucauuuucc

SEQ ID NO: 1492934 - RNA, 19 nt, Artificial Sequence
  Description of Artificial Sequence: Synthetic oligonucleotide
cauugaacuguccugacgc

SEQ ID NO: 1492935 - RNA, 19 nt, Artificial Sequence
  Description of Artificial Sequence: Synthetic oligonucleotide
uaaauaugagcugaaaagu

SEQ ID NO: 1492936 - RNA, 19 nt, Artificial Sequence
  Description of Artificial Sequence: Synthetic oligonucleotide
auauacuguacacacagga

SEQ ID NO: 1492937 - RNA, 19 nt, Artificial Sequence
  Description of Artificial Sequence: Synthetic oligonucleotide
aaaugggccauggaggugg

SEQ ID NO: 1492938 - RNA, 19 nt, Artificial Sequence
  Description of Artificial Sequence: Synthetic oligonucleotide
uguugucauuauuaggagg

SEQ ID NO: 1492939 - RNA, 19 nt, Artificial Sequence
  Description of Artificial Sequence: Synthetic oligonucleotide
ugaaaugagaacagaaaau

SEQ ID NO: 1492940 - RNA, 19 nt, Artificial Sequence
  Description of Artificial Sequence: Synthetic oligonucleotide
uuguuaaacaaagcgauca

SEQ ID NO: 1492941 - RNA, 19 nt, Artificial Sequence
  Description of Artificial Sequence: Synthetic oligonucleotide
aaaaugaaaugggccaugg

SEQ ID NO: 1492942 - RNA, 19 nt, Artificial Sequence
  Description of Artificial Sequence: Synthetic oligonucleotide
aucacguugacgaaggugg

SEQ ID NO: 1492943 - RNA, 19 nt, Artificial Sequence
  Description of Artificial Sequence: Synthetic oligonucleotide
aaauaugagcugaaaagug

SEQ ID NO: 1492944 - RNA, 19 nt, Artificial Sequence
  Description of Artificial Sequence: Synthetic oligonucleotide
ucaaucuucuccugguccg

SEQ ID NO: 1492945 - RNA, 19 nt, Artificial Sequence
  Description of Artificial Sequence: Synthetic oligonucleotide
accauauacacgauggcgc

SEQ ID NO: 1492946 - RNA, 19 nt, Artificial Sequence
  Description of Artificial Sequence: Synthetic oligonucleotide
agguuaggggaccugaugg

SEQ ID NO: 1492947 - RNA, 19 nt, Artificial Sequence
  Description of Artificial Sequence: Synthetic oligonucleotide
aggaguucaaaccucagca

SEQ ID NO: 1492948 - RNA, 19 nt, Artificial Sequence
  Description of Artificial Sequence: Synthetic oligonucleotide
auacuguacacacaggaca

SEQ ID NO: 1492949 - RNA, 19 nt, Artificial Sequence
  Description of Artificial Sequence: Synthetic oligonucleotide
gacgcgaucacguugacga

SEQ ID NO: 1492950 - RNA, 19 nt, Artificial Sequence
  Description of Artificial Sequence: Synthetic oligonucleotide
guugucauuauuaggaggc

SEQ ID NO: 1492951 - RNA, 19 nt, Artificial Sequence
  Description of Artificial Sequence: Synthetic oligonucleotide
aucauguccucauugaacu

SEQ ID NO: 1492952 - RNA, 19 nt, Artificial Sequence
  Description of Artificial Sequence: Synthetic oligonucleotide
cacaaucucagcuucuccg

SEQ ID NO: 1492953 - RNA, 19 nt, Artificial Sequence
  Description of Artificial Sequence: Synthetic oligonucleotide
guuaccgaggacuaagacc

SEQ ID NO: 1492954 - RNA, 19 nt, Artificial Sequence
  Description of Artificial Sequence: Synthetic oligonucleotide
aauaugagcugaaaagugu

SEQ ID NO: 1492955 - RNA, 19 nt, Artificial Sequence
  Description of Artificial Sequence: Synthetic oligonucleotide
acacaggacaauaacaggg

SEQ ID NO: 1492956 - RNA, 19 nt, Artificial Sequence
  Description of Artificial Sequence: Synthetic oligonucleotide
caaacagagguuaaauaug

SEQ ID NO: 1492957 - RNA, 19 nt, Artificial Sequence
  Description of Artificial Sequence: Synthetic oligonucleotide
ucauugaacuguccugacg

SEQ ID NO: 1492958 - RNA, 19 nt, Artificial Sequence
  Description of Artificial Sequence: Synthetic oligonucleotide
aaagcgaucauggucgcug

SEQ ID NO: 1492959 - RNA, 19 nt, Artificial Sequence
  Description of Artificial Sequence: Synthetic oligonucleotide
gacucuaggagccccagag

SEQ ID NO: 1492960 - RNA, 19 nt, Artificial Sequence
  Description of Artificial Sequence: Synthetic oligonucleotide
aaauauauauacauauaua

SEQ ID NO: 1492961 - RNA, 19 nt, Artificial Sequence
  Description of Artificial Sequence: Synthetic oligonucleotide
uacaacucugugaaaugag

SEQ ID NO: 1492962 - RNA, 19 nt, Artificial Sequence
  Description of Artificial Sequence: Synthetic oligonucleotide
agaaagugaggacaggggu

SEQ ID NO: 1492963 - RNA, 19 nt, Artificial Sequence
  Description of Artificial Sequence: Synthetic oligonucleotide
ugguaauuuauuguuguca

SEQ ID NO: 1492964 - RNA, 19 nt, Artificial Sequence
  Description of Artificial Sequence: Synthetic oligonucleotide
uugucuaguagguugugga

SEQ ID NO: 1492965 - RNA, 19 nt, Artificial Sequence
  Description of Artificial Sequence: Synthetic oligonucleotide
ucuaguagguuguggagcu

SEQ ID NO: 1492966 - RNA, 19 nt, Artificial Sequence
  Description of Artificial Sequence: Synthetic oligonucleotide
cucuaggagccccagaggg

SEQ ID NO: 1492967 - RNA, 19 nt, Artificial Sequence
  Description of Artificial Sequence: Synthetic oligonucleotide
uacacgauggcgcucacuc

SEQ ID NO: 1492968 - RNA, 19 nt, Artificial Sequence
  Description of Artificial Sequence: Synthetic oligonucleotide
ucccacuuaggccuggucc

SEQ ID NO: 1492969 - RNA, 19 nt, Artificial Sequence
  Description of Artificial Sequence: Synthetic oligonucleotide
auguacaguuacaagaauc

SEQ ID NO: 1492970 - RNA, 19 nt, Artificial Sequence
  Description of Artificial Sequence: Synthetic oligonucleotide
gacaauaacaggguguuga

SEQ ID NO: 1492971 - RNA, 19 nt, Artificial Sequence
  Description of Artificial Sequence: Synthetic oligonucleotide
agagguuaaauaugagcug

SEQ ID NO: 1492972 - RNA, 19 nt, Artificial Sequence
  Description of Artificial Sequence: Synthetic oligonucleotide
agcagaacgggacucuagg

SEQ ID NO: 1492973 - RNA, 19 nt, Artificial Sequence
  Description of Artificial Sequence: Synthetic oligonucleotide
agcuccauuuccuccuucc

SEQ ID NO: 1492974 - RNA, 19 nt, Artificial Sequence
  Description of Artificial Sequence: Synthetic oligonucleotide
gaucuuaagucuuugcuua

SEQ ID NO: 1492975 - RNA, 19 nt, Artificial Sequence
  Description of Artificial Sequence: Synthetic oligonucleotide
uuguugucauuauuaggag

SEQ ID NO: 1492976 - RNA, 19 nt, Artificial Sequence
  Description of Artificial Sequence: Synthetic oligonucleotide
uuacaagaaucauuuucca

SEQ ID NO: 1492977 - RNA, 19 nt, Artificial Sequence
  Description of Artificial Sequence: Synthetic oligonucleotide
uacaguuacaagaaucauu

SEQ ID NO: 1492978 - RNA, 19 nt, Artificial Sequence
  Description of Artificial Sequence: Synthetic oligonucleotide
gacaccacuggcuuccucc

SEQ ID NO: 1492979 - RNA, 19 nt, Artificial Sequence
  Description of Artificial Sequence: Synthetic oligonucleotide
ucuccuugcaggaaaugga

SEQ ID NO: 1492980 - RNA, 19 nt, Artificial Sequence
  Description of Artificial Sequence: Synthetic oligonucleotide
aagcgaucauggucgcugc

SEQ ID NO: 1492981 - RNA, 19 nt, Artificial Sequence
  Description of Artificial Sequence: Synthetic oligonucleotide
auauauacauauauauacu

SEQ ID NO: 1492982 - RNA, 19 nt, Artificial Sequence
  Description of Artificial Sequence: Synthetic oligonucleotide
acaguuacaagaaucauuu

SEQ ID NO: 1492983 - RNA, 19 nt, Artificial Sequence
  Description of Artificial Sequence: Synthetic oligonucleotide
acucugugaaaugagaaca

SEQ ID NO: 1492984 - RNA, 19 nt, Artificial Sequence
  Description of Artificial Sequence: Synthetic oligonucleotide
auggaguagcagcagaucu

SEQ ID NO: 1492985 - RNA, 19 nt, Artificial Sequence
  Description of Artificial Sequence: Synthetic oligonucleotide
ugaucuuaagucuuugcuu

SEQ ID NO: 1492986 - RNA, 19 nt, Artificial Sequence
  Description of Artificial Sequence: Synthetic oligonucleotide
ucaucuagcgcuccugcga

SEQ ID NO: 1492987 - RNA, 19 nt, Artificial Sequence
  Description of Artificial Sequence: Synthetic oligonucleotide
uaaacaaagcgaucauggu

SEQ ID NO: 1492988 - RNA, 19 nt, Artificial Sequence
  Description of Artificial Sequence: Synthetic oligonucleotide
gaugccuugcagcuggggc

SEQ ID NO: 1492989 - RNA, 19 nt, Artificial Sequence
  Description of Artificial Sequence: Synthetic oligonucleotide
ugucuaguagguuguggag

SEQ ID NO: 1492990 - RNA, 19 nt, Artificial Sequence
  Description of Artificial Sequence: Synthetic oligonucleotide
uguccugacgcgaucacgu

SEQ ID NO: 1492991 - RNA, 19 nt, Artificial Sequence
  Description of Artificial Sequence: Synthetic oligonucleotide
uuuugcgcauguugaaacc

SEQ ID NO: 1492992 - RNA, 19 nt, Artificial Sequence
  Description of Artificial Sequence: Synthetic oligonucleotide
ugacuguggucccuggucc

SEQ ID NO: 1492993 - RNA, 19 nt, Artificial Sequence
  Description of Artificial Sequence: Synthetic oligonucleotide
ggugauuuugcgcauguug

SEQ ID NO: 1492994 - RNA, 19 nt, Artificial Sequence
  Description of Artificial Sequence: Synthetic oligonucleotide
auugaacuguccugacgcg

SEQ ID NO: 1492995 - RNA, 19 nt, Artificial Sequence
  Description of Artificial Sequence: Synthetic oligonucleotide
caccauauacacgauggcg

SEQ ID NO: 1492996 - RNA, 19 nt, Artificial Sequence
  Description of Artificial Sequence: Synthetic oligonucleotide
aagggacagaaagugagga

SEQ ID NO: 1492997 - RNA, 19 nt, Artificial Sequence
  Description of Artificial Sequence: Synthetic oligonucleotide
aaacaggaguucaaaccuc

SEQ ID NO: 1492998 - RNA, 19 nt, Artificial Sequence
  Description of Artificial Sequence: Synthetic oligonucleotide
gagguuaaauaugagcuga

SEQ ID NO: 1492999 - RNA, 19 nt, Artificial Sequence
  Description of Artificial Sequence: Synthetic oligonucleotide
cuuguuaccgaggacuaag

SEQ ID NO: 1493000 - RNA, 19 nt, Artificial Sequence
  Description of Artificial Sequence: Synthetic oligonucleotide
ggaaguuuauuuuacaaua

SEQ ID NO: 1493001 - RNA, 19 nt, Artificial Sequence
  Description of Artificial Sequence: Synthetic oligonucleotide
caugcugcggaaacggggc

SEQ ID NO: 1493002 - RNA, 19 nt, Artificial Sequence
  Description of Artificial Sequence: Synthetic oligonucleotide
guggcauagacaccacugg

SEQ ID NO: 1493003 - RNA, 19 nt, Artificial Sequence
  Description of Artificial Sequence: Synthetic oligonucleotide
uggcauagacaccacuggc

SEQ ID NO: 1493004 - RNA, 19 nt, Artificial Sequence
  Description of Artificial Sequence: Synthetic oligonucleotide
ucucgcuuguuaccgagga

SEQ ID NO: 1493005 - RNA, 19 nt, Artificial Sequence
  Description of Artificial Sequence: Synthetic oligonucleotide
uuugcgcauguugaaaccc

SEQ ID NO: 1493006 - RNA, 19 nt, Artificial Sequence
  Description of Artificial Sequence: Synthetic oligonucleotide
cucugugaaaugagaacag

SEQ ID NO: 1493007 - RNA, 19 nt, Artificial Sequence
  Description of Artificial Sequence: Synthetic oligonucleotide
uguuaccgaggacuaagac

SEQ ID NO: 1493008 - RNA, 19 nt, Artificial Sequence
  Description of Artificial Sequence: Synthetic oligonucleotide
uaugagcugaaaaguguaa

SEQ ID NO: 1493009 - RNA, 19 nt, Artificial Sequence
  Description of Artificial Sequence: Synthetic oligonucleotide
auggcgcucacuccucugc

SEQ ID NO: 1493010 - RNA, 19 nt, Artificial Sequence
  Description of Artificial Sequence: Synthetic oligonucleotide
uccugauuggccccugcag

SEQ ID NO: 1493011 - RNA, 19 nt, Artificial Sequence
  Description of Artificial Sequence: Synthetic oligonucleotide
cagaacgggacucuaggag

SEQ ID NO: 1493012 - RNA, 19 nt, Artificial Sequence
  Description of Artificial Sequence: Synthetic oligonucleotide
ucccuuuggugauuuugcg

SEQ ID NO: 1493013 - RNA, 19 nt, Artificial Sequence
  Description of Artificial Sequence: Synthetic oligonucleotide
cucggcuucagguugggug

SEQ ID NO: 1493014 - RNA, 19 nt, Artificial Sequence
  Description of Artificial Sequence: Synthetic oligonucleotide
ucugcaguagcgcucccac

SEQ ID NO: 1493015 - RNA, 19 nt, Artificial Sequence
  Description of Artificial Sequence: Synthetic oligonucleotide
uccaaacagagguuaaaua

SEQ ID NO: 1493016 - RNA, 19 nt, Artificial Sequence
  Description of Artificial Sequence: Synthetic oligonucleotide
auauauauacauauauaua

SEQ ID NO: 1493017 - RNA, 19 nt, Artificial Sequence
  Description of Artificial Sequence: Synthetic oligonucleotide
auagugaggauggggucgc

SEQ ID NO: 1493018 - RNA, 19 nt, Artificial Sequence
  Description of Artificial Sequence: Synthetic oligonucleotide
uuuuccaaacagagguuaa

SEQ ID NO: 1493019 - RNA, 19 nt, Artificial Sequence
  Description of Artificial Sequence: Synthetic oligonucleotide
acaaagcgaucauggucgc

SEQ ID NO: 1493020 - RNA, 19 nt, Artificial Sequence
  Description of Artificial Sequence: Synthetic oligonucleotide
agcuuguuaaacaaagcga

SEQ ID NO: 1493021 - RNA, 19 nt, Artificial Sequence
  Description of Artificial Sequence: Synthetic oligonucleotide
ucgcuuguuaccgaggacu

SEQ ID NO: 1493022 - RNA, 19 nt, Artificial Sequence
  Description of Artificial Sequence: Synthetic oligonucleotide
aucacuuuacaaaucauua

SEQ ID NO: 1493023 - RNA, 19 nt, Artificial Sequence
  Description of Artificial Sequence: Synthetic oligonucleotide
uggauagcagacagauuca

SEQ ID NO: 1493024 - RNA, 19 nt, Artificial Sequence
  Description of Artificial Sequence: Synthetic oligonucleotide
uucagguugggugacugug

SEQ ID NO: 1493025 - RNA, 19 nt, Artificial Sequence
  Description of Artificial Sequence: Synthetic oligonucleotide
guacacacaggacaauaac

SEQ ID NO: 1493026 - RNA, 19 nt, Artificial Sequence
  Description of Artificial Sequence: Synthetic oligonucleotide
ucggcuucagguuggguga

SEQ ID NO: 1493027 - RNA, 19 nt, Artificial Sequence
  Description of Artificial Sequence: Synthetic oligonucleotide
uccuggauagcagacagau

SEQ ID NO: 1493028 - RNA, 19 nt, Artificial Sequence
  Description of Artificial Sequence: Synthetic oligonucleotide
uguaucucuucccauccuu

SEQ ID NO: 1493029 - RNA, 19 nt, Artificial Sequence
  Description of Artificial Sequence: Synthetic oligonucleotide
gaucacguugacgaaggug

SEQ ID NO: 1493030 - RNA, 19 nt, Artificial Sequence
  Description of Artificial Sequence: Synthetic oligonucleotide
aucucucgguccuggauag

SEQ ID NO: 1493031 - RNA, 19 nt, Artificial Sequence
  Description of Artificial Sequence: Synthetic oligonucleotide
aacagagguuaaauaugag

SEQ ID NO: 1493032 - RNA, 19 nt, Artificial Sequence
  Description of Artificial Sequence: Synthetic oligonucleotide
gguugggugacuguggucc

SEQ ID NO: 1493033 - RNA, 19 nt, Artificial Sequence
  Description of Artificial Sequence: Synthetic oligonucleotide
ugauuuugcgcauguugaa

SEQ ID NO: 1493034 - RNA, 19 nt, Artificial Sequence
  Description of Artificial Sequence: Synthetic oligonucleotide
ugaacuguccugacgcgau

SEQ ID NO: 1493035 - RNA, 19 nt, Artificial Sequence
  Description of Artificial Sequence: Synthetic oligonucleotide
uuguuaccgaggacuaaga

SEQ ID NO: 1493036 - RNA, 19 nt, Artificial Sequence
  Description of Artificial Sequence: Synthetic oligonucleotide
aaauggaguagcagcagau

SEQ ID NO: 1493037 - RNA, 19 nt, Artificial Sequence
  Description of Artificial Sequence: Synthetic oligonucleotide
uugguaauuuauuguuguc

SEQ ID NO: 1493038 - RNA, 19 nt, Artificial Sequence
  Description of Artificial Sequence: Synthetic oligonucleotide
cuugucuaguagguugugg

SEQ ID NO: 1493039 - RNA, 19 nt, Artificial Sequence
  Description of Artificial Sequence: Synthetic oligonucleotide
gaggacuaagaccgggaug

SEQ ID NO: 1493040 - RNA, 19 nt, Artificial Sequence
  Description of Artificial Sequence: Synthetic oligonucleotide
caggaguucaaaccucagc

SEQ ID NO: 1493041 - RNA, 19 nt, Artificial Sequence
  Description of Artificial Sequence: Synthetic oligonucleotide
guuugccccucccaggucc

SEQ ID NO: 1493042 - RNA, 19 nt, Artificial Sequence
  Description of Artificial Sequence: Synthetic oligonucleotide
auauacacgauggcgcuca

SEQ ID NO: 1493043 - RNA, 19 nt, Artificial Sequence
  Description of Artificial Sequence: Synthetic oligonucleotide
ucuugcccgaguacugcag

SEQ ID NO: 1493044 - RNA, 19 nt, Artificial Sequence
  Description of Artificial Sequence: Synthetic oligonucleotide
acucuaggagccccagagg

SEQ ID NO: 1493045 - RNA, 19 nt, Artificial Sequence
  Description of Artificial Sequence: Synthetic oligonucleotide
acacgauggcgcucacucc

SEQ ID NO: 1493046 - RNA, 19 nt, Artificial Sequence
  Description of Artificial Sequence: Synthetic oligonucleotide
gguccgaaggagaagagcc

SEQ ID NO: 1493047 - RNA, 19 nt, Artificial Sequence
  Description of Artificial Sequence: Synthetic oligonucleotide
auuuuccaaacagagguua

SEQ ID NO: 1493048 - RNA, 19 nt, Artificial Sequence
  Description of Artificial Sequence: Synthetic oligonucleotide
cuaggagccccagagggcc

SEQ ID NO: 1493049 - RNA, 19 nt, Artificial Sequence
  Description of Artificial Sequence: Synthetic oligonucleotide
uugcgcauguugaaaccca

SEQ ID NO: 1493050 - RNA, 19 nt, Artificial Sequence
  Description of Artificial Sequence: Synthetic oligonucleotide
ggggacaacagagugggcg

SEQ ID NO: 1493051 - RNA, 19 nt, Artificial Sequence
  Description of Artificial Sequence: Synthetic oligonucleotide
gagguuaggggaccugaug

SEQ ID NO: 1493052 - RNA, 19 nt, Artificial Sequence
  Description of Artificial Sequence: Synthetic oligonucleotide
uggggccaggaauagugag

SEQ ID NO: 1493053 - RNA, 19 nt, Artificial Sequence
  Description of Artificial Sequence: Synthetic oligonucleotide
uagcgcucccacaugcugc

SEQ ID NO: 1493054 - RNA, 19 nt, Artificial Sequence
  Description of Artificial Sequence: Synthetic oligonucleotide
cuugcaggaaauggaguag

SEQ ID NO: 1493055 - RNA, 19 nt, Artificial Sequence
  Description of Artificial Sequence: Synthetic oligonucleotide
cugugaaaugagaacagaa

SEQ ID NO: 1493056 - RNA, 19 nt, Artificial Sequence
  Description of Artificial Sequence: Synthetic oligonucleotide
uaguagguuguggagcuca

SEQ ID NO: 1493057 - RNA, 19 nt, Artificial Sequence
  Description of Artificial Sequence: Synthetic oligonucleotide
ucccauccuuuccaguuug

SEQ ID NO: 1493058 - RNA, 19 nt, Artificial Sequence
  Description of Artificial Sequence: Synthetic oligonucleotide
cucaucuagcgcuccugcg

SEQ ID NO: 1493059 - RNA, 19 nt, Artificial Sequence
  Description of Artificial Sequence: Synthetic oligonucleotide
cacaaaauugguaauuuau

SEQ ID NO: 1493060 - RNA, 19 nt, Artificial Sequence
  Description of Artificial Sequence: Synthetic oligonucleotide
acaugcugcggaaacgggg

SEQ ID NO: 1493061 - RNA, 19 nt, Artificial Sequence
  Description of Artificial Sequence: Synthetic oligonucleotide
gaguacugcagccccacca

SEQ ID NO: 1493062 - RNA, 19 nt, Artificial Sequence
  Description of Artificial Sequence: Synthetic oligonucleotide
acaauaacaggguguugaa

SEQ ID NO: 1493063 - RNA, 19 nt, Artificial Sequence
  Description of Artificial Sequence: Synthetic oligonucleotide
ugucauuauuaggaggcaa

SEQ ID NO: 1493064 - RNA, 19 nt, Artificial Sequence
  Description of Artificial Sequence: Synthetic oligonucleotide
uaucucuucccauccuuuc

SEQ ID NO: 1493065 - RNA, 19 nt, Artificial Sequence
  Description of Artificial Sequence: Synthetic oligonucleotide
aucauggucgcugccgccg

SEQ ID NO: 1493066 - RNA, 19 nt, Artificial Sequence
  Description of Artificial Sequence: Synthetic oligonucleotide
caucuagcgcuccugcgag

SEQ ID NO: 1493067 - RNA, 19 nt, Artificial Sequence
  Description of Artificial Sequence: Synthetic oligonucleotide
accagcgugagcuccauuu

SEQ ID NO: 1493068 - RNA, 19 nt, Artificial Sequence
  Description of Artificial Sequence: Synthetic oligonucleotide
ucucgguccuggauagcag

SEQ ID NO: 1493069 - RNA, 19 nt, Artificial Sequence
  Description of Artificial Sequence: Synthetic oligonucleotide
gggacaacagagugggcgg

SEQ ID NO: 1493070 - RNA, 19 nt, Artificial Sequence
  Description of Artificial Sequence: Synthetic oligonucleotide
aagaccgggaugccuugca

SEQ ID NO: 1493071 - RNA, 19 nt, Artificial Sequence
  Description of Artificial Sequence: Synthetic oligonucleotide
uggucccuguaucucuucc

SEQ ID NO: 1493072 - RNA, 19 nt, Artificial Sequence
  Description of Artificial Sequence: Synthetic oligonucleotide
agcgcucccacaugcugcg

SEQ ID NO: 1493073 - RNA, 19 nt, Artificial Sequence
  Description of Artificial Sequence: Synthetic oligonucleotide
aacgggacucuaggagccc

SEQ ID NO: 1493074 - RNA, 19 nt, Artificial Sequence
  Description of Artificial Sequence: Synthetic oligonucleotide
auccaccauauacacgaug

SEQ ID NO: 1493075 - RNA, 19 nt, Artificial Sequence
  Description of Artificial Sequence: Synthetic oligonucleotide
aacuguccugacgcgauca

SEQ ID NO: 1493076 - RNA, 19 nt, Artificial Sequence
  Description of Artificial Sequence: Synthetic oligonucleotide
ucauggucgcugccgccgg

SEQ ID NO: 1493077 - RNA, 19 nt, Artificial Sequence
  Description of Artificial Sequence: Synthetic oligonucleotide
agccccaccagcgugagcu

SEQ ID NO: 1493078 - RNA, 19 nt, Artificial Sequence
  Description of Artificial Sequence: Synthetic oligonucleotide
gguuaggggaccugauggg

SEQ ID NO: 1493079 - RNA, 19 nt, Artificial Sequence
  Description of Artificial Sequence: Synthetic oligonucleotide
gacagaaagugaggacagg

SEQ ID NO: 1493080 - RNA, 19 nt, Artificial Sequence
  Description of Artificial Sequence: Synthetic oligonucleotide
gaccgggaugccuugcagc

SEQ ID NO: 1493081 - RNA, 19 nt, Artificial Sequence
  Description of Artificial Sequence: Synthetic oligonucleotide
agcgaucauggucgcugcc

SEQ ID NO: 1493082 - RNA, 19 nt, Artificial Sequence
  Description of Artificial Sequence: Synthetic oligonucleotide
agagugggcggggagcucg

SEQ ID NO: 1493083 - RNA, 19 nt, Artificial Sequence
  Description of Artificial Sequence: Synthetic oligonucleotide
uccgcagcauccaccauau

SEQ ID NO: 1493084 - RNA, 19 nt, Artificial Sequence
  Description of Artificial Sequence: Synthetic oligonucleotide
accgggaugccuugcagcu

SEQ ID NO: 1493085 - RNA, 19 nt, Artificial Sequence
  Description of Artificial Sequence: Synthetic oligonucleotide
caguagcgcucccacaugc

SEQ ID NO: 1493086 - RNA, 19 nt, Artificial Sequence
  Description of Artificial Sequence: Synthetic oligonucleotide
gaucucucgguccuggaua

SEQ ID NO: 1493087 - RNA, 19 nt, Artificial Sequence
  Description of Artificial Sequence: Synthetic oligonucleotide
uugaacuguccugacgcga

SEQ ID NO: 1493088 - RNA, 19 nt, Artificial Sequence
  Description of Artificial Sequence: Synthetic oligonucleotide
ugcgcauguugaaacccac

SEQ ID NO: 1493089 - RNA, 19 nt, Artificial Sequence
  Description of Artificial Sequence: Synthetic oligonucleotide
uguccucauugaacugucc

SEQ ID NO: 1493090 - RNA, 19 nt, Artificial Sequence
  Description of Artificial Sequence: Synthetic oligonucleotide
uccgaaggagaagagccac

SEQ ID NO: 1493091 - RNA, 19 nt, Artificial Sequence
  Description of Artificial Sequence: Synthetic oligonucleotide
agguuguggagcucauucu

SEQ ID NO: 1493092 - RNA, 19 nt, Artificial Sequence
  Description of Artificial Sequence: Synthetic oligonucleotide
uccugcgaggucucgcuug

SEQ ID NO: 1493093 - RNA, 19 nt, Artificial Sequence
  Description of Artificial Sequence: Synthetic oligonucleotide
cuugcccgaguacugcagc

SEQ ID NO: 1493094 - RNA, 19 nt, Artificial Sequence
  Description of Artificial Sequence: Synthetic oligonucleotide
guacaacucugugaaauga

SEQ ID NO: 1493095 - RNA, 19 nt, Artificial Sequence
  Description of Artificial Sequence: Synthetic oligonucleotide
gauuuugcgcauguugaaa

SEQ ID NO: 1493096 - RNA, 19 nt, Artificial Sequence
  Description of Artificial Sequence: Synthetic oligonucleotide
guagcgcucccacaugcug

SEQ ID NO: 1493097 - RNA, 19 nt, Artificial Sequence
  Description of Artificial Sequence: Synthetic oligonucleotide
ccuuuggugauuuugcgca

SEQ ID NO: 1493098 - RNA, 19 nt, Artificial Sequence
  Description of Artificial Sequence: Synthetic oligonucleotide
cagcgugagcuccauuucc

SEQ ID NO: 1493099 - RNA, 19 nt, Artificial Sequence
  Description of Artificial Sequence: Synthetic oligonucleotide
uccgagacuuugaguguug

SEQ ID NO: 1493100 - RNA, 19 nt, Artificial Sequence
  Description of Artificial Sequence: Synthetic oligonucleotide
agggcugucaagaggggag

SEQ ID NO: 1493101 - RNA, 19 nt, Artificial Sequence
  Description of Artificial Sequence: Synthetic oligonucleotide
cucauugaacuguccugac

SEQ ID NO: 1493102 - RNA, 19 nt, Artificial Sequence
  Description of Artificial Sequence: Synthetic oligonucleotide
ucuagcgcuccugcgaggu

SEQ ID NO: 1493103 - RNA, 19 nt, Artificial Sequence
  Description of Artificial Sequence: Synthetic oligonucleotide
uugcccgaguacugcagcc

SEQ ID NO: 1493104 - RNA, 19 nt, Artificial Sequence
  Description of Artificial Sequence: Synthetic oligonucleotide
augagcugaaaaguguaaa

SEQ ID NO: 1493105 - RNA, 19 nt, Artificial Sequence
  Description of Artificial Sequence: Synthetic oligonucleotide
auaugagcugaaaagugua

SEQ ID NO: 1493106 - RNA, 19 nt, Artificial Sequence
  Description of Artificial Sequence: Synthetic oligonucleotide
ucgguccuggauagcagac

SEQ ID NO: 1493107 - RNA, 19 nt, Artificial Sequence
  Description of Artificial Sequence: Synthetic oligonucleotide
uccagaacagggccuugaa

SEQ ID NO: 1493108 - RNA, 19 nt, Artificial Sequence
  Description of Artificial Sequence: Synthetic oligonucleotide
gguaauuuauuguugucau

SEQ ID NO: 1493109 - RNA, 19 nt, Artificial Sequence
  Description of Artificial Sequence: Synthetic oligonucleotide
uucucaucuagcgcuccug

SEQ ID NO: 1493110 - RNA, 19 nt, Artificial Sequence
  Description of Artificial Sequence: Synthetic oligonucleotide
gugacuguggucccugguc

SEQ ID NO: 1493111 - RNA, 19 nt, Artificial Sequence
  Description of Artificial Sequence: Synthetic oligonucleotide
cauagacaccacuggcuuc

SEQ ID NO: 1493112 - RNA, 19 nt, Artificial Sequence
  Description of Artificial Sequence: Synthetic oligonucleotide
ugcgaggucucgcuuguua

SEQ ID NO: 1493113 - RNA, 19 nt, Artificial Sequence
  Description of Artificial Sequence: Synthetic oligonucleotide
agugaggacagggguugcg

SEQ ID NO: 1493114 - RNA, 19 nt, Artificial Sequence
  Description of Artificial Sequence: Synthetic oligonucleotide
gugaggacagggguugcgg

SEQ ID NO: 1493115 - RNA, 19 nt, Artificial Sequence
  Description of Artificial Sequence: Synthetic oligonucleotide
gaucauggucgcugccgcc

SEQ ID NO: 1493116 - RNA, 19 nt, Artificial Sequence
  Description of Artificial Sequence: Synthetic oligonucleotide
ugguugaucuuaagucuuu

SEQ ID NO: 1493117 - RNA, 19 nt, Artificial Sequence
  Description of Artificial Sequence: Synthetic oligonucleotide
aucuuaagucuuugcuuaa

SEQ ID NO: 1493118 - RNA, 19 nt, Artificial Sequence
  Description of Artificial Sequence: Synthetic oligonucleotide
ggggaucauguccucauug

SEQ ID NO: 1493119 - RNA, 19 nt, Artificial Sequence
  Description of Artificial Sequence: Synthetic oligonucleotide
gcuugauggucacauuccc

SEQ ID NO: 1493120 - RNA, 19 nt, Artificial Sequence
  Description of Artificial Sequence: Synthetic oligonucleotide
gcuucuccgagacuuugag

SEQ ID NO: 1493121 - RNA, 19 nt, Artificial Sequence
  Description of Artificial Sequence: Synthetic oligonucleotide
ucacguugacgaagguggu

SEQ ID NO: 1493122 - RNA, 19 nt, Artificial Sequence
  Description of Artificial Sequence: Synthetic oligonucleotide
ugaggagaaguggguuuag

SEQ ID NO: 1493123 - RNA, 19 nt, Artificial Sequence
  Description of Artificial Sequence: Synthetic oligonucleotide
cugguccgcagcauccacc

SEQ ID NO: 1493124 - RNA, 19 nt, Artificial Sequence
  Description of Artificial Sequence: Synthetic oligonucleotide
agaccgggaugccuugcag

SEQ ID NO: 1493125 - RNA, 19 nt, Artificial Sequence
  Description of Artificial Sequence: Synthetic oligonucleotide
accgaggacuaagaccggg

SEQ ID NO: 1493126 - RNA, 19 nt, Artificial Sequence
  Description of Artificial Sequence: Synthetic oligonucleotide
acuaagaccgggaugccuu

SEQ ID NO: 1493127 - RNA, 19 nt, Artificial Sequence
  Description of Artificial Sequence: Synthetic oligonucleotide
ggagcucggcuucagguug

SEQ ID NO: 1493128 - RNA, 19 nt, Artificial Sequence
  Description of Artificial Sequence: Synthetic oligonucleotide
cuaagaccgggaugccuug

SEQ ID NO: 1493129 - RNA, 19 nt, Artificial Sequence
  Description of Artificial Sequence: Synthetic oligonucleotide
aacagggccuugaaccagu

SEQ ID NO: 1493130 - RNA, 19 nt, Artificial Sequence
  Description of Artificial Sequence: Synthetic oligonucleotide
cugauuggccccugcagca

SEQ ID NO: 1493131 - RNA, 19 nt, Artificial Sequence
  Description of Artificial Sequence: Synthetic oligonucleotide
aguuugccccucccagguc

SEQ ID NO: 1493132 - RNA, 19 nt, Artificial Sequence
  Description of Artificial Sequence: Synthetic oligonucleotide
cuccuucucaucuagcgcu

SEQ ID NO: 1493133 - RNA, 19 nt, Artificial Sequence
  Description of Artificial Sequence: Synthetic oligonucleotide
cucuucccauccuuuccag

SEQ ID NO: 1493134 - RNA, 19 nt, Artificial Sequence
  Description of Artificial Sequence: Synthetic oligonucleotide
agccacuguagggugaugu

SEQ ID NO: 1493135 - RNA, 19 nt, Artificial Sequence
  Description of Artificial Sequence: Synthetic oligonucleotide
agguugggugacugugguc

SEQ ID NO: 1493136 - RNA, 19 nt, Artificial Sequence
  Description of Artificial Sequence: Synthetic oligonucleotide
ucccugguccgaaggagaa

SEQ ID NO: 1493137 - RNA, 19 nt, Artificial Sequence
  Description of Artificial Sequence: Synthetic oligonucleotide
ccugauuggccccugcagc

SEQ ID NO: 1493138 - RNA, 19 nt, Artificial Sequence
  Description of Artificial Sequence: Synthetic oligonucleotide
gauggcgcucacuccucug

SEQ ID NO: 1493139 - RNA, 19 nt, Artificial Sequence
  Description of Artificial Sequence: Synthetic oligonucleotide
uguggucccugguccgaag

SEQ ID NO: 1493140 - RNA, 19 nt, Artificial Sequence
  Description of Artificial Sequence: Synthetic oligonucleotide
ugcggaaacggggcugucc

SEQ ID NO: 1493141 - RNA, 19 nt, Artificial Sequence
  Description of Artificial Sequence: Synthetic oligonucleotide
uaccgaggacuaagaccgg

SEQ ID NO: 1493142 - RNA, 19 nt, Artificial Sequence
  Description of Artificial Sequence: Synthetic oligonucleotide
uggucacauucccuuuggu

SEQ ID NO: 1493143 - RNA, 19 nt, Artificial Sequence
  Description of Artificial Sequence: Synthetic oligonucleotide
aucuagcgcuccugcgagg

SEQ ID NO: 1493144 - RNA, 19 nt, Artificial Sequence
  Description of Artificial Sequence: Synthetic oligonucleotide
cauuuccuccuuccagaac

SEQ ID NO: 1493145 - RNA, 19 nt, Artificial Sequence
  Description of Artificial Sequence: Synthetic oligonucleotide
gcagcagaucucucggucc

SEQ ID NO: 1493146 - RNA, 19 nt, Artificial Sequence
  Description of Artificial Sequence: Synthetic oligonucleotide
cccacuuaggccugguccc

SEQ ID NO: 1493147 - RNA, 19 nt, Artificial Sequence
  Description of Artificial Sequence: Synthetic oligonucleotide
gaaaugggccauggaggug

SEQ ID NO: 1493148 - RNA, 19 nt, Artificial Sequence
  Description of Artificial Sequence: Synthetic oligonucleotide
ccaaacagagguuaaauau

SEQ ID NO: 1493149 - RNA, 19 nt, Artificial Sequence
  Description of Artificial Sequence: Synthetic oligonucleotide
guugggugacugugguccc

SEQ ID NO: 1493150 - RNA, 19 nt, Artificial Sequence
  Description of Artificial Sequence: Synthetic oligonucleotide
uagcgcuccugcgaggucu

SEQ ID NO: 1493151 - RNA, 19 nt, Artificial Sequence
  Description of Artificial Sequence: Synthetic oligonucleotide
cuguccugacgcgaucacg

SEQ ID NO: 1493152 - RNA, 19 nt, Artificial Sequence
  Description of Artificial Sequence: Synthetic oligonucleotide
auggucgcugccgccggcc

SEQ ID NO: 1493153 - RNA, 19 nt, Artificial Sequence
  Description of Artificial Sequence: Synthetic oligonucleotide
gauuggccccugcagcauc

SEQ ID NO: 1493154 - RNA, 19 nt, Artificial Sequence
  Description of Artificial Sequence: Synthetic oligonucleotide
uggcuuccucccacuuagg

SEQ ID NO: 1493155 - RNA, 19 nt, Artificial Sequence
  Description of Artificial Sequence: Synthetic oligonucleotide
uggucgcugccgccggccg

SEQ ID NO: 1493156 - RNA, 19 nt, Artificial Sequence
  Description of Artificial Sequence: Synthetic oligonucleotide
cgcauguugaaacccacag

SEQ ID NO: 1493157 - RNA, 19 nt, Artificial Sequence
  Description of Artificial Sequence: Synthetic oligonucleotide
aaugggccauggagguggg

SEQ ID NO: 1493158 - RNA, 19 nt, Artificial Sequence
  Description of Artificial Sequence: Synthetic oligonucleotide
cccuuuggugauuuugcgc

SEQ ID NO: 1493159 - RNA, 19 nt, Artificial Sequence
  Description of Artificial Sequence: Synthetic oligonucleotide
cugguccgaaggagaagag

SEQ ID NO: 1493160 - RNA, 19 nt, Artificial Sequence
  Description of Artificial Sequence: Synthetic oligonucleotide
uggcgcucacuccucugca

SEQ ID NO: 1493161 - RNA, 19 nt, Artificial Sequence
  Description of Artificial Sequence: Synthetic oligonucleotide
acuuaggccuggucccugu

SEQ ID NO: 1493162 - RNA, 19 nt, Artificial Sequence
  Description of Artificial Sequence: Synthetic oligonucleotide
augguugaucuuaagucuu

SEQ ID NO: 1493163 - RNA, 19 nt, Artificial Sequence
  Description of Artificial Sequence: Synthetic oligonucleotide
caacagagugggcggggag

SEQ ID NO: 1493164 - RNA, 19 nt, Artificial Sequence
  Description of Artificial Sequence: Synthetic oligonucleotide
gcaggaaauggaguagcag

SEQ ID NO: 1493165 - RNA, 19 nt, Artificial Sequence
  Description of Artificial Sequence: Synthetic oligonucleotide
ggcuuccucccacuuaggc

SEQ ID NO: 1493166 - RNA, 19 nt, Artificial Sequence
  Description of Artificial Sequence: Synthetic oligonucleotide
gcggaaacggggcuguccc

SEQ ID NO: 1493167 - RNA, 19 nt, Artificial Sequence
  Description of Artificial Sequence: Synthetic oligonucleotide
ugcccgaguacugcagccc

SEQ ID NO: 1493168 - RNA, 19 nt, Artificial Sequence
  Description of Artificial Sequence: Synthetic oligonucleotide
uaagaccgggaugccuugc

SEQ ID NO: 1493169 - RNA, 19 nt, Artificial Sequence
  Description of Artificial Sequence: Synthetic oligonucleotide
guccucauugaacuguccu

SEQ ID NO: 1493170 - RNA, 19 nt, Artificial Sequence
  Description of Artificial Sequence: Synthetic oligonucleotide
uagcagcagaucucucggu

SEQ ID NO: 1493171 - RNA, 19 nt, Artificial Sequence
  Description of Artificial Sequence: Synthetic oligonucleotide
agacaccacuggcuuccuc

SEQ ID NO: 1493172 - RNA, 19 nt, Artificial Sequence
  Description of Artificial Sequence: Synthetic oligonucleotide
ggucccuguaucucuuccc

SEQ ID NO: 1493173 - RNA, 19 nt, Artificial Sequence
  Description of Artificial Sequence: Synthetic oligonucleotide
gcuuguuaaacaaagcgau

SEQ ID NO: 1493174 - RNA, 19 nt, Artificial Sequence
  Description of Artificial Sequence: Synthetic oligonucleotide
gucaagaggggagggcagc

SEQ ID NO: 1493175 - RNA, 19 nt, Artificial Sequence
  Description of Artificial Sequence: Synthetic oligonucleotide
uauacacgauggcgcucac

SEQ ID NO: 1493176 - RNA, 19 nt, Artificial Sequence
  Description of Artificial Sequence: Synthetic oligonucleotide
gguugaucuuaagucuuug

SEQ ID NO: 1493177 - RNA, 19 nt, Artificial Sequence
  Description of Artificial Sequence: Synthetic oligonucleotide
gcgaucauggucgcugccg

SEQ ID NO: 1493178 - RNA, 19 nt, Artificial Sequence
  Description of Artificial Sequence: Synthetic oligonucleotide
agggguugcggggccaggg

SEQ ID NO: 1493179 - RNA, 19 nt, Artificial Sequence
  Description of Artificial Sequence: Synthetic oligonucleotide
agcgugagcuccauuuccu

SEQ ID NO: 1493180 - RNA, 19 nt, Artificial Sequence
  Description of Artificial Sequence: Synthetic oligonucleotide
cauauacacgauggcgcuc

SEQ ID NO: 1493181 - RNA, 19 nt, Artificial Sequence
  Description of Artificial Sequence: Synthetic oligonucleotide
gcagcuuguuaaacaaagc

SEQ ID NO: 1493182 - RNA, 19 nt, Artificial Sequence
  Description of Artificial Sequence: Synthetic oligonucleotide
gucucgcuuguuaccgagg

SEQ ID NO: 1493183 - RNA, 19 nt, Artificial Sequence
  Description of Artificial Sequence: Synthetic oligonucleotide
cucgcuuguuaccgaggac

SEQ ID NO: 1493184 - RNA, 19 nt, Artificial Sequence
  Description of Artificial Sequence: Synthetic oligonucleotide
ccaguuugccccucccagg

SEQ ID NO: 1493185 - RNA, 19 nt, Artificial Sequence
  Description of Artificial Sequence: Synthetic oligonucleotide
gcuggggcuugucuaguag

SEQ ID NO: 1493186 - RNA, 19 nt, Artificial Sequence
  Description of Artificial Sequence: Synthetic oligonucleotide
gaaagugaggacagggguu

SEQ ID NO: 1493187 - RNA, 19 nt, Artificial Sequence
  Description of Artificial Sequence: Synthetic oligonucleotide
acaacagagugggcgggga

SEQ ID NO: 1493188 - RNA, 19 nt, Artificial Sequence
  Description of Artificial Sequence: Synthetic oligonucleotide
ucccuguaucucuucccau

SEQ ID NO: 1493189 - RNA, 19 nt, Artificial Sequence
  Description of Artificial Sequence: Synthetic oligonucleotide
cucucgguccuggauagca

SEQ ID NO: 1493190 - RNA, 19 nt, Artificial Sequence
  Description of Artificial Sequence: Synthetic oligonucleotide
agguuaaauaugagcugaa

SEQ ID NO: 1493191 - RNA, 19 nt, Artificial Sequence
  Description of Artificial Sequence: Synthetic oligonucleotide
gguuaaauaugagcugaaa

SEQ ID NO: 1493192 - RNA, 19 nt, Artificial Sequence
  Description of Artificial Sequence: Synthetic oligonucleotide
guccgcagcauccaccaua

SEQ ID NO: 1493193 - RNA, 19 nt, Artificial Sequence
  Description of Artificial Sequence: Synthetic oligonucleotide
caauaacaggguguugaaa

SEQ ID NO: 1493194 - RNA, 19 nt, Artificial Sequence
  Description of Artificial Sequence: Synthetic oligonucleotide
aggucucgcuuguuaccga

SEQ ID NO: 1493195 - RNA, 19 nt, Artificial Sequence
  Description of Artificial Sequence: Synthetic oligonucleotide
cuguacacacaggacaaua

SEQ ID NO: 1493196 - RNA, 19 nt, Artificial Sequence
  Description of Artificial Sequence: Synthetic oligonucleotide
gcgaggucucgcuuguuac

SEQ ID NO: 1493197 - RNA, 19 nt, Artificial Sequence
  Description of Artificial Sequence: Synthetic oligonucleotide
augcugcggaaacggggcu

SEQ ID NO: 1493198 - RNA, 19 nt, Artificial Sequence
  Description of Artificial Sequence: Synthetic oligonucleotide
cacgauggcgcucacuccu

SEQ ID NO: 1493199 - RNA, 19 nt, Artificial Sequence
  Description of Artificial Sequence: Synthetic oligonucleotide
cccuguaucucuucccauc

SEQ ID NO: 1493200 - RNA, 19 nt, Artificial Sequence
  Description of Artificial Sequence: Synthetic oligonucleotide
ggucccugguccgaaggag

SEQ ID NO: 1493201 - RNA, 19 nt, Artificial Sequence
  Description of Artificial Sequence: Synthetic oligonucleotide
ccagaacagggccuugaac

SEQ ID NO: 1493202 - RNA, 19 nt, Artificial Sequence
  Description of Artificial Sequence: Synthetic oligonucleotide
aguagcgcucccacaugcu

SEQ ID NO: 1493203 - RNA, 19 nt, Artificial Sequence
  Description of Artificial Sequence: Synthetic oligonucleotide
ccucccagguccugauugg

SEQ ID NO: 1493204 - RNA, 19 nt, Artificial Sequence
  Description of Artificial Sequence: Synthetic oligonucleotide
gugaggagaaguggguuua

SEQ ID NO: 1493205 - RNA, 19 nt, Artificial Sequence
  Description of Artificial Sequence: Synthetic oligonucleotide
cagcuucuccgagacuuug

SEQ ID NO: 1493206 - RNA, 19 nt, Artificial Sequence
  Description of Artificial Sequence: Synthetic oligonucleotide
uugggugacuguggucccu

SEQ ID NO: 1493207 - RNA, 19 nt, Artificial Sequence
  Description of Artificial Sequence: Synthetic oligonucleotide
ccauccuuuccaguuugcc

SEQ ID NO: 1493208 - RNA, 19 nt, Artificial Sequence
  Description of Artificial Sequence: Synthetic oligonucleotide
acgauggcgcucacuccuc

SEQ ID NO: 1493209 - RNA, 19 nt, Artificial Sequence
  Description of Artificial Sequence: Synthetic oligonucleotide
ccucauugaacuguccuga

SEQ ID NO: 1493210 - RNA, 19 nt, Artificial Sequence
  Description of Artificial Sequence: Synthetic oligonucleotide
cuggggccaggaauaguga

SEQ ID NO: 1493211 - RNA, 19 nt, Artificial Sequence
  Description of Artificial Sequence: Synthetic oligonucleotide
agcuucuccgagacuuuga

SEQ ID NO: 1493212 - RNA, 19 nt, Artificial Sequence
  Description of Artificial Sequence: Synthetic oligonucleotide
guccgaaggagaagagcca

SEQ ID NO: 1493213 - RNA, 19 nt, Artificial Sequence
  Description of Artificial Sequence: Synthetic oligonucleotide
agagguuaggggaccugau

SEQ ID NO: 1493214 - RNA, 19 nt, Artificial Sequence
  Description of Artificial Sequence: Synthetic oligonucleotide
auacacgauggcgcucacu

SEQ ID NO: 1493215 - RNA, 19 nt, Artificial Sequence
  Description of Artificial Sequence: Synthetic oligonucleotide
gacuaagaccgggaugccu

SEQ ID NO: 1493216 - RNA, 19 nt, Artificial Sequence
  Description of Artificial Sequence: Synthetic oligonucleotide
ggcgcucacuccucugcag

SEQ ID NO: 1493217 - RNA, 19 nt, Artificial Sequence
  Description of Artificial Sequence: Synthetic oligonucleotide
gcugucaagaggggagggc

SEQ ID NO: 1493218 - RNA, 19 nt, Artificial Sequence
  Description of Artificial Sequence: Synthetic oligonucleotide
cauuuuccaaacagagguu

SEQ ID NO: 1493219 - RNA, 19 nt, Artificial Sequence
  Description of Artificial Sequence: Synthetic oligonucleotide
agugggcggggagcucggc

SEQ ID NO: 1493220 - RNA, 19 nt, Artificial Sequence
  Description of Artificial Sequence: Synthetic oligonucleotide
acccacaguggggaucaug

SEQ ID NO: 1493221 - RNA, 19 nt, Artificial Sequence
  Description of Artificial Sequence: Synthetic oligonucleotide
cauggucgcugccgccggc

SEQ ID NO: 1493222 - RNA, 19 nt, Artificial Sequence
  Description of Artificial Sequence: Synthetic oligonucleotide
gagugggcggggagcucgg

SEQ ID NO: 1493223 - RNA, 19 nt, Artificial Sequence
  Description of Artificial Sequence: Synthetic oligonucleotide
agagggcccuccccacacu

SEQ ID NO: 1493224 - RNA, 19 nt, Artificial Sequence
  Description of Artificial Sequence: Synthetic oligonucleotide
ccugguccgaaggagaaga

SEQ ID NO: 1493225 - RNA, 19 nt, Artificial Sequence
  Description of Artificial Sequence: Synthetic oligonucleotide
cuaguagguuguggagcuc

SEQ ID NO: 1493226 - RNA, 19 nt, Artificial Sequence
  Description of Artificial Sequence: Synthetic oligonucleotide
agcuggggcuugucuagua

SEQ ID NO: 1493227 - RNA, 19 nt, Artificial Sequence
  Description of Artificial Sequence: Synthetic oligonucleotide
uggccccugcagcaucaaa

SEQ ID NO: 1493228 - RNA, 19 nt, Artificial Sequence
  Description of Artificial Sequence: Synthetic oligonucleotide
ucucucgguccuggauagc

SEQ ID NO: 1493229 - RNA, 19 nt, Artificial Sequence
  Description of Artificial Sequence: Synthetic oligonucleotide
cgaggucucgcuuguuacc

SEQ ID NO: 1493230 - RNA, 19 nt, Artificial Sequence
  Description of Artificial Sequence: Synthetic oligonucleotide
ggucgcugggguggcauag

SEQ ID NO: 1493231 - RNA, 19 nt, Artificial Sequence
  Description of Artificial Sequence: Synthetic oligonucleotide
gcaguagcgcucccacaug

SEQ ID NO: 1493232 - RNA, 19 nt, Artificial Sequence
  Description of Artificial Sequence: Synthetic oligonucleotide
caguuugccccucccaggu

SEQ ID NO: 1493233 - RNA, 19 nt, Artificial Sequence
  Description of Artificial Sequence: Synthetic oligonucleotide
cuucuccgagacuuugagu

SEQ ID NO: 1493234 - RNA, 19 nt, Artificial Sequence
  Description of Artificial Sequence: Synthetic oligonucleotide
gguuguggagcucauucuu

SEQ ID NO: 1493235 - RNA, 19 nt, Artificial Sequence
  Description of Artificial Sequence: Synthetic oligonucleotide
gccacuguagggugauguc

SEQ ID NO: 1493236 - RNA, 19 nt, Artificial Sequence
  Description of Artificial Sequence: Synthetic oligonucleotide
uggugauuuugcgcauguu

SEQ ID NO: 1493237 - RNA, 19 nt, Artificial Sequence
  Description of Artificial Sequence: Synthetic oligonucleotide
acgcgaucacguugacgaa

SEQ ID NO: 1493238 - RNA, 19 nt, Artificial Sequence
  Description of Artificial Sequence: Synthetic oligonucleotide
cuccccacacugggugagg

SEQ ID NO: 1493239 - RNA, 19 nt, Artificial Sequence
  Description of Artificial Sequence: Synthetic oligonucleotide
cugcaguagcgcucccaca

SEQ ID NO: 1493240 - RNA, 19 nt, Artificial Sequence
  Description of Artificial Sequence: Synthetic oligonucleotide
gguugcggggccagggcug

SEQ ID NO: 1493241 - RNA, 19 nt, Artificial Sequence
  Description of Artificial Sequence: Synthetic oligonucleotide
ggggagcucggcuucaggu

SEQ ID NO: 1493242 - RNA, 19 nt, Artificial Sequence
  Description of Artificial Sequence: Synthetic oligonucleotide
cuagcgcuccugcgagguc

SEQ ID NO: 1493243 - RNA, 19 nt, Artificial Sequence
  Description of Artificial Sequence: Synthetic oligonucleotide
cagguugggugacuguggu

SEQ ID NO: 1493244 - RNA, 19 nt, Artificial Sequence
  Description of Artificial Sequence: Synthetic oligonucleotide
cagaucucucgguccugga

SEQ ID NO: 1493245 - RNA, 19 nt, Artificial Sequence
  Description of Artificial Sequence: Synthetic oligonucleotide
gggguugcggggccagggc

SEQ ID NO: 1493246 - RNA, 19 nt, Artificial Sequence
  Description of Artificial Sequence: Synthetic oligonucleotide
cagggcugucaagagggga

SEQ ID NO: 1493247 - RNA, 19 nt, Artificial Sequence
  Description of Artificial Sequence: Synthetic oligonucleotide
ccagcgugagcuccauuuc

SEQ ID NO: 1493248 - RNA, 19 nt, Artificial Sequence
  Description of Artificial Sequence: Synthetic oligonucleotide
cagcagaucucucgguccu

SEQ ID NO: 1493249 - RNA, 19 nt, Artificial Sequence
  Description of Artificial Sequence: Synthetic oligonucleotide
ccauauacacgauggcgcu

SEQ ID NO: 1493250 - RNA, 19 nt, Artificial Sequence
  Description of Artificial Sequence: Synthetic oligonucleotide
gcuugucuaguagguugug

SEQ ID NO: 1493251 - RNA, 19 nt, Artificial Sequence
  Description of Artificial Sequence: Synthetic oligonucleotide
gggacucuaggagccccag

SEQ ID NO: 1493252 - RNA, 19 nt, Artificial Sequence
  Description of Artificial Sequence: Synthetic oligonucleotide
guaucucuucccauccuuu

SEQ ID NO: 1493253 - RNA, 19 nt, Artificial Sequence
  Description of Artificial Sequence: Synthetic oligonucleotide
cccugcagcaucaaauggu

SEQ ID NO: 1493254 - RNA, 19 nt, Artificial Sequence
  Description of Artificial Sequence: Synthetic oligonucleotide
ggacuaagaccgggaugcc

SEQ ID NO: 1493255 - RNA, 19 nt, Artificial Sequence
  Description of Artificial Sequence: Synthetic oligonucleotide
gcgugagcuccauuuccuc

SEQ ID NO: 1493256 - RNA, 19 nt, Artificial Sequence
  Description of Artificial Sequence: Synthetic oligonucleotide
ccuucucaucuagcgcucc

SEQ ID NO: 1493257 - RNA, 19 nt, Artificial Sequence
  Description of Artificial Sequence: Synthetic oligonucleotide
uagugaggauggggucgcu

SEQ ID NO: 1493258 - RNA, 19 nt, Artificial Sequence
  Description of Artificial Sequence: Synthetic oligonucleotide
ggacucuaggagccccaga

SEQ ID NO: 1493259 - RNA, 19 nt, Artificial Sequence
  Description of Artificial Sequence: Synthetic oligonucleotide
ccccaugcugaguucucuc

SEQ ID NO: 1493260 - RNA, 19 nt, Artificial Sequence
  Description of Artificial Sequence: Synthetic oligonucleotide
ggauagcagacagauucau

SEQ ID NO: 1493261 - RNA, 19 nt, Artificial Sequence
  Description of Artificial Sequence: Synthetic oligonucleotide
cuuaggccuggucccugua

SEQ ID NO: 1493262 - RNA, 19 nt, Artificial Sequence
  Description of Artificial Sequence: Synthetic oligonucleotide
ccgaguacugcagccccac

SEQ ID NO: 1493263 - RNA, 19 nt, Artificial Sequence
  Description of Artificial Sequence: Synthetic oligonucleotide
uuggccccugcagcaucaa

SEQ ID NO: 1493264 - RNA, 19 nt, Artificial Sequence
  Description of Artificial Sequence: Synthetic oligonucleotide
gucgcugggguggcauaga

SEQ ID NO: 1493265 - RNA, 19 nt, Artificial Sequence
  Description of Artificial Sequence: Synthetic oligonucleotide
gugggcggggagcucggcu

SEQ ID NO: 1493266 - RNA, 19 nt, Artificial Sequence
  Description of Artificial Sequence: Synthetic oligonucleotide
gggcuaagugaaggaacaa

SEQ ID NO: 1493267 - RNA, 19 nt, Artificial Sequence
  Description of Artificial Sequence: Synthetic oligonucleotide
gcuuguuaccgaggacuaa

SEQ ID NO: 1493268 - RNA, 19 nt, Artificial Sequence
  Description of Artificial Sequence: Synthetic oligonucleotide
ggguggcauagacaccacu

SEQ ID NO: 1493269 - RNA, 19 nt, Artificial Sequence
  Description of Artificial Sequence: Synthetic oligonucleotide
cuccgagacuuugaguguu

SEQ ID NO: 1493270 - RNA, 19 nt, Artificial Sequence
  Description of Artificial Sequence: Synthetic oligonucleotide
gggagcucggcuucagguu

SEQ ID NO: 1493271 - RNA, 19 nt, Artificial Sequence
  Description of Artificial Sequence: Synthetic oligonucleotide
uggggucgcugggguggca

SEQ ID NO: 1493272 - RNA, 19 nt, Artificial Sequence
  Description of Artificial Sequence: Synthetic oligonucleotide
cgaguacugcagccccacc

SEQ ID NO: 1493273 - RNA, 19 nt, Artificial Sequence
  Description of Artificial Sequence: Synthetic oligonucleotide
guugcggggccagggcugu

SEQ ID NO: 1493274 - RNA, 19 nt, Artificial Sequence
  Description of Artificial Sequence: Synthetic oligonucleotide
cuguggucccugguccgaa

SEQ ID NO: 1493275 - RNA, 19 nt, Artificial Sequence
  Description of Artificial Sequence: Synthetic oligonucleotide
guagguuguggagcucauu

SEQ ID NO: 1493276 - RNA, 19 nt, Artificial Sequence
  Description of Artificial Sequence: Synthetic oligonucleotide
guccugacgcgaucacguu

SEQ ID NO: 1493277 - RNA, 19 nt, Artificial Sequence
  Description of Artificial Sequence: Synthetic oligonucleotide
gcugcggaaacggggcugu

SEQ ID NO: 1493278 - RNA, 19 nt, Artificial Sequence
  Description of Artificial Sequence: Synthetic oligonucleotide
cugcggaaacggggcuguc

SEQ ID NO: 1493279 - RNA, 19 nt, Artificial Sequence
  Description of Artificial Sequence: Synthetic oligonucleotide
cgcuuguuaccgaggacua

SEQ ID NO: 1493280 - RNA, 19 nt, Artificial Sequence
  Description of Artificial Sequence: Synthetic oligonucleotide
cauucccuuuggugauuuu

SEQ ID NO: 1493281 - RNA, 19 nt, Artificial Sequence
  Description of Artificial Sequence: Synthetic oligonucleotide
ccgggaugccuugcagcug

SEQ ID NO: 1493282 - RNA, 19 nt, Artificial Sequence
  Description of Artificial Sequence: Synthetic oligonucleotide
gcggggagcucggcuucag

SEQ ID NO: 1493283 - RNA, 19 nt, Artificial Sequence
  Description of Artificial Sequence: Synthetic oligonucleotide
cgcuccugcgaggucucgc

SEQ ID NO: 1493284 - RNA, 19 nt, Artificial Sequence
  Description of Artificial Sequence: Synthetic oligonucleotide
cccuccccacacuggguga

SEQ ID NO: 1493285 - RNA, 19 nt, Artificial Sequence
  Description of Artificial Sequence: Synthetic oligonucleotide
ccggugccggguccccgcc

SEQ ID NO: 1493286 - RNA, 19 nt, Artificial Sequence
  Description of Artificial Sequence: Synthetic oligonucleotide
ccugcgaggucucgcuugu

SEQ ID NO: 1493287 - RNA, 19 nt, Artificial Sequence
  Description of Artificial Sequence: Synthetic oligonucleotide
uugcggggccagggcuguc

SEQ ID NO: 1493288 - RNA, 19 nt, Artificial Sequence
  Description of Artificial Sequence: Synthetic oligonucleotide
gggucgcugggguggcaua

SEQ ID NO: 1493289 - RNA, 19 nt, Artificial Sequence
  Description of Artificial Sequence: Synthetic oligonucleotide
gcgcuccugcgaggucucg

SEQ ID NO: 1493290 - RNA, 19 nt, Artificial Sequence
  Description of Artificial Sequence: Synthetic oligonucleotide
cgaggacuaagaccgggau

SEQ ID NO: 1493291 - RNA, 19 nt, Artificial Sequence
  Description of Artificial Sequence: Synthetic oligonucleotide
ggcggggagcucggcuuca

SEQ ID NO: 1493292 - RNA, 19 nt, Artificial Sequence
  Description of Artificial Sequence: Synthetic oligonucleotide
ggggcuugucuaguagguu

SEQ ID NO: 1493293 - RNA, 19 nt, Artificial Sequence
  Description of Artificial Sequence: Synthetic oligonucleotide
cagcuggggcuugucuagu

SEQ ID NO: 1493294 - RNA, 19 nt, Artificial Sequence
  Description of Artificial Sequence: Synthetic oligonucleotide
cgcucacuccucugcagua

SEQ ID NO: 1493295 - RNA, 19 nt, Artificial Sequence
  Description of Artificial Sequence: Synthetic oligonucleotide
cgggacucuaggagcccca

SEQ ID NO: 1493296 - RNA, 19 nt, Artificial Sequence
  Description of Artificial Sequence: Synthetic oligonucleotide
gcgcccggugccggguccc

SEQ ID NO: 1493297 - RNA, 19 nt, Artificial Sequence
  Description of Artificial Sequence: Synthetic oligonucleotide
cggcuucagguugggugac

SEQ ID NO: 1493298 - RNA, 19 nt, Artificial Sequence
  Description of Artificial Sequence: Synthetic oligonucleotide
ggagccccagagggcccuc

SEQ ID NO: 1493299 - RNA, 19 nt, Artificial Sequence
  Description of Artificial Sequence: Synthetic oligonucleotide
ggggucgcugggguggcau

SEQ ID NO: 1493300 - RNA, 19 nt, Artificial Sequence
  Description of Artificial Sequence: Synthetic oligonucleotide
ccacuuaggccuggucccu

SEQ ID NO: 1493301 - RNA, 19 nt, Artificial Sequence
  Description of Artificial Sequence: Synthetic oligonucleotide
cgaucacguugacgaaggu

SEQ ID NO: 1493302 - RNA, 19 nt, Artificial Sequence
  Description of Artificial Sequence: Synthetic oligonucleotide
gcucggcuucagguugggu

SEQ ID NO: 1493303 - RNA, 19 nt, Artificial Sequence
  Description of Artificial Sequence: Synthetic oligonucleotide
cugcgaggucucgcuuguu

SEQ ID NO: 1493304 - RNA, 19 nt, Artificial Sequence
  Description of Artificial Sequence: Synthetic oligonucleotide
ccgcagcauccaccauaua

SEQ ID NO: 1493305 - RNA, 19 nt, Artificial Sequence
  Description of Artificial Sequence: Synthetic oligonucleotide
agaaugauaccuuacugcc

SEQ ID NO: 1493306 - RNA, 19 nt, Artificial Sequence
  Description of Artificial Sequence: Synthetic oligonucleotide
uuuaacuugaaguuucacg

SEQ ID NO: 1493307 - RNA, 19 nt, Artificial Sequence
  Description of Artificial Sequence: Synthetic oligonucleotide
gaaagaauauagcagaggc

SEQ ID NO: 1493308 - RNA, 19 nt, Artificial Sequence
  Description of Artificial Sequence: Synthetic oligonucleotide
uauggaaagaauauagcag

SEQ ID NO: 1493309 - RNA, 19 nt, Artificial Sequence
  Description of Artificial Sequence: Synthetic oligonucleotide
uuaacuugaaguuucacga

SEQ ID NO: 1493310 - RNA, 19 nt, Artificial Sequence
  Description of Artificial Sequence: Synthetic oligonucleotide
aaauaugucaaauaaccaa

SEQ ID NO: 1493311 - RNA, 19 nt, Artificial Sequence
  Description of Artificial Sequence: Synthetic oligonucleotide
uauauaaucucacuccugc

SEQ ID NO: 1493312 - RNA, 19 nt, Artificial Sequence
  Description of Artificial Sequence: Synthetic oligonucleotide
aaaugcacuugcuccaucc

SEQ ID NO: 1493313 - RNA, 19 nt, Artificial Sequence
  Description of Artificial Sequence: Synthetic oligonucleotide
cuuuauggaaagaauauag

SEQ ID NO: 1493314 - RNA, 19 nt, Artificial Sequence
  Description of Artificial Sequence: Synthetic oligonucleotide
aaauaaucuggauuguuug

SEQ ID NO: 1493315 - RNA, 19 nt, Artificial Sequence
  Description of Artificial Sequence: Synthetic oligonucleotide
uuauggaaagaauauagca

SEQ ID NO: 1493316 - RNA, 19 nt, Artificial Sequence
  Description of Artificial Sequence: Synthetic oligonucleotide
aaagaaugauaccuuacug

SEQ ID NO: 1493317 - RNA, 19 nt, Artificial Sequence
  Description of Artificial Sequence: Synthetic oligonucleotide
aagaauuucucaaauaugu

SEQ ID NO: 1493318 - RNA, 19 nt, Artificial Sequence
  Description of Artificial Sequence: Synthetic oligonucleotide
ugauuuuacagccggcucg

SEQ ID NO: 1493319 - RNA, 19 nt, Artificial Sequence
  Description of Artificial Sequence: Synthetic oligonucleotide
uguauagauacaauaacaa

SEQ ID NO: 1493320 - RNA, 19 nt, Artificial Sequence
  Description of Artificial Sequence: Synthetic oligonucleotide
ucuguuguuacccaauggc

SEQ ID NO: 1493321 - RNA, 19 nt, Artificial Sequence
  Description of Artificial Sequence: Synthetic oligonucleotide
aaaacuuguuucaucuucc

SEQ ID NO: 1493322 - RNA, 19 nt, Artificial Sequence
  Description of Artificial Sequence: Synthetic oligonucleotide
uuuauggaaagaauauagc

SEQ ID NO: 1493323 - RNA, 19 nt, Artificial Sequence
  Description of Artificial Sequence: Synthetic oligonucleotide
uggaauauccccuucaaga

SEQ ID NO: 1493324 - RNA, 19 nt, Artificial Sequence
  Description of Artificial Sequence: Synthetic oligonucleotide
auaguuaccugccuccugc

SEQ ID NO: 1493325 - RNA, 19 nt, Artificial Sequence
  Description of Artificial Sequence: Synthetic oligonucleotide
aaugucuuauuauggcagg

SEQ ID NO: 1493326 - RNA, 19 nt, Artificial Sequence
  Description of Artificial Sequence: Synthetic oligonucleotide
ucaaguagcggucugaaaa

SEQ ID NO: 1493327 - RNA, 19 nt, Artificial Sequence
  Description of Artificial Sequence: Synthetic oligonucleotide
ucaucauuaaggaaagcca

SEQ ID NO: 1493328 - RNA, 19 nt, Artificial Sequence
  Description of Artificial Sequence: Synthetic oligonucleotide
cuugaauaacuucacagag

SEQ ID NO: 1493329 - RNA, 19 nt, Artificial Sequence
  Description of Artificial Sequence: Synthetic oligonucleotide
aaguuucacgaaguuaucc

SEQ ID NO: 1493330 - RNA, 19 nt, Artificial Sequence
  Description of Artificial Sequence: Synthetic oligonucleotide
uucaucauuaaggaaagcc

SEQ ID NO: 1493331 - RNA, 19 nt, Artificial Sequence
  Description of Artificial Sequence: Synthetic oligonucleotide
gaugcaaagguauuuuccc

SEQ ID NO: 1493332 - RNA, 19 nt, Artificial Sequence
  Description of Artificial Sequence: Synthetic oligonucleotide
auagcaaaagcuugugacg

SEQ ID NO: 1493333 - RNA, 19 nt, Artificial Sequence
  Description of Artificial Sequence: Synthetic oligonucleotide
aaugauaccuuacugccaa

SEQ ID NO: 1493334 - RNA, 19 nt, Artificial Sequence
  Description of Artificial Sequence: Synthetic oligonucleotide
uaaaauugaacaacuugcu

SEQ ID NO: 1493335 - RNA, 19 nt, Artificial Sequence
  Description of Artificial Sequence: Synthetic oligonucleotide
uguugaaaauacaagcccu

SEQ ID NO: 1493336 - RNA, 19 nt, Artificial Sequence
  Description of Artificial Sequence: Synthetic oligonucleotide
aaaugucuuauuauggcag

SEQ ID NO: 1493337 - RNA, 19 nt, Artificial Sequence
  Description of Artificial Sequence: Synthetic oligonucleotide
auggaaagaauauagcaga

SEQ ID NO: 1493338 - RNA, 19 nt, Artificial Sequence
  Description of Artificial Sequence: Synthetic oligonucleotide
uuuacuauauaaucucacu

SEQ ID NO: 1493339 - RNA, 19 nt, Artificial Sequence
  Description of Artificial Sequence: Synthetic oligonucleotide
aucacgucucuuaagaugc

SEQ ID NO: 1493340 - RNA, 19 nt, Artificial Sequence
  Description of Artificial Sequence: Synthetic oligonucleotide
aaagguauuuucccuguug

SEQ ID NO: 1493341 - RNA, 19 nt, Artificial Sequence
  Description of Artificial Sequence: Synthetic oligonucleotide
ugaugucaugcuuaugugg

SEQ ID NO: 1493342 - RNA, 19 nt, Artificial Sequence
  Description of Artificial Sequence: Synthetic oligonucleotide
ucauuaaggaaagccaccg

SEQ ID NO: 1493343 - RNA, 19 nt, Artificial Sequence
  Description of Artificial Sequence: Synthetic oligonucleotide
uccacgaaaccuuuucugg

SEQ ID NO: 1493344 - RNA, 19 nt, Artificial Sequence
  Description of Artificial Sequence: Synthetic oligonucleotide
aauugaacaacuugcuuuu

SEQ ID NO: 1493345 - RNA, 19 nt, Artificial Sequence
  Description of Artificial Sequence: Synthetic oligonucleotide
ugaaaauacaagcccuuca

SEQ ID NO: 1493346 - RNA, 19 nt, Artificial Sequence
  Description of Artificial Sequence: Synthetic oligonucleotide
ucaaauaaccaaaugucuu

SEQ ID NO: 1493347 - RNA, 19 nt, Artificial Sequence
  Description of Artificial Sequence: Synthetic oligonucleotide
acugccaacaucuaacaca

SEQ ID NO: 1493348 - RNA, 19 nt, Artificial Sequence
  Description of Artificial Sequence: Synthetic oligonucleotide
agauaauacagagcugugc

SEQ ID NO: 1493349 - RNA, 19 nt, Artificial Sequence
  Description of Artificial Sequence: Synthetic oligonucleotide
auaaucucacuccugcguc

SEQ ID NO: 1493350 - RNA, 19 nt, Artificial Sequence
  Description of Artificial Sequence: Synthetic oligonucleotide
ucuaacacaauuccagcaa

SEQ ID NO: 1493351 - RNA, 19 nt, Artificial Sequence
  Description of Artificial Sequence: Synthetic oligonucleotide
gaaguuauccucuguaaca

SEQ ID NO: 1493352 - RNA, 19 nt, Artificial Sequence
  Description of Artificial Sequence: Synthetic oligonucleotide
aaucacgcgggcuauagaa

SEQ ID NO: 1493353 - RNA, 19 nt, Artificial Sequence
  Description of Artificial Sequence: Synthetic oligonucleotide
aauauccccuucaagaugu

SEQ ID NO: 1493354 - RNA, 19 nt, Artificial Sequence
  Description of Artificial Sequence: Synthetic oligonucleotide
uccaucacgucucuuaaga

SEQ ID NO: 1493355 - RNA, 19 nt, Artificial Sequence
  Description of Artificial Sequence: Synthetic oligonucleotide
uggcuauugugccaaaugc

SEQ ID NO: 1493356 - RNA, 19 nt, Artificial Sequence
  Description of Artificial Sequence: Synthetic oligonucleotide
agaugcaaagguauuuucc

SEQ ID NO: 1493357 - RNA, 19 nt, Artificial Sequence
  Description of Artificial Sequence: Synthetic oligonucleotide
aaguuauccucuguaacag

SEQ ID NO: 1493358 - RNA, 19 nt, Artificial Sequence
  Description of Artificial Sequence: Synthetic oligonucleotide
ugcgucuaugacaauaucu

SEQ ID NO: 1493359 - RNA, 19 nt, Artificial Sequence
  Description of Artificial Sequence: Synthetic oligonucleotide
uggugugcuaacugaaugg

SEQ ID NO: 1493360 - RNA, 19 nt, Artificial Sequence
  Description of Artificial Sequence: Synthetic oligonucleotide
uuauggcaggaaaacaggc

SEQ ID NO: 1493361 - RNA, 19 nt, Artificial Sequence
  Description of Artificial Sequence: Synthetic oligonucleotide
uggaaagaauauagcagag

SEQ ID NO: 1493362 - RNA, 19 nt, Artificial Sequence
  Description of Artificial Sequence: Synthetic oligonucleotide
caucauuaaggaaagccac

SEQ ID NO: 1493363 - RNA, 19 nt, Artificial Sequence
  Description of Artificial Sequence: Synthetic oligonucleotide
cuuuacuauauaaucucac

SEQ ID NO: 1493364 - RNA, 19 nt, Artificial Sequence
  Description of Artificial Sequence: Synthetic oligonucleotide
cucaaauaugucaaauaac

SEQ ID NO: 1493365 - RNA, 19 nt, Artificial Sequence
  Description of Artificial Sequence: Synthetic oligonucleotide
uaaggaaagccaccguugc

SEQ ID NO: 1493366 - RNA, 19 nt, Artificial Sequence
  Description of Artificial Sequence: Synthetic oligonucleotide
aaggccuaauccuuucaag

SEQ ID NO: 1493367 - RNA, 19 nt, Artificial Sequence
  Description of Artificial Sequence: Synthetic oligonucleotide
auauaaucucacuccugcg

SEQ ID NO: 1493368 - RNA, 19 nt, Artificial Sequence
  Description of Artificial Sequence: Synthetic oligonucleotide
caagaauuucucaaauaug

SEQ ID NO: 1493369 - RNA, 19 nt, Artificial Sequence
  Description of Artificial Sequence: Synthetic oligonucleotide
ucacgcgggcuauagaagg

SEQ ID NO: 1493370 - RNA, 19 nt, Artificial Sequence
  Description of Artificial Sequence: Synthetic oligonucleotide
aguuucacgaaguuauccu

SEQ ID NO: 1493371 - RNA, 19 nt, Artificial Sequence
  Description of Artificial Sequence: Synthetic oligonucleotide
uguugaaaucaccuuggcu

SEQ ID NO: 1493372 - RNA, 19 nt, Artificial Sequence
  Description of Artificial Sequence: Synthetic oligonucleotide
uggacuuucccacuagaga

SEQ ID NO: 1493373 - RNA, 19 nt, Artificial Sequence
  Description of Artificial Sequence: Synthetic oligonucleotide
agcaacauggacuuuccca

SEQ ID NO: 1493374 - RNA, 19 nt, Artificial Sequence
  Description of Artificial Sequence: Synthetic oligonucleotide
uugcacauuaauuuugcaa

SEQ ID NO: 1493375 - RNA, 19 nt, Artificial Sequence
  Description of Artificial Sequence: Synthetic oligonucleotide
auauagcagaggcaaaugu

SEQ ID NO: 1493376 - RNA, 19 nt, Artificial Sequence
  Description of Artificial Sequence: Synthetic oligonucleotide
ucgcacaccaucccgaaug

SEQ ID NO: 1493377 - RNA, 19 nt, Artificial Sequence
  Description of Artificial Sequence: Synthetic oligonucleotide
auaacuucuccaucacguc

SEQ ID NO: 1493378 - RNA, 19 nt, Artificial Sequence
  Description of Artificial Sequence: Synthetic oligonucleotide
uacccaauggccuccaaca

SEQ ID NO: 1493379 - RNA, 19 nt, Artificial Sequence
  Description of Artificial Sequence: Synthetic oligonucleotide
uaugugguagcugugauuu

SEQ ID NO: 1493380 - RNA, 19 nt, Artificial Sequence
  Description of Artificial Sequence: Synthetic oligonucleotide
gcuauagaaggccuaaucc

SEQ ID NO: 1493381 - RNA, 19 nt, Artificial Sequence
  Description of Artificial Sequence: Synthetic oligonucleotide
uagcugugauuuuacagcc

SEQ ID NO: 1493382 - RNA, 19 nt, Artificial Sequence
  Description of Artificial Sequence: Synthetic oligonucleotide
cugucauaugacagcaugg

SEQ ID NO: 1493383 - RNA, 19 nt, Artificial Sequence
  Description of Artificial Sequence: Synthetic oligonucleotide
uucauauacuggcaugagu

SEQ ID NO: 1493384 - RNA, 19 nt, Artificial Sequence
  Description of Artificial Sequence: Synthetic oligonucleotide
uuggaauauccccuucaag

SEQ ID NO: 1493385 - RNA, 19 nt, Artificial Sequence
  Description of Artificial Sequence: Synthetic oligonucleotide
gaauauccccuucaagaug

SEQ ID NO: 1493386 - RNA, 19 nt, Artificial Sequence
  Description of Artificial Sequence: Synthetic oligonucleotide
uguagagcucuguugaaaa

SEQ ID NO: 1493387 - RNA, 19 nt, Artificial Sequence
  Description of Artificial Sequence: Synthetic oligonucleotide
auguauagauacaauaaca

SEQ ID NO: 1493388 - RNA, 19 nt, Artificial Sequence
  Description of Artificial Sequence: Synthetic oligonucleotide
agugcguccaacugagguc

SEQ ID NO: 1493389 - RNA, 19 nt, Artificial Sequence
  Description of Artificial Sequence: Synthetic oligonucleotide
acuagagaugucaaucacg

SEQ ID NO: 1493390 - RNA, 19 nt, Artificial Sequence
  Description of Artificial Sequence: Synthetic oligonucleotide
cauuuguagagcucuguug

SEQ ID NO: 1493391 - RNA, 19 nt, Artificial Sequence
  Description of Artificial Sequence: Synthetic oligonucleotide
aaagaauauagcagaggca

SEQ ID NO: 1493392 - RNA, 19 nt, Artificial Sequence
  Description of Artificial Sequence: Synthetic oligonucleotide
agagcucuguugaaaauac

SEQ ID NO: 1493393 - RNA, 19 nt, Artificial Sequence
  Description of Artificial Sequence: Synthetic oligonucleotide
gaggugagaaagauaauac

SEQ ID NO: 1493394 - RNA, 19 nt, Artificial Sequence
  Description of Artificial Sequence: Synthetic oligonucleotide
guaacagggagacucuccc

SEQ ID NO: 1493395 - RNA, 19 nt, Artificial Sequence
  Description of Artificial Sequence: Synthetic oligonucleotide
caucacgucucuuaagaug

SEQ ID NO: 1493396 - RNA, 19 nt, Artificial Sequence
  Description of Artificial Sequence: Synthetic oligonucleotide
augcuuaugugguagcugu

SEQ ID NO: 1493397 - RNA, 19 nt, Artificial Sequence
  Description of Artificial Sequence: Synthetic oligonucleotide
ugcuucauacaguggaaug

SEQ ID NO: 1493398 - RNA, 19 nt, Artificial Sequence
  Description of Artificial Sequence: Synthetic oligonucleotide
ugucaugcuuaugugguag

SEQ ID NO: 1493399 - RNA, 19 nt, Artificial Sequence
  Description of Artificial Sequence: Synthetic oligonucleotide
gaaagaaugauaccuuacu

SEQ ID NO: 1493400 - RNA, 19 nt, Artificial Sequence
  Description of Artificial Sequence: Synthetic oligonucleotide
uucucaaauaugucaaaua

SEQ ID NO: 1493401 - RNA, 19 nt, Artificial Sequence
  Description of Artificial Sequence: Synthetic oligonucleotide
uauugugccaaaugcacuu

SEQ ID NO: 1493402 - RNA, 19 nt, Artificial Sequence
  Description of Artificial Sequence: Synthetic oligonucleotide
ugacaauaucuacucccag

SEQ ID NO: 1493403 - RNA, 19 nt, Artificial Sequence
  Description of Artificial Sequence: Synthetic oligonucleotide
auggugugcuaacugaaug

SEQ ID NO: 1493404 - RNA, 19 nt, Artificial Sequence
  Description of Artificial Sequence: Synthetic oligonucleotide
uaacacaauuccagcaacu

SEQ ID NO: 1493405 - RNA, 19 nt, Artificial Sequence
  Description of Artificial Sequence: Synthetic oligonucleotide
auggcuauugugccaaaug

SEQ ID NO: 1493406 - RNA, 19 nt, Artificial Sequence
  Description of Artificial Sequence: Synthetic oligonucleotide
agaauuucucaaauauguc

SEQ ID NO: 1493407 - RNA, 19 nt, Artificial Sequence
  Description of Artificial Sequence: Synthetic oligonucleotide
cuugcuccauccaugauca

SEQ ID NO: 1493408 - RNA, 19 nt, Artificial Sequence
  Description of Artificial Sequence: Synthetic oligonucleotide
gaacaacuuccauggaagc

SEQ ID NO: 1493409 - RNA, 19 nt, Artificial Sequence
  Description of Artificial Sequence: Synthetic oligonucleotide
gucucuuaagaugcaaagg

SEQ ID NO: 1493410 - RNA, 19 nt, Artificial Sequence
  Description of Artificial Sequence: Synthetic oligonucleotide
cuaacacaauuccagcaac

SEQ ID NO: 1493411 - RNA, 19 nt, Artificial Sequence
  Description of Artificial Sequence: Synthetic oligonucleotide
uagcggucugaaaauacca

SEQ ID NO: 1493412 - RNA, 19 nt, Artificial Sequence
  Description of Artificial Sequence: Synthetic oligonucleotide
guaaugcucauguacuuga

SEQ ID NO: 1493413 - RNA, 19 nt, Artificial Sequence
  Description of Artificial Sequence: Synthetic oligonucleotide
cuauauaaucucacuccug

SEQ ID NO: 1493414 - RNA, 19 nt, Artificial Sequence
  Description of Artificial Sequence: Synthetic oligonucleotide
guuaccugccuccugcgag

SEQ ID NO: 1493415 - RNA, 19 nt, Artificial Sequence
  Description of Artificial Sequence: Synthetic oligonucleotide
uucauacaguggaaugggc

SEQ ID NO: 1493416 - RNA, 19 nt, Artificial Sequence
  Description of Artificial Sequence: Synthetic oligonucleotide
aggccuaauccuuucaaga

SEQ ID NO: 1493417 - RNA, 19 nt, Artificial Sequence
  Description of Artificial Sequence: Synthetic oligonucleotide
uaucuggaggguccaacug

SEQ ID NO: 1493418 - RNA, 19 nt, Artificial Sequence
  Description of Artificial Sequence: Synthetic oligonucleotide
gacggaugcugucauauga

SEQ ID NO: 1493419 - RNA, 19 nt, Artificial Sequence
  Description of Artificial Sequence: Synthetic oligonucleotide
aguagcggucugaaaauac

SEQ ID NO: 1493420 - RNA, 19 nt, Artificial Sequence
  Description of Artificial Sequence: Synthetic oligonucleotide
uuaagaugcaaagguauuu

SEQ ID NO: 1493421 - RNA, 19 nt, Artificial Sequence
  Description of Artificial Sequence: Synthetic oligonucleotide
ucauuuguagagcucuguu

SEQ ID NO: 1493422 - RNA, 19 nt, Artificial Sequence
  Description of Artificial Sequence: Synthetic oligonucleotide
cuaugacaauaucuacucc

SEQ ID NO: 1493423 - RNA, 19 nt, Artificial Sequence
  Description of Artificial Sequence: Synthetic oligonucleotide
caagauguugcuugucuuc

SEQ ID NO: 1493424 - RNA, 19 nt, Artificial Sequence
  Description of Artificial Sequence: Synthetic oligonucleotide
uuacccaauggccuccaac

SEQ ID NO: 1493425 - RNA, 19 nt, Artificial Sequence
  Description of Artificial Sequence: Synthetic oligonucleotide
auaucuacucccaggccac

SEQ ID NO: 1493426 - RNA, 19 nt, Artificial Sequence
  Description of Artificial Sequence: Synthetic oligonucleotide
ggucugaaaauaccagccg

SEQ ID NO: 1493427 - RNA, 19 nt, Artificial Sequence
  Description of Artificial Sequence: Synthetic oligonucleotide
ucaaucacgcgggcuauag

SEQ ID NO: 1493428 - RNA, 19 nt, Artificial Sequence
  Description of Artificial Sequence: Synthetic oligonucleotide
agaagugugaugaugucau

SEQ ID NO: 1493429 - RNA, 19 nt, Artificial Sequence
  Description of Artificial Sequence: Synthetic oligonucleotide
uuucugguuuaugaaccag

SEQ ID NO: 1493430 - RNA, 19 nt, Artificial Sequence
  Description of Artificial Sequence: Synthetic oligonucleotide
agaugucaaucacgcgggc

SEQ ID NO: 1493431 - RNA, 19 nt, Artificial Sequence
  Description of Artificial Sequence: Synthetic oligonucleotide
ugauaccuuacugccaaca

SEQ ID NO: 1493432 - RNA, 19 nt, Artificial Sequence
  Description of Artificial Sequence: Synthetic oligonucleotide
aacauggacuuucccacua

SEQ ID NO: 1493433 - RNA, 19 nt, Artificial Sequence
  Description of Artificial Sequence: Synthetic oligonucleotide
gagacucucccuuucuuga

SEQ ID NO: 1493434 - RNA, 19 nt, Artificial Sequence
  Description of Artificial Sequence: Synthetic oligonucleotide
gucugaaaauaccagccga

SEQ ID NO: 1493435 - RNA, 19 nt, Artificial Sequence
  Description of Artificial Sequence: Synthetic oligonucleotide
gugagaaagauaauacaga

SEQ ID NO: 1493436 - RNA, 19 nt, Artificial Sequence
  Description of Artificial Sequence: Synthetic oligonucleotide
cugcgagcaaccccaaccg

SEQ ID NO: 1493437 - RNA, 19 nt, Artificial Sequence
  Description of Artificial Sequence: Synthetic oligonucleotide
guccacgaaaccuuuucug

SEQ ID NO: 1493438 - RNA, 19 nt, Artificial Sequence
  Description of Artificial Sequence: Synthetic oligonucleotide
aucuggaggguccaacuga

SEQ ID NO: 1493439 - RNA, 19 nt, Artificial Sequence
  Description of Artificial Sequence: Synthetic oligonucleotide
gcugucauaugacagcaug

SEQ ID NO: 1493440 - RNA, 19 nt, Artificial Sequence
  Description of Artificial Sequence: Synthetic oligonucleotide
aucuggauuguuugcacau

SEQ ID NO: 1493441 - RNA, 19 nt, Artificial Sequence
  Description of Artificial Sequence: Synthetic oligonucleotide
guuguuacccaauggccuc

SEQ ID NO: 1493442 - RNA, 19 nt, Artificial Sequence
  Description of Artificial Sequence: Synthetic oligonucleotide
caauaucuacucccaggcc

SEQ ID NO: 1493443 - RNA, 19 nt, Artificial Sequence
  Description of Artificial Sequence: Synthetic oligonucleotide
ucaagauguugcuugucuu

SEQ ID NO: 1493444 - RNA, 19 nt, Artificial Sequence
  Description of Artificial Sequence: Synthetic oligonucleotide
cucuauggugugcuaacug

SEQ ID NO: 1493445 - RNA, 19 nt, Artificial Sequence
  Description of Artificial Sequence: Synthetic oligonucleotide
uugaaauaggaauguuauu

SEQ ID NO: 1493446 - RNA, 19 nt, Artificial Sequence
  Description of Artificial Sequence: Synthetic oligonucleotide
uaaucucacuccugcgucu

SEQ ID NO: 1493447 - RNA, 19 nt, Artificial Sequence
  Description of Artificial Sequence: Synthetic oligonucleotide
uuaccugccuccugcgagc

SEQ ID NO: 1493448 - RNA, 19 nt, Artificial Sequence
  Description of Artificial Sequence: Synthetic oligonucleotide
uccucuauggugugcuaac

SEQ ID NO: 1493449 - RNA, 19 nt, Artificial Sequence
  Description of Artificial Sequence: Synthetic oligonucleotide
uggauuguuugcacauuaa

SEQ ID NO: 1493450 - RNA, 19 nt, Artificial Sequence
  Description of Artificial Sequence: Synthetic oligonucleotide
guagcggucugaaaauacc

SEQ ID NO: 1493451 - RNA, 19 nt, Artificial Sequence
  Description of Artificial Sequence: Synthetic oligonucleotide
accagccgauaacuucucc

SEQ ID NO: 1493452 - RNA, 19 nt, Artificial Sequence
  Description of Artificial Sequence: Synthetic oligonucleotide
uaguuaccugccuccugcg

SEQ ID NO: 1493453 - RNA, 19 nt, Artificial Sequence
  Description of Artificial Sequence: Synthetic oligonucleotide
ugucuuauuauggcaggaa

SEQ ID NO: 1493454 - RNA, 19 nt, Artificial Sequence
  Description of Artificial Sequence: Synthetic oligonucleotide
uacugccaacaucuaacac

SEQ ID NO: 1493455 - RNA, 19 nt, Artificial Sequence
  Description of Artificial Sequence: Synthetic oligonucleotide
uagagcucuguugaaaaua

SEQ ID NO: 1493456 - RNA, 19 nt, Artificial Sequence
  Description of Artificial Sequence: Synthetic oligonucleotide
augagugcguccaacugag

SEQ ID NO: 1493457 - RNA, 19 nt, Artificial Sequence
  Description of Artificial Sequence: Synthetic oligonucleotide
gguugaaagaaugauaccu

SEQ ID NO: 1493458 - RNA, 19 nt, Artificial Sequence
  Description of Artificial Sequence: Synthetic oligonucleotide
uucauuuguagagcucugu

SEQ ID NO: 1493459 - RNA, 19 nt, Artificial Sequence
  Description of Artificial Sequence: Synthetic oligonucleotide
gcuguugaaaucaccuugg

SEQ ID NO: 1493460 - RNA, 19 nt, Artificial Sequence
  Description of Artificial Sequence: Synthetic oligonucleotide
ugugguagcugugauuuua

SEQ ID NO: 1493461 - RNA, 19 nt, Artificial Sequence
  Description of Artificial Sequence: Synthetic oligonucleotide
agccgauaacuucuccauc

SEQ ID NO: 1493462 - RNA, 19 nt, Artificial Sequence
  Description of Artificial Sequence: Synthetic oligonucleotide
cacuagagaugucaaucac

SEQ ID NO: 1493463 - RNA, 19 nt, Artificial Sequence
  Description of Artificial Sequence: Synthetic oligonucleotide
acauggacuuucccacuag

SEQ ID NO: 1493464 - RNA, 19 nt, Artificial Sequence
  Description of Artificial Sequence: Synthetic oligonucleotide
gucuuauuauggcaggaaa

SEQ ID NO: 1493465 - RNA, 19 nt, Artificial Sequence
  Description of Artificial Sequence: Synthetic oligonucleotide
acuugaaguuucacgaagu

SEQ ID NO: 1493466 - RNA, 19 nt, Artificial Sequence
  Description of Artificial Sequence: Synthetic oligonucleotide
caaaagcuugugacggaug

SEQ ID NO: 1493467 - RNA, 19 nt, Artificial Sequence
  Description of Artificial Sequence: Synthetic oligonucleotide
caugagugcguccaacuga

SEQ ID NO: 1493468 - RNA, 19 nt, Artificial Sequence
  Description of Artificial Sequence: Synthetic oligonucleotide
uuguguuuaucuggcucag

SEQ ID NO: 1493469 - RNA, 19 nt, Artificial Sequence
  Description of Artificial Sequence: Synthetic oligonucleotide
uuaugugguagcugugauu

SEQ ID NO: 1493470 - RNA, 19 nt, Artificial Sequence
  Description of Artificial Sequence: Synthetic oligonucleotide
auggacuuucccacuagag

SEQ ID NO: 1493471 - RNA, 19 nt, Artificial Sequence
  Description of Artificial Sequence: Synthetic oligonucleotide
gaaggccuaauccuuucaa

SEQ ID NO: 1493472 - RNA, 19 nt, Artificial Sequence
  Description of Artificial Sequence: Synthetic oligonucleotide
guacuugaauaacuucaca

SEQ ID NO: 1493473 - RNA, 19 nt, Artificial Sequence
  Description of Artificial Sequence: Synthetic oligonucleotide
ugcuuaugugguagcugug

SEQ ID NO: 1493474 - RNA, 19 nt, Artificial Sequence
  Description of Artificial Sequence: Synthetic oligonucleotide
aucugguugaaagaaugau

SEQ ID NO: 1493475 - RNA, 19 nt, Artificial Sequence
  Description of Artificial Sequence: Synthetic oligonucleotide
caagaagugugaugauguc

SEQ ID NO: 1493476 - RNA, 19 nt, Artificial Sequence
  Description of Artificial Sequence: Synthetic oligonucleotide
gugauuuuacagccggcuc

SEQ ID NO: 1493477 - RNA, 19 nt, Artificial Sequence
  Description of Artificial Sequence: Synthetic oligonucleotide
gaaugauaccuuacugcca

SEQ ID NO: 1493478 - RNA, 19 nt, Artificial Sequence
  Description of Artificial Sequence: Synthetic oligonucleotide
cuucauauacuggcaugag

SEQ ID NO: 1493479 - RNA, 19 nt, Artificial Sequence
  Description of Artificial Sequence: Synthetic oligonucleotide
uuguagagcucuguugaaa

SEQ ID NO: 1493480 - RNA, 19 nt, Artificial Sequence
  Description of Artificial Sequence: Synthetic oligonucleotide
acgcgggcuauagaaggcc

SEQ ID NO: 1493481 - RNA, 19 nt, Artificial Sequence
  Description of Artificial Sequence: Synthetic oligonucleotide
caugcuuaugugguagcug

SEQ ID NO: 1493482 - RNA, 19 nt, Artificial Sequence
  Description of Artificial Sequence: Synthetic oligonucleotide
cugugauuuuacagccggc

SEQ ID NO: 1493483 - RNA, 19 nt, Artificial Sequence
  Description of Artificial Sequence: Synthetic oligonucleotide
agcggucugaaaauaccag

SEQ ID NO: 1493484 - RNA, 19 nt, Artificial Sequence
  Description of Artificial Sequence: Synthetic oligonucleotide
aggcucgcacaccaucccg

SEQ ID NO: 1493485 - RNA, 19 nt, Artificial Sequence
  Description of Artificial Sequence: Synthetic oligonucleotide
caucugguugaaagaauga

SEQ ID NO: 1493486 - RNA, 19 nt, Artificial Sequence
  Description of Artificial Sequence: Synthetic oligonucleotide
ugcaggcucgcacaccauc

SEQ ID NO: 1493487 - RNA, 19 nt, Artificial Sequence
  Description of Artificial Sequence: Synthetic oligonucleotide
ugcgagcaaccccaaccgc

SEQ ID NO: 1493488 - RNA, 19 nt, Artificial Sequence
  Description of Artificial Sequence: Synthetic oligonucleotide
cauaguuaccugccuccug

SEQ ID NO: 1493489 - RNA, 19 nt, Artificial Sequence
  Description of Artificial Sequence: Synthetic oligonucleotide
agcaaaagcuugugacgga

SEQ ID NO: 1493490 - RNA, 19 nt, Artificial Sequence
  Description of Artificial Sequence: Synthetic oligonucleotide
ugagugcguccaacugagg

SEQ ID NO: 1493491 - RNA, 19 nt, Artificial Sequence
  Description of Artificial Sequence: Synthetic oligonucleotide
ugacggaugcugucauaug

SEQ ID NO: 1493492 - RNA, 19 nt, Artificial Sequence
  Description of Artificial Sequence: Synthetic oligonucleotide
gccgauaacuucuccauca

SEQ ID NO: 1493493 - RNA, 19 nt, Artificial Sequence
  Description of Artificial Sequence: Synthetic oligonucleotide
ccugcgagcaaccccaacc

SEQ ID NO: 1493494 - RNA, 19 nt, Artificial Sequence
  Description of Artificial Sequence: Synthetic oligonucleotide
ggugugcuaacugaauggc

SEQ ID NO: 1493495 - RNA, 19 nt, Artificial Sequence
  Description of Artificial Sequence: Synthetic oligonucleotide
acucucccuuucuugaaau

SEQ ID NO: 1493496 - RNA, 19 nt, Artificial Sequence
  Description of Artificial Sequence: Synthetic oligonucleotide
auacuggcaugagugcguc

SEQ ID NO: 1493497 - RNA, 19 nt, Artificial Sequence
  Description of Artificial Sequence: Synthetic oligonucleotide
gagugcguccaacugaggu

SEQ ID NO: 1493498 - RNA, 19 nt, Artificial Sequence
  Description of Artificial Sequence: Synthetic oligonucleotide
uccccuucaagauguuaaa

SEQ ID NO: 1493499 - RNA, 19 nt, Artificial Sequence
  Description of Artificial Sequence: Synthetic oligonucleotide
ggcuauagaaggccuaauc

SEQ ID NO: 1493500 - RNA, 19 nt, Artificial Sequence
  Description of Artificial Sequence: Synthetic oligonucleotide
gcggucugaaaauaccagc

SEQ ID NO: 1493501 - RNA, 19 nt, Artificial Sequence
  Description of Artificial Sequence: Synthetic oligonucleotide
ucgucaucuuuacuauaua

SEQ ID NO: 1493502 - RNA, 19 nt, Artificial Sequence
  Description of Artificial Sequence: Synthetic oligonucleotide
uuguuacccaauggccucc

SEQ ID NO: 1493503 - RNA, 19 nt, Artificial Sequence
  Description of Artificial Sequence: Synthetic oligonucleotide
ggcaaauguauagauacaa

SEQ ID NO: 1493504 - RNA, 19 nt, Artificial Sequence
  Description of Artificial Sequence: Synthetic oligonucleotide
gcuaacugaauggcuauug

SEQ ID NO: 1493505 - RNA, 19 nt, Artificial Sequence
  Description of Artificial Sequence: Synthetic oligonucleotide
auccccuucaagauguuaa

SEQ ID NO: 1493506 - RNA, 19 nt, Artificial Sequence
  Description of Artificial Sequence: Synthetic oligonucleotide
gauaccuuacugccaacau

SEQ ID NO: 1493507 - RNA, 19 nt, Artificial Sequence
  Description of Artificial Sequence: Synthetic oligonucleotide
cggucugaaaauaccagcc

SEQ ID NO: 1493508 - RNA, 19 nt, Artificial Sequence
  Description of Artificial Sequence: Synthetic oligonucleotide
caccaucccgaauggcucc

SEQ ID NO: 1493509 - RNA, 19 nt, Artificial Sequence
  Description of Artificial Sequence: Synthetic oligonucleotide
cacgcgggcuauagaaggc

SEQ ID NO: 1493510 - RNA, 19 nt, Artificial Sequence
  Description of Artificial Sequence: Synthetic oligonucleotide
agcugugauuuuacagccg

SEQ ID NO: 1493511 - RNA, 19 nt, Artificial Sequence
  Description of Artificial Sequence: Synthetic oligonucleotide
cuccaucacgucucuuaag

SEQ ID NO: 1493512 - RNA, 19 nt, Artificial Sequence
  Description of Artificial Sequence: Synthetic oligonucleotide
augucuuauuauggcagga

SEQ ID NO: 1493513 - RNA, 19 nt, Artificial Sequence
  Description of Artificial Sequence: Synthetic oligonucleotide
ccauggaagcuuuugcuuc

SEQ ID NO: 1493514 - RNA, 19 nt, Artificial Sequence
  Description of Artificial Sequence: Synthetic oligonucleotide
cugaauggcuauugugcca

SEQ ID NO: 1493515 - RNA, 19 nt, Artificial Sequence
  Description of Artificial Sequence: Synthetic oligonucleotide
caguggaaugggcucauca

SEQ ID NO: 1493516 - RNA, 19 nt, Artificial Sequence
  Description of Artificial Sequence: Synthetic oligonucleotide
aaguagcggucugaaaaua

SEQ ID NO: 1493517 - RNA, 19 nt, Artificial Sequence
  Description of Artificial Sequence: Synthetic oligonucleotide
cacgaaguuauccucugua

SEQ ID NO: 1493518 - RNA, 19 nt, Artificial Sequence
  Description of Artificial Sequence: Synthetic oligonucleotide
aucacgcgggcuauagaag

SEQ ID NO: 1493519 - RNA, 19 nt, Artificial Sequence
  Description of Artificial Sequence: Synthetic oligonucleotide
aucaaguagcggucugaaa

SEQ ID NO: 1493520 - RNA, 19 nt, Artificial Sequence
  Description of Artificial Sequence: Synthetic oligonucleotide
ggaaagccaccguugcccc

SEQ ID NO: 1493521 - RNA, 19 nt, Artificial Sequence
  Description of Artificial Sequence: Synthetic oligonucleotide
agcugccguccacgaaacc

SEQ ID NO: 1493522 - RNA, 19 nt, Artificial Sequence
  Description of Artificial Sequence: Synthetic oligonucleotide
gacucucccuuucuugaaa

SEQ ID NO: 1493523 - RNA, 19 nt, Artificial Sequence
  Description of Artificial Sequence: Synthetic oligonucleotide
uguguuuaucuggcucaga

SEQ ID NO: 1493524 - RNA, 19 nt, Artificial Sequence
  Description of Artificial Sequence: Synthetic oligonucleotide
agaggcaaauguauagaua

SEQ ID NO: 1493525 - RNA, 19 nt, Artificial Sequence
  Description of Artificial Sequence: Synthetic oligonucleotide
cucacuccugcgucuauga

SEQ ID NO: 1493526 - RNA, 19 nt, Artificial Sequence
  Description of Artificial Sequence: Synthetic oligonucleotide
cacagacuuuccgggagag

SEQ ID NO: 1493527 - RNA, 19 nt, Artificial Sequence
  Description of Artificial Sequence: Synthetic oligonucleotide
uuggcuccucuauggugug

SEQ ID NO: 1493528 - RNA, 19 nt, Artificial Sequence
  Description of Artificial Sequence: Synthetic oligonucleotide
ucccacuagagaugucaau

SEQ ID NO: 1493529 - RNA, 19 nt, Artificial Sequence
  Description of Artificial Sequence: Synthetic oligonucleotide
gauuuuacagccggcucgu

SEQ ID NO: 1493530 - RNA, 19 nt, Artificial Sequence
  Description of Artificial Sequence: Synthetic oligonucleotide
cgaaguuauccucuguaac

SEQ ID NO: 1493531 - RNA, 19 nt, Artificial Sequence
  Description of Artificial Sequence: Synthetic oligonucleotide
ggaauauccccuucaagau

SEQ ID NO: 1493532 - RNA, 19 nt, Artificial Sequence
  Description of Artificial Sequence: Synthetic oligonucleotide
agacucucccuuucuugaa

SEQ ID NO: 1493533 - RNA, 19 nt, Artificial Sequence
  Description of Artificial Sequence: Synthetic oligonucleotide
auagaaggccuaauccuuu

SEQ ID NO: 1493534 - RNA, 19 nt, Artificial Sequence
  Description of Artificial Sequence: Synthetic oligonucleotide
caucccgaauggcuccagc

SEQ ID NO: 1493535 - RNA, 19 nt, Artificial Sequence
  Description of Artificial Sequence: Synthetic oligonucleotide
uacagccggcucgucaucu

SEQ ID NO: 1493536 - RNA, 19 nt, Artificial Sequence
  Description of Artificial Sequence: Synthetic oligonucleotide
caggcucgcacaccauccc

SEQ ID NO: 1493537 - RNA, 19 nt, Artificial Sequence
  Description of Artificial Sequence: Synthetic oligonucleotide
aggcaaauguauagauaca

SEQ ID NO: 1493538 - RNA, 19 nt, Artificial Sequence
  Description of Artificial Sequence: Synthetic oligonucleotide
caaaugcacuugcuccauc

SEQ ID NO: 1493539 - RNA, 19 nt, Artificial Sequence
  Description of Artificial Sequence: Synthetic oligonucleotide
uguuacccaauggccucca

SEQ ID NO: 1493540 - RNA, 19 nt, Artificial Sequence
  Description of Artificial Sequence: Synthetic oligonucleotide
gagcaaccccaaccgccag

SEQ ID NO: 1493541 - RNA, 19 nt, Artificial Sequence
  Description of Artificial Sequence: Synthetic oligonucleotide
uaccagccgauaacuucuc

SEQ ID NO: 1493542 - RNA, 19 nt, Artificial Sequence
  Description of Artificial Sequence: Synthetic oligonucleotide
cuaucuggaggguccaacu

SEQ ID NO: 1493543 - RNA, 19 nt, Artificial Sequence
  Description of Artificial Sequence: Synthetic oligonucleotide
ccaccuguuuccuccaaac

SEQ ID NO: 1493544 - RNA, 19 nt, Artificial Sequence
  Description of Artificial Sequence: Synthetic oligonucleotide
uaucuacucccaggccacc

SEQ ID NO: 1493545 - RNA, 19 nt, Artificial Sequence
  Description of Artificial Sequence: Synthetic oligonucleotide
cagcuuucagcaacaugga

SEQ ID NO: 1493546 - RNA, 19 nt, Artificial Sequence
  Description of Artificial Sequence: Synthetic oligonucleotide
uuacagccggcucgucauc

SEQ ID NO: 1493547 - RNA, 19 nt, Artificial Sequence
  Description of Artificial Sequence: Synthetic oligonucleotide
ugugacggaugcugucaua

SEQ ID NO: 1493548 - RNA, 19 nt, Artificial Sequence
  Description of Artificial Sequence: Synthetic oligonucleotide
ccacuagagaugucaauca

SEQ ID NO: 1493549 - RNA, 19 nt, Artificial Sequence
  Description of Artificial Sequence: Synthetic oligonucleotide
caaguagcggucugaaaau

SEQ ID NO: 1493550 - RNA, 19 nt, Artificial Sequence
  Description of Artificial Sequence: Synthetic oligonucleotide
cugcgucuaugacaauauc

SEQ ID NO: 1493551 - RNA, 19 nt, Artificial Sequence
  Description of Artificial Sequence: Synthetic oligonucleotide
cugccuccugcgagcaacc

SEQ ID NO: 1493552 - RNA, 19 nt, Artificial Sequence
  Description of Artificial Sequence: Synthetic oligonucleotide
cgucuaugacaauaucuac

SEQ ID NO: 1493553 - RNA, 19 nt, Artificial Sequence
  Description of Artificial Sequence: Synthetic oligonucleotide
uggcaugagugcguccaac

SEQ ID NO: 1493554 - RNA, 19 nt, Artificial Sequence
  Description of Artificial Sequence: Synthetic oligonucleotide
gcgucuaugacaauaucua

SEQ ID NO: 1493555 - RNA, 19 nt, Artificial Sequence
  Description of Artificial Sequence: Synthetic oligonucleotide
ggaggguccaacugaaggu

SEQ ID NO: 1493556 - RNA, 19 nt, Artificial Sequence
  Description of Artificial Sequence: Synthetic oligonucleotide
gcagcugccguccacgaaa

SEQ ID NO: 1493557 - RNA, 19 nt, Artificial Sequence
  Description of Artificial Sequence: Synthetic oligonucleotide
cagcugccguccacgaaac

SEQ ID NO: 1493558 - RNA, 19 nt, Artificial Sequence
  Description of Artificial Sequence: Synthetic oligonucleotide
gcuuaugugguagcuguga

SEQ ID NO: 1493559 - RNA, 19 nt, Artificial Sequence
  Description of Artificial Sequence: Synthetic oligonucleotide
aucuacucccaggccaccu

SEQ ID NO: 1493560 - RNA, 19 nt, Artificial Sequence
  Description of Artificial Sequence: Synthetic oligonucleotide
gcgagcaaccccaaccgcc

SEQ ID NO: 1493561 - RNA, 19 nt, Artificial Sequence
  Description of Artificial Sequence: Synthetic oligonucleotide
guugaaaauacaagcccuu

SEQ ID NO: 1493562 - RNA, 19 nt, Artificial Sequence
  Description of Artificial Sequence: Synthetic oligonucleotide
cuguaacagggagacucuc

SEQ ID NO: 1493563 - RNA, 19 nt, Artificial Sequence
  Description of Artificial Sequence: Synthetic oligonucleotide
uccugcgagcaaccccaac

SEQ ID NO: 1493564 - RNA, 19 nt, Artificial Sequence
  Description of Artificial Sequence: Synthetic oligonucleotide
ggaaugggcucaucaagua

SEQ ID NO: 1493565 - RNA, 19 nt, Artificial Sequence
  Description of Artificial Sequence: Synthetic oligonucleotide
gagcucuguugaaaauaca

SEQ ID NO: 1493566 - RNA, 19 nt, Artificial Sequence
  Description of Artificial Sequence: Synthetic oligonucleotide
ugcguccaacugaggucug

SEQ ID NO: 1493567 - RNA, 19 nt, Artificial Sequence
  Description of Artificial Sequence: Synthetic oligonucleotide
caucaaguagcggucugaa

SEQ ID NO: 1493568 - RNA, 19 nt, Artificial Sequence
  Description of Artificial Sequence: Synthetic oligonucleotide
agcuugugacggaugcugu

SEQ ID NO: 1493569 - RNA, 19 nt, Artificial Sequence
  Description of Artificial Sequence: Synthetic oligonucleotide
cuuaugugguagcugugau

SEQ ID NO: 1493570 - RNA, 19 nt, Artificial Sequence
  Description of Artificial Sequence: Synthetic oligonucleotide
cuugaaguuucacgaaguu

SEQ ID NO: 1493571 - RNA, 19 nt, Artificial Sequence
  Description of Artificial Sequence: Synthetic oligonucleotide
acaguggaaugggcucauc

SEQ ID NO: 1493572 - RNA, 19 nt, Artificial Sequence
  Description of Artificial Sequence: Synthetic oligonucleotide
uggcuaucuggagggucca

SEQ ID NO: 1493573 - RNA, 19 nt, Artificial Sequence
  Description of Artificial Sequence: Synthetic oligonucleotide
ugccguccacgaaaccuuu

SEQ ID NO: 1493574 - RNA, 19 nt, Artificial Sequence
  Description of Artificial Sequence: Synthetic oligonucleotide
gugcguccaacugaggucu

SEQ ID NO: 1493575 - RNA, 19 nt, Artificial Sequence
  Description of Artificial Sequence: Synthetic oligonucleotide
cauuaaggaaagccaccgu

SEQ ID NO: 1493576 - RNA, 19 nt, Artificial Sequence
  Description of Artificial Sequence: Synthetic oligonucleotide
cagcacagacuuuccggga

SEQ ID NO: 1493577 - RNA, 19 nt, Artificial Sequence
  Description of Artificial Sequence: Synthetic oligonucleotide
acagacuuuccgggagaga

SEQ ID NO: 1493578 - RNA, 19 nt, Artificial Sequence
  Description of Artificial Sequence: Synthetic oligonucleotide
ccgauaacuucuccaucac

SEQ ID NO: 1493579 - RNA, 19 nt, Artificial Sequence
  Description of Artificial Sequence: Synthetic oligonucleotide
gcuugugacggaugcuguc

SEQ ID NO: 1493580 - RNA, 19 nt, Artificial Sequence
  Description of Artificial Sequence: Synthetic oligonucleotide
ggccuaauccuuucaagau

SEQ ID NO: 1493581 - RNA, 19 nt, Artificial Sequence
  Description of Artificial Sequence: Synthetic oligonucleotide
gugcuaacugaauggcuau

SEQ ID NO: 1493582 - RNA, 19 nt, Artificial Sequence
  Description of Artificial Sequence: Synthetic oligonucleotide
caaucacgcgggcuauaga

SEQ ID NO: 1493583 - RNA, 19 nt, Artificial Sequence
  Description of Artificial Sequence: Synthetic oligonucleotide
gaauggcuauugugccaaa

SEQ ID NO: 1493584 - RNA, 19 nt, Artificial Sequence
  Description of Artificial Sequence: Synthetic oligonucleotide
cagccgauaacuucuccau

SEQ ID NO: 1493585 - RNA, 19 nt, Artificial Sequence
  Description of Artificial Sequence: Synthetic oligonucleotide
gaggguccaacugaagguu

SEQ ID NO: 1493586 - RNA, 19 nt, Artificial Sequence
  Description of Artificial Sequence: Synthetic oligonucleotide
ugccuccugcgagcaaccc

SEQ ID NO: 1493587 - RNA, 19 nt, Artificial Sequence
  Description of Artificial Sequence: Synthetic oligonucleotide
ugccaacaucuaacacaau

SEQ ID NO: 1493588 - RNA, 19 nt, Artificial Sequence
  Description of Artificial Sequence: Synthetic oligonucleotide
ccguccacgaaaccuuuuc

SEQ ID NO: 1493589 - RNA, 19 nt, Artificial Sequence
  Description of Artificial Sequence: Synthetic oligonucleotide
ggcaugagugcguccaacu

SEQ ID NO: 1493590 - RNA, 19 nt, Artificial Sequence
  Description of Artificial Sequence: Synthetic oligonucleotide
gugugcuaacugaauggcu

SEQ ID NO: 1493591 - RNA, 19 nt, Artificial Sequence
  Description of Artificial Sequence: Synthetic oligonucleotide
aggguccaacugaagguuu

SEQ ID NO: 1493592 - RNA, 19 nt, Artificial Sequence
  Description of Artificial Sequence: Synthetic oligonucleotide
gcugccguccacgaaaccu

SEQ ID NO: 1493593 - RNA, 19 nt, Artificial Sequence
  Description of Artificial Sequence: Synthetic oligonucleotide
cugccguccacgaaaccuu

SEQ ID NO: 1493594 - RNA, 19 nt, Artificial Sequence
  Description of Artificial Sequence: Synthetic oligonucleotide
cacagagcccagggucuuc

SEQ ID NO: 1493595 - RNA, 19 nt, Artificial Sequence
  Description of Artificial Sequence: Synthetic oligonucleotide
ggcucgcacaccaucccga

SEQ ID NO: 1493596 - RNA, 19 nt, Artificial Sequence
  Description of Artificial Sequence: Synthetic oligonucleotide
ccacgaaaccuuuucuggu

SEQ ID NO: 1493597 - RNA, 19 nt, Artificial Sequence
  Description of Artificial Sequence: Synthetic oligonucleotide
gcaaaagcuugugacggau

SEQ ID NO: 1493598 - RNA, 19 nt, Artificial Sequence
  Description of Artificial Sequence: Synthetic oligonucleotide
caugaucagcacagacuuu

SEQ ID NO: 1493599 - RNA, 19 nt, Artificial Sequence
  Description of Artificial Sequence: Synthetic oligonucleotide
gcucgucaucuuuacuaua

SEQ ID NO: 1493600 - RNA, 19 nt, Artificial Sequence
  Description of Artificial Sequence: Synthetic oligonucleotide
cuggcaugagugcguccaa

SEQ ID NO: 1493601 - RNA, 19 nt, Artificial Sequence
  Description of Artificial Sequence: Synthetic oligonucleotide
ccugcgucuaugacaauau

SEQ ID NO: 1493602 - RNA, 19 nt, Artificial Sequence
  Description of Artificial Sequence: Synthetic oligonucleotide
accuuacugccaacaucua

SEQ ID NO: 1493603 - RNA, 19 nt, Artificial Sequence
  Description of Artificial Sequence: Synthetic oligonucleotide
gucaaucacgcgggcuaua

SEQ ID NO: 1493604 - RNA, 19 nt, Artificial Sequence
  Description of Artificial Sequence: Synthetic oligonucleotide
ccccuucaagauguuaaaa

SEQ ID NO: 1493605 - RNA, 19 nt, Artificial Sequence
  Description of Artificial Sequence: Synthetic oligonucleotide
ccaucacgucucuuaagau

SEQ ID NO: 1493606 - RNA, 19 nt, Artificial Sequence
  Description of Artificial Sequence: Synthetic oligonucleotide
cuccugcgagcaaccccaa

SEQ ID NO: 1493607 - RNA, 19 nt, Artificial Sequence
  Description of Artificial Sequence: Synthetic oligonucleotide
cacuugcuccauccaugau

SEQ ID NO: 1493608 - RNA, 19 nt, Artificial Sequence
  Description of Artificial Sequence: Synthetic oligonucleotide
cguccacgaaaccuuuucu

SEQ ID NO: 1493609 - RNA, 19 nt, Artificial Sequence
  Description of Artificial Sequence: Synthetic oligonucleotide
gcgggcuauagaaggccua

SEQ ID NO: 1493610 - RNA, 19 nt, Artificial Sequence
  Description of Artificial Sequence: Synthetic oligonucleotide
ggguccaacugaagguuuu

SEQ ID NO: 1493611 - RNA, 19 nt, Artificial Sequence
  Description of Artificial Sequence: Synthetic oligonucleotide
ccucuauggugugcuaacu

SEQ ID NO: 1493612 - RNA, 19 nt, Artificial Sequence
  Description of Artificial Sequence: Synthetic oligonucleotide
ggcuaucuggaggguccaa

SEQ ID NO: 1493613 - RNA, 19 nt, Artificial Sequence
  Description of Artificial Sequence: Synthetic oligonucleotide
gggcuauagaaggccuaau

SEQ ID NO: 1493614 - RNA, 19 nt, Artificial Sequence
  Description of Artificial Sequence: Synthetic oligonucleotide
caguggcuaucuggagggu

SEQ ID NO: 1493615 - RNA, 19 nt, Artificial Sequence
  Description of Artificial Sequence: Synthetic oligonucleotide
cgcgggcuauagaaggccu

SEQ ID NO: 1493616 - RNA, 19 nt, Artificial Sequence
  Description of Artificial Sequence: Synthetic oligonucleotide
ccggcucgucaucuuuacu

SEQ ID NO: 1493617 - RNA, 19 nt, Artificial Sequence
  Description of Artificial Sequence: Synthetic oligonucleotide
gccguccacgaaaccuuuu

SEQ ID NO: 1493618 - RNA, 19 nt, Artificial Sequence
  Description of Artificial Sequence: Synthetic oligonucleotide
uuagauuuuguaaacaugg

SEQ ID NO: 1493619 - RNA, 19 nt, Artificial Sequence
  Description of Artificial Sequence: Synthetic oligonucleotide
aaauauugaucacaaaugg

SEQ ID NO: 1493620 - RNA, 19 nt, Artificial Sequence
  Description of Artificial Sequence: Synthetic oligonucleotide
aaguauuaaauauugauca

SEQ ID NO: 1493621 - RNA, 19 nt, Artificial Sequence
  Description of Artificial Sequence: Synthetic oligonucleotide
uauaguauaauacuggagu

SEQ ID NO: 1493622 - RNA, 19 nt, Artificial Sequence
  Description of Artificial Sequence: Synthetic oligonucleotide
uauaauaugagacuaauuu

SEQ ID NO: 1493623 - RNA, 19 nt, Artificial Sequence
  Description of Artificial Sequence: Synthetic oligonucleotide
accuuuauaaaacacugcc

SEQ ID NO: 1493624 - RNA, 19 nt, Artificial Sequence
  Description of Artificial Sequence: Synthetic oligonucleotide
auaacuugcaaauauuuuc

SEQ ID NO: 1493625 - RNA, 19 nt, Artificial Sequence
  Description of Artificial Sequence: Synthetic oligonucleotide
ugguuagcaaucaaaaugg

SEQ ID NO: 1493626 - RNA, 19 nt, Artificial Sequence
  Description of Artificial Sequence: Synthetic oligonucleotide
ucuucuauaaguucuaccc

SEQ ID NO: 1493627 - RNA, 19 nt, Artificial Sequence
  Description of Artificial Sequence: Synthetic oligonucleotide
aaauuuaucucauuccaug

SEQ ID NO: 1493628 - RNA, 19 nt, Artificial Sequence
  Description of Artificial Sequence: Synthetic oligonucleotide
ugaaauagcgucccaaagg

SEQ ID NO: 1493629 - RNA, 19 nt, Artificial Sequence
  Description of Artificial Sequence: Synthetic oligonucleotide
uuuagcagauggaauaugg

SEQ ID NO: 1493630 - RNA, 19 nt, Artificial Sequence
  Description of Artificial Sequence: Synthetic oligonucleotide
aaaggacuuuuguugaccc

SEQ ID NO: 1493631 - RNA, 19 nt, Artificial Sequence
  Description of Artificial Sequence: Synthetic oligonucleotide
uuguauaguauaauacugg

SEQ ID NO: 1493632 - RNA, 19 nt, Artificial Sequence
  Description of Artificial Sequence: Synthetic oligonucleotide
uauaauacuggagugacag

SEQ ID NO: 1493633 - RNA, 19 nt, Artificial Sequence
  Description of Artificial Sequence: Synthetic oligonucleotide
uucauauacauuaugaaua

SEQ ID NO: 1493634 - RNA, 19 nt, Artificial Sequence
  Description of Artificial Sequence: Synthetic oligonucleotide
uguuuagagaaaucuaagg

SEQ ID NO: 1493635 - RNA, 19 nt, Artificial Sequence
  Description of Artificial Sequence: Synthetic oligonucleotide
gauuguaaggaugaaauag

SEQ ID NO: 1493636 - RNA, 19 nt, Artificial Sequence
  Description of Artificial Sequence: Synthetic oligonucleotide
uuagcaaucaaaaugguuu

SEQ ID NO: 1493637 - RNA, 19 nt, Artificial Sequence
  Description of Artificial Sequence: Synthetic oligonucleotide
ugaaauuuaucucauucca

SEQ ID NO: 1493638 - RNA, 19 nt, Artificial Sequence
  Description of Artificial Sequence: Synthetic oligonucleotide
aaggguuaaccauucuucc

SEQ ID NO: 1493639 - RNA, 19 nt, Artificial Sequence
  Description of Artificial Sequence: Synthetic oligonucleotide
aauaugggauuuuacaagu

SEQ ID NO: 1493640 - RNA, 19 nt, Artificial Sequence
  Description of Artificial Sequence: Synthetic oligonucleotide
auaaguucuacccucaaug

SEQ ID NO: 1493641 - RNA, 19 nt, Artificial Sequence
  Description of Artificial Sequence: Synthetic oligonucleotide
ucauccuauaauaugagac

SEQ ID NO: 1493642 - RNA, 19 nt, Artificial Sequence
  Description of Artificial Sequence: Synthetic oligonucleotide
uaaauaugaaugcaauuca

SEQ ID NO: 1493643 - RNA, 19 nt, Artificial Sequence
  Description of Artificial Sequence: Synthetic oligonucleotide
augaaugcaauucauaaga

SEQ ID NO: 1493644 - RNA, 19 nt, Artificial Sequence
  Description of Artificial Sequence: Synthetic oligonucleotide
uuauuauccuccuacagga

SEQ ID NO: 1493645 - RNA, 19 nt, Artificial Sequence
  Description of Artificial Sequence: Synthetic oligonucleotide
uuugauaacuugcaaauau

SEQ ID NO: 1493646 - RNA, 19 nt, Artificial Sequence
  Description of Artificial Sequence: Synthetic oligonucleotide
ucucauuccauguucagag

SEQ ID NO: 1493647 - RNA, 19 nt, Artificial Sequence
  Description of Artificial Sequence: Synthetic oligonucleotide
uaugagacuaauuuuauua

SEQ ID NO: 1493648 - RNA, 19 nt, Artificial Sequence
  Description of Artificial Sequence: Synthetic oligonucleotide
uaucucaauaacaagugca

SEQ ID NO: 1493649 - RNA, 19 nt, Artificial Sequence
  Description of Artificial Sequence: Synthetic oligonucleotide
aacauaaggacucuuucgu

SEQ ID NO: 1493650 - RNA, 19 nt, Artificial Sequence
  Description of Artificial Sequence: Synthetic oligonucleotide
aucguaauuauuuguacag

SEQ ID NO: 1493651 - RNA, 19 nt, Artificial Sequence
  Description of Artificial Sequence: Synthetic oligonucleotide
uagauuguaaggaugaaau

SEQ ID NO: 1493652 - RNA, 19 nt, Artificial Sequence
  Description of Artificial Sequence: Synthetic oligonucleotide
aaaggguuaaccauucuuc

SEQ ID NO: 1493653 - RNA, 19 nt, Artificial Sequence
  Description of Artificial Sequence: Synthetic oligonucleotide
ucuucuagaaucuugggau

SEQ ID NO: 1493654 - RNA, 19 nt, Artificial Sequence
  Description of Artificial Sequence: Synthetic oligonucleotide
aaaauagagaauagcaucu

SEQ ID NO: 1493655 - RNA, 19 nt, Artificial Sequence
  Description of Artificial Sequence: Synthetic oligonucleotide
aauuuaucucauuccaugu

SEQ ID NO: 1493656 - RNA, 19 nt, Artificial Sequence
  Description of Artificial Sequence: Synthetic oligonucleotide
aaugaaucaucacucuuca

SEQ ID NO: 1493657 - RNA, 19 nt, Artificial Sequence
  Description of Artificial Sequence: Synthetic oligonucleotide
uaugaaugcaauucauaag

SEQ ID NO: 1493658 - RNA, 19 nt, Artificial Sequence
  Description of Artificial Sequence: Synthetic oligonucleotide
uagucauccuauaauauga

SEQ ID NO: 1493659 - RNA, 19 nt, Artificial Sequence
  Description of Artificial Sequence: Synthetic oligonucleotide
agguagguaaaauacauga

SEQ ID NO: 1493660 - RNA, 19 nt, Artificial Sequence
  Description of Artificial Sequence: Synthetic oligonucleotide
uguauaguauaauacugga

SEQ ID NO: 1493661 - RNA, 19 nt, Artificial Sequence
  Description of Artificial Sequence: Synthetic oligonucleotide
agcucauugguccaauagc

SEQ ID NO: 1493662 - RNA, 19 nt, Artificial Sequence
  Description of Artificial Sequence: Synthetic oligonucleotide
aacaagugcacauucuacu

SEQ ID NO: 1493663 - RNA, 19 nt, Artificial Sequence
  Description of Artificial Sequence: Synthetic oligonucleotide
aguauaauacuggagugac

SEQ ID NO: 1493664 - RNA, 19 nt, Artificial Sequence
  Description of Artificial Sequence: Synthetic oligonucleotide
cugguuagcaaucaaaaug

SEQ ID NO: 1493665 - RNA, 19 nt, Artificial Sequence
  Description of Artificial Sequence: Synthetic oligonucleotide
aaggaugaaauagcguccc

SEQ ID NO: 1493666 - RNA, 19 nt, Artificial Sequence
  Description of Artificial Sequence: Synthetic oligonucleotide
uggaauaugggauuuuaca

SEQ ID NO: 1493667 - RNA, 19 nt, Artificial Sequence
  Description of Artificial Sequence: Synthetic oligonucleotide
uagguaaaauacaugacuc

SEQ ID NO: 1493668 - RNA, 19 nt, Artificial Sequence
  Description of Artificial Sequence: Synthetic oligonucleotide
uauguguuugccucaacag

SEQ ID NO: 1493669 - RNA, 19 nt, Artificial Sequence
  Description of Artificial Sequence: Synthetic oligonucleotide
ucuuugauaacuugcaaau

SEQ ID NO: 1493670 - RNA, 19 nt, Artificial Sequence
  Description of Artificial Sequence: Synthetic oligonucleotide
ucaguuucgagguagguaa

SEQ ID NO: 1493671 - RNA, 19 nt, Artificial Sequence
  Description of Artificial Sequence: Synthetic oligonucleotide
ucuaguauguguuugccuc

SEQ ID NO: 1493672 - RNA, 19 nt, Artificial Sequence
  Description of Artificial Sequence: Synthetic oligonucleotide
ugaaucaucacucuucauu

SEQ ID NO: 1493673 - RNA, 19 nt, Artificial Sequence
  Description of Artificial Sequence: Synthetic oligonucleotide
acuagaaugucucauccug

SEQ ID NO: 1493674 - RNA, 19 nt, Artificial Sequence
  Description of Artificial Sequence: Synthetic oligonucleotide
guuuagagaaaucuaagga

SEQ ID NO: 1493675 - RNA, 19 nt, Artificial Sequence
  Description of Artificial Sequence: Synthetic oligonucleotide
cuaccuuuauaaaacacug

SEQ ID NO: 1493676 - RNA, 19 nt, Artificial Sequence
  Description of Artificial Sequence: Synthetic oligonucleotide
uuuuguugacccuuuaagu

SEQ ID NO: 1493677 - RNA, 19 nt, Artificial Sequence
  Description of Artificial Sequence: Synthetic oligonucleotide
agaaaucuaaggagaaucc

SEQ ID NO: 1493678 - RNA, 19 nt, Artificial Sequence
  Description of Artificial Sequence: Synthetic oligonucleotide
uuacacauucuuacuaacc

SEQ ID NO: 1493679 - RNA, 19 nt, Artificial Sequence
  Description of Artificial Sequence: Synthetic oligonucleotide
acaucguaauuauuuguac

SEQ ID NO: 1493680 - RNA, 19 nt, Artificial Sequence
  Description of Artificial Sequence: Synthetic oligonucleotide
uuucaaacucuagugaaag

SEQ ID NO: 1493681 - RNA, 19 nt, Artificial Sequence
  Description of Artificial Sequence: Synthetic oligonucleotide
cuuuuguugacccuuuaag

SEQ ID NO: 1493682 - RNA, 19 nt, Artificial Sequence
  Description of Artificial Sequence: Synthetic oligonucleotide
uguguauuaaacuguuaca

SEQ ID NO: 1493683 - RNA, 19 nt, Artificial Sequence
  Description of Artificial Sequence: Synthetic oligonucleotide
uuucuagauuguaaggaug

SEQ ID NO: 1493684 - RNA, 19 nt, Artificial Sequence
  Description of Artificial Sequence: Synthetic oligonucleotide
uuaucucaauaacaagugc

SEQ ID NO: 1493685 - RNA, 19 nt, Artificial Sequence
  Description of Artificial Sequence: Synthetic oligonucleotide
cuguguauuaaacuguuac

SEQ ID NO: 1493686 - RNA, 19 nt, Artificial Sequence
  Description of Artificial Sequence: Synthetic oligonucleotide
ucacuagaaugucucaucc

SEQ ID NO: 1493687 - RNA, 19 nt, Artificial Sequence
  Description of Artificial Sequence: Synthetic oligonucleotide
gaaauagcgucccaaagga

SEQ ID NO: 1493688 - RNA, 19 nt, Artificial Sequence
  Description of Artificial Sequence: Synthetic oligonucleotide
ucccaaaggacuuuuguug

SEQ ID NO: 1493689 - RNA, 19 nt, Artificial Sequence
  Description of Artificial Sequence: Synthetic oligonucleotide
gaaucuugggauuaucuca

SEQ ID NO: 1493690 - RNA, 19 nt, Artificial Sequence
  Description of Artificial Sequence: Synthetic oligonucleotide
ucuauuucaugcccucagg

SEQ ID NO: 1493691 - RNA, 19 nt, Artificial Sequence
  Description of Artificial Sequence: Synthetic oligonucleotide
caacauaaggacucuuucg

SEQ ID NO: 1493692 - RNA, 19 nt, Artificial Sequence
  Description of Artificial Sequence: Synthetic oligonucleotide
ugagacuaauuuuauuaug

SEQ ID NO: 1493693 - RNA, 19 nt, Artificial Sequence
  Description of Artificial Sequence: Synthetic oligonucleotide
gauuuguuagauuuuguaa

SEQ ID NO: 1493694 - RNA, 19 nt, Artificial Sequence
  Description of Artificial Sequence: Synthetic oligonucleotide
cuuaggaaaagcagucccg

SEQ ID NO: 1493695 - RNA, 19 nt, Artificial Sequence
  Description of Artificial Sequence: Synthetic oligonucleotide
uucuauuucaugcccucag

SEQ ID NO: 1493696 - RNA, 19 nt, Artificial Sequence
  Description of Artificial Sequence: Synthetic oligonucleotide
ggauuugugaggcaggagg

SEQ ID NO: 1493697 - RNA, 19 nt, Artificial Sequence
  Description of Artificial Sequence: Synthetic oligonucleotide
uugcauuccauugucaacc

SEQ ID NO: 1493698 - RNA, 19 nt, Artificial Sequence
  Description of Artificial Sequence: Synthetic oligonucleotide
auugcauuccauugucaac

SEQ ID NO: 1493699 - RNA, 19 nt, Artificial Sequence
  Description of Artificial Sequence: Synthetic oligonucleotide
aaugucucauccugugaag

SEQ ID NO: 1493700 - RNA, 19 nt, Artificial Sequence
  Description of Artificial Sequence: Synthetic oligonucleotide
aauagcgucccaaaggacu

SEQ ID NO: 1493701 - RNA, 19 nt, Artificial Sequence
  Description of Artificial Sequence: Synthetic oligonucleotide
acacauucuuacuaacccg

SEQ ID NO: 1493702 - RNA, 19 nt, Artificial Sequence
  Description of Artificial Sequence: Synthetic oligonucleotide
uuuguugacccuuuaaguu

SEQ ID NO: 1493703 - RNA, 19 nt, Artificial Sequence
  Description of Artificial Sequence: Synthetic oligonucleotide
aggguuaaccauucuuccc

SEQ ID NO: 1493704 - RNA, 19 nt, Artificial Sequence
  Description of Artificial Sequence: Synthetic oligonucleotide
cacauucuuacuaacccgc

SEQ ID NO: 1493705 - RNA, 19 nt, Artificial Sequence
  Description of Artificial Sequence: Synthetic oligonucleotide
guaaacagugcacuucuag

SEQ ID NO: 1493706 - RNA, 19 nt, Artificial Sequence
  Description of Artificial Sequence: Synthetic oligonucleotide
gaaugcaauucauaagaac

SEQ ID NO: 1493707 - RNA, 19 nt, Artificial Sequence
  Description of Artificial Sequence: Synthetic oligonucleotide
agcuaguaguuuccaaagc

SEQ ID NO: 1493708 - RNA, 19 nt, Artificial Sequence
  Description of Artificial Sequence: Synthetic oligonucleotide
auaacagcuaguaguuucc

SEQ ID NO: 1493709 - RNA, 19 nt, Artificial Sequence
  Description of Artificial Sequence: Synthetic oligonucleotide
auuaucucaauaacaagug

SEQ ID NO: 1493710 - RNA, 19 nt, Artificial Sequence
  Description of Artificial Sequence: Synthetic oligonucleotide
cuuuauuauccuccuacag

SEQ ID NO: 1493711 - RNA, 19 nt, Artificial Sequence
  Description of Artificial Sequence: Synthetic oligonucleotide
ugacauuuguauaguauaa

SEQ ID NO: 1493712 - RNA, 19 nt, Artificial Sequence
  Description of Artificial Sequence: Synthetic oligonucleotide
caaacucuagugaaaggag

SEQ ID NO: 1493713 - RNA, 19 nt, Artificial Sequence
  Description of Artificial Sequence: Synthetic oligonucleotide
ucuauaaguucuacccuca

SEQ ID NO: 1493714 - RNA, 19 nt, Artificial Sequence
  Description of Artificial Sequence: Synthetic oligonucleotide
uacaucguaauuauuugua

SEQ ID NO: 1493715 - RNA, 19 nt, Artificial Sequence
  Description of Artificial Sequence: Synthetic oligonucleotide
ucaauggucacacaccauu

SEQ ID NO: 1493716 - RNA, 19 nt, Artificial Sequence
  Description of Artificial Sequence: Synthetic oligonucleotide
aaacacucaacuucaguuu

SEQ ID NO: 1493717 - RNA, 19 nt, Artificial Sequence
  Description of Artificial Sequence: Synthetic oligonucleotide
uuaaacuguuacaucguaa

SEQ ID NO: 1493718 - RNA, 19 nt, Artificial Sequence
  Description of Artificial Sequence: Synthetic oligonucleotide
uaaguucuacccucaauga

SEQ ID NO: 1493719 - RNA, 19 nt, Artificial Sequence
  Description of Artificial Sequence: Synthetic oligonucleotide
uugggauuaucucaauaac

SEQ ID NO: 1493720 - RNA, 19 nt, Artificial Sequence
  Description of Artificial Sequence: Synthetic oligonucleotide
aucucaauaacaagugcac

SEQ ID NO: 1493721 - RNA, 19 nt, Artificial Sequence
  Description of Artificial Sequence: Synthetic oligonucleotide
uccauguucagagauaaaa

SEQ ID NO: 1493722 - RNA, 19 nt, Artificial Sequence
  Description of Artificial Sequence: Synthetic oligonucleotide
uaauuucguacucugguua

SEQ ID NO: 1493723 - RNA, 19 nt, Artificial Sequence
  Description of Artificial Sequence: Synthetic oligonucleotide
uuacaucguaauuauuugu

SEQ ID NO: 1493724 - RNA, 19 nt, Artificial Sequence
  Description of Artificial Sequence: Synthetic oligonucleotide
uuucauaaaccaagggaaa

SEQ ID NO: 1493725 - RNA, 19 nt, Artificial Sequence
  Description of Artificial Sequence: Synthetic oligonucleotide
gauguaacaucugucuacc

SEQ ID NO: 1493726 - RNA, 19 nt, Artificial Sequence
  Description of Artificial Sequence: Synthetic oligonucleotide
auucuuacuaacccgcgca

SEQ ID NO: 1493727 - RNA, 19 nt, Artificial Sequence
  Description of Artificial Sequence: Synthetic oligonucleotide
aaugacauuuguauaguau

SEQ ID NO: 1493728 - RNA, 19 nt, Artificial Sequence
  Description of Artificial Sequence: Synthetic oligonucleotide
agucugauggcaauaacag

SEQ ID NO: 1493729 - RNA, 19 nt, Artificial Sequence
  Description of Artificial Sequence: Synthetic oligonucleotide
uguagucauccuauaauau

SEQ ID NO: 1493730 - RNA, 19 nt, Artificial Sequence
  Description of Artificial Sequence: Synthetic oligonucleotide
guggaauucgccuaccgug

SEQ ID NO: 1493731 - RNA, 19 nt, Artificial Sequence
  Description of Artificial Sequence: Synthetic oligonucleotide
ugcacuucuaguauguguu

SEQ ID NO: 1493732 - RNA, 19 nt, Artificial Sequence
  Description of Artificial Sequence: Synthetic oligonucleotide
gucuugacuggcuaguugc

SEQ ID NO: 1493733 - RNA, 19 nt, Artificial Sequence
  Description of Artificial Sequence: Synthetic oligonucleotide
uaccuuuauaaaacacugc

SEQ ID NO: 1493734 - RNA, 19 nt, Artificial Sequence
  Description of Artificial Sequence: Synthetic oligonucleotide
uguugacccuuuaaguucu

SEQ ID NO: 1493735 - RNA, 19 nt, Artificial Sequence
  Description of Artificial Sequence: Synthetic oligonucleotide
cacacggcaacauaaggac

SEQ ID NO: 1493736 - RNA, 19 nt, Artificial Sequence
  Description of Artificial Sequence: Synthetic oligonucleotide
uaugggauuuuacaaguuu

SEQ ID NO: 1493737 - RNA, 19 nt, Artificial Sequence
  Description of Artificial Sequence: Synthetic oligonucleotide
uuguugacccuuuaaguuc

SEQ ID NO: 1493738 - RNA, 19 nt, Artificial Sequence
  Description of Artificial Sequence: Synthetic oligonucleotide
ucacuauacagcacacggc

SEQ ID NO: 1493739 - RNA, 19 nt, Artificial Sequence
  Description of Artificial Sequence: Synthetic oligonucleotide
caaagcuacuguaugaaga

SEQ ID NO: 1493740 - RNA, 19 nt, Artificial Sequence
  Description of Artificial Sequence: Synthetic oligonucleotide
auaaaaggguuaaccauuc

SEQ ID NO: 1493741 - RNA, 19 nt, Artificial Sequence
  Description of Artificial Sequence: Synthetic oligonucleotide
auacuggagugacagaacu

SEQ ID NO: 1493742 - RNA, 19 nt, Artificial Sequence
  Description of Artificial Sequence: Synthetic oligonucleotide
guauuaaauauugaucaca

SEQ ID NO: 1493743 - RNA, 19 nt, Artificial Sequence
  Description of Artificial Sequence: Synthetic oligonucleotide
ugaaugcaauucauaagaa

SEQ ID NO: 1493744 - RNA, 19 nt, Artificial Sequence
  Description of Artificial Sequence: Synthetic oligonucleotide
uuaagguaauuucguacuc

SEQ ID NO: 1493745 - RNA, 19 nt, Artificial Sequence
  Description of Artificial Sequence: Synthetic oligonucleotide
uguuugccucaacagcagg

SEQ ID NO: 1493746 - RNA, 19 nt, Artificial Sequence
  Description of Artificial Sequence: Synthetic oligonucleotide
agguaaaauacaugacucu

SEQ ID NO: 1493747 - RNA, 19 nt, Artificial Sequence
  Description of Artificial Sequence: Synthetic oligonucleotide
aaaggagccuguggaauuc

SEQ ID NO: 1493748 - RNA, 19 nt, Artificial Sequence
  Description of Artificial Sequence: Synthetic oligonucleotide
cuugggauuaucucaauaa

SEQ ID NO: 1493749 - RNA, 19 nt, Artificial Sequence
  Description of Artificial Sequence: Synthetic oligonucleotide
aaauaugaaugcaauucau

SEQ ID NO: 1493750 - RNA, 19 nt, Artificial Sequence
  Description of Artificial Sequence: Synthetic oligonucleotide
uaguauaauacuggaguga

SEQ ID NO: 1493751 - RNA, 19 nt, Artificial Sequence
  Description of Artificial Sequence: Synthetic oligonucleotide
uucuuacuaacccgcgcag

SEQ ID NO: 1493752 - RNA, 19 nt, Artificial Sequence
  Description of Artificial Sequence: Synthetic oligonucleotide
agcacacggcaacauaagg

SEQ ID NO: 1493753 - RNA, 19 nt, Artificial Sequence
  Description of Artificial Sequence: Synthetic oligonucleotide
guaguuuccaaagcuacug

SEQ ID NO: 1493754 - RNA, 19 nt, Artificial Sequence
  Description of Artificial Sequence: Synthetic oligonucleotide
aauauguagucauccuaua

SEQ ID NO: 1493755 - RNA, 19 nt, Artificial Sequence
  Description of Artificial Sequence: Synthetic oligonucleotide
uccacuauugcauuccauu

SEQ ID NO: 1493756 - RNA, 19 nt, Artificial Sequence
  Description of Artificial Sequence: Synthetic oligonucleotide
ugucuaccuuuauaaaaca

SEQ ID NO: 1493757 - RNA, 19 nt, Artificial Sequence
  Description of Artificial Sequence: Synthetic oligonucleotide
aaguucuacccucaaugaa

SEQ ID NO: 1493758 - RNA, 19 nt, Artificial Sequence
  Description of Artificial Sequence: Synthetic oligonucleotide
uuccaaagcuacuguauga

SEQ ID NO: 1493759 - RNA, 19 nt, Artificial Sequence
  Description of Artificial Sequence: Synthetic oligonucleotide
guauaguauaauacuggag

SEQ ID NO: 1493760 - RNA, 19 nt, Artificial Sequence
  Description of Artificial Sequence: Synthetic oligonucleotide
uauaaguucuacccucaau

SEQ ID NO: 1493761 - RNA, 19 nt, Artificial Sequence
  Description of Artificial Sequence: Synthetic oligonucleotide
uucagagauaaaaggguua

SEQ ID NO: 1493762 - RNA, 19 nt, Artificial Sequence
  Description of Artificial Sequence: Synthetic oligonucleotide
uaccguguguucuauuuca

SEQ ID NO: 1493763 - RNA, 19 nt, Artificial Sequence
  Description of Artificial Sequence: Synthetic oligonucleotide
auagagaauagcaucuuga

SEQ ID NO: 1493764 - RNA, 19 nt, Artificial Sequence
  Description of Artificial Sequence: Synthetic oligonucleotide
gaauccacuauugcauucc

SEQ ID NO: 1493765 - RNA, 19 nt, Artificial Sequence
  Description of Artificial Sequence: Synthetic oligonucleotide
uuaggaaaagcagucccga

SEQ ID NO: 1493766 - RNA, 19 nt, Artificial Sequence
  Description of Artificial Sequence: Synthetic oligonucleotide
uguggaauucgccuaccgu

SEQ ID NO: 1493767 - RNA, 19 nt, Artificial Sequence
  Description of Artificial Sequence: Synthetic oligonucleotide
ucuagugaaaggagccugu

SEQ ID NO: 1493768 - RNA, 19 nt, Artificial Sequence
  Description of Artificial Sequence: Synthetic oligonucleotide
uuauccuccuacaggauuu

SEQ ID NO: 1493769 - RNA, 19 nt, Artificial Sequence
  Description of Artificial Sequence: Synthetic oligonucleotide
uugauaacuugcaaauauu

SEQ ID NO: 1493770 - RNA, 19 nt, Artificial Sequence
  Description of Artificial Sequence: Synthetic oligonucleotide
cuugaauggaaacauuuaa

SEQ ID NO: 1493771 - RNA, 19 nt, Artificial Sequence
  Description of Artificial Sequence: Synthetic oligonucleotide
ucaaugaaucaucacucuu

SEQ ID NO: 1493772 - RNA, 19 nt, Artificial Sequence
  Description of Artificial Sequence: Synthetic oligonucleotide
cuauacagcacacggcaac

SEQ ID NO: 1493773 - RNA, 19 nt, Artificial Sequence
  Description of Artificial Sequence: Synthetic oligonucleotide
aaauagcgucccaaaggac

SEQ ID NO: 1493774 - RNA, 19 nt, Artificial Sequence
  Description of Artificial Sequence: Synthetic oligonucleotide
uauugcaugcucuucuaua

SEQ ID NO: 1493775 - RNA, 19 nt, Artificial Sequence
  Description of Artificial Sequence: Synthetic oligonucleotide
gaugaaauagcgucccaaa

SEQ ID NO: 1493776 - RNA, 19 nt, Artificial Sequence
  Description of Artificial Sequence: Synthetic oligonucleotide
auauguagucauccuauaa

SEQ ID NO: 1493777 - RNA, 19 nt, Artificial Sequence
  Description of Artificial Sequence: Synthetic oligonucleotide
uggaauucgccuaccgugu

SEQ ID NO: 1493778 - RNA, 19 nt, Artificial Sequence
  Description of Artificial Sequence: Synthetic oligonucleotide
uggcaauaacagcuaguag

SEQ ID NO: 1493779 - RNA, 19 nt, Artificial Sequence
  Description of Artificial Sequence: Synthetic oligonucleotide
auggaaacauuuaagguaa

SEQ ID NO: 1493780 - RNA, 19 nt, Artificial Sequence
  Description of Artificial Sequence: Synthetic oligonucleotide
uggcuaguugccauuacaa

SEQ ID NO: 1493781 - RNA, 19 nt, Artificial Sequence
  Description of Artificial Sequence: Synthetic oligonucleotide
aauccacuauugcauucca

SEQ ID NO: 1493782 - RNA, 19 nt, Artificial Sequence
  Description of Artificial Sequence: Synthetic oligonucleotide
cagcuaguaguuuccaaag

SEQ ID NO: 1493783 - RNA, 19 nt, Artificial Sequence
  Description of Artificial Sequence: Synthetic oligonucleotide
uaucucauuccauguucag

SEQ ID NO: 1493784 - RNA, 19 nt, Artificial Sequence
  Description of Artificial Sequence: Synthetic oligonucleotide
uccuauaauaugagacuaa

SEQ ID NO: 1493785 - RNA, 19 nt, Artificial Sequence
  Description of Artificial Sequence: Synthetic oligonucleotide
gucccgacacaacagaaug

SEQ ID NO: 1493786 - RNA, 19 nt, Artificial Sequence
  Description of Artificial Sequence: Synthetic oligonucleotide
acuggagugacagaacuga

SEQ ID NO: 1493787 - RNA, 19 nt, Artificial Sequence
  Description of Artificial Sequence: Synthetic oligonucleotide
auguuuagagaaaucuaag

SEQ ID NO: 1493788 - RNA, 19 nt, Artificial Sequence
  Description of Artificial Sequence: Synthetic oligonucleotide
ucguaauuauuuguacagc

SEQ ID NO: 1493789 - RNA, 19 nt, Artificial Sequence
  Description of Artificial Sequence: Synthetic oligonucleotide
guauguguuugccucaaca

SEQ ID NO: 1493790 - RNA, 19 nt, Artificial Sequence
  Description of Artificial Sequence: Synthetic oligonucleotide
caauucauaagaacaguaa

SEQ ID NO: 1493791 - RNA, 19 nt, Artificial Sequence
  Description of Artificial Sequence: Synthetic oligonucleotide
cacggcaacauaaggacuc

SEQ ID NO: 1493792 - RNA, 19 nt, Artificial Sequence
  Description of Artificial Sequence: Synthetic oligonucleotide
ucuuacuaacccgcgcagg

SEQ ID NO: 1493793 - RNA, 19 nt, Artificial Sequence
  Description of Artificial Sequence: Synthetic oligonucleotide
uacaaguuucuggaaacac

SEQ ID NO: 1493794 - RNA, 19 nt, Artificial Sequence
  Description of Artificial Sequence: Synthetic oligonucleotide
guguguucuauuucaugcc

SEQ ID NO: 1493795 - RNA, 19 nt, Artificial Sequence
  Description of Artificial Sequence: Synthetic oligonucleotide
gaaaucuaaggagaaucca

SEQ ID NO: 1493796 - RNA, 19 nt, Artificial Sequence
  Description of Artificial Sequence: Synthetic oligonucleotide
caucguaauuauuuguaca

SEQ ID NO: 1493797 - RNA, 19 nt, Artificial Sequence
  Description of Artificial Sequence: Synthetic oligonucleotide
uugcaugcucuucuauaag

SEQ ID NO: 1493798 - RNA, 19 nt, Artificial Sequence
  Description of Artificial Sequence: Synthetic oligonucleotide
uacccucaaugaaucauca

SEQ ID NO: 1493799 - RNA, 19 nt, Artificial Sequence
  Description of Artificial Sequence: Synthetic oligonucleotide
agaauagcaucuugaaauu

SEQ ID NO: 1493800 - RNA, 19 nt, Artificial Sequence
  Description of Artificial Sequence: Synthetic oligonucleotide
caugcucuucuauaaguuc

SEQ ID NO: 1493801 - RNA, 19 nt, Artificial Sequence
  Description of Artificial Sequence: Synthetic oligonucleotide
acagaaugacauuuguaua

SEQ ID NO: 1493802 - RNA, 19 nt, Artificial Sequence
  Description of Artificial Sequence: Synthetic oligonucleotide
aauuauuuguacagcucau

SEQ ID NO: 1493803 - RNA, 19 nt, Artificial Sequence
  Description of Artificial Sequence: Synthetic oligonucleotide
auuuaucucauuccauguu

SEQ ID NO: 1493804 - RNA, 19 nt, Artificial Sequence
  Description of Artificial Sequence: Synthetic oligonucleotide
uuuuagcagauggaauaug

SEQ ID NO: 1493805 - RNA, 19 nt, Artificial Sequence
  Description of Artificial Sequence: Synthetic oligonucleotide
uuucguacucugguuagca

SEQ ID NO: 1493806 - RNA, 19 nt, Artificial Sequence
  Description of Artificial Sequence: Synthetic oligonucleotide
uucugugcauccaggaaau

SEQ ID NO: 1493807 - RNA, 19 nt, Artificial Sequence
  Description of Artificial Sequence: Synthetic oligonucleotide
ucuugggauuaucucaaua

SEQ ID NO: 1493808 - RNA, 19 nt, Artificial Sequence
  Description of Artificial Sequence: Synthetic oligonucleotide
ggauguaacaucugucuac

SEQ ID NO: 1493809 - RNA, 19 nt, Artificial Sequence
  Description of Artificial Sequence: Synthetic oligonucleotide
cuaguugccauuacaaugu

SEQ ID NO: 1493810 - RNA, 19 nt, Artificial Sequence
  Description of Artificial Sequence: Synthetic oligonucleotide
acagugcacuucuaguaug

SEQ ID NO: 1493811 - RNA, 19 nt, Artificial Sequence
  Description of Artificial Sequence: Synthetic oligonucleotide
auuucguacucugguuagc

SEQ ID NO: 1493812 - RNA, 19 nt, Artificial Sequence
  Description of Artificial Sequence: Synthetic oligonucleotide
caaaggacuuuuguugacc

SEQ ID NO: 1493813 - RNA, 19 nt, Artificial Sequence
  Description of Artificial Sequence: Synthetic oligonucleotide
aaccauucuucccauuauu

SEQ ID NO: 1493814 - RNA, 19 nt, Artificial Sequence
  Description of Artificial Sequence: Synthetic oligonucleotide
agcuacuguaugaagagga

SEQ ID NO: 1493815 - RNA, 19 nt, Artificial Sequence
  Description of Artificial Sequence: Synthetic oligonucleotide
gaaucaucacucuucauuu

SEQ ID NO: 1493816 - RNA, 19 nt, Artificial Sequence
  Description of Artificial Sequence: Synthetic oligonucleotide
aacagcuaguaguuuccaa

SEQ ID NO: 1493817 - RNA, 19 nt, Artificial Sequence
  Description of Artificial Sequence: Synthetic oligonucleotide
guaauuauuuguacagcuc

SEQ ID NO: 1493818 - RNA, 19 nt, Artificial Sequence
  Description of Artificial Sequence: Synthetic oligonucleotide
cuacccucaaugaaucauc

SEQ ID NO: 1493819 - RNA, 19 nt, Artificial Sequence
  Description of Artificial Sequence: Synthetic oligonucleotide
uacuaacccgcgcaggaaa

SEQ ID NO: 1493820 - RNA, 19 nt, Artificial Sequence
  Description of Artificial Sequence: Synthetic oligonucleotide
cguguguucuauuucaugc

SEQ ID NO: 1493821 - RNA, 19 nt, Artificial Sequence
  Description of Artificial Sequence: Synthetic oligonucleotide
aguucuacccucaaugaau

SEQ ID NO: 1493822 - RNA, 19 nt, Artificial Sequence
  Description of Artificial Sequence: Synthetic oligonucleotide
ucaauaacaagugcacauu

SEQ ID NO: 1493823 - RNA, 19 nt, Artificial Sequence
  Description of Artificial Sequence: Synthetic oligonucleotide
uuauugcaugcucuucuau

SEQ ID NO: 1493824 - RNA, 19 nt, Artificial Sequence
  Description of Artificial Sequence: Synthetic oligonucleotide
cagcucauugguccaauag

SEQ ID NO: 1493825 - RNA, 19 nt, Artificial Sequence
  Description of Artificial Sequence: Synthetic oligonucleotide
acuuuuguugacccuuuaa

SEQ ID NO: 1493826 - RNA, 19 nt, Artificial Sequence
  Description of Artificial Sequence: Synthetic oligonucleotide
cuucuaguauguguuugcc

SEQ ID NO: 1493827 - RNA, 19 nt, Artificial Sequence
  Description of Artificial Sequence: Synthetic oligonucleotide
acacaccauuuucaaaugu

SEQ ID NO: 1493828 - RNA, 19 nt, Artificial Sequence
  Description of Artificial Sequence: Synthetic oligonucleotide
aguauguguuugccucaac

SEQ ID NO: 1493829 - RNA, 19 nt, Artificial Sequence
  Description of Artificial Sequence: Synthetic oligonucleotide
auaugagacuaauuuuauu

SEQ ID NO: 1493830 - RNA, 19 nt, Artificial Sequence
  Description of Artificial Sequence: Synthetic oligonucleotide
auggcaauaacagcuagua

SEQ ID NO: 1493831 - RNA, 19 nt, Artificial Sequence
  Description of Artificial Sequence: Synthetic oligonucleotide
acaaguuucuggaaacacu

SEQ ID NO: 1493832 - RNA, 19 nt, Artificial Sequence
  Description of Artificial Sequence: Synthetic oligonucleotide
agauuguaaggaugaaaua

SEQ ID NO: 1493833 - RNA, 19 nt, Artificial Sequence
  Description of Artificial Sequence: Synthetic oligonucleotide
gucacuagaaugucucauc

SEQ ID NO: 1493834 - RNA, 19 nt, Artificial Sequence
  Description of Artificial Sequence: Synthetic oligonucleotide
cuuacuaacccgcgcagga

SEQ ID NO: 1493835 - RNA, 19 nt, Artificial Sequence
  Description of Artificial Sequence: Synthetic oligonucleotide
cuauuucaugcccucagga

SEQ ID NO: 1493836 - RNA, 19 nt, Artificial Sequence
  Description of Artificial Sequence: Synthetic oligonucleotide
acccucaaugaaucaucac

SEQ ID NO: 1493837 - RNA, 19 nt, Artificial Sequence
  Description of Artificial Sequence: Synthetic oligonucleotide
cuacuguaugaagaggaug

SEQ ID NO: 1493838 - RNA, 19 nt, Artificial Sequence
  Description of Artificial Sequence: Synthetic oligonucleotide
ccucaaugaaucaucacuc

SEQ ID NO: 1493839 - RNA, 19 nt, Artificial Sequence
  Description of Artificial Sequence: Synthetic oligonucleotide
acuggcuaguugccauuac

SEQ ID NO: 1493840 - RNA, 19 nt, Artificial Sequence
  Description of Artificial Sequence: Synthetic oligonucleotide
ucccgacacaacagaauga

SEQ ID NO: 1493841 - RNA, 19 nt, Artificial Sequence
  Description of Artificial Sequence: Synthetic oligonucleotide
uucaguuucgagguaggua

SEQ ID NO: 1493842 - RNA, 19 nt, Artificial Sequence
  Description of Artificial Sequence: Synthetic oligonucleotide
agucauccuauaauaugag

SEQ ID NO: 1493843 - RNA, 19 nt, Artificial Sequence
  Description of Artificial Sequence: Synthetic oligonucleotide
uugacuggcuaguugccau

SEQ ID NO: 1493844 - RNA, 19 nt, Artificial Sequence
  Description of Artificial Sequence: Synthetic oligonucleotide
acauucuuacuaacccgcg

SEQ ID NO: 1493845 - RNA, 19 nt, Artificial Sequence
  Description of Artificial Sequence: Synthetic oligonucleotide
cauccuauaauaugagacu

SEQ ID NO: 1493846 - RNA, 19 nt, Artificial Sequence
  Description of Artificial Sequence: Synthetic oligonucleotide
caucacuauacagcacacg

SEQ ID NO: 1493847 - RNA, 19 nt, Artificial Sequence
  Description of Artificial Sequence: Synthetic oligonucleotide
gucauccuauaauaugaga

SEQ ID NO: 1493848 - RNA, 19 nt, Artificial Sequence
  Description of Artificial Sequence: Synthetic oligonucleotide
cuaguaguuuccaaagcua

SEQ ID NO: 1493849 - RNA, 19 nt, Artificial Sequence
  Description of Artificial Sequence: Synthetic oligonucleotide
aucuaaggagaauccacua

SEQ ID NO: 1493850 - RNA, 19 nt, Artificial Sequence
  Description of Artificial Sequence: Synthetic oligonucleotide
aauaggccagucacuagaa

SEQ ID NO: 1493851 - RNA, 19 nt, Artificial Sequence
  Description of Artificial Sequence: Synthetic oligonucleotide
cuguggaauucgccuaccg

SEQ ID NO: 1493852 - RNA, 19 nt, Artificial Sequence
  Description of Artificial Sequence: Synthetic oligonucleotide
aaaccaagggaaacuuuau

SEQ ID NO: 1493853 - RNA, 19 nt, Artificial Sequence
  Description of Artificial Sequence: Synthetic oligonucleotide
ggagacauguccuuguuua

SEQ ID NO: 1493854 - RNA, 19 nt, Artificial Sequence
  Description of Artificial Sequence: Synthetic oligonucleotide
ggguuaaccauucuuccca

SEQ ID NO: 1493855 - RNA, 19 nt, Artificial Sequence
  Description of Artificial Sequence: Synthetic oligonucleotide
ugcauuccauugucaaccu

SEQ ID NO: 1493856 - RNA, 19 nt, Artificial Sequence
  Description of Artificial Sequence: Synthetic oligonucleotide
uucuagaaucuugggauua

SEQ ID NO: 1493857 - RNA, 19 nt, Artificial Sequence
  Description of Artificial Sequence: Synthetic oligonucleotide
acuaacccgcgcaggaaac

SEQ ID NO: 1493858 - RNA, 19 nt, Artificial Sequence
  Description of Artificial Sequence: Synthetic oligonucleotide
aggauguaacaucugucua

SEQ ID NO: 1493859 - RNA, 19 nt, Artificial Sequence
  Description of Artificial Sequence: Synthetic oligonucleotide
aacaucugucuaccuuuau

SEQ ID NO: 1493860 - RNA, 19 nt, Artificial Sequence
  Description of Artificial Sequence: Synthetic oligonucleotide
aauucgccuaccguguguu

SEQ ID NO: 1493861 - RNA, 19 nt, Artificial Sequence
  Description of Artificial Sequence: Synthetic oligonucleotide
agacauguccuuguuuaca

SEQ ID NO: 1493862 - RNA, 19 nt, Artificial Sequence
  Description of Artificial Sequence: Synthetic oligonucleotide
ccuacaggauuugugaggc

SEQ ID NO: 1493863 - RNA, 19 nt, Artificial Sequence
  Description of Artificial Sequence: Synthetic oligonucleotide
uucgccuaccguguguucu

SEQ ID NO: 1493864 - RNA, 19 nt, Artificial Sequence
  Description of Artificial Sequence: Synthetic oligonucleotide
aguaguuuccaaagcuacu

SEQ ID NO: 1493865 - RNA, 19 nt, Artificial Sequence
  Description of Artificial Sequence: Synthetic oligonucleotide
acacucaacuucaguuucg

SEQ ID NO: 1493866 - RNA, 19 nt, Artificial Sequence
  Description of Artificial Sequence: Synthetic oligonucleotide
gcaacauaaggacucuuuc

SEQ ID NO: 1493867 - RNA, 19 nt, Artificial Sequence
  Description of Artificial Sequence: Synthetic oligonucleotide
cauuccuguguauuaaacu

SEQ ID NO: 1493868 - RNA, 19 nt, Artificial Sequence
  Description of Artificial Sequence: Synthetic oligonucleotide
acagcacacggcaacauaa

SEQ ID NO: 1493869 - RNA, 19 nt, Artificial Sequence
  Description of Artificial Sequence: Synthetic oligonucleotide
guucuacccucaaugaauc

SEQ ID NO: 1493870 - RNA, 19 nt, Artificial Sequence
  Description of Artificial Sequence: Synthetic oligonucleotide
agucacuagaaugucucau

SEQ ID NO: 1493871 - RNA, 19 nt, Artificial Sequence
  Description of Artificial Sequence: Synthetic oligonucleotide
cuagauuguaaggaugaaa

SEQ ID NO: 1493872 - RNA, 19 nt, Artificial Sequence
  Description of Artificial Sequence: Synthetic oligonucleotide
agagaaaucuaaggagaau

SEQ ID NO: 1493873 - RNA, 19 nt, Artificial Sequence
  Description of Artificial Sequence: Synthetic oligonucleotide
uaacagcuaguaguuucca

SEQ ID NO: 1493874 - RNA, 19 nt, Artificial Sequence
  Description of Artificial Sequence: Synthetic oligonucleotide
ggacuuuauuauaaauuac

SEQ ID NO: 1493875 - RNA, 19 nt, Artificial Sequence
  Description of Artificial Sequence: Synthetic oligonucleotide
ccagucacuagaaugucuc

SEQ ID NO: 1493876 - RNA, 19 nt, Artificial Sequence
  Description of Artificial Sequence: Synthetic oligonucleotide
ccacuauugcauuccauug

SEQ ID NO: 1493877 - RNA, 19 nt, Artificial Sequence
  Description of Artificial Sequence: Synthetic oligonucleotide
cagcacacggcaacauaag

SEQ ID NO: 1493878 - RNA, 19 nt, Artificial Sequence
  Description of Artificial Sequence: Synthetic oligonucleotide
gcuaguaguuuccaaagcu

SEQ ID NO: 1493879 - RNA, 19 nt, Artificial Sequence
  Description of Artificial Sequence: Synthetic oligonucleotide
cuaccguguguucuauuuc

SEQ ID NO: 1493880 - RNA, 19 nt, Artificial Sequence
  Description of Artificial Sequence: Synthetic oligonucleotide
gguaaaggacuuuauuaua

SEQ ID NO: 1493881 - RNA, 19 nt, Artificial Sequence
  Description of Artificial Sequence: Synthetic oligonucleotide
uggagacauguccuuguuu

SEQ ID NO: 1493882 - RNA, 19 nt, Artificial Sequence
  Description of Artificial Sequence: Synthetic oligonucleotide
cauuccauugucaaccuuu

SEQ ID NO: 1493883 - RNA, 19 nt, Artificial Sequence
  Description of Artificial Sequence: Synthetic oligonucleotide
auguaacaucugucuaccu

SEQ ID NO: 1493884 - RNA, 19 nt, Artificial Sequence
  Description of Artificial Sequence: Synthetic oligonucleotide
auucgccuaccguguguuc

SEQ ID NO: 1493885 - RNA, 19 nt, Artificial Sequence
  Description of Artificial Sequence: Synthetic oligonucleotide
uauccuccuacaggauuug

SEQ ID NO: 1493886 - RNA, 19 nt, Artificial Sequence
  Description of Artificial Sequence: Synthetic oligonucleotide
gcucauugguccaauagca

SEQ ID NO: 1493887 - RNA, 19 nt, Artificial Sequence
  Description of Artificial Sequence: Synthetic oligonucleotide
cuucuauaaguucuacccu

SEQ ID NO: 1493888 - RNA, 19 nt, Artificial Sequence
  Description of Artificial Sequence: Synthetic oligonucleotide
ccaaagcuacuguaugaag

SEQ ID NO: 1493889 - RNA, 19 nt, Artificial Sequence
  Description of Artificial Sequence: Synthetic oligonucleotide
cuggcuaguugccauuaca

SEQ ID NO: 1493890 - RNA, 19 nt, Artificial Sequence
  Description of Artificial Sequence: Synthetic oligonucleotide
uggaaacauuuaagguaau

SEQ ID NO: 1493891 - RNA, 19 nt, Artificial Sequence
  Description of Artificial Sequence: Synthetic oligonucleotide
uuacuaacccgcgcaggaa

SEQ ID NO: 1493892 - RNA, 19 nt, Artificial Sequence
  Description of Artificial Sequence: Synthetic oligonucleotide
uaguauguguuugccucaa

SEQ ID NO: 1493893 - RNA, 19 nt, Artificial Sequence
  Description of Artificial Sequence: Synthetic oligonucleotide
auaggccagucacuagaau

SEQ ID NO: 1493894 - RNA, 19 nt, Artificial Sequence
  Description of Artificial Sequence: Synthetic oligonucleotide
cucaaugaaucaucacucu

SEQ ID NO: 1493895 - RNA, 19 nt, Artificial Sequence
  Description of Artificial Sequence: Synthetic oligonucleotide
cagagauaaaaggguuaac

SEQ ID NO: 1493896 - RNA, 19 nt, Artificial Sequence
  Description of Artificial Sequence: Synthetic oligonucleotide
cuccauauacauuaaucuu

SEQ ID NO: 1493897 - RNA, 19 nt, Artificial Sequence
  Description of Artificial Sequence: Synthetic oligonucleotide
agugcacuucuaguaugug

SEQ ID NO: 1493898 - RNA, 19 nt, Artificial Sequence
  Description of Artificial Sequence: Synthetic oligonucleotide
cuagaaugucucauccugu

SEQ ID NO: 1493899 - RNA, 19 nt, Artificial Sequence
  Description of Artificial Sequence: Synthetic oligonucleotide
augaaucaucacucuucau

SEQ ID NO: 1493900 - RNA, 19 nt, Artificial Sequence
  Description of Artificial Sequence: Synthetic oligonucleotide
ggggaaacacucaacuuca

SEQ ID NO: 1493901 - RNA, 19 nt, Artificial Sequence
  Description of Artificial Sequence: Synthetic oligonucleotide
gauggcaauaacagcuagu

SEQ ID NO: 1493902 - RNA, 19 nt, Artificial Sequence
  Description of Artificial Sequence: Synthetic oligonucleotide
gucacacaccauuuucaaa

SEQ ID NO: 1493903 - RNA, 19 nt, Artificial Sequence
  Description of Artificial Sequence: Synthetic oligonucleotide
uaguugccauuacaauguu

SEQ ID NO: 1493904 - RNA, 19 nt, Artificial Sequence
  Description of Artificial Sequence: Synthetic oligonucleotide
uaacccgcgcaggaaacau

SEQ ID NO: 1493905 - RNA, 19 nt, Artificial Sequence
  Description of Artificial Sequence: Synthetic oligonucleotide
cacuauugcauuccauugu

SEQ ID NO: 1493906 - RNA, 19 nt, Artificial Sequence
  Description of Artificial Sequence: Synthetic oligonucleotide
gugcacuucuaguaugugu

SEQ ID NO: 1493907 - RNA, 19 nt, Artificial Sequence
  Description of Artificial Sequence: Synthetic oligonucleotide
agccuguggaauucgccua

SEQ ID NO: 1493908 - RNA, 19 nt, Artificial Sequence
  Description of Artificial Sequence: Synthetic oligonucleotide
gagaauccacuauugcauu

SEQ ID NO: 1493909 - RNA, 19 nt, Artificial Sequence
  Description of Artificial Sequence: Synthetic oligonucleotide
gcaauucauaagaacagua

SEQ ID NO: 1493910 - RNA, 19 nt, Artificial Sequence
  Description of Artificial Sequence: Synthetic oligonucleotide
auagcgucccaaaggacuu

SEQ ID NO: 1493911 - RNA, 19 nt, Artificial Sequence
  Description of Artificial Sequence: Synthetic oligonucleotide
cuuugauaacuugcaaaua

SEQ ID NO: 1493912 - RNA, 19 nt, Artificial Sequence
  Description of Artificial Sequence: Synthetic oligonucleotide
guucuauuucaugcccuca

SEQ ID NO: 1493913 - RNA, 19 nt, Artificial Sequence
  Description of Artificial Sequence: Synthetic oligonucleotide
aggucgacuguuacauuca

SEQ ID NO: 1493914 - RNA, 19 nt, Artificial Sequence
  Description of Artificial Sequence: Synthetic oligonucleotide
cccgacacaacagaaugac

SEQ ID NO: 1493915 - RNA, 19 nt, Artificial Sequence
  Description of Artificial Sequence: Synthetic oligonucleotide
cuccaggauguaacaucug

SEQ ID NO: 1493916 - RNA, 19 nt, Artificial Sequence
  Description of Artificial Sequence: Synthetic oligonucleotide
cuauaaguucuacccucaa

SEQ ID NO: 1493917 - RNA, 19 nt, Artificial Sequence
  Description of Artificial Sequence: Synthetic oligonucleotide
guuagcaaucaaaaugguu

SEQ ID NO: 1493918 - RNA, 19 nt, Artificial Sequence
  Description of Artificial Sequence: Synthetic oligonucleotide
gaauucgccuaccgugugu

SEQ ID NO: 1493919 - RNA, 19 nt, Artificial Sequence
  Description of Artificial Sequence: Synthetic oligonucleotide
gcacacggcaacauaagga

SEQ ID NO: 1493920 - RNA, 19 nt, Artificial Sequence
  Description of Artificial Sequence: Synthetic oligonucleotide
ggaauucgccuaccgugug

SEQ ID NO: 1493921 - RNA, 19 nt, Artificial Sequence
  Description of Artificial Sequence: Synthetic oligonucleotide
acacggcaacauaaggacu

SEQ ID NO: 1493922 - RNA, 19 nt, Artificial Sequence
  Description of Artificial Sequence: Synthetic oligonucleotide
aucuugggauuaucucaau

SEQ ID NO: 1493923 - RNA, 19 nt, Artificial Sequence
  Description of Artificial Sequence: Synthetic oligonucleotide
ggaugaaauagcgucccaa

SEQ ID NO: 1493924 - RNA, 19 nt, Artificial Sequence
  Description of Artificial Sequence: Synthetic oligonucleotide
caggauuugugaggcagga

SEQ ID NO: 1493925 - RNA, 19 nt, Artificial Sequence
  Description of Artificial Sequence: Synthetic oligonucleotide
ccugaauuuuauauuauuu

SEQ ID NO: 1493926 - RNA, 19 nt, Artificial Sequence
  Description of Artificial Sequence: Synthetic oligonucleotide
auggaggcaaagauuuguu

SEQ ID NO: 1493927 - RNA, 19 nt, Artificial Sequence
  Description of Artificial Sequence: Synthetic oligonucleotide
ccaucacuauacagcacac

SEQ ID NO: 1493928 - RNA, 19 nt, Artificial Sequence
  Description of Artificial Sequence: Synthetic oligonucleotide
ggucgacuguuacauucac

SEQ ID NO: 1493929 - RNA, 19 nt, Artificial Sequence
  Description of Artificial Sequence: Synthetic oligonucleotide
gacuuuuguugacccuuua

SEQ ID NO: 1493930 - RNA, 19 nt, Artificial Sequence
  Description of Artificial Sequence: Synthetic oligonucleotide
cugaggucgacuguuacau

SEQ ID NO: 1493931 - RNA, 19 nt, Artificial Sequence
  Description of Artificial Sequence: Synthetic oligonucleotide
ucgccuaccguguguucua

SEQ ID NO: 1493932 - RNA, 19 nt, Artificial Sequence
  Description of Artificial Sequence: Synthetic oligonucleotide
cagcagggacugcuuuuag

SEQ ID NO: 1493933 - RNA, 19 nt, Artificial Sequence
  Description of Artificial Sequence: Synthetic oligonucleotide
acggcaacauaaggacucu

SEQ ID NO: 1493934 - RNA, 19 nt, Artificial Sequence
  Description of Artificial Sequence: Synthetic oligonucleotide
gucgacuguuacauucaca

SEQ ID NO: 1493935 - RNA, 19 nt, Artificial Sequence
  Description of Artificial Sequence: Synthetic oligonucleotide
cacuagaaugucucauccu

SEQ ID NO: 1493936 - RNA, 19 nt, Artificial Sequence
  Description of Artificial Sequence: Synthetic oligonucleotide
uugacccuuuaaguucuuu

SEQ ID NO: 1493937 - RNA, 19 nt, Artificial Sequence
  Description of Artificial Sequence: Synthetic oligonucleotide
cagucccgacacaacagaa

SEQ ID NO: 1493938 - RNA, 19 nt, Artificial Sequence
  Description of Artificial Sequence: Synthetic oligonucleotide
ccguguguucuauuucaug

SEQ ID NO: 1493939 - RNA, 19 nt, Artificial Sequence
  Description of Artificial Sequence: Synthetic oligonucleotide
cucauugguccaauagcau

SEQ ID NO: 1493940 - RNA, 19 nt, Artificial Sequence
  Description of Artificial Sequence: Synthetic oligonucleotide
gcaauaacagcuaguaguu

SEQ ID NO: 1493941 - RNA, 19 nt, Artificial Sequence
  Description of Artificial Sequence: Synthetic oligonucleotide
ccgcgcaggaaacaucuug

SEQ ID NO: 1493942 - RNA, 19 nt, Artificial Sequence
  Description of Artificial Sequence: Synthetic oligonucleotide
gacuggcuaguugccauua

SEQ ID NO: 1493943 - RNA, 19 nt, Artificial Sequence
  Description of Artificial Sequence: Synthetic oligonucleotide
gccuguggaauucgccuac

SEQ ID NO: 1493944 - RNA, 19 nt, Artificial Sequence
  Description of Artificial Sequence: Synthetic oligonucleotide
cuaacccgcgcaggaaaca

SEQ ID NO: 1493945 - RNA, 19 nt, Artificial Sequence
  Description of Artificial Sequence: Synthetic oligonucleotide
gaacugaggucgacuguua

SEQ ID NO: 1493946 - RNA, 19 nt, Artificial Sequence
  Description of Artificial Sequence: Synthetic oligonucleotide
auccacuauugcauuccau

SEQ ID NO: 1493947 - RNA, 19 nt, Artificial Sequence
  Description of Artificial Sequence: Synthetic oligonucleotide
gcucuucuauaaguucuac

SEQ ID NO: 1493948 - RNA, 19 nt, Artificial Sequence
  Description of Artificial Sequence: Synthetic oligonucleotide
accguguguucuauuucau

SEQ ID NO: 1493949 - RNA, 19 nt, Artificial Sequence
  Description of Artificial Sequence: Synthetic oligonucleotide
caguuucgagguagguaaa

SEQ ID NO: 1493950 - RNA, 19 nt, Artificial Sequence
  Description of Artificial Sequence: Synthetic oligonucleotide
ggcuaguugccauuacaau

SEQ ID NO: 1493951 - RNA, 19 nt, Artificial Sequence
  Description of Artificial Sequence: Synthetic oligonucleotide
cgcgcaggaaacaucuuga

SEQ ID NO: 1493952 - RNA, 19 nt, Artificial Sequence
  Description of Artificial Sequence: Synthetic oligonucleotide
gguuagcaaucaaaauggu

SEQ ID NO: 1493953 - RNA, 19 nt, Artificial Sequence
  Description of Artificial Sequence: Synthetic oligonucleotide
uagcgucccaaaggacuuu

SEQ ID NO: 1493954 - RNA, 19 nt, Artificial Sequence
  Description of Artificial Sequence: Synthetic oligonucleotide
gcgcaggaaacaucuugaa

SEQ ID NO: 1493955 - RNA, 19 nt, Artificial Sequence
  Description of Artificial Sequence: Synthetic oligonucleotide
ccgacacaacagaaugaca

SEQ ID NO: 1493956 - RNA, 19 nt, Artificial Sequence
  Description of Artificial Sequence: Synthetic oligonucleotide
cuguuacaucguaauuauu

SEQ ID NO: 1493957 - RNA, 19 nt, Artificial Sequence
  Description of Artificial Sequence: Synthetic oligonucleotide
gcuacuguaugaagaggau

SEQ ID NO: 1493958 - RNA, 19 nt, Artificial Sequence
  Description of Artificial Sequence: Synthetic oligonucleotide
gcgucccaaaggacuuuug

SEQ ID NO: 1493959 - RNA, 19 nt, Artificial Sequence
  Description of Artificial Sequence: Synthetic oligonucleotide
cucauccugugaagacaau

SEQ ID NO: 1493960 - RNA, 19 nt, Artificial Sequence
  Description of Artificial Sequence: Synthetic oligonucleotide
cgucccaaaggacuuuugu

SEQ ID NO: 1493961 - RNA, 19 nt, Artificial Sequence
  Description of Artificial Sequence: Synthetic oligonucleotide
cugucuugacuggcuaguu

SEQ ID NO: 1493962 - RNA, 19 nt, Artificial Sequence
  Description of Artificial Sequence: Synthetic oligonucleotide
gcauuccauugucaaccuu

SEQ ID NO: 1493963 - RNA, 19 nt, Artificial Sequence
  Description of Artificial Sequence: Synthetic oligonucleotide
guugacccuuuaaguucuu

SEQ ID NO: 1493964 - RNA, 19 nt, Artificial Sequence
  Description of Artificial Sequence: Synthetic oligonucleotide
gccuaccguguguucuauu

SEQ ID NO: 1493965 - RNA, 19 nt, Artificial Sequence
  Description of Artificial Sequence: Synthetic oligonucleotide
cccgcgcaggaaacaucuu

SEQ ID NO: 1493966 - RNA, 19 nt, Artificial Sequence
  Description of Artificial Sequence: Synthetic oligonucleotide
cggcaacauaaggacucuu

SEQ ID NO: 1493967 - RNA, 19 nt, Artificial Sequence
  Description of Artificial Sequence: Synthetic oligonucleotide
cgccuaccguguguucuau

SEQ ID NO: 1493968 - RNA, 19 nt, Artificial Sequence
  Description of Artificial Sequence: Synthetic oligonucleotide
aaugaagucaaacaaaacc

SEQ ID NO: 1493969 - RNA, 19 nt, Artificial Sequence
  Description of Artificial Sequence: Synthetic oligonucleotide
ugaguuaagaaauuuauga

SEQ ID NO: 1493970 - RNA, 19 nt, Artificial Sequence
  Description of Artificial Sequence: Synthetic oligonucleotide
aagacccacaaccaaaccc

SEQ ID NO: 1493971 - RNA, 19 nt, Artificial Sequence
  Description of Artificial Sequence: Synthetic oligonucleotide
aauauucacgaacacguuc

SEQ ID NO: 1493972 - RNA, 19 nt, Artificial Sequence
  Description of Artificial Sequence: Synthetic oligonucleotide
cauucaaagacccacaacc

SEQ ID NO: 1493973 - RNA, 19 nt, Artificial Sequence
  Description of Artificial Sequence: Synthetic oligonucleotide
uaagaaaucagaauacaug

SEQ ID NO: 1493974 - RNA, 19 nt, Artificial Sequence
  Description of Artificial Sequence: Synthetic oligonucleotide
agagaaugaauucauacug

SEQ ID NO: 1493975 - RNA, 19 nt, Artificial Sequence
  Description of Artificial Sequence: Synthetic oligonucleotide
uauuugacacuauugaaug

SEQ ID NO: 1493976 - RNA, 19 nt, Artificial Sequence
  Description of Artificial Sequence: Synthetic oligonucleotide
uuuggauaggccauggaag

SEQ ID NO: 1493977 - RNA, 19 nt, Artificial Sequence
  Description of Artificial Sequence: Synthetic oligonucleotide
uuaaugaagucaaacaaaa

SEQ ID NO: 1493978 - RNA, 19 nt, Artificial Sequence
  Description of Artificial Sequence: Synthetic oligonucleotide
auagcaaugacacugaguu

SEQ ID NO: 1493979 - RNA, 19 nt, Artificial Sequence
  Description of Artificial Sequence: Synthetic oligonucleotide
uucacgaacacguucauca

SEQ ID NO: 1493980 - RNA, 19 nt, Artificial Sequence
  Description of Artificial Sequence: Synthetic oligonucleotide
aaaugaucuagacgcuugc

SEQ ID NO: 1493981 - RNA, 19 nt, Artificial Sequence
  Description of Artificial Sequence: Synthetic oligonucleotide
uuauauagagccauuucug

SEQ ID NO: 1493982 - RNA, 19 nt, Artificial Sequence
  Description of Artificial Sequence: Synthetic oligonucleotide
agaauuaaugaagucaaac

SEQ ID NO: 1493983 - RNA, 19 nt, Artificial Sequence
  Description of Artificial Sequence: Synthetic oligonucleotide
aaggagguaauauucacga

SEQ ID NO: 1493984 - RNA, 19 nt, Artificial Sequence
  Description of Artificial Sequence: Synthetic oligonucleotide
gaauuaaugaagucaaaca

SEQ ID NO: 1493985 - RNA, 19 nt, Artificial Sequence
  Description of Artificial Sequence: Synthetic oligonucleotide
augagcgagaaguugauuc

SEQ ID NO: 1493986 - RNA, 19 nt, Artificial Sequence
  Description of Artificial Sequence: Synthetic oligonucleotide
aauacguuggcuugggccu

SEQ ID NO: 1493987 - RNA, 19 nt, Artificial Sequence
  Description of Artificial Sequence: Synthetic oligonucleotide
aucacguuauucuuucgcc

SEQ ID NO: 1493988 - RNA, 19 nt, Artificial Sequence
  Description of Artificial Sequence: Synthetic oligonucleotide
aaugacacugaguuaagaa

SEQ ID NO: 1493989 - RNA, 19 nt, Artificial Sequence
  Description of Artificial Sequence: Synthetic oligonucleotide
aaaucagaauacaugauga

SEQ ID NO: 1493990 - RNA, 19 nt, Artificial Sequence
  Description of Artificial Sequence: Synthetic oligonucleotide
agcaacgagauuuggauag

SEQ ID NO: 1493991 - RNA, 19 nt, Artificial Sequence
  Description of Artificial Sequence: Synthetic oligonucleotide
uuuaagagaaugaauucau

SEQ ID NO: 1493992 - RNA, 19 nt, Artificial Sequence
  Description of Artificial Sequence: Synthetic oligonucleotide
cuauugaaugcaaagcaag

SEQ ID NO: 1493993 - RNA, 19 nt, Artificial Sequence
  Description of Artificial Sequence: Synthetic oligonucleotide
uuaagaaauuuaugaagug

SEQ ID NO: 1493994 - RNA, 19 nt, Artificial Sequence
  Description of Artificial Sequence: Synthetic oligonucleotide
uuugcgaugccauagcaac

SEQ ID NO: 1493995 - RNA, 19 nt, Artificial Sequence
  Description of Artificial Sequence: Synthetic oligonucleotide
ucuaagcagauaccaaucc

SEQ ID NO: 1493996 - RNA, 19 nt, Artificial Sequence
  Description of Artificial Sequence: Synthetic oligonucleotide
aaagacccacaaccaaacc

SEQ ID NO: 1493997 - RNA, 19 nt, Artificial Sequence
  Description of Artificial Sequence: Synthetic oligonucleotide
uacagcaauuauuugacac

SEQ ID NO: 1493998 - RNA, 19 nt, Artificial Sequence
  Description of Artificial Sequence: Synthetic oligonucleotide
uaagcagauaccaauccac

SEQ ID NO: 1493999 - RNA, 19 nt, Artificial Sequence
  Description of Artificial Sequence: Synthetic oligonucleotide
ugaaaucagcugauggcgg

SEQ ID NO: 1494000 - RNA, 19 nt, Artificial Sequence
  Description of Artificial Sequence: Synthetic oligonucleotide
ucaaucucuucuaagcaga

SEQ ID NO: 1494001 - RNA, 19 nt, Artificial Sequence
  Description of Artificial Sequence: Synthetic oligonucleotide
uuuaugaaguguucucgag

SEQ ID NO: 1494002 - RNA, 19 nt, Artificial Sequence
  Description of Artificial Sequence: Synthetic oligonucleotide
auuuuagccugucuuugcg

SEQ ID NO: 1494003 - RNA, 19 nt, Artificial Sequence
  Description of Artificial Sequence: Synthetic oligonucleotide
guagcugaaacucagccac

SEQ ID NO: 1494004 - RNA, 19 nt, Artificial Sequence
  Description of Artificial Sequence: Synthetic oligonucleotide
guuccgauaacauuccagc

SEQ ID NO: 1494005 - RNA, 19 nt, Artificial Sequence
  Description of Artificial Sequence: Synthetic oligonucleotide
guugauuccucucuuggag

SEQ ID NO: 1494006 - RNA, 19 nt, Artificial Sequence
  Description of Artificial Sequence: Synthetic oligonucleotide
auagcaacgagauuuggau

SEQ ID NO: 1494007 - RNA, 19 nt, Artificial Sequence
  Description of Artificial Sequence: Synthetic oligonucleotide
ugugaugcucuuuugaaau

SEQ ID NO: 1494008 - RNA, 19 nt, Artificial Sequence
  Description of Artificial Sequence: Synthetic oligonucleotide
aacaaaucaaguuccgaua

SEQ ID NO: 1494009 - RNA, 19 nt, Artificial Sequence
  Description of Artificial Sequence: Synthetic oligonucleotide
auuucggcugaacaaauca

SEQ ID NO: 1494010 - RNA, 19 nt, Artificial Sequence
  Description of Artificial Sequence: Synthetic oligonucleotide
uucggcugaacaaaucaag

SEQ ID NO: 1494011 - RNA, 19 nt, Artificial Sequence
  Description of Artificial Sequence: Synthetic oligonucleotide
aacgagauuuggauaggcc

SEQ ID NO: 1494012 - RNA, 19 nt, Artificial Sequence
  Description of Artificial Sequence: Synthetic oligonucleotide
uaggguacagcaauuauuu

SEQ ID NO: 1494013 - RNA, 19 nt, Artificial Sequence
  Description of Artificial Sequence: Synthetic oligonucleotide
acaaccuaugcuccaacuc

SEQ ID NO: 1494014 - RNA, 19 nt, Artificial Sequence
  Description of Artificial Sequence: Synthetic oligonucleotide
guaugaaggguuucauugg

SEQ ID NO: 1494015 - RNA, 19 nt, Artificial Sequence
  Description of Artificial Sequence: Synthetic oligonucleotide
auucuuucgcccuucagga

SEQ ID NO: 1494016 - RNA, 19 nt, Artificial Sequence
  Description of Artificial Sequence: Synthetic oligonucleotide
uaugaaggguuucauugga

SEQ ID NO: 1494017 - RNA, 19 nt, Artificial Sequence
  Description of Artificial Sequence: Synthetic oligonucleotide
cugauacccacauuugugc

SEQ ID NO: 1494018 - RNA, 19 nt, Artificial Sequence
  Description of Artificial Sequence: Synthetic oligonucleotide
gaaggagguaauauucacg

SEQ ID NO: 1494019 - RNA, 19 nt, Artificial Sequence
  Description of Artificial Sequence: Synthetic oligonucleotide
auaaccagcuccaaauacg

SEQ ID NO: 1494020 - RNA, 19 nt, Artificial Sequence
  Description of Artificial Sequence: Synthetic oligonucleotide
uggauaaccagcuccaaau

SEQ ID NO: 1494021 - RNA, 19 nt, Artificial Sequence
  Description of Artificial Sequence: Synthetic oligonucleotide
aucagaauacaugaugaag

SEQ ID NO: 1494022 - RNA, 19 nt, Artificial Sequence
  Description of Artificial Sequence: Synthetic oligonucleotide
acaaccaaacccuacugcu

SEQ ID NO: 1494023 - RNA, 19 nt, Artificial Sequence
  Description of Artificial Sequence: Synthetic oligonucleotide
uuaccuaggguacagcaau

SEQ ID NO: 1494024 - RNA, 19 nt, Artificial Sequence
  Description of Artificial Sequence: Synthetic oligonucleotide
ucacucacugucauaguug

SEQ ID NO: 1494025 - RNA, 19 nt, Artificial Sequence
  Description of Artificial Sequence: Synthetic oligonucleotide
gguaauauucacgaacacg

SEQ ID NO: 1494026 - RNA, 19 nt, Artificial Sequence
  Description of Artificial Sequence: Synthetic oligonucleotide
auuuaugaaguguucucga

SEQ ID NO: 1494027 - RNA, 19 nt, Artificial Sequence
  Description of Artificial Sequence: Synthetic oligonucleotide
uuauccuggacugucccgg

SEQ ID NO: 1494028 - RNA, 19 nt, Artificial Sequence
  Description of Artificial Sequence: Synthetic oligonucleotide
uuggauaggccauggaaga

SEQ ID NO: 1494029 - RNA, 19 nt, Artificial Sequence
  Description of Artificial Sequence: Synthetic oligonucleotide
guuauauagagccauuucu

SEQ ID NO: 1494030 - RNA, 19 nt, Artificial Sequence
  Description of Artificial Sequence: Synthetic oligonucleotide
aacgcuggcaccaucaagu

SEQ ID NO: 1494031 - RNA, 19 nt, Artificial Sequence
  Description of Artificial Sequence: Synthetic oligonucleotide
uauuuuagccugucuuugc

SEQ ID NO: 1494032 - RNA, 19 nt, Artificial Sequence
  Description of Artificial Sequence: Synthetic oligonucleotide
uaccaauccaccuccgaag

SEQ ID NO: 1494033 - RNA, 19 nt, Artificial Sequence
  Description of Artificial Sequence: Synthetic oligonucleotide
agaaauuuaugaaguguuc

SEQ ID NO: 1494034 - RNA, 19 nt, Artificial Sequence
  Description of Artificial Sequence: Synthetic oligonucleotide
ugaaggagguaauauucac

SEQ ID NO: 1494035 - RNA, 19 nt, Artificial Sequence
  Description of Artificial Sequence: Synthetic oligonucleotide
cugaguuaagaaauuuaug

SEQ ID NO: 1494036 - RNA, 19 nt, Artificial Sequence
  Description of Artificial Sequence: Synthetic oligonucleotide
uaaccagcuccaaauacgu

SEQ ID NO: 1494037 - RNA, 19 nt, Artificial Sequence
  Description of Artificial Sequence: Synthetic oligonucleotide
uucuaagcagauaccaauc

SEQ ID NO: 1494038 - RNA, 19 nt, Artificial Sequence
  Description of Artificial Sequence: Synthetic oligonucleotide
cacgaucugguaaugcucc

SEQ ID NO: 1494039 - RNA, 19 nt, Artificial Sequence
  Description of Artificial Sequence: Synthetic oligonucleotide
uauuccacgaucugguaau

SEQ ID NO: 1494040 - RNA, 19 nt, Artificial Sequence
  Description of Artificial Sequence: Synthetic oligonucleotide
ucacguuauucuuucgccc

SEQ ID NO: 1494041 - RNA, 19 nt, Artificial Sequence
  Description of Artificial Sequence: Synthetic oligonucleotide
agucaucccacucucgcag

SEQ ID NO: 1494042 - RNA, 19 nt, Artificial Sequence
  Description of Artificial Sequence: Synthetic oligonucleotide
gacgcugccaucuugugga

SEQ ID NO: 1494043 - RNA, 19 nt, Artificial Sequence
  Description of Artificial Sequence: Synthetic oligonucleotide
agagaauuaaugaagucaa

SEQ ID NO: 1494044 - RNA, 19 nt, Artificial Sequence
  Description of Artificial Sequence: Synthetic oligonucleotide
agguaauauucacgaacac

SEQ ID NO: 1494045 - RNA, 19 nt, Artificial Sequence
  Description of Artificial Sequence: Synthetic oligonucleotide
ugcaaagcaagacucuguc

SEQ ID NO: 1494046 - RNA, 19 nt, Artificial Sequence
  Description of Artificial Sequence: Synthetic oligonucleotide
uccgagugaguaugaaggg

SEQ ID NO: 1494047 - RNA, 19 nt, Artificial Sequence
  Description of Artificial Sequence: Synthetic oligonucleotide
ggagguaauauucacgaac

SEQ ID NO: 1494048 - RNA, 19 nt, Artificial Sequence
  Description of Artificial Sequence: Synthetic oligonucleotide
cacauuugugcacaggcac

SEQ ID NO: 1494049 - RNA, 19 nt, Artificial Sequence
  Description of Artificial Sequence: Synthetic oligonucleotide
ugcuguucauaccagucac

SEQ ID NO: 1494050 - RNA, 19 nt, Artificial Sequence
  Description of Artificial Sequence: Synthetic oligonucleotide
caucacguuauucuuucgc

SEQ ID NO: 1494051 - RNA, 19 nt, Artificial Sequence
  Description of Artificial Sequence: Synthetic oligonucleotide
guuaagaaauuuaugaagu

SEQ ID NO: 1494052 - RNA, 19 nt, Artificial Sequence
  Description of Artificial Sequence: Synthetic oligonucleotide
cauggugagagcuccuugc

SEQ ID NO: 1494053 - RNA, 19 nt, Artificial Sequence
  Description of Artificial Sequence: Synthetic oligonucleotide
aagucaaacaaaaccucug

SEQ ID NO: 1494054 - RNA, 19 nt, Artificial Sequence
  Description of Artificial Sequence: Synthetic oligonucleotide
ugcagacaaccuaugcucc

SEQ ID NO: 1494055 - RNA, 19 nt, Artificial Sequence
  Description of Artificial Sequence: Synthetic oligonucleotide
agcagauuucagugcagac

SEQ ID NO: 1494056 - RNA, 19 nt, Artificial Sequence
  Description of Artificial Sequence: Synthetic oligonucleotide
aaugcuccauauuucugau

SEQ ID NO: 1494057 - RNA, 19 nt, Artificial Sequence
  Description of Artificial Sequence: Synthetic oligonucleotide
aaaccucuggucauuaccu

SEQ ID NO: 1494058 - RNA, 19 nt, Artificial Sequence
  Description of Artificial Sequence: Synthetic oligonucleotide
agauccaguccuuuggaca

SEQ ID NO: 1494059 - RNA, 19 nt, Artificial Sequence
  Description of Artificial Sequence: Synthetic oligonucleotide
ggaagauuagcccauguuc

SEQ ID NO: 1494060 - RNA, 19 nt, Artificial Sequence
  Description of Artificial Sequence: Synthetic oligonucleotide
ugaaguguucucgagccug

SEQ ID NO: 1494061 - RNA, 19 nt, Artificial Sequence
  Description of Artificial Sequence: Synthetic oligonucleotide
ugucuuugcgaugccauag

SEQ ID NO: 1494062 - RNA, 19 nt, Artificial Sequence
  Description of Artificial Sequence: Synthetic oligonucleotide
uauucuugcuuugggguag

SEQ ID NO: 1494063 - RNA, 19 nt, Artificial Sequence
  Description of Artificial Sequence: Synthetic oligonucleotide
ucggcugaacaaaucaagu

SEQ ID NO: 1494064 - RNA, 19 nt, Artificial Sequence
  Description of Artificial Sequence: Synthetic oligonucleotide
agagcuagcaguguuauuu

SEQ ID NO: 1494065 - RNA, 19 nt, Artificial Sequence
  Description of Artificial Sequence: Synthetic oligonucleotide
gaaguugauuccucucuug

SEQ ID NO: 1494066 - RNA, 19 nt, Artificial Sequence
  Description of Artificial Sequence: Synthetic oligonucleotide
auauucacgaacacguuca

SEQ ID NO: 1494067 - RNA, 19 nt, Artificial Sequence
  Description of Artificial Sequence: Synthetic oligonucleotide
uguugcucaccaugaaggc

SEQ ID NO: 1494068 - RNA, 19 nt, Artificial Sequence
  Description of Artificial Sequence: Synthetic oligonucleotide
ugauagcaaugacacugag

SEQ ID NO: 1494069 - RNA, 19 nt, Artificial Sequence
  Description of Artificial Sequence: Synthetic oligonucleotide
uccacgaucugguaaugcu

SEQ ID NO: 1494070 - RNA, 19 nt, Artificial Sequence
  Description of Artificial Sequence: Synthetic oligonucleotide
uucauuucggcugaacaaa

SEQ ID NO: 1494071 - RNA, 19 nt, Artificial Sequence
  Description of Artificial Sequence: Synthetic oligonucleotide
ucuuugcgaugccauagca

SEQ ID NO: 1494072 - RNA, 19 nt, Artificial Sequence
  Description of Artificial Sequence: Synthetic oligonucleotide
ggguugacuuguuucaugg

SEQ ID NO: 1494073 - RNA, 19 nt, Artificial Sequence
  Description of Artificial Sequence: Synthetic oligonucleotide
uugcgaugccauagcaacg

SEQ ID NO: 1494074 - RNA, 19 nt, Artificial Sequence
  Description of Artificial Sequence: Synthetic oligonucleotide
uuuagccugucuuugcgau

SEQ ID NO: 1494075 - RNA, 19 nt, Artificial Sequence
  Description of Artificial Sequence: Synthetic oligonucleotide
auagguuauauagagccau

SEQ ID NO: 1494076 - RNA, 19 nt, Artificial Sequence
  Description of Artificial Sequence: Synthetic oligonucleotide
auaguugccaggcuuggau

SEQ ID NO: 1494077 - RNA, 19 nt, Artificial Sequence
  Description of Artificial Sequence: Synthetic oligonucleotide
ucagacgcugccaucuugu

SEQ ID NO: 1494078 - RNA, 19 nt, Artificial Sequence
  Description of Artificial Sequence: Synthetic oligonucleotide
uuuuagccugucuuugcga

SEQ ID NO: 1494079 - RNA, 19 nt, Artificial Sequence
  Description of Artificial Sequence: Synthetic oligonucleotide
uggcuauuccacgaucugg

SEQ ID NO: 1494080 - RNA, 19 nt, Artificial Sequence
  Description of Artificial Sequence: Synthetic oligonucleotide
ugaacaaaucaaguuccga

SEQ ID NO: 1494081 - RNA, 19 nt, Artificial Sequence
  Description of Artificial Sequence: Synthetic oligonucleotide
gaacaaaucaaguuccgau

SEQ ID NO: 1494082 - RNA, 19 nt, Artificial Sequence
  Description of Artificial Sequence: Synthetic oligonucleotide
cuuauccuggacugucccg

SEQ ID NO: 1494083 - RNA, 19 nt, Artificial Sequence
  Description of Artificial Sequence: Synthetic oligonucleotide
uuccgauaacauuccagca

SEQ ID NO: 1494084 - RNA, 19 nt, Artificial Sequence
  Description of Artificial Sequence: Synthetic oligonucleotide
gcaauuguugcucaccaug

SEQ ID NO: 1494085 - RNA, 19 nt, Artificial Sequence
  Description of Artificial Sequence: Synthetic oligonucleotide
cuauuuuagccugucuuug

SEQ ID NO: 1494086 - RNA, 19 nt, Artificial Sequence
  Description of Artificial Sequence: Synthetic oligonucleotide
gugagagcuccuugcaacg

SEQ ID NO: 1494087 - RNA, 19 nt, Artificial Sequence
  Description of Artificial Sequence: Synthetic oligonucleotide
uuggauaaccagcuccaaa

SEQ ID NO: 1494088 - RNA, 19 nt, Artificial Sequence
  Description of Artificial Sequence: Synthetic oligonucleotide
ugagagcucuuuucuaccu

SEQ ID NO: 1494089 - RNA, 19 nt, Artificial Sequence
  Description of Artificial Sequence: Synthetic oligonucleotide
aaggcauaugacaaggauu

SEQ ID NO: 1494090 - RNA, 19 nt, Artificial Sequence
  Description of Artificial Sequence: Synthetic oligonucleotide
aaugaucuagacgcuugcu

SEQ ID NO: 1494091 - RNA, 19 nt, Artificial Sequence
  Description of Artificial Sequence: Synthetic oligonucleotide
agcuagcaguguuauuuuc

SEQ ID NO: 1494092 - RNA, 19 nt, Artificial Sequence
  Description of Artificial Sequence: Synthetic oligonucleotide
cugguuucgaagagcuccg

SEQ ID NO: 1494093 - RNA, 19 nt, Artificial Sequence
  Description of Artificial Sequence: Synthetic oligonucleotide
ucauggugagagcuccuug

SEQ ID NO: 1494094 - RNA, 19 nt, Artificial Sequence
  Description of Artificial Sequence: Synthetic oligonucleotide
uagccugucuuugcgaugc

SEQ ID NO: 1494095 - RNA, 19 nt, Artificial Sequence
  Description of Artificial Sequence: Synthetic oligonucleotide
cugagagcucuuuucuacc

SEQ ID NO: 1494096 - RNA, 19 nt, Artificial Sequence
  Description of Artificial Sequence: Synthetic oligonucleotide
auaccaauccaccuccgaa

SEQ ID NO: 1494097 - RNA, 19 nt, Artificial Sequence
  Description of Artificial Sequence: Synthetic oligonucleotide
uuggugugcaucacguuau

SEQ ID NO: 1494098 - RNA, 19 nt, Artificial Sequence
  Description of Artificial Sequence: Synthetic oligonucleotide
uuggcuauuccacgaucug

SEQ ID NO: 1494099 - RNA, 19 nt, Artificial Sequence
  Description of Artificial Sequence: Synthetic oligonucleotide
aucaaguuccgauaacauu

SEQ ID NO: 1494100 - RNA, 19 nt, Artificial Sequence
  Description of Artificial Sequence: Synthetic oligonucleotide
cauuaccuaggguacagca

SEQ ID NO: 1494101 - RNA, 19 nt, Artificial Sequence
  Description of Artificial Sequence: Synthetic oligonucleotide
aguuccgauaacauuccag

SEQ ID NO: 1494102 - RNA, 19 nt, Artificial Sequence
  Description of Artificial Sequence: Synthetic oligonucleotide
gagccgguggguucagucg

SEQ ID NO: 1494103 - RNA, 19 nt, Artificial Sequence
  Description of Artificial Sequence: Synthetic oligonucleotide
ucauaguugccaggcuugg

SEQ ID NO: 1494104 - RNA, 19 nt, Artificial Sequence
  Description of Artificial Sequence: Synthetic oligonucleotide
gguacagcaauuauuugac

SEQ ID NO: 1494105 - RNA, 19 nt, Artificial Sequence
  Description of Artificial Sequence: Synthetic oligonucleotide
ugcgaugccauagcaacga

SEQ ID NO: 1494106 - RNA, 19 nt, Artificial Sequence
  Description of Artificial Sequence: Synthetic oligonucleotide
cauagcaacgagauuugga

SEQ ID NO: 1494107 - RNA, 19 nt, Artificial Sequence
  Description of Artificial Sequence: Synthetic oligonucleotide
aggcauaugacaaggauuu

SEQ ID NO: 1494108 - RNA, 19 nt, Artificial Sequence
  Description of Artificial Sequence: Synthetic oligonucleotide
ggguacagcaauuauuuga

SEQ ID NO: 1494109 - RNA, 19 nt, Artificial Sequence
  Description of Artificial Sequence: Synthetic oligonucleotide
ucugguaaugcuccauauu

SEQ ID NO: 1494110 - RNA, 19 nt, Artificial Sequence
  Description of Artificial Sequence: Synthetic oligonucleotide
ucauuucggcugaacaaau

SEQ ID NO: 1494111 - RNA, 19 nt, Artificial Sequence
  Description of Artificial Sequence: Synthetic oligonucleotide
accaaacccuacugcuccc

SEQ ID NO: 1494112 - RNA, 19 nt, Artificial Sequence
  Description of Artificial Sequence: Synthetic oligonucleotide
ucgagccugcugcaaauga

SEQ ID NO: 1494113 - RNA, 19 nt, Artificial Sequence
  Description of Artificial Sequence: Synthetic oligonucleotide
gcugguuucgaagagcucc

SEQ ID NO: 1494114 - RNA, 19 nt, Artificial Sequence
  Description of Artificial Sequence: Synthetic oligonucleotide
agacccacaaccaaacccu

SEQ ID NO: 1494115 - RNA, 19 nt, Artificial Sequence
  Description of Artificial Sequence: Synthetic oligonucleotide
accaauccaccuccgaagu

SEQ ID NO: 1494116 - RNA, 19 nt, Artificial Sequence
  Description of Artificial Sequence: Synthetic oligonucleotide
agagcucuuuucuaccuaa

SEQ ID NO: 1494117 - RNA, 19 nt, Artificial Sequence
  Description of Artificial Sequence: Synthetic oligonucleotide
aaccagcugauacccacau

SEQ ID NO: 1494118 - RNA, 19 nt, Artificial Sequence
  Description of Artificial Sequence: Synthetic oligonucleotide
caagacucugucugcugcc

SEQ ID NO: 1494119 - RNA, 19 nt, Artificial Sequence
  Description of Artificial Sequence: Synthetic oligonucleotide
aucaaguacuucaggucgg

SEQ ID NO: 1494120 - RNA, 19 nt, Artificial Sequence
  Description of Artificial Sequence: Synthetic oligonucleotide
agcugaguuauucuugcuu

SEQ ID NO: 1494121 - RNA, 19 nt, Artificial Sequence
  Description of Artificial Sequence: Synthetic oligonucleotide
uuggacaccuuauccugga

SEQ ID NO: 1494122 - RNA, 19 nt, Artificial Sequence
  Description of Artificial Sequence: Synthetic oligonucleotide
ucuagacgcuugcuggggu

SEQ ID NO: 1494123 - RNA, 19 nt, Artificial Sequence
  Description of Artificial Sequence: Synthetic oligonucleotide
gguuauauagagccauuuc

SEQ ID NO: 1494124 - RNA, 19 nt, Artificial Sequence
  Description of Artificial Sequence: Synthetic oligonucleotide
cugucauagguuauauaga

SEQ ID NO: 1494125 - RNA, 19 nt, Artificial Sequence
  Description of Artificial Sequence: Synthetic oligonucleotide
auggcggcuuggcuauucc

SEQ ID NO: 1494126 - RNA, 19 nt, Artificial Sequence
  Description of Artificial Sequence: Synthetic oligonucleotide
ggguagcugaaacucagcc

SEQ ID NO: 1494127 - RNA, 19 nt, Artificial Sequence
  Description of Artificial Sequence: Synthetic oligonucleotide
gagauccaguccuuuggac

SEQ ID NO: 1494128 - RNA, 19 nt, Artificial Sequence
  Description of Artificial Sequence: Synthetic oligonucleotide
gauaccaauccaccuccga

SEQ ID NO: 1494129 - RNA, 19 nt, Artificial Sequence
  Description of Artificial Sequence: Synthetic oligonucleotide
agaaguugauuccucucuu

SEQ ID NO: 1494130 - RNA, 19 nt, Artificial Sequence
  Description of Artificial Sequence: Synthetic oligonucleotide
gucauuaccuaggguacag

SEQ ID NO: 1494131 - RNA, 19 nt, Artificial Sequence
  Description of Artificial Sequence: Synthetic oligonucleotide
gaagucaaacaaaaccucu

SEQ ID NO: 1494132 - RNA, 19 nt, Artificial Sequence
  Description of Artificial Sequence: Synthetic oligonucleotide
ccaccuccgaaguugaagg

SEQ ID NO: 1494133 - RNA, 19 nt, Artificial Sequence
  Description of Artificial Sequence: Synthetic oligonucleotide
cauagguuauauagagcca

SEQ ID NO: 1494134 - RNA, 19 nt, Artificial Sequence
  Description of Artificial Sequence: Synthetic oligonucleotide
cauuugugcacaggcacac

SEQ ID NO: 1494135 - RNA, 19 nt, Artificial Sequence
  Description of Artificial Sequence: Synthetic oligonucleotide
ugggcaauuguugcucacc

SEQ ID NO: 1494136 - RNA, 19 nt, Artificial Sequence
  Description of Artificial Sequence: Synthetic oligonucleotide
caaccaaacccuacugcuc

SEQ ID NO: 1494137 - RNA, 19 nt, Artificial Sequence
  Description of Artificial Sequence: Synthetic oligonucleotide
gaaggcauaugacaaggau

SEQ ID NO: 1494138 - RNA, 19 nt, Artificial Sequence
  Description of Artificial Sequence: Synthetic oligonucleotide
aucugguaaugcuccauau

SEQ ID NO: 1494139 - RNA, 19 nt, Artificial Sequence
  Description of Artificial Sequence: Synthetic oligonucleotide
cuuuugaaaucagcugaug

SEQ ID NO: 1494140 - RNA, 19 nt, Artificial Sequence
  Description of Artificial Sequence: Synthetic oligonucleotide
auucacgaacacguucauc

SEQ ID NO: 1494141 - RNA, 19 nt, Artificial Sequence
  Description of Artificial Sequence: Synthetic oligonucleotide
cagcaacccgucaucagac

SEQ ID NO: 1494142 - RNA, 19 nt, Artificial Sequence
  Description of Artificial Sequence: Synthetic oligonucleotide
auuucagugcagacaaccu

SEQ ID NO: 1494143 - RNA, 19 nt, Artificial Sequence
  Description of Artificial Sequence: Synthetic oligonucleotide
cuuggugugcaucacguua

SEQ ID NO: 1494144 - RNA, 19 nt, Artificial Sequence
  Description of Artificial Sequence: Synthetic oligonucleotide
acaugauagcaaugacacu

SEQ ID NO: 1494145 - RNA, 19 nt, Artificial Sequence
  Description of Artificial Sequence: Synthetic oligonucleotide
gucuuugcgaugccauagc

SEQ ID NO: 1494146 - RNA, 19 nt, Artificial Sequence
  Description of Artificial Sequence: Synthetic oligonucleotide
accuccgaaguugaaggag

SEQ ID NO: 1494147 - RNA, 19 nt, Artificial Sequence
  Description of Artificial Sequence: Synthetic oligonucleotide
aucuagacgcuugcugggg

SEQ ID NO: 1494148 - RNA, 19 nt, Artificial Sequence
  Description of Artificial Sequence: Synthetic oligonucleotide
uauucacgaacacguucau

SEQ ID NO: 1494149 - RNA, 19 nt, Artificial Sequence
  Description of Artificial Sequence: Synthetic oligonucleotide
aggguacagcaauuauuug

SEQ ID NO: 1494150 - RNA, 19 nt, Artificial Sequence
  Description of Artificial Sequence: Synthetic oligonucleotide
aucagacgcugccaucuug

SEQ ID NO: 1494151 - RNA, 19 nt, Artificial Sequence
  Description of Artificial Sequence: Synthetic oligonucleotide
cucaaggagauccaguccu

SEQ ID NO: 1494152 - RNA, 19 nt, Artificial Sequence
  Description of Artificial Sequence: Synthetic oligonucleotide
caacgagauuuggauaggc

SEQ ID NO: 1494153 - RNA, 19 nt, Artificial Sequence
  Description of Artificial Sequence: Synthetic oligonucleotide
agaaaucagaauacaugau

SEQ ID NO: 1494154 - RNA, 19 nt, Artificial Sequence
  Description of Artificial Sequence: Synthetic oligonucleotide
ccuccgaaguugaaggagg

SEQ ID NO: 1494155 - RNA, 19 nt, Artificial Sequence
  Description of Artificial Sequence: Synthetic oligonucleotide
agcaagacucugucugcug

SEQ ID NO: 1494156 - RNA, 19 nt, Artificial Sequence
  Description of Artificial Sequence: Synthetic oligonucleotide
uagcaacgagauuuggaua

SEQ ID NO: 1494157 - RNA, 19 nt, Artificial Sequence
  Description of Artificial Sequence: Synthetic oligonucleotide
cuucuaagcagauaccaau

SEQ ID NO: 1494158 - RNA, 19 nt, Artificial Sequence
  Description of Artificial Sequence: Synthetic oligonucleotide
ugagagcuccuugcaacgc

SEQ ID NO: 1494159 - RNA, 19 nt, Artificial Sequence
  Description of Artificial Sequence: Synthetic oligonucleotide
aagacucugucugcugccu

SEQ ID NO: 1494160 - RNA, 19 nt, Artificial Sequence
  Description of Artificial Sequence: Synthetic oligonucleotide
cacaggcacacauaauaga

SEQ ID NO: 1494161 - RNA, 19 nt, Artificial Sequence
  Description of Artificial Sequence: Synthetic oligonucleotide
gcaagacucugucugcugc

SEQ ID NO: 1494162 - RNA, 19 nt, Artificial Sequence
  Description of Artificial Sequence: Synthetic oligonucleotide
ucauuaccuaggguacagc

SEQ ID NO: 1494163 - RNA, 19 nt, Artificial Sequence
  Description of Artificial Sequence: Synthetic oligonucleotide
cuauuccacgaucugguaa

SEQ ID NO: 1494164 - RNA, 19 nt, Artificial Sequence
  Description of Artificial Sequence: Synthetic oligonucleotide
ugccaggcuuggauaacca

SEQ ID NO: 1494165 - RNA, 19 nt, Artificial Sequence
  Description of Artificial Sequence: Synthetic oligonucleotide
ucaaguacuucaggucggu

SEQ ID NO: 1494166 - RNA, 19 nt, Artificial Sequence
  Description of Artificial Sequence: Synthetic oligonucleotide
gguagcugaaacucagcca

SEQ ID NO: 1494167 - RNA, 19 nt, Artificial Sequence
  Description of Artificial Sequence: Synthetic oligonucleotide
uuccacgaucugguaaugc

SEQ ID NO: 1494168 - RNA, 19 nt, Artificial Sequence
  Description of Artificial Sequence: Synthetic oligonucleotide
cagcugauacccacauuug

SEQ ID NO: 1494169 - RNA, 19 nt, Artificial Sequence
  Description of Artificial Sequence: Synthetic oligonucleotide
cacugaguuaagaaauuua

SEQ ID NO: 1494170 - RNA, 19 nt, Artificial Sequence
  Description of Artificial Sequence: Synthetic oligonucleotide
uuguuccgagugaguauga

SEQ ID NO: 1494171 - RNA, 19 nt, Artificial Sequence
  Description of Artificial Sequence: Synthetic oligonucleotide
augauagcaaugacacuga

SEQ ID NO: 1494172 - RNA, 19 nt, Artificial Sequence
  Description of Artificial Sequence: Synthetic oligonucleotide
aaccucuggucauuaccua

SEQ ID NO: 1494173 - RNA, 19 nt, Artificial Sequence
  Description of Artificial Sequence: Synthetic oligonucleotide
agcgagaaguugauuccuc

SEQ ID NO: 1494174 - RNA, 19 nt, Artificial Sequence
  Description of Artificial Sequence: Synthetic oligonucleotide
auuaccuaggguacagcaa

SEQ ID NO: 1494175 - RNA, 19 nt, Artificial Sequence
  Description of Artificial Sequence: Synthetic oligonucleotide
ggauaggccauggaagagc

SEQ ID NO: 1494176 - RNA, 19 nt, Artificial Sequence
  Description of Artificial Sequence: Synthetic oligonucleotide
aagagaugagcgagaaguu

SEQ ID NO: 1494177 - RNA, 19 nt, Artificial Sequence
  Description of Artificial Sequence: Synthetic oligonucleotide
ucacgaacacguucaucau

SEQ ID NO: 1494178 - RNA, 19 nt, Artificial Sequence
  Description of Artificial Sequence: Synthetic oligonucleotide
cuuugcgaugccauagcaa

SEQ ID NO: 1494179 - RNA, 19 nt, Artificial Sequence
  Description of Artificial Sequence: Synthetic oligonucleotide
cuaccuaagaaaucagaau

SEQ ID NO: 1494180 - RNA, 19 nt, Artificial Sequence
  Description of Artificial Sequence: Synthetic oligonucleotide
cuugaccacuuuccacagc

SEQ ID NO: 1494181 - RNA, 19 nt, Artificial Sequence
  Description of Artificial Sequence: Synthetic oligonucleotide
gauagcaaugacacugagu

SEQ ID NO: 1494182 - RNA, 19 nt, Artificial Sequence
  Description of Artificial Sequence: Synthetic oligonucleotide
gcaguguuauuuucagcug

SEQ ID NO: 1494183 - RNA, 19 nt, Artificial Sequence
  Description of Artificial Sequence: Synthetic oligonucleotide
agccgguggguucagucgu

SEQ ID NO: 1494184 - RNA, 19 nt, Artificial Sequence
  Description of Artificial Sequence: Synthetic oligonucleotide
gcaacccgucaucagacgc

SEQ ID NO: 1494185 - RNA, 19 nt, Artificial Sequence
  Description of Artificial Sequence: Synthetic oligonucleotide
agguuauauagagccauuu

SEQ ID NO: 1494186 - RNA, 19 nt, Artificial Sequence
  Description of Artificial Sequence: Synthetic oligonucleotide
guacagcaauuauuugaca

SEQ ID NO: 1494187 - RNA, 19 nt, Artificial Sequence
  Description of Artificial Sequence: Synthetic oligonucleotide
gguuucgaagagcuccggc

SEQ ID NO: 1494188 - RNA, 19 nt, Artificial Sequence
  Description of Artificial Sequence: Synthetic oligonucleotide
ucaggucgguggaagcaau

SEQ ID NO: 1494189 - RNA, 19 nt, Artificial Sequence
  Description of Artificial Sequence: Synthetic oligonucleotide
gauaggccauggaagagcu

SEQ ID NO: 1494190 - RNA, 19 nt, Artificial Sequence
  Description of Artificial Sequence: Synthetic oligonucleotide
aggagguaauauucacgaa

SEQ ID NO: 1494191 - RNA, 19 nt, Artificial Sequence
  Description of Artificial Sequence: Synthetic oligonucleotide
auccaguccuuuggacacc

SEQ ID NO: 1494192 - RNA, 19 nt, Artificial Sequence
  Description of Artificial Sequence: Synthetic oligonucleotide
gagcucuuuucuaccuaag

SEQ ID NO: 1494193 - RNA, 19 nt, Artificial Sequence
  Description of Artificial Sequence: Synthetic oligonucleotide
ccagucaucccacucucgc

SEQ ID NO: 1494194 - RNA, 19 nt, Artificial Sequence
  Description of Artificial Sequence: Synthetic oligonucleotide
ccacaugauagcaaugaca

SEQ ID NO: 1494195 - RNA, 19 nt, Artificial Sequence
  Description of Artificial Sequence: Synthetic oligonucleotide
aggucgguggaagcaaucu

SEQ ID NO: 1494196 - RNA, 19 nt, Artificial Sequence
  Description of Artificial Sequence: Synthetic oligonucleotide
uucuuucgcccuucaggaa

SEQ ID NO: 1494197 - RNA, 19 nt, Artificial Sequence
  Description of Artificial Sequence: Synthetic oligonucleotide
uggacaccuuauccuggac

SEQ ID NO: 1494198 - RNA, 19 nt, Artificial Sequence
  Description of Artificial Sequence: Synthetic oligonucleotide
agauaccaauccaccuccg

SEQ ID NO: 1494199 - RNA, 19 nt, Artificial Sequence
  Description of Artificial Sequence: Synthetic oligonucleotide
guccuuuggacaccuuauc

SEQ ID NO: 1494200 - RNA, 19 nt, Artificial Sequence
  Description of Artificial Sequence: Synthetic oligonucleotide
gagaauuaaugaagucaaa

SEQ ID NO: 1494201 - RNA, 19 nt, Artificial Sequence
  Description of Artificial Sequence: Synthetic oligonucleotide
cuuucgcccuucaggaaga

SEQ ID NO: 1494202 - RNA, 19 nt, Artificial Sequence
  Description of Artificial Sequence: Synthetic oligonucleotide
uccaguccuuuggacaccu

SEQ ID NO: 1494203 - RNA, 19 nt, Artificial Sequence
  Description of Artificial Sequence: Synthetic oligonucleotide
gcggcuuggcuauuccacg

SEQ ID NO: 1494204 - RNA, 19 nt, Artificial Sequence
  Description of Artificial Sequence: Synthetic oligonucleotide
aucagcugauggcggcuug

SEQ ID NO: 1494205 - RNA, 19 nt, Artificial Sequence
  Description of Artificial Sequence: Synthetic oligonucleotide
cuaggguacagcaauuauu

SEQ ID NO: 1494206 - RNA, 19 nt, Artificial Sequence
  Description of Artificial Sequence: Synthetic oligonucleotide
aggccauggaagagcuagc

SEQ ID NO: 1494207 - RNA, 19 nt, Artificial Sequence
  Description of Artificial Sequence: Synthetic oligonucleotide
aaucagcugauggcggcuu

SEQ ID NO: 1494208 - RNA, 19 nt, Artificial Sequence
  Description of Artificial Sequence: Synthetic oligonucleotide
ggcacacauaauagagggg

SEQ ID NO: 1494209 - RNA, 19 nt, Artificial Sequence
  Description of Artificial Sequence: Synthetic oligonucleotide
cuuguaccucucuauuuua

SEQ ID NO: 1494210 - RNA, 19 nt, Artificial Sequence
  Description of Artificial Sequence: Synthetic oligonucleotide
caccuuauccuggacuguc

SEQ ID NO: 1494211 - RNA, 19 nt, Artificial Sequence
  Description of Artificial Sequence: Synthetic oligonucleotide
cacguuauucuuucgcccu

SEQ ID NO: 1494212 - RNA, 19 nt, Artificial Sequence
  Description of Artificial Sequence: Synthetic oligonucleotide
gccauggaagagcuagcag

SEQ ID NO: 1494213 - RNA, 19 nt, Artificial Sequence
  Description of Artificial Sequence: Synthetic oligonucleotide
uaccuaggguacagcaauu

SEQ ID NO: 1494214 - RNA, 19 nt, Artificial Sequence
  Description of Artificial Sequence: Synthetic oligonucleotide
uggcggcuuggcuauucca

SEQ ID NO: 1494215 - RNA, 19 nt, Artificial Sequence
  Description of Artificial Sequence: Synthetic oligonucleotide
aaguguucucgagccugcu

SEQ ID NO: 1494216 - RNA, 19 nt, Artificial Sequence
  Description of Artificial Sequence: Synthetic oligonucleotide
uauuuucagcugaguuauu

SEQ ID NO: 1494217 - RNA, 19 nt, Artificial Sequence
  Description of Artificial Sequence: Synthetic oligonucleotide
gagagcucuuuucuaccua

SEQ ID NO: 1494218 - RNA, 19 nt, Artificial Sequence
  Description of Artificial Sequence: Synthetic oligonucleotide
gaagagcuagcaguguuau

SEQ ID NO: 1494219 - RNA, 19 nt, Artificial Sequence
  Description of Artificial Sequence: Synthetic oligonucleotide
gcaucacguuauucuuucg

SEQ ID NO: 1494220 - RNA, 19 nt, Artificial Sequence
  Description of Artificial Sequence: Synthetic oligonucleotide
cuucaggucgguggaagca

SEQ ID NO: 1494221 - RNA, 19 nt, Artificial Sequence
  Description of Artificial Sequence: Synthetic oligonucleotide
gucgguggaagcaaucucu

SEQ ID NO: 1494222 - RNA, 19 nt, Artificial Sequence
  Description of Artificial Sequence: Synthetic oligonucleotide
acguuauucuuucgcccuu

SEQ ID NO: 1494223 - RNA, 19 nt, Artificial Sequence
  Description of Artificial Sequence: Synthetic oligonucleotide
auuccacgaucugguaaug

SEQ ID NO: 1494224 - RNA, 19 nt, Artificial Sequence
  Description of Artificial Sequence: Synthetic oligonucleotide
gucaucagacgcugccauc

SEQ ID NO: 1494225 - RNA, 19 nt, Artificial Sequence
  Description of Artificial Sequence: Synthetic oligonucleotide
gcaacgagauuuggauagg

SEQ ID NO: 1494226 - RNA, 19 nt, Artificial Sequence
  Description of Artificial Sequence: Synthetic oligonucleotide
ugggguugacuuguuucau

SEQ ID NO: 1494227 - RNA, 19 nt, Artificial Sequence
  Description of Artificial Sequence: Synthetic oligonucleotide
caaguacuucaggucggug

SEQ ID NO: 1494228 - RNA, 19 nt, Artificial Sequence
  Description of Artificial Sequence: Synthetic oligonucleotide
cagucaucccacucucgca

SEQ ID NO: 1494229 - RNA, 19 nt, Artificial Sequence
  Description of Artificial Sequence: Synthetic oligonucleotide
ccacgaucugguaaugcuc

SEQ ID NO: 1494230 - RNA, 19 nt, Artificial Sequence
  Description of Artificial Sequence: Synthetic oligonucleotide
caggucgguggaagcaauc

SEQ ID NO: 1494231 - RNA, 19 nt, Artificial Sequence
  Description of Artificial Sequence: Synthetic oligonucleotide
uccgaaguugaaggaggua

SEQ ID NO: 1494232 - RNA, 19 nt, Artificial Sequence
  Description of Artificial Sequence: Synthetic oligonucleotide
accuaggguacagcaauua

SEQ ID NO: 1494233 - RNA, 19 nt, Artificial Sequence
  Description of Artificial Sequence: Synthetic oligonucleotide
ggauaaccagcuccaaaua

SEQ ID NO: 1494234 - RNA, 19 nt, Artificial Sequence
  Description of Artificial Sequence: Synthetic oligonucleotide
uggugugcaucacguuauu

SEQ ID NO: 1494235 - RNA, 19 nt, Artificial Sequence
  Description of Artificial Sequence: Synthetic oligonucleotide
gcuugggccuuguuccgag

SEQ ID NO: 1494236 - RNA, 19 nt, Artificial Sequence
  Description of Artificial Sequence: Synthetic oligonucleotide
gcugaguuauucuugcuuu

SEQ ID NO: 1494237 - RNA, 19 nt, Artificial Sequence
  Description of Artificial Sequence: Synthetic oligonucleotide
ggucgguggaagcaaucuc

SEQ ID NO: 1494238 - RNA, 19 nt, Artificial Sequence
  Description of Artificial Sequence: Synthetic oligonucleotide
acaaggauuuccagacauu

SEQ ID NO: 1494239 - RNA, 19 nt, Artificial Sequence
  Description of Artificial Sequence: Synthetic oligonucleotide
uugcaacgcuggcaccauc

SEQ ID NO: 1494240 - RNA, 19 nt, Artificial Sequence
  Description of Artificial Sequence: Synthetic oligonucleotide
gguggguucagucguuucu

SEQ ID NO: 1494241 - RNA, 19 nt, Artificial Sequence
  Description of Artificial Sequence: Synthetic oligonucleotide
guugccaggcuuggauaac

SEQ ID NO: 1494242 - RNA, 19 nt, Artificial Sequence
  Description of Artificial Sequence: Synthetic oligonucleotide
ggcggcuuggcuauuccac

SEQ ID NO: 1494243 - RNA, 19 nt, Artificial Sequence
  Description of Artificial Sequence: Synthetic oligonucleotide
uacguuggcuugggccuug

SEQ ID NO: 1494244 - RNA, 19 nt, Artificial Sequence
  Description of Artificial Sequence: Synthetic oligonucleotide
gagcgagaaguugauuccu

SEQ ID NO: 1494245 - RNA, 19 nt, Artificial Sequence
  Description of Artificial Sequence: Synthetic oligonucleotide
caccuccgaaguugaagga

SEQ ID NO: 1494246 - RNA, 19 nt, Artificial Sequence
  Description of Artificial Sequence: Synthetic oligonucleotide
gagcuagcaguguuauuuu

SEQ ID NO: 1494247 - RNA, 19 nt, Artificial Sequence
  Description of Artificial Sequence: Synthetic oligonucleotide
caacccgucaucagacgcu

SEQ ID NO: 1494248 - RNA, 19 nt, Artificial Sequence
  Description of Artificial Sequence: Synthetic oligonucleotide
ccugggauggguguccuuc

SEQ ID NO: 1494249 - RNA, 19 nt, Artificial Sequence
  Description of Artificial Sequence: Synthetic oligonucleotide
cugucuuugcgaugccaua

SEQ ID NO: 1494250 - RNA, 19 nt, Artificial Sequence
  Description of Artificial Sequence: Synthetic oligonucleotide
ggugugcaucacguuauuc

SEQ ID NO: 1494251 - RNA, 19 nt, Artificial Sequence
  Description of Artificial Sequence: Synthetic oligonucleotide
cauaguugccaggcuugga

SEQ ID NO: 1494252 - RNA, 19 nt, Artificial Sequence
  Description of Artificial Sequence: Synthetic oligonucleotide
cugauggcggcuuggcuau

SEQ ID NO: 1494253 - RNA, 19 nt, Artificial Sequence
  Description of Artificial Sequence: Synthetic oligonucleotide
ggccauggaagagcuagca

SEQ ID NO: 1494254 - RNA, 19 nt, Artificial Sequence
  Description of Artificial Sequence: Synthetic oligonucleotide
cuccgaaguugaaggaggu

SEQ ID NO: 1494255 - RNA, 19 nt, Artificial Sequence
  Description of Artificial Sequence: Synthetic oligonucleotide
agacgcuugcugggguuga

SEQ ID NO: 1494256 - RNA, 19 nt, Artificial Sequence
  Description of Artificial Sequence: Synthetic oligonucleotide
gcgaugccauagcaacgag

SEQ ID NO: 1494257 - RNA, 19 nt, Artificial Sequence
  Description of Artificial Sequence: Synthetic oligonucleotide
ccacucucgcagucugugc

SEQ ID NO: 1494258 - RNA, 19 nt, Artificial Sequence
  Description of Artificial Sequence: Synthetic oligonucleotide
gacgcuugcugggguugac

SEQ ID NO: 1494259 - RNA, 19 nt, Artificial Sequence
  Description of Artificial Sequence: Synthetic oligonucleotide
gggguagcugaaacucagc

SEQ ID NO: 1494260 - RNA, 19 nt, Artificial Sequence
  Description of Artificial Sequence: Synthetic oligonucleotide
gagugaguaugaaggguuu

SEQ ID NO: 1494261 - RNA, 19 nt, Artificial Sequence
  Description of Artificial Sequence: Synthetic oligonucleotide
ccaaacccuacugcucccc

SEQ ID NO: 1494262 - RNA, 19 nt, Artificial Sequence
  Description of Artificial Sequence: Synthetic oligonucleotide
ccagacauucaaagaccca

SEQ ID NO: 1494263 - RNA, 19 nt, Artificial Sequence
  Description of Artificial Sequence: Synthetic oligonucleotide
gcgagaaguugauuccucu

SEQ ID NO: 1494264 - RNA, 19 nt, Artificial Sequence
  Description of Artificial Sequence: Synthetic oligonucleotide
uuucgcccuucaggaagau

SEQ ID NO: 1494265 - RNA, 19 nt, Artificial Sequence
  Description of Artificial Sequence: Synthetic oligonucleotide
auacguuggcuugggccuu

SEQ ID NO: 1494266 - RNA, 19 nt, Artificial Sequence
  Description of Artificial Sequence: Synthetic oligonucleotide
gccuuguuccgagugagua

SEQ ID NO: 1494267 - RNA, 19 nt, Artificial Sequence
  Description of Artificial Sequence: Synthetic oligonucleotide
gacccacaaccaaacccua

SEQ ID NO: 1494268 - RNA, 19 nt, Artificial Sequence
  Description of Artificial Sequence: Synthetic oligonucleotide
gcuauuccacgaucuggua

SEQ ID NO: 1494269 - RNA, 19 nt, Artificial Sequence
  Description of Artificial Sequence: Synthetic oligonucleotide
cacccucgucaucguuuug

SEQ ID NO: 1494270 - RNA, 19 nt, Artificial Sequence
  Description of Artificial Sequence: Synthetic oligonucleotide
gcaaaugaucuagacgcuu

SEQ ID NO: 1494271 - RNA, 19 nt, Artificial Sequence
  Description of Artificial Sequence: Synthetic oligonucleotide
cgagugaguaugaaggguu

SEQ ID NO: 1494272 - RNA, 19 nt, Artificial Sequence
  Description of Artificial Sequence: Synthetic oligonucleotide
auaggccauggaagagcua

SEQ ID NO: 1494273 - RNA, 19 nt, Artificial Sequence
  Description of Artificial Sequence: Synthetic oligonucleotide
cuugggccuuguuccgagu

SEQ ID NO: 1494274 - RNA, 19 nt, Artificial Sequence
  Description of Artificial Sequence: Synthetic oligonucleotide
ccuaggguacagcaauuau

SEQ ID NO: 1494275 - RNA, 19 nt, Artificial Sequence
  Description of Artificial Sequence: Synthetic oligonucleotide
acguuggcuugggccuugu

SEQ ID NO: 1494276 - RNA, 19 nt, Artificial Sequence
  Description of Artificial Sequence: Synthetic oligonucleotide
cuggcaccaucaaguacuu

SEQ ID NO: 1494277 - RNA, 19 nt, Artificial Sequence
  Description of Artificial Sequence: Synthetic oligonucleotide
ggcuuggcuauuccacgau

SEQ ID NO: 1494278 - RNA, 19 nt, Artificial Sequence
  Description of Artificial Sequence: Synthetic oligonucleotide
ccuuguuccgagugaguau

SEQ ID NO: 1494279 - RNA, 19 nt, Artificial Sequence
  Description of Artificial Sequence: Synthetic oligonucleotide
ugauggcggcuuggcuauu

SEQ ID NO: 1494280 - RNA, 19 nt, Artificial Sequence
  Description of Artificial Sequence: Synthetic oligonucleotide
ccgagugaguaugaagggu

SEQ ID NO: 1494281 - RNA, 19 nt, Artificial Sequence
  Description of Artificial Sequence: Synthetic oligonucleotide
cggcuuggcuauuccacga

SEQ ID NO: 1494282 - RNA, 19 nt, Artificial Sequence
  Description of Artificial Sequence: Synthetic oligonucleotide
ccgucaucagacgcugcca

SEQ ID NO: 1494283 - RNA, 19 nt, Artificial Sequence
  Description of Artificial Sequence: Synthetic oligonucleotide
cgguggguucagucguuuc

SEQ ID NO: 1494284 - RNA, 19 nt, Artificial Sequence
  Description of Artificial Sequence: Synthetic oligonucleotide
ccucucuauuuuagccugu

SEQ ID NO: 1494285 - RNA, 19 nt, Artificial Sequence
  Description of Artificial Sequence: Synthetic oligonucleotide
cccggagccgguggguuca

SEQ ID NO: 1494286 - RNA, 19 nt, Artificial Sequence
  Description of Artificial Sequence: Synthetic oligonucleotide
ggccuuguuccgagugagu

SEQ ID NO: 1494287 - RNA, 19 nt, Artificial Sequence
  Description of Artificial Sequence: Synthetic oligonucleotide
ccaauccaccuccgaaguu

SEQ ID NO: 1494288 - RNA, 19 nt, Artificial Sequence
  Description of Artificial Sequence: Synthetic oligonucleotide
cgaucugguaaugcuccau

SEQ ID NO: 1494289 - RNA, 19 nt, Artificial Sequence
  Description of Artificial Sequence: Synthetic oligonucleotide
ccggagccgguggguucag

SEQ ID NO: 1494290 - RNA, 19 nt, Artificial Sequence
  Description of Artificial Sequence: Synthetic oligonucleotide
gccgguggguucagucguu

SEQ ID NO: 1494291 - RNA, 19 nt, Artificial Sequence
  Description of Artificial Sequence: Synthetic oligonucleotide
ccgguggguucagucguuu

SEQ ID NO: 1494292 - RNA, 19 nt, Artificial Sequence
  Description of Artificial Sequence: Synthetic oligonucleotide
cggagccgguggguucagu

SEQ ID NO: 1494293 - RNA, 19 nt, Artificial Sequence
  Description of Artificial Sequence: Synthetic oligonucleotide
aaaauucuuuacuaggcac

SEQ ID NO: 1494294 - RNA, 19 nt, Artificial Sequence
  Description of Artificial Sequence: Synthetic oligonucleotide
uuaaaauucuuuacuaggc

SEQ ID NO: 1494295 - RNA, 19 nt, Artificial Sequence
  Description of Artificial Sequence: Synthetic oligonucleotide
uuuauuuacuuaaaauucu

SEQ ID NO: 1494296 - RNA, 19 nt, Artificial Sequence
  Description of Artificial Sequence: Synthetic oligonucleotide
uuuacuuaaaauucuuuac

SEQ ID NO: 1494297 - RNA, 19 nt, Artificial Sequence
  Description of Artificial Sequence: Synthetic oligonucleotide
uuacuuaaaauucuuuacu

SEQ ID NO: 1494298 - RNA, 19 nt, Artificial Sequence
  Description of Artificial Sequence: Synthetic oligonucleotide
aacaagugagauuuccuag

SEQ ID NO: 1494299 - RNA, 19 nt, Artificial Sequence
  Description of Artificial Sequence: Synthetic oligonucleotide
acuuaaaauucuuuacuag

SEQ ID NO: 1494300 - RNA, 19 nt, Artificial Sequence
  Description of Artificial Sequence: Synthetic oligonucleotide
uaaaauucuuuacuaggca

SEQ ID NO: 1494301 - RNA, 19 nt, Artificial Sequence
  Description of Artificial Sequence: Synthetic oligonucleotide
agugagauuuccuagggcu

SEQ ID NO: 1494302 - RNA, 19 nt, Artificial Sequence
  Description of Artificial Sequence: Synthetic oligonucleotide
aagugagauuuccuagggc

SEQ ID NO: 1494303 - RNA, 19 nt, Artificial Sequence
  Description of Artificial Sequence: Synthetic oligonucleotide
acaagugagauuuccuagg

SEQ ID NO: 1494304 - RNA, 19 nt, Artificial Sequence
  Description of Artificial Sequence: Synthetic oligonucleotide
gaauaaaagccccuguuca

SEQ ID NO: 1494305 - RNA, 19 nt, Artificial Sequence
  Description of Artificial Sequence: Synthetic oligonucleotide
auuuacuuaaaauucuuua

SEQ ID NO: 1494306 - RNA, 19 nt, Artificial Sequence
  Description of Artificial Sequence: Synthetic oligonucleotide
uucuuuacuaggcacuaug

SEQ ID NO: 1494307 - RNA, 19 nt, Artificial Sequence
  Description of Artificial Sequence: Synthetic oligonucleotide
ugaauaaaagccccuguuc

SEQ ID NO: 1494308 - RNA, 19 nt, Artificial Sequence
  Description of Artificial Sequence: Synthetic oligonucleotide
uaugccucuaugcaggagu

SEQ ID NO: 1494309 - RNA, 19 nt, Artificial Sequence
  Description of Artificial Sequence: Synthetic oligonucleotide
uaaaagccccuguucaagg

SEQ ID NO: 1494310 - RNA, 19 nt, Artificial Sequence
  Description of Artificial Sequence: Synthetic oligonucleotide
ggaguaguccuuuucaagg

SEQ ID NO: 1494311 - RNA, 19 nt, Artificial Sequence
  Description of Artificial Sequence: Synthetic oligonucleotide
uacuuaaaauucuuuacua

SEQ ID NO: 1494312 - RNA, 19 nt, Artificial Sequence
  Description of Artificial Sequence: Synthetic oligonucleotide
aauaaaagccccuguucaa

SEQ ID NO: 1494313 - RNA, 19 nt, Artificial Sequence
  Description of Artificial Sequence: Synthetic oligonucleotide
aaauucuuuacuaggcacu

SEQ ID NO: 1494314 - RNA, 19 nt, Artificial Sequence
  Description of Artificial Sequence: Synthetic oligonucleotide
aguaguccuuuucaagguc

SEQ ID NO: 1494315 - RNA, 19 nt, Artificial Sequence
  Description of Artificial Sequence: Synthetic oligonucleotide
cugccaugaauaaaagccc

SEQ ID NO: 1494316 - RNA, 19 nt, Artificial Sequence
  Description of Artificial Sequence: Synthetic oligonucleotide
cuagccacgggugacaacc

SEQ ID NO: 1494317 - RNA, 19 nt, Artificial Sequence
  Description of Artificial Sequence: Synthetic oligonucleotide
caagugagauuuccuaggg

SEQ ID NO: 1494318 - RNA, 19 nt, Artificial Sequence
  Description of Artificial Sequence: Synthetic oligonucleotide
uuuggguguacugguaucc

SEQ ID NO: 1494319 - RNA, 19 nt, Artificial Sequence
  Description of Artificial Sequence: Synthetic oligonucleotide
aaaagccccuguucaaggu

SEQ ID NO: 1494320 - RNA, 19 nt, Artificial Sequence
  Description of Artificial Sequence: Synthetic oligonucleotide
auaaaagccccuguucaag

SEQ ID NO: 1494321 - RNA, 19 nt, Artificial Sequence
  Description of Artificial Sequence: Synthetic oligonucleotide
ucuaugcaggaguacuagc

SEQ ID NO: 1494322 - RNA, 19 nt, Artificial Sequence
  Description of Artificial Sequence: Synthetic oligonucleotide
ugcaggaguacuagcuugc

SEQ ID NO: 1494323 - RNA, 19 nt, Artificial Sequence
  Description of Artificial Sequence: Synthetic oligonucleotide
gauuuccuagggcuccacg

SEQ ID NO: 1494324 - RNA, 19 nt, Artificial Sequence
  Description of Artificial Sequence: Synthetic oligonucleotide
augaauaaaagccccuguu

SEQ ID NO: 1494325 - RNA, 19 nt, Artificial Sequence
  Description of Artificial Sequence: Synthetic oligonucleotide
aaggguccuuguuugggug

SEQ ID NO: 1494326 - RNA, 19 nt, Artificial Sequence
  Description of Artificial Sequence: Synthetic oligonucleotide
uguuuggguguacugguau

SEQ ID NO: 1494327 - RNA, 19 nt, Artificial Sequence
  Description of Artificial Sequence: Synthetic oligonucleotide
aagccccuguucaagguac

SEQ ID NO: 1494328 - RNA, 19 nt, Artificial Sequence
  Description of Artificial Sequence: Synthetic oligonucleotide
augcaggaguacuagcuug

SEQ ID NO: 1494329 - RNA, 19 nt, Artificial Sequence
  Description of Artificial Sequence: Synthetic oligonucleotide
aauucuuuacuaggcacua

SEQ ID NO: 1494330 - RNA, 19 nt, Artificial Sequence
  Description of Artificial Sequence: Synthetic oligonucleotide
uaugcaggaguacuagcuu

SEQ ID NO: 1494331 - RNA, 19 nt, Artificial Sequence
  Description of Artificial Sequence: Synthetic oligonucleotide
aaagccccuguucaaggua

SEQ ID NO: 1494332 - RNA, 19 nt, Artificial Sequence
  Description of Artificial Sequence: Synthetic oligonucleotide
uccuuguuuggguguacug

SEQ ID NO: 1494333 - RNA, 19 nt, Artificial Sequence
  Description of Artificial Sequence: Synthetic oligonucleotide
cucuaugcaggaguacuag

SEQ ID NO: 1494334 - RNA, 19 nt, Artificial Sequence
  Description of Artificial Sequence: Synthetic oligonucleotide
uaguccuuuucaaggucac

SEQ ID NO: 1494335 - RNA, 19 nt, Artificial Sequence
  Description of Artificial Sequence: Synthetic oligonucleotide
caacaagugagauuuccua

SEQ ID NO: 1494336 - RNA, 19 nt, Artificial Sequence
  Description of Artificial Sequence: Synthetic oligonucleotide
cuaugcaggaguacuagcu

SEQ ID NO: 1494337 - RNA, 19 nt, Artificial Sequence
  Description of Artificial Sequence: Synthetic oligonucleotide
guaguccuuuucaagguca

SEQ ID NO: 1494338 - RNA, 19 nt, Artificial Sequence
  Description of Artificial Sequence: Synthetic oligonucleotide
ccuuguuuggguguacugg

SEQ ID NO: 1494339 - RNA, 19 nt, Artificial Sequence
  Description of Artificial Sequence: Synthetic oligonucleotide
ccuuuucaaggucacuggg

SEQ ID NO: 1494340 - RNA, 19 nt, Artificial Sequence
  Description of Artificial Sequence: Synthetic oligonucleotide
gaguaguccuuuucaaggu

SEQ ID NO: 1494341 - RNA, 19 nt, Artificial Sequence
  Description of Artificial Sequence: Synthetic oligonucleotide
guuuggguguacugguauc

SEQ ID NO: 1494342 - RNA, 19 nt, Artificial Sequence
  Description of Artificial Sequence: Synthetic oligonucleotide
acggaguaguccuuuucaa

SEQ ID NO: 1494343 - RNA, 19 nt, Artificial Sequence
  Description of Artificial Sequence: Synthetic oligonucleotide
cuuguuuggguguacuggu

SEQ ID NO: 1494344 - RNA, 19 nt, Artificial Sequence
  Description of Artificial Sequence: Synthetic oligonucleotide
uuggguguacugguauccu

SEQ ID NO: 1494345 - RNA, 19 nt, Artificial Sequence
  Description of Artificial Sequence: Synthetic oligonucleotide
caugaauaaaagccccugu

SEQ ID NO: 1494346 - RNA, 19 nt, Artificial Sequence
  Description of Artificial Sequence: Synthetic oligonucleotide
gugagauuuccuagggcuc

SEQ ID NO: 1494347 - RNA, 19 nt, Artificial Sequence
  Description of Artificial Sequence: Synthetic oligonucleotide
ccaugaauaaaagccccug

SEQ ID NO: 1494348 - RNA, 19 nt, Artificial Sequence
  Description of Artificial Sequence: Synthetic oligonucleotide
auucuuuacuaggcacuau

SEQ ID NO: 1494349 - RNA, 19 nt, Artificial Sequence
  Description of Artificial Sequence: Synthetic oligonucleotide
aguccuuuucaaggucacu

SEQ ID NO: 1494350 - RNA, 19 nt, Artificial Sequence
  Description of Artificial Sequence: Synthetic oligonucleotide
cggaguaguccuuuucaag

SEQ ID NO: 1494351 - RNA, 19 nt, Artificial Sequence
  Description of Artificial Sequence: Synthetic oligonucleotide
ugccuagccacgggugaca

SEQ ID NO: 1494352 - RNA, 19 nt, Artificial Sequence
  Description of Artificial Sequence: Synthetic oligonucleotide
ugccucuaugcaggaguac

SEQ ID NO: 1494353 - RNA, 19 nt, Artificial Sequence
  Description of Artificial Sequence: Synthetic oligonucleotide
caggaguacuagcuugcaa

SEQ ID NO: 1494354 - RNA, 19 nt, Artificial Sequence
  Description of Artificial Sequence: Synthetic oligonucleotide
augccucuaugcaggagua

SEQ ID NO: 1494355 - RNA, 19 nt, Artificial Sequence
  Description of Artificial Sequence: Synthetic oligonucleotide
gcaacaagugagauuuccu

SEQ ID NO: 1494356 - RNA, 19 nt, Artificial Sequence
  Description of Artificial Sequence: Synthetic oligonucleotide
gccucuaugcaggaguacu

SEQ ID NO: 1494357 - RNA, 19 nt, Artificial Sequence
  Description of Artificial Sequence: Synthetic oligonucleotide
guccuuguuuggguguacu

SEQ ID NO: 1494358 - RNA, 19 nt, Artificial Sequence
  Description of Artificial Sequence: Synthetic oligonucleotide
agccccuguucaagguaca

SEQ ID NO: 1494359 - RNA, 19 nt, Artificial Sequence
  Description of Artificial Sequence: Synthetic oligonucleotide
gcaggaguacuagcuugca

SEQ ID NO: 1494360 - RNA, 19 nt, Artificial Sequence
  Description of Artificial Sequence: Synthetic oligonucleotide
gccaugaauaaaagccccu

SEQ ID NO: 1494361 - RNA, 19 nt, Artificial Sequence
  Description of Artificial Sequence: Synthetic oligonucleotide
gguccuuguuuggguguac

SEQ ID NO: 1494362 - RNA, 19 nt, Artificial Sequence
  Description of Artificial Sequence: Synthetic oligonucleotide
ccuagccacgggugacaac

SEQ ID NO: 1494363 - RNA, 19 nt, Artificial Sequence
  Description of Artificial Sequence: Synthetic oligonucleotide
ggguccuuguuugggugua

SEQ ID NO: 1494364 - RNA, 19 nt, Artificial Sequence
  Description of Artificial Sequence: Synthetic oligonucleotide
gccuagccacgggugacaa

SEQ ID NO: 1494365 - RNA, 19 nt, Artificial Sequence
  Description of Artificial Sequence: Synthetic oligonucleotide
guuaaaaccauuuacaugc

SEQ ID NO: 1494366 - RNA, 19 nt, Artificial Sequence
  Description of Artificial Sequence: Synthetic oligonucleotide
aaauuuggaacaucaaagc

SEQ ID NO: 1494367 - RNA, 19 nt, Artificial Sequence
  Description of Artificial Sequence: Synthetic oligonucleotide
uaauuaauugugcuuaagg

SEQ ID NO: 1494368 - RNA, 19 nt, Artificial Sequence
  Description of Artificial Sequence: Synthetic oligonucleotide
aagcauugaauccacuugc

SEQ ID NO: 1494369 - RNA, 19 nt, Artificial Sequence
  Description of Artificial Sequence: Synthetic oligonucleotide
aauuaaauuuggguguucc

SEQ ID NO: 1494370 - RNA, 19 nt, Artificial Sequence
  Description of Artificial Sequence: Synthetic oligonucleotide
uuaagcuuacuaaauuugg

SEQ ID NO: 1494371 - RNA, 19 nt, Artificial Sequence
  Description of Artificial Sequence: Synthetic oligonucleotide
ucucgaaugaaguacuugg

SEQ ID NO: 1494372 - RNA, 19 nt, Artificial Sequence
  Description of Artificial Sequence: Synthetic oligonucleotide
uaaucaugcccuauggugg

SEQ ID NO: 1494373 - RNA, 19 nt, Artificial Sequence
  Description of Artificial Sequence: Synthetic oligonucleotide
uuaaucaugcccuauggug

SEQ ID NO: 1494374 - RNA, 19 nt, Artificial Sequence
  Description of Artificial Sequence: Synthetic oligonucleotide
ugagagggaacuuuugugg

SEQ ID NO: 1494375 - RNA, 19 nt, Artificial Sequence
  Description of Artificial Sequence: Synthetic oligonucleotide
agcuuacuaaauuuggaac

SEQ ID NO: 1494376 - RNA, 19 nt, Artificial Sequence
  Description of Artificial Sequence: Synthetic oligonucleotide
uuuaaugcugcacaacaca

SEQ ID NO: 1494377 - RNA, 19 nt, Artificial Sequence
  Description of Artificial Sequence: Synthetic oligonucleotide
auuaaauuuggguguuccc

SEQ ID NO: 1494378 - RNA, 19 nt, Artificial Sequence
  Description of Artificial Sequence: Synthetic oligonucleotide
uccguuaaaaccauuuaca

SEQ ID NO: 1494379 - RNA, 19 nt, Artificial Sequence
  Description of Artificial Sequence: Synthetic oligonucleotide
ucuucgauuucccagcgag

SEQ ID NO: 1494380 - RNA, 19 nt, Artificial Sequence
  Description of Artificial Sequence: Synthetic oligonucleotide
ugcguuguuaaucaugccc

SEQ ID NO: 1494381 - RNA, 19 nt, Artificial Sequence
  Description of Artificial Sequence: Synthetic oligonucleotide
auagaauucaggugggaag

SEQ ID NO: 1494382 - RNA, 19 nt, Artificial Sequence
  Description of Artificial Sequence: Synthetic oligonucleotide
uuaaggcugaauuaaauuu

SEQ ID NO: 1494383 - RNA, 19 nt, Artificial Sequence
  Description of Artificial Sequence: Synthetic oligonucleotide
cuuaagcuuacuaaauuug

SEQ ID NO: 1494384 - RNA, 19 nt, Artificial Sequence
  Description of Artificial Sequence: Synthetic oligonucleotide
gcugaauuaaauuugggug

SEQ ID NO: 1494385 - RNA, 19 nt, Artificial Sequence
  Description of Artificial Sequence: Synthetic oligonucleotide
aacauguggaaguugacuu

SEQ ID NO: 1494386 - RNA, 19 nt, Artificial Sequence
  Description of Artificial Sequence: Synthetic oligonucleotide
uuuucaauugcguuucacu

SEQ ID NO: 1494387 - RNA, 19 nt, Artificial Sequence
  Description of Artificial Sequence: Synthetic oligonucleotide
ucgaaugaaguacuuggcc

SEQ ID NO: 1494388 - RNA, 19 nt, Artificial Sequence
  Description of Artificial Sequence: Synthetic oligonucleotide
ucaaaguugggcacguuca

SEQ ID NO: 1494389 - RNA, 19 nt, Artificial Sequence
  Description of Artificial Sequence: Synthetic oligonucleotide
cagaauguaguccacgcgg

SEQ ID NO: 1494390 - RNA, 19 nt, Artificial Sequence
  Description of Artificial Sequence: Synthetic oligonucleotide
uggaaaguaguccucaauc

SEQ ID NO: 1494391 - RNA, 19 nt, Artificial Sequence
  Description of Artificial Sequence: Synthetic oligonucleotide
uacuuacugaaagugagag

SEQ ID NO: 1494392 - RNA, 19 nt, Artificial Sequence
  Description of Artificial Sequence: Synthetic oligonucleotide
aagcuuacuaaauuuggaa

SEQ ID NO: 1494393 - RNA, 19 nt, Artificial Sequence
  Description of Artificial Sequence: Synthetic oligonucleotide
uuucaauugcguuucacuc

SEQ ID NO: 1494394 - RNA, 19 nt, Artificial Sequence
  Description of Artificial Sequence: Synthetic oligonucleotide
aaauuuggguguucccuuc

SEQ ID NO: 1494395 - RNA, 19 nt, Artificial Sequence
  Description of Artificial Sequence: Synthetic oligonucleotide
uaagcuuacuaaauuugga

SEQ ID NO: 1494396 - RNA, 19 nt, Artificial Sequence
  Description of Artificial Sequence: Synthetic oligonucleotide
uauuuuacuuacugaaagu

SEQ ID NO: 1494397 - RNA, 19 nt, Artificial Sequence
  Description of Artificial Sequence: Synthetic oligonucleotide
aaagauuccagaggucagg

SEQ ID NO: 1494398 - RNA, 19 nt, Artificial Sequence
  Description of Artificial Sequence: Synthetic oligonucleotide
uuaaauuuggguguucccu

SEQ ID NO: 1494399 - RNA, 19 nt, Artificial Sequence
  Description of Artificial Sequence: Synthetic oligonucleotide
agcugguacucauuggagc

SEQ ID NO: 1494400 - RNA, 19 nt, Artificial Sequence
  Description of Artificial Sequence: Synthetic oligonucleotide
guucaucacgcucagaaug

SEQ ID NO: 1494401 - RNA, 19 nt, Artificial Sequence
  Description of Artificial Sequence: Synthetic oligonucleotide
uuuuaaugcugcacaacac

SEQ ID NO: 1494402 - RNA, 19 nt, Artificial Sequence
  Description of Artificial Sequence: Synthetic oligonucleotide
cagaaacucaucucgaaug

SEQ ID NO: 1494403 - RNA, 19 nt, Artificial Sequence
  Description of Artificial Sequence: Synthetic oligonucleotide
ucucgucuccguuaaaacc

SEQ ID NO: 1494404 - RNA, 19 nt, Artificial Sequence
  Description of Artificial Sequence: Synthetic oligonucleotide
aaguacuuggcccggguca

SEQ ID NO: 1494405 - RNA, 19 nt, Artificial Sequence
  Description of Artificial Sequence: Synthetic oligonucleotide
acucuuaauuaauugugcu

SEQ ID NO: 1494406 - RNA, 19 nt, Artificial Sequence
  Description of Artificial Sequence: Synthetic oligonucleotide
ucuguaggccgccuuaagc

SEQ ID NO: 1494407 - RNA, 19 nt, Artificial Sequence
  Description of Artificial Sequence: Synthetic oligonucleotide
ucgcuuggcacguagucgg

SEQ ID NO: 1494408 - RNA, 19 nt, Artificial Sequence
  Description of Artificial Sequence: Synthetic oligonucleotide
uucaauugcguuucacucu

SEQ ID NO: 1494409 - RNA, 19 nt, Artificial Sequence
  Description of Artificial Sequence: Synthetic oligonucleotide
ucaucucgaaugaaguacu

SEQ ID NO: 1494410 - RNA, 19 nt, Artificial Sequence
  Description of Artificial Sequence: Synthetic oligonucleotide
uugggcacguucaucacgc

SEQ ID NO: 1494411 - RNA, 19 nt, Artificial Sequence
  Description of Artificial Sequence: Synthetic oligonucleotide
acuuacugaaagugagagg

SEQ ID NO: 1494412 - RNA, 19 nt, Artificial Sequence
  Description of Artificial Sequence: Synthetic oligonucleotide
uuguccucccgaaugacca

SEQ ID NO: 1494413 - RNA, 19 nt, Artificial Sequence
  Description of Artificial Sequence: Synthetic oligonucleotide
gaugguuucaauggccucc

SEQ ID NO: 1494414 - RNA, 19 nt, Artificial Sequence
  Description of Artificial Sequence: Synthetic oligonucleotide
guugcguuguuaaucaugc

SEQ ID NO: 1494415 - RNA, 19 nt, Artificial Sequence
  Description of Artificial Sequence: Synthetic oligonucleotide
cucauuggagcgcucauag

SEQ ID NO: 1494416 - RNA, 19 nt, Artificial Sequence
  Description of Artificial Sequence: Synthetic oligonucleotide
uugugcuuaaggcugaauu

SEQ ID NO: 1494417 - RNA, 19 nt, Artificial Sequence
  Description of Artificial Sequence: Synthetic oligonucleotide
uagucggccugcuugauca

SEQ ID NO: 1494418 - RNA, 19 nt, Artificial Sequence
  Description of Artificial Sequence: Synthetic oligonucleotide
uuacuuacugaaagugaga

SEQ ID NO: 1494419 - RNA, 19 nt, Artificial Sequence
  Description of Artificial Sequence: Synthetic oligonucleotide
ugugcuuaaggcugaauua

SEQ ID NO: 1494420 - RNA, 19 nt, Artificial Sequence
  Description of Artificial Sequence: Synthetic oligonucleotide
uuggcaugcucauagaauu

SEQ ID NO: 1494421 - RNA, 19 nt, Artificial Sequence
  Description of Artificial Sequence: Synthetic oligonucleotide
uuggguguucccuucuuag

SEQ ID NO: 1494422 - RNA, 19 nt, Artificial Sequence
  Description of Artificial Sequence: Synthetic oligonucleotide
ugcguuucacucuuaauua

SEQ ID NO: 1494423 - RNA, 19 nt, Artificial Sequence
  Description of Artificial Sequence: Synthetic oligonucleotide
cuccguuaaaaccauuuac

SEQ ID NO: 1494424 - RNA, 19 nt, Artificial Sequence
  Description of Artificial Sequence: Synthetic oligonucleotide
gcagucacaucauugaagc

SEQ ID NO: 1494425 - RNA, 19 nt, Artificial Sequence
  Description of Artificial Sequence: Synthetic oligonucleotide
aauugcguuucacucuuaa

SEQ ID NO: 1494426 - RNA, 19 nt, Artificial Sequence
  Description of Artificial Sequence: Synthetic oligonucleotide
acguucaucacgcucagaa

SEQ ID NO: 1494427 - RNA, 19 nt, Artificial Sequence
  Description of Artificial Sequence: Synthetic oligonucleotide
cucaucucgaaugaaguac

SEQ ID NO: 1494428 - RNA, 19 nt, Artificial Sequence
  Description of Artificial Sequence: Synthetic oligonucleotide
uucgauuucccagcgagga

SEQ ID NO: 1494429 - RNA, 19 nt, Artificial Sequence
  Description of Artificial Sequence: Synthetic oligonucleotide
gaugucacggcagucguug

SEQ ID NO: 1494430 - RNA, 19 nt, Artificial Sequence
  Description of Artificial Sequence: Synthetic oligonucleotide
auuuggaacaucaaagcaa

SEQ ID NO: 1494431 - RNA, 19 nt, Artificial Sequence
  Description of Artificial Sequence: Synthetic oligonucleotide
cauuggagcgcucauagca

SEQ ID NO: 1494432 - RNA, 19 nt, Artificial Sequence
  Description of Artificial Sequence: Synthetic oligonucleotide
auugaagcauugaauccac

SEQ ID NO: 1494433 - RNA, 19 nt, Artificial Sequence
  Description of Artificial Sequence: Synthetic oligonucleotide
ucaauugcguuucacucuu

SEQ ID NO: 1494434 - RNA, 19 nt, Artificial Sequence
  Description of Artificial Sequence: Synthetic oligonucleotide
cucguauuggcggaggugc

SEQ ID NO: 1494435 - RNA, 19 nt, Artificial Sequence
  Description of Artificial Sequence: Synthetic oligonucleotide
agucacaucauugaagcau

SEQ ID NO: 1494436 - RNA, 19 nt, Artificial Sequence
  Description of Artificial Sequence: Synthetic oligonucleotide
gaggguagcaguaguggcg

SEQ ID NO: 1494437 - RNA, 19 nt, Artificial Sequence
  Description of Artificial Sequence: Synthetic oligonucleotide
uauggugggugaucaacug

SEQ ID NO: 1494438 - RNA, 19 nt, Artificial Sequence
  Description of Artificial Sequence: Synthetic oligonucleotide
auggcagucacaucauuga

SEQ ID NO: 1494439 - RNA, 19 nt, Artificial Sequence
  Description of Artificial Sequence: Synthetic oligonucleotide
gaagguugcguuguuaauc

SEQ ID NO: 1494440 - RNA, 19 nt, Artificial Sequence
  Description of Artificial Sequence: Synthetic oligonucleotide
aaguugacuuuguccaccu

SEQ ID NO: 1494441 - RNA, 19 nt, Artificial Sequence
  Description of Artificial Sequence: Synthetic oligonucleotide
ucaggugggaagucaaagu

SEQ ID NO: 1494442 - RNA, 19 nt, Artificial Sequence
  Description of Artificial Sequence: Synthetic oligonucleotide
agucguugaagacgcggcg

SEQ ID NO: 1494443 - RNA, 19 nt, Artificial Sequence
  Description of Artificial Sequence: Synthetic oligonucleotide
gugagagggaacuuuugug

SEQ ID NO: 1494444 - RNA, 19 nt, Artificial Sequence
  Description of Artificial Sequence: Synthetic oligonucleotide
accacgaagaugauggcag

SEQ ID NO: 1494445 - RNA, 19 nt, Artificial Sequence
  Description of Artificial Sequence: Synthetic oligonucleotide
gauucucaggguuggccag

SEQ ID NO: 1494446 - RNA, 19 nt, Artificial Sequence
  Description of Artificial Sequence: Synthetic oligonucleotide
gaaguugacuuuguccacc

SEQ ID NO: 1494447 - RNA, 19 nt, Artificial Sequence
  Description of Artificial Sequence: Synthetic oligonucleotide
uuggagcgcucauagcagg

SEQ ID NO: 1494448 - RNA, 19 nt, Artificial Sequence
  Description of Artificial Sequence: Synthetic oligonucleotide
ucuuagagcagcucguauu

SEQ ID NO: 1494449 - RNA, 19 nt, Artificial Sequence
  Description of Artificial Sequence: Synthetic oligonucleotide
gcuuacuaaauuuggaaca

SEQ ID NO: 1494450 - RNA, 19 nt, Artificial Sequence
  Description of Artificial Sequence: Synthetic oligonucleotide
cucgucuccguuaaaacca

SEQ ID NO: 1494451 - RNA, 19 nt, Artificial Sequence
  Description of Artificial Sequence: Synthetic oligonucleotide
acggcagucguugaagacg

SEQ ID NO: 1494452 - RNA, 19 nt, Artificial Sequence
  Description of Artificial Sequence: Synthetic oligonucleotide
acugcuuuucaauugcguu

SEQ ID NO: 1494453 - RNA, 19 nt, Artificial Sequence
  Description of Artificial Sequence: Synthetic oligonucleotide
cugaauuaaauuugggugu

SEQ ID NO: 1494454 - RNA, 19 nt, Artificial Sequence
  Description of Artificial Sequence: Synthetic oligonucleotide
guugggcacguucaucacg

SEQ ID NO: 1494455 - RNA, 19 nt, Artificial Sequence
  Description of Artificial Sequence: Synthetic oligonucleotide
aagauuccagaggucagga

SEQ ID NO: 1494456 - RNA, 19 nt, Artificial Sequence
  Description of Artificial Sequence: Synthetic oligonucleotide
uucucgucuccguuaaaac

SEQ ID NO: 1494457 - RNA, 19 nt, Artificial Sequence
  Description of Artificial Sequence: Synthetic oligonucleotide
ucuccguuaaaaccauuua

SEQ ID NO: 1494458 - RNA, 19 nt, Artificial Sequence
  Description of Artificial Sequence: Synthetic oligonucleotide
ugcuuuucaauugcguuuc

SEQ ID NO: 1494459 - RNA, 19 nt, Artificial Sequence
  Description of Artificial Sequence: Synthetic oligonucleotide
acgcucagaauguagucca

SEQ ID NO: 1494460 - RNA, 19 nt, Artificial Sequence
  Description of Artificial Sequence: Synthetic oligonucleotide
acugaaagugagagggaac

SEQ ID NO: 1494461 - RNA, 19 nt, Artificial Sequence
  Description of Artificial Sequence: Synthetic oligonucleotide
cauugaagcauugaaucca

SEQ ID NO: 1494462 - RNA, 19 nt, Artificial Sequence
  Description of Artificial Sequence: Synthetic oligonucleotide
aggugcaugcgcuggauga

SEQ ID NO: 1494463 - RNA, 19 nt, Artificial Sequence
  Description of Artificial Sequence: Synthetic oligonucleotide
cagucguugaagacgcggc

SEQ ID NO: 1494464 - RNA, 19 nt, Artificial Sequence
  Description of Artificial Sequence: Synthetic oligonucleotide
cuucgauuucccagcgagg

SEQ ID NO: 1494465 - RNA, 19 nt, Artificial Sequence
  Description of Artificial Sequence: Synthetic oligonucleotide
ugcuuaaggcugaauuaaa

SEQ ID NO: 1494466 - RNA, 19 nt, Artificial Sequence
  Description of Artificial Sequence: Synthetic oligonucleotide
uuggcggaggugcaugcgc

SEQ ID NO: 1494467 - RNA, 19 nt, Artificial Sequence
  Description of Artificial Sequence: Synthetic oligonucleotide
gaacugauucucaggguug

SEQ ID NO: 1494468 - RNA, 19 nt, Artificial Sequence
  Description of Artificial Sequence: Synthetic oligonucleotide
ucacaucauugaagcauug

SEQ ID NO: 1494469 - RNA, 19 nt, Artificial Sequence
  Description of Artificial Sequence: Synthetic oligonucleotide
gacgcggcagcgaagcagg

SEQ ID NO: 1494470 - RNA, 19 nt, Artificial Sequence
  Description of Artificial Sequence: Synthetic oligonucleotide
aggagugguguagcgagcg

SEQ ID NO: 1494471 - RNA, 19 nt, Artificial Sequence
  Description of Artificial Sequence: Synthetic oligonucleotide
ugcguggcccgguagaccu

SEQ ID NO: 1494472 - RNA, 19 nt, Artificial Sequence
  Description of Artificial Sequence: Synthetic oligonucleotide
aucacagagauggugcgca

SEQ ID NO: 1494473 - RNA, 19 nt, Artificial Sequence
  Description of Artificial Sequence: Synthetic oligonucleotide
caucacgcucagaauguag

SEQ ID NO: 1494474 - RNA, 19 nt, Artificial Sequence
  Description of Artificial Sequence: Synthetic oligonucleotide
agcauugaauccacuugcg

SEQ ID NO: 1494475 - RNA, 19 nt, Artificial Sequence
  Description of Artificial Sequence: Synthetic oligonucleotide
cuugcggcgcucaucgcgc

SEQ ID NO: 1494476 - RNA, 19 nt, Artificial Sequence
  Description of Artificial Sequence: Synthetic oligonucleotide
uucuguaggccgccuuaag

SEQ ID NO: 1494477 - RNA, 19 nt, Artificial Sequence
  Description of Artificial Sequence: Synthetic oligonucleotide
aggacuuucucagcaagca

SEQ ID NO: 1494478 - RNA, 19 nt, Artificial Sequence
  Description of Artificial Sequence: Synthetic oligonucleotide
guguccacggcacagguaa

SEQ ID NO: 1494479 - RNA, 19 nt, Artificial Sequence
  Description of Artificial Sequence: Synthetic oligonucleotide
uucuuagagcagcucguau

SEQ ID NO: 1494480 - RNA, 19 nt, Artificial Sequence
  Description of Artificial Sequence: Synthetic oligonucleotide
auuggagcgcucauagcag

SEQ ID NO: 1494481 - RNA, 19 nt, Artificial Sequence
  Description of Artificial Sequence: Synthetic oligonucleotide
agugguguagcgagcgaac

SEQ ID NO: 1494482 - RNA, 19 nt, Artificial Sequence
  Description of Artificial Sequence: Synthetic oligonucleotide
guccacgcggaacugauuc

SEQ ID NO: 1494483 - RNA, 19 nt, Artificial Sequence
  Description of Artificial Sequence: Synthetic oligonucleotide
cuuaauuaauugugcuuaa

SEQ ID NO: 1494484 - RNA, 19 nt, Artificial Sequence
  Description of Artificial Sequence: Synthetic oligonucleotide
uuuggguguucccuucuua

SEQ ID NO: 1494485 - RNA, 19 nt, Artificial Sequence
  Description of Artificial Sequence: Synthetic oligonucleotide
ucauuggagcgcucauagc

SEQ ID NO: 1494486 - RNA, 19 nt, Artificial Sequence
  Description of Artificial Sequence: Synthetic oligonucleotide
gucgcuuggcacguagucg

SEQ ID NO: 1494487 - RNA, 19 nt, Artificial Sequence
  Description of Artificial Sequence: Synthetic oligonucleotide
guaaagugaggguagcagu

SEQ ID NO: 1494488 - RNA, 19 nt, Artificial Sequence
  Description of Artificial Sequence: Synthetic oligonucleotide
guagcaguaguggcgcccg

SEQ ID NO: 1494489 - RNA, 19 nt, Artificial Sequence
  Description of Artificial Sequence: Synthetic oligonucleotide
ucacgcguggguccucucc

SEQ ID NO: 1494490 - RNA, 19 nt, Artificial Sequence
  Description of Artificial Sequence: Synthetic oligonucleotide
gucguugaagacgcggcgg

SEQ ID NO: 1494491 - RNA, 19 nt, Artificial Sequence
  Description of Artificial Sequence: Synthetic oligonucleotide
aucucgaaugaaguacuug

SEQ ID NO: 1494492 - RNA, 19 nt, Artificial Sequence
  Description of Artificial Sequence: Synthetic oligonucleotide
uggagcgcucauagcaggc

SEQ ID NO: 1494493 - RNA, 19 nt, Artificial Sequence
  Description of Artificial Sequence: Synthetic oligonucleotide
uggguguucccuucuuaga

SEQ ID NO: 1494494 - RNA, 19 nt, Artificial Sequence
  Description of Artificial Sequence: Synthetic oligonucleotide
cuuuucaauugcguuucac

SEQ ID NO: 1494495 - RNA, 19 nt, Artificial Sequence
  Description of Artificial Sequence: Synthetic oligonucleotide
uacugggcacagucaauca

SEQ ID NO: 1494496 - RNA, 19 nt, Artificial Sequence
  Description of Artificial Sequence: Synthetic oligonucleotide
aucacgcucagaauguagu

SEQ ID NO: 1494497 - RNA, 19 nt, Artificial Sequence
  Description of Artificial Sequence: Synthetic oligonucleotide
guagcgagcgaacucugga

SEQ ID NO: 1494498 - RNA, 19 nt, Artificial Sequence
  Description of Artificial Sequence: Synthetic oligonucleotide
cccuucuuagagcagcucg

SEQ ID NO: 1494499 - RNA, 19 nt, Artificial Sequence
  Description of Artificial Sequence: Synthetic oligonucleotide
ugguguagcgagcgaacuc

SEQ ID NO: 1494500 - RNA, 19 nt, Artificial Sequence
  Description of Artificial Sequence: Synthetic oligonucleotide
acucaucucgaaugaagua

SEQ ID NO: 1494501 - RNA, 19 nt, Artificial Sequence
  Description of Artificial Sequence: Synthetic oligonucleotide
gaucacagagauggugcgc

SEQ ID NO: 1494502 - RNA, 19 nt, Artificial Sequence
  Description of Artificial Sequence: Synthetic oligonucleotide
uugaagcauugaauccacu

SEQ ID NO: 1494503 - RNA, 19 nt, Artificial Sequence
  Description of Artificial Sequence: Synthetic oligonucleotide
uggcaugcucauagaauuc

SEQ ID NO: 1494504 - RNA, 19 nt, Artificial Sequence
  Description of Artificial Sequence: Synthetic oligonucleotide
gugaucaacugcuuuucaa

SEQ ID NO: 1494505 - RNA, 19 nt, Artificial Sequence
  Description of Artificial Sequence: Synthetic oligonucleotide
gguguucccuucuuagagc

SEQ ID NO: 1494506 - RNA, 19 nt, Artificial Sequence
  Description of Artificial Sequence: Synthetic oligonucleotide
ucgauuucccagcgaggac

SEQ ID NO: 1494507 - RNA, 19 nt, Artificial Sequence
  Description of Artificial Sequence: Synthetic oligonucleotide
agcgagcgaacucuggaaa

SEQ ID NO: 1494508 - RNA, 19 nt, Artificial Sequence
  Description of Artificial Sequence: Synthetic oligonucleotide
acuaaauuuggaacaucaa

SEQ ID NO: 1494509 - RNA, 19 nt, Artificial Sequence
  Description of Artificial Sequence: Synthetic oligonucleotide
cguuaaaaccauuuacaug

SEQ ID NO: 1494510 - RNA, 19 nt, Artificial Sequence
  Description of Artificial Sequence: Synthetic oligonucleotide
gcggcagcgaagcaggucc

SEQ ID NO: 1494511 - RNA, 19 nt, Artificial Sequence
  Description of Artificial Sequence: Synthetic oligonucleotide
acgcggaacugauucucag

SEQ ID NO: 1494512 - RNA, 19 nt, Artificial Sequence
  Description of Artificial Sequence: Synthetic oligonucleotide
uguaggccgccuuaagcuu

SEQ ID NO: 1494513 - RNA, 19 nt, Artificial Sequence
  Description of Artificial Sequence: Synthetic oligonucleotide
ccacuugcggcgcucaucg

SEQ ID NO: 1494514 - RNA, 19 nt, Artificial Sequence
  Description of Artificial Sequence: Synthetic oligonucleotide
uugcguuguuaaucaugcc

SEQ ID NO: 1494515 - RNA, 19 nt, Artificial Sequence
  Description of Artificial Sequence: Synthetic oligonucleotide
auggugcgcagccaucugu

SEQ ID NO: 1494516 - RNA, 19 nt, Artificial Sequence
  Description of Artificial Sequence: Synthetic oligonucleotide
cauagaauucaggugggaa

SEQ ID NO: 1494517 - RNA, 19 nt, Artificial Sequence
  Description of Artificial Sequence: Synthetic oligonucleotide
uccucccgaaugaccaugu

SEQ ID NO: 1494518 - RNA, 19 nt, Artificial Sequence
  Description of Artificial Sequence: Synthetic oligonucleotide
uguugaggaacaggaucac

SEQ ID NO: 1494519 - RNA, 19 nt, Artificial Sequence
  Description of Artificial Sequence: Synthetic oligonucleotide
ugucacggcagucguugaa

SEQ ID NO: 1494520 - RNA, 19 nt, Artificial Sequence
  Description of Artificial Sequence: Synthetic oligonucleotide
ggaaaguaguccucaaucu

SEQ ID NO: 1494521 - RNA, 19 nt, Artificial Sequence
  Description of Artificial Sequence: Synthetic oligonucleotide
ucguauuggcggaggugca

SEQ ID NO: 1494522 - RNA, 19 nt, Artificial Sequence
  Description of Artificial Sequence: Synthetic oligonucleotide
agcgaacucuggaaaguag

SEQ ID NO: 1494523 - RNA, 19 nt, Artificial Sequence
  Description of Artificial Sequence: Synthetic oligonucleotide
gguugcguuguuaaucaug

SEQ ID NO: 1494524 - RNA, 19 nt, Artificial Sequence
  Description of Artificial Sequence: Synthetic oligonucleotide
gagcgcucauagcaggcac

SEQ ID NO: 1494525 - RNA, 19 nt, Artificial Sequence
  Description of Artificial Sequence: Synthetic oligonucleotide
ucaugcccuauggugggug

SEQ ID NO: 1494526 - RNA, 19 nt, Artificial Sequence
  Description of Artificial Sequence: Synthetic oligonucleotide
cucaaucuucgauuuccca

SEQ ID NO: 1494527 - RNA, 19 nt, Artificial Sequence
  Description of Artificial Sequence: Synthetic oligonucleotide
uuggcacguagucggccug

SEQ ID NO: 1494528 - RNA, 19 nt, Artificial Sequence
  Description of Artificial Sequence: Synthetic oligonucleotide
cuguaggccgccuuaagcu

SEQ ID NO: 1494529 - RNA, 19 nt, Artificial Sequence
  Description of Artificial Sequence: Synthetic oligonucleotide
auuggcggaggugcaugcg

SEQ ID NO: 1494530 - RNA, 19 nt, Artificial Sequence
  Description of Artificial Sequence: Synthetic oligonucleotide
aauccacuugcggcgcuca

SEQ ID NO: 1494531 - RNA, 19 nt, Artificial Sequence
  Description of Artificial Sequence: Synthetic oligonucleotide
guauuggcggaggugcaug

SEQ ID NO: 1494532 - RNA, 19 nt, Artificial Sequence
  Description of Artificial Sequence: Synthetic oligonucleotide
ucgucuccguuaaaaccau

SEQ ID NO: 1494533 - RNA, 19 nt, Artificial Sequence
  Description of Artificial Sequence: Synthetic oligonucleotide
caggacgcggcagcgaagc

SEQ ID NO: 1494534 - RNA, 19 nt, Artificial Sequence
  Description of Artificial Sequence: Synthetic oligonucleotide
ugaauccacuugcggcgcu

SEQ ID NO: 1494535 - RNA, 19 nt, Artificial Sequence
  Description of Artificial Sequence: Synthetic oligonucleotide
uccacgcggaacugauucu

SEQ ID NO: 1494536 - RNA, 19 nt, Artificial Sequence
  Description of Artificial Sequence: Synthetic oligonucleotide
gcagucguugaagacgcgg

SEQ ID NO: 1494537 - RNA, 19 nt, Artificial Sequence
  Description of Artificial Sequence: Synthetic oligonucleotide
aggcgguuggucugguugu

SEQ ID NO: 1494538 - RNA, 19 nt, Artificial Sequence
  Description of Artificial Sequence: Synthetic oligonucleotide
aguggcgcccgucuccgcu

SEQ ID NO: 1494539 - RNA, 19 nt, Artificial Sequence
  Description of Artificial Sequence: Synthetic oligonucleotide
ugcgcagccaucuguuguu

SEQ ID NO: 1494540 - RNA, 19 nt, Artificial Sequence
  Description of Artificial Sequence: Synthetic oligonucleotide
ggagucgcauccucaggag

SEQ ID NO: 1494541 - RNA, 19 nt, Artificial Sequence
  Description of Artificial Sequence: Synthetic oligonucleotide
cuggucgcuuggcacguag

SEQ ID NO: 1494542 - RNA, 19 nt, Artificial Sequence
  Description of Artificial Sequence: Synthetic oligonucleotide
agcaguaguggcgcccguc

SEQ ID NO: 1494543 - RNA, 19 nt, Artificial Sequence
  Description of Artificial Sequence: Synthetic oligonucleotide
caugcgcuggaugauguca

SEQ ID NO: 1494544 - RNA, 19 nt, Artificial Sequence
  Description of Artificial Sequence: Synthetic oligonucleotide
ggaaguugacuuuguccac

SEQ ID NO: 1494545 - RNA, 19 nt, Artificial Sequence
  Description of Artificial Sequence: Synthetic oligonucleotide
cuuacuaaauuuggaacau

SEQ ID NO: 1494546 - RNA, 19 nt, Artificial Sequence
  Description of Artificial Sequence: Synthetic oligonucleotide
gggagucgcauccucagga

SEQ ID NO: 1494547 - RNA, 19 nt, Artificial Sequence
  Description of Artificial Sequence: Synthetic oligonucleotide
gcaggcacgcacucccucg

SEQ ID NO: 1494548 - RNA, 19 nt, Artificial Sequence
  Description of Artificial Sequence: Synthetic oligonucleotide
uggugcgcagccaucuguu

SEQ ID NO: 1494549 - RNA, 19 nt, Artificial Sequence
  Description of Artificial Sequence: Synthetic oligonucleotide
agcucguauuggcggaggu

SEQ ID NO: 1494550 - RNA, 19 nt, Artificial Sequence
  Description of Artificial Sequence: Synthetic oligonucleotide
caggagugguguagcgagc

SEQ ID NO: 1494551 - RNA, 19 nt, Artificial Sequence
  Description of Artificial Sequence: Synthetic oligonucleotide
gggaagguugcguuguuaa

SEQ ID NO: 1494552 - RNA, 19 nt, Artificial Sequence
  Description of Artificial Sequence: Synthetic oligonucleotide
aucuucgauuucccagcga

SEQ ID NO: 1494553 - RNA, 19 nt, Artificial Sequence
  Description of Artificial Sequence: Synthetic oligonucleotide
auuuggguguucccuucuu

SEQ ID NO: 1494554 - RNA, 19 nt, Artificial Sequence
  Description of Artificial Sequence: Synthetic oligonucleotide
cuucucgucuccguuaaaa

SEQ ID NO: 1494555 - RNA, 19 nt, Artificial Sequence
  Description of Artificial Sequence: Synthetic oligonucleotide
guaguccucaaucuucgau

SEQ ID NO: 1494556 - RNA, 19 nt, Artificial Sequence
  Description of Artificial Sequence: Synthetic oligonucleotide
agacgcggcggauguucuc

SEQ ID NO: 1494557 - RNA, 19 nt, Artificial Sequence
  Description of Artificial Sequence: Synthetic oligonucleotide
gagugguguagcgagcgaa

SEQ ID NO: 1494558 - RNA, 19 nt, Artificial Sequence
  Description of Artificial Sequence: Synthetic oligonucleotide
uggucgcuuggcacguagu

SEQ ID NO: 1494559 - RNA, 19 nt, Artificial Sequence
  Description of Artificial Sequence: Synthetic oligonucleotide
ggcccgguagaccugcuug

SEQ ID NO: 1494560 - RNA, 19 nt, Artificial Sequence
  Description of Artificial Sequence: Synthetic oligonucleotide
uuggcccgggucacgcgug

SEQ ID NO: 1494561 - RNA, 19 nt, Artificial Sequence
  Description of Artificial Sequence: Synthetic oligonucleotide
gccgccuuaagcuuacuaa

SEQ ID NO: 1494562 - RNA, 19 nt, Artificial Sequence
  Description of Artificial Sequence: Synthetic oligonucleotide
gacgcggcggauguucuca

SEQ ID NO: 1494563 - RNA, 19 nt, Artificial Sequence
  Description of Artificial Sequence: Synthetic oligonucleotide
ccgaaugaccauguuguag

SEQ ID NO: 1494564 - RNA, 19 nt, Artificial Sequence
  Description of Artificial Sequence: Synthetic oligonucleotide
ccuauggugggugaucaac

SEQ ID NO: 1494565 - RNA, 19 nt, Artificial Sequence
  Description of Artificial Sequence: Synthetic oligonucleotide
uggcccgggucacgcgugg

SEQ ID NO: 1494566 - RNA, 19 nt, Artificial Sequence
  Description of Artificial Sequence: Synthetic oligonucleotide
gucaggacgcggcagcgaa

SEQ ID NO: 1494567 - RNA, 19 nt, Artificial Sequence
  Description of Artificial Sequence: Synthetic oligonucleotide
acgcguggguccucuccgg

SEQ ID NO: 1494568 - RNA, 19 nt, Artificial Sequence
  Description of Artificial Sequence: Synthetic oligonucleotide
guagucggccugcuugauc

SEQ ID NO: 1494569 - RNA, 19 nt, Artificial Sequence
  Description of Artificial Sequence: Synthetic oligonucleotide
gguagcaguaguggcgccc

SEQ ID NO: 1494570 - RNA, 19 nt, Artificial Sequence
  Description of Artificial Sequence: Synthetic oligonucleotide
aagacgcggcggauguucu

SEQ ID NO: 1494571 - RNA, 19 nt, Artificial Sequence
  Description of Artificial Sequence: Synthetic oligonucleotide
ggugaucaacugcuuuuca

SEQ ID NO: 1494572 - RNA, 19 nt, Artificial Sequence
  Description of Artificial Sequence: Synthetic oligonucleotide
ggucgcuuggcacguaguc

SEQ ID NO: 1494573 - RNA, 19 nt, Artificial Sequence
  Description of Artificial Sequence: Synthetic oligonucleotide
ucaucacgcucagaaugua

SEQ ID NO: 1494574 - RNA, 19 nt, Artificial Sequence
  Description of Artificial Sequence: Synthetic oligonucleotide
uccacuugcggcgcucauc

SEQ ID NO: 1494575 - RNA, 19 nt, Artificial Sequence
  Description of Artificial Sequence: Synthetic oligonucleotide
uggccuucucgucuccguu

SEQ ID NO: 1494576 - RNA, 19 nt, Artificial Sequence
  Description of Artificial Sequence: Synthetic oligonucleotide
caccacgaagaugauggca

SEQ ID NO: 1494577 - RNA, 19 nt, Artificial Sequence
  Description of Artificial Sequence: Synthetic oligonucleotide
cagucacaucauugaagca

SEQ ID NO: 1494578 - RNA, 19 nt, Artificial Sequence
  Description of Artificial Sequence: Synthetic oligonucleotide
cucgggagucgcauccuca

SEQ ID NO: 1494579 - RNA, 19 nt, Artificial Sequence
  Description of Artificial Sequence: Synthetic oligonucleotide
ugcccuauggugggugauc

SEQ ID NO: 1494580 - RNA, 19 nt, Artificial Sequence
  Description of Artificial Sequence: Synthetic oligonucleotide
augucacggcagucguuga

SEQ ID NO: 1494581 - RNA, 19 nt, Artificial Sequence
  Description of Artificial Sequence: Synthetic oligonucleotide
cgaacucuggaaaguaguc

SEQ ID NO: 1494582 - RNA, 19 nt, Artificial Sequence
  Description of Artificial Sequence: Synthetic oligonucleotide
gaauccacuugcggcgcuc

SEQ ID NO: 1494583 - RNA, 19 nt, Artificial Sequence
  Description of Artificial Sequence: Synthetic oligonucleotide
gagucgcauccucaggagu

SEQ ID NO: 1494584 - RNA, 19 nt, Artificial Sequence
  Description of Artificial Sequence: Synthetic oligonucleotide
auugugcuuaaggcugaau

SEQ ID NO: 1494585 - RNA, 19 nt, Artificial Sequence
  Description of Artificial Sequence: Synthetic oligonucleotide
gggcucgggagucgcaucc

SEQ ID NO: 1494586 - RNA, 19 nt, Artificial Sequence
  Description of Artificial Sequence: Synthetic oligonucleotide
cucaggagugguguagcga

SEQ ID NO: 1494587 - RNA, 19 nt, Artificial Sequence
  Description of Artificial Sequence: Synthetic oligonucleotide
gguguagcgagcgaacucu

SEQ ID NO: 1494588 - RNA, 19 nt, Artificial Sequence
  Description of Artificial Sequence: Synthetic oligonucleotide
cacgcggaacugauucuca

SEQ ID NO: 1494589 - RNA, 19 nt, Artificial Sequence
  Description of Artificial Sequence: Synthetic oligonucleotide
gagcgaacucuggaaagua

SEQ ID NO: 1494590 - RNA, 19 nt, Artificial Sequence
  Description of Artificial Sequence: Synthetic oligonucleotide
caugcccuaugguggguga

SEQ ID NO: 1494591 - RNA, 19 nt, Artificial Sequence
  Description of Artificial Sequence: Synthetic oligonucleotide
cuuggcacguagucggccu

SEQ ID NO: 1494592 - RNA, 19 nt, Artificial Sequence
  Description of Artificial Sequence: Synthetic oligonucleotide
guaguccacgcggaacuga

SEQ ID NO: 1494593 - RNA, 19 nt, Artificial Sequence
  Description of Artificial Sequence: Synthetic oligonucleotide
cagcucguauuggcggagg

SEQ ID NO: 1494594 - RNA, 19 nt, Artificial Sequence
  Description of Artificial Sequence: Synthetic oligonucleotide
agguugcguuguuaaucau

SEQ ID NO: 1494595 - RNA, 19 nt, Artificial Sequence
  Description of Artificial Sequence: Synthetic oligonucleotide
acgcggcggauguucucag

SEQ ID NO: 1494596 - RNA, 19 nt, Artificial Sequence
  Description of Artificial Sequence: Synthetic oligonucleotide
gcguuucacucuuaauuaa

SEQ ID NO: 1494597 - RNA, 19 nt, Artificial Sequence
  Description of Artificial Sequence: Synthetic oligonucleotide
guguagcgagcgaacucug

SEQ ID NO: 1494598 - RNA, 19 nt, Artificial Sequence
  Description of Artificial Sequence: Synthetic oligonucleotide
ggugcgcagccaucuguug

SEQ ID NO: 1494599 - RNA, 19 nt, Artificial Sequence
  Description of Artificial Sequence: Synthetic oligonucleotide
cgcggaacugauucucagg

SEQ ID NO: 1494600 - RNA, 19 nt, Artificial Sequence
  Description of Artificial Sequence: Synthetic oligonucleotide
gggugaucaacugcuuuuc

SEQ ID NO: 1494601 - RNA, 19 nt, Artificial Sequence
  Description of Artificial Sequence: Synthetic oligonucleotide
ccgguagaccugcuugucc

SEQ ID NO: 1494602 - RNA, 19 nt, Artificial Sequence
  Description of Artificial Sequence: Synthetic oligonucleotide
gcguuguuaaucaugcccu

SEQ ID NO: 1494603 - RNA, 19 nt, Artificial Sequence
  Description of Artificial Sequence: Synthetic oligonucleotide
gucuccguuaaaaccauuu

SEQ ID NO: 1494604 - RNA, 19 nt, Artificial Sequence
  Description of Artificial Sequence: Synthetic oligonucleotide
caguaguggcgcccgucuc

SEQ ID NO: 1494605 - RNA, 19 nt, Artificial Sequence
  Description of Artificial Sequence: Synthetic oligonucleotide
ugggcacguucaucacgcu

SEQ ID NO: 1494606 - RNA, 19 nt, Artificial Sequence
  Description of Artificial Sequence: Synthetic oligonucleotide
cuucuuagagcagcucgua

SEQ ID NO: 1494607 - RNA, 19 nt, Artificial Sequence
  Description of Artificial Sequence: Synthetic oligonucleotide
ucgcauccucaggaguggu

SEQ ID NO: 1494608 - RNA, 19 nt, Artificial Sequence
  Description of Artificial Sequence: Synthetic oligonucleotide
ucauggcggccacgauggu

SEQ ID NO: 1494609 - RNA, 19 nt, Artificial Sequence
  Description of Artificial Sequence: Synthetic oligonucleotide
gcucguauuggcggaggug

SEQ ID NO: 1494610 - RNA, 19 nt, Artificial Sequence
  Description of Artificial Sequence: Synthetic oligonucleotide
ccguuaaaaccauuuacau

SEQ ID NO: 1494611 - RNA, 19 nt, Artificial Sequence
  Description of Artificial Sequence: Synthetic oligonucleotide
ccgccuuaagcuuacuaaa

SEQ ID NO: 1494612 - RNA, 19 nt, Artificial Sequence
  Description of Artificial Sequence: Synthetic oligonucleotide
gcgcucauagcaggcacgc

SEQ ID NO: 1494613 - RNA, 19 nt, Artificial Sequence
  Description of Artificial Sequence: Synthetic oligonucleotide
caaaguugggcacguucau

SEQ ID NO: 1494614 - RNA, 19 nt, Artificial Sequence
  Description of Artificial Sequence: Synthetic oligonucleotide
gcuuggcacguagucggcc

SEQ ID NO: 1494615 - RNA, 19 nt, Artificial Sequence
  Description of Artificial Sequence: Synthetic oligonucleotide
gcggcgcucaucgcgcugg

SEQ ID NO: 1494616 - RNA, 19 nt, Artificial Sequence
  Description of Artificial Sequence: Synthetic oligonucleotide
gugcguggcccgguagacc

SEQ ID NO: 1494617 - RNA, 19 nt, Artificial Sequence
  Description of Artificial Sequence: Synthetic oligonucleotide
ccaccacgaagaugauggc

SEQ ID NO: 1494618 - RNA, 19 nt, Artificial Sequence
  Description of Artificial Sequence: Synthetic oligonucleotide
gguugcucauggcggccac

SEQ ID NO: 1494619 - RNA, 19 nt, Artificial Sequence
  Description of Artificial Sequence: Synthetic oligonucleotide
auccacuugcggcgcucau

SEQ ID NO: 1494620 - RNA, 19 nt, Artificial Sequence
  Description of Artificial Sequence: Synthetic oligonucleotide
uaguggcgcccgucuccgc

SEQ ID NO: 1494621 - RNA, 19 nt, Artificial Sequence
  Description of Artificial Sequence: Synthetic oligonucleotide
gugguguagcgagcgaacu

SEQ ID NO: 1494622 - RNA, 19 nt, Artificial Sequence
  Description of Artificial Sequence: Synthetic oligonucleotide
gcgaacucuggaaaguagu

SEQ ID NO: 1494623 - RNA, 19 nt, Artificial Sequence
  Description of Artificial Sequence: Synthetic oligonucleotide
gcagcucguauuggcggag

SEQ ID NO: 1494624 - RNA, 19 nt, Artificial Sequence
  Description of Artificial Sequence: Synthetic oligonucleotide
ggagcgcucauagcaggca

SEQ ID NO: 1494625 - RNA, 19 nt, Artificial Sequence
  Description of Artificial Sequence: Synthetic oligonucleotide
ggugcguggcccgguagac

SEQ ID NO: 1494626 - RNA, 19 nt, Artificial Sequence
  Description of Artificial Sequence: Synthetic oligonucleotide
caucgcgcuggccgcccac

SEQ ID NO: 1494627 - RNA, 19 nt, Artificial Sequence
  Description of Artificial Sequence: Synthetic oligonucleotide
ggagugguguagcgagcga

SEQ ID NO: 1494628 - RNA, 19 nt, Artificial Sequence
  Description of Artificial Sequence: Synthetic oligonucleotide
gcaguaguggcgcccgucu

SEQ ID NO: 1494629 - RNA, 19 nt, Artificial Sequence
  Description of Artificial Sequence: Synthetic oligonucleotide
ccuucuuagagcagcucgu

SEQ ID NO: 1494630 - RNA, 19 nt, Artificial Sequence
  Description of Artificial Sequence: Synthetic oligonucleotide
gccuucucgucuccguuaa

SEQ ID NO: 1494631 - RNA, 19 nt, Artificial Sequence
  Description of Artificial Sequence: Synthetic oligonucleotide
gcccuauggugggugauca

SEQ ID NO: 1494632 - RNA, 19 nt, Artificial Sequence
  Description of Artificial Sequence: Synthetic oligonucleotide
ggaagguugcguuguuaau

SEQ ID NO: 1494633 - RNA, 19 nt, Artificial Sequence
  Description of Artificial Sequence: Synthetic oligonucleotide
augcccuauggugggugau

SEQ ID NO: 1494634 - RNA, 19 nt, Artificial Sequence
  Description of Artificial Sequence: Synthetic oligonucleotide
ccacgcggaacugauucuc

SEQ ID NO: 1494635 - RNA, 19 nt, Artificial Sequence
  Description of Artificial Sequence: Synthetic oligonucleotide
caucucgaaugaaguacuu

SEQ ID NO: 1494636 - RNA, 19 nt, Artificial Sequence
  Description of Artificial Sequence: Synthetic oligonucleotide
ugcaggcgguuggucuggu

SEQ ID NO: 1494637 - RNA, 19 nt, Artificial Sequence
  Description of Artificial Sequence: Synthetic oligonucleotide
uggcggccacgaugguuuc

SEQ ID NO: 1494638 - RNA, 19 nt, Artificial Sequence
  Description of Artificial Sequence: Synthetic oligonucleotide
cagcgaagcagguccuggu

SEQ ID NO: 1494639 - RNA, 19 nt, Artificial Sequence
  Description of Artificial Sequence: Synthetic oligonucleotide
caauugcguuucacucuua

SEQ ID NO: 1494640 - RNA, 19 nt, Artificial Sequence
  Description of Artificial Sequence: Synthetic oligonucleotide
gcaugcgcuggaugauguc

SEQ ID NO: 1494641 - RNA, 19 nt, Artificial Sequence
  Description of Artificial Sequence: Synthetic oligonucleotide
ggcagucguugaagacgcg

SEQ ID NO: 1494642 - RNA, 19 nt, Artificial Sequence
  Description of Artificial Sequence: Synthetic oligonucleotide
cgcucaucgcgcuggccgc

SEQ ID NO: 1494643 - RNA, 19 nt, Artificial Sequence
  Description of Artificial Sequence: Synthetic oligonucleotide
ggccgccuuaagcuuacua

SEQ ID NO: 1494644 - RNA, 19 nt, Artificial Sequence
  Description of Artificial Sequence: Synthetic oligonucleotide
cugaagggaagagggguuu

SEQ ID NO: 1494645 - RNA, 19 nt, Artificial Sequence
  Description of Artificial Sequence: Synthetic oligonucleotide
gcggugcguggcccgguag

SEQ ID NO: 1494646 - RNA, 19 nt, Artificial Sequence
  Description of Artificial Sequence: Synthetic oligonucleotide
cguuucacucuuaauuaau

SEQ ID NO: 1494647 - RNA, 19 nt, Artificial Sequence
  Description of Artificial Sequence: Synthetic oligonucleotide
gguacucauuggagcgcuc

SEQ ID NO: 1494648 - RNA, 19 nt, Artificial Sequence
  Description of Artificial Sequence: Synthetic oligonucleotide
gcucaucgcgcuggccgcc

SEQ ID NO: 1494649 - RNA, 19 nt, Artificial Sequence
  Description of Artificial Sequence: Synthetic oligonucleotide
ggaacuuuuguggccuauu

SEQ ID NO: 1494650 - RNA, 19 nt, Artificial Sequence
  Description of Artificial Sequence: Synthetic oligonucleotide
caggcacgcacucccucgu

SEQ ID NO: 1494651 - RNA, 19 nt, Artificial Sequence
  Description of Artificial Sequence: Synthetic oligonucleotide
cgcguggguccucuccggg

SEQ ID NO: 1494652 - RNA, 19 nt, Artificial Sequence
  Description of Artificial Sequence: Synthetic oligonucleotide
cgauuucccagcgaggacu

SEQ ID NO: 1494653 - RNA, 19 nt, Artificial Sequence
  Description of Artificial Sequence: Synthetic oligonucleotide
gcccgguagaccugcuugu

SEQ ID NO: 1494654 - RNA, 19 nt, Artificial Sequence
  Description of Artificial Sequence: Synthetic oligonucleotide
cgcuuggcacguagucggc

SEQ ID NO: 1494655 - RNA, 19 nt, Artificial Sequence
  Description of Artificial Sequence: Synthetic oligonucleotide
cccgguagaccugcuuguc

SEQ ID NO: 1494656 - RNA, 19 nt, Artificial Sequence
  Description of Artificial Sequence: Synthetic oligonucleotide
ggugcaugcgcuggaugau

SEQ ID NO: 1494657 - RNA, 19 nt, Artificial Sequence
  Description of Artificial Sequence: Synthetic oligonucleotide
ggcccgggucacgcguggg

SEQ ID NO: 1494658 - RNA, 19 nt, Artificial Sequence
  Description of Artificial Sequence: Synthetic oligonucleotide
cgccuuaagcuuacuaaau

SEQ ID NO: 1494659 - RNA, 19 nt, Artificial Sequence
  Description of Artificial Sequence: Synthetic oligonucleotide
ccacgaagaugauggcagu

SEQ ID NO: 1494660 - RNA, 19 nt, Artificial Sequence
  Description of Artificial Sequence: Synthetic oligonucleotide
acgcggcagcgaagcaggu

SEQ ID NO: 1494661 - RNA, 19 nt, Artificial Sequence
  Description of Artificial Sequence: Synthetic oligonucleotide
aggcggugcguggcccggu

SEQ ID NO: 1494662 - RNA, 19 nt, Artificial Sequence
  Description of Artificial Sequence: Synthetic oligonucleotide
aggccgccuuaagcuuacu

SEQ ID NO: 1494663 - RNA, 19 nt, Artificial Sequence
  Description of Artificial Sequence: Synthetic oligonucleotide
gggaacuuuuguggccuau

SEQ ID NO: 1494664 - RNA, 19 nt, Artificial Sequence
  Description of Artificial Sequence: Synthetic oligonucleotide
cguucaucacgcucagaau

SEQ ID NO: 1494665 - RNA, 19 nt, Artificial Sequence
  Description of Artificial Sequence: Synthetic oligonucleotide
ggcggccacgaugguuuca

SEQ ID NO: 1494666 - RNA, 19 nt, Artificial Sequence
  Description of Artificial Sequence: Synthetic oligonucleotide
ggcggugcguggcccggua

SEQ ID NO: 1494667 - RNA, 19 nt, Artificial Sequence
  Description of Artificial Sequence: Synthetic oligonucleotide
ccgucuccgcuggcagugc

SEQ ID NO: 1494668 - RNA, 19 nt, Artificial Sequence
  Description of Artificial Sequence: Synthetic oligonucleotide
cggugcguggcccgguaga

SEQ ID NO: 1494669 - RNA, 19 nt, Artificial Sequence
  Description of Artificial Sequence: Synthetic oligonucleotide
cgggcucgggagucgcauc

SEQ ID NO: 1494670 - RNA, 19 nt, Artificial Sequence
  Description of Artificial Sequence: Synthetic oligonucleotide
gcgcccgucuccgcuggca

SEQ ID NO: 1494671 - RNA, 19 nt, Artificial Sequence
  Description of Artificial Sequence: Synthetic oligonucleotide
gcccgggucacgcgugggu

SEQ ID NO: 1494672 - RNA, 19 nt, Artificial Sequence
  Description of Artificial Sequence: Synthetic oligonucleotide
gcguggcccgguagaccug

SEQ ID NO: 1494673 - RNA, 19 nt, Artificial Sequence
  Description of Artificial Sequence: Synthetic oligonucleotide
cgcggcagcgaagcagguc

SEQ ID NO: 1494674 - RNA, 19 nt, Artificial Sequence
  Description of Artificial Sequence: Synthetic oligonucleotide
ccuucucgucuccguuaaa

SEQ ID NO: 1494675 - RNA, 19 nt, Artificial Sequence
  Description of Artificial Sequence: Synthetic oligonucleotide
ggcucgggagucgcauccu

SEQ ID NO: 1494676 - RNA, 19 nt, Artificial Sequence
  Description of Artificial Sequence: Synthetic oligonucleotide
ccucuccgggcucgggagu

SEQ ID NO: 1494677 - RNA, 19 nt, Artificial Sequence
  Description of Artificial Sequence: Synthetic oligonucleotide
cgcucauagcaggcacgca

SEQ ID NO: 1494678 - RNA, 19 nt, Artificial Sequence
  Description of Artificial Sequence: Synthetic oligonucleotide
gcaggcgguuggucugguu

SEQ ID NO: 1494679 - RNA, 19 nt, Artificial Sequence
  Description of Artificial Sequence: Synthetic oligonucleotide
ccucccgaaugaccauguu

SEQ ID NO: 1494680 - RNA, 19 nt, Artificial Sequence
  Description of Artificial Sequence: Synthetic oligonucleotide
cgucuccguuaaaaccauu

SEQ ID NO: 1494681 - RNA, 19 nt, Artificial Sequence
  Description of Artificial Sequence: Synthetic oligonucleotide
ccuggucgcuuggcacgua

SEQ ID NO: 1494682 - RNA, 19 nt, Artificial Sequence
  Description of Artificial Sequence: Synthetic oligonucleotide
cgggucacgcguggguccu

SEQ ID NO: 1494683 - RNA, 19 nt, Artificial Sequence
  Description of Artificial Sequence: Synthetic oligonucleotide
auucaguucaugcagaaac

SEQ ID NO: 1494684 - RNA, 19 nt, Artificial Sequence
  Description of Artificial Sequence: Synthetic oligonucleotide
aaggaaaauuguuaguguc

SEQ ID NO: 1494685 - RNA, 19 nt, Artificial Sequence
  Description of Artificial Sequence: Synthetic oligonucleotide
aaaaguucgacacagcuua

SEQ ID NO: 1494686 - RNA, 19 nt, Artificial Sequence
  Description of Artificial Sequence: Synthetic oligonucleotide
aaaauuguuagugucacca

SEQ ID NO: 1494687 - RNA, 19 nt, Artificial Sequence
  Description of Artificial Sequence: Synthetic oligonucleotide
aguuaugugacguuccaac

SEQ ID NO: 1494688 - RNA, 19 nt, Artificial Sequence
  Description of Artificial Sequence: Synthetic oligonucleotide
aaagaagucgaacaaccug

SEQ ID NO: 1494689 - RNA, 19 nt, Artificial Sequence
  Description of Artificial Sequence: Synthetic oligonucleotide
gacaccucaaaguagaaug

SEQ ID NO: 1494690 - RNA, 19 nt, Artificial Sequence
  Description of Artificial Sequence: Synthetic oligonucleotide
agauaaggaaaauuguuag

SEQ ID NO: 1494691 - RNA, 19 nt, Artificial Sequence
  Description of Artificial Sequence: Synthetic oligonucleotide
agaacaaaaugauuaaucu

SEQ ID NO: 1494692 - RNA, 19 nt, Artificial Sequence
  Description of Artificial Sequence: Synthetic oligonucleotide
aaggugacaacagagcuac

SEQ ID NO: 1494693 - RNA, 19 nt, Artificial Sequence
  Description of Artificial Sequence: Synthetic oligonucleotide
acaaaagugaaauguggac

SEQ ID NO: 1494694 - RNA, 19 nt, Artificial Sequence
  Description of Artificial Sequence: Synthetic oligonucleotide
ugguauacuugcuucaugg

SEQ ID NO: 1494695 - RNA, 19 nt, Artificial Sequence
  Description of Artificial Sequence: Synthetic oligonucleotide
uccgcgaugaugaagcacg

SEQ ID NO: 1494696 - RNA, 19 nt, Artificial Sequence
  Description of Artificial Sequence: Synthetic oligonucleotide
aagaagucgaacaaccugg

SEQ ID NO: 1494697 - RNA, 19 nt, Artificial Sequence
  Description of Artificial Sequence: Synthetic oligonucleotide
uauacuugcuucauggugu

SEQ ID NO: 1494698 - RNA, 19 nt, Artificial Sequence
  Description of Artificial Sequence: Synthetic oligonucleotide
aaguauauggucucuccag

SEQ ID NO: 1494699 - RNA, 19 nt, Artificial Sequence
  Description of Artificial Sequence: Synthetic oligonucleotide
uuaaggugacaacagagcu

SEQ ID NO: 1494700 - RNA, 19 nt, Artificial Sequence
  Description of Artificial Sequence: Synthetic oligonucleotide
uacccuaugggaaugucgg

SEQ ID NO: 1494701 - RNA, 19 nt, Artificial Sequence
  Description of Artificial Sequence: Synthetic oligonucleotide
auaaggaaaauuguuagug

SEQ ID NO: 1494702 - RNA, 19 nt, Artificial Sequence
  Description of Artificial Sequence: Synthetic oligonucleotide
ugguauuccgagaugacgc

SEQ ID NO: 1494703 - RNA, 19 nt, Artificial Sequence
  Description of Artificial Sequence: Synthetic oligonucleotide
uucgacacagcuuaaagaa

SEQ ID NO: 1494704 - RNA, 19 nt, Artificial Sequence
  Description of Artificial Sequence: Synthetic oligonucleotide
uuccgguuaaacuugaacu

SEQ ID NO: 1494705 - RNA, 19 nt, Artificial Sequence
  Description of Artificial Sequence: Synthetic oligonucleotide
gauuaaggugacaacagag

SEQ ID NO: 1494706 - RNA, 19 nt, Artificial Sequence
  Description of Artificial Sequence: Synthetic oligonucleotide
ugacaacagagcuacacag

SEQ ID NO: 1494707 - RNA, 19 nt, Artificial Sequence
  Description of Artificial Sequence: Synthetic oligonucleotide
ucuguagguaggaacauga

SEQ ID NO: 1494708 - RNA, 19 nt, Artificial Sequence
  Description of Artificial Sequence: Synthetic oligonucleotide
aauuguuagugucaccaga

SEQ ID NO: 1494709 - RNA, 19 nt, Artificial Sequence
  Description of Artificial Sequence: Synthetic oligonucleotide
aaggauuaaggugacaaca

SEQ ID NO: 1494710 - RNA, 19 nt, Artificial Sequence
  Description of Artificial Sequence: Synthetic oligonucleotide
cuccagauaaggaaaauug

SEQ ID NO: 1494711 - RNA, 19 nt, Artificial Sequence
  Description of Artificial Sequence: Synthetic oligonucleotide
uuaugcucgccguaugucg

SEQ ID NO: 1494712 - RNA, 19 nt, Artificial Sequence
  Description of Artificial Sequence: Synthetic oligonucleotide
aguauauggucucuccagg

SEQ ID NO: 1494713 - RNA, 19 nt, Artificial Sequence
  Description of Artificial Sequence: Synthetic oligonucleotide
uaugugacguuccaacacc

SEQ ID NO: 1494714 - RNA, 19 nt, Artificial Sequence
  Description of Artificial Sequence: Synthetic oligonucleotide
aaauuguuagugucaccag

SEQ ID NO: 1494715 - RNA, 19 nt, Artificial Sequence
  Description of Artificial Sequence: Synthetic oligonucleotide
acagaaacccugaaggagc

SEQ ID NO: 1494716 - RNA, 19 nt, Artificial Sequence
  Description of Artificial Sequence: Synthetic oligonucleotide
ucugaaacuuagcacaguc

SEQ ID NO: 1494717 - RNA, 19 nt, Artificial Sequence
  Description of Artificial Sequence: Synthetic oligonucleotide
cuaccaggcgcacagaccg

SEQ ID NO: 1494718 - RNA, 19 nt, Artificial Sequence
  Description of Artificial Sequence: Synthetic oligonucleotide
uuaugugacguuccaacac

SEQ ID NO: 1494719 - RNA, 19 nt, Artificial Sequence
  Description of Artificial Sequence: Synthetic oligonucleotide
uuguuggagaucccaaugc

SEQ ID NO: 1494720 - RNA, 19 nt, Artificial Sequence
  Description of Artificial Sequence: Synthetic oligonucleotide
aaaguuaugugacguucca

SEQ ID NO: 1494721 - RNA, 19 nt, Artificial Sequence
  Description of Artificial Sequence: Synthetic oligonucleotide
uggacaaugaaccucuaua

SEQ ID NO: 1494722 - RNA, 19 nt, Artificial Sequence
  Description of Artificial Sequence: Synthetic oligonucleotide
acaugaaggauuaagguga

SEQ ID NO: 1494723 - RNA, 19 nt, Artificial Sequence
  Description of Artificial Sequence: Synthetic oligonucleotide
uauauggucucuccagggc

SEQ ID NO: 1494724 - RNA, 19 nt, Artificial Sequence
  Description of Artificial Sequence: Synthetic oligonucleotide
aagaugccaaucuccugcg

SEQ ID NO: 1494725 - RNA, 19 nt, Artificial Sequence
  Description of Artificial Sequence: Synthetic oligonucleotide
ugugcacccaauacacugg

SEQ ID NO: 1494726 - RNA, 19 nt, Artificial Sequence
  Description of Artificial Sequence: Synthetic oligonucleotide
aguucgacacagcuuaaag

SEQ ID NO: 1494727 - RNA, 19 nt, Artificial Sequence
  Description of Artificial Sequence: Synthetic oligonucleotide
aucuccgcgaugaugaagc

SEQ ID NO: 1494728 - RNA, 19 nt, Artificial Sequence
  Description of Artificial Sequence: Synthetic oligonucleotide
acagauauggcaaugccug

SEQ ID NO: 1494729 - RNA, 19 nt, Artificial Sequence
  Description of Artificial Sequence: Synthetic oligonucleotide
guauacuugcuucauggug

SEQ ID NO: 1494730 - RNA, 19 nt, Artificial Sequence
  Description of Artificial Sequence: Synthetic oligonucleotide
uccaaagaacaaaagugaa

SEQ ID NO: 1494731 - RNA, 19 nt, Artificial Sequence
  Description of Artificial Sequence: Synthetic oligonucleotide
caaaguuaugugacguucc

SEQ ID NO: 1494732 - RNA, 19 nt, Artificial Sequence
  Description of Artificial Sequence: Synthetic oligonucleotide
agaaacucaacugccaucu

SEQ ID NO: 1494733 - RNA, 19 nt, Artificial Sequence
  Description of Artificial Sequence: Synthetic oligonucleotide
uuggcuauguccaggucgc

SEQ ID NO: 1494734 - RNA, 19 nt, Artificial Sequence
  Description of Artificial Sequence: Synthetic oligonucleotide
guauauggucucuccaggg

SEQ ID NO: 1494735 - RNA, 19 nt, Artificial Sequence
  Description of Artificial Sequence: Synthetic oligonucleotide
gcuacauuugcucugggcc

SEQ ID NO: 1494736 - RNA, 19 nt, Artificial Sequence
  Description of Artificial Sequence: Synthetic oligonucleotide
ugucucaugcccagaauac

SEQ ID NO: 1494737 - RNA, 19 nt, Artificial Sequence
  Description of Artificial Sequence: Synthetic oligonucleotide
uucacgaucugguauacuu

SEQ ID NO: 1494738 - RNA, 19 nt, Artificial Sequence
  Description of Artificial Sequence: Synthetic oligonucleotide
cuggacaguaguagcaggg

SEQ ID NO: 1494739 - RNA, 19 nt, Artificial Sequence
  Description of Artificial Sequence: Synthetic oligonucleotide
acaacagagcuacacagaa

SEQ ID NO: 1494740 - RNA, 19 nt, Artificial Sequence
  Description of Artificial Sequence: Synthetic oligonucleotide
uccgguuaaacuugaacuc

SEQ ID NO: 1494741 - RNA, 19 nt, Artificial Sequence
  Description of Artificial Sequence: Synthetic oligonucleotide
gauuugauuuucuugcugu

SEQ ID NO: 1494742 - RNA, 19 nt, Artificial Sequence
  Description of Artificial Sequence: Synthetic oligonucleotide
uaugggaaugucgggaaag

SEQ ID NO: 1494743 - RNA, 19 nt, Artificial Sequence
  Description of Artificial Sequence: Synthetic oligonucleotide
caaucuccugcgcauagcg

SEQ ID NO: 1494744 - RNA, 19 nt, Artificial Sequence
  Description of Artificial Sequence: Synthetic oligonucleotide
caaaaugauuaaucucagc

SEQ ID NO: 1494745 - RNA, 19 nt, Artificial Sequence
  Description of Artificial Sequence: Synthetic oligonucleotide
auugauuccaaagaacaaa

SEQ ID NO: 1494746 - RNA, 19 nt, Artificial Sequence
  Description of Artificial Sequence: Synthetic oligonucleotide
agcauugauuccaaagaac

SEQ ID NO: 1494747 - RNA, 19 nt, Artificial Sequence
  Description of Artificial Sequence: Synthetic oligonucleotide
uauuccgagaugacgcgca

SEQ ID NO: 1494748 - RNA, 19 nt, Artificial Sequence
  Description of Artificial Sequence: Synthetic oligonucleotide
ucgacacagcuuaaagaag

SEQ ID NO: 1494749 - RNA, 19 nt, Artificial Sequence
  Description of Artificial Sequence: Synthetic oligonucleotide
gaguuucugguauuccgag

SEQ ID NO: 1494750 - RNA, 19 nt, Artificial Sequence
  Description of Artificial Sequence: Synthetic oligonucleotide
cucaaaguagaauggcuuc

SEQ ID NO: 1494751 - RNA, 19 nt, Artificial Sequence
  Description of Artificial Sequence: Synthetic oligonucleotide
ucacgaucugguauacuug

SEQ ID NO: 1494752 - RNA, 19 nt, Artificial Sequence
  Description of Artificial Sequence: Synthetic oligonucleotide
caacucacucuucugaaac

SEQ ID NO: 1494753 - RNA, 19 nt, Artificial Sequence
  Description of Artificial Sequence: Synthetic oligonucleotide
aucgacugcaucccacugg

SEQ ID NO: 1494754 - RNA, 19 nt, Artificial Sequence
  Description of Artificial Sequence: Synthetic oligonucleotide
cuucugaaacuuagcacag

SEQ ID NO: 1494755 - RNA, 19 nt, Artificial Sequence
  Description of Artificial Sequence: Synthetic oligonucleotide
uccgagaugacgcgcaggu

SEQ ID NO: 1494756 - RNA, 19 nt, Artificial Sequence
  Description of Artificial Sequence: Synthetic oligonucleotide
ggacauucaguucaugcag

SEQ ID NO: 1494757 - RNA, 19 nt, Artificial Sequence
  Description of Artificial Sequence: Synthetic oligonucleotide
aauacccuaugggaauguc

SEQ ID NO: 1494758 - RNA, 19 nt, Artificial Sequence
  Description of Artificial Sequence: Synthetic oligonucleotide
ucgacugcaucccacugga

SEQ ID NO: 1494759 - RNA, 19 nt, Artificial Sequence
  Description of Artificial Sequence: Synthetic oligonucleotide
auacacuggacaguaguag

SEQ ID NO: 1494760 - RNA, 19 nt, Artificial Sequence
  Description of Artificial Sequence: Synthetic oligonucleotide
aaugcccgcucuaccaggc

SEQ ID NO: 1494761 - RNA, 19 nt, Artificial Sequence
  Description of Artificial Sequence: Synthetic oligonucleotide
ugaguggucacuccccuuc

SEQ ID NO: 1494762 - RNA, 19 nt, Artificial Sequence
  Description of Artificial Sequence: Synthetic oligonucleotide
ugauuaaucucagcauuga

SEQ ID NO: 1494763 - RNA, 19 nt, Artificial Sequence
  Description of Artificial Sequence: Synthetic oligonucleotide
cauaggccgaccuuucuug

SEQ ID NO: 1494764 - RNA, 19 nt, Artificial Sequence
  Description of Artificial Sequence: Synthetic oligonucleotide
cugaaggagcuacauuugc

SEQ ID NO: 1494765 - RNA, 19 nt, Artificial Sequence
  Description of Artificial Sequence: Synthetic oligonucleotide
aggauuaaggugacaacag

SEQ ID NO: 1494766 - RNA, 19 nt, Artificial Sequence
  Description of Artificial Sequence: Synthetic oligonucleotide
auacuugcuucaugguguc

SEQ ID NO: 1494767 - RNA, 19 nt, Artificial Sequence
  Description of Artificial Sequence: Synthetic oligonucleotide
ucggggauucucacuuugg

SEQ ID NO: 1494768 - RNA, 19 nt, Artificial Sequence
  Description of Artificial Sequence: Synthetic oligonucleotide
ugcuucgaaguauaugguc

SEQ ID NO: 1494769 - RNA, 19 nt, Artificial Sequence
  Description of Artificial Sequence: Synthetic oligonucleotide
cugguauuccgagaugacg

SEQ ID NO: 1494770 - RNA, 19 nt, Artificial Sequence
  Description of Artificial Sequence: Synthetic oligonucleotide
augauuaaucucagcauug

SEQ ID NO: 1494771 - RNA, 19 nt, Artificial Sequence
  Description of Artificial Sequence: Synthetic oligonucleotide
gaaacuuagcacagucagc

SEQ ID NO: 1494772 - RNA, 19 nt, Artificial Sequence
  Description of Artificial Sequence: Synthetic oligonucleotide
cguuccaacaccuuggccc

SEQ ID NO: 1494773 - RNA, 19 nt, Artificial Sequence
  Description of Artificial Sequence: Synthetic oligonucleotide
uucggggauucucacuuug

SEQ ID NO: 1494774 - RNA, 19 nt, Artificial Sequence
  Description of Artificial Sequence: Synthetic oligonucleotide
aggauagccuuuaggcucc

SEQ ID NO: 1494775 - RNA, 19 nt, Artificial Sequence
  Description of Artificial Sequence: Synthetic oligonucleotide
guucuggccgaucuccgcg

SEQ ID NO: 1494776 - RNA, 19 nt, Artificial Sequence
  Description of Artificial Sequence: Synthetic oligonucleotide
agggugugcacccaauaca

SEQ ID NO: 1494777 - RNA, 19 nt, Artificial Sequence
  Description of Artificial Sequence: Synthetic oligonucleotide
guuaugugacguuccaaca

SEQ ID NO: 1494778 - RNA, 19 nt, Artificial Sequence
  Description of Artificial Sequence: Synthetic oligonucleotide
auaggccgaccuuucuugg

SEQ ID NO: 1494779 - RNA, 19 nt, Artificial Sequence
  Description of Artificial Sequence: Synthetic oligonucleotide
uauggucucuccagggccu

SEQ ID NO: 1494780 - RNA, 19 nt, Artificial Sequence
  Description of Artificial Sequence: Synthetic oligonucleotide
augaagcacggaugcugcc

SEQ ID NO: 1494781 - RNA, 19 nt, Artificial Sequence
  Description of Artificial Sequence: Synthetic oligonucleotide
acuaaguugaagaugucuu

SEQ ID NO: 1494782 - RNA, 19 nt, Artificial Sequence
  Description of Artificial Sequence: Synthetic oligonucleotide
acaccucaaaguagaaugg

SEQ ID NO: 1494783 - RNA, 19 nt, Artificial Sequence
  Description of Artificial Sequence: Synthetic oligonucleotide
auacccuaugggaaugucg

SEQ ID NO: 1494784 - RNA, 19 nt, Artificial Sequence
  Description of Artificial Sequence: Synthetic oligonucleotide
caggaggauagccuuuagg

SEQ ID NO: 1494785 - RNA, 19 nt, Artificial Sequence
  Description of Artificial Sequence: Synthetic oligonucleotide
aauacacuggacaguagua

SEQ ID NO: 1494786 - RNA, 19 nt, Artificial Sequence
  Description of Artificial Sequence: Synthetic oligonucleotide
auauggcaaugccugucuc

SEQ ID NO: 1494787 - RNA, 19 nt, Artificial Sequence
  Description of Artificial Sequence: Synthetic oligonucleotide
uaugcucgccguaugucgu

SEQ ID NO: 1494788 - RNA, 19 nt, Artificial Sequence
  Description of Artificial Sequence: Synthetic oligonucleotide
gagaugacgcgcagguugg

SEQ ID NO: 1494789 - RNA, 19 nt, Artificial Sequence
  Description of Artificial Sequence: Synthetic oligonucleotide
cuucaugguguccaucgac

SEQ ID NO: 1494790 - RNA, 19 nt, Artificial Sequence
  Description of Artificial Sequence: Synthetic oligonucleotide
ugccaguucuccaggcucc

SEQ ID NO: 1494791 - RNA, 19 nt, Artificial Sequence
  Description of Artificial Sequence: Synthetic oligonucleotide
gguauuccgagaugacgcg

SEQ ID NO: 1494792 - RNA, 19 nt, Artificial Sequence
  Description of Artificial Sequence: Synthetic oligonucleotide
uggcuggacaccucaaagu

SEQ ID NO: 1494793 - RNA, 19 nt, Artificial Sequence
  Description of Artificial Sequence: Synthetic oligonucleotide
uguccaucgacugcauccc

SEQ ID NO: 1494794 - RNA, 19 nt, Artificial Sequence
  Description of Artificial Sequence: Synthetic oligonucleotide
guuggagaucccaaugccc

SEQ ID NO: 1494795 - RNA, 19 nt, Artificial Sequence
  Description of Artificial Sequence: Synthetic oligonucleotide
auuguuagugucaccagau

SEQ ID NO: 1494796 - RNA, 19 nt, Artificial Sequence
  Description of Artificial Sequence: Synthetic oligonucleotide
aaugccugucucaugccca

SEQ ID NO: 1494797 - RNA, 19 nt, Artificial Sequence
  Description of Artificial Sequence: Synthetic oligonucleotide
caugaaggauuaaggugac

SEQ ID NO: 1494798 - RNA, 19 nt, Artificial Sequence
  Description of Artificial Sequence: Synthetic oligonucleotide
gcauugauuccaaagaaca

SEQ ID NO: 1494799 - RNA, 19 nt, Artificial Sequence
  Description of Artificial Sequence: Synthetic oligonucleotide
ggaaaauuguuagugucac

SEQ ID NO: 1494800 - RNA, 19 nt, Artificial Sequence
  Description of Artificial Sequence: Synthetic oligonucleotide
uuguuagugucaccagauc

SEQ ID NO: 1494801 - RNA, 19 nt, Artificial Sequence
  Description of Artificial Sequence: Synthetic oligonucleotide
ugggaaugucgggaaagag

SEQ ID NO: 1494802 - RNA, 19 nt, Artificial Sequence
  Description of Artificial Sequence: Synthetic oligonucleotide
uccaucgacugcaucccac

SEQ ID NO: 1494803 - RNA, 19 nt, Artificial Sequence
  Description of Artificial Sequence: Synthetic oligonucleotide
agaauacccuaugggaaug

SEQ ID NO: 1494804 - RNA, 19 nt, Artificial Sequence
  Description of Artificial Sequence: Synthetic oligonucleotide
gauauggcaaugccugucu

SEQ ID NO: 1494805 - RNA, 19 nt, Artificial Sequence
  Description of Artificial Sequence: Synthetic oligonucleotide
agcuucucguugcaggcca

SEQ ID NO: 1494806 - RNA, 19 nt, Artificial Sequence
  Description of Artificial Sequence: Synthetic oligonucleotide
cagaaacucaacugccauc

SEQ ID NO: 1494807 - RNA, 19 nt, Artificial Sequence
  Description of Artificial Sequence: Synthetic oligonucleotide
cauugauuccaaagaacaa

SEQ ID NO: 1494808 - RNA, 19 nt, Artificial Sequence
  Description of Artificial Sequence: Synthetic oligonucleotide
uuagugucaccagauccaa

SEQ ID NO: 1494809 - RNA, 19 nt, Artificial Sequence
  Description of Artificial Sequence: Synthetic oligonucleotide
ugcgcauagcgcugcagcu

SEQ ID NO: 1494810 - RNA, 19 nt, Artificial Sequence
  Description of Artificial Sequence: Synthetic oligonucleotide
cagggugugcacccaauac

SEQ ID NO: 1494811 - RNA, 19 nt, Artificial Sequence
  Description of Artificial Sequence: Synthetic oligonucleotide
gugcggaucaugcgcuugg

SEQ ID NO: 1494812 - RNA, 19 nt, Artificial Sequence
  Description of Artificial Sequence: Synthetic oligonucleotide
uccaaaguuaugugacguu

SEQ ID NO: 1494813 - RNA, 19 nt, Artificial Sequence
  Description of Artificial Sequence: Synthetic oligonucleotide
ggugacaacagagcuacac

SEQ ID NO: 1494814 - RNA, 19 nt, Artificial Sequence
  Description of Artificial Sequence: Synthetic oligonucleotide
augccgcuuaugcucgccg

SEQ ID NO: 1494815 - RNA, 19 nt, Artificial Sequence
  Description of Artificial Sequence: Synthetic oligonucleotide
ugcccacuaaguugaagau

SEQ ID NO: 1494816 - RNA, 19 nt, Artificial Sequence
  Description of Artificial Sequence: Synthetic oligonucleotide
uggcugaauucuagaugcc

SEQ ID NO: 1494817 - RNA, 19 nt, Artificial Sequence
  Description of Artificial Sequence: Synthetic oligonucleotide
aaguuaugugacguuccaa

SEQ ID NO: 1494818 - RNA, 19 nt, Artificial Sequence
  Description of Artificial Sequence: Synthetic oligonucleotide
uucgaaguauauggucucu

SEQ ID NO: 1494819 - RNA, 19 nt, Artificial Sequence
  Description of Artificial Sequence: Synthetic oligonucleotide
gagaucaccauaggccgac

SEQ ID NO: 1494820 - RNA, 19 nt, Artificial Sequence
  Description of Artificial Sequence: Synthetic oligonucleotide
ggagcuacauuugcucugg

SEQ ID NO: 1494821 - RNA, 19 nt, Artificial Sequence
  Description of Artificial Sequence: Synthetic oligonucleotide
gucaggacggugccuucgg

SEQ ID NO: 1494822 - RNA, 19 nt, Artificial Sequence
  Description of Artificial Sequence: Synthetic oligonucleotide
cugguauacuugcuucaug

SEQ ID NO: 1494823 - RNA, 19 nt, Artificial Sequence
  Description of Artificial Sequence: Synthetic oligonucleotide
gcugaauucuagaugccgc

SEQ ID NO: 1494824 - RNA, 19 nt, Artificial Sequence
  Description of Artificial Sequence: Synthetic oligonucleotide
uggacaguaguagcagggu

SEQ ID NO: 1494825 - RNA, 19 nt, Artificial Sequence
  Description of Artificial Sequence: Synthetic oligonucleotide
cacuggacaguaguagcag

SEQ ID NO: 1494826 - RNA, 19 nt, Artificial Sequence
  Description of Artificial Sequence: Synthetic oligonucleotide
cuuaugcucgccguauguc

SEQ ID NO: 1494827 - RNA, 19 nt, Artificial Sequence
  Description of Artificial Sequence: Synthetic oligonucleotide
acuuuggccaccacagacu

SEQ ID NO: 1494828 - RNA, 19 nt, Artificial Sequence
  Description of Artificial Sequence: Synthetic oligonucleotide
guaggcacuggugcacugg

SEQ ID NO: 1494829 - RNA, 19 nt, Artificial Sequence
  Description of Artificial Sequence: Synthetic oligonucleotide
uaggccgaccuuucuuggc

SEQ ID NO: 1494830 - RNA, 19 nt, Artificial Sequence
  Description of Artificial Sequence: Synthetic oligonucleotide
gcacccaauacacuggaca

SEQ ID NO: 1494831 - RNA, 19 nt, Artificial Sequence
  Description of Artificial Sequence: Synthetic oligonucleotide
aggccgaccuuucuuggcu

SEQ ID NO: 1494832 - RNA, 19 nt, Artificial Sequence
  Description of Artificial Sequence: Synthetic oligonucleotide
ucgaaguauauggucucuc

SEQ ID NO: 1494833 - RNA, 19 nt, Artificial Sequence
  Description of Artificial Sequence: Synthetic oligonucleotide
uccggcugcaguggguagg

SEQ ID NO: 1494834 - RNA, 19 nt, Artificial Sequence
  Description of Artificial Sequence: Synthetic oligonucleotide
aaguucgacacagcuuaaa

SEQ ID NO: 1494835 - RNA, 19 nt, Artificial Sequence
  Description of Artificial Sequence: Synthetic oligonucleotide
ucaccauaggccgaccuuu

SEQ ID NO: 1494836 - RNA, 19 nt, Artificial Sequence
  Description of Artificial Sequence: Synthetic oligonucleotide
gaguggucacuccccuucc

SEQ ID NO: 1494837 - RNA, 19 nt, Artificial Sequence
  Description of Artificial Sequence: Synthetic oligonucleotide
agaugccgcuuaugcucgc

SEQ ID NO: 1494838 - RNA, 19 nt, Artificial Sequence
  Description of Artificial Sequence: Synthetic oligonucleotide
uuccgagaugacgcgcagg

SEQ ID NO: 1494839 - RNA, 19 nt, Artificial Sequence
  Description of Artificial Sequence: Synthetic oligonucleotide
uucucguugcaggccaucu

SEQ ID NO: 1494840 - RNA, 19 nt, Artificial Sequence
  Description of Artificial Sequence: Synthetic oligonucleotide
uacugggcguggcugaauu

SEQ ID NO: 1494841 - RNA, 19 nt, Artificial Sequence
  Description of Artificial Sequence: Synthetic oligonucleotide
ucucguugcaggccaucuc

SEQ ID NO: 1494842 - RNA, 19 nt, Artificial Sequence
  Description of Artificial Sequence: Synthetic oligonucleotide
ucguugcaggccaucucac

SEQ ID NO: 1494843 - RNA, 19 nt, Artificial Sequence
  Description of Artificial Sequence: Synthetic oligonucleotide
ugaauucuagaugccgcuu

SEQ ID NO: 1494844 - RNA, 19 nt, Artificial Sequence
  Description of Artificial Sequence: Synthetic oligonucleotide
uucugaaacuuagcacagu

SEQ ID NO: 1494845 - RNA, 19 nt, Artificial Sequence
  Description of Artificial Sequence: Synthetic oligonucleotide
augacgcgcagguuggcau

SEQ ID NO: 1494846 - RNA, 19 nt, Artificial Sequence
  Description of Artificial Sequence: Synthetic oligonucleotide
guauuccgagaugacgcgc

SEQ ID NO: 1494847 - RNA, 19 nt, Artificial Sequence
  Description of Artificial Sequence: Synthetic oligonucleotide
guucaugcagaaacucaac

SEQ ID NO: 1494848 - RNA, 19 nt, Artificial Sequence
  Description of Artificial Sequence: Synthetic oligonucleotide
aucaccauaggccgaccuu

SEQ ID NO: 1494849 - RNA, 19 nt, Artificial Sequence
  Description of Artificial Sequence: Synthetic oligonucleotide
cugucucaugcccagaaua

SEQ ID NO: 1494850 - RNA, 19 nt, Artificial Sequence
  Description of Artificial Sequence: Synthetic oligonucleotide
cacagauauggcaaugccu

SEQ ID NO: 1494851 - RNA, 19 nt, Artificial Sequence
  Description of Artificial Sequence: Synthetic oligonucleotide
uucuggccgaucuccgcga

SEQ ID NO: 1494852 - RNA, 19 nt, Artificial Sequence
  Description of Artificial Sequence: Synthetic oligonucleotide
augcucgccguaugucguc

SEQ ID NO: 1494853 - RNA, 19 nt, Artificial Sequence
  Description of Artificial Sequence: Synthetic oligonucleotide
uggacaccucaaaguagaa

SEQ ID NO: 1494854 - RNA, 19 nt, Artificial Sequence
  Description of Artificial Sequence: Synthetic oligonucleotide
cuuggcagugcggaucaug

SEQ ID NO: 1494855 - RNA, 19 nt, Artificial Sequence
  Description of Artificial Sequence: Synthetic oligonucleotide
agaucaccauaggccgacc

SEQ ID NO: 1494856 - RNA, 19 nt, Artificial Sequence
  Description of Artificial Sequence: Synthetic oligonucleotide
acauuugcucugggccacc

SEQ ID NO: 1494857 - RNA, 19 nt, Artificial Sequence
  Description of Artificial Sequence: Synthetic oligonucleotide
caguggguaggcacuggug

SEQ ID NO: 1494858 - RNA, 19 nt, Artificial Sequence
  Description of Artificial Sequence: Synthetic oligonucleotide
caucgacugcaucccacug

SEQ ID NO: 1494859 - RNA, 19 nt, Artificial Sequence
  Description of Artificial Sequence: Synthetic oligonucleotide
agaagucgaacaaccugga

SEQ ID NO: 1494860 - RNA, 19 nt, Artificial Sequence
  Description of Artificial Sequence: Synthetic oligonucleotide
ccacagauauggcaaugcc

SEQ ID NO: 1494861 - RNA, 19 nt, Artificial Sequence
  Description of Artificial Sequence: Synthetic oligonucleotide
accauaggccgaccuuucu

SEQ ID NO: 1494862 - RNA, 19 nt, Artificial Sequence
  Description of Artificial Sequence: Synthetic oligonucleotide
gaucaugcgcuuggcuaug

SEQ ID NO: 1494863 - RNA, 19 nt, Artificial Sequence
  Description of Artificial Sequence: Synthetic oligonucleotide
agaugacgcgcagguuggc

SEQ ID NO: 1494864 - RNA, 19 nt, Artificial Sequence
  Description of Artificial Sequence: Synthetic oligonucleotide
aguggucacuccccuucca

SEQ ID NO: 1494865 - RNA, 19 nt, Artificial Sequence
  Description of Artificial Sequence: Synthetic oligonucleotide
uggugcacuggaggaagca

SEQ ID NO: 1494866 - RNA, 19 nt, Artificial Sequence
  Description of Artificial Sequence: Synthetic oligonucleotide
cugaauucuagaugccgcu

SEQ ID NO: 1494867 - RNA, 19 nt, Artificial Sequence
  Description of Artificial Sequence: Synthetic oligonucleotide
uggguaggcacuggugcac

SEQ ID NO: 1494868 - RNA, 19 nt, Artificial Sequence
  Description of Artificial Sequence: Synthetic oligonucleotide
cuggugcacuggaggaagc

SEQ ID NO: 1494869 - RNA, 19 nt, Artificial Sequence
  Description of Artificial Sequence: Synthetic oligonucleotide
ccgaucuccgcgaugauga

SEQ ID NO: 1494870 - RNA, 19 nt, Artificial Sequence
  Description of Artificial Sequence: Synthetic oligonucleotide
ugccgcuuaugcucgccgu

SEQ ID NO: 1494871 - RNA, 19 nt, Artificial Sequence
  Description of Artificial Sequence: Synthetic oligonucleotide
gaugacgcgcagguuggca

SEQ ID NO: 1494872 - RNA, 19 nt, Artificial Sequence
  Description of Artificial Sequence: Synthetic oligonucleotide
ugacgcgcagguuggcauc

SEQ ID NO: 1494873 - RNA, 19 nt, Artificial Sequence
  Description of Artificial Sequence: Synthetic oligonucleotide
uuccaaugggcuggacaca

SEQ ID NO: 1494874 - RNA, 19 nt, Artificial Sequence
  Description of Artificial Sequence: Synthetic oligonucleotide
agugcggaucaugcgcuug

SEQ ID NO: 1494875 - RNA, 19 nt, Artificial Sequence
  Description of Artificial Sequence: Synthetic oligonucleotide
agguaggaacaugaaggau

SEQ ID NO: 1494876 - RNA, 19 nt, Artificial Sequence
  Description of Artificial Sequence: Synthetic oligonucleotide
acccaauacacuggacagu

SEQ ID NO: 1494877 - RNA, 19 nt, Artificial Sequence
  Description of Artificial Sequence: Synthetic oligonucleotide
aaaguucgacacagcuuaa

SEQ ID NO: 1494878 - RNA, 19 nt, Artificial Sequence
  Description of Artificial Sequence: Synthetic oligonucleotide
gaucaccauaggccgaccu

SEQ ID NO: 1494879 - RNA, 19 nt, Artificial Sequence
  Description of Artificial Sequence: Synthetic oligonucleotide
ugccuucggggauucucac

SEQ ID NO: 1494880 - RNA, 19 nt, Artificial Sequence
  Description of Artificial Sequence: Synthetic oligonucleotide
cucgccguaugucgucccc

SEQ ID NO: 1494881 - RNA, 19 nt, Artificial Sequence
  Description of Artificial Sequence: Synthetic oligonucleotide
aguagcaggguggcugaga

SEQ ID NO: 1494882 - RNA, 19 nt, Artificial Sequence
  Description of Artificial Sequence: Synthetic oligonucleotide
cgaugaugaagcacggaug

SEQ ID NO: 1494883 - RNA, 19 nt, Artificial Sequence
  Description of Artificial Sequence: Synthetic oligonucleotide
ggugcacuggaggaagcag

SEQ ID NO: 1494884 - RNA, 19 nt, Artificial Sequence
  Description of Artificial Sequence: Synthetic oligonucleotide
ggaaugucgggaaagaguu

SEQ ID NO: 1494885 - RNA, 19 nt, Artificial Sequence
  Description of Artificial Sequence: Synthetic oligonucleotide
augcuucgaaguauauggu

SEQ ID NO: 1494886 - RNA, 19 nt, Artificial Sequence
  Description of Artificial Sequence: Synthetic oligonucleotide
uaccaggcgcacagaccgc

SEQ ID NO: 1494887 - RNA, 19 nt, Artificial Sequence
  Description of Artificial Sequence: Synthetic oligonucleotide
ggcuggacaccucaaagua

SEQ ID NO: 1494888 - RNA, 19 nt, Artificial Sequence
  Description of Artificial Sequence: Synthetic oligonucleotide
guccaaaguuaugugacgu

SEQ ID NO: 1494889 - RNA, 19 nt, Artificial Sequence
  Description of Artificial Sequence: Synthetic oligonucleotide
ggaguggcacuuuauuuua

SEQ ID NO: 1494890 - RNA, 19 nt, Artificial Sequence
  Description of Artificial Sequence: Synthetic oligonucleotide
uguggacaaugaaccucua

SEQ ID NO: 1494891 - RNA, 19 nt, Artificial Sequence
  Description of Artificial Sequence: Synthetic oligonucleotide
caccauaggccgaccuuuc

SEQ ID NO: 1494892 - RNA, 19 nt, Artificial Sequence
  Description of Artificial Sequence: Synthetic oligonucleotide
ugcggaucaugcgcuuggc

SEQ ID NO: 1494893 - RNA, 19 nt, Artificial Sequence
  Description of Artificial Sequence: Synthetic oligonucleotide
ugggcguggcugaauucua

SEQ ID NO: 1494894 - RNA, 19 nt, Artificial Sequence
  Description of Artificial Sequence: Synthetic oligonucleotide
gguucuggccgaucuccgc

SEQ ID NO: 1494895 - RNA, 19 nt, Artificial Sequence
  Description of Artificial Sequence: Synthetic oligonucleotide
uccuuguacugggcguggc

SEQ ID NO: 1494896 - RNA, 19 nt, Artificial Sequence
  Description of Artificial Sequence: Synthetic oligonucleotide
caacagagcuacacagaaa

SEQ ID NO: 1494897 - RNA, 19 nt, Artificial Sequence
  Description of Artificial Sequence: Synthetic oligonucleotide
cuguagguaggaacaugaa

SEQ ID NO: 1494898 - RNA, 19 nt, Artificial Sequence
  Description of Artificial Sequence: Synthetic oligonucleotide
uuagcacagucagccccac

SEQ ID NO: 1494899 - RNA, 19 nt, Artificial Sequence
  Description of Artificial Sequence: Synthetic oligonucleotide
caugaaugcuucgaaguau

SEQ ID NO: 1494900 - RNA, 19 nt, Artificial Sequence
  Description of Artificial Sequence: Synthetic oligonucleotide
ucuggccgaucuccgcgau

SEQ ID NO: 1494901 - RNA, 19 nt, Artificial Sequence
  Description of Artificial Sequence: Synthetic oligonucleotide
ggcuucacgaucugguaua

SEQ ID NO: 1494902 - RNA, 19 nt, Artificial Sequence
  Description of Artificial Sequence: Synthetic oligonucleotide
gcgaugaugaagcacggau

SEQ ID NO: 1494903 - RNA, 19 nt, Artificial Sequence
  Description of Artificial Sequence: Synthetic oligonucleotide
cuaugggaaugucgggaaa

SEQ ID NO: 1494904 - RNA, 19 nt, Artificial Sequence
  Description of Artificial Sequence: Synthetic oligonucleotide
gguauacuugcuucauggu

SEQ ID NO: 1494905 - RNA, 19 nt, Artificial Sequence
  Description of Artificial Sequence: Synthetic oligonucleotide
ggaagcagaaguugggguu

SEQ ID NO: 1494906 - RNA, 19 nt, Artificial Sequence
  Description of Artificial Sequence: Synthetic oligonucleotide
ccaauacacuggacaguag

SEQ ID NO: 1494907 - RNA, 19 nt, Artificial Sequence
  Description of Artificial Sequence: Synthetic oligonucleotide
gugccuucggggauucuca

SEQ ID NO: 1494908 - RNA, 19 nt, Artificial Sequence
  Description of Artificial Sequence: Synthetic oligonucleotide
cccaugaaugcuucgaagu

SEQ ID NO: 1494909 - RNA, 19 nt, Artificial Sequence
  Description of Artificial Sequence: Synthetic oligonucleotide
ggccuuccgguuaaacuug

SEQ ID NO: 1494910 - RNA, 19 nt, Artificial Sequence
  Description of Artificial Sequence: Synthetic oligonucleotide
cauucaguucaugcagaaa

SEQ ID NO: 1494911 - RNA, 19 nt, Artificial Sequence
  Description of Artificial Sequence: Synthetic oligonucleotide
acagaccgcaccagcucug

SEQ ID NO: 1494912 - RNA, 19 nt, Artificial Sequence
  Description of Artificial Sequence: Synthetic oligonucleotide
ggaucaugcgcuuggcuau

SEQ ID NO: 1494913 - RNA, 19 nt, Artificial Sequence
  Description of Artificial Sequence: Synthetic oligonucleotide
ggcugaguggucacucccc

SEQ ID NO: 1494914 - RNA, 19 nt, Artificial Sequence
  Description of Artificial Sequence: Synthetic oligonucleotide
ugguguccaucgacugcau

SEQ ID NO: 1494915 - RNA, 19 nt, Artificial Sequence
  Description of Artificial Sequence: Synthetic oligonucleotide
ggcguggcugaauucuaga

SEQ ID NO: 1494916 - RNA, 19 nt, Artificial Sequence
  Description of Artificial Sequence: Synthetic oligonucleotide
cuuuggccaccacagacuu

SEQ ID NO: 1494917 - RNA, 19 nt, Artificial Sequence
  Description of Artificial Sequence: Synthetic oligonucleotide
cccaaugcccgcucuacca

SEQ ID NO: 1494918 - RNA, 19 nt, Artificial Sequence
  Description of Artificial Sequence: Synthetic oligonucleotide
ccuaugggaaugucgggaa

SEQ ID NO: 1494919 - RNA, 19 nt, Artificial Sequence
  Description of Artificial Sequence: Synthetic oligonucleotide
guggacaaugaaccucuau

SEQ ID NO: 1494920 - RNA, 19 nt, Artificial Sequence
  Description of Artificial Sequence: Synthetic oligonucleotide
cuucucguugcaggccauc

SEQ ID NO: 1494921 - RNA, 19 nt, Artificial Sequence
  Description of Artificial Sequence: Synthetic oligonucleotide
gguuaaacuugaacuccaa

SEQ ID NO: 1494922 - RNA, 19 nt, Artificial Sequence
  Description of Artificial Sequence: Synthetic oligonucleotide
ccaugaaugcuucgaagua

SEQ ID NO: 1494923 - RNA, 19 nt, Artificial Sequence
  Description of Artificial Sequence: Synthetic oligonucleotide
ggccgaccuuucuuggcug

SEQ ID NO: 1494924 - RNA, 19 nt, Artificial Sequence
  Description of Artificial Sequence: Synthetic oligonucleotide
guccaucgacugcauccca

SEQ ID NO: 1494925 - RNA, 19 nt, Artificial Sequence
  Description of Artificial Sequence: Synthetic oligonucleotide
cuggccgaucuccgcgaug

SEQ ID NO: 1494926 - RNA, 19 nt, Artificial Sequence
  Description of Artificial Sequence: Synthetic oligonucleotide
gcuuaugcucgccguaugu

SEQ ID NO: 1494927 - RNA, 19 nt, Artificial Sequence
  Description of Artificial Sequence: Synthetic oligonucleotide
acgggacauucaguucaug

SEQ ID NO: 1494928 - RNA, 19 nt, Artificial Sequence
  Description of Artificial Sequence: Synthetic oligonucleotide
aggucgcccuggugguucu

SEQ ID NO: 1494929 - RNA, 19 nt, Artificial Sequence
  Description of Artificial Sequence: Synthetic oligonucleotide
gccgaucuccgcgaugaug

SEQ ID NO: 1494930 - RNA, 19 nt, Artificial Sequence
  Description of Artificial Sequence: Synthetic oligonucleotide
ccgcgaugaugaagcacgg

SEQ ID NO: 1494931 - RNA, 19 nt, Artificial Sequence
  Description of Artificial Sequence: Synthetic oligonucleotide
cccaauacacuggacagua

SEQ ID NO: 1494932 - RNA, 19 nt, Artificial Sequence
  Description of Artificial Sequence: Synthetic oligonucleotide
gggcguggcugaauucuag

SEQ ID NO: 1494933 - RNA, 19 nt, Artificial Sequence
  Description of Artificial Sequence: Synthetic oligonucleotide
ccaaucuccugcgcauagc

SEQ ID NO: 1494934 - RNA, 19 nt, Artificial Sequence
  Description of Artificial Sequence: Synthetic oligonucleotide
gcuucacgaucugguauac

SEQ ID NO: 1494935 - RNA, 19 nt, Artificial Sequence
  Description of Artificial Sequence: Synthetic oligonucleotide
cccuaugggaaugucggga

SEQ ID NO: 1494936 - RNA, 19 nt, Artificial Sequence
  Description of Artificial Sequence: Synthetic oligonucleotide
cagggaguggcacuuuauu

SEQ ID NO: 1494937 - RNA, 19 nt, Artificial Sequence
  Description of Artificial Sequence: Synthetic oligonucleotide
ccacuaaguugaagauguc

SEQ ID NO: 1494938 - RNA, 19 nt, Artificial Sequence
  Description of Artificial Sequence: Synthetic oligonucleotide
cacuggugcacuggaggaa

SEQ ID NO: 1494939 - RNA, 19 nt, Artificial Sequence
  Description of Artificial Sequence: Synthetic oligonucleotide
gcugaguggucacuccccu

SEQ ID NO: 1494940 - RNA, 19 nt, Artificial Sequence
  Description of Artificial Sequence: Synthetic oligonucleotide
gcucgccguaugucguccc

SEQ ID NO: 1494941 - RNA, 19 nt, Artificial Sequence
  Description of Artificial Sequence: Synthetic oligonucleotide
ggagaucccaaugcccgcu

SEQ ID NO: 1494942 - RNA, 19 nt, Artificial Sequence
  Description of Artificial Sequence: Synthetic oligonucleotide
ccggcugcaguggguaggc

SEQ ID NO: 1494943 - RNA, 19 nt, Artificial Sequence
  Description of Artificial Sequence: Synthetic oligonucleotide
cuucacgaucugguauacu

SEQ ID NO: 1494944 - RNA, 19 nt, Artificial Sequence
  Description of Artificial Sequence: Synthetic oligonucleotide
aggugacaacagagcuaca

SEQ ID NO: 1494945 - RNA, 19 nt, Artificial Sequence
  Description of Artificial Sequence: Synthetic oligonucleotide
ccaggcgcacagaccgcac

SEQ ID NO: 1494946 - RNA, 19 nt, Artificial Sequence
  Description of Artificial Sequence: Synthetic oligonucleotide
ccaucgacugcaucccacu

SEQ ID NO: 1494947 - RNA, 19 nt, Artificial Sequence
  Description of Artificial Sequence: Synthetic oligonucleotide
gccagggaguggcacuuua

SEQ ID NO: 1494948 - RNA, 19 nt, Artificial Sequence
  Description of Artificial Sequence: Synthetic oligonucleotide
gacggugccuucggggauu

SEQ ID NO: 1494949 - RNA, 19 nt, Artificial Sequence
  Description of Artificial Sequence: Synthetic oligonucleotide
gccgcuuaugcucgccgua

SEQ ID NO: 1494950 - RNA, 19 nt, Artificial Sequence
  Description of Artificial Sequence: Synthetic oligonucleotide
cgcuuaugcucgccguaug

SEQ ID NO: 1494951 - RNA, 19 nt, Artificial Sequence
  Description of Artificial Sequence: Synthetic oligonucleotide
ggugugcacccaauacacu

SEQ ID NO: 1494952 - RNA, 19 nt, Artificial Sequence
  Description of Artificial Sequence: Synthetic oligonucleotide
cuucggggauucucacuuu

SEQ ID NO: 1494953 - RNA, 19 nt, Artificial Sequence
  Description of Artificial Sequence: Synthetic oligonucleotide
gcggaucaugcgcuuggcu

SEQ ID NO: 1494954 - RNA, 19 nt, Artificial Sequence
  Description of Artificial Sequence: Synthetic oligonucleotide
gcaggccaucucacagggc

SEQ ID NO: 1494955 - RNA, 19 nt, Artificial Sequence
  Description of Artificial Sequence: Synthetic oligonucleotide
agucagccccacacuccuu

SEQ ID NO: 1494956 - RNA, 19 nt, Artificial Sequence
  Description of Artificial Sequence: Synthetic oligonucleotide
gccuucggggauucucacu

SEQ ID NO: 1494957 - RNA, 19 nt, Artificial Sequence
  Description of Artificial Sequence: Synthetic oligonucleotide
gccgaccuuucuuggcugu

SEQ ID NO: 1494958 - RNA, 19 nt, Artificial Sequence
  Description of Artificial Sequence: Synthetic oligonucleotide
ccgaccuuucuuggcuguc

SEQ ID NO: 1494959 - RNA, 19 nt, Artificial Sequence
  Description of Artificial Sequence: Synthetic oligonucleotide
cgaacaaccuggaguugcu

SEQ ID NO: 1494960 - RNA, 19 nt, Artificial Sequence
  Description of Artificial Sequence: Synthetic oligonucleotide
ggacggugccuucggggau

SEQ ID NO: 1494961 - RNA, 19 nt, Artificial Sequence
  Description of Artificial Sequence: Synthetic oligonucleotide
guacugggcguggcugaau

SEQ ID NO: 1494962 - RNA, 19 nt, Artificial Sequence
  Description of Artificial Sequence: Synthetic oligonucleotide
cagugcggaucaugcgcuu

SEQ ID NO: 1494963 - RNA, 19 nt, Artificial Sequence
  Description of Artificial Sequence: Synthetic oligonucleotide
gcaucccacuggagaucac

SEQ ID NO: 1494964 - RNA, 19 nt, Artificial Sequence
  Description of Artificial Sequence: Synthetic oligonucleotide
cccgcucuaccaggcgcac

SEQ ID NO: 1494965 - RNA, 19 nt, Artificial Sequence
  Description of Artificial Sequence: Synthetic oligonucleotide
ccugucucaugcccagaau

SEQ ID NO: 1494966 - RNA, 19 nt, Artificial Sequence
  Description of Artificial Sequence: Synthetic oligonucleotide
ccgggacacagcuccaguu

SEQ ID NO: 1494967 - RNA, 19 nt, Artificial Sequence
  Description of Artificial Sequence: Synthetic oligonucleotide
cgaucuccgcgaugaugaa

SEQ ID NO: 1494968 - RNA, 19 nt, Artificial Sequence
  Description of Artificial Sequence: Synthetic oligonucleotide
gcgaggcugaguggucacu

SEQ ID NO: 1494969 - RNA, 19 nt, Artificial Sequence
  Description of Artificial Sequence: Synthetic oligonucleotide
cccgggacacagcuccagu

SEQ ID NO: 1494970 - RNA, 19 nt, Artificial Sequence
  Description of Artificial Sequence: Synthetic oligonucleotide
cgaccuuucuuggcugucu

SEQ ID NO: 1494971 - RNA, 19 nt, Artificial Sequence
  Description of Artificial Sequence: Synthetic oligonucleotide
ccgcuuaugcucgccguau

SEQ ID NO: 1494972 - RNA, 19 nt, Artificial Sequence
  Description of Artificial Sequence: Synthetic oligonucleotide
gcuucucguugcaggccau

SEQ ID NO: 1494973 - RNA, 19 nt, Artificial Sequence
  Description of Artificial Sequence: Synthetic oligonucleotide
ccgcucuaccaggcgcaca

SEQ ID NO: 1494974 - RNA, 19 nt, Artificial Sequence
  Description of Artificial Sequence: Synthetic oligonucleotide
ccgagaugacgcgcagguu

SEQ ID NO: 1494975 - RNA, 19 nt, Artificial Sequence
  Description of Artificial Sequence: Synthetic oligonucleotide
ccaggucgcccuggugguu

SEQ ID NO: 1494976 - RNA, 19 nt, Artificial Sequence
  Description of Artificial Sequence: Synthetic oligonucleotide
ugugagucagcaauggugg

SEQ ID NO: 1494977 - RNA, 19 nt, Artificial Sequence
  Description of Artificial Sequence: Synthetic oligonucleotide
acuggugugauccaggcgg

SEQ ID NO: 1494978 - RNA, 19 nt, Artificial Sequence
  Description of Artificial Sequence: Synthetic oligonucleotide
uuuacaggcuguaacgggg

SEQ ID NO: 1494979 - RNA, 19 nt, Artificial Sequence
  Description of Artificial Sequence: Synthetic oligonucleotide
ucaacuccuaacaaaaugu

SEQ ID NO: 1494980 - RNA, 19 nt, Artificial Sequence
  Description of Artificial Sequence: Synthetic oligonucleotide
agagugaccacacuuggcg

SEQ ID NO: 1494981 - RNA, 19 nt, Artificial Sequence
  Description of Artificial Sequence: Synthetic oligonucleotide
cuugauucugucuucacag

SEQ ID NO: 1494982 - RNA, 19 nt, Artificial Sequence
  Description of Artificial Sequence: Synthetic oligonucleotide
ugauucugucuucacagcg

SEQ ID NO: 1494983 - RNA, 19 nt, Artificial Sequence
  Description of Artificial Sequence: Synthetic oligonucleotide
uguugcaucagguagcugu

SEQ ID NO: 1494984 - RNA, 19 nt, Artificial Sequence
  Description of Artificial Sequence: Synthetic oligonucleotide
aaugguggacgugucagcc

SEQ ID NO: 1494985 - RNA, 19 nt, Artificial Sequence
  Description of Artificial Sequence: Synthetic oligonucleotide
uacaccacgaccauauagc

SEQ ID NO: 1494986 - RNA, 19 nt, Artificial Sequence
  Description of Artificial Sequence: Synthetic oligonucleotide
gaaaagucaacuccuaaca

SEQ ID NO: 1494987 - RNA, 19 nt, Artificial Sequence
  Description of Artificial Sequence: Synthetic oligonucleotide
aguaguugugccuccgugc

SEQ ID NO: 1494988 - RNA, 19 nt, Artificial Sequence
  Description of Artificial Sequence: Synthetic oligonucleotide
aagaugugcauccugccug

SEQ ID NO: 1494989 - RNA, 19 nt, Artificial Sequence
  Description of Artificial Sequence: Synthetic oligonucleotide
ucucuagucguacagccag

SEQ ID NO: 1494990 - RNA, 19 nt, Artificial Sequence
  Description of Artificial Sequence: Synthetic oligonucleotide
cauauagcggacacggucg

SEQ ID NO: 1494991 - RNA, 19 nt, Artificial Sequence
  Description of Artificial Sequence: Synthetic oligonucleotide
aaagucaacuccuaacaaa

SEQ ID NO: 1494992 - RNA, 19 nt, Artificial Sequence
  Description of Artificial Sequence: Synthetic oligonucleotide
uguagcugaaugauggacu

SEQ ID NO: 1494993 - RNA, 19 nt, Artificial Sequence
  Description of Artificial Sequence: Synthetic oligonucleotide
gaagagugaccacacuugg

SEQ ID NO: 1494994 - RNA, 19 nt, Artificial Sequence
  Description of Artificial Sequence: Synthetic oligonucleotide
cagacgaagaaccaucccg

SEQ ID NO: 1494995 - RNA, 19 nt, Artificial Sequence
  Description of Artificial Sequence: Synthetic oligonucleotide
gacaauucuuccuucacca

SEQ ID NO: 1494996 - RNA, 19 nt, Artificial Sequence
  Description of Artificial Sequence: Synthetic oligonucleotide
uucacagcguagaagguug

SEQ ID NO: 1494997 - RNA, 19 nt, Artificial Sequence
  Description of Artificial Sequence: Synthetic oligonucleotide
ugauguugcaucagguagc

SEQ ID NO: 1494998 - RNA, 19 nt, Artificial Sequence
  Description of Artificial Sequence: Synthetic oligonucleotide
aaaagucaacuccuaacaa

SEQ ID NO: 1494999 - RNA, 19 nt, Artificial Sequence
  Description of Artificial Sequence: Synthetic oligonucleotide
uuuggugugcuuccggacc

SEQ ID NO: 1495000 - RNA, 19 nt, Artificial Sequence
  Description of Artificial Sequence: Synthetic oligonucleotide
uuagcugacaauucuuccu

SEQ ID NO: 1495001 - RNA, 19 nt, Artificial Sequence
  Description of Artificial Sequence: Synthetic oligonucleotide
uccucgguggauaaguuga

SEQ ID NO: 1495002 - RNA, 19 nt, Artificial Sequence
  Description of Artificial Sequence: Synthetic oligonucleotide
aacuccuaacaaaauguuc

SEQ ID NO: 1495003 - RNA, 19 nt, Artificial Sequence
  Description of Artificial Sequence: Synthetic oligonucleotide
acugguggcguucuuauca

SEQ ID NO: 1495004 - RNA, 19 nt, Artificial Sequence
  Description of Artificial Sequence: Synthetic oligonucleotide
guuuacaggcuguaacggg

SEQ ID NO: 1495005 - RNA, 19 nt, Artificial Sequence
  Description of Artificial Sequence: Synthetic oligonucleotide
cuuagcugacaauucuucc

SEQ ID NO: 1495006 - RNA, 19 nt, Artificial Sequence
  Description of Artificial Sequence: Synthetic oligonucleotide
ucuuaucacagugagaauu

SEQ ID NO: 1495007 - RNA, 19 nt, Artificial Sequence
  Description of Artificial Sequence: Synthetic oligonucleotide
auuacugaacagaagccuc

SEQ ID NO: 1495008 - RNA, 19 nt, Artificial Sequence
  Description of Artificial Sequence: Synthetic oligonucleotide
acgaccauauagcggacac

SEQ ID NO: 1495009 - RNA, 19 nt, Artificial Sequence
  Description of Artificial Sequence: Synthetic oligonucleotide
ugcuugguugcucagggcu

SEQ ID NO: 1495010 - RNA, 19 nt, Artificial Sequence
  Description of Artificial Sequence: Synthetic oligonucleotide
uuacugaacagaagccuca

SEQ ID NO: 1495011 - RNA, 19 nt, Artificial Sequence
  Description of Artificial Sequence: Synthetic oligonucleotide
cuuuugcucuccuuacugg

SEQ ID NO: 1495012 - RNA, 19 nt, Artificial Sequence
  Description of Artificial Sequence: Synthetic oligonucleotide
agaugugcauccugccugc

SEQ ID NO: 1495013 - RNA, 19 nt, Artificial Sequence
  Description of Artificial Sequence: Synthetic oligonucleotide
aaguaguugugccuccgug

SEQ ID NO: 1495014 - RNA, 19 nt, Artificial Sequence
  Description of Artificial Sequence: Synthetic oligonucleotide
ucugggaccgauuucccug

SEQ ID NO: 1495015 - RNA, 19 nt, Artificial Sequence
  Description of Artificial Sequence: Synthetic oligonucleotide
cagguuggaacucauggag

SEQ ID NO: 1495016 - RNA, 19 nt, Artificial Sequence
  Description of Artificial Sequence: Synthetic oligonucleotide
uugguggucggcuucucgg

SEQ ID NO: 1495017 - RNA, 19 nt, Artificial Sequence
  Description of Artificial Sequence: Synthetic oligonucleotide
ucgguggauaaguugagac

SEQ ID NO: 1495018 - RNA, 19 nt, Artificial Sequence
  Description of Artificial Sequence: Synthetic oligonucleotide
acagacgaagaaccauccc

SEQ ID NO: 1495019 - RNA, 19 nt, Artificial Sequence
  Description of Artificial Sequence: Synthetic oligonucleotide
ucggccucauuacugaaca

SEQ ID NO: 1495020 - RNA, 19 nt, Artificial Sequence
  Description of Artificial Sequence: Synthetic oligonucleotide
guacaccacgaccauauag

SEQ ID NO: 1495021 - RNA, 19 nt, Artificial Sequence
  Description of Artificial Sequence: Synthetic oligonucleotide
ggaccgauuucccugaggg

SEQ ID NO: 1495022 - RNA, 19 nt, Artificial Sequence
  Description of Artificial Sequence: Synthetic oligonucleotide
agugaccacacuuggcguc

SEQ ID NO: 1495023 - RNA, 19 nt, Artificial Sequence
  Description of Artificial Sequence: Synthetic oligonucleotide
uggcguucuuaucacagug

SEQ ID NO: 1495024 - RNA, 19 nt, Artificial Sequence
  Description of Artificial Sequence: Synthetic oligonucleotide
uccagacgcucucuagucg

SEQ ID NO: 1495025 - RNA, 19 nt, Artificial Sequence
  Description of Artificial Sequence: Synthetic oligonucleotide
agacggugggucugaaggc

SEQ ID NO: 1495026 - RNA, 19 nt, Artificial Sequence
  Description of Artificial Sequence: Synthetic oligonucleotide
gacgugucagccucacugg

SEQ ID NO: 1495027 - RNA, 19 nt, Artificial Sequence
  Description of Artificial Sequence: Synthetic oligonucleotide
agagccaccgacgucuggc

SEQ ID NO: 1495028 - RNA, 19 nt, Artificial Sequence
  Description of Artificial Sequence: Synthetic oligonucleotide
ugaacagaagccucagguc

SEQ ID NO: 1495029 - RNA, 19 nt, Artificial Sequence
  Description of Artificial Sequence: Synthetic oligonucleotide
ggguuuacaggcuguaacg

SEQ ID NO: 1495030 - RNA, 19 nt, Artificial Sequence
  Description of Artificial Sequence: Synthetic oligonucleotide
ggaaaagucaacuccuaac

SEQ ID NO: 1495031 - RNA, 19 nt, Artificial Sequence
  Description of Artificial Sequence: Synthetic oligonucleotide
aguuuggcgagggaguggg

SEQ ID NO: 1495032 - RNA, 19 nt, Artificial Sequence
  Description of Artificial Sequence: Synthetic oligonucleotide
cuggcaguagggaugcggg

SEQ ID NO: 1495033 - RNA, 19 nt, Artificial Sequence
  Description of Artificial Sequence: Synthetic oligonucleotide
guaguugugccuccgugcc

SEQ ID NO: 1495034 - RNA, 19 nt, Artificial Sequence
  Description of Artificial Sequence: Synthetic oligonucleotide
acaaggaagagugaccaca

SEQ ID NO: 1495035 - RNA, 19 nt, Artificial Sequence
  Description of Artificial Sequence: Synthetic oligonucleotide
uccuuacuggaaaagucaa

SEQ ID NO: 1495036 - RNA, 19 nt, Artificial Sequence
  Description of Artificial Sequence: Synthetic oligonucleotide
gguucgugcaacaaggaag

SEQ ID NO: 1495037 - RNA, 19 nt, Artificial Sequence
  Description of Artificial Sequence: Synthetic oligonucleotide
uccuaacaaaauguucucc

SEQ ID NO: 1495038 - RNA, 19 nt, Artificial Sequence
  Description of Artificial Sequence: Synthetic oligonucleotide
aggcacaccgucuucagga

SEQ ID NO: 1495039 - RNA, 19 nt, Artificial Sequence
  Description of Artificial Sequence: Synthetic oligonucleotide
ucuucgugucacuccacag

SEQ ID NO: 1495040 - RNA, 19 nt, Artificial Sequence
  Description of Artificial Sequence: Synthetic oligonucleotide
gucaagguggaucuucgug

SEQ ID NO: 1495041 - RNA, 19 nt, Artificial Sequence
  Description of Artificial Sequence: Synthetic oligonucleotide
uggaucuucgugucacucc

SEQ ID NO: 1495042 - RNA, 19 nt, Artificial Sequence
  Description of Artificial Sequence: Synthetic oligonucleotide
cucgucucgaucuccugcg

SEQ ID NO: 1495043 - RNA, 19 nt, Artificial Sequence
  Description of Artificial Sequence: Synthetic oligonucleotide
uggaaaagucaacuccuaa

SEQ ID NO: 1495044 - RNA, 19 nt, Artificial Sequence
  Description of Artificial Sequence: Synthetic oligonucleotide
cacagacgaagaaccaucc

SEQ ID NO: 1495045 - RNA, 19 nt, Artificial Sequence
  Description of Artificial Sequence: Synthetic oligonucleotide
uugauucugucuucacagc

SEQ ID NO: 1495046 - RNA, 19 nt, Artificial Sequence
  Description of Artificial Sequence: Synthetic oligonucleotide
auauagcggacacggucgg

SEQ ID NO: 1495047 - RNA, 19 nt, Artificial Sequence
  Description of Artificial Sequence: Synthetic oligonucleotide
aaggcucuagaaggcuugc

SEQ ID NO: 1495048 - RNA, 19 nt, Artificial Sequence
  Description of Artificial Sequence: Synthetic oligonucleotide
uggauaaguugagacuucc

SEQ ID NO: 1495049 - RNA, 19 nt, Artificial Sequence
  Description of Artificial Sequence: Synthetic oligonucleotide
ucucucuuagcugacaauu

SEQ ID NO: 1495050 - RNA, 19 nt, Artificial Sequence
  Description of Artificial Sequence: Synthetic oligonucleotide
cuucccucggacacugugg

SEQ ID NO: 1495051 - RNA, 19 nt, Artificial Sequence
  Description of Artificial Sequence: Synthetic oligonucleotide
uugagacuucccaguuugg

SEQ ID NO: 1495052 - RNA, 19 nt, Artificial Sequence
  Description of Artificial Sequence: Synthetic oligonucleotide
ugacuuuggagggacuuug

SEQ ID NO: 1495053 - RNA, 19 nt, Artificial Sequence
  Description of Artificial Sequence: Synthetic oligonucleotide
ggacgugucagccucacug

SEQ ID NO: 1495054 - RNA, 19 nt, Artificial Sequence
  Description of Artificial Sequence: Synthetic oligonucleotide
aacucauggaggaggaggu

SEQ ID NO: 1495055 - RNA, 19 nt, Artificial Sequence
  Description of Artificial Sequence: Synthetic oligonucleotide
uccugauguugcaucaggu

SEQ ID NO: 1495056 - RNA, 19 nt, Artificial Sequence
  Description of Artificial Sequence: Synthetic oligonucleotide
gaugcgggguuguuggcug

SEQ ID NO: 1495057 - RNA, 19 nt, Artificial Sequence
  Description of Artificial Sequence: Synthetic oligonucleotide
uccgugccacuucacaggc

SEQ ID NO: 1495058 - RNA, 19 nt, Artificial Sequence
  Description of Artificial Sequence: Synthetic oligonucleotide
cuccuuacuggaaaaguca

SEQ ID NO: 1495059 - RNA, 19 nt, Artificial Sequence
  Description of Artificial Sequence: Synthetic oligonucleotide
auagcggacacggucgguc

SEQ ID NO: 1495060 - RNA, 19 nt, Artificial Sequence
  Description of Artificial Sequence: Synthetic oligonucleotide
uguaggcacaccgucuuca

SEQ ID NO: 1495061 - RNA, 19 nt, Artificial Sequence
  Description of Artificial Sequence: Synthetic oligonucleotide
ugggucugaaggcaggcuc

SEQ ID NO: 1495062 - RNA, 19 nt, Artificial Sequence
  Description of Artificial Sequence: Synthetic oligonucleotide
cuccgugccacuucacagg

SEQ ID NO: 1495063 - RNA, 19 nt, Artificial Sequence
  Description of Artificial Sequence: Synthetic oligonucleotide
ucccaguuuggcgagggag

SEQ ID NO: 1495064 - RNA, 19 nt, Artificial Sequence
  Description of Artificial Sequence: Synthetic oligonucleotide
uucucggccucauuacuga

SEQ ID NO: 1495065 - RNA, 19 nt, Artificial Sequence
  Description of Artificial Sequence: Synthetic oligonucleotide
uaggcacaccgucuucagg

SEQ ID NO: 1495066 - RNA, 19 nt, Artificial Sequence
  Description of Artificial Sequence: Synthetic oligonucleotide
uacuuaacccugacaggcu

SEQ ID NO: 1495067 - RNA, 19 nt, Artificial Sequence
  Description of Artificial Sequence: Synthetic oligonucleotide
accauccccgucaaggugg

SEQ ID NO: 1495068 - RNA, 19 nt, Artificial Sequence
  Description of Artificial Sequence: Synthetic oligonucleotide
ucuucaaucccugcuuggu

SEQ ID NO: 1495069 - RNA, 19 nt, Artificial Sequence
  Description of Artificial Sequence: Synthetic oligonucleotide
aacggggucccucggggug

SEQ ID NO: 1495070 - RNA, 19 nt, Artificial Sequence
  Description of Artificial Sequence: Synthetic oligonucleotide
uccgggucagguuggaacu

SEQ ID NO: 1495071 - RNA, 19 nt, Artificial Sequence
  Description of Artificial Sequence: Synthetic oligonucleotide
gguuuacaggcuguaacgg

SEQ ID NO: 1495072 - RNA, 19 nt, Artificial Sequence
  Description of Artificial Sequence: Synthetic oligonucleotide
agcugaaugauggacuccu

SEQ ID NO: 1495073 - RNA, 19 nt, Artificial Sequence
  Description of Artificial Sequence: Synthetic oligonucleotide
acaaaauguucuccucggu

SEQ ID NO: 1495074 - RNA, 19 nt, Artificial Sequence
  Description of Artificial Sequence: Synthetic oligonucleotide
uuucugggaccgauuuccc

SEQ ID NO: 1495075 - RNA, 19 nt, Artificial Sequence
  Description of Artificial Sequence: Synthetic oligonucleotide
ucgugucacuccacagacg

SEQ ID NO: 1495076 - RNA, 19 nt, Artificial Sequence
  Description of Artificial Sequence: Synthetic oligonucleotide
ucucuggaaggcucuagaa

SEQ ID NO: 1495077 - RNA, 19 nt, Artificial Sequence
  Description of Artificial Sequence: Synthetic oligonucleotide
uuggcguccugugagucag

SEQ ID NO: 1495078 - RNA, 19 nt, Artificial Sequence
  Description of Artificial Sequence: Synthetic oligonucleotide
uccccgucaagguggaucu

SEQ ID NO: 1495079 - RNA, 19 nt, Artificial Sequence
  Description of Artificial Sequence: Synthetic oligonucleotide
cucucuuagcugacaauuc

SEQ ID NO: 1495080 - RNA, 19 nt, Artificial Sequence
  Description of Artificial Sequence: Synthetic oligonucleotide
cuuucgagaagcuacuggu

SEQ ID NO: 1495081 - RNA, 19 nt, Artificial Sequence
  Description of Artificial Sequence: Synthetic oligonucleotide
ucaucacuuggagaugcug

SEQ ID NO: 1495082 - RNA, 19 nt, Artificial Sequence
  Description of Artificial Sequence: Synthetic oligonucleotide
caccacgaccauauagcgg

SEQ ID NO: 1495083 - RNA, 19 nt, Artificial Sequence
  Description of Artificial Sequence: Synthetic oligonucleotide
gaucucucuuagcugacaa

SEQ ID NO: 1495084 - RNA, 19 nt, Artificial Sequence
  Description of Artificial Sequence: Synthetic oligonucleotide
ucuagucguacagccagcu

SEQ ID NO: 1495085 - RNA, 19 nt, Artificial Sequence
  Description of Artificial Sequence: Synthetic oligonucleotide
aucuucgugucacuccaca

SEQ ID NO: 1495086 - RNA, 19 nt, Artificial Sequence
  Description of Artificial Sequence: Synthetic oligonucleotide
cuccgggucagguuggaac

SEQ ID NO: 1495087 - RNA, 19 nt, Artificial Sequence
  Description of Artificial Sequence: Synthetic oligonucleotide
uggcgagggagugggaacg

SEQ ID NO: 1495088 - RNA, 19 nt, Artificial Sequence
  Description of Artificial Sequence: Synthetic oligonucleotide
ugugaagcacuugcagggc

SEQ ID NO: 1495089 - RNA, 19 nt, Artificial Sequence
  Description of Artificial Sequence: Synthetic oligonucleotide
caucagguagcuguuggug

SEQ ID NO: 1495090 - RNA, 19 nt, Artificial Sequence
  Description of Artificial Sequence: Synthetic oligonucleotide
gcuggaccagcucucauag

SEQ ID NO: 1495091 - RNA, 19 nt, Artificial Sequence
  Description of Artificial Sequence: Synthetic oligonucleotide
gcguucuuaucacagugag

SEQ ID NO: 1495092 - RNA, 19 nt, Artificial Sequence
  Description of Artificial Sequence: Synthetic oligonucleotide
acuuccauacugguggcgu

SEQ ID NO: 1495093 - RNA, 19 nt, Artificial Sequence
  Description of Artificial Sequence: Synthetic oligonucleotide
acgcucucuagucguacag

SEQ ID NO: 1495094 - RNA, 19 nt, Artificial Sequence
  Description of Artificial Sequence: Synthetic oligonucleotide
agacgaagaaccaucccga

SEQ ID NO: 1495095 - RNA, 19 nt, Artificial Sequence
  Description of Artificial Sequence: Synthetic oligonucleotide
gcucucuagucguacagcc

SEQ ID NO: 1495096 - RNA, 19 nt, Artificial Sequence
  Description of Artificial Sequence: Synthetic oligonucleotide
aggcccgccagccggaguc

SEQ ID NO: 1495097 - RNA, 19 nt, Artificial Sequence
  Description of Artificial Sequence: Synthetic oligonucleotide
gacuucccaguuuggcgag

SEQ ID NO: 1495098 - RNA, 19 nt, Artificial Sequence
  Description of Artificial Sequence: Synthetic oligonucleotide
aucccgauggugcagcuuu

SEQ ID NO: 1495099 - RNA, 19 nt, Artificial Sequence
  Description of Artificial Sequence: Synthetic oligonucleotide
accgauuucccugaggguu

SEQ ID NO: 1495100 - RNA, 19 nt, Artificial Sequence
  Description of Artificial Sequence: Synthetic oligonucleotide
uccuuagcuggcuucggau

SEQ ID NO: 1495101 - RNA, 19 nt, Artificial Sequence
  Description of Artificial Sequence: Synthetic oligonucleotide
ugaucaucacuuggagaug

SEQ ID NO: 1495102 - RNA, 19 nt, Artificial Sequence
  Description of Artificial Sequence: Synthetic oligonucleotide
aguagggcucuucaccaaa

SEQ ID NO: 1495103 - RNA, 19 nt, Artificial Sequence
  Description of Artificial Sequence: Synthetic oligonucleotide
agguccuuagcuggcuucg

SEQ ID NO: 1495104 - RNA, 19 nt, Artificial Sequence
  Description of Artificial Sequence: Synthetic oligonucleotide
ccaaagcuccuucuggagg

SEQ ID NO: 1495105 - RNA, 19 nt, Artificial Sequence
  Description of Artificial Sequence: Synthetic oligonucleotide
guaggcacaccgucuucag

SEQ ID NO: 1495106 - RNA, 19 nt, Artificial Sequence
  Description of Artificial Sequence: Synthetic oligonucleotide
ucggacacuguggaugcug

SEQ ID NO: 1495107 - RNA, 19 nt, Artificial Sequence
  Description of Artificial Sequence: Synthetic oligonucleotide
ugggaacgcuucagugggg

SEQ ID NO: 1495108 - RNA, 19 nt, Artificial Sequence
  Description of Artificial Sequence: Synthetic oligonucleotide
uuggcgagggagugggaac

SEQ ID NO: 1495109 - RNA, 19 nt, Artificial Sequence
  Description of Artificial Sequence: Synthetic oligonucleotide
cucggccucauuacugaac

SEQ ID NO: 1495110 - RNA, 19 nt, Artificial Sequence
  Description of Artificial Sequence: Synthetic oligonucleotide
ccauauagcggacacgguc

SEQ ID NO: 1495111 - RNA, 19 nt, Artificial Sequence
  Description of Artificial Sequence: Synthetic oligonucleotide
ucacagcguagaagguuga

SEQ ID NO: 1495112 - RNA, 19 nt, Artificial Sequence
  Description of Artificial Sequence: Synthetic oligonucleotide
gacgucuggcuuccuugag

SEQ ID NO: 1495113 - RNA, 19 nt, Artificial Sequence
  Description of Artificial Sequence: Synthetic oligonucleotide
agcuccagagccaccgacg

SEQ ID NO: 1495114 - RNA, 19 nt, Artificial Sequence
  Description of Artificial Sequence: Synthetic oligonucleotide
agacgcucucuagucguac

SEQ ID NO: 1495115 - RNA, 19 nt, Artificial Sequence
  Description of Artificial Sequence: Synthetic oligonucleotide
ggagguuucucuggaaggc

SEQ ID NO: 1495116 - RNA, 19 nt, Artificial Sequence
  Description of Artificial Sequence: Synthetic oligonucleotide
ugugauccaggcggaggag

SEQ ID NO: 1495117 - RNA, 19 nt, Artificial Sequence
  Description of Artificial Sequence: Synthetic oligonucleotide
gaugcuggggcaggucacc

SEQ ID NO: 1495118 - RNA, 19 nt, Artificial Sequence
  Description of Artificial Sequence: Synthetic oligonucleotide
guagacggugggucugaag

SEQ ID NO: 1495119 - RNA, 19 nt, Artificial Sequence
  Description of Artificial Sequence: Synthetic oligonucleotide
agucuuucgagaagcuacu

SEQ ID NO: 1495120 - RNA, 19 nt, Artificial Sequence
  Description of Artificial Sequence: Synthetic oligonucleotide
agguccucgguggauaagu

SEQ ID NO: 1495121 - RNA, 19 nt, Artificial Sequence
  Description of Artificial Sequence: Synthetic oligonucleotide
cauuacugaacagaagccu

SEQ ID NO: 1495122 - RNA, 19 nt, Artificial Sequence
  Description of Artificial Sequence: Synthetic oligonucleotide
aucucucuuagcugacaau

SEQ ID NO: 1495123 - RNA, 19 nt, Artificial Sequence
  Description of Artificial Sequence: Synthetic oligonucleotide
agcuacuggugugauccag

SEQ ID NO: 1495124 - RNA, 19 nt, Artificial Sequence
  Description of Artificial Sequence: Synthetic oligonucleotide
aaccaucccgauggugcag

SEQ ID NO: 1495125 - RNA, 19 nt, Artificial Sequence
  Description of Artificial Sequence: Synthetic oligonucleotide
acugucccugcagguagac

SEQ ID NO: 1495126 - RNA, 19 nt, Artificial Sequence
  Description of Artificial Sequence: Synthetic oligonucleotide
gcuugauucugucuucaca

SEQ ID NO: 1495127 - RNA, 19 nt, Artificial Sequence
  Description of Artificial Sequence: Synthetic oligonucleotide
uguccuggcgcccgcuggu

SEQ ID NO: 1495128 - RNA, 19 nt, Artificial Sequence
  Description of Artificial Sequence: Synthetic oligonucleotide
ucgucucgaucuccugcgc

SEQ ID NO: 1495129 - RNA, 19 nt, Artificial Sequence
  Description of Artificial Sequence: Synthetic oligonucleotide
ucguacagccagcuugauu

SEQ ID NO: 1495130 - RNA, 19 nt, Artificial Sequence
  Description of Artificial Sequence: Synthetic oligonucleotide
gacgcucucuagucguaca

SEQ ID NO: 1495131 - RNA, 19 nt, Artificial Sequence
  Description of Artificial Sequence: Synthetic oligonucleotide
augcuagccuccagccugc

SEQ ID NO: 1495132 - RNA, 19 nt, Artificial Sequence
  Description of Artificial Sequence: Synthetic oligonucleotide
uuccauacugguggcguuc

SEQ ID NO: 1495133 - RNA, 19 nt, Artificial Sequence
  Description of Artificial Sequence: Synthetic oligonucleotide
gagggagugggaacgcuuc

SEQ ID NO: 1495134 - RNA, 19 nt, Artificial Sequence
  Description of Artificial Sequence: Synthetic oligonucleotide
gcuacuggugugauccagg

SEQ ID NO: 1495135 - RNA, 19 nt, Artificial Sequence
  Description of Artificial Sequence: Synthetic oligonucleotide
agcguagaagguugaucau

SEQ ID NO: 1495136 - RNA, 19 nt, Artificial Sequence
  Description of Artificial Sequence: Synthetic oligonucleotide
gauguugcaucagguagcu

SEQ ID NO: 1495137 - RNA, 19 nt, Artificial Sequence
  Description of Artificial Sequence: Synthetic oligonucleotide
agggcagaccacauggccu

SEQ ID NO: 1495138 - RNA, 19 nt, Artificial Sequence
  Description of Artificial Sequence: Synthetic oligonucleotide
uccauacugguggcguucu

SEQ ID NO: 1495139 - RNA, 19 nt, Artificial Sequence
  Description of Artificial Sequence: Synthetic oligonucleotide
gugaccacacuuggcgucc

SEQ ID NO: 1495140 - RNA, 19 nt, Artificial Sequence
  Description of Artificial Sequence: Synthetic oligonucleotide
uguacaccacgaccauaua

SEQ ID NO: 1495141 - RNA, 19 nt, Artificial Sequence
  Description of Artificial Sequence: Synthetic oligonucleotide
gcuuuuacuuaacccugac

SEQ ID NO: 1495142 - RNA, 19 nt, Artificial Sequence
  Description of Artificial Sequence: Synthetic oligonucleotide
gggcagaccacauggccug

SEQ ID NO: 1495143 - RNA, 19 nt, Artificial Sequence
  Description of Artificial Sequence: Synthetic oligonucleotide
gagucucgucucgaucucc

SEQ ID NO: 1495144 - RNA, 19 nt, Artificial Sequence
  Description of Artificial Sequence: Synthetic oligonucleotide
uuguuggcuggaccagcuc

SEQ ID NO: 1495145 - RNA, 19 nt, Artificial Sequence
  Description of Artificial Sequence: Synthetic oligonucleotide
cucucuagucguacagcca

SEQ ID NO: 1495146 - RNA, 19 nt, Artificial Sequence
  Description of Artificial Sequence: Synthetic oligonucleotide
uaacggggucccucggggu

SEQ ID NO: 1495147 - RNA, 19 nt, Artificial Sequence
  Description of Artificial Sequence: Synthetic oligonucleotide
ccuaacaaaauguucuccu

SEQ ID NO: 1495148 - RNA, 19 nt, Artificial Sequence
  Description of Artificial Sequence: Synthetic oligonucleotide
ugggaccgauuucccugag

SEQ ID NO: 1495149 - RNA, 19 nt, Artificial Sequence
  Description of Artificial Sequence: Synthetic oligonucleotide
ucucggccucauuacugaa

SEQ ID NO: 1495150 - RNA, 19 nt, Artificial Sequence
  Description of Artificial Sequence: Synthetic oligonucleotide
uggacuccugauguugcau

SEQ ID NO: 1495151 - RNA, 19 nt, Artificial Sequence
  Description of Artificial Sequence: Synthetic oligonucleotide
ccgucaagguggaucuucg

SEQ ID NO: 1495152 - RNA, 19 nt, Artificial Sequence
  Description of Artificial Sequence: Synthetic oligonucleotide
gaaguaguugugccuccgu

SEQ ID NO: 1495153 - RNA, 19 nt, Artificial Sequence
  Description of Artificial Sequence: Synthetic oligonucleotide
cuuggcguccugugaguca

SEQ ID NO: 1495154 - RNA, 19 nt, Artificial Sequence
  Description of Artificial Sequence: Synthetic oligonucleotide
gguggauaaguugagacuu

SEQ ID NO: 1495155 - RNA, 19 nt, Artificial Sequence
  Description of Artificial Sequence: Synthetic oligonucleotide
caguuuggcgagggagugg

SEQ ID NO: 1495156 - RNA, 19 nt, Artificial Sequence
  Description of Artificial Sequence: Synthetic oligonucleotide
agucaacuccuaacaaaau

SEQ ID NO: 1495157 - RNA, 19 nt, Artificial Sequence
  Description of Artificial Sequence: Synthetic oligonucleotide
ggccucauuacugaacaga

SEQ ID NO: 1495158 - RNA, 19 nt, Artificial Sequence
  Description of Artificial Sequence: Synthetic oligonucleotide
gcuucccucggacacugug

SEQ ID NO: 1495159 - RNA, 19 nt, Artificial Sequence
  Description of Artificial Sequence: Synthetic oligonucleotide
gagugaccacacuuggcgu

SEQ ID NO: 1495160 - RNA, 19 nt, Artificial Sequence
  Description of Artificial Sequence: Synthetic oligonucleotide
agucucgucucgaucuccu

SEQ ID NO: 1495161 - RNA, 19 nt, Artificial Sequence
  Description of Artificial Sequence: Synthetic oligonucleotide
guggauaaguugagacuuc

SEQ ID NO: 1495162 - RNA, 19 nt, Artificial Sequence
  Description of Artificial Sequence: Synthetic oligonucleotide
gggaccgauuucccugagg

SEQ ID NO: 1495163 - RNA, 19 nt, Artificial Sequence
  Description of Artificial Sequence: Synthetic oligonucleotide
ucgguccagacgcucucua

SEQ ID NO: 1495164 - RNA, 19 nt, Artificial Sequence
  Description of Artificial Sequence: Synthetic oligonucleotide
gguggucggcuucucggcc

SEQ ID NO: 1495165 - RNA, 19 nt, Artificial Sequence
  Description of Artificial Sequence: Synthetic oligonucleotide
gggcugaguguucaggcuc

SEQ ID NO: 1495166 - RNA, 19 nt, Artificial Sequence
  Description of Artificial Sequence: Synthetic oligonucleotide
guccuuagcuggcuucgga

SEQ ID NO: 1495167 - RNA, 19 nt, Artificial Sequence
  Description of Artificial Sequence: Synthetic oligonucleotide
ggaacgcuucaguggggag

SEQ ID NO: 1495168 - RNA, 19 nt, Artificial Sequence
  Description of Artificial Sequence: Synthetic oligonucleotide
ccuuagcuggcuucggauc

SEQ ID NO: 1495169 - RNA, 19 nt, Artificial Sequence
  Description of Artificial Sequence: Synthetic oligonucleotide
uggcuucggaucucucuua

SEQ ID NO: 1495170 - RNA, 19 nt, Artificial Sequence
  Description of Artificial Sequence: Synthetic oligonucleotide
uauagcggacacggucggu

SEQ ID NO: 1495171 - RNA, 19 nt, Artificial Sequence
  Description of Artificial Sequence: Synthetic oligonucleotide
accagcucucauaguaggu

SEQ ID NO: 1495172 - RNA, 19 nt, Artificial Sequence
  Description of Artificial Sequence: Synthetic oligonucleotide
aggagugacuuuggaggga

SEQ ID NO: 1495173 - RNA, 19 nt, Artificial Sequence
  Description of Artificial Sequence: Synthetic oligonucleotide
cugggaccgauuucccuga

SEQ ID NO: 1495174 - RNA, 19 nt, Artificial Sequence
  Description of Artificial Sequence: Synthetic oligonucleotide
cgugucacuccacagacga

SEQ ID NO: 1495175 - RNA, 19 nt, Artificial Sequence
  Description of Artificial Sequence: Synthetic oligonucleotide
uggacgugucagccucacu

SEQ ID NO: 1495176 - RNA, 19 nt, Artificial Sequence
  Description of Artificial Sequence: Synthetic oligonucleotide
gaucuucgugucacuccac

SEQ ID NO: 1495177 - RNA, 19 nt, Artificial Sequence
  Description of Artificial Sequence: Synthetic oligonucleotide
cccgcugguguacaccacg

SEQ ID NO: 1495178 - RNA, 19 nt, Artificial Sequence
  Description of Artificial Sequence: Synthetic oligonucleotide
acggucgguccagacgcuc

SEQ ID NO: 1495179 - RNA, 19 nt, Artificial Sequence
  Description of Artificial Sequence: Synthetic oligonucleotide
acggugggucugaaggcag

SEQ ID NO: 1495180 - RNA, 19 nt, Artificial Sequence
  Description of Artificial Sequence: Synthetic oligonucleotide
cauacugguggcguucuua

SEQ ID NO: 1495181 - RNA, 19 nt, Artificial Sequence
  Description of Artificial Sequence: Synthetic oligonucleotide
ggcugaguguucaggcucc

SEQ ID NO: 1495182 - RNA, 19 nt, Artificial Sequence
  Description of Artificial Sequence: Synthetic oligonucleotide
ccgacgucuggcuuccuug

SEQ ID NO: 1495183 - RNA, 19 nt, Artificial Sequence
  Description of Artificial Sequence: Synthetic oligonucleotide
gacgaagaaccaucccgau

SEQ ID NO: 1495184 - RNA, 19 nt, Artificial Sequence
  Description of Artificial Sequence: Synthetic oligonucleotide
gcguagaagguugaucauc

SEQ ID NO: 1495185 - RNA, 19 nt, Artificial Sequence
  Description of Artificial Sequence: Synthetic oligonucleotide
gggagugggaacgcuucag

SEQ ID NO: 1495186 - RNA, 19 nt, Artificial Sequence
  Description of Artificial Sequence: Synthetic oligonucleotide
gagguuucucuggaaggcu

SEQ ID NO: 1495187 - RNA, 19 nt, Artificial Sequence
  Description of Artificial Sequence: Synthetic oligonucleotide
ccgauggugcagcuuuugc

SEQ ID NO: 1495188 - RNA, 19 nt, Artificial Sequence
  Description of Artificial Sequence: Synthetic oligonucleotide
cucgaucuccugcgcccgc

SEQ ID NO: 1495189 - RNA, 19 nt, Artificial Sequence
  Description of Artificial Sequence: Synthetic oligonucleotide
ggguucgugcaacaaggaa

SEQ ID NO: 1495190 - RNA, 19 nt, Artificial Sequence
  Description of Artificial Sequence: Synthetic oligonucleotide
accgacgucuggcuuccuu

SEQ ID NO: 1495191 - RNA, 19 nt, Artificial Sequence
  Description of Artificial Sequence: Synthetic oligonucleotide
gaccgauuucccugagggu

SEQ ID NO: 1495192 - RNA, 19 nt, Artificial Sequence
  Description of Artificial Sequence: Synthetic oligonucleotide
cagagccaccgacgucugg

SEQ ID NO: 1495193 - RNA, 19 nt, Artificial Sequence
  Description of Artificial Sequence: Synthetic oligonucleotide
gcuugguugcucagggcug

SEQ ID NO: 1495194 - RNA, 19 nt, Artificial Sequence
  Description of Artificial Sequence: Synthetic oligonucleotide
gugccuccgugccacuuca

SEQ ID NO: 1495195 - RNA, 19 nt, Artificial Sequence
  Description of Artificial Sequence: Synthetic oligonucleotide
cucgguggauaaguugaga

SEQ ID NO: 1495196 - RNA, 19 nt, Artificial Sequence
  Description of Artificial Sequence: Synthetic oligonucleotide
cugacaggcuuuucaaguu

SEQ ID NO: 1495197 - RNA, 19 nt, Artificial Sequence
  Description of Artificial Sequence: Synthetic oligonucleotide
guuguuggcuggaccagcu

SEQ ID NO: 1495198 - RNA, 19 nt, Artificial Sequence
  Description of Artificial Sequence: Synthetic oligonucleotide
gccaccgacgucuggcuuc

SEQ ID NO: 1495199 - RNA, 19 nt, Artificial Sequence
  Description of Artificial Sequence: Synthetic oligonucleotide
ggcgguucugggugagccc

SEQ ID NO: 1495200 - RNA, 19 nt, Artificial Sequence
  Description of Artificial Sequence: Synthetic oligonucleotide
caguagggaugcgggguug

SEQ ID NO: 1495201 - RNA, 19 nt, Artificial Sequence
  Description of Artificial Sequence: Synthetic oligonucleotide
guggcguucuuaucacagu

SEQ ID NO: 1495202 - RNA, 19 nt, Artificial Sequence
  Description of Artificial Sequence: Synthetic oligonucleotide
ggagucucgucucgaucuc

SEQ ID NO: 1495203 - RNA, 19 nt, Artificial Sequence
  Description of Artificial Sequence: Synthetic oligonucleotide
guacagccagcuugauucu

SEQ ID NO: 1495204 - RNA, 19 nt, Artificial Sequence
  Description of Artificial Sequence: Synthetic oligonucleotide
ccaguuuggcgagggagug

SEQ ID NO: 1495205 - RNA, 19 nt, Artificial Sequence
  Description of Artificial Sequence: Synthetic oligonucleotide
ucccgauggugcagcuuuu

SEQ ID NO: 1495206 - RNA, 19 nt, Artificial Sequence
  Description of Artificial Sequence: Synthetic oligonucleotide
gggaacgcuucagugggga

SEQ ID NO: 1495207 - RNA, 19 nt, Artificial Sequence
  Description of Artificial Sequence: Synthetic oligonucleotide
cacgaccauauagcggaca

SEQ ID NO: 1495208 - RNA, 19 nt, Artificial Sequence
  Description of Artificial Sequence: Synthetic oligonucleotide
cuucacagcguagaagguu

SEQ ID NO: 1495209 - RNA, 19 nt, Artificial Sequence
  Description of Artificial Sequence: Synthetic oligonucleotide
auguugcaucagguagcug

SEQ ID NO: 1495210 - RNA, 19 nt, Artificial Sequence
  Description of Artificial Sequence: Synthetic oligonucleotide
cuucaaucccugcuugguu

SEQ ID NO: 1495211 - RNA, 19 nt, Artificial Sequence
  Description of Artificial Sequence: Synthetic oligonucleotide
cuuaacccugacaggcuuu

SEQ ID NO: 1495212 - RNA, 19 nt, Artificial Sequence
  Description of Artificial Sequence: Synthetic oligonucleotide
cgucucgaucuccugcgcc

SEQ ID NO: 1495213 - RNA, 19 nt, Artificial Sequence
  Description of Artificial Sequence: Synthetic oligonucleotide
ggucgguccagacgcucuc

SEQ ID NO: 1495214 - RNA, 19 nt, Artificial Sequence
  Description of Artificial Sequence: Synthetic oligonucleotide
guggucggcuucucggccu

SEQ ID NO: 1495215 - RNA, 19 nt, Artificial Sequence
  Description of Artificial Sequence: Synthetic oligonucleotide
gccuccgugccacuucaca

SEQ ID NO: 1495216 - RNA, 19 nt, Artificial Sequence
  Description of Artificial Sequence: Synthetic oligonucleotide
gagaagcuacuggugugau

SEQ ID NO: 1495217 - RNA, 19 nt, Artificial Sequence
  Description of Artificial Sequence: Synthetic oligonucleotide
ggcaguagggaugcggggu

SEQ ID NO: 1495218 - RNA, 19 nt, Artificial Sequence
  Description of Artificial Sequence: Synthetic oligonucleotide
ggcacaccgucuucaggaa

SEQ ID NO: 1495219 - RNA, 19 nt, Artificial Sequence
  Description of Artificial Sequence: Synthetic oligonucleotide
cgaccauauagcggacacg

SEQ ID NO: 1495220 - RNA, 19 nt, Artificial Sequence
  Description of Artificial Sequence: Synthetic oligonucleotide
cuggcgcccgcugguguac

SEQ ID NO: 1495221 - RNA, 19 nt, Artificial Sequence
  Description of Artificial Sequence: Synthetic oligonucleotide
agccggagucucgucucga

SEQ ID NO: 1495222 - RNA, 19 nt, Artificial Sequence
  Description of Artificial Sequence: Synthetic oligonucleotide
ggaugcuagccuccagccu

SEQ ID NO: 1495223 - RNA, 19 nt, Artificial Sequence
  Description of Artificial Sequence: Synthetic oligonucleotide
cguucuuaucacagugaga

SEQ ID NO: 1495224 - RNA, 19 nt, Artificial Sequence
  Description of Artificial Sequence: Synthetic oligonucleotide
acgcuucaguggggaggac

SEQ ID NO: 1495225 - RNA, 19 nt, Artificial Sequence
  Description of Artificial Sequence: Synthetic oligonucleotide
cagacgcucucuagucgua

SEQ ID NO: 1495226 - RNA, 19 nt, Artificial Sequence
  Description of Artificial Sequence: Synthetic oligonucleotide
ggcgagggagugggaacgc

SEQ ID NO: 1495227 - RNA, 19 nt, Artificial Sequence
  Description of Artificial Sequence: Synthetic oligonucleotide
ccagacgcucucuagucgu

SEQ ID NO: 1495228 - RNA, 19 nt, Artificial Sequence
  Description of Artificial Sequence: Synthetic oligonucleotide
gggguucgugcaacaagga

SEQ ID NO: 1495229 - RNA, 19 nt, Artificial Sequence
  Description of Artificial Sequence: Synthetic oligonucleotide
cuuccauacugguggcguu

SEQ ID NO: 1495230 - RNA, 19 nt, Artificial Sequence
  Description of Artificial Sequence: Synthetic oligonucleotide
ccggagucucgucucgauc

SEQ ID NO: 1495231 - RNA, 19 nt, Artificial Sequence
  Description of Artificial Sequence: Synthetic oligonucleotide
cgcucucuagucguacagc

SEQ ID NO: 1495232 - RNA, 19 nt, Artificial Sequence
  Description of Artificial Sequence: Synthetic oligonucleotide
ccaccgacgucuggcuucc

SEQ ID NO: 1495233 - RNA, 19 nt, Artificial Sequence
  Description of Artificial Sequence: Synthetic oligonucleotide
gugucacuccacagacgaa

SEQ ID NO: 1495234 - RNA, 19 nt, Artificial Sequence
  Description of Artificial Sequence: Synthetic oligonucleotide
cgugccacuucacaggccu

SEQ ID NO: 1495235 - RNA, 19 nt, Artificial Sequence
  Description of Artificial Sequence: Synthetic oligonucleotide
uggcgcccgcugguguaca

SEQ ID NO: 1495236 - RNA, 19 nt, Artificial Sequence
  Description of Artificial Sequence: Synthetic oligonucleotide
ccacgaccauauagcggac

SEQ ID NO: 1495237 - RNA, 19 nt, Artificial Sequence
  Description of Artificial Sequence: Synthetic oligonucleotide
ccgugccacuucacaggcc

SEQ ID NO: 1495238 - RNA, 19 nt, Artificial Sequence
  Description of Artificial Sequence: Synthetic oligonucleotide
cuagucguacagccagcuu

SEQ ID NO: 1495239 - RNA, 19 nt, Artificial Sequence
  Description of Artificial Sequence: Synthetic oligonucleotide
gccagccggagucucgucu

SEQ ID NO: 1495240 - RNA, 19 nt, Artificial Sequence
  Description of Artificial Sequence: Synthetic oligonucleotide
ccgcugguguacaccacga

SEQ ID NO: 1495241 - RNA, 19 nt, Artificial Sequence
  Description of Artificial Sequence: Synthetic oligonucleotide
ggguguaggcacaccgucu

SEQ ID NO: 1495242 - RNA, 19 nt, Artificial Sequence
  Description of Artificial Sequence: Synthetic oligonucleotide
cgguggauaaguugagacu

SEQ ID NO: 1495243 - RNA, 19 nt, Artificial Sequence
  Description of Artificial Sequence: Synthetic oligonucleotide
gucccugcagguagacggu

SEQ ID NO: 1495244 - RNA, 19 nt, Artificial Sequence
  Description of Artificial Sequence: Synthetic oligonucleotide
cuggaccagcucucauagu

SEQ ID NO: 1495245 - RNA, 19 nt, Artificial Sequence
  Description of Artificial Sequence: Synthetic oligonucleotide
gcaguagggaugcgggguu

SEQ ID NO: 1495246 - RNA, 19 nt, Artificial Sequence
  Description of Artificial Sequence: Synthetic oligonucleotide
cgacgucuggcuuccuuga

SEQ ID NO: 1495247 - RNA, 19 nt, Artificial Sequence
  Description of Artificial Sequence: Synthetic oligonucleotide
gcgcccgcugguguacacc

SEQ ID NO: 1495248 - RNA, 19 nt, Artificial Sequence
  Description of Artificial Sequence: Synthetic oligonucleotide
cacagcguagaagguugau

SEQ ID NO: 1495249 - RNA, 19 nt, Artificial Sequence
  Description of Artificial Sequence: Synthetic oligonucleotide
ggcgcccgcugguguacac

SEQ ID NO: 1495250 - RNA, 19 nt, Artificial Sequence
  Description of Artificial Sequence: Synthetic oligonucleotide
ccggaccaggccugccuuc

SEQ ID NO: 1495251 - RNA, 19 nt, Artificial Sequence
  Description of Artificial Sequence: Synthetic oligonucleotide
cacggucgguccagacgcu

SEQ ID NO: 1495252 - RNA, 19 nt, Artificial Sequence
  Description of Artificial Sequence: Synthetic oligonucleotide
ccgauuucccugaggguuu

SEQ ID NO: 1495253 - RNA, 19 nt, Artificial Sequence
  Description of Artificial Sequence: Synthetic oligonucleotide
gccggagucucgucucgau

SEQ ID NO: 1495254 - RNA, 19 nt, Artificial Sequence
  Description of Artificial Sequence: Synthetic oligonucleotide
gguccucgguggauaaguu

SEQ ID NO: 1495255 - RNA, 19 nt, Artificial Sequence
  Description of Artificial Sequence: Synthetic oligonucleotide
gucguacagccagcuugau

SEQ ID NO: 1495256 - RNA, 19 nt, Artificial Sequence
  Description of Artificial Sequence: Synthetic oligonucleotide
ccuggcgcccgcuggugua

SEQ ID NO: 1495257 - RNA, 19 nt, Artificial Sequence
  Description of Artificial Sequence: Synthetic oligonucleotide
ccuggacagacacgggcuu

SEQ ID NO: 1495258 - RNA, 19 nt, Artificial Sequence
  Description of Artificial Sequence: Synthetic oligonucleotide
caucccgauggugcagcuu

SEQ ID NO: 1495259 - RNA, 19 nt, Artificial Sequence
  Description of Artificial Sequence: Synthetic oligonucleotide
gcgagggagugggaacgcu

SEQ ID NO: 1495260 - RNA, 19 nt, Artificial Sequence
  Description of Artificial Sequence: Synthetic oligonucleotide
gcuccgggucagguuggaa

SEQ ID NO: 1495261 - RNA, 19 nt, Artificial Sequence
  Description of Artificial Sequence: Synthetic oligonucleotide
cgucaagguggaucuucgu

SEQ ID NO: 1495262 - RNA, 19 nt, Artificial Sequence
  Description of Artificial Sequence: Synthetic oligonucleotide
gugccacuucacaggccuu

SEQ ID NO: 1495263 - RNA, 19 nt, Artificial Sequence
  Description of Artificial Sequence: Synthetic oligonucleotide
cggucgguccagacgcucu

SEQ ID NO: 1495264 - RNA, 19 nt, Artificial Sequence
  Description of Artificial Sequence: Synthetic oligonucleotide
ccgccagccggagucucgu

SEQ ID NO: 1495265 - RNA, 19 nt, Artificial Sequence
  Description of Artificial Sequence: Synthetic oligonucleotide
ccauacugguggcguucuu

SEQ ID NO: 1495266 - RNA, 19 nt, Artificial Sequence
  Description of Artificial Sequence: Synthetic oligonucleotide
caccgacgucuggcuuccu

SEQ ID NO: 1495267 - RNA, 19 nt, Artificial Sequence
  Description of Artificial Sequence: Synthetic oligonucleotide
ccccgucaagguggaucuu

SEQ ID NO: 1495268 - RNA, 19 nt, Artificial Sequence
  Description of Artificial Sequence: Synthetic oligonucleotide
aacacgauguaauaugucc

SEQ ID NO: 1495269 - RNA, 19 nt, Artificial Sequence
  Description of Artificial Sequence: Synthetic oligonucleotide
aauuacugcacagagaggc

SEQ ID NO: 1495270 - RNA, 19 nt, Artificial Sequence
  Description of Artificial Sequence: Synthetic oligonucleotide
aauuaagcaguuuagcauc

SEQ ID NO: 1495271 - RNA, 19 nt, Artificial Sequence
  Description of Artificial Sequence: Synthetic oligonucleotide
ucugauugaaauaucaucc

SEQ ID NO: 1495272 - RNA, 19 nt, Artificial Sequence
  Description of Artificial Sequence: Synthetic oligonucleotide
uuauauuaucuuaaguugg

SEQ ID NO: 1495273 - RNA, 19 nt, Artificial Sequence
  Description of Artificial Sequence: Synthetic oligonucleotide
uguaauauguccuacgugc

SEQ ID NO: 1495274 - RNA, 19 nt, Artificial Sequence
  Description of Artificial Sequence: Synthetic oligonucleotide
auuuguguaaagcacuugc

SEQ ID NO: 1495275 - RNA, 19 nt, Artificial Sequence
  Description of Artificial Sequence: Synthetic oligonucleotide
cuuuacacauucaagaagc

SEQ ID NO: 1495276 - RNA, 19 nt, Artificial Sequence
  Description of Artificial Sequence: Synthetic oligonucleotide
auugaaauaucauccgagc

SEQ ID NO: 1495277 - RNA, 19 nt, Artificial Sequence
  Description of Artificial Sequence: Synthetic oligonucleotide
uuaaguugguuguacaggg

SEQ ID NO: 1495278 - RNA, 19 nt, Artificial Sequence
  Description of Artificial Sequence: Synthetic oligonucleotide
aaagcacuugcauuaaauc

SEQ ID NO: 1495279 - RNA, 19 nt, Artificial Sequence
  Description of Artificial Sequence: Synthetic oligonucleotide
ugaaauaucauccgagcug

SEQ ID NO: 1495280 - RNA, 19 nt, Artificial Sequence
  Description of Artificial Sequence: Synthetic oligonucleotide
agugaaaagucuuugaaga

SEQ ID NO: 1495281 - RNA, 19 nt, Artificial Sequence
  Description of Artificial Sequence: Synthetic oligonucleotide
uauucauuuguguaaagca

SEQ ID NO: 1495282 - RNA, 19 nt, Artificial Sequence
  Description of Artificial Sequence: Synthetic oligonucleotide
uuugguacaaaguuccucc

SEQ ID NO: 1495283 - RNA, 19 nt, Artificial Sequence
  Description of Artificial Sequence: Synthetic oligonucleotide
auuacaacgggcaaucugc

SEQ ID NO: 1495284 - RNA, 19 nt, Artificial Sequence
  Description of Artificial Sequence: Synthetic oligonucleotide
uguacaaccgcacuguuac

SEQ ID NO: 1495285 - RNA, 19 nt, Artificial Sequence
  Description of Artificial Sequence: Synthetic oligonucleotide
acuucauucugauucauag

SEQ ID NO: 1495286 - RNA, 19 nt, Artificial Sequence
  Description of Artificial Sequence: Synthetic oligonucleotide
uauuaucuuaaguugguug

SEQ ID NO: 1495287 - RNA, 19 nt, Artificial Sequence
  Description of Artificial Sequence: Synthetic oligonucleotide
aagaguuuugcucacauuu

SEQ ID NO: 1495288 - RNA, 19 nt, Artificial Sequence
  Description of Artificial Sequence: Synthetic oligonucleotide
uguugauuuacaaaaugac

SEQ ID NO: 1495289 - RNA, 19 nt, Artificial Sequence
  Description of Artificial Sequence: Synthetic oligonucleotide
aaguaaucaggugaucugc

SEQ ID NO: 1495290 - RNA, 19 nt, Artificial Sequence
  Description of Artificial Sequence: Synthetic oligonucleotide
uguccuaucauccuucuga

SEQ ID NO: 1495291 - RNA, 19 nt, Artificial Sequence
  Description of Artificial Sequence: Synthetic oligonucleotide
ucaaacacgauguaauaug

SEQ ID NO: 1495292 - RNA, 19 nt, Artificial Sequence
  Description of Artificial Sequence: Synthetic oligonucleotide
aucacagcugaucaaacac

SEQ ID NO: 1495293 - RNA, 19 nt, Artificial Sequence
  Description of Artificial Sequence: Synthetic oligonucleotide
agagugaagaguuuugcuc

SEQ ID NO: 1495294 - RNA, 19 nt, Artificial Sequence
  Description of Artificial Sequence: Synthetic oligonucleotide
uuugauuuugguacaaagu

SEQ ID NO: 1495295 - RNA, 19 nt, Artificial Sequence
  Description of Artificial Sequence: Synthetic oligonucleotide
gauuuugguacaaaguucc

SEQ ID NO: 1495296 - RNA, 19 nt, Artificial Sequence
  Description of Artificial Sequence: Synthetic oligonucleotide
aaguauuuggggcugugag

SEQ ID NO: 1495297 - RNA, 19 nt, Artificial Sequence
  Description of Artificial Sequence: Synthetic oligonucleotide
aauaugggucucucugugc

SEQ ID NO: 1495298 - RNA, 19 nt, Artificial Sequence
  Description of Artificial Sequence: Synthetic oligonucleotide
aaaguaaucaggugaucug

SEQ ID NO: 1495299 - RNA, 19 nt, Artificial Sequence
  Description of Artificial Sequence: Synthetic oligonucleotide
uuggaauuacugcacagag

SEQ ID NO: 1495300 - RNA, 19 nt, Artificial Sequence
  Description of Artificial Sequence: Synthetic oligonucleotide
uuagcaucacagcugauca

SEQ ID NO: 1495301 - RNA, 19 nt, Artificial Sequence
  Description of Artificial Sequence: Synthetic oligonucleotide
uugauuuugguacaaaguu

SEQ ID NO: 1495302 - RNA, 19 nt, Artificial Sequence
  Description of Artificial Sequence: Synthetic oligonucleotide
ugugcuuuauccauggcac

SEQ ID NO: 1495303 - RNA, 19 nt, Artificial Sequence
  Description of Artificial Sequence: Synthetic oligonucleotide
ugaacugcuucucaccagg

SEQ ID NO: 1495304 - RNA, 19 nt, Artificial Sequence
  Description of Artificial Sequence: Synthetic oligonucleotide
uugguuauuccuaugauuu

SEQ ID NO: 1495305 - RNA, 19 nt, Artificial Sequence
  Description of Artificial Sequence: Synthetic oligonucleotide
uacaguggaaauaaacaug

SEQ ID NO: 1495306 - RNA, 19 nt, Artificial Sequence
  Description of Artificial Sequence: Synthetic oligonucleotide
ucuguuuuguacaaccgca

SEQ ID NO: 1495307 - RNA, 19 nt, Artificial Sequence
  Description of Artificial Sequence: Synthetic oligonucleotide
uucguugcucuccagagag

SEQ ID NO: 1495308 - RNA, 19 nt, Artificial Sequence
  Description of Artificial Sequence: Synthetic oligonucleotide
uguuugguuauuccuauga

SEQ ID NO: 1495309 - RNA, 19 nt, Artificial Sequence
  Description of Artificial Sequence: Synthetic oligonucleotide
ugcacuuuaggugauuugg

SEQ ID NO: 1495310 - RNA, 19 nt, Artificial Sequence
  Description of Artificial Sequence: Synthetic oligonucleotide
augauaagggcuuauauua

SEQ ID NO: 1495311 - RNA, 19 nt, Artificial Sequence
  Description of Artificial Sequence: Synthetic oligonucleotide
gauugaaauaucauccgag

SEQ ID NO: 1495312 - RNA, 19 nt, Artificial Sequence
  Description of Artificial Sequence: Synthetic oligonucleotide
ugcuaagggaguuucauca

SEQ ID NO: 1495313 - RNA, 19 nt, Artificial Sequence
  Description of Artificial Sequence: Synthetic oligonucleotide
ugaucaaacacgauguaau

SEQ ID NO: 1495314 - RNA, 19 nt, Artificial Sequence
  Description of Artificial Sequence: Synthetic oligonucleotide
uauauuaucuuaaguuggu

SEQ ID NO: 1495315 - RNA, 19 nt, Artificial Sequence
  Description of Artificial Sequence: Synthetic oligonucleotide
agcaguuuagcaucacagc

SEQ ID NO: 1495316 - RNA, 19 nt, Artificial Sequence
  Description of Artificial Sequence: Synthetic oligonucleotide
uuuccuucuguuacagugg

SEQ ID NO: 1495317 - RNA, 19 nt, Artificial Sequence
  Description of Artificial Sequence: Synthetic oligonucleotide
cuugcucuuauuacaacgg

SEQ ID NO: 1495318 - RNA, 19 nt, Artificial Sequence
  Description of Artificial Sequence: Synthetic oligonucleotide
aaucaggugaucugccauc

SEQ ID NO: 1495319 - RNA, 19 nt, Artificial Sequence
  Description of Artificial Sequence: Synthetic oligonucleotide
ucacagcugaucaaacacg

SEQ ID NO: 1495320 - RNA, 19 nt, Artificial Sequence
  Description of Artificial Sequence: Synthetic oligonucleotide
uauuacaacgggcaaucug

SEQ ID NO: 1495321 - RNA, 19 nt, Artificial Sequence
  Description of Artificial Sequence: Synthetic oligonucleotide
uggaguuuaauuuuauuua

SEQ ID NO: 1495322 - RNA, 19 nt, Artificial Sequence
  Description of Artificial Sequence: Synthetic oligonucleotide
gaguuuugcucacauuugg

SEQ ID NO: 1495323 - RNA, 19 nt, Artificial Sequence
  Description of Artificial Sequence: Synthetic oligonucleotide
agagaguagacgcaggugu

SEQ ID NO: 1495324 - RNA, 19 nt, Artificial Sequence
  Description of Artificial Sequence: Synthetic oligonucleotide
ucacauugcaaaguaauca

SEQ ID NO: 1495325 - RNA, 19 nt, Artificial Sequence
  Description of Artificial Sequence: Synthetic oligonucleotide
ugauugaaauaucauccga

SEQ ID NO: 1495326 - RNA, 19 nt, Artificial Sequence
  Description of Artificial Sequence: Synthetic oligonucleotide
cugauugaaauaucauccg

SEQ ID NO: 1495327 - RNA, 19 nt, Artificial Sequence
  Description of Artificial Sequence: Synthetic oligonucleotide
agaauauuuuaucuuuugu

SEQ ID NO: 1495328 - RNA, 19 nt, Artificial Sequence
  Description of Artificial Sequence: Synthetic oligonucleotide
uaagggaguuucaucauca

SEQ ID NO: 1495329 - RNA, 19 nt, Artificial Sequence
  Description of Artificial Sequence: Synthetic oligonucleotide
aauaaacauguuaaaauua

SEQ ID NO: 1495330 - RNA, 19 nt, Artificial Sequence
  Description of Artificial Sequence: Synthetic oligonucleotide
aauaucuguuuuguacaac

SEQ ID NO: 1495331 - RNA, 19 nt, Artificial Sequence
  Description of Artificial Sequence: Synthetic oligonucleotide
uccuaugauuucuugaacu

SEQ ID NO: 1495332 - RNA, 19 nt, Artificial Sequence
  Description of Artificial Sequence: Synthetic oligonucleotide
agagaguauucucuggguc

SEQ ID NO: 1495333 - RNA, 19 nt, Artificial Sequence
  Description of Artificial Sequence: Synthetic oligonucleotide
gagaguauucucugggucc

SEQ ID NO: 1495334 - RNA, 19 nt, Artificial Sequence
  Description of Artificial Sequence: Synthetic oligonucleotide
auaaauuucugaggcuugc

SEQ ID NO: 1495335 - RNA, 19 nt, Artificial Sequence
  Description of Artificial Sequence: Synthetic oligonucleotide
accaaagacugucgaagcc

SEQ ID NO: 1495336 - RNA, 19 nt, Artificial Sequence
  Description of Artificial Sequence: Synthetic oligonucleotide
uauuccuaugauuucuuga

SEQ ID NO: 1495337 - RNA, 19 nt, Artificial Sequence
  Description of Artificial Sequence: Synthetic oligonucleotide
acuauuugcuauuuucugu

SEQ ID NO: 1495338 - RNA, 19 nt, Artificial Sequence
  Description of Artificial Sequence: Synthetic oligonucleotide
cacauugcaaaguaaucag

SEQ ID NO: 1495339 - RNA, 19 nt, Artificial Sequence
  Description of Artificial Sequence: Synthetic oligonucleotide
cuuaaguugguuguacagg

SEQ ID NO: 1495340 - RNA, 19 nt, Artificial Sequence
  Description of Artificial Sequence: Synthetic oligonucleotide
uuuguguaaagcacuugca

SEQ ID NO: 1495341 - RNA, 19 nt, Artificial Sequence
  Description of Artificial Sequence: Synthetic oligonucleotide
ugaccaaagacugucgaag

SEQ ID NO: 1495342 - RNA, 19 nt, Artificial Sequence
  Description of Artificial Sequence: Synthetic oligonucleotide
ucuggggaggaguuguucg

SEQ ID NO: 1495343 - RNA, 19 nt, Artificial Sequence
  Description of Artificial Sequence: Synthetic oligonucleotide
cauguuaaaauuaagcagu

SEQ ID NO: 1495344 - RNA, 19 nt, Artificial Sequence
  Description of Artificial Sequence: Synthetic oligonucleotide
gacagacauucucugaucc

SEQ ID NO: 1495345 - RNA, 19 nt, Artificial Sequence
  Description of Artificial Sequence: Synthetic oligonucleotide
uaugauaagggcuuauauu

SEQ ID NO: 1495346 - RNA, 19 nt, Artificial Sequence
  Description of Artificial Sequence: Synthetic oligonucleotide
aaucauguugcaugcuugu

SEQ ID NO: 1495347 - RNA, 19 nt, Artificial Sequence
  Description of Artificial Sequence: Synthetic oligonucleotide
uugcucuuauuacaacggg

SEQ ID NO: 1495348 - RNA, 19 nt, Artificial Sequence
  Description of Artificial Sequence: Synthetic oligonucleotide
ugcucuuauuacaacgggc

SEQ ID NO: 1495349 - RNA, 19 nt, Artificial Sequence
  Description of Artificial Sequence: Synthetic oligonucleotide
uaauaaauuucugaggcuu

SEQ ID NO: 1495350 - RNA, 19 nt, Artificial Sequence
  Description of Artificial Sequence: Synthetic oligonucleotide
uauccauggcacuauuugc

SEQ ID NO: 1495351 - RNA, 19 nt, Artificial Sequence
  Description of Artificial Sequence: Synthetic oligonucleotide
ucggauguugguuaguuuc

SEQ ID NO: 1495352 - RNA, 19 nt, Artificial Sequence
  Description of Artificial Sequence: Synthetic oligonucleotide
uauuuuaucuuuuguugau

SEQ ID NO: 1495353 - RNA, 19 nt, Artificial Sequence
  Description of Artificial Sequence: Synthetic oligonucleotide
aaaguagcaaauguugcau

SEQ ID NO: 1495354 - RNA, 19 nt, Artificial Sequence
  Description of Artificial Sequence: Synthetic oligonucleotide
aauaaauuucugaggcuug

SEQ ID NO: 1495355 - RNA, 19 nt, Artificial Sequence
  Description of Artificial Sequence: Synthetic oligonucleotide
aguuucaucaucacuggag

SEQ ID NO: 1495356 - RNA, 19 nt, Artificial Sequence
  Description of Artificial Sequence: Synthetic oligonucleotide
guuuuguacaaccgcacug

SEQ ID NO: 1495357 - RNA, 19 nt, Artificial Sequence
  Description of Artificial Sequence: Synthetic oligonucleotide
uuguguaaagcacuugcau

SEQ ID NO: 1495358 - RNA, 19 nt, Artificial Sequence
  Description of Artificial Sequence: Synthetic oligonucleotide
uguuuuguacaaccgcacu

SEQ ID NO: 1495359 - RNA, 19 nt, Artificial Sequence
  Description of Artificial Sequence: Synthetic oligonucleotide
aaaucauguugcaugcuug

SEQ ID NO: 1495360 - RNA, 19 nt, Artificial Sequence
  Description of Artificial Sequence: Synthetic oligonucleotide
caaagacugucgaagccgg

SEQ ID NO: 1495361 - RNA, 19 nt, Artificial Sequence
  Description of Artificial Sequence: Synthetic oligonucleotide
uuuacacauucaagaagca

SEQ ID NO: 1495362 - RNA, 19 nt, Artificial Sequence
  Description of Artificial Sequence: Synthetic oligonucleotide
ccuaucauccuucugauug

SEQ ID NO: 1495363 - RNA, 19 nt, Artificial Sequence
  Description of Artificial Sequence: Synthetic oligonucleotide
ucauucugauucauagcug

SEQ ID NO: 1495364 - RNA, 19 nt, Artificial Sequence
  Description of Artificial Sequence: Synthetic oligonucleotide
uuugguuauuccuaugauu

SEQ ID NO: 1495365 - RNA, 19 nt, Artificial Sequence
  Description of Artificial Sequence: Synthetic oligonucleotide
gauaagggcuuauauuauc

SEQ ID NO: 1495366 - RNA, 19 nt, Artificial Sequence
  Description of Artificial Sequence: Synthetic oligonucleotide
uguguaaagcacuugcauu

SEQ ID NO: 1495367 - RNA, 19 nt, Artificial Sequence
  Description of Artificial Sequence: Synthetic oligonucleotide
guauucauuuguguaaagc

SEQ ID NO: 1495368 - RNA, 19 nt, Artificial Sequence
  Description of Artificial Sequence: Synthetic oligonucleotide
uugagaauaucuguuuugu

SEQ ID NO: 1495369 - RNA, 19 nt, Artificial Sequence
  Description of Artificial Sequence: Synthetic oligonucleotide
ucugauucauagcugguuu

SEQ ID NO: 1495370 - RNA, 19 nt, Artificial Sequence
  Description of Artificial Sequence: Synthetic oligonucleotide
aguaaucaggugaucugcc

SEQ ID NO: 1495371 - RNA, 19 nt, Artificial Sequence
  Description of Artificial Sequence: Synthetic oligonucleotide
uaagcaguuuagcaucaca

SEQ ID NO: 1495372 - RNA, 19 nt, Artificial Sequence
  Description of Artificial Sequence: Synthetic oligonucleotide
agaggauuuugccccaguc

SEQ ID NO: 1495373 - RNA, 19 nt, Artificial Sequence
  Description of Artificial Sequence: Synthetic oligonucleotide
uuugacagacauucucuga

SEQ ID NO: 1495374 - RNA, 19 nt, Artificial Sequence
  Description of Artificial Sequence: Synthetic oligonucleotide
aagggcuuauauuaucuua

SEQ ID NO: 1495375 - RNA, 19 nt, Artificial Sequence
  Description of Artificial Sequence: Synthetic oligonucleotide
uguuuagagagaguauucu

SEQ ID NO: 1495376 - RNA, 19 nt, Artificial Sequence
  Description of Artificial Sequence: Synthetic oligonucleotide
cuuauuacaacgggcaauc

SEQ ID NO: 1495377 - RNA, 19 nt, Artificial Sequence
  Description of Artificial Sequence: Synthetic oligonucleotide
aaccgcacuguuaccaagc

SEQ ID NO: 1495378 - RNA, 19 nt, Artificial Sequence
  Description of Artificial Sequence: Synthetic oligonucleotide
uuaagcagggucucugcca

SEQ ID NO: 1495379 - RNA, 19 nt, Artificial Sequence
  Description of Artificial Sequence: Synthetic oligonucleotide
aguuggaauuacugcacag

SEQ ID NO: 1495380 - RNA, 19 nt, Artificial Sequence
  Description of Artificial Sequence: Synthetic oligonucleotide
uguccuacgugcacuuuag

SEQ ID NO: 1495381 - RNA, 19 nt, Artificial Sequence
  Description of Artificial Sequence: Synthetic oligonucleotide
ugaauaugggucucucugu

SEQ ID NO: 1495382 - RNA, 19 nt, Artificial Sequence
  Description of Artificial Sequence: Synthetic oligonucleotide
aguagcaaauguugcauaa

SEQ ID NO: 1495383 - RNA, 19 nt, Artificial Sequence
  Description of Artificial Sequence: Synthetic oligonucleotide
uuauuccuaugauuucuug

SEQ ID NO: 1495384 - RNA, 19 nt, Artificial Sequence
  Description of Artificial Sequence: Synthetic oligonucleotide
uaauauguccuacgugcac

SEQ ID NO: 1495385 - RNA, 19 nt, Artificial Sequence
  Description of Artificial Sequence: Synthetic oligonucleotide
uccuacgugcacuuuaggu

SEQ ID NO: 1495386 - RNA, 19 nt, Artificial Sequence
  Description of Artificial Sequence: Synthetic oligonucleotide
uagcaaauguugcauaauu

SEQ ID NO: 1495387 - RNA, 19 nt, Artificial Sequence
  Description of Artificial Sequence: Synthetic oligonucleotide
auguaauauguccuacgug

SEQ ID NO: 1495388 - RNA, 19 nt, Artificial Sequence
  Description of Artificial Sequence: Synthetic oligonucleotide
cacuuuaggugauuuggag

SEQ ID NO: 1495389 - RNA, 19 nt, Artificial Sequence
  Description of Artificial Sequence: Synthetic oligonucleotide
ugagagugaagaguuuugc

SEQ ID NO: 1495390 - RNA, 19 nt, Artificial Sequence
  Description of Artificial Sequence: Synthetic oligonucleotide
cacuauuugcuauuuucug

SEQ ID NO: 1495391 - RNA, 19 nt, Artificial Sequence
  Description of Artificial Sequence: Synthetic oligonucleotide
aaacacgauguaauauguc

SEQ ID NO: 1495392 - RNA, 19 nt, Artificial Sequence
  Description of Artificial Sequence: Synthetic oligonucleotide
agaguuggaauuacugcac

SEQ ID NO: 1495393 - RNA, 19 nt, Artificial Sequence
  Description of Artificial Sequence: Synthetic oligonucleotide
aauaucauccgagcuggga

SEQ ID NO: 1495394 - RNA, 19 nt, Artificial Sequence
  Description of Artificial Sequence: Synthetic oligonucleotide
gauuuugccccagucagac

SEQ ID NO: 1495395 - RNA, 19 nt, Artificial Sequence
  Description of Artificial Sequence: Synthetic oligonucleotide
acuuguagcaugaccaaag

SEQ ID NO: 1495396 - RNA, 19 nt, Artificial Sequence
  Description of Artificial Sequence: Synthetic oligonucleotide
aaauguugcauaauuuauu

SEQ ID NO: 1495397 - RNA, 19 nt, Artificial Sequence
  Description of Artificial Sequence: Synthetic oligonucleotide
uggaauuacugcacagaga

SEQ ID NO: 1495398 - RNA, 19 nt, Artificial Sequence
  Description of Artificial Sequence: Synthetic oligonucleotide
auaucauccgagcugggaa

SEQ ID NO: 1495399 - RNA, 19 nt, Artificial Sequence
  Description of Artificial Sequence: Synthetic oligonucleotide
ucugugccauuauuaaaca

SEQ ID NO: 1495400 - RNA, 19 nt, Artificial Sequence
  Description of Artificial Sequence: Synthetic oligonucleotide
gaccaaagacugucgaagc

SEQ ID NO: 1495401 - RNA, 19 nt, Artificial Sequence
  Description of Artificial Sequence: Synthetic oligonucleotide
guuuugccagacauggugg

SEQ ID NO: 1495402 - RNA, 19 nt, Artificial Sequence
  Description of Artificial Sequence: Synthetic oligonucleotide
gauguaauauguccuacgu

SEQ ID NO: 1495403 - RNA, 19 nt, Artificial Sequence
  Description of Artificial Sequence: Synthetic oligonucleotide
cuucagggaacuuggggag

SEQ ID NO: 1495404 - RNA, 19 nt, Artificial Sequence
  Description of Artificial Sequence: Synthetic oligonucleotide
guuugacagacauucucug

SEQ ID NO: 1495405 - RNA, 19 nt, Artificial Sequence
  Description of Artificial Sequence: Synthetic oligonucleotide
caaccaguucuucaaacug

SEQ ID NO: 1495406 - RNA, 19 nt, Artificial Sequence
  Description of Artificial Sequence: Synthetic oligonucleotide
cuuaggaauuccccuuucc

SEQ ID NO: 1495407 - RNA, 19 nt, Artificial Sequence
  Description of Artificial Sequence: Synthetic oligonucleotide
ucauugagaauaucuguuu

SEQ ID NO: 1495408 - RNA, 19 nt, Artificial Sequence
  Description of Artificial Sequence: Synthetic oligonucleotide
cuugaaguagaggauuuug

SEQ ID NO: 1495409 - RNA, 19 nt, Artificial Sequence
  Description of Artificial Sequence: Synthetic oligonucleotide
caguuuagcaucacagcug

SEQ ID NO: 1495410 - RNA, 19 nt, Artificial Sequence
  Description of Artificial Sequence: Synthetic oligonucleotide
ugauaagggcuuauauuau

SEQ ID NO: 1495411 - RNA, 19 nt, Artificial Sequence
  Description of Artificial Sequence: Synthetic oligonucleotide
gguacaaaguuccuccuug

SEQ ID NO: 1495412 - RNA, 19 nt, Artificial Sequence
  Description of Artificial Sequence: Synthetic oligonucleotide
ucauagcugguuuuacaac

SEQ ID NO: 1495413 - RNA, 19 nt, Artificial Sequence
  Description of Artificial Sequence: Synthetic oligonucleotide
uuacaacgggcaaucugcc

SEQ ID NO: 1495414 - RNA, 19 nt, Artificial Sequence
  Description of Artificial Sequence: Synthetic oligonucleotide
uaggugauuuggaggguag

SEQ ID NO: 1495415 - RNA, 19 nt, Artificial Sequence
  Description of Artificial Sequence: Synthetic oligonucleotide
uuguucguugcucuccaga

SEQ ID NO: 1495416 - RNA, 19 nt, Artificial Sequence
  Description of Artificial Sequence: Synthetic oligonucleotide
uucuguaguucacugucuc

SEQ ID NO: 1495417 - RNA, 19 nt, Artificial Sequence
  Description of Artificial Sequence: Synthetic oligonucleotide
acauugcaaaguaaucagg

SEQ ID NO: 1495418 - RNA, 19 nt, Artificial Sequence
  Description of Artificial Sequence: Synthetic oligonucleotide
ucuuauuacaacgggcaau

SEQ ID NO: 1495419 - RNA, 19 nt, Artificial Sequence
  Description of Artificial Sequence: Synthetic oligonucleotide
uacaaccgcacuguuacca

SEQ ID NO: 1495420 - RNA, 19 nt, Artificial Sequence
  Description of Artificial Sequence: Synthetic oligonucleotide
uaucuuaaguugguuguac

SEQ ID NO: 1495421 - RNA, 19 nt, Artificial Sequence
  Description of Artificial Sequence: Synthetic oligonucleotide
augcuuguuugacagacau

SEQ ID NO: 1495422 - RNA, 19 nt, Artificial Sequence
  Description of Artificial Sequence: Synthetic oligonucleotide
gaggauuuugccccaguca

SEQ ID NO: 1495423 - RNA, 19 nt, Artificial Sequence
  Description of Artificial Sequence: Synthetic oligonucleotide
cuucaacaucacuuuacac

SEQ ID NO: 1495424 - RNA, 19 nt, Artificial Sequence
  Description of Artificial Sequence: Synthetic oligonucleotide
guguaaagcacuugcauua

SEQ ID NO: 1495425 - RNA, 19 nt, Artificial Sequence
  Description of Artificial Sequence: Synthetic oligonucleotide
aaguagcaaauguugcaua

SEQ ID NO: 1495426 - RNA, 19 nt, Artificial Sequence
  Description of Artificial Sequence: Synthetic oligonucleotide
aguagacgcagguguggac

SEQ ID NO: 1495427 - RNA, 19 nt, Artificial Sequence
  Description of Artificial Sequence: Synthetic oligonucleotide
cuacgugcacuuuagguga

SEQ ID NO: 1495428 - RNA, 19 nt, Artificial Sequence
  Description of Artificial Sequence: Synthetic oligonucleotide
acgauguaauauguccuac

SEQ ID NO: 1495429 - RNA, 19 nt, Artificial Sequence
  Description of Artificial Sequence: Synthetic oligonucleotide
uaaguugguuguacaggga

SEQ ID NO: 1495430 - RNA, 19 nt, Artificial Sequence
  Description of Artificial Sequence: Synthetic oligonucleotide
uccacccuuaagcaggguc

SEQ ID NO: 1495431 - RNA, 19 nt, Artificial Sequence
  Description of Artificial Sequence: Synthetic oligonucleotide
aagacugucgaagccggcu

SEQ ID NO: 1495432 - RNA, 19 nt, Artificial Sequence
  Description of Artificial Sequence: Synthetic oligonucleotide
uuuauccauggcacuauuu

SEQ ID NO: 1495433 - RNA, 19 nt, Artificial Sequence
  Description of Artificial Sequence: Synthetic oligonucleotide
uguugcaugcuuguuugac

SEQ ID NO: 1495434 - RNA, 19 nt, Artificial Sequence
  Description of Artificial Sequence: Synthetic oligonucleotide
cuguuuuguacaaccgcac

SEQ ID NO: 1495435 - RNA, 19 nt, Artificial Sequence
  Description of Artificial Sequence: Synthetic oligonucleotide
auccuucugauugaaauau

SEQ ID NO: 1495436 - RNA, 19 nt, Artificial Sequence
  Description of Artificial Sequence: Synthetic oligonucleotide
ugguaacacuuguagcaug

SEQ ID NO: 1495437 - RNA, 19 nt, Artificial Sequence
  Description of Artificial Sequence: Synthetic oligonucleotide
ugucgaagccggcuguucu

SEQ ID NO: 1495438 - RNA, 19 nt, Artificial Sequence
  Description of Artificial Sequence: Synthetic oligonucleotide
caagugaaaagucuuugaa

SEQ ID NO: 1495439 - RNA, 19 nt, Artificial Sequence
  Description of Artificial Sequence: Synthetic oligonucleotide
cugagagugaagaguuuug

SEQ ID NO: 1495440 - RNA, 19 nt, Artificial Sequence
  Description of Artificial Sequence: Synthetic oligonucleotide
guugauuuacaaaaugacu

SEQ ID NO: 1495441 - RNA, 19 nt, Artificial Sequence
  Description of Artificial Sequence: Synthetic oligonucleotide
uaucauccgagcugggaaa

SEQ ID NO: 1495442 - RNA, 19 nt, Artificial Sequence
  Description of Artificial Sequence: Synthetic oligonucleotide
aaagacugucgaagccggc

SEQ ID NO: 1495443 - RNA, 19 nt, Artificial Sequence
  Description of Artificial Sequence: Synthetic oligonucleotide
gaauuacugcacagagagg

SEQ ID NO: 1495444 - RNA, 19 nt, Artificial Sequence
  Description of Artificial Sequence: Synthetic oligonucleotide
cuuuccaggcuucaacauc

SEQ ID NO: 1495445 - RNA, 19 nt, Artificial Sequence
  Description of Artificial Sequence: Synthetic oligonucleotide
cuaagggaguuucaucauc

SEQ ID NO: 1495446 - RNA, 19 nt, Artificial Sequence
  Description of Artificial Sequence: Synthetic oligonucleotide
agaguagacgcaggugugg

SEQ ID NO: 1495447 - RNA, 19 nt, Artificial Sequence
  Description of Artificial Sequence: Synthetic oligonucleotide
cuaugauuucuugaacuuc

SEQ ID NO: 1495448 - RNA, 19 nt, Artificial Sequence
  Description of Artificial Sequence: Synthetic oligonucleotide
ucucugauccugagaguga

SEQ ID NO: 1495449 - RNA, 19 nt, Artificial Sequence
  Description of Artificial Sequence: Synthetic oligonucleotide
agggaguuucaucaucacu

SEQ ID NO: 1495450 - RNA, 19 nt, Artificial Sequence
  Description of Artificial Sequence: Synthetic oligonucleotide
uuuguccuaucauccuucu

SEQ ID NO: 1495451 - RNA, 19 nt, Artificial Sequence
  Description of Artificial Sequence: Synthetic oligonucleotide
ccuacgugcacuuuaggug

SEQ ID NO: 1495452 - RNA, 19 nt, Artificial Sequence
  Description of Artificial Sequence: Synthetic oligonucleotide
gacgcagguguggacacgg

SEQ ID NO: 1495453 - RNA, 19 nt, Artificial Sequence
  Description of Artificial Sequence: Synthetic oligonucleotide
ucucuugaaguagaggauu

SEQ ID NO: 1495454 - RNA, 19 nt, Artificial Sequence
  Description of Artificial Sequence: Synthetic oligonucleotide
cagacauucucugauccug

SEQ ID NO: 1495455 - RNA, 19 nt, Artificial Sequence
  Description of Artificial Sequence: Synthetic oligonucleotide
gauucauagcugguuuuac

SEQ ID NO: 1495456 - RNA, 19 nt, Artificial Sequence
  Description of Artificial Sequence: Synthetic oligonucleotide
aguuguucguugcucucca

SEQ ID NO: 1495457 - RNA, 19 nt, Artificial Sequence
  Description of Artificial Sequence: Synthetic oligonucleotide
guggccauguauucauuug

SEQ ID NO: 1495458 - RNA, 19 nt, Artificial Sequence
  Description of Artificial Sequence: Synthetic oligonucleotide
caagcaauguuuagagaga

SEQ ID NO: 1495459 - RNA, 19 nt, Artificial Sequence
  Description of Artificial Sequence: Synthetic oligonucleotide
guauucucuggguccacug

SEQ ID NO: 1495460 - RNA, 19 nt, Artificial Sequence
  Description of Artificial Sequence: Synthetic oligonucleotide
acagacauucucugauccu

SEQ ID NO: 1495461 - RNA, 19 nt, Artificial Sequence
  Description of Artificial Sequence: Synthetic oligonucleotide
cagaguuuugccagacaug

SEQ ID NO: 1495462 - RNA, 19 nt, Artificial Sequence
  Description of Artificial Sequence: Synthetic oligonucleotide
uccuuucggauguugguua

SEQ ID NO: 1495463 - RNA, 19 nt, Artificial Sequence
  Description of Artificial Sequence: Synthetic oligonucleotide
auguugguuaguuucucuu

SEQ ID NO: 1495464 - RNA, 19 nt, Artificial Sequence
  Description of Artificial Sequence: Synthetic oligonucleotide
gugccauuauuaaacagca

SEQ ID NO: 1495465 - RNA, 19 nt, Artificial Sequence
  Description of Artificial Sequence: Synthetic oligonucleotide
cacagcugaucaaacacga

SEQ ID NO: 1495466 - RNA, 19 nt, Artificial Sequence
  Description of Artificial Sequence: Synthetic oligonucleotide
gcuagaguuggaauuacug

SEQ ID NO: 1495467 - RNA, 19 nt, Artificial Sequence
  Description of Artificial Sequence: Synthetic oligonucleotide
uuguacaaccgcacuguua

SEQ ID NO: 1495468 - RNA, 19 nt, Artificial Sequence
  Description of Artificial Sequence: Synthetic oligonucleotide
agacugucgaagccggcug

SEQ ID NO: 1495469 - RNA, 19 nt, Artificial Sequence
  Description of Artificial Sequence: Synthetic oligonucleotide
uuguuugguuauuccuaug

SEQ ID NO: 1495470 - RNA, 19 nt, Artificial Sequence
  Description of Artificial Sequence: Synthetic oligonucleotide
gaguuggaauuacugcaca

SEQ ID NO: 1495471 - RNA, 19 nt, Artificial Sequence
  Description of Artificial Sequence: Synthetic oligonucleotide
gaguuguucguugcucucc

SEQ ID NO: 1495472 - RNA, 19 nt, Artificial Sequence
  Description of Artificial Sequence: Synthetic oligonucleotide
uguggccauguauucauuu

SEQ ID NO: 1495473 - RNA, 19 nt, Artificial Sequence
  Description of Artificial Sequence: Synthetic oligonucleotide
ugguuauuccuaugauuuc

SEQ ID NO: 1495474 - RNA, 19 nt, Artificial Sequence
  Description of Artificial Sequence: Synthetic oligonucleotide
acauucucugauccugaga

SEQ ID NO: 1495475 - RNA, 19 nt, Artificial Sequence
  Description of Artificial Sequence: Synthetic oligonucleotide
uaagggcuuauauuaucuu

SEQ ID NO: 1495476 - RNA, 19 nt, Artificial Sequence
  Description of Artificial Sequence: Synthetic oligonucleotide
ggaauuccccuuuccaggc

SEQ ID NO: 1495477 - RNA, 19 nt, Artificial Sequence
  Description of Artificial Sequence: Synthetic oligonucleotide
aguugguuguacagggaag

SEQ ID NO: 1495478 - RNA, 19 nt, Artificial Sequence
  Description of Artificial Sequence: Synthetic oligonucleotide
ugauucauagcugguuuua

SEQ ID NO: 1495479 - RNA, 19 nt, Artificial Sequence
  Description of Artificial Sequence: Synthetic oligonucleotide
aaauaucauccgagcuggg

SEQ ID NO: 1495480 - RNA, 19 nt, Artificial Sequence
  Description of Artificial Sequence: Synthetic oligonucleotide
aaacugggugacugccugu

SEQ ID NO: 1495481 - RNA, 19 nt, Artificial Sequence
  Description of Artificial Sequence: Synthetic oligonucleotide
aguagaggauuuugcccca

SEQ ID NO: 1495482 - RNA, 19 nt, Artificial Sequence
  Description of Artificial Sequence: Synthetic oligonucleotide
uuacugcacagagaggcaa

SEQ ID NO: 1495483 - RNA, 19 nt, Artificial Sequence
  Description of Artificial Sequence: Synthetic oligonucleotide
auuaagcaguuuagcauca

SEQ ID NO: 1495484 - RNA, 19 nt, Artificial Sequence
  Description of Artificial Sequence: Synthetic oligonucleotide
agggcuuauauuaucuuaa

SEQ ID NO: 1495485 - RNA, 19 nt, Artificial Sequence
  Description of Artificial Sequence: Synthetic oligonucleotide
uuaucuuaaguugguugua

SEQ ID NO: 1495486 - RNA, 19 nt, Artificial Sequence
  Description of Artificial Sequence: Synthetic oligonucleotide
uccacugcacugcaccuua

SEQ ID NO: 1495487 - RNA, 19 nt, Artificial Sequence
  Description of Artificial Sequence: Synthetic oligonucleotide
uacaacgggcaaucugcca

SEQ ID NO: 1495488 - RNA, 19 nt, Artificial Sequence
  Description of Artificial Sequence: Synthetic oligonucleotide
ugcuuuauccauggcacua

SEQ ID NO: 1495489 - RNA, 19 nt, Artificial Sequence
  Description of Artificial Sequence: Synthetic oligonucleotide
uuuguacaaccgcacuguu

SEQ ID NO: 1495490 - RNA, 19 nt, Artificial Sequence
  Description of Artificial Sequence: Synthetic oligonucleotide
gcaauguuuagagagagua

SEQ ID NO: 1495491 - RNA, 19 nt, Artificial Sequence
  Description of Artificial Sequence: Synthetic oligonucleotide
uuaggugauuuggagggua

SEQ ID NO: 1495492 - RNA, 19 nt, Artificial Sequence
  Description of Artificial Sequence: Synthetic oligonucleotide
uuguccuaucauccuucug

SEQ ID NO: 1495493 - RNA, 19 nt, Artificial Sequence
  Description of Artificial Sequence: Synthetic oligonucleotide
gauccugagagugaagagu

SEQ ID NO: 1495494 - RNA, 19 nt, Artificial Sequence
  Description of Artificial Sequence: Synthetic oligonucleotide
uccuucugauugaaauauc

SEQ ID NO: 1495495 - RNA, 19 nt, Artificial Sequence
  Description of Artificial Sequence: Synthetic oligonucleotide
ugguuguacagggaaguau

SEQ ID NO: 1495496 - RNA, 19 nt, Artificial Sequence
  Description of Artificial Sequence: Synthetic oligonucleotide
cugcaccuuaggaauuccc

SEQ ID NO: 1495497 - RNA, 19 nt, Artificial Sequence
  Description of Artificial Sequence: Synthetic oligonucleotide
gagagugaagaguuuugcu

SEQ ID NO: 1495498 - RNA, 19 nt, Artificial Sequence
  Description of Artificial Sequence: Synthetic oligonucleotide
uuucggauguugguuaguu

SEQ ID NO: 1495499 - RNA, 19 nt, Artificial Sequence
  Description of Artificial Sequence: Synthetic oligonucleotide
caaaguaaucaggugaucu

SEQ ID NO: 1495500 - RNA, 19 nt, Artificial Sequence
  Description of Artificial Sequence: Synthetic oligonucleotide
cugauccugagagugaaga

SEQ ID NO: 1495501 - RNA, 19 nt, Artificial Sequence
  Description of Artificial Sequence: Synthetic oligonucleotide
caucacagcugaucaaaca

SEQ ID NO: 1495502 - RNA, 19 nt, Artificial Sequence
  Description of Artificial Sequence: Synthetic oligonucleotide
uuccaaccaguucuucaaa

SEQ ID NO: 1495503 - RNA, 19 nt, Artificial Sequence
  Description of Artificial Sequence: Synthetic oligonucleotide
uucugauucauagcugguu

SEQ ID NO: 1495504 - RNA, 19 nt, Artificial Sequence
  Description of Artificial Sequence: Synthetic oligonucleotide
cuaucauccuucugauuga

SEQ ID NO: 1495505 - RNA, 19 nt, Artificial Sequence
  Description of Artificial Sequence: Synthetic oligonucleotide
acugggugacugccugugg

SEQ ID NO: 1495506 - RNA, 19 nt, Artificial Sequence
  Description of Artificial Sequence: Synthetic oligonucleotide
uccauggcacuauuugcua

SEQ ID NO: 1495507 - RNA, 19 nt, Artificial Sequence
  Description of Artificial Sequence: Synthetic oligonucleotide
guaauauguccuacgugca

SEQ ID NO: 1495508 - RNA, 19 nt, Artificial Sequence
  Description of Artificial Sequence: Synthetic oligonucleotide
uuugccagacaugguggca

SEQ ID NO: 1495509 - RNA, 19 nt, Artificial Sequence
  Description of Artificial Sequence: Synthetic oligonucleotide
gggcuuauauuaucuuaag

SEQ ID NO: 1495510 - RNA, 19 nt, Artificial Sequence
  Description of Artificial Sequence: Synthetic oligonucleotide
cauccgagcugggaaauac

SEQ ID NO: 1495511 - RNA, 19 nt, Artificial Sequence
  Description of Artificial Sequence: Synthetic oligonucleotide
uacugcacagagaggcaaa

SEQ ID NO: 1495512 - RNA, 19 nt, Artificial Sequence
  Description of Artificial Sequence: Synthetic oligonucleotide
uuauuucauugagaauauc

SEQ ID NO: 1495513 - RNA, 19 nt, Artificial Sequence
  Description of Artificial Sequence: Synthetic oligonucleotide
gcauuaaaucauuaauaaa

SEQ ID NO: 1495514 - RNA, 19 nt, Artificial Sequence
  Description of Artificial Sequence: Synthetic oligonucleotide
ccuucugauugaaauauca

SEQ ID NO: 1495515 - RNA, 19 nt, Artificial Sequence
  Description of Artificial Sequence: Synthetic oligonucleotide
agcaaauguugcauaauuu

SEQ ID NO: 1495516 - RNA, 19 nt, Artificial Sequence
  Description of Artificial Sequence: Synthetic oligonucleotide
ugcucuccagagaguagac

SEQ ID NO: 1495517 - RNA, 19 nt, Artificial Sequence
  Description of Artificial Sequence: Synthetic oligonucleotide
cugccugugguaacacuug

SEQ ID NO: 1495518 - RNA, 19 nt, Artificial Sequence
  Description of Artificial Sequence: Synthetic oligonucleotide
guagacgcagguguggaca

SEQ ID NO: 1495519 - RNA, 19 nt, Artificial Sequence
  Description of Artificial Sequence: Synthetic oligonucleotide
gcucuuauuacaacgggca

SEQ ID NO: 1495520 - RNA, 19 nt, Artificial Sequence
  Description of Artificial Sequence: Synthetic oligonucleotide
uuuaggugauuuggagggu

SEQ ID NO: 1495521 - RNA, 19 nt, Artificial Sequence
  Description of Artificial Sequence: Synthetic oligonucleotide
uuauuacaacgggcaaucu

SEQ ID NO: 1495522 - RNA, 19 nt, Artificial Sequence
  Description of Artificial Sequence: Synthetic oligonucleotide
ggacaguucugcuaaggga

SEQ ID NO: 1495523 - RNA, 19 nt, Artificial Sequence
  Description of Artificial Sequence: Synthetic oligonucleotide
gcuucaacaucacuuuaca

SEQ ID NO: 1495524 - RNA, 19 nt, Artificial Sequence
  Description of Artificial Sequence: Synthetic oligonucleotide
auguccuacgugcacuuua

SEQ ID NO: 1495525 - RNA, 19 nt, Artificial Sequence
  Description of Artificial Sequence: Synthetic oligonucleotide
uggacacggcuccuccacc

SEQ ID NO: 1495526 - RNA, 19 nt, Artificial Sequence
  Description of Artificial Sequence: Synthetic oligonucleotide
cuuggggagcuggagcuag

SEQ ID NO: 1495527 - RNA, 19 nt, Artificial Sequence
  Description of Artificial Sequence: Synthetic oligonucleotide
caaccgcacuguuaccaag

SEQ ID NO: 1495528 - RNA, 19 nt, Artificial Sequence
  Description of Artificial Sequence: Synthetic oligonucleotide
ugccauuauuaaacagcau

SEQ ID NO: 1495529 - RNA, 19 nt, Artificial Sequence
  Description of Artificial Sequence: Synthetic oligonucleotide
cgauguaauauguccuacg

SEQ ID NO: 1495530 - RNA, 19 nt, Artificial Sequence
  Description of Artificial Sequence: Synthetic oligonucleotide
ggugcaguuauucaguuuu

SEQ ID NO: 1495531 - RNA, 19 nt, Artificial Sequence
  Description of Artificial Sequence: Synthetic oligonucleotide
gcaguuuagcaucacagcu

SEQ ID NO: 1495532 - RNA, 19 nt, Artificial Sequence
  Description of Artificial Sequence: Synthetic oligonucleotide
ggguccacugcacugcacc

SEQ ID NO: 1495533 - RNA, 19 nt, Artificial Sequence
  Description of Artificial Sequence: Synthetic oligonucleotide
uuaagcaguuuagcaucac

SEQ ID NO: 1495534 - RNA, 19 nt, Artificial Sequence
  Description of Artificial Sequence: Synthetic oligonucleotide
cuaugauaagggcuuauau

SEQ ID NO: 1495535 - RNA, 19 nt, Artificial Sequence
  Description of Artificial Sequence: Synthetic oligonucleotide
cuuggacaguucugcuaag

SEQ ID NO: 1495536 - RNA, 19 nt, Artificial Sequence
  Description of Artificial Sequence: Synthetic oligonucleotide
uagcugguuuuacaacuuu

SEQ ID NO: 1495537 - RNA, 19 nt, Artificial Sequence
  Description of Artificial Sequence: Synthetic oligonucleotide
acaaccgcacuguuaccaa

SEQ ID NO: 1495538 - RNA, 19 nt, Artificial Sequence
  Description of Artificial Sequence: Synthetic oligonucleotide
auccugagagugaagaguu

SEQ ID NO: 1495539 - RNA, 19 nt, Artificial Sequence
  Description of Artificial Sequence: Synthetic oligonucleotide
uucugaggcuugcucuuau

SEQ ID NO: 1495540 - RNA, 19 nt, Artificial Sequence
  Description of Artificial Sequence: Synthetic oligonucleotide
gagagaguauucucugggu

SEQ ID NO: 1495541 - RNA, 19 nt, Artificial Sequence
  Description of Artificial Sequence: Synthetic oligonucleotide
cugaucaaacacgauguaa

SEQ ID NO: 1495542 - RNA, 19 nt, Artificial Sequence
  Description of Artificial Sequence: Synthetic oligonucleotide
cauccuucugauugaaaua

SEQ ID NO: 1495543 - RNA, 19 nt, Artificial Sequence
  Description of Artificial Sequence: Synthetic oligonucleotide
accgcacuguuaccaagca

SEQ ID NO: 1495544 - RNA, 19 nt, Artificial Sequence
  Description of Artificial Sequence: Synthetic oligonucleotide
auuacugcacagagaggca

SEQ ID NO: 1495545 - RNA, 19 nt, Artificial Sequence
  Description of Artificial Sequence: Synthetic oligonucleotide
gguaacacuuguagcauga

SEQ ID NO: 1495546 - RNA, 19 nt, Artificial Sequence
  Description of Artificial Sequence: Synthetic oligonucleotide
agggaaguauuuggggcug

SEQ ID NO: 1495547 - RNA, 19 nt, Artificial Sequence
  Description of Artificial Sequence: Synthetic oligonucleotide
aguauucucuggguccacu

SEQ ID NO: 1495548 - RNA, 19 nt, Artificial Sequence
  Description of Artificial Sequence: Synthetic oligonucleotide
acugccugugguaacacuu

SEQ ID NO: 1495549 - RNA, 19 nt, Artificial Sequence
  Description of Artificial Sequence: Synthetic oligonucleotide
guccuacgugcacuuuagg

SEQ ID NO: 1495550 - RNA, 19 nt, Artificial Sequence
  Description of Artificial Sequence: Synthetic oligonucleotide
guguggacacggcuccucc

SEQ ID NO: 1495551 - RNA, 19 nt, Artificial Sequence
  Description of Artificial Sequence: Synthetic oligonucleotide
guggacacggcuccuccac

SEQ ID NO: 1495552 - RNA, 19 nt, Artificial Sequence
  Description of Artificial Sequence: Synthetic oligonucleotide
cacgauguaauauguccua

SEQ ID NO: 1495553 - RNA, 19 nt, Artificial Sequence
  Description of Artificial Sequence: Synthetic oligonucleotide
uucggauguugguuaguuu

SEQ ID NO: 1495554 - RNA, 19 nt, Artificial Sequence
  Description of Artificial Sequence: Synthetic oligonucleotide
ugcuuguuugacagacauu

SEQ ID NO: 1495555 - RNA, 19 nt, Artificial Sequence
  Description of Artificial Sequence: Synthetic oligonucleotide
cagagaguagacgcaggug

SEQ ID NO: 1495556 - RNA, 19 nt, Artificial Sequence
  Description of Artificial Sequence: Synthetic oligonucleotide
cuuguuugguuauuccuau

SEQ ID NO: 1495557 - RNA, 19 nt, Artificial Sequence
  Description of Artificial Sequence: Synthetic oligonucleotide
ggcuucaacaucacuuuac

SEQ ID NO: 1495558 - RNA, 19 nt, Artificial Sequence
  Description of Artificial Sequence: Synthetic oligonucleotide
uccugaauaugggucucuc

SEQ ID NO: 1495559 - RNA, 19 nt, Artificial Sequence
  Description of Artificial Sequence: Synthetic oligonucleotide
cugugagaaaugcauauuu

SEQ ID NO: 1495560 - RNA, 19 nt, Artificial Sequence
  Description of Artificial Sequence: Synthetic oligonucleotide
cugccauuccaaccaguuc

SEQ ID NO: 1495561 - RNA, 19 nt, Artificial Sequence
  Description of Artificial Sequence: Synthetic oligonucleotide
gcagaucucagcuucacau

SEQ ID NO: 1495562 - RNA, 19 nt, Artificial Sequence
  Description of Artificial Sequence: Synthetic oligonucleotide
cucuuauuacaacgggcaa

SEQ ID NO: 1495563 - RNA, 19 nt, Artificial Sequence
  Description of Artificial Sequence: Synthetic oligonucleotide
gagcuagaguuggaauuac

SEQ ID NO: 1495564 - RNA, 19 nt, Artificial Sequence
  Description of Artificial Sequence: Synthetic oligonucleotide
cauucaagaagcagaguuu

SEQ ID NO: 1495565 - RNA, 19 nt, Artificial Sequence
  Description of Artificial Sequence: Synthetic oligonucleotide
gggaggaguuguucguugc

SEQ ID NO: 1495566 - RNA, 19 nt, Artificial Sequence
  Description of Artificial Sequence: Synthetic oligonucleotide
guacaaccgcacuguuacc

SEQ ID NO: 1495567 - RNA, 19 nt, Artificial Sequence
  Description of Artificial Sequence: Synthetic oligonucleotide
ggaacuuggggagcuggag

SEQ ID NO: 1495568 - RNA, 19 nt, Artificial Sequence
  Description of Artificial Sequence: Synthetic oligonucleotide
gguuauuccuaugauuucu

SEQ ID NO: 1495569 - RNA, 19 nt, Artificial Sequence
  Description of Artificial Sequence: Synthetic oligonucleotide
uuccugaauaugggucucu

SEQ ID NO: 1495570 - RNA, 19 nt, Artificial Sequence
  Description of Artificial Sequence: Synthetic oligonucleotide
guaacacuuguagcaugac

SEQ ID NO: 1495571 - RNA, 19 nt, Artificial Sequence
  Description of Artificial Sequence: Synthetic oligonucleotide
uccuucuguuacaguggaa

SEQ ID NO: 1495572 - RNA, 19 nt, Artificial Sequence
  Description of Artificial Sequence: Synthetic oligonucleotide
ccuuaagcagggucucugc

SEQ ID NO: 1495573 - RNA, 19 nt, Artificial Sequence
  Description of Artificial Sequence: Synthetic oligonucleotide
ggcuuauauuaucuuaagu

SEQ ID NO: 1495574 - RNA, 19 nt, Artificial Sequence
  Description of Artificial Sequence: Synthetic oligonucleotide
uggugcaguuauucaguuu

SEQ ID NO: 1495575 - RNA, 19 nt, Artificial Sequence
  Description of Artificial Sequence: Synthetic oligonucleotide
ucguugcucuccagagagu

SEQ ID NO: 1495576 - RNA, 19 nt, Artificial Sequence
  Description of Artificial Sequence: Synthetic oligonucleotide
ugcuaugauaagggcuuau

SEQ ID NO: 1495577 - RNA, 19 nt, Artificial Sequence
  Description of Artificial Sequence: Synthetic oligonucleotide
uacgugcacuuuaggugau

SEQ ID NO: 1495578 - RNA, 19 nt, Artificial Sequence
  Description of Artificial Sequence: Synthetic oligonucleotide
cauugagaauaucuguuuu

SEQ ID NO: 1495579 - RNA, 19 nt, Artificial Sequence
  Description of Artificial Sequence: Synthetic oligonucleotide
agcuagaguuggaauuacu

SEQ ID NO: 1495580 - RNA, 19 nt, Artificial Sequence
  Description of Artificial Sequence: Synthetic oligonucleotide
uccuaucauccuucugauu

SEQ ID NO: 1495581 - RNA, 19 nt, Artificial Sequence
  Description of Artificial Sequence: Synthetic oligonucleotide
uugcucacauuuggcuucu

SEQ ID NO: 1495582 - RNA, 19 nt, Artificial Sequence
  Description of Artificial Sequence: Synthetic oligonucleotide
gugacugccugugguaaca

SEQ ID NO: 1495583 - RNA, 19 nt, Artificial Sequence
  Description of Artificial Sequence: Synthetic oligonucleotide
cuguguguggccauguauu

SEQ ID NO: 1495584 - RNA, 19 nt, Artificial Sequence
  Description of Artificial Sequence: Synthetic oligonucleotide
ugacugccugugguaacac

SEQ ID NO: 1495585 - RNA, 19 nt, Artificial Sequence
  Description of Artificial Sequence: Synthetic oligonucleotide
ccuuucggauguugguuag

SEQ ID NO: 1495586 - RNA, 19 nt, Artificial Sequence
  Description of Artificial Sequence: Synthetic oligonucleotide
aggugauuuggaggguaga

SEQ ID NO: 1495587 - RNA, 19 nt, Artificial Sequence
  Description of Artificial Sequence: Synthetic oligonucleotide
aucauccgagcugggaaau

SEQ ID NO: 1495588 - RNA, 19 nt, Artificial Sequence
  Description of Artificial Sequence: Synthetic oligonucleotide
cuguucuccuuucggaugu

SEQ ID NO: 1495589 - RNA, 19 nt, Artificial Sequence
  Description of Artificial Sequence: Synthetic oligonucleotide
ccuuggacaguucugcuaa

SEQ ID NO: 1495590 - RNA, 19 nt, Artificial Sequence
  Description of Artificial Sequence: Synthetic oligonucleotide
ggagcuagaguuggaauua

SEQ ID NO: 1495591 - RNA, 19 nt, Artificial Sequence
  Description of Artificial Sequence: Synthetic oligonucleotide
cagacuguguguggccaug

SEQ ID NO: 1495592 - RNA, 19 nt, Artificial Sequence
  Description of Artificial Sequence: Synthetic oligonucleotide
aucauguugcaugcuuguu

SEQ ID NO: 1495593 - RNA, 19 nt, Artificial Sequence
  Description of Artificial Sequence: Synthetic oligonucleotide
ggaguuguucguugcucuc

SEQ ID NO: 1495594 - RNA, 19 nt, Artificial Sequence
  Description of Artificial Sequence: Synthetic oligonucleotide
aacgggcaaucugccauuu

SEQ ID NO: 1495595 - RNA, 19 nt, Artificial Sequence
  Description of Artificial Sequence: Synthetic oligonucleotide
gggucucugccauuccaac

SEQ ID NO: 1495596 - RNA, 19 nt, Artificial Sequence
  Description of Artificial Sequence: Synthetic oligonucleotide
ccgagcugggaaauacuug

SEQ ID NO: 1495597 - RNA, 19 nt, Artificial Sequence
  Description of Artificial Sequence: Synthetic oligonucleotide
ggcuugcucuuauuacaac

SEQ ID NO: 1495598 - RNA, 19 nt, Artificial Sequence
  Description of Artificial Sequence: Synthetic oligonucleotide
aucugccaucaagugaaaa

SEQ ID NO: 1495599 - RNA, 19 nt, Artificial Sequence
  Description of Artificial Sequence: Synthetic oligonucleotide
ccggcuguucuccuuucgg

SEQ ID NO: 1495600 - RNA, 19 nt, Artificial Sequence
  Description of Artificial Sequence: Synthetic oligonucleotide
ggcugugagaaaugcauau

SEQ ID NO: 1495601 - RNA, 19 nt, Artificial Sequence
  Description of Artificial Sequence: Synthetic oligonucleotide
cagggucucugccauucca

SEQ ID NO: 1495602 - RNA, 19 nt, Artificial Sequence
  Description of Artificial Sequence: Synthetic oligonucleotide
ggugacugccugugguaac

SEQ ID NO: 1495603 - RNA, 19 nt, Artificial Sequence
  Description of Artificial Sequence: Synthetic oligonucleotide
caaaggagucuggggagga

SEQ ID NO: 1495604 - RNA, 19 nt, Artificial Sequence
  Description of Artificial Sequence: Synthetic oligonucleotide
gaauuccccuuuccaggcu

SEQ ID NO: 1495605 - RNA, 19 nt, Artificial Sequence
  Description of Artificial Sequence: Synthetic oligonucleotide
gugaagaguuuugcucaca

SEQ ID NO: 1495606 - RNA, 19 nt, Artificial Sequence
  Description of Artificial Sequence: Synthetic oligonucleotide
gacugucgaagccggcugu

SEQ ID NO: 1495607 - RNA, 19 nt, Artificial Sequence
  Description of Artificial Sequence: Synthetic oligonucleotide
gcagguguggacacggcuc

SEQ ID NO: 1495608 - RNA, 19 nt, Artificial Sequence
  Description of Artificial Sequence: Synthetic oligonucleotide
auccgagcugggaaauacu

SEQ ID NO: 1495609 - RNA, 19 nt, Artificial Sequence
  Description of Artificial Sequence: Synthetic oligonucleotide
uggggaggaguuguucguu

SEQ ID NO: 1495610 - RNA, 19 nt, Artificial Sequence
  Description of Artificial Sequence: Synthetic oligonucleotide
gaguauucucuggguccac

SEQ ID NO: 1495611 - RNA, 19 nt, Artificial Sequence
  Description of Artificial Sequence: Synthetic oligonucleotide
acgcagguguggacacggc

SEQ ID NO: 1495612 - RNA, 19 nt, Artificial Sequence
  Description of Artificial Sequence: Synthetic oligonucleotide
ccuccacccuuaagcaggg

SEQ ID NO: 1495613 - RNA, 19 nt, Artificial Sequence
  Description of Artificial Sequence: Synthetic oligonucleotide
guuauuccuaugauuucuu

SEQ ID NO: 1495614 - RNA, 19 nt, Artificial Sequence
  Description of Artificial Sequence: Synthetic oligonucleotide
uauguccuacgugcacuuu

SEQ ID NO: 1495615 - RNA, 19 nt, Artificial Sequence
  Description of Artificial Sequence: Synthetic oligonucleotide
acagcugaucaaacacgau

SEQ ID NO: 1495616 - RNA, 19 nt, Artificial Sequence
  Description of Artificial Sequence: Synthetic oligonucleotide
gguuguacagggaaguauu

SEQ ID NO: 1495617 - RNA, 19 nt, Artificial Sequence
  Description of Artificial Sequence: Synthetic oligonucleotide
guagcaaauguugcauaau

SEQ ID NO: 1495618 - RNA, 19 nt, Artificial Sequence
  Description of Artificial Sequence: Synthetic oligonucleotide
gacugccugugguaacacu

SEQ ID NO: 1495619 - RNA, 19 nt, Artificial Sequence
  Description of Artificial Sequence: Synthetic oligonucleotide
cacuuguagcaugaccaaa

SEQ ID NO: 1495620 - RNA, 19 nt, Artificial Sequence
  Description of Artificial Sequence: Synthetic oligonucleotide
gugcuuuauccauggcacu

SEQ ID NO: 1495621 - RNA, 19 nt, Artificial Sequence
  Description of Artificial Sequence: Synthetic oligonucleotide
gugguaacacuuguagcau

SEQ ID NO: 1495622 - RNA, 19 nt, Artificial Sequence
  Description of Artificial Sequence: Synthetic oligonucleotide
cuggagcuagaguuggaau

SEQ ID NO: 1495623 - RNA, 19 nt, Artificial Sequence
  Description of Artificial Sequence: Synthetic oligonucleotide
gucucuugaaguagaggau

SEQ ID NO: 1495624 - RNA, 19 nt, Artificial Sequence
  Description of Artificial Sequence: Synthetic oligonucleotide
cugucgaagccggcuguuc

SEQ ID NO: 1495625 - RNA, 19 nt, Artificial Sequence
  Description of Artificial Sequence: Synthetic oligonucleotide
gcuaugauaagggcuuaua

SEQ ID NO: 1495626 - RNA, 19 nt, Artificial Sequence
  Description of Artificial Sequence: Synthetic oligonucleotide
ccuuaggaauuccccuuuc

SEQ ID NO: 1495627 - RNA, 19 nt, Artificial Sequence
  Description of Artificial Sequence: Synthetic oligonucleotide
acccuuaagcagggucucu

SEQ ID NO: 1495628 - RNA, 19 nt, Artificial Sequence
  Description of Artificial Sequence: Synthetic oligonucleotide
gcugaucaaacacgaugua

SEQ ID NO: 1495629 - RNA, 19 nt, Artificial Sequence
  Description of Artificial Sequence: Synthetic oligonucleotide
ggugauuuggaggguagau

SEQ ID NO: 1495630 - RNA, 19 nt, Artificial Sequence
  Description of Artificial Sequence: Synthetic oligonucleotide
cccuuaagcagggucucug

SEQ ID NO: 1495631 - RNA, 19 nt, Artificial Sequence
  Description of Artificial Sequence: Synthetic oligonucleotide
cuggggaggaguuguucgu

SEQ ID NO: 1495632 - RNA, 19 nt, Artificial Sequence
  Description of Artificial Sequence: Synthetic oligonucleotide
acugucgaagccggcuguu

SEQ ID NO: 1495633 - RNA, 19 nt, Artificial Sequence
  Description of Artificial Sequence: Synthetic oligonucleotide
uggcuucuuggugcaguua

SEQ ID NO: 1495634 - RNA, 19 nt, Artificial Sequence
  Description of Artificial Sequence: Synthetic oligonucleotide
gacacggcuccuccacccu

SEQ ID NO: 1495635 - RNA, 19 nt, Artificial Sequence
  Description of Artificial Sequence: Synthetic oligonucleotide
acgggcaaucugccauuuu

SEQ ID NO: 1495636 - RNA, 19 nt, Artificial Sequence
  Description of Artificial Sequence: Synthetic oligonucleotide
cuuuauccauggcacuauu

SEQ ID NO: 1495637 - RNA, 19 nt, Artificial Sequence
  Description of Artificial Sequence: Synthetic oligonucleotide
gaucugccaucaagugaaa

SEQ ID NO: 1495638 - RNA, 19 nt, Artificial Sequence
  Description of Artificial Sequence: Synthetic oligonucleotide
gcuaagggaguuucaucau

SEQ ID NO: 1495639 - RNA, 19 nt, Artificial Sequence
  Description of Artificial Sequence: Synthetic oligonucleotide
gguguggacacggcuccuc

SEQ ID NO: 1495640 - RNA, 19 nt, Artificial Sequence
  Description of Artificial Sequence: Synthetic oligonucleotide
cagcuucacauugcaaagu

SEQ ID NO: 1495641 - RNA, 19 nt, Artificial Sequence
  Description of Artificial Sequence: Synthetic oligonucleotide
cuccuuucggauguugguu

SEQ ID NO: 1495642 - RNA, 19 nt, Artificial Sequence
  Description of Artificial Sequence: Synthetic oligonucleotide
ccagagaguagacgcaggu

SEQ ID NO: 1495643 - RNA, 19 nt, Artificial Sequence
  Description of Artificial Sequence: Synthetic oligonucleotide
acgugcacuuuaggugauu

SEQ ID NO: 1495644 - RNA, 19 nt, Artificial Sequence
  Description of Artificial Sequence: Synthetic oligonucleotide
gcuuuauccauggcacuau

SEQ ID NO: 1495645 - RNA, 19 nt, Artificial Sequence
  Description of Artificial Sequence: Synthetic oligonucleotide
gggcugugagaaaugcaua

SEQ ID NO: 1495646 - RNA, 19 nt, Artificial Sequence
  Description of Artificial Sequence: Synthetic oligonucleotide
caacgggcaaucugccauu

SEQ ID NO: 1495647 - RNA, 19 nt, Artificial Sequence
  Description of Artificial Sequence: Synthetic oligonucleotide
gcacuugcauuaaaucauu

SEQ ID NO: 1495648 - RNA, 19 nt, Artificial Sequence
  Description of Artificial Sequence: Synthetic oligonucleotide
ccauggcacuauuugcuau

SEQ ID NO: 1495649 - RNA, 19 nt, Artificial Sequence
  Description of Artificial Sequence: Synthetic oligonucleotide
caguucugcuaagggaguu

SEQ ID NO: 1495650 - RNA, 19 nt, Artificial Sequence
  Description of Artificial Sequence: Synthetic oligonucleotide
guuuagcaucacagcugau

SEQ ID NO: 1495651 - RNA, 19 nt, Artificial Sequence
  Description of Artificial Sequence: Synthetic oligonucleotide
ccgcacuguuaccaagcaa

SEQ ID NO: 1495652 - RNA, 19 nt, Artificial Sequence
  Description of Artificial Sequence: Synthetic oligonucleotide
guguggccauguauucauu

SEQ ID NO: 1495653 - RNA, 19 nt, Artificial Sequence
  Description of Artificial Sequence: Synthetic oligonucleotide
cgcagguguggacacggcu

SEQ ID NO: 1495654 - RNA, 19 nt, Artificial Sequence
  Description of Artificial Sequence: Synthetic oligonucleotide
cgugcacuuuaggugauuu

SEQ ID NO: 1495655 - RNA, 19 nt, Artificial Sequence
  Description of Artificial Sequence: Synthetic oligonucleotide
aauucuuuagcccaaacgc

SEQ ID NO: 1495656 - RNA, 19 nt, Artificial Sequence
  Description of Artificial Sequence: Synthetic oligonucleotide
uuuaauaucagcaggaagu

SEQ ID NO: 1495657 - RNA, 19 nt, Artificial Sequence
  Description of Artificial Sequence: Synthetic oligonucleotide
uuaauaauaucuguuaucg

SEQ ID NO: 1495658 - RNA, 19 nt, Artificial Sequence
  Description of Artificial Sequence: Synthetic oligonucleotide
aaagcuuaaacccacucuc

SEQ ID NO: 1495659 - RNA, 19 nt, Artificial Sequence
  Description of Artificial Sequence: Synthetic oligonucleotide
gauuugaugacguuagugg

SEQ ID NO: 1495660 - RNA, 19 nt, Artificial Sequence
  Description of Artificial Sequence: Synthetic oligonucleotide
uuacagaaagcuuaaaccc

SEQ ID NO: 1495661 - RNA, 19 nt, Artificial Sequence
  Description of Artificial Sequence: Synthetic oligonucleotide
ugaaagucaacacaguucu

SEQ ID NO: 1495662 - RNA, 19 nt, Artificial Sequence
  Description of Artificial Sequence: Synthetic oligonucleotide
ucuaauuaucuaaugacac

SEQ ID NO: 1495663 - RNA, 19 nt, Artificial Sequence
  Description of Artificial Sequence: Synthetic oligonucleotide
ucuauaaauaccacaugag

SEQ ID NO: 1495664 - RNA, 19 nt, Artificial Sequence
  Description of Artificial Sequence: Synthetic oligonucleotide
aauccguuucuccaaauag

SEQ ID NO: 1495665 - RNA, 19 nt, Artificial Sequence
  Description of Artificial Sequence: Synthetic oligonucleotide
auggauuccaaccauagug

SEQ ID NO: 1495666 - RNA, 19 nt, Artificial Sequence
  Description of Artificial Sequence: Synthetic oligonucleotide
aauugcauccaauggaacu

SEQ ID NO: 1495667 - RNA, 19 nt, Artificial Sequence
  Description of Artificial Sequence: Synthetic oligonucleotide
uucuauugcaugauggcag

SEQ ID NO: 1495668 - RNA, 19 nt, Artificial Sequence
  Description of Artificial Sequence: Synthetic oligonucleotide
aacacauucuauugcauga

SEQ ID NO: 1495669 - RNA, 19 nt, Artificial Sequence
  Description of Artificial Sequence: Synthetic oligonucleotide
aauccaauaccauaugaaa

SEQ ID NO: 1495670 - RNA, 19 nt, Artificial Sequence
  Description of Artificial Sequence: Synthetic oligonucleotide
aaggccagaaauccgaaug

SEQ ID NO: 1495671 - RNA, 19 nt, Artificial Sequence
  Description of Artificial Sequence: Synthetic oligonucleotide
aaaggaacauucaaugguc

SEQ ID NO: 1495672 - RNA, 19 nt, Artificial Sequence
  Description of Artificial Sequence: Synthetic oligonucleotide
gaaaggucaguucaaauuc

SEQ ID NO: 1495673 - RNA, 19 nt, Artificial Sequence
  Description of Artificial Sequence: Synthetic oligonucleotide
uaaacguuggaaagcauca

SEQ ID NO: 1495674 - RNA, 19 nt, Artificial Sequence
  Description of Artificial Sequence: Synthetic oligonucleotide
ugaacuuaauaauaucugu

SEQ ID NO: 1495675 - RNA, 19 nt, Artificial Sequence
  Description of Artificial Sequence: Synthetic oligonucleotide
uaauuaucuaaugacacac

SEQ ID NO: 1495676 - RNA, 19 nt, Artificial Sequence
  Description of Artificial Sequence: Synthetic oligonucleotide
uccaauaccauaugaaagu

SEQ ID NO: 1495677 - RNA, 19 nt, Artificial Sequence
  Description of Artificial Sequence: Synthetic oligonucleotide
ucuucgugaacuuucaagu

SEQ ID NO: 1495678 - RNA, 19 nt, Artificial Sequence
  Description of Artificial Sequence: Synthetic oligonucleotide
aauggaacucuauuguaga

SEQ ID NO: 1495679 - RNA, 19 nt, Artificial Sequence
  Description of Artificial Sequence: Synthetic oligonucleotide
uucagaucauuccuuaagc

SEQ ID NO: 1495680 - RNA, 19 nt, Artificial Sequence
  Description of Artificial Sequence: Synthetic oligonucleotide
ugaccucuugccuagaaag

SEQ ID NO: 1495681 - RNA, 19 nt, Artificial Sequence
  Description of Artificial Sequence: Synthetic oligonucleotide
aguucuuaagaccaacaag

SEQ ID NO: 1495682 - RNA, 19 nt, Artificial Sequence
  Description of Artificial Sequence: Synthetic oligonucleotide
uuaagaccaacaagaauug

SEQ ID NO: 1495683 - RNA, 19 nt, Artificial Sequence
  Description of Artificial Sequence: Synthetic oligonucleotide
ucaaauguuucuaauuauc

SEQ ID NO: 1495684 - RNA, 19 nt, Artificial Sequence
  Description of Artificial Sequence: Synthetic oligonucleotide
ugguccaacacuuuuguug

SEQ ID NO: 1495685 - RNA, 19 nt, Artificial Sequence
  Description of Artificial Sequence: Synthetic oligonucleotide
uuuguugugugguaaggcc

SEQ ID NO: 1495686 - RNA, 19 nt, Artificial Sequence
  Description of Artificial Sequence: Synthetic oligonucleotide
uaccauaugaaagucaaca

SEQ ID NO: 1495687 - RNA, 19 nt, Artificial Sequence
  Description of Artificial Sequence: Synthetic oligonucleotide
accauaugaaagucaacac

SEQ ID NO: 1495688 - RNA, 19 nt, Artificial Sequence
  Description of Artificial Sequence: Synthetic oligonucleotide
uaucgacucuuuaauauca

SEQ ID NO: 1495689 - RNA, 19 nt, Artificial Sequence
  Description of Artificial Sequence: Synthetic oligonucleotide
caauucuuuagcccaaacg

SEQ ID NO: 1495690 - RNA, 19 nt, Artificial Sequence
  Description of Artificial Sequence: Synthetic oligonucleotide
aaugguccaacacuuuugu

SEQ ID NO: 1495691 - RNA, 19 nt, Artificial Sequence
  Description of Artificial Sequence: Synthetic oligonucleotide
aacuucugguguaagaauc

SEQ ID NO: 1495692 - RNA, 19 nt, Artificial Sequence
  Description of Artificial Sequence: Synthetic oligonucleotide
uuuacacuauggacaauag

SEQ ID NO: 1495693 - RNA, 19 nt, Artificial Sequence
  Description of Artificial Sequence: Synthetic oligonucleotide
uucgugaacuuucaaguca

SEQ ID NO: 1495694 - RNA, 19 nt, Artificial Sequence
  Description of Artificial Sequence: Synthetic oligonucleotide
aauaccauaugaaagucaa

SEQ ID NO: 1495695 - RNA, 19 nt, Artificial Sequence
  Description of Artificial Sequence: Synthetic oligonucleotide
acauucaaugguccaacac

SEQ ID NO: 1495696 - RNA, 19 nt, Artificial Sequence
  Description of Artificial Sequence: Synthetic oligonucleotide
uucuuuagcccaaacgcca

SEQ ID NO: 1495697 - RNA, 19 nt, Artificial Sequence
  Description of Artificial Sequence: Synthetic oligonucleotide
ucuguuaucgacucuuuaa

SEQ ID NO: 1495698 - RNA, 19 nt, Artificial Sequence
  Description of Artificial Sequence: Synthetic oligonucleotide
aauugguucuccucuuucu

SEQ ID NO: 1495699 - RNA, 19 nt, Artificial Sequence
  Description of Artificial Sequence: Synthetic oligonucleotide
agcgcauuauacuccacac

SEQ ID NO: 1495700 - RNA, 19 nt, Artificial Sequence
  Description of Artificial Sequence: Synthetic oligonucleotide
gucauuaaccucuucaguc

SEQ ID NO: 1495701 - RNA, 19 nt, Artificial Sequence
  Description of Artificial Sequence: Synthetic oligonucleotide
ucuuaaacguuggaaagca

SEQ ID NO: 1495702 - RNA, 19 nt, Artificial Sequence
  Description of Artificial Sequence: Synthetic oligonucleotide
ucucgcauggauuccaacc

SEQ ID NO: 1495703 - RNA, 19 nt, Artificial Sequence
  Description of Artificial Sequence: Synthetic oligonucleotide
uggauuccaaccauaguga

SEQ ID NO: 1495704 - RNA, 19 nt, Artificial Sequence
  Description of Artificial Sequence: Synthetic oligonucleotide
ggaaguauuccuuuuccgg

SEQ ID NO: 1495705 - RNA, 19 nt, Artificial Sequence
  Description of Artificial Sequence: Synthetic oligonucleotide
cuuaagaccaacaagaauu

SEQ ID NO: 1495706 - RNA, 19 nt, Artificial Sequence
  Description of Artificial Sequence: Synthetic oligonucleotide
acaugugcaacaugcuugg

SEQ ID NO: 1495707 - RNA, 19 nt, Artificial Sequence
  Description of Artificial Sequence: Synthetic oligonucleotide
uguuugcaauccaauacca

SEQ ID NO: 1495708 - RNA, 19 nt, Artificial Sequence
  Description of Artificial Sequence: Synthetic oligonucleotide
uagaaagagucauggguag

SEQ ID NO: 1495709 - RNA, 19 nt, Artificial Sequence
  Description of Artificial Sequence: Synthetic oligonucleotide
ucucauagcgcauuauacu

SEQ ID NO: 1495710 - RNA, 19 nt, Artificial Sequence
  Description of Artificial Sequence: Synthetic oligonucleotide
aacaugaacuuaauaauau

SEQ ID NO: 1495711 - RNA, 19 nt, Artificial Sequence
  Description of Artificial Sequence: Synthetic oligonucleotide
ugugguaaggccagaaauc

SEQ ID NO: 1495712 - RNA, 19 nt, Artificial Sequence
  Description of Artificial Sequence: Synthetic oligonucleotide
ucauagcgcauuauacucc

SEQ ID NO: 1495713 - RNA, 19 nt, Artificial Sequence
  Description of Artificial Sequence: Synthetic oligonucleotide
aauguauuuccgcuggguu

SEQ ID NO: 1495714 - RNA, 19 nt, Artificial Sequence
  Description of Artificial Sequence: Synthetic oligonucleotide
ugcuaguucaaguuccagc

SEQ ID NO: 1495715 - RNA, 19 nt, Artificial Sequence
  Description of Artificial Sequence: Synthetic oligonucleotide
augaucgucaccuuucccu

SEQ ID NO: 1495716 - RNA, 19 nt, Artificial Sequence
  Description of Artificial Sequence: Synthetic oligonucleotide
aaguaacuuuaacucagga

SEQ ID NO: 1495717 - RNA, 19 nt, Artificial Sequence
  Description of Artificial Sequence: Synthetic oligonucleotide
auuaucuaaugacacacuu

SEQ ID NO: 1495718 - RNA, 19 nt, Artificial Sequence
  Description of Artificial Sequence: Synthetic oligonucleotide
aggaaguauuccuuuuccg

SEQ ID NO: 1495719 - RNA, 19 nt, Artificial Sequence
  Description of Artificial Sequence: Synthetic oligonucleotide
aaaguaacuuuaacucagg

SEQ ID NO: 1495720 - RNA, 19 nt, Artificial Sequence
  Description of Artificial Sequence: Synthetic oligonucleotide
ugucuacacauuuacacua

SEQ ID NO: 1495721 - RNA, 19 nt, Artificial Sequence
  Description of Artificial Sequence: Synthetic oligonucleotide
uaacaguaaacacauucua

SEQ ID NO: 1495722 - RNA, 19 nt, Artificial Sequence
  Description of Artificial Sequence: Synthetic oligonucleotide
cucauagcgcauuauacuc

SEQ ID NO: 1495723 - RNA, 19 nt, Artificial Sequence
  Description of Artificial Sequence: Synthetic oligonucleotide
aaacaugugcaacaugcuu

SEQ ID NO: 1495724 - RNA, 19 nt, Artificial Sequence
  Description of Artificial Sequence: Synthetic oligonucleotide
acuuucaagucauucugug

SEQ ID NO: 1495725 - RNA, 19 nt, Artificial Sequence
  Description of Artificial Sequence: Synthetic oligonucleotide
aucucauagcgcauuauac

SEQ ID NO: 1495726 - RNA, 19 nt, Artificial Sequence
  Description of Artificial Sequence: Synthetic oligonucleotide
ucugguguaagaaucucua

SEQ ID NO: 1495727 - RNA, 19 nt, Artificial Sequence
  Description of Artificial Sequence: Synthetic oligonucleotide
uuaugaucgucaccuuucc

SEQ ID NO: 1495728 - RNA, 19 nt, Artificial Sequence
  Description of Artificial Sequence: Synthetic oligonucleotide
ucuuaagaccaacaagaau

SEQ ID NO: 1495729 - RNA, 19 nt, Artificial Sequence
  Description of Artificial Sequence: Synthetic oligonucleotide
uuccuuaagcccuuguuaa

SEQ ID NO: 1495730 - RNA, 19 nt, Artificial Sequence
  Description of Artificial Sequence: Synthetic oligonucleotide
agcaucauaauccguuucu

SEQ ID NO: 1495731 - RNA, 19 nt, Artificial Sequence
  Description of Artificial Sequence: Synthetic oligonucleotide
uuaucgacucuuuaauauc

SEQ ID NO: 1495732 - RNA, 19 nt, Artificial Sequence
  Description of Artificial Sequence: Synthetic oligonucleotide
augaacuuaauaauaucug

SEQ ID NO: 1495733 - RNA, 19 nt, Artificial Sequence
  Description of Artificial Sequence: Synthetic oligonucleotide
ugacguuagugguuucugg

SEQ ID NO: 1495734 - RNA, 19 nt, Artificial Sequence
  Description of Artificial Sequence: Synthetic oligonucleotide
acagaaagcuuaaacccac

SEQ ID NO: 1495735 - RNA, 19 nt, Artificial Sequence
  Description of Artificial Sequence: Synthetic oligonucleotide
aauaucuguuaucgacucu

SEQ ID NO: 1495736 - RNA, 19 nt, Artificial Sequence
  Description of Artificial Sequence: Synthetic oligonucleotide
ugaauguauuuccgcuggg

SEQ ID NO: 1495737 - RNA, 19 nt, Artificial Sequence
  Description of Artificial Sequence: Synthetic oligonucleotide
uuucccuaaggacucuccc

SEQ ID NO: 1495738 - RNA, 19 nt, Artificial Sequence
  Description of Artificial Sequence: Synthetic oligonucleotide
uuaucuaaugacacacuuu

SEQ ID NO: 1495739 - RNA, 19 nt, Artificial Sequence
  Description of Artificial Sequence: Synthetic oligonucleotide
uucuuaagaccaacaagaa

SEQ ID NO: 1495740 - RNA, 19 nt, Artificial Sequence
  Description of Artificial Sequence: Synthetic oligonucleotide
cauuuugauggauccguag

SEQ ID NO: 1495741 - RNA, 19 nt, Artificial Sequence
  Description of Artificial Sequence: Synthetic oligonucleotide
ugcaaaucaugauaauuua

SEQ ID NO: 1495742 - RNA, 19 nt, Artificial Sequence
  Description of Artificial Sequence: Synthetic oligonucleotide
aguauuccuuuuccgguag

SEQ ID NO: 1495743 - RNA, 19 nt, Artificial Sequence
  Description of Artificial Sequence: Synthetic oligonucleotide
ugguguaagaaucucuauu

SEQ ID NO: 1495744 - RNA, 19 nt, Artificial Sequence
  Description of Artificial Sequence: Synthetic oligonucleotide
ccaaacgccaagaagaaac

SEQ ID NO: 1495745 - RNA, 19 nt, Artificial Sequence
  Description of Artificial Sequence: Synthetic oligonucleotide
cuaauuaucuaaugacaca

SEQ ID NO: 1495746 - RNA, 19 nt, Artificial Sequence
  Description of Artificial Sequence: Synthetic oligonucleotide
aggaacuucgugaugaugu

SEQ ID NO: 1495747 - RNA, 19 nt, Artificial Sequence
  Description of Artificial Sequence: Synthetic oligonucleotide
ucuauugcaugauggcaga

SEQ ID NO: 1495748 - RNA, 19 nt, Artificial Sequence
  Description of Artificial Sequence: Synthetic oligonucleotide
gaaaagcggucugagguag

SEQ ID NO: 1495749 - RNA, 19 nt, Artificial Sequence
  Description of Artificial Sequence: Synthetic oligonucleotide
acauaauccucccuggcau

SEQ ID NO: 1495750 - RNA, 19 nt, Artificial Sequence
  Description of Artificial Sequence: Synthetic oligonucleotide
agaucauuccuuaagcccu

SEQ ID NO: 1495751 - RNA, 19 nt, Artificial Sequence
  Description of Artificial Sequence: Synthetic oligonucleotide
accaauaggccagggagcg

SEQ ID NO: 1495752 - RNA, 19 nt, Artificial Sequence
  Description of Artificial Sequence: Synthetic oligonucleotide
caggaaguauuccuuuucc

SEQ ID NO: 1495753 - RNA, 19 nt, Artificial Sequence
  Description of Artificial Sequence: Synthetic oligonucleotide
aacguuggaaagcaucaua

SEQ ID NO: 1495754 - RNA, 19 nt, Artificial Sequence
  Description of Artificial Sequence: Synthetic oligonucleotide
aauuuguuugcaauccaau

SEQ ID NO: 1495755 - RNA, 19 nt, Artificial Sequence
  Description of Artificial Sequence: Synthetic oligonucleotide
aauuaucuaaugacacacu

SEQ ID NO: 1495756 - RNA, 19 nt, Artificial Sequence
  Description of Artificial Sequence: Synthetic oligonucleotide
ucaaugguccaacacuuuu

SEQ ID NO: 1495757 - RNA, 19 nt, Artificial Sequence
  Description of Artificial Sequence: Synthetic oligonucleotide
auuccuuaagcccuuguua

SEQ ID NO: 1495758 - RNA, 19 nt, Artificial Sequence
  Description of Artificial Sequence: Synthetic oligonucleotide
aaauuuguuugcaauccaa

SEQ ID NO: 1495759 - RNA, 19 nt, Artificial Sequence
  Description of Artificial Sequence: Synthetic oligonucleotide
aaauccgaaugcugcagau

SEQ ID NO: 1495760 - RNA, 19 nt, Artificial Sequence
  Description of Artificial Sequence: Synthetic oligonucleotide
ucgacucuuuaauaucagc

SEQ ID NO: 1495761 - RNA, 19 nt, Artificial Sequence
  Description of Artificial Sequence: Synthetic oligonucleotide
auaucagcaggaaguauuc

SEQ ID NO: 1495762 - RNA, 19 nt, Artificial Sequence
  Description of Artificial Sequence: Synthetic oligonucleotide
uuugaugacguuagugguu

SEQ ID NO: 1495763 - RNA, 19 nt, Artificial Sequence
  Description of Artificial Sequence: Synthetic oligonucleotide
cauuaaccucuucaguccc

SEQ ID NO: 1495764 - RNA, 19 nt, Artificial Sequence
  Description of Artificial Sequence: Synthetic oligonucleotide
agcccaaacgccaagaaga

SEQ ID NO: 1495765 - RNA, 19 nt, Artificial Sequence
  Description of Artificial Sequence: Synthetic oligonucleotide
ugcaauccaauaccauaug

SEQ ID NO: 1495766 - RNA, 19 nt, Artificial Sequence
  Description of Artificial Sequence: Synthetic oligonucleotide
ugcguuucacauaauccuc

SEQ ID NO: 1495767 - RNA, 19 nt, Artificial Sequence
  Description of Artificial Sequence: Synthetic oligonucleotide
agcacuggauuugaugacg

SEQ ID NO: 1495768 - RNA, 19 nt, Artificial Sequence
  Description of Artificial Sequence: Synthetic oligonucleotide
uuaauaucagcaggaagua

SEQ ID NO: 1495769 - RNA, 19 nt, Artificial Sequence
  Description of Artificial Sequence: Synthetic oligonucleotide
uaaacacauucuauugcau

SEQ ID NO: 1495770 - RNA, 19 nt, Artificial Sequence
  Description of Artificial Sequence: Synthetic oligonucleotide
aaguauuccuuuuccggua

SEQ ID NO: 1495771 - RNA, 19 nt, Artificial Sequence
  Description of Artificial Sequence: Synthetic oligonucleotide
uaauugguucuccucuuuc

SEQ ID NO: 1495772 - RNA, 19 nt, Artificial Sequence
  Description of Artificial Sequence: Synthetic oligonucleotide
uguuaucgacucuuuaaua

SEQ ID NO: 1495773 - RNA, 19 nt, Artificial Sequence
  Description of Artificial Sequence: Synthetic oligonucleotide
agucaacacaguucuuaag

SEQ ID NO: 1495774 - RNA, 19 nt, Artificial Sequence
  Description of Artificial Sequence: Synthetic oligonucleotide
caaugguccaacacuuuug

SEQ ID NO: 1495775 - RNA, 19 nt, Artificial Sequence
  Description of Artificial Sequence: Synthetic oligonucleotide
uaugaucgucaccuuuccc

SEQ ID NO: 1495776 - RNA, 19 nt, Artificial Sequence
  Description of Artificial Sequence: Synthetic oligonucleotide
ucgugaacuuucaagucau

SEQ ID NO: 1495777 - RNA, 19 nt, Artificial Sequence
  Description of Artificial Sequence: Synthetic oligonucleotide
ccacaugagagaaaugugc

SEQ ID NO: 1495778 - RNA, 19 nt, Artificial Sequence
  Description of Artificial Sequence: Synthetic oligonucleotide
uggaacucuauuguagaac

SEQ ID NO: 1495779 - RNA, 19 nt, Artificial Sequence
  Description of Artificial Sequence: Synthetic oligonucleotide
gcuaguucaaguuccagca

SEQ ID NO: 1495780 - RNA, 19 nt, Artificial Sequence
  Description of Artificial Sequence: Synthetic oligonucleotide
gaaguauuccuuuuccggu

SEQ ID NO: 1495781 - RNA, 19 nt, Artificial Sequence
  Description of Artificial Sequence: Synthetic oligonucleotide
aagagucauggguaguuuu

SEQ ID NO: 1495782 - RNA, 19 nt, Artificial Sequence
  Description of Artificial Sequence: Synthetic oligonucleotide
guuaucgacucuuuaauau

SEQ ID NO: 1495783 - RNA, 19 nt, Artificial Sequence
  Description of Artificial Sequence: Synthetic oligonucleotide
ggcauucaauucuuuagcc

SEQ ID NO: 1495784 - RNA, 19 nt, Artificial Sequence
  Description of Artificial Sequence: Synthetic oligonucleotide
caauccaauaccauaugaa

SEQ ID NO: 1495785 - RNA, 19 nt, Artificial Sequence
  Description of Artificial Sequence: Synthetic oligonucleotide
uguccauguccuuaugauc

SEQ ID NO: 1495786 - RNA, 19 nt, Artificial Sequence
  Description of Artificial Sequence: Synthetic oligonucleotide
augagagaaaugugcaaau

SEQ ID NO: 1495787 - RNA, 19 nt, Artificial Sequence
  Description of Artificial Sequence: Synthetic oligonucleotide
uggauccguaggaaagugc

SEQ ID NO: 1495788 - RNA, 19 nt, Artificial Sequence
  Description of Artificial Sequence: Synthetic oligonucleotide
uucccuaaggacucuccca

SEQ ID NO: 1495789 - RNA, 19 nt, Artificial Sequence
  Description of Artificial Sequence: Synthetic oligonucleotide
ucccugaauguauuuccgc

SEQ ID NO: 1495790 - RNA, 19 nt, Artificial Sequence
  Description of Artificial Sequence: Synthetic oligonucleotide
agaauugcauccaauggaa

SEQ ID NO: 1495791 - RNA, 19 nt, Artificial Sequence
  Description of Artificial Sequence: Synthetic oligonucleotide
uucaauggugguguuuucu

SEQ ID NO: 1495792 - RNA, 19 nt, Artificial Sequence
  Description of Artificial Sequence: Synthetic oligonucleotide
ugaaaagcggucugaggua

SEQ ID NO: 1495793 - RNA, 19 nt, Artificial Sequence
  Description of Artificial Sequence: Synthetic oligonucleotide
aggaacauucaauggucca

SEQ ID NO: 1495794 - RNA, 19 nt, Artificial Sequence
  Description of Artificial Sequence: Synthetic oligonucleotide
agaacuguaaaggaacauu

SEQ ID NO: 1495795 - RNA, 19 nt, Artificial Sequence
  Description of Artificial Sequence: Synthetic oligonucleotide
cuucgugaacuuucaaguc

SEQ ID NO: 1495796 - RNA, 19 nt, Artificial Sequence
  Description of Artificial Sequence: Synthetic oligonucleotide
cugaaaagcggucugaggu

SEQ ID NO: 1495797 - RNA, 19 nt, Artificial Sequence
  Description of Artificial Sequence: Synthetic oligonucleotide
ugugugguaaggccagaaa

SEQ ID NO: 1495798 - RNA, 19 nt, Artificial Sequence
  Description of Artificial Sequence: Synthetic oligonucleotide
uuagcccaaacgccaagaa

SEQ ID NO: 1495799 - RNA, 19 nt, Artificial Sequence
  Description of Artificial Sequence: Synthetic oligonucleotide
auaauccucccuggcauuc

SEQ ID NO: 1495800 - RNA, 19 nt, Artificial Sequence
  Description of Artificial Sequence: Synthetic oligonucleotide
agucuuucugaaaagcggu

SEQ ID NO: 1495801 - RNA, 19 nt, Artificial Sequence
  Description of Artificial Sequence: Synthetic oligonucleotide
gaucucauagcgcauuaua

SEQ ID NO: 1495802 - RNA, 19 nt, Artificial Sequence
  Description of Artificial Sequence: Synthetic oligonucleotide
ucaauggugguguuuucuu

SEQ ID NO: 1495803 - RNA, 19 nt, Artificial Sequence
  Description of Artificial Sequence: Synthetic oligonucleotide
ucuuuagcccaaacgccaa

SEQ ID NO: 1495804 - RNA, 19 nt, Artificial Sequence
  Description of Artificial Sequence: Synthetic oligonucleotide
ugagagaaaugugcaaauc

SEQ ID NO: 1495805 - RNA, 19 nt, Artificial Sequence
  Description of Artificial Sequence: Synthetic oligonucleotide
uuucucgcagucuucugau

SEQ ID NO: 1495806 - RNA, 19 nt, Artificial Sequence
  Description of Artificial Sequence: Synthetic oligonucleotide
uaagaccaacaagaauugc

SEQ ID NO: 1495807 - RNA, 19 nt, Artificial Sequence
  Description of Artificial Sequence: Synthetic oligonucleotide
uucccugccaguucucgca

SEQ ID NO: 1495808 - RNA, 19 nt, Artificial Sequence
  Description of Artificial Sequence: Synthetic oligonucleotide
caaaagcaagucugaauca

SEQ ID NO: 1495809 - RNA, 19 nt, Artificial Sequence
  Description of Artificial Sequence: Synthetic oligonucleotide
caauaccauaugaaaguca

SEQ ID NO: 1495810 - RNA, 19 nt, Artificial Sequence
  Description of Artificial Sequence: Synthetic oligonucleotide
uauggacaauagcuuuaga

SEQ ID NO: 1495811 - RNA, 19 nt, Artificial Sequence
  Description of Artificial Sequence: Synthetic oligonucleotide
aucgucaccuuucccuaag

SEQ ID NO: 1495812 - RNA, 19 nt, Artificial Sequence
  Description of Artificial Sequence: Synthetic oligonucleotide
ucggucugcuucuggguag

SEQ ID NO: 1495813 - RNA, 19 nt, Artificial Sequence
  Description of Artificial Sequence: Synthetic oligonucleotide
uugaugacguuagugguuu

SEQ ID NO: 1495814 - RNA, 19 nt, Artificial Sequence
  Description of Artificial Sequence: Synthetic oligonucleotide
ggauuugaugacguuagug

SEQ ID NO: 1495815 - RNA, 19 nt, Artificial Sequence
  Description of Artificial Sequence: Synthetic oligonucleotide
aaagcggucugagguagga

SEQ ID NO: 1495816 - RNA, 19 nt, Artificial Sequence
  Description of Artificial Sequence: Synthetic oligonucleotide
agcuuaaacccacucucaa

SEQ ID NO: 1495817 - RNA, 19 nt, Artificial Sequence
  Description of Artificial Sequence: Synthetic oligonucleotide
gaccaacaagaauugcauc

SEQ ID NO: 1495818 - RNA, 19 nt, Artificial Sequence
  Description of Artificial Sequence: Synthetic oligonucleotide
acuggauuugaugacguua

SEQ ID NO: 1495819 - RNA, 19 nt, Artificial Sequence
  Description of Artificial Sequence: Synthetic oligonucleotide
ggcaaauugucauuaaccu

SEQ ID NO: 1495820 - RNA, 19 nt, Artificial Sequence
  Description of Artificial Sequence: Synthetic oligonucleotide
ugaucgucaccuuucccua

SEQ ID NO: 1495821 - RNA, 19 nt, Artificial Sequence
  Description of Artificial Sequence: Synthetic oligonucleotide
cauuauacuccacacauuu

SEQ ID NO: 1495822 - RNA, 19 nt, Artificial Sequence
  Description of Artificial Sequence: Synthetic oligonucleotide
caugagagaaaugugcaaa

SEQ ID NO: 1495823 - RNA, 19 nt, Artificial Sequence
  Description of Artificial Sequence: Synthetic oligonucleotide
gucuaauugguucuccucu

SEQ ID NO: 1495824 - RNA, 19 nt, Artificial Sequence
  Description of Artificial Sequence: Synthetic oligonucleotide
aagagcagucugugcaaaa

SEQ ID NO: 1495825 - RNA, 19 nt, Artificial Sequence
  Description of Artificial Sequence: Synthetic oligonucleotide
ugguguuuucuucgugaac

SEQ ID NO: 1495826 - RNA, 19 nt, Artificial Sequence
  Description of Artificial Sequence: Synthetic oligonucleotide
auaccauaugaaagucaac

SEQ ID NO: 1495827 - RNA, 19 nt, Artificial Sequence
  Description of Artificial Sequence: Synthetic oligonucleotide
aguucaaguuccagcacug

SEQ ID NO: 1495828 - RNA, 19 nt, Artificial Sequence
  Description of Artificial Sequence: Synthetic oligonucleotide
agcguuuccaauggccauc

SEQ ID NO: 1495829 - RNA, 19 nt, Artificial Sequence
  Description of Artificial Sequence: Synthetic oligonucleotide
gacaccaauaggccaggga

SEQ ID NO: 1495830 - RNA, 19 nt, Artificial Sequence
  Description of Artificial Sequence: Synthetic oligonucleotide
cauguccuuaugaucguca

SEQ ID NO: 1495831 - RNA, 19 nt, Artificial Sequence
  Description of Artificial Sequence: Synthetic oligonucleotide
guccuuaugaucgucaccu

SEQ ID NO: 1495832 - RNA, 19 nt, Artificial Sequence
  Description of Artificial Sequence: Synthetic oligonucleotide
cuuucucgcagucuucuga

SEQ ID NO: 1495833 - RNA, 19 nt, Artificial Sequence
  Description of Artificial Sequence: Synthetic oligonucleotide
auggaacucuauuguagaa

SEQ ID NO: 1495834 - RNA, 19 nt, Artificial Sequence
  Description of Artificial Sequence: Synthetic oligonucleotide
cucgcauggauuccaacca

SEQ ID NO: 1495835 - RNA, 19 nt, Artificial Sequence
  Description of Artificial Sequence: Synthetic oligonucleotide
acguuggaaagcaucauaa

SEQ ID NO: 1495836 - RNA, 19 nt, Artificial Sequence
  Description of Artificial Sequence: Synthetic oligonucleotide
uuucuucgugaacuuucaa

SEQ ID NO: 1495837 - RNA, 19 nt, Artificial Sequence
  Description of Artificial Sequence: Synthetic oligonucleotide
aaaagcggucugagguagg

SEQ ID NO: 1495838 - RNA, 19 nt, Artificial Sequence
  Description of Artificial Sequence: Synthetic oligonucleotide
gaauugcauccaauggaac

SEQ ID NO: 1495839 - RNA, 19 nt, Artificial Sequence
  Description of Artificial Sequence: Synthetic oligonucleotide
aaccauagugacaccaaua

SEQ ID NO: 1495840 - RNA, 19 nt, Artificial Sequence
  Description of Artificial Sequence: Synthetic oligonucleotide
ugcacgcugcguuucacau

SEQ ID NO: 1495841 - RNA, 19 nt, Artificial Sequence
  Description of Artificial Sequence: Synthetic oligonucleotide
aagcggucugagguaggac

SEQ ID NO: 1495842 - RNA, 19 nt, Artificial Sequence
  Description of Artificial Sequence: Synthetic oligonucleotide
aaacguuggaaagcaucau

SEQ ID NO: 1495843 - RNA, 19 nt, Artificial Sequence
  Description of Artificial Sequence: Synthetic oligonucleotide
acaguucuuaagaccaaca

SEQ ID NO: 1495844 - RNA, 19 nt, Artificial Sequence
  Description of Artificial Sequence: Synthetic oligonucleotide
cuuuagcccaaacgccaag

SEQ ID NO: 1495845 - RNA, 19 nt, Artificial Sequence
  Description of Artificial Sequence: Synthetic oligonucleotide
uggugguguuuucuucgug

SEQ ID NO: 1495846 - RNA, 19 nt, Artificial Sequence
  Description of Artificial Sequence: Synthetic oligonucleotide
cacgcugcguuucacauaa

SEQ ID NO: 1495847 - RNA, 19 nt, Artificial Sequence
  Description of Artificial Sequence: Synthetic oligonucleotide
auccguuucuccaaauagu

SEQ ID NO: 1495848 - RNA, 19 nt, Artificial Sequence
  Description of Artificial Sequence: Synthetic oligonucleotide
uggguagcacuguucaguu

SEQ ID NO: 1495849 - RNA, 19 nt, Artificial Sequence
  Description of Artificial Sequence: Synthetic oligonucleotide
cauucuguguguccuccuc

SEQ ID NO: 1495850 - RNA, 19 nt, Artificial Sequence
  Description of Artificial Sequence: Synthetic oligonucleotide
aguuugcccugcacgcugc

SEQ ID NO: 1495851 - RNA, 19 nt, Artificial Sequence
  Description of Artificial Sequence: Synthetic oligonucleotide
caguucuuaagaccaacaa

SEQ ID NO: 1495852 - RNA, 19 nt, Artificial Sequence
  Description of Artificial Sequence: Synthetic oligonucleotide
auaauccguuucuccaaau

SEQ ID NO: 1495853 - RNA, 19 nt, Artificial Sequence
  Description of Artificial Sequence: Synthetic oligonucleotide
gguguaagaaucucuauuu

SEQ ID NO: 1495854 - RNA, 19 nt, Artificial Sequence
  Description of Artificial Sequence: Synthetic oligonucleotide
gguaaggccagaaauccga

SEQ ID NO: 1495855 - RNA, 19 nt, Artificial Sequence
  Description of Artificial Sequence: Synthetic oligonucleotide
ucgcagucuucugaugacc

SEQ ID NO: 1495856 - RNA, 19 nt, Artificial Sequence
  Description of Artificial Sequence: Synthetic oligonucleotide
cucgcagucuucugaugac

SEQ ID NO: 1495857 - RNA, 19 nt, Artificial Sequence
  Description of Artificial Sequence: Synthetic oligonucleotide
aucgacucuuuaauaucag

SEQ ID NO: 1495858 - RNA, 19 nt, Artificial Sequence
  Description of Artificial Sequence: Synthetic oligonucleotide
uccauguccuuaugaucgu

SEQ ID NO: 1495859 - RNA, 19 nt, Artificial Sequence
  Description of Artificial Sequence: Synthetic oligonucleotide
auggauccguaggaaagug

SEQ ID NO: 1495860 - RNA, 19 nt, Artificial Sequence
  Description of Artificial Sequence: Synthetic oligonucleotide
uccgguagucuuucugaaa

SEQ ID NO: 1495861 - RNA, 19 nt, Artificial Sequence
  Description of Artificial Sequence: Synthetic oligonucleotide
auccguaggaaagugcuuu

SEQ ID NO: 1495862 - RNA, 19 nt, Artificial Sequence
  Description of Artificial Sequence: Synthetic oligonucleotide
ggauuccaaccauagugac

SEQ ID NO: 1495863 - RNA, 19 nt, Artificial Sequence
  Description of Artificial Sequence: Synthetic oligonucleotide
cguaggaaagugcuuuugg

SEQ ID NO: 1495864 - RNA, 19 nt, Artificial Sequence
  Description of Artificial Sequence: Synthetic oligonucleotide
gugcaaaucaugauaauuu

SEQ ID NO: 1495865 - RNA, 19 nt, Artificial Sequence
  Description of Artificial Sequence: Synthetic oligonucleotide
agcaggaaguauuccuuuu

SEQ ID NO: 1495866 - RNA, 19 nt, Artificial Sequence
  Description of Artificial Sequence: Synthetic oligonucleotide
ucgcauggauuccaaccau

SEQ ID NO: 1495867 - RNA, 19 nt, Artificial Sequence
  Description of Artificial Sequence: Synthetic oligonucleotide
uucucgcagucuucugaug

SEQ ID NO: 1495868 - RNA, 19 nt, Artificial Sequence
  Description of Artificial Sequence: Synthetic oligonucleotide
uccgcuggguuucaucauu

SEQ ID NO: 1495869 - RNA, 19 nt, Artificial Sequence
  Description of Artificial Sequence: Synthetic oligonucleotide
aucuguuaucgacucuuua

SEQ ID NO: 1495870 - RNA, 19 nt, Artificial Sequence
  Description of Artificial Sequence: Synthetic oligonucleotide
cuucgugaugauguccaug

SEQ ID NO: 1495871 - RNA, 19 nt, Artificial Sequence
  Description of Artificial Sequence: Synthetic oligonucleotide
caguuugcccugcacgcug

SEQ ID NO: 1495872 - RNA, 19 nt, Artificial Sequence
  Description of Artificial Sequence: Synthetic oligonucleotide
gugugguaaggccagaaau

SEQ ID NO: 1495873 - RNA, 19 nt, Artificial Sequence
  Description of Artificial Sequence: Synthetic oligonucleotide
gccuagaaagagucauggg

SEQ ID NO: 1495874 - RNA, 19 nt, Artificial Sequence
  Description of Artificial Sequence: Synthetic oligonucleotide
agaaagagucauggguagu

SEQ ID NO: 1495875 - RNA, 19 nt, Artificial Sequence
  Description of Artificial Sequence: Synthetic oligonucleotide
uucucgcauggauuccaac

SEQ ID NO: 1495876 - RNA, 19 nt, Artificial Sequence
  Description of Artificial Sequence: Synthetic oligonucleotide
cucaaauguuucuaauuau

SEQ ID NO: 1495877 - RNA, 19 nt, Artificial Sequence
  Description of Artificial Sequence: Synthetic oligonucleotide
gaauguauuuccgcugggu

SEQ ID NO: 1495878 - RNA, 19 nt, Artificial Sequence
  Description of Artificial Sequence: Synthetic oligonucleotide
aaagcugcuuucagaucau

SEQ ID NO: 1495879 - RNA, 19 nt, Artificial Sequence
  Description of Artificial Sequence: Synthetic oligonucleotide
uugugugguaaggccagaa

SEQ ID NO: 1495880 - RNA, 19 nt, Artificial Sequence
  Description of Artificial Sequence: Synthetic oligonucleotide
ccuaaggacucucccagug

SEQ ID NO: 1495881 - RNA, 19 nt, Artificial Sequence
  Description of Artificial Sequence: Synthetic oligonucleotide
gaccucuugccuagaaaga

SEQ ID NO: 1495882 - RNA, 19 nt, Artificial Sequence
  Description of Artificial Sequence: Synthetic oligonucleotide
uccgaaugcugcagaucuc

SEQ ID NO: 1495883 - RNA, 19 nt, Artificial Sequence
  Description of Artificial Sequence: Synthetic oligonucleotide
gauggauccguaggaaagu

SEQ ID NO: 1495884 - RNA, 19 nt, Artificial Sequence
  Description of Artificial Sequence: Synthetic oligonucleotide
gugacaccaauaggccagg

SEQ ID NO: 1495885 - RNA, 19 nt, Artificial Sequence
  Description of Artificial Sequence: Synthetic oligonucleotide
ccugccaguucucgcaugg

SEQ ID NO: 1495886 - RNA, 19 nt, Artificial Sequence
  Description of Artificial Sequence: Synthetic oligonucleotide
ccagggagcguuuccaaug

SEQ ID NO: 1495887 - RNA, 19 nt, Artificial Sequence
  Description of Artificial Sequence: Synthetic oligonucleotide
cagguuccugaccacccac

SEQ ID NO: 1495888 - RNA, 19 nt, Artificial Sequence
  Description of Artificial Sequence: Synthetic oligonucleotide
cuguuaucgacucuuuaau

SEQ ID NO: 1495889 - RNA, 19 nt, Artificial Sequence
  Description of Artificial Sequence: Synthetic oligonucleotide
guuugcccugcacgcugcg

SEQ ID NO: 1495890 - RNA, 19 nt, Artificial Sequence
  Description of Artificial Sequence: Synthetic oligonucleotide
uccugaccacccacaauuu

SEQ ID NO: 1495891 - RNA, 19 nt, Artificial Sequence
  Description of Artificial Sequence: Synthetic oligonucleotide
uccguaggaaagugcuuuu

SEQ ID NO: 1495892 - RNA, 19 nt, Artificial Sequence
  Description of Artificial Sequence: Synthetic oligonucleotide
ggaacuucgugaugauguc

SEQ ID NO: 1495893 - RNA, 19 nt, Artificial Sequence
  Description of Artificial Sequence: Synthetic oligonucleotide
auaggccagggagcguuuc

SEQ ID NO: 1495894 - RNA, 19 nt, Artificial Sequence
  Description of Artificial Sequence: Synthetic oligonucleotide
gggagcguuuccaauggcc

SEQ ID NO: 1495895 - RNA, 19 nt, Artificial Sequence
  Description of Artificial Sequence: Synthetic oligonucleotide
gcguuucacauaauccucc

SEQ ID NO: 1495896 - RNA, 19 nt, Artificial Sequence
  Description of Artificial Sequence: Synthetic oligonucleotide
ugcauccaauggaacucua

SEQ ID NO: 1495897 - RNA, 19 nt, Artificial Sequence
  Description of Artificial Sequence: Synthetic oligonucleotide
auagcgcauuauacuccac

SEQ ID NO: 1495898 - RNA, 19 nt, Artificial Sequence
  Description of Artificial Sequence: Synthetic oligonucleotide
aggucaguucaaauucccu

SEQ ID NO: 1495899 - RNA, 19 nt, Artificial Sequence
  Description of Artificial Sequence: Synthetic oligonucleotide
ggaacauucaaugguccaa

SEQ ID NO: 1495900 - RNA, 19 nt, Artificial Sequence
  Description of Artificial Sequence: Synthetic oligonucleotide
cugcuaguucaaguuccag

SEQ ID NO: 1495901 - RNA, 19 nt, Artificial Sequence
  Description of Artificial Sequence: Synthetic oligonucleotide
gaucgucaccuuucccuaa

SEQ ID NO: 1495902 - RNA, 19 nt, Artificial Sequence
  Description of Artificial Sequence: Synthetic oligonucleotide
acuucgugaugauguccau

SEQ ID NO: 1495903 - RNA, 19 nt, Artificial Sequence
  Description of Artificial Sequence: Synthetic oligonucleotide
gcuuaaacccacucucaaa

SEQ ID NO: 1495904 - RNA, 19 nt, Artificial Sequence
  Description of Artificial Sequence: Synthetic oligonucleotide
agaucucauagcgcauuau

SEQ ID NO: 1495905 - RNA, 19 nt, Artificial Sequence
  Description of Artificial Sequence: Synthetic oligonucleotide
cguuucuccaaauagucua

SEQ ID NO: 1495906 - RNA, 19 nt, Artificial Sequence
  Description of Artificial Sequence: Synthetic oligonucleotide
uccuuaugaucgucaccuu

SEQ ID NO: 1495907 - RNA, 19 nt, Artificial Sequence
  Description of Artificial Sequence: Synthetic oligonucleotide
ggucaguucaaauucccuu

SEQ ID NO: 1495908 - RNA, 19 nt, Artificial Sequence
  Description of Artificial Sequence: Synthetic oligonucleotide
ggauccguaggaaagugcu

SEQ ID NO: 1495909 - RNA, 19 nt, Artificial Sequence
  Description of Artificial Sequence: Synthetic oligonucleotide
uuugcccugcacgcugcgu

SEQ ID NO: 1495910 - RNA, 19 nt, Artificial Sequence
  Description of Artificial Sequence: Synthetic oligonucleotide
ccgguagucuuucugaaaa

SEQ ID NO: 1495911 - RNA, 19 nt, Artificial Sequence
  Description of Artificial Sequence: Synthetic oligonucleotide
caaauucccuucuccuugu

SEQ ID NO: 1495912 - RNA, 19 nt, Artificial Sequence
  Description of Artificial Sequence: Synthetic oligonucleotide
guaaggccagaaauccgaa

SEQ ID NO: 1495913 - RNA, 19 nt, Artificial Sequence
  Description of Artificial Sequence: Synthetic oligonucleotide
gcaucauaauccguuucuc

SEQ ID NO: 1495914 - RNA, 19 nt, Artificial Sequence
  Description of Artificial Sequence: Synthetic oligonucleotide
cauggauuccaaccauagu

SEQ ID NO: 1495915 - RNA, 19 nt, Artificial Sequence
  Description of Artificial Sequence: Synthetic oligonucleotide
gcgcauuauacuccacaca

SEQ ID NO: 1495916 - RNA, 19 nt, Artificial Sequence
  Description of Artificial Sequence: Synthetic oligonucleotide
cauuccuuaagcccuuguu

SEQ ID NO: 1495917 - RNA, 19 nt, Artificial Sequence
  Description of Artificial Sequence: Synthetic oligonucleotide
cuuaaacguuggaaagcau

SEQ ID NO: 1495918 - RNA, 19 nt, Artificial Sequence
  Description of Artificial Sequence: Synthetic oligonucleotide
ccaauggaacucuauugua

SEQ ID NO: 1495919 - RNA, 19 nt, Artificial Sequence
  Description of Artificial Sequence: Synthetic oligonucleotide
caaccauagugacaccaau

SEQ ID NO: 1495920 - RNA, 19 nt, Artificial Sequence
  Description of Artificial Sequence: Synthetic oligonucleotide
cugguguaagaaucucuau

SEQ ID NO: 1495921 - RNA, 19 nt, Artificial Sequence
  Description of Artificial Sequence: Synthetic oligonucleotide
cgcauuauacuccacacau

SEQ ID NO: 1495922 - RNA, 19 nt, Artificial Sequence
  Description of Artificial Sequence: Synthetic oligonucleotide
ccaaccauagugacaccaa

SEQ ID NO: 1495923 - RNA, 19 nt, Artificial Sequence
  Description of Artificial Sequence: Synthetic oligonucleotide
cuuuuggguccuggggaga

SEQ ID NO: 1495924 - RNA, 19 nt, Artificial Sequence
  Description of Artificial Sequence: Synthetic oligonucleotide
cuauugcaugauggcagaa

SEQ ID NO: 1495925 - RNA, 19 nt, Artificial Sequence
  Description of Artificial Sequence: Synthetic oligonucleotide
cacccacaauuucauucaa

SEQ ID NO: 1495926 - RNA, 19 nt, Artificial Sequence
  Description of Artificial Sequence: Synthetic oligonucleotide
cgcugcguuucacauaauc

SEQ ID NO: 1495927 - RNA, 19 nt, Artificial Sequence
  Description of Artificial Sequence: Synthetic oligonucleotide
guauuccuuuuccgguagu

SEQ ID NO: 1495928 - RNA, 19 nt, Artificial Sequence
  Description of Artificial Sequence: Synthetic oligonucleotide
ccgaaugcugcagaucuca

SEQ ID NO: 1495929 - RNA, 19 nt, Artificial Sequence
  Description of Artificial Sequence: Synthetic oligonucleotide
cccugaauguauuuccgcu

SEQ ID NO: 1495930 - RNA, 19 nt, Artificial Sequence
  Description of Artificial Sequence: Synthetic oligonucleotide
guccaacacuuuuguugaa

SEQ ID NO: 1495931 - RNA, 19 nt, Artificial Sequence
  Description of Artificial Sequence: Synthetic oligonucleotide
cauaauccucccuggcauu

SEQ ID NO: 1495932 - RNA, 19 nt, Artificial Sequence
  Description of Artificial Sequence: Synthetic oligonucleotide
guucucgcauggauuccaa

SEQ ID NO: 1495933 - RNA, 19 nt, Artificial Sequence
  Description of Artificial Sequence: Synthetic oligonucleotide
ccguaggaaagugcuuuug

SEQ ID NO: 1495934 - RNA, 19 nt, Artificial Sequence
  Description of Artificial Sequence: Synthetic oligonucleotide
guauuuccgcuggguuuca

SEQ ID NO: 1495935 - RNA, 19 nt, Artificial Sequence
  Description of Artificial Sequence: Synthetic oligonucleotide
gguaugcaucauuugccuu

SEQ ID NO: 1495936 - RNA, 19 nt, Artificial Sequence
  Description of Artificial Sequence: Synthetic oligonucleotide
gcggucugagguaggacuc

SEQ ID NO: 1495937 - RNA, 19 nt, Artificial Sequence
  Description of Artificial Sequence: Synthetic oligonucleotide
gauccguaggaaagugcuu

SEQ ID NO: 1495938 - RNA, 19 nt, Artificial Sequence
  Description of Artificial Sequence: Synthetic oligonucleotide
cuuuuccgguagucuuucu

SEQ ID NO: 1495939 - RNA, 19 nt, Artificial Sequence
  Description of Artificial Sequence: Synthetic oligonucleotide
ccuuaugaucgucaccuuu

SEQ ID NO: 1495940 - RNA, 19 nt, Artificial Sequence
  Description of Artificial Sequence: Synthetic oligonucleotide
cugccaguucucgcaugga

SEQ ID NO: 1495941 - RNA, 19 nt, Artificial Sequence
  Description of Artificial Sequence: Synthetic oligonucleotide
cacuggauuugaugacguu

SEQ ID NO: 1495942 - RNA, 19 nt, Artificial Sequence
  Description of Artificial Sequence: Synthetic oligonucleotide
gcacgcugcguuucacaua

SEQ ID NO: 1495943 - RNA, 19 nt, Artificial Sequence
  Description of Artificial Sequence: Synthetic oligonucleotide
gcguuuccaauggccaucu

SEQ ID NO: 1495944 - RNA, 19 nt, Artificial Sequence
  Description of Artificial Sequence: Synthetic oligonucleotide
gcauuauacuccacacauu

SEQ ID NO: 1495945 - RNA, 19 nt, Artificial Sequence
  Description of Artificial Sequence: Synthetic oligonucleotide
gccagggagcguuuccaau

SEQ ID NO: 1495946 - RNA, 19 nt, Artificial Sequence
  Description of Artificial Sequence: Synthetic oligonucleotide
ggucugcuucuggguagca

SEQ ID NO: 1495947 - RNA, 19 nt, Artificial Sequence
  Description of Artificial Sequence: Synthetic oligonucleotide
cccaaacgccaagaagaaa

SEQ ID NO: 1495948 - RNA, 19 nt, Artificial Sequence
  Description of Artificial Sequence: Synthetic oligonucleotide
ggguagcacuguucaguuu

SEQ ID NO: 1495949 - RNA, 19 nt, Artificial Sequence
  Description of Artificial Sequence: Synthetic oligonucleotide
cccuaaggacucucccagu

SEQ ID NO: 1495950 - RNA, 19 nt, Artificial Sequence
  Description of Artificial Sequence: Synthetic oligonucleotide
acgcugcguuucacauaau

SEQ ID NO: 1495951 - RNA, 19 nt, Artificial Sequence
  Description of Artificial Sequence: Synthetic oligonucleotide
ccgcuggguuucaucauuu

SEQ ID NO: 1495952 - RNA, 19 nt, Artificial Sequence
  Description of Artificial Sequence: Synthetic oligonucleotide
ccaauaggccagggagcgu

SEQ ID NO: 1495953 - RNA, 19 nt, Artificial Sequence
  Description of Artificial Sequence: Synthetic oligonucleotide
uuaaaguuucaucacaucc

SEQ ID NO: 1495954 - RNA, 19 nt, Artificial Sequence
  Description of Artificial Sequence: Synthetic oligonucleotide
ugacaaauggaacacacag

SEQ ID NO: 1495955 - RNA, 19 nt, Artificial Sequence
  Description of Artificial Sequence: Synthetic oligonucleotide
aaauggaacacacagugcu

SEQ ID NO: 1495956 - RNA, 19 nt, Artificial Sequence
  Description of Artificial Sequence: Synthetic oligonucleotide
uguacuuccaucaccauca

SEQ ID NO: 1495957 - RNA, 19 nt, Artificial Sequence
  Description of Artificial Sequence: Synthetic oligonucleotide
acaauugcagaucacagag

SEQ ID NO: 1495958 - RNA, 19 nt, Artificial Sequence
  Description of Artificial Sequence: Synthetic oligonucleotide
gaaucaggaaaccacacag

SEQ ID NO: 1495959 - RNA, 19 nt, Artificial Sequence
  Description of Artificial Sequence: Synthetic oligonucleotide
ugaagauccaguaugucug

SEQ ID NO: 1495960 - RNA, 19 nt, Artificial Sequence
  Description of Artificial Sequence: Synthetic oligonucleotide
guaagucccacauacaucc

SEQ ID NO: 1495961 - RNA, 19 nt, Artificial Sequence
  Description of Artificial Sequence: Synthetic oligonucleotide
agcccauggaaucauaacc

SEQ ID NO: 1495962 - RNA, 19 nt, Artificial Sequence
  Description of Artificial Sequence: Synthetic oligonucleotide
ugagguaagucccacauac

SEQ ID NO: 1495963 - RNA, 19 nt, Artificial Sequence
  Description of Artificial Sequence: Synthetic oligonucleotide
cuaaguacugagauaaggc

SEQ ID NO: 1495964 - RNA, 19 nt, Artificial Sequence
  Description of Artificial Sequence: Synthetic oligonucleotide
ugaaacuuauccuucuugc

SEQ ID NO: 1495965 - RNA, 19 nt, Artificial Sequence
  Description of Artificial Sequence: Synthetic oligonucleotide
uugccuuagaacuugaaac

SEQ ID NO: 1495966 - RNA, 19 nt, Artificial Sequence
  Description of Artificial Sequence: Synthetic oligonucleotide
uaaguacugagauaaggcc

SEQ ID NO: 1495967 - RNA, 19 nt, Artificial Sequence
  Description of Artificial Sequence: Synthetic oligonucleotide
uaagguagaacccaccacu

SEQ ID NO: 1495968 - RNA, 19 nt, Artificial Sequence
  Description of Artificial Sequence: Synthetic oligonucleotide
aaggcucccacgcuuaaac

SEQ ID NO: 1495969 - RNA, 19 nt, Artificial Sequence
  Description of Artificial Sequence: Synthetic oligonucleotide
aauugcagaucacagaguu

SEQ ID NO: 1495970 - RNA, 19 nt, Artificial Sequence
  Description of Artificial Sequence: Synthetic oligonucleotide
uacauccgggcuuugaugg

SEQ ID NO: 1495971 - RNA, 19 nt, Artificial Sequence
  Description of Artificial Sequence: Synthetic oligonucleotide
agaacuugaaacuuauccu

SEQ ID NO: 1495972 - RNA, 19 nt, Artificial Sequence
  Description of Artificial Sequence: Synthetic oligonucleotide
aaucauaaccuuccacaag

SEQ ID NO: 1495973 - RNA, 19 nt, Artificial Sequence
  Description of Artificial Sequence: Synthetic oligonucleotide
aucauaaccuuccacaagu

SEQ ID NO: 1495974 - RNA, 19 nt, Artificial Sequence
  Description of Artificial Sequence: Synthetic oligonucleotide
auugcacuuauagaagugc

SEQ ID NO: 1495975 - RNA, 19 nt, Artificial Sequence
  Description of Artificial Sequence: Synthetic oligonucleotide
gacaguaagcagcacagcc

SEQ ID NO: 1495976 - RNA, 19 nt, Artificial Sequence
  Description of Artificial Sequence: Synthetic oligonucleotide
agaaagaaguugcaaccac

SEQ ID NO: 1495977 - RNA, 19 nt, Artificial Sequence
  Description of Artificial Sequence: Synthetic oligonucleotide
aaugaaaaccugcuuguau

SEQ ID NO: 1495978 - RNA, 19 nt, Artificial Sequence
  Description of Artificial Sequence: Synthetic oligonucleotide
cuugcggacaguaagcagc

SEQ ID NO: 1495979 - RNA, 19 nt, Artificial Sequence
  Description of Artificial Sequence: Synthetic oligonucleotide
ugcacuuauagaagugccg

SEQ ID NO: 1495980 - RNA, 19 nt, Artificial Sequence
  Description of Artificial Sequence: Synthetic oligonucleotide
aacuuauccuucuugcccu

SEQ ID NO: 1495981 - RNA, 19 nt, Artificial Sequence
  Description of Artificial Sequence: Synthetic oligonucleotide
uugugaaaaucgcaggccc

SEQ ID NO: 1495982 - RNA, 19 nt, Artificial Sequence
  Description of Artificial Sequence: Synthetic oligonucleotide
uagucuuuugcuuguagcc

SEQ ID NO: 1495983 - RNA, 19 nt, Artificial Sequence
  Description of Artificial Sequence: Synthetic oligonucleotide
uuagucuuuugcuuguagc

SEQ ID NO: 1495984 - RNA, 19 nt, Artificial Sequence
  Description of Artificial Sequence: Synthetic oligonucleotide
uguagauccugcaucugag

SEQ ID NO: 1495985 - RNA, 19 nt, Artificial Sequence
  Description of Artificial Sequence: Synthetic oligonucleotide
caugaguugcaucaguacc

SEQ ID NO: 1495986 - RNA, 19 nt, Artificial Sequence
  Description of Artificial Sequence: Synthetic oligonucleotide
cugagauaaggccucaucc

SEQ ID NO: 1495987 - RNA, 19 nt, Artificial Sequence
  Description of Artificial Sequence: Synthetic oligonucleotide
cuugucugagguaaguccc

SEQ ID NO: 1495988 - RNA, 19 nt, Artificial Sequence
  Description of Artificial Sequence: Synthetic oligonucleotide
aaucaggaaaccacacagc

SEQ ID NO: 1495989 - RNA, 19 nt, Artificial Sequence
  Description of Artificial Sequence: Synthetic oligonucleotide
aaggcuacauuuucggggu

SEQ ID NO: 1495990 - RNA, 19 nt, Artificial Sequence
  Description of Artificial Sequence: Synthetic oligonucleotide
gaaacuuauccuucuugcc

SEQ ID NO: 1495991 - RNA, 19 nt, Artificial Sequence
  Description of Artificial Sequence: Synthetic oligonucleotide
cacagaaagaaguugcaac

SEQ ID NO: 1495992 - RNA, 19 nt, Artificial Sequence
  Description of Artificial Sequence: Synthetic oligonucleotide
ugcuucaaugaaaaccugc

SEQ ID NO: 1495993 - RNA, 19 nt, Artificial Sequence
  Description of Artificial Sequence: Synthetic oligonucleotide
gguucugagggacaaaagg

SEQ ID NO: 1495994 - RNA, 19 nt, Artificial Sequence
  Description of Artificial Sequence: Synthetic oligonucleotide
guugaccagagguugagag

SEQ ID NO: 1495995 - RNA, 19 nt, Artificial Sequence
  Description of Artificial Sequence: Synthetic oligonucleotide
ugagauaaggccucaucca

SEQ ID NO: 1495996 - RNA, 19 nt, Artificial Sequence
  Description of Artificial Sequence: Synthetic oligonucleotide
cacacuguugcucucgugg

SEQ ID NO: 1495997 - RNA, 19 nt, Artificial Sequence
  Description of Artificial Sequence: Synthetic oligonucleotide
accuaugcagccaacaaac

SEQ ID NO: 1495998 - RNA, 19 nt, Artificial Sequence
  Description of Artificial Sequence: Synthetic oligonucleotide
cauguucucaucuacccac

SEQ ID NO: 1495999 - RNA, 19 nt, Artificial Sequence
  Description of Artificial Sequence: Synthetic oligonucleotide
uuugcuuguagccucuggu

SEQ ID NO: 1496000 - RNA, 19 nt, Artificial Sequence
  Description of Artificial Sequence: Synthetic oligonucleotide
cucaucuacccacugaaag

SEQ ID NO: 1496001 - RNA, 19 nt, Artificial Sequence
  Description of Artificial Sequence: Synthetic oligonucleotide
ugacguguaccccauggag

SEQ ID NO: 1496002 - RNA, 19 nt, Artificial Sequence
  Description of Artificial Sequence: Synthetic oligonucleotide
uugagaucagcuuccagcu

SEQ ID NO: 1496003 - RNA, 19 nt, Artificial Sequence
  Description of Artificial Sequence: Synthetic oligonucleotide
uugcagaucacagaguuac

SEQ ID NO: 1496004 - RNA, 19 nt, Artificial Sequence
  Description of Artificial Sequence: Synthetic oligonucleotide
cuaaagcugacguguaccc

SEQ ID NO: 1496005 - RNA, 19 nt, Artificial Sequence
  Description of Artificial Sequence: Synthetic oligonucleotide
aaagaaguugcaaccacca

SEQ ID NO: 1496006 - RNA, 19 nt, Artificial Sequence
  Description of Artificial Sequence: Synthetic oligonucleotide
acagaugagcuugagauca

SEQ ID NO: 1496007 - RNA, 19 nt, Artificial Sequence
  Description of Artificial Sequence: Synthetic oligonucleotide
aaaaucgcaggcccaagau

SEQ ID NO: 1496008 - RNA, 19 nt, Artificial Sequence
  Description of Artificial Sequence: Synthetic oligonucleotide
aauguguucugcaugaguu

SEQ ID NO: 1496009 - RNA, 19 nt, Artificial Sequence
  Description of Artificial Sequence: Synthetic oligonucleotide
uugcacuuauagaagugcc

SEQ ID NO: 1496010 - RNA, 19 nt, Artificial Sequence
  Description of Artificial Sequence: Synthetic oligonucleotide
ugccuuagaacuugaaacu

SEQ ID NO: 1496011 - RNA, 19 nt, Artificial Sequence
  Description of Artificial Sequence: Synthetic oligonucleotide
uucucaucuacccacugaa

SEQ ID NO: 1496012 - RNA, 19 nt, Artificial Sequence
  Description of Artificial Sequence: Synthetic oligonucleotide
ugcaagacucccuggagcc

SEQ ID NO: 1496013 - RNA, 19 nt, Artificial Sequence
  Description of Artificial Sequence: Synthetic oligonucleotide
uuucaucacauccaccuau

SEQ ID NO: 1496014 - RNA, 19 nt, Artificial Sequence
  Description of Artificial Sequence: Synthetic oligonucleotide
ugcacaguccgugugacag

SEQ ID NO: 1496015 - RNA, 19 nt, Artificial Sequence
  Description of Artificial Sequence: Synthetic oligonucleotide
uccaguaugucuguugacc

SEQ ID NO: 1496016 - RNA, 19 nt, Artificial Sequence
  Description of Artificial Sequence: Synthetic oligonucleotide
uuccacaagucccaugccc

SEQ ID NO: 1496017 - RNA, 19 nt, Artificial Sequence
  Description of Artificial Sequence: Synthetic oligonucleotide
ggaaucauaaccuuccaca

SEQ ID NO: 1496018 - RNA, 19 nt, Artificial Sequence
  Description of Artificial Sequence: Synthetic oligonucleotide
uucuugcccucacagauga

SEQ ID NO: 1496019 - RNA, 19 nt, Artificial Sequence
  Description of Artificial Sequence: Synthetic oligonucleotide
cuuucgaacaggcucuggc

SEQ ID NO: 1496020 - RNA, 19 nt, Artificial Sequence
  Description of Artificial Sequence: Synthetic oligonucleotide
gacaaaaggggcgagugug

SEQ ID NO: 1496021 - RNA, 19 nt, Artificial Sequence
  Description of Artificial Sequence: Synthetic oligonucleotide
augaguugcaucaguaccg

SEQ ID NO: 1496022 - RNA, 19 nt, Artificial Sequence
  Description of Artificial Sequence: Synthetic oligonucleotide
gaaagaaguugcaaccacc

SEQ ID NO: 1496023 - RNA, 19 nt, Artificial Sequence
  Description of Artificial Sequence: Synthetic oligonucleotide
cuuauagaagugccggccc

SEQ ID NO: 1496024 - RNA, 19 nt, Artificial Sequence
  Description of Artificial Sequence: Synthetic oligonucleotide
acacuguugcucucguggc

SEQ ID NO: 1496025 - RNA, 19 nt, Artificial Sequence
  Description of Artificial Sequence: Synthetic oligonucleotide
gaccuugugaaaaucgcag

SEQ ID NO: 1496026 - RNA, 19 nt, Artificial Sequence
  Description of Artificial Sequence: Synthetic oligonucleotide
cauaaccuuccacaagucc

SEQ ID NO: 1496027 - RNA, 19 nt, Artificial Sequence
  Description of Artificial Sequence: Synthetic oligonucleotide
accuugugaaaaucgcagg

SEQ ID NO: 1496028 - RNA, 19 nt, Artificial Sequence
  Description of Artificial Sequence: Synthetic oligonucleotide
ugcagcuaagguagaaccc

SEQ ID NO: 1496029 - RNA, 19 nt, Artificial Sequence
  Description of Artificial Sequence: Synthetic oligonucleotide
uggugggaagguuucagcc

SEQ ID NO: 1496030 - RNA, 19 nt, Artificial Sequence
  Description of Artificial Sequence: Synthetic oligonucleotide
uccacaagucccaugccca

SEQ ID NO: 1496031 - RNA, 19 nt, Artificial Sequence
  Description of Artificial Sequence: Synthetic oligonucleotide
ugcuuguagccucuggucu

SEQ ID NO: 1496032 - RNA, 19 nt, Artificial Sequence
  Description of Artificial Sequence: Synthetic oligonucleotide
gugcagcuaagguagaacc

SEQ ID NO: 1496033 - RNA, 19 nt, Artificial Sequence
  Description of Artificial Sequence: Synthetic oligonucleotide
acuuucaccagcaggagug

SEQ ID NO: 1496034 - RNA, 19 nt, Artificial Sequence
  Description of Artificial Sequence: Synthetic oligonucleotide
aagguuucagccauugccu

SEQ ID NO: 1496035 - RNA, 19 nt, Artificial Sequence
  Description of Artificial Sequence: Synthetic oligonucleotide
augaaaaccugcuuguauu

SEQ ID NO: 1496036 - RNA, 19 nt, Artificial Sequence
  Description of Artificial Sequence: Synthetic oligonucleotide
ugugaaaaucgcaggccca

SEQ ID NO: 1496037 - RNA, 19 nt, Artificial Sequence
  Description of Artificial Sequence: Synthetic oligonucleotide
uucaaccuguacacagggg

SEQ ID NO: 1496038 - RNA, 19 nt, Artificial Sequence
  Description of Artificial Sequence: Synthetic oligonucleotide
cagaguuacuuucaccagc

SEQ ID NO: 1496039 - RNA, 19 nt, Artificial Sequence
  Description of Artificial Sequence: Synthetic oligonucleotide
uuucgaacaggcucuggca

SEQ ID NO: 1496040 - RNA, 19 nt, Artificial Sequence
  Description of Artificial Sequence: Synthetic oligonucleotide
gauccaguaugucuguuga

SEQ ID NO: 1496041 - RNA, 19 nt, Artificial Sequence
  Description of Artificial Sequence: Synthetic oligonucleotide
cuugugaaaaucgcaggcc

SEQ ID NO: 1496042 - RNA, 19 nt, Artificial Sequence
  Description of Artificial Sequence: Synthetic oligonucleotide
aacuucaacuucaaccugu

SEQ ID NO: 1496043 - RNA, 19 nt, Artificial Sequence
  Description of Artificial Sequence: Synthetic oligonucleotide
uggaaucauaaccuuccac

SEQ ID NO: 1496044 - RNA, 19 nt, Artificial Sequence
  Description of Artificial Sequence: Synthetic oligonucleotide
caaaggcuacauuuucggg

SEQ ID NO: 1496045 - RNA, 19 nt, Artificial Sequence
  Description of Artificial Sequence: Synthetic oligonucleotide
gcaaaggcuacauuuucgg

SEQ ID NO: 1496046 - RNA, 19 nt, Artificial Sequence
  Description of Artificial Sequence: Synthetic oligonucleotide
ugcacuuguugccuuagaa

SEQ ID NO: 1496047 - RNA, 19 nt, Artificial Sequence
  Description of Artificial Sequence: Synthetic oligonucleotide
aaguuucaucacauccacc

SEQ ID NO: 1496048 - RNA, 19 nt, Artificial Sequence
  Description of Artificial Sequence: Synthetic oligonucleotide
uuauagaagugccggcccu

SEQ ID NO: 1496049 - RNA, 19 nt, Artificial Sequence
  Description of Artificial Sequence: Synthetic oligonucleotide
uuggucuugaggaccauau

SEQ ID NO: 1496050 - RNA, 19 nt, Artificial Sequence
  Description of Artificial Sequence: Synthetic oligonucleotide
acagaguuacuuucaccag

SEQ ID NO: 1496051 - RNA, 19 nt, Artificial Sequence
  Description of Artificial Sequence: Synthetic oligonucleotide
aaucgcaggcccaagauuu

SEQ ID NO: 1496052 - RNA, 19 nt, Artificial Sequence
  Description of Artificial Sequence: Synthetic oligonucleotide
cuacccacugaaagaagcc

SEQ ID NO: 1496053 - RNA, 19 nt, Artificial Sequence
  Description of Artificial Sequence: Synthetic oligonucleotide
agauccaguaugucuguug

SEQ ID NO: 1496054 - RNA, 19 nt, Artificial Sequence
  Description of Artificial Sequence: Synthetic oligonucleotide
ugcugccuaaagcugacgu

SEQ ID NO: 1496055 - RNA, 19 nt, Artificial Sequence
  Description of Artificial Sequence: Synthetic oligonucleotide
uccacguugcugccuaaag

SEQ ID NO: 1496056 - RNA, 19 nt, Artificial Sequence
  Description of Artificial Sequence: Synthetic oligonucleotide
ucaucacauccaccuaugc

SEQ ID NO: 1496057 - RNA, 19 nt, Artificial Sequence
  Description of Artificial Sequence: Synthetic oligonucleotide
caccgaaucaggaaaccac

SEQ ID NO: 1496058 - RNA, 19 nt, Artificial Sequence
  Description of Artificial Sequence: Synthetic oligonucleotide
cauugcacuuauagaagug

SEQ ID NO: 1496059 - RNA, 19 nt, Artificial Sequence
  Description of Artificial Sequence: Synthetic oligonucleotide
cccaagauuuccuuuaaag

SEQ ID NO: 1496060 - RNA, 19 nt, Artificial Sequence
  Description of Artificial Sequence: Synthetic oligonucleotide
uaccccauggagcugccug

SEQ ID NO: 1496061 - RNA, 19 nt, Artificial Sequence
  Description of Artificial Sequence: Synthetic oligonucleotide
ucuguugaccagagguuga

SEQ ID NO: 1496062 - RNA, 19 nt, Artificial Sequence
  Description of Artificial Sequence: Synthetic oligonucleotide
acguguaccccauggagcu

SEQ ID NO: 1496063 - RNA, 19 nt, Artificial Sequence
  Description of Artificial Sequence: Synthetic oligonucleotide
auacauccgggcuuugaug

SEQ ID NO: 1496064 - RNA, 19 nt, Artificial Sequence
  Description of Artificial Sequence: Synthetic oligonucleotide
aaaucgcaggcccaagauu

SEQ ID NO: 1496065 - RNA, 19 nt, Artificial Sequence
  Description of Artificial Sequence: Synthetic oligonucleotide
gaaaaucgcaggcccaaga

SEQ ID NO: 1496066 - RNA, 19 nt, Artificial Sequence
  Description of Artificial Sequence: Synthetic oligonucleotide
uccuuuguugggcccaucu

SEQ ID NO: 1496067 - RNA, 19 nt, Artificial Sequence
  Description of Artificial Sequence: Synthetic oligonucleotide
cuaagguagaacccaccac

SEQ ID NO: 1496068 - RNA, 19 nt, Artificial Sequence
  Description of Artificial Sequence: Synthetic oligonucleotide
uucgaacaggcucuggcau

SEQ ID NO: 1496069 - RNA, 19 nt, Artificial Sequence
  Description of Artificial Sequence: Synthetic oligonucleotide
guugggcccaucuuucugc

SEQ ID NO: 1496070 - RNA, 19 nt, Artificial Sequence
  Description of Artificial Sequence: Synthetic oligonucleotide
uggagccauguucucaucu

SEQ ID NO: 1496071 - RNA, 19 nt, Artificial Sequence
  Description of Artificial Sequence: Synthetic oligonucleotide
agaugagcuugagaucagc

SEQ ID NO: 1496072 - RNA, 19 nt, Artificial Sequence
  Description of Artificial Sequence: Synthetic oligonucleotide
gacguguaccccauggagc

SEQ ID NO: 1496073 - RNA, 19 nt, Artificial Sequence
  Description of Artificial Sequence: Synthetic oligonucleotide
gagauaaggccucauccaa

SEQ ID NO: 1496074 - RNA, 19 nt, Artificial Sequence
  Description of Artificial Sequence: Synthetic oligonucleotide
uuagaacuugaaacuuauc

SEQ ID NO: 1496075 - RNA, 19 nt, Artificial Sequence
  Description of Artificial Sequence: Synthetic oligonucleotide
gcuugucugagguaagucc

SEQ ID NO: 1496076 - RNA, 19 nt, Artificial Sequence
  Description of Artificial Sequence: Synthetic oligonucleotide
cacuuauagaagugccggc

SEQ ID NO: 1496077 - RNA, 19 nt, Artificial Sequence
  Description of Artificial Sequence: Synthetic oligonucleotide
cuccuaaguacugagauaa

SEQ ID NO: 1496078 - RNA, 19 nt, Artificial Sequence
  Description of Artificial Sequence: Synthetic oligonucleotide
uugcggacaguaagcagca

SEQ ID NO: 1496079 - RNA, 19 nt, Artificial Sequence
  Description of Artificial Sequence: Synthetic oligonucleotide
cacuuguugccuuagaacu

SEQ ID NO: 1496080 - RNA, 19 nt, Artificial Sequence
  Description of Artificial Sequence: Synthetic oligonucleotide
guugccuuagaacuugaaa

SEQ ID NO: 1496081 - RNA, 19 nt, Artificial Sequence
  Description of Artificial Sequence: Synthetic oligonucleotide
accauugcacuuauagaag

SEQ ID NO: 1496082 - RNA, 19 nt, Artificial Sequence
  Description of Artificial Sequence: Synthetic oligonucleotide
agcugcccgacauucuggg

SEQ ID NO: 1496083 - RNA, 19 nt, Artificial Sequence
  Description of Artificial Sequence: Synthetic oligonucleotide
caguaagcagcacagccuc

SEQ ID NO: 1496084 - RNA, 19 nt, Artificial Sequence
  Description of Artificial Sequence: Synthetic oligonucleotide
agaguuacuuucaccagca

SEQ ID NO: 1496085 - RNA, 19 nt, Artificial Sequence
  Description of Artificial Sequence: Synthetic oligonucleotide
gccucauccaauuucuuug

SEQ ID NO: 1496086 - RNA, 19 nt, Artificial Sequence
  Description of Artificial Sequence: Synthetic oligonucleotide
auccaguaugucuguugac

SEQ ID NO: 1496087 - RNA, 19 nt, Artificial Sequence
  Description of Artificial Sequence: Synthetic oligonucleotide
ccuaaguacugagauaagg

SEQ ID NO: 1496088 - RNA, 19 nt, Artificial Sequence
  Description of Artificial Sequence: Synthetic oligonucleotide
uccuaaguacugagauaag

SEQ ID NO: 1496089 - RNA, 19 nt, Artificial Sequence
  Description of Artificial Sequence: Synthetic oligonucleotide
uguccauccuguugagggc

SEQ ID NO: 1496090 - RNA, 19 nt, Artificial Sequence
  Description of Artificial Sequence: Synthetic oligonucleotide
aaccgcuugucugagguaa

SEQ ID NO: 1496091 - RNA, 19 nt, Artificial Sequence
  Description of Artificial Sequence: Synthetic oligonucleotide
ucauaaccuuccacaaguc

SEQ ID NO: 1496092 - RNA, 19 nt, Artificial Sequence
  Description of Artificial Sequence: Synthetic oligonucleotide
caucucauagcccauggaa

SEQ ID NO: 1496093 - RNA, 19 nt, Artificial Sequence
  Description of Artificial Sequence: Synthetic oligonucleotide
uccgugugacagcaggcug

SEQ ID NO: 1496094 - RNA, 19 nt, Artificial Sequence
  Description of Artificial Sequence: Synthetic oligonucleotide
ugccuuugaagauccagua

SEQ ID NO: 1496095 - RNA, 19 nt, Artificial Sequence
  Description of Artificial Sequence: Synthetic oligonucleotide
cugcuugcggacaguaagc

SEQ ID NO: 1496096 - RNA, 19 nt, Artificial Sequence
  Description of Artificial Sequence: Synthetic oligonucleotide
ucgaacaggcucuggcaug

SEQ ID NO: 1496097 - RNA, 19 nt, Artificial Sequence
  Description of Artificial Sequence: Synthetic oligonucleotide
agucuuuugcuuguagccu

SEQ ID NO: 1496098 - RNA, 19 nt, Artificial Sequence
  Description of Artificial Sequence: Synthetic oligonucleotide
cugguuggggcccugcuug

SEQ ID NO: 1496099 - RNA, 19 nt, Artificial Sequence
  Description of Artificial Sequence: Synthetic oligonucleotide
ccuugugaaaaucgcaggc

SEQ ID NO: 1496100 - RNA, 19 nt, Artificial Sequence
  Description of Artificial Sequence: Synthetic oligonucleotide
cugaggaaccagcucuuag

SEQ ID NO: 1496101 - RNA, 19 nt, Artificial Sequence
  Description of Artificial Sequence: Synthetic oligonucleotide
gucuuuugcuuguagccuc

SEQ ID NO: 1496102 - RNA, 19 nt, Artificial Sequence
  Description of Artificial Sequence: Synthetic oligonucleotide
cccugugcagcuaagguag

SEQ ID NO: 1496103 - RNA, 19 nt, Artificial Sequence
  Description of Artificial Sequence: Synthetic oligonucleotide
ugaguugcaucaguaccga

SEQ ID NO: 1496104 - RNA, 19 nt, Artificial Sequence
  Description of Artificial Sequence: Synthetic oligonucleotide
cacaauugcagaucacaga

SEQ ID NO: 1496105 - RNA, 19 nt, Artificial Sequence
  Description of Artificial Sequence: Synthetic oligonucleotide
uuugaagauccaguauguc

SEQ ID NO: 1496106 - RNA, 19 nt, Artificial Sequence
  Description of Artificial Sequence: Synthetic oligonucleotide
uccagcaccgaaucaggaa

SEQ ID NO: 1496107 - RNA, 19 nt, Artificial Sequence
  Description of Artificial Sequence: Synthetic oligonucleotide
aguugcaaccaccaccauu

SEQ ID NO: 1496108 - RNA, 19 nt, Artificial Sequence
  Description of Artificial Sequence: Synthetic oligonucleotide
uauagaagugccggcccug

SEQ ID NO: 1496109 - RNA, 19 nt, Artificial Sequence
  Description of Artificial Sequence: Synthetic oligonucleotide
uuucaccagcaggaguggg

SEQ ID NO: 1496110 - RNA, 19 nt, Artificial Sequence
  Description of Artificial Sequence: Synthetic oligonucleotide
cuggcuggccugcagguag

SEQ ID NO: 1496111 - RNA, 19 nt, Artificial Sequence
  Description of Artificial Sequence: Synthetic oligonucleotide
auggaacacacagugcugu

SEQ ID NO: 1496112 - RNA, 19 nt, Artificial Sequence
  Description of Artificial Sequence: Synthetic oligonucleotide
gagcuugagaucagcuucc

SEQ ID NO: 1496113 - RNA, 19 nt, Artificial Sequence
  Description of Artificial Sequence: Synthetic oligonucleotide
cauccaauuucuuuguccu

SEQ ID NO: 1496114 - RNA, 19 nt, Artificial Sequence
  Description of Artificial Sequence: Synthetic oligonucleotide
ugaaaaucgcaggcccaag

SEQ ID NO: 1496115 - RNA, 19 nt, Artificial Sequence
  Description of Artificial Sequence: Synthetic oligonucleotide
accccauggagcugccugg

SEQ ID NO: 1496116 - RNA, 19 nt, Artificial Sequence
  Description of Artificial Sequence: Synthetic oligonucleotide
gcaaccaccaccauugcac

SEQ ID NO: 1496117 - RNA, 19 nt, Artificial Sequence
  Description of Artificial Sequence: Synthetic oligonucleotide
aguccgugugacagcaggc

SEQ ID NO: 1496118 - RNA, 19 nt, Artificial Sequence
  Description of Artificial Sequence: Synthetic oligonucleotide
ggcaaaggcuacauuuucg

SEQ ID NO: 1496119 - RNA, 19 nt, Artificial Sequence
  Description of Artificial Sequence: Synthetic oligonucleotide
gccauguucucaucuaccc

SEQ ID NO: 1496120 - RNA, 19 nt, Artificial Sequence
  Description of Artificial Sequence: Synthetic oligonucleotide
auagaagugccggcccugg

SEQ ID NO: 1496121 - RNA, 19 nt, Artificial Sequence
  Description of Artificial Sequence: Synthetic oligonucleotide
ugcugacugcuguccaucc

SEQ ID NO: 1496122 - RNA, 19 nt, Artificial Sequence
  Description of Artificial Sequence: Synthetic oligonucleotide
cacagaugagcuugagauc

SEQ ID NO: 1496123 - RNA, 19 nt, Artificial Sequence
  Description of Artificial Sequence: Synthetic oligonucleotide
uccaccuaugcagccaaca

SEQ ID NO: 1496124 - RNA, 19 nt, Artificial Sequence
  Description of Artificial Sequence: Synthetic oligonucleotide
aagaagccacacuguugcu

SEQ ID NO: 1496125 - RNA, 19 nt, Artificial Sequence
  Description of Artificial Sequence: Synthetic oligonucleotide
ccacaauugcagaucacag

SEQ ID NO: 1496126 - RNA, 19 nt, Artificial Sequence
  Description of Artificial Sequence: Synthetic oligonucleotide
gaguuacuuucaccagcag

SEQ ID NO: 1496127 - RNA, 19 nt, Artificial Sequence
  Description of Artificial Sequence: Synthetic oligonucleotide
acauucugggaacccugug

SEQ ID NO: 1496128 - RNA, 19 nt, Artificial Sequence
  Description of Artificial Sequence: Synthetic oligonucleotide
cacguugcugccuaaagcu

SEQ ID NO: 1496129 - RNA, 19 nt, Artificial Sequence
  Description of Artificial Sequence: Synthetic oligonucleotide
guuggggcccugcuugcgg

SEQ ID NO: 1496130 - RNA, 19 nt, Artificial Sequence
  Description of Artificial Sequence: Synthetic oligonucleotide
ggauguacuuccaucacca

SEQ ID NO: 1496131 - RNA, 19 nt, Artificial Sequence
  Description of Artificial Sequence: Synthetic oligonucleotide
ccugcuugcggacaguaag

SEQ ID NO: 1496132 - RNA, 19 nt, Artificial Sequence
  Description of Artificial Sequence: Synthetic oligonucleotide
uaugcugacugcuguccau

SEQ ID NO: 1496133 - RNA, 19 nt, Artificial Sequence
  Description of Artificial Sequence: Synthetic oligonucleotide
agguagaacccaccacucu

SEQ ID NO: 1496134 - RNA, 19 nt, Artificial Sequence
  Description of Artificial Sequence: Synthetic oligonucleotide
ugcucucguggcuuggcac

SEQ ID NO: 1496135 - RNA, 19 nt, Artificial Sequence
  Description of Artificial Sequence: Synthetic oligonucleotide
guggugggaagguuucagc

SEQ ID NO: 1496136 - RNA, 19 nt, Artificial Sequence
  Description of Artificial Sequence: Synthetic oligonucleotide
cuguagauccugcaucuga

SEQ ID NO: 1496137 - RNA, 19 nt, Artificial Sequence
  Description of Artificial Sequence: Synthetic oligonucleotide
accgaaucaggaaaccaca

SEQ ID NO: 1496138 - RNA, 19 nt, Artificial Sequence
  Description of Artificial Sequence: Synthetic oligonucleotide
aguugcaucaguaccgaua

SEQ ID NO: 1496139 - RNA, 19 nt, Artificial Sequence
  Description of Artificial Sequence: Synthetic oligonucleotide
guaugucuguugaccagag

SEQ ID NO: 1496140 - RNA, 19 nt, Artificial Sequence
  Description of Artificial Sequence: Synthetic oligonucleotide
acaucucauagcccaugga

SEQ ID NO: 1496141 - RNA, 19 nt, Artificial Sequence
  Description of Artificial Sequence: Synthetic oligonucleotide
gauaaggccucauccaauu

SEQ ID NO: 1496142 - RNA, 19 nt, Artificial Sequence
  Description of Artificial Sequence: Synthetic oligonucleotide
uggaacuggcguccuuugu

SEQ ID NO: 1496143 - RNA, 19 nt, Artificial Sequence
  Description of Artificial Sequence: Synthetic oligonucleotide
cuuucaccagcaggagugg

SEQ ID NO: 1496144 - RNA, 19 nt, Artificial Sequence
  Description of Artificial Sequence: Synthetic oligonucleotide
caggauguacuuccaucac

SEQ ID NO: 1496145 - RNA, 19 nt, Artificial Sequence
  Description of Artificial Sequence: Synthetic oligonucleotide
ugcagaucacagaguuacu

SEQ ID NO: 1496146 - RNA, 19 nt, Artificial Sequence
  Description of Artificial Sequence: Synthetic oligonucleotide
ucugcacaguccgugugac

SEQ ID NO: 1496147 - RNA, 19 nt, Artificial Sequence
  Description of Artificial Sequence: Synthetic oligonucleotide
ugguuucaauguguucugc

SEQ ID NO: 1496148 - RNA, 19 nt, Artificial Sequence
  Description of Artificial Sequence: Synthetic oligonucleotide
gcugacaaauggaacacac

SEQ ID NO: 1496149 - RNA, 19 nt, Artificial Sequence
  Description of Artificial Sequence: Synthetic oligonucleotide
gcugccaaacccauccacg

SEQ ID NO: 1496150 - RNA, 19 nt, Artificial Sequence
  Description of Artificial Sequence: Synthetic oligonucleotide
ccauugccuuugaagaucc

SEQ ID NO: 1496151 - RNA, 19 nt, Artificial Sequence
  Description of Artificial Sequence: Synthetic oligonucleotide
acccugugcagcuaaggua

SEQ ID NO: 1496152 - RNA, 19 nt, Artificial Sequence
  Description of Artificial Sequence: Synthetic oligonucleotide
uugcucucguggcuuggca

SEQ ID NO: 1496153 - RNA, 19 nt, Artificial Sequence
  Description of Artificial Sequence: Synthetic oligonucleotide
cagaaagaaguugcaacca

SEQ ID NO: 1496154 - RNA, 19 nt, Artificial Sequence
  Description of Artificial Sequence: Synthetic oligonucleotide
ugcccgacauucugggaac

SEQ ID NO: 1496155 - RNA, 19 nt, Artificial Sequence
  Description of Artificial Sequence: Synthetic oligonucleotide
cuuccacaagucccaugcc

SEQ ID NO: 1496156 - RNA, 19 nt, Artificial Sequence
  Description of Artificial Sequence: Synthetic oligonucleotide
agaagugccggcccugguu

SEQ ID NO: 1496157 - RNA, 19 nt, Artificial Sequence
  Description of Artificial Sequence: Synthetic oligonucleotide
acccauccacguugcugcc

SEQ ID NO: 1496158 - RNA, 19 nt, Artificial Sequence
  Description of Artificial Sequence: Synthetic oligonucleotide
gagaggcuaugcugacugc

SEQ ID NO: 1496159 - RNA, 19 nt, Artificial Sequence
  Description of Artificial Sequence: Synthetic oligonucleotide
guccauccuguugagggcc

SEQ ID NO: 1496160 - RNA, 19 nt, Artificial Sequence
  Description of Artificial Sequence: Synthetic oligonucleotide
cuucuccuaaguacugaga

SEQ ID NO: 1496161 - RNA, 19 nt, Artificial Sequence
  Description of Artificial Sequence: Synthetic oligonucleotide
ccuucuccuaaguacugag

SEQ ID NO: 1496162 - RNA, 19 nt, Artificial Sequence
  Description of Artificial Sequence: Synthetic oligonucleotide
uguugaccagagguugaga

SEQ ID NO: 1496163 - RNA, 19 nt, Artificial Sequence
  Description of Artificial Sequence: Synthetic oligonucleotide
cagcugcccgacauucugg

SEQ ID NO: 1496164 - RNA, 19 nt, Artificial Sequence
  Description of Artificial Sequence: Synthetic oligonucleotide
cuguugaccagagguugag

SEQ ID NO: 1496165 - RNA, 19 nt, Artificial Sequence
  Description of Artificial Sequence: Synthetic oligonucleotide
cugcuucaaugaaaaccug

SEQ ID NO: 1496166 - RNA, 19 nt, Artificial Sequence
  Description of Artificial Sequence: Synthetic oligonucleotide
gguggcaaaggcuacauuu

SEQ ID NO: 1496167 - RNA, 19 nt, Artificial Sequence
  Description of Artificial Sequence: Synthetic oligonucleotide
gcaugaguugcaucaguac

SEQ ID NO: 1496168 - RNA, 19 nt, Artificial Sequence
  Description of Artificial Sequence: Synthetic oligonucleotide
ggcgaguguguccaggcug

SEQ ID NO: 1496169 - RNA, 19 nt, Artificial Sequence
  Description of Artificial Sequence: Synthetic oligonucleotide
guagaacccaccacucuuc

SEQ ID NO: 1496170 - RNA, 19 nt, Artificial Sequence
  Description of Artificial Sequence: Synthetic oligonucleotide
cugugggcacuuucgaaca

SEQ ID NO: 1496171 - RNA, 19 nt, Artificial Sequence
  Description of Artificial Sequence: Synthetic oligonucleotide
cacgcuuaaacuucaacuu

SEQ ID NO: 1496172 - RNA, 19 nt, Artificial Sequence
  Description of Artificial Sequence: Synthetic oligonucleotide
ggcacagauguggaacugg

SEQ ID NO: 1496173 - RNA, 19 nt, Artificial Sequence
  Description of Artificial Sequence: Synthetic oligonucleotide
cagaugagcuugagaucag

SEQ ID NO: 1496174 - RNA, 19 nt, Artificial Sequence
  Description of Artificial Sequence: Synthetic oligonucleotide
uggaacacacagugcuguc

SEQ ID NO: 1496175 - RNA, 19 nt, Artificial Sequence
  Description of Artificial Sequence: Synthetic oligonucleotide
cuggcguccuuuguugggc

SEQ ID NO: 1496176 - RNA, 19 nt, Artificial Sequence
  Description of Artificial Sequence: Synthetic oligonucleotide
accaaggcugccaaaccca

SEQ ID NO: 1496177 - RNA, 19 nt, Artificial Sequence
  Description of Artificial Sequence: Synthetic oligonucleotide
gggacaaaaggggcgagug

SEQ ID NO: 1496178 - RNA, 19 nt, Artificial Sequence
  Description of Artificial Sequence: Synthetic oligonucleotide
ggugggaagguuucagcca

SEQ ID NO: 1496179 - RNA, 19 nt, Artificial Sequence
  Description of Artificial Sequence: Synthetic oligonucleotide
auaaggccucauccaauuu

SEQ ID NO: 1496180 - RNA, 19 nt, Artificial Sequence
  Description of Artificial Sequence: Synthetic oligonucleotide
aggaaccgcuugucugagg

SEQ ID NO: 1496181 - RNA, 19 nt, Artificial Sequence
  Description of Artificial Sequence: Synthetic oligonucleotide
uguaccccauggagcugcc

SEQ ID NO: 1496182 - RNA, 19 nt, Artificial Sequence
  Description of Artificial Sequence: Synthetic oligonucleotide
ucgcaggcccaagauuucc

SEQ ID NO: 1496183 - RNA, 19 nt, Artificial Sequence
  Description of Artificial Sequence: Synthetic oligonucleotide
uccauccuguugagggccu

SEQ ID NO: 1496184 - RNA, 19 nt, Artificial Sequence
  Description of Artificial Sequence: Synthetic oligonucleotide
cggacaguaagcagcacag

SEQ ID NO: 1496185 - RNA, 19 nt, Artificial Sequence
  Description of Artificial Sequence: Synthetic oligonucleotide
gucccacauacauccgggc

SEQ ID NO: 1496186 - RNA, 19 nt, Artificial Sequence
  Description of Artificial Sequence: Synthetic oligonucleotide
uggcguccuuuguugggcc

SEQ ID NO: 1496187 - RNA, 19 nt, Artificial Sequence
  Description of Artificial Sequence: Synthetic oligonucleotide
gggaccuugugaaaaucgc

SEQ ID NO: 1496188 - RNA, 19 nt, Artificial Sequence
  Description of Artificial Sequence: Synthetic oligonucleotide
acaaaaggggcgagugugu

SEQ ID NO: 1496189 - RNA, 19 nt, Artificial Sequence
  Description of Artificial Sequence: Synthetic oligonucleotide
gaggaaccgcuugucugag

SEQ ID NO: 1496190 - RNA, 19 nt, Artificial Sequence
  Description of Artificial Sequence: Synthetic oligonucleotide
acgguggagcugcaagacu

SEQ ID NO: 1496191 - RNA, 19 nt, Artificial Sequence
  Description of Artificial Sequence: Synthetic oligonucleotide
uugcugccuaaagcugacg

SEQ ID NO: 1496192 - RNA, 19 nt, Artificial Sequence
  Description of Artificial Sequence: Synthetic oligonucleotide
aaccaccaccauugcacuu

SEQ ID NO: 1496193 - RNA, 19 nt, Artificial Sequence
  Description of Artificial Sequence: Synthetic oligonucleotide
gguaagucccacauacauc

SEQ ID NO: 1496194 - RNA, 19 nt, Artificial Sequence
  Description of Artificial Sequence: Synthetic oligonucleotide
cugcccgacauucugggaa

SEQ ID NO: 1496195 - RNA, 19 nt, Artificial Sequence
  Description of Artificial Sequence: Synthetic oligonucleotide
ccacguugcugccuaaagc

SEQ ID NO: 1496196 - RNA, 19 nt, Artificial Sequence
  Description of Artificial Sequence: Synthetic oligonucleotide
cacgguggagcugcaagac

SEQ ID NO: 1496197 - RNA, 19 nt, Artificial Sequence
  Description of Artificial Sequence: Synthetic oligonucleotide
cauccuguugagggccugg

SEQ ID NO: 1496198 - RNA, 19 nt, Artificial Sequence
  Description of Artificial Sequence: Synthetic oligonucleotide
gcagcuaagguagaaccca

SEQ ID NO: 1496199 - RNA, 19 nt, Artificial Sequence
  Description of Artificial Sequence: Synthetic oligonucleotide
cucuggcauggcuggguag

SEQ ID NO: 1496200 - RNA, 19 nt, Artificial Sequence
  Description of Artificial Sequence: Synthetic oligonucleotide
uucugcacuuguugccuua

SEQ ID NO: 1496201 - RNA, 19 nt, Artificial Sequence
  Description of Artificial Sequence: Synthetic oligonucleotide
gccacaauugcagaucaca

SEQ ID NO: 1496202 - RNA, 19 nt, Artificial Sequence
  Description of Artificial Sequence: Synthetic oligonucleotide
caccuaugcagccaacaaa

SEQ ID NO: 1496203 - RNA, 19 nt, Artificial Sequence
  Description of Artificial Sequence: Synthetic oligonucleotide
cuaugcugacugcugucca

SEQ ID NO: 1496204 - RNA, 19 nt, Artificial Sequence
  Description of Artificial Sequence: Synthetic oligonucleotide
ucguggcuuggcacagaug

SEQ ID NO: 1496205 - RNA, 19 nt, Artificial Sequence
  Description of Artificial Sequence: Synthetic oligonucleotide
guugcugccuaaagcugac

SEQ ID NO: 1496206 - RNA, 19 nt, Artificial Sequence
  Description of Artificial Sequence: Synthetic oligonucleotide
gugaaaaucgcaggcccaa

SEQ ID NO: 1496207 - RNA, 19 nt, Artificial Sequence
  Description of Artificial Sequence: Synthetic oligonucleotide
gcgaguguguccaggcugg

SEQ ID NO: 1496208 - RNA, 19 nt, Artificial Sequence
  Description of Artificial Sequence: Synthetic oligonucleotide
ggaaccgcuugucugaggu

SEQ ID NO: 1496209 - RNA, 19 nt, Artificial Sequence
  Description of Artificial Sequence: Synthetic oligonucleotide
ccaaacccauccacguugc

SEQ ID NO: 1496210 - RNA, 19 nt, Artificial Sequence
  Description of Artificial Sequence: Synthetic oligonucleotide
ugcugucagcccacagaaa

SEQ ID NO: 1496211 - RNA, 19 nt, Artificial Sequence
  Description of Artificial Sequence: Synthetic oligonucleotide
aagauccaguaugucuguu

SEQ ID NO: 1496212 - RNA, 19 nt, Artificial Sequence
  Description of Artificial Sequence: Synthetic oligonucleotide
gguggcugacaaauggaac

SEQ ID NO: 1496213 - RNA, 19 nt, Artificial Sequence
  Description of Artificial Sequence: Synthetic oligonucleotide
gcggacaguaagcagcaca

SEQ ID NO: 1496214 - RNA, 19 nt, Artificial Sequence
  Description of Artificial Sequence: Synthetic oligonucleotide
aaguugcaaccaccaccau

SEQ ID NO: 1496215 - RNA, 19 nt, Artificial Sequence
  Description of Artificial Sequence: Synthetic oligonucleotide
cugacguguaccccaugga

SEQ ID NO: 1496216 - RNA, 19 nt, Artificial Sequence
  Description of Artificial Sequence: Synthetic oligonucleotide
aucgcaggcccaagauuuc

SEQ ID NO: 1496217 - RNA, 19 nt, Artificial Sequence
  Description of Artificial Sequence: Synthetic oligonucleotide
ccgaaucaggaaaccacac

SEQ ID NO: 1496218 - RNA, 19 nt, Artificial Sequence
  Description of Artificial Sequence: Synthetic oligonucleotide
gggcccaucuuucugcaca

SEQ ID NO: 1496219 - RNA, 19 nt, Artificial Sequence
  Description of Artificial Sequence: Synthetic oligonucleotide
cacaguccgugugacagca

SEQ ID NO: 1496220 - RNA, 19 nt, Artificial Sequence
  Description of Artificial Sequence: Synthetic oligonucleotide
guugcucucguggcuuggc

SEQ ID NO: 1496221 - RNA, 19 nt, Artificial Sequence
  Description of Artificial Sequence: Synthetic oligonucleotide
gcacagauguggaacuggc

SEQ ID NO: 1496222 - RNA, 19 nt, Artificial Sequence
  Description of Artificial Sequence: Synthetic oligonucleotide
ccacgcuuaaacuucaacu

SEQ ID NO: 1496223 - RNA, 19 nt, Artificial Sequence
  Description of Artificial Sequence: Synthetic oligonucleotide
caauguguucugcaugagu

SEQ ID NO: 1496224 - RNA, 19 nt, Artificial Sequence
  Description of Artificial Sequence: Synthetic oligonucleotide
agagguugagagaggcuau

SEQ ID NO: 1496225 - RNA, 19 nt, Artificial Sequence
  Description of Artificial Sequence: Synthetic oligonucleotide
cucggcacggagguccggc

SEQ ID NO: 1496226 - RNA, 19 nt, Artificial Sequence
  Description of Artificial Sequence: Synthetic oligonucleotide
aggggcgaguguguccagg

SEQ ID NO: 1496227 - RNA, 19 nt, Artificial Sequence
  Description of Artificial Sequence: Synthetic oligonucleotide
gcuuguagccucuggucuc

SEQ ID NO: 1496228 - RNA, 19 nt, Artificial Sequence
  Description of Artificial Sequence: Synthetic oligonucleotide
guacuuccaucaccaucac

SEQ ID NO: 1496229 - RNA, 19 nt, Artificial Sequence
  Description of Artificial Sequence: Synthetic oligonucleotide
cagcucuuagucuuuugcu

SEQ ID NO: 1496230 - RNA, 19 nt, Artificial Sequence
  Description of Artificial Sequence: Synthetic oligonucleotide
gugggaagguuucagccau

SEQ ID NO: 1496231 - RNA, 19 nt, Artificial Sequence
  Description of Artificial Sequence: Synthetic oligonucleotide
ggaccuugugaaaaucgca

SEQ ID NO: 1496232 - RNA, 19 nt, Artificial Sequence
  Description of Artificial Sequence: Synthetic oligonucleotide
cauacauccgggcuuugau

SEQ ID NO: 1496233 - RNA, 19 nt, Artificial Sequence
  Description of Artificial Sequence: Synthetic oligonucleotide
aggcaggauguacuuccau

SEQ ID NO: 1496234 - RNA, 19 nt, Artificial Sequence
  Description of Artificial Sequence: Synthetic oligonucleotide
cauccaccuaugcagccaa

SEQ ID NO: 1496235 - RNA, 19 nt, Artificial Sequence
  Description of Artificial Sequence: Synthetic oligonucleotide
agugccggcccugguuggg

SEQ ID NO: 1496236 - RNA, 19 nt, Artificial Sequence
  Description of Artificial Sequence: Synthetic oligonucleotide
cgcuuaaacuucaacuuca

SEQ ID NO: 1496237 - RNA, 19 nt, Artificial Sequence
  Description of Artificial Sequence: Synthetic oligonucleotide
cucucguggcuuggcacag

SEQ ID NO: 1496238 - RNA, 19 nt, Artificial Sequence
  Description of Artificial Sequence: Synthetic oligonucleotide
ggggcgaguguguccaggc

SEQ ID NO: 1496239 - RNA, 19 nt, Artificial Sequence
  Description of Artificial Sequence: Synthetic oligonucleotide
auugcagaucacagaguua

SEQ ID NO: 1496240 - RNA, 19 nt, Artificial Sequence
  Description of Artificial Sequence: Synthetic oligonucleotide
gccauugccuuugaagauc

SEQ ID NO: 1496241 - RNA, 19 nt, Artificial Sequence
  Description of Artificial Sequence: Synthetic oligonucleotide
ucggcacggagguccggcu

SEQ ID NO: 1496242 - RNA, 19 nt, Artificial Sequence
  Description of Artificial Sequence: Synthetic oligonucleotide
uacugagauaaggccucau

SEQ ID NO: 1496243 - RNA, 19 nt, Artificial Sequence
  Description of Artificial Sequence: Synthetic oligonucleotide
gucccuucuccuaaguacu

SEQ ID NO: 1496244 - RNA, 19 nt, Artificial Sequence
  Description of Artificial Sequence: Synthetic oligonucleotide
cucccacgcuuaaacuuca

SEQ ID NO: 1496245 - RNA, 19 nt, Artificial Sequence
  Description of Artificial Sequence: Synthetic oligonucleotide
gguagaacccaccacucuu

SEQ ID NO: 1496246 - RNA, 19 nt, Artificial Sequence
  Description of Artificial Sequence: Synthetic oligonucleotide
ugcccucacagaugagcuu

SEQ ID NO: 1496247 - RNA, 19 nt, Artificial Sequence
  Description of Artificial Sequence: Synthetic oligonucleotide
ucccacgcuuaaacuucaa

SEQ ID NO: 1496248 - RNA, 19 nt, Artificial Sequence
  Description of Artificial Sequence: Synthetic oligonucleotide
ccagcaccgaaucaggaaa

SEQ ID NO: 1496249 - RNA, 19 nt, Artificial Sequence
  Description of Artificial Sequence: Synthetic oligonucleotide
gaucagcuuccagcucggc

SEQ ID NO: 1496250 - RNA, 19 nt, Artificial Sequence
  Description of Artificial Sequence: Synthetic oligonucleotide
aagcugacguguaccccau

SEQ ID NO: 1496251 - RNA, 19 nt, Artificial Sequence
  Description of Artificial Sequence: Synthetic oligonucleotide
gcucucguggcuuggcaca

SEQ ID NO: 1496252 - RNA, 19 nt, Artificial Sequence
  Description of Artificial Sequence: Synthetic oligonucleotide
gcucccacgcuuaaacuuc

SEQ ID NO: 1496253 - RNA, 19 nt, Artificial Sequence
  Description of Artificial Sequence: Synthetic oligonucleotide
cccacgcuuaaacuucaac

SEQ ID NO: 1496254 - RNA, 19 nt, Artificial Sequence
  Description of Artificial Sequence: Synthetic oligonucleotide
ugggcccaucuuucugcac

SEQ ID NO: 1496255 - RNA, 19 nt, Artificial Sequence
  Description of Artificial Sequence: Synthetic oligonucleotide
uccgggcuuugaugguuuc

SEQ ID NO: 1496256 - RNA, 19 nt, Artificial Sequence
  Description of Artificial Sequence: Synthetic oligonucleotide
ggcuaugcugacugcuguc

SEQ ID NO: 1496257 - RNA, 19 nt, Artificial Sequence
  Description of Artificial Sequence: Synthetic oligonucleotide
cuugaaacuuauccuucuu

SEQ ID NO: 1496258 - RNA, 19 nt, Artificial Sequence
  Description of Artificial Sequence: Synthetic oligonucleotide
ccacaagucccaugcccag

SEQ ID NO: 1496259 - RNA, 19 nt, Artificial Sequence
  Description of Artificial Sequence: Synthetic oligonucleotide
caacuucaaccuguacaca

SEQ ID NO: 1496260 - RNA, 19 nt, Artificial Sequence
  Description of Artificial Sequence: Synthetic oligonucleotide
cacuuucgaacaggcucug

SEQ ID NO: 1496261 - RNA, 19 nt, Artificial Sequence
  Description of Artificial Sequence: Synthetic oligonucleotide
gaaccgcuugucugaggua

SEQ ID NO: 1496262 - RNA, 19 nt, Artificial Sequence
  Description of Artificial Sequence: Synthetic oligonucleotide
accgcuugucugagguaag

SEQ ID NO: 1496263 - RNA, 19 nt, Artificial Sequence
  Description of Artificial Sequence: Synthetic oligonucleotide
acccaccacucuucuuggu

SEQ ID NO: 1496264 - RNA, 19 nt, Artificial Sequence
  Description of Artificial Sequence: Synthetic oligonucleotide
auccaccuaugcagccaac

SEQ ID NO: 1496265 - RNA, 19 nt, Artificial Sequence
  Description of Artificial Sequence: Synthetic oligonucleotide
cggcuuggacaucucauag

SEQ ID NO: 1496266 - RNA, 19 nt, Artificial Sequence
  Description of Artificial Sequence: Synthetic oligonucleotide
ccauugcacuuauagaagu

SEQ ID NO: 1496267 - RNA, 19 nt, Artificial Sequence
  Description of Artificial Sequence: Synthetic oligonucleotide
guacugagauaaggccuca

SEQ ID NO: 1496268 - RNA, 19 nt, Artificial Sequence
  Description of Artificial Sequence: Synthetic oligonucleotide
cugagguaagucccacaua

SEQ ID NO: 1496269 - RNA, 19 nt, Artificial Sequence
  Description of Artificial Sequence: Synthetic oligonucleotide
gaaggcucccacgcuuaaa

SEQ ID NO: 1496270 - RNA, 19 nt, Artificial Sequence
  Description of Artificial Sequence: Synthetic oligonucleotide
caucgguucugagggacaa

SEQ ID NO: 1496271 - RNA, 19 nt, Artificial Sequence
  Description of Artificial Sequence: Synthetic oligonucleotide
ggcguccuuuguugggccc

SEQ ID NO: 1496272 - RNA, 19 nt, Artificial Sequence
  Description of Artificial Sequence: Synthetic oligonucleotide
ucucguggcuuggcacaga

SEQ ID NO: 1496273 - RNA, 19 nt, Artificial Sequence
  Description of Artificial Sequence: Synthetic oligonucleotide
ccauguucucaucuaccca

SEQ ID NO: 1496274 - RNA, 19 nt, Artificial Sequence
  Description of Artificial Sequence: Synthetic oligonucleotide
cauugccuuugaagaucca

SEQ ID NO: 1496275 - RNA, 19 nt, Artificial Sequence
  Description of Artificial Sequence: Synthetic oligonucleotide
gguuggggcccugcuugcg

SEQ ID NO: 1496276 - RNA, 19 nt, Artificial Sequence
  Description of Artificial Sequence: Synthetic oligonucleotide
cgaaucaggaaaccacaca

SEQ ID NO: 1496277 - RNA, 19 nt, Artificial Sequence
  Description of Artificial Sequence: Synthetic oligonucleotide
cguugcugccuaaagcuga

SEQ ID NO: 1496278 - RNA, 19 nt, Artificial Sequence
  Description of Artificial Sequence: Synthetic oligonucleotide
auccacguugcugccuaaa

SEQ ID NO: 1496279 - RNA, 19 nt, Artificial Sequence
  Description of Artificial Sequence: Synthetic oligonucleotide
gugccggcccugguugggg

SEQ ID NO: 1496280 - RNA, 19 nt, Artificial Sequence
  Description of Artificial Sequence: Synthetic oligonucleotide
ggguggcugacaaauggaa

SEQ ID NO: 1496281 - RNA, 19 nt, Artificial Sequence
  Description of Artificial Sequence: Synthetic oligonucleotide
ggaacccugugcagcuaag

SEQ ID NO: 1496282 - RNA, 19 nt, Artificial Sequence
  Description of Artificial Sequence: Synthetic oligonucleotide
gcacuuucgaacaggcucu

SEQ ID NO: 1496283 - RNA, 19 nt, Artificial Sequence
  Description of Artificial Sequence: Synthetic oligonucleotide
gggaacccugugcagcuaa

SEQ ID NO: 1496284 - RNA, 19 nt, Artificial Sequence
  Description of Artificial Sequence: Synthetic oligonucleotide
auguggaacuggcguccuu

SEQ ID NO: 1496285 - RNA, 19 nt, Artificial Sequence
  Description of Artificial Sequence: Synthetic oligonucleotide
ugcggacaguaagcagcac

SEQ ID NO: 1496286 - RNA, 19 nt, Artificial Sequence
  Description of Artificial Sequence: Synthetic oligonucleotide
cugcaugaguugcaucagu

SEQ ID NO: 1496287 - RNA, 19 nt, Artificial Sequence
  Description of Artificial Sequence: Synthetic oligonucleotide
ggacaaaaggggcgagugu

SEQ ID NO: 1496288 - RNA, 19 nt, Artificial Sequence
  Description of Artificial Sequence: Synthetic oligonucleotide
guccgugugacagcaggcu

SEQ ID NO: 1496289 - RNA, 19 nt, Artificial Sequence
  Description of Artificial Sequence: Synthetic oligonucleotide
gggguggcugacaaaugga

SEQ ID NO: 1496290 - RNA, 19 nt, Artificial Sequence
  Description of Artificial Sequence: Synthetic oligonucleotide
ggcugacaaauggaacaca

SEQ ID NO: 1496291 - RNA, 19 nt, Artificial Sequence
  Description of Artificial Sequence: Synthetic oligonucleotide
gucccaugcccaggugccc

SEQ ID NO: 1496292 - RNA, 19 nt, Artificial Sequence
  Description of Artificial Sequence: Synthetic oligonucleotide
aggcuacauuuucgggguu

SEQ ID NO: 1496293 - RNA, 19 nt, Artificial Sequence
  Description of Artificial Sequence: Synthetic oligonucleotide
cugcacaguccgugugaca

SEQ ID NO: 1496294 - RNA, 19 nt, Artificial Sequence
  Description of Artificial Sequence: Synthetic oligonucleotide
ccacugcuucaaugaaaac

SEQ ID NO: 1496295 - RNA, 19 nt, Artificial Sequence
  Description of Artificial Sequence: Synthetic oligonucleotide
cggagguccggcuuggaca

SEQ ID NO: 1496296 - RNA, 19 nt, Artificial Sequence
  Description of Artificial Sequence: Synthetic oligonucleotide
ggcccaagauuuccuuuaa

SEQ ID NO: 1496297 - RNA, 19 nt, Artificial Sequence
  Description of Artificial Sequence: Synthetic oligonucleotide
aucgguucugagggacaaa

SEQ ID NO: 1496298 - RNA, 19 nt, Artificial Sequence
  Description of Artificial Sequence: Synthetic oligonucleotide
cccgacauucugggaaccc

SEQ ID NO: 1496299 - RNA, 19 nt, Artificial Sequence
  Description of Artificial Sequence: Synthetic oligonucleotide
ccaccuaugcagccaacaa

SEQ ID NO: 1496300 - RNA, 19 nt, Artificial Sequence
  Description of Artificial Sequence: Synthetic oligonucleotide
ccacgguggagcugcaaga

SEQ ID NO: 1496301 - RNA, 19 nt, Artificial Sequence
  Description of Artificial Sequence: Synthetic oligonucleotide
cagcccacagaaagaaguu

SEQ ID NO: 1496302 - RNA, 19 nt, Artificial Sequence
  Description of Artificial Sequence: Synthetic oligonucleotide
gccuuugaagauccaguau

SEQ ID NO: 1496303 - RNA, 19 nt, Artificial Sequence
  Description of Artificial Sequence: Synthetic oligonucleotide
cgugugacagcaggcugcc

SEQ ID NO: 1496304 - RNA, 19 nt, Artificial Sequence
  Description of Artificial Sequence: Synthetic oligonucleotide
cucguggcuuggcacagau

SEQ ID NO: 1496305 - RNA, 19 nt, Artificial Sequence
  Description of Artificial Sequence: Synthetic oligonucleotide
ugggaacccugugcagcua

SEQ ID NO: 1496306 - RNA, 19 nt, Artificial Sequence
  Description of Artificial Sequence: Synthetic oligonucleotide
ccacagaaagaaguugcaa

SEQ ID NO: 1496307 - RNA, 19 nt, Artificial Sequence
  Description of Artificial Sequence: Synthetic oligonucleotide
ccacacuguugcucucgug

SEQ ID NO: 1496308 - RNA, 19 nt, Artificial Sequence
  Description of Artificial Sequence: Synthetic oligonucleotide
ggaaggcucccacgcuuaa

SEQ ID NO: 1496309 - RNA, 19 nt, Artificial Sequence
  Description of Artificial Sequence: Synthetic oligonucleotide
gugugacagcaggcugccc

SEQ ID NO: 1496310 - RNA, 19 nt, Artificial Sequence
  Description of Artificial Sequence: Synthetic oligonucleotide
caacaaacuccaggggcau

SEQ ID NO: 1496311 - RNA, 19 nt, Artificial Sequence
  Description of Artificial Sequence: Synthetic oligonucleotide
gccuuagaacuugaaacuu

SEQ ID NO: 1496312 - RNA, 19 nt, Artificial Sequence
  Description of Artificial Sequence: Synthetic oligonucleotide
ccuaugcagccaacaaacu

SEQ ID NO: 1496313 - RNA, 19 nt, Artificial Sequence
  Description of Artificial Sequence: Synthetic oligonucleotide
ccauccacguugcugccua

SEQ ID NO: 1496314 - RNA, 19 nt, Artificial Sequence
  Description of Artificial Sequence: Synthetic oligonucleotide
ggccacaauugcagaucac

SEQ ID NO: 1496315 - RNA, 19 nt, Artificial Sequence
  Description of Artificial Sequence: Synthetic oligonucleotide
ccggcuuggacaucucaua

SEQ ID NO: 1496316 - RNA, 19 nt, Artificial Sequence
  Description of Artificial Sequence: Synthetic oligonucleotide
cauccacguugcugccuaa

SEQ ID NO: 1496317 - RNA, 19 nt, Artificial Sequence
  Description of Artificial Sequence: Synthetic oligonucleotide
gccggcccugguuggggcc

SEQ ID NO: 1496318 - RNA, 19 nt, Artificial Sequence
  Description of Artificial Sequence: Synthetic oligonucleotide
gcguccuuuguugggccca

SEQ ID NO: 1496319 - RNA, 19 nt, Artificial Sequence
  Description of Artificial Sequence: Synthetic oligonucleotide
gcccgacauucugggaacc

SEQ ID NO: 1496320 - RNA, 19 nt, Artificial Sequence
  Description of Artificial Sequence: Synthetic oligonucleotide
cgcuugucugagguaaguc

SEQ ID NO: 1496321 - RNA, 19 nt, Artificial Sequence
  Description of Artificial Sequence: Synthetic oligonucleotide
ggggaaggcucccacgcuu

SEQ ID NO: 1496322 - RNA, 19 nt, Artificial Sequence
  Description of Artificial Sequence: Synthetic oligonucleotide
gggaaggcucccacgcuua

SEQ ID NO: 1496323 - RNA, 19 nt, Artificial Sequence
  Description of Artificial Sequence: Synthetic oligonucleotide
cccuucuccuaaguacuga

SEQ ID NO: 1496324 - RNA, 19 nt, Artificial Sequence
  Description of Artificial Sequence: Synthetic oligonucleotide
ggcuacauuuucgggguuu

SEQ ID NO: 1496325 - RNA, 19 nt, Artificial Sequence
  Description of Artificial Sequence: Synthetic oligonucleotide
gcuacauuuucgggguuuu

SEQ ID NO: 1496326 - RNA, 19 nt, Artificial Sequence
  Description of Artificial Sequence: Synthetic oligonucleotide
cauccgggcuuugaugguu

SEQ ID NO: 1496327 - RNA, 19 nt, Artificial Sequence
  Description of Artificial Sequence: Synthetic oligonucleotide
ccagagguugagagaggcu

SEQ ID NO: 1496328 - RNA, 19 nt, Artificial Sequence
  Description of Artificial Sequence: Synthetic oligonucleotide
caccaccauugcacuuaua

SEQ ID NO: 1496329 - RNA, 19 nt, Artificial Sequence
  Description of Artificial Sequence: Synthetic oligonucleotide
gcucggcacggagguccgg

SEQ ID NO: 1496330 - RNA, 19 nt, Artificial Sequence
  Description of Artificial Sequence: Synthetic oligonucleotide
ccgacauucugggaacccu

SEQ ID NO: 1496331 - RNA, 19 nt, Artificial Sequence
  Description of Artificial Sequence: Synthetic oligonucleotide
gguccggcuuggacaucuc

SEQ ID NO: 1496332 - RNA, 19 nt, Artificial Sequence
  Description of Artificial Sequence: Synthetic oligonucleotide
cguguaccccauggagcug

SEQ ID NO: 1496333 - RNA, 19 nt, Artificial Sequence
  Description of Artificial Sequence: Synthetic oligonucleotide
ccgcuugucugagguaagu

SEQ ID NO: 1496334 - RNA, 19 nt, Artificial Sequence
  Description of Artificial Sequence: Synthetic oligonucleotide
cguccuuuguugggcccau

SEQ ID NO: 1496335 - RNA, 19 nt, Artificial Sequence
  Description of Artificial Sequence: Synthetic oligonucleotide
cggcacggagguccggcuu

SEQ ID NO: 1496336 - RNA, 19 nt, Artificial Sequence
  Description of Artificial Sequence: Synthetic oligonucleotide
aaauagauuaaucaacugg

SEQ ID NO: 1496337 - RNA, 19 nt, Artificial Sequence
  Description of Artificial Sequence: Synthetic oligonucleotide
aagaauuugaucuugccac

SEQ ID NO: 1496338 - RNA, 19 nt, Artificial Sequence
  Description of Artificial Sequence: Synthetic oligonucleotide
uauugaaacaccucuaugg

SEQ ID NO: 1496339 - RNA, 19 nt, Artificial Sequence
  Description of Artificial Sequence: Synthetic oligonucleotide
aguauaauacauuaacuac

SEQ ID NO: 1496340 - RNA, 19 nt, Artificial Sequence
  Description of Artificial Sequence: Synthetic oligonucleotide
aauaaggcuaacuagcacu

SEQ ID NO: 1496341 - RNA, 19 nt, Artificial Sequence
  Description of Artificial Sequence: Synthetic oligonucleotide
acuaagaguccuuuggucc

SEQ ID NO: 1496342 - RNA, 19 nt, Artificial Sequence
  Description of Artificial Sequence: Synthetic oligonucleotide
auagcuaugcccuuuacag

SEQ ID NO: 1496343 - RNA, 19 nt, Artificial Sequence
  Description of Artificial Sequence: Synthetic oligonucleotide
uauaauacauuaacuacug

SEQ ID NO: 1496344 - RNA, 19 nt, Artificial Sequence
  Description of Artificial Sequence: Synthetic oligonucleotide
uugguuauuucuuauugcg

SEQ ID NO: 1496345 - RNA, 19 nt, Artificial Sequence
  Description of Artificial Sequence: Synthetic oligonucleotide
gagacagccagauaguacg

SEQ ID NO: 1496346 - RNA, 19 nt, Artificial Sequence
  Description of Artificial Sequence: Synthetic oligonucleotide
uguaaggacagacuguucc

SEQ ID NO: 1496347 - RNA, 19 nt, Artificial Sequence
  Description of Artificial Sequence: Synthetic oligonucleotide
agcuaugcccuuuacagcc

SEQ ID NO: 1496348 - RNA, 19 nt, Artificial Sequence
  Description of Artificial Sequence: Synthetic oligonucleotide
aacaccucuauggugaggc

SEQ ID NO: 1496349 - RNA, 19 nt, Artificial Sequence
  Description of Artificial Sequence: Synthetic oligonucleotide
gauaguacgucuuggacgc

SEQ ID NO: 1496350 - RNA, 19 nt, Artificial Sequence
  Description of Artificial Sequence: Synthetic oligonucleotide
uagguuagcuaaaagaucu

SEQ ID NO: 1496351 - RNA, 19 nt, Artificial Sequence
  Description of Artificial Sequence: Synthetic oligonucleotide
agauaguacgucuuggacg

SEQ ID NO: 1496352 - RNA, 19 nt, Artificial Sequence
  Description of Artificial Sequence: Synthetic oligonucleotide
uaaucaacuggaaaggucu

SEQ ID NO: 1496353 - RNA, 19 nt, Artificial Sequence
  Description of Artificial Sequence: Synthetic oligonucleotide
aaauaaggcuaacuagcac

SEQ ID NO: 1496354 - RNA, 19 nt, Artificial Sequence
  Description of Artificial Sequence: Synthetic oligonucleotide
agacauacuggcaagaagc

SEQ ID NO: 1496355 - RNA, 19 nt, Artificial Sequence
  Description of Artificial Sequence: Synthetic oligonucleotide
aacauuaagacuucuuuau

SEQ ID NO: 1496356 - RNA, 19 nt, Artificial Sequence
  Description of Artificial Sequence: Synthetic oligonucleotide
acuuaugugccccagaaug

SEQ ID NO: 1496357 - RNA, 19 nt, Artificial Sequence
  Description of Artificial Sequence: Synthetic oligonucleotide
aggaacugauauuagcugc

SEQ ID NO: 1496358 - RNA, 19 nt, Artificial Sequence
  Description of Artificial Sequence: Synthetic oligonucleotide
agggaaaugacagauuugc

SEQ ID NO: 1496359 - RNA, 19 nt, Artificial Sequence
  Description of Artificial Sequence: Synthetic oligonucleotide
aaaauagauuaaucaacug

SEQ ID NO: 1496360 - RNA, 19 nt, Artificial Sequence
  Description of Artificial Sequence: Synthetic oligonucleotide
acagcaauuauucaagugu

SEQ ID NO: 1496361 - RNA, 19 nt, Artificial Sequence
  Description of Artificial Sequence: Synthetic oligonucleotide
gauuaaucaacuggaaagg

SEQ ID NO: 1496362 - RNA, 19 nt, Artificial Sequence
  Description of Artificial Sequence: Synthetic oligonucleotide
aguuucaacacauggacug

SEQ ID NO: 1496363 - RNA, 19 nt, Artificial Sequence
  Description of Artificial Sequence: Synthetic oligonucleotide
gaauagguuagcuaaaaga

SEQ ID NO: 1496364 - RNA, 19 nt, Artificial Sequence
  Description of Artificial Sequence: Synthetic oligonucleotide
aauagguuagcuaaaagau

SEQ ID NO: 1496365 - RNA, 19 nt, Artificial Sequence
  Description of Artificial Sequence: Synthetic oligonucleotide
uuaacuacugguuuguauc

SEQ ID NO: 1496366 - RNA, 19 nt, Artificial Sequence
  Description of Artificial Sequence: Synthetic oligonucleotide
uguugacacauacacagug

SEQ ID NO: 1496367 - RNA, 19 nt, Artificial Sequence
  Description of Artificial Sequence: Synthetic oligonucleotide
aaucaguccaaguauaaua

SEQ ID NO: 1496368 - RNA, 19 nt, Artificial Sequence
  Description of Artificial Sequence: Synthetic oligonucleotide
ugauauuagcugcauagcu

SEQ ID NO: 1496369 - RNA, 19 nt, Artificial Sequence
  Description of Artificial Sequence: Synthetic oligonucleotide
ucuauggugaggcagggac

SEQ ID NO: 1496370 - RNA, 19 nt, Artificial Sequence
  Description of Artificial Sequence: Synthetic oligonucleotide
gacgcggagacuuaugggg

SEQ ID NO: 1496371 - RNA, 19 nt, Artificial Sequence
  Description of Artificial Sequence: Synthetic oligonucleotide
ucuuacuccauacuugaga

SEQ ID NO: 1496372 - RNA, 19 nt, Artificial Sequence
  Description of Artificial Sequence: Synthetic oligonucleotide
cuuauugcggcucuguaag

SEQ ID NO: 1496373 - RNA, 19 nt, Artificial Sequence
  Description of Artificial Sequence: Synthetic oligonucleotide
gacgcaagaacucagguga

SEQ ID NO: 1496374 - RNA, 19 nt, Artificial Sequence
  Description of Artificial Sequence: Synthetic oligonucleotide
aacagcaauuauucaagug

SEQ ID NO: 1496375 - RNA, 19 nt, Artificial Sequence
  Description of Artificial Sequence: Synthetic oligonucleotide
ugguuauuucuuauugcgg

SEQ ID NO: 1496376 - RNA, 19 nt, Artificial Sequence
  Description of Artificial Sequence: Synthetic oligonucleotide
aaucugaaagugucuuggg

SEQ ID NO: 1496377 - RNA, 19 nt, Artificial Sequence
  Description of Artificial Sequence: Synthetic oligonucleotide
cuugggaaaaguuuuaaca

SEQ ID NO: 1496378 - RNA, 19 nt, Artificial Sequence
  Description of Artificial Sequence: Synthetic oligonucleotide
acuacugguuuguaucacc

SEQ ID NO: 1496379 - RNA, 19 nt, Artificial Sequence
  Description of Artificial Sequence: Synthetic oligonucleotide
aauuagguuggcccuaacu

SEQ ID NO: 1496380 - RNA, 19 nt, Artificial Sequence
  Description of Artificial Sequence: Synthetic oligonucleotide
auauuagcugcauagcuga

SEQ ID NO: 1496381 - RNA, 19 nt, Artificial Sequence
  Description of Artificial Sequence: Synthetic oligonucleotide
uacauuaacuacugguuug

SEQ ID NO: 1496382 - RNA, 19 nt, Artificial Sequence
  Description of Artificial Sequence: Synthetic oligonucleotide
uggguuugcaaacuuauuc

SEQ ID NO: 1496383 - RNA, 19 nt, Artificial Sequence
  Description of Artificial Sequence: Synthetic oligonucleotide
aaugacagauuugcugggc

SEQ ID NO: 1496384 - RNA, 19 nt, Artificial Sequence
  Description of Artificial Sequence: Synthetic oligonucleotide
uuauucccgagacagagaa

SEQ ID NO: 1496385 - RNA, 19 nt, Artificial Sequence
  Description of Artificial Sequence: Synthetic oligonucleotide
ugaauagguuagcuaaaag

SEQ ID NO: 1496386 - RNA, 19 nt, Artificial Sequence
  Description of Artificial Sequence: Synthetic oligonucleotide
ucugaaagugucuugggaa

SEQ ID NO: 1496387 - RNA, 19 nt, Artificial Sequence
  Description of Artificial Sequence: Synthetic oligonucleotide
gugucuuagacauacuggc

SEQ ID NO: 1496388 - RNA, 19 nt, Artificial Sequence
  Description of Artificial Sequence: Synthetic oligonucleotide
aucaguccaaguauaauac

SEQ ID NO: 1496389 - RNA, 19 nt, Artificial Sequence
  Description of Artificial Sequence: Synthetic oligonucleotide
uuagaauuagguuggcccu

SEQ ID NO: 1496390 - RNA, 19 nt, Artificial Sequence
  Description of Artificial Sequence: Synthetic oligonucleotide
uuaaucaacuggaaagguc

SEQ ID NO: 1496391 - RNA, 19 nt, Artificial Sequence
  Description of Artificial Sequence: Synthetic oligonucleotide
guuggagcaauccauggcc

SEQ ID NO: 1496392 - RNA, 19 nt, Artificial Sequence
  Description of Artificial Sequence: Synthetic oligonucleotide
uugacacauacacagugca

SEQ ID NO: 1496393 - RNA, 19 nt, Artificial Sequence
  Description of Artificial Sequence: Synthetic oligonucleotide
cuugcauagagauguagug

SEQ ID NO: 1496394 - RNA, 19 nt, Artificial Sequence
  Description of Artificial Sequence: Synthetic oligonucleotide
ucaacacauggacuggucc

SEQ ID NO: 1496395 - RNA, 19 nt, Artificial Sequence
  Description of Artificial Sequence: Synthetic oligonucleotide
gauauuagcugcauagcug

SEQ ID NO: 1496396 - RNA, 19 nt, Artificial Sequence
  Description of Artificial Sequence: Synthetic oligonucleotide
auugaaacaccucuauggu

SEQ ID NO: 1496397 - RNA, 19 nt, Artificial Sequence
  Description of Artificial Sequence: Synthetic oligonucleotide
cuuaugugccccagaaugg

SEQ ID NO: 1496398 - RNA, 19 nt, Artificial Sequence
  Description of Artificial Sequence: Synthetic oligonucleotide
acaggagucauuugugguc

SEQ ID NO: 1496399 - RNA, 19 nt, Artificial Sequence
  Description of Artificial Sequence: Synthetic oligonucleotide
auaauacauuaacuacugg

SEQ ID NO: 1496400 - RNA, 19 nt, Artificial Sequence
  Description of Artificial Sequence: Synthetic oligonucleotide
gguuauuucuuauugcggc

SEQ ID NO: 1496401 - RNA, 19 nt, Artificial Sequence
  Description of Artificial Sequence: Synthetic oligonucleotide
uagacauacuggcaagaag

SEQ ID NO: 1496402 - RNA, 19 nt, Artificial Sequence
  Description of Artificial Sequence: Synthetic oligonucleotide
uggacgcggagacuuaugg

SEQ ID NO: 1496403 - RNA, 19 nt, Artificial Sequence
  Description of Artificial Sequence: Synthetic oligonucleotide
ucucuuacuccauacuuga

SEQ ID NO: 1496404 - RNA, 19 nt, Artificial Sequence
  Description of Artificial Sequence: Synthetic oligonucleotide
uagugauguggucugacca

SEQ ID NO: 1496405 - RNA, 19 nt, Artificial Sequence
  Description of Artificial Sequence: Synthetic oligonucleotide
ccuguugacacauacacag

SEQ ID NO: 1496406 - RNA, 19 nt, Artificial Sequence
  Description of Artificial Sequence: Synthetic oligonucleotide
gcuaaaagaucuuugacca

SEQ ID NO: 1496407 - RNA, 19 nt, Artificial Sequence
  Description of Artificial Sequence: Synthetic oligonucleotide
aaggcuaacuagcacugca

SEQ ID NO: 1496408 - RNA, 19 nt, Artificial Sequence
  Description of Artificial Sequence: Synthetic oligonucleotide
auuagguuggcccuaacua

SEQ ID NO: 1496409 - RNA, 19 nt, Artificial Sequence
  Description of Artificial Sequence: Synthetic oligonucleotide
ugcauagagauguagugau

SEQ ID NO: 1496410 - RNA, 19 nt, Artificial Sequence
  Description of Artificial Sequence: Synthetic oligonucleotide
aaagaucuuugaccaccac

SEQ ID NO: 1496411 - RNA, 19 nt, Artificial Sequence
  Description of Artificial Sequence: Synthetic oligonucleotide
agaauggacacaagagacc

SEQ ID NO: 1496412 - RNA, 19 nt, Artificial Sequence
  Description of Artificial Sequence: Synthetic oligonucleotide
ugagacgacuacugagucg

SEQ ID NO: 1496413 - RNA, 19 nt, Artificial Sequence
  Description of Artificial Sequence: Synthetic oligonucleotide
auggggaaucuugucaucc

SEQ ID NO: 1496414 - RNA, 19 nt, Artificial Sequence
  Description of Artificial Sequence: Synthetic oligonucleotide
ucauccagugaacucaguc

SEQ ID NO: 1496415 - RNA, 19 nt, Artificial Sequence
  Description of Artificial Sequence: Synthetic oligonucleotide
ugggccuggguccaaaacc

SEQ ID NO: 1496416 - RNA, 19 nt, Artificial Sequence
  Description of Artificial Sequence: Synthetic oligonucleotide
gacuacugagucguggugg

SEQ ID NO: 1496417 - RNA, 19 nt, Artificial Sequence
  Description of Artificial Sequence: Synthetic oligonucleotide
acuauugaaacaccucuau

SEQ ID NO: 1496418 - RNA, 19 nt, Artificial Sequence
  Description of Artificial Sequence: Synthetic oligonucleotide
auagguuagcuaaaagauc

SEQ ID NO: 1496419 - RNA, 19 nt, Artificial Sequence
  Description of Artificial Sequence: Synthetic oligonucleotide
uuugaauagguuagcuaaa

SEQ ID NO: 1496420 - RNA, 19 nt, Artificial Sequence
  Description of Artificial Sequence: Synthetic oligonucleotide
agauuugcugggcagguca

SEQ ID NO: 1496421 - RNA, 19 nt, Artificial Sequence
  Description of Artificial Sequence: Synthetic oligonucleotide
auuaacuacugguuuguau

SEQ ID NO: 1496422 - RNA, 19 nt, Artificial Sequence
  Description of Artificial Sequence: Synthetic oligonucleotide
uuuguaucaccuguugaca

SEQ ID NO: 1496423 - RNA, 19 nt, Artificial Sequence
  Description of Artificial Sequence: Synthetic oligonucleotide
acucaggugaaccaggcaa

SEQ ID NO: 1496424 - RNA, 19 nt, Artificial Sequence
  Description of Artificial Sequence: Synthetic oligonucleotide
auugcggcucuguaaggac

SEQ ID NO: 1496425 - RNA, 19 nt, Artificial Sequence
  Description of Artificial Sequence: Synthetic oligonucleotide
ucuugggaaaaguuuuaac

SEQ ID NO: 1496426 - RNA, 19 nt, Artificial Sequence
  Description of Artificial Sequence: Synthetic oligonucleotide
cuggcaagaagcaucccag

SEQ ID NO: 1496427 - RNA, 19 nt, Artificial Sequence
  Description of Artificial Sequence: Synthetic oligonucleotide
ucuuugaauagguuagcua

SEQ ID NO: 1496428 - RNA, 19 nt, Artificial Sequence
  Description of Artificial Sequence: Synthetic oligonucleotide
auacauuaacuacugguuu

SEQ ID NO: 1496429 - RNA, 19 nt, Artificial Sequence
  Description of Artificial Sequence: Synthetic oligonucleotide
uuagguuggcccuaacuau

SEQ ID NO: 1496430 - RNA, 19 nt, Artificial Sequence
  Description of Artificial Sequence: Synthetic oligonucleotide
uuacuccauacuugagacg

SEQ ID NO: 1496431 - RNA, 19 nt, Artificial Sequence
  Description of Artificial Sequence: Synthetic oligonucleotide
auggacacaagagaccuag

SEQ ID NO: 1496432 - RNA, 19 nt, Artificial Sequence
  Description of Artificial Sequence: Synthetic oligonucleotide
caaaaggacaggccugacg

SEQ ID NO: 1496433 - RNA, 19 nt, Artificial Sequence
  Description of Artificial Sequence: Synthetic oligonucleotide
aacuacugguuuguaucac

SEQ ID NO: 1496434 - RNA, 19 nt, Artificial Sequence
  Description of Artificial Sequence: Synthetic oligonucleotide
auccagugaacucagucgu

SEQ ID NO: 1496435 - RNA, 19 nt, Artificial Sequence
  Description of Artificial Sequence: Synthetic oligonucleotide
uuguaucaccuguugacac

SEQ ID NO: 1496436 - RNA, 19 nt, Artificial Sequence
  Description of Artificial Sequence: Synthetic oligonucleotide
uauuucuuauugcggcucu

SEQ ID NO: 1496437 - RNA, 19 nt, Artificial Sequence
  Description of Artificial Sequence: Synthetic oligonucleotide
agcuauagcagggagaaaa

SEQ ID NO: 1496438 - RNA, 19 nt, Artificial Sequence
  Description of Artificial Sequence: Synthetic oligonucleotide
ggacacaagagaccuaggg

SEQ ID NO: 1496439 - RNA, 19 nt, Artificial Sequence
  Description of Artificial Sequence: Synthetic oligonucleotide
uguaucaccuguugacaca

SEQ ID NO: 1496440 - RNA, 19 nt, Artificial Sequence
  Description of Artificial Sequence: Synthetic oligonucleotide
ugcaaacuuauucccgaga

SEQ ID NO: 1496441 - RNA, 19 nt, Artificial Sequence
  Description of Artificial Sequence: Synthetic oligonucleotide
uucccaaagcuccagcuau

SEQ ID NO: 1496442 - RNA, 19 nt, Artificial Sequence
  Description of Artificial Sequence: Synthetic oligonucleotide
ucuucaccgcccacaaaag

SEQ ID NO: 1496443 - RNA, 19 nt, Artificial Sequence
  Description of Artificial Sequence: Synthetic oligonucleotide
cacaagagaccuaggguag

SEQ ID NO: 1496444 - RNA, 19 nt, Artificial Sequence
  Description of Artificial Sequence: Synthetic oligonucleotide
cagcaauuauucaaguguc

SEQ ID NO: 1496445 - RNA, 19 nt, Artificial Sequence
  Description of Artificial Sequence: Synthetic oligonucleotide
cuauugaaacaccucuaug

SEQ ID NO: 1496446 - RNA, 19 nt, Artificial Sequence
  Description of Artificial Sequence: Synthetic oligonucleotide
guaaggacagacuguuccc

SEQ ID NO: 1496447 - RNA, 19 nt, Artificial Sequence
  Description of Artificial Sequence: Synthetic oligonucleotide
gcaguuucaacacauggac

SEQ ID NO: 1496448 - RNA, 19 nt, Artificial Sequence
  Description of Artificial Sequence: Synthetic oligonucleotide
ucaguccaaguauaauaca

SEQ ID NO: 1496449 - RNA, 19 nt, Artificial Sequence
  Description of Artificial Sequence: Synthetic oligonucleotide
uugcauagagauguaguga

SEQ ID NO: 1496450 - RNA, 19 nt, Artificial Sequence
  Description of Artificial Sequence: Synthetic oligonucleotide
gacagauuugcugggcagg

SEQ ID NO: 1496451 - RNA, 19 nt, Artificial Sequence
  Description of Artificial Sequence: Synthetic oligonucleotide
ugucugacuggcuucgaga

SEQ ID NO: 1496452 - RNA, 19 nt, Artificial Sequence
  Description of Artificial Sequence: Synthetic oligonucleotide
gagguguaguuccagguuc

SEQ ID NO: 1496453 - RNA, 19 nt, Artificial Sequence
  Description of Artificial Sequence: Synthetic oligonucleotide
uggcccuaacuauugaaac

SEQ ID NO: 1496454 - RNA, 19 nt, Artificial Sequence
  Description of Artificial Sequence: Synthetic oligonucleotide
agacuuauggggaaucuug

SEQ ID NO: 1496455 - RNA, 19 nt, Artificial Sequence
  Description of Artificial Sequence: Synthetic oligonucleotide
cugucuaggacgugcacug

SEQ ID NO: 1496456 - RNA, 19 nt, Artificial Sequence
  Description of Artificial Sequence: Synthetic oligonucleotide
aggcuccugacaaucagcc

SEQ ID NO: 1496457 - RNA, 19 nt, Artificial Sequence
  Description of Artificial Sequence: Synthetic oligonucleotide
uccuguaacuuaugugccc

SEQ ID NO: 1496458 - RNA, 19 nt, Artificial Sequence
  Description of Artificial Sequence: Synthetic oligonucleotide
uuauugcggcucuguaagg

SEQ ID NO: 1496459 - RNA, 19 nt, Artificial Sequence
  Description of Artificial Sequence: Synthetic oligonucleotide
aggcuuagaauuagguugg

SEQ ID NO: 1496460 - RNA, 19 nt, Artificial Sequence
  Description of Artificial Sequence: Synthetic oligonucleotide
gcuccugacaaucagccag

SEQ ID NO: 1496461 - RNA, 19 nt, Artificial Sequence
  Description of Artificial Sequence: Synthetic oligonucleotide
aaaagaucuuugaccacca

SEQ ID NO: 1496462 - RNA, 19 nt, Artificial Sequence
  Description of Artificial Sequence: Synthetic oligonucleotide
guggucugaccauacagug

SEQ ID NO: 1496463 - RNA, 19 nt, Artificial Sequence
  Description of Artificial Sequence: Synthetic oligonucleotide
uccagcuauagcagggaga

SEQ ID NO: 1496464 - RNA, 19 nt, Artificial Sequence
  Description of Artificial Sequence: Synthetic oligonucleotide
ugcggcucuguaaggacag

SEQ ID NO: 1496465 - RNA, 19 nt, Artificial Sequence
  Description of Artificial Sequence: Synthetic oligonucleotide
uguaacuuaugugccccag

SEQ ID NO: 1496466 - RNA, 19 nt, Artificial Sequence
  Description of Artificial Sequence: Synthetic oligonucleotide
uacuugagacgacuacuga

SEQ ID NO: 1496467 - RNA, 19 nt, Artificial Sequence
  Description of Artificial Sequence: Synthetic oligonucleotide
cauacagugagugcaaaca

SEQ ID NO: 1496468 - RNA, 19 nt, Artificial Sequence
  Description of Artificial Sequence: Synthetic oligonucleotide
aaaucaguccaaguauaau

SEQ ID NO: 1496469 - RNA, 19 nt, Artificial Sequence
  Description of Artificial Sequence: Synthetic oligonucleotide
agaggcuuagaauuagguu

SEQ ID NO: 1496470 - RNA, 19 nt, Artificial Sequence
  Description of Artificial Sequence: Synthetic oligonucleotide
cagauaguacgucuuggac

SEQ ID NO: 1496471 - RNA, 19 nt, Artificial Sequence
  Description of Artificial Sequence: Synthetic oligonucleotide
uuauuucuuauugcggcuc

SEQ ID NO: 1496472 - RNA, 19 nt, Artificial Sequence
  Description of Artificial Sequence: Synthetic oligonucleotide
uggaacuaagaguccuuug

SEQ ID NO: 1496473 - RNA, 19 nt, Artificial Sequence
  Description of Artificial Sequence: Synthetic oligonucleotide
gacgacuacugagucgugg

SEQ ID NO: 1496474 - RNA, 19 nt, Artificial Sequence
  Description of Artificial Sequence: Synthetic oligonucleotide
ucaccgcccacaaaaggac

SEQ ID NO: 1496475 - RNA, 19 nt, Artificial Sequence
  Description of Artificial Sequence: Synthetic oligonucleotide
uugaauagguuagcuaaaa

SEQ ID NO: 1496476 - RNA, 19 nt, Artificial Sequence
  Description of Artificial Sequence: Synthetic oligonucleotide
agugauucuucaccgccca

SEQ ID NO: 1496477 - RNA, 19 nt, Artificial Sequence
  Description of Artificial Sequence: Synthetic oligonucleotide
gacagugauucuucaccgc

SEQ ID NO: 1496478 - RNA, 19 nt, Artificial Sequence
  Description of Artificial Sequence: Synthetic oligonucleotide
guagugauguggucugacc

SEQ ID NO: 1496479 - RNA, 19 nt, Artificial Sequence
  Description of Artificial Sequence: Synthetic oligonucleotide
cuucaccgcccacaaaagg

SEQ ID NO: 1496480 - RNA, 19 nt, Artificial Sequence
  Description of Artificial Sequence: Synthetic oligonucleotide
uuaugugccccagaaugga

SEQ ID NO: 1496481 - RNA, 19 nt, Artificial Sequence
  Description of Artificial Sequence: Synthetic oligonucleotide
guugacacauacacagugc

SEQ ID NO: 1496482 - RNA, 19 nt, Artificial Sequence
  Description of Artificial Sequence: Synthetic oligonucleotide
uagcuaugcccuuuacagc

SEQ ID NO: 1496483 - RNA, 19 nt, Artificial Sequence
  Description of Artificial Sequence: Synthetic oligonucleotide
uauugcggcucuguaagga

SEQ ID NO: 1496484 - RNA, 19 nt, Artificial Sequence
  Description of Artificial Sequence: Synthetic oligonucleotide
gcaaacuuauucccgagac

SEQ ID NO: 1496485 - RNA, 19 nt, Artificial Sequence
  Description of Artificial Sequence: Synthetic oligonucleotide
uaacuagcacugcagcauc

SEQ ID NO: 1496486 - RNA, 19 nt, Artificial Sequence
  Description of Artificial Sequence: Synthetic oligonucleotide
uggucugaccauacaguga

SEQ ID NO: 1496487 - RNA, 19 nt, Artificial Sequence
  Description of Artificial Sequence: Synthetic oligonucleotide
aacuuaugugccccagaau

SEQ ID NO: 1496488 - RNA, 19 nt, Artificial Sequence
  Description of Artificial Sequence: Synthetic oligonucleotide
gcucuguaaggacagacug

SEQ ID NO: 1496489 - RNA, 19 nt, Artificial Sequence
  Description of Artificial Sequence: Synthetic oligonucleotide
uaaggacagacuguuccca

SEQ ID NO: 1496490 - RNA, 19 nt, Artificial Sequence
  Description of Artificial Sequence: Synthetic oligonucleotide
ggugggaucucucuuacuc

SEQ ID NO: 1496491 - RNA, 19 nt, Artificial Sequence
  Description of Artificial Sequence: Synthetic oligonucleotide
cuuugguccugucuaggac

SEQ ID NO: 1496492 - RNA, 19 nt, Artificial Sequence
  Description of Artificial Sequence: Synthetic oligonucleotide
auacaagggaaaugacaga

SEQ ID NO: 1496493 - RNA, 19 nt, Artificial Sequence
  Description of Artificial Sequence: Synthetic oligonucleotide
agugauguggucugaccau

SEQ ID NO: 1496494 - RNA, 19 nt, Artificial Sequence
  Description of Artificial Sequence: Synthetic oligonucleotide
acauuaacuacugguuugu

SEQ ID NO: 1496495 - RNA, 19 nt, Artificial Sequence
  Description of Artificial Sequence: Synthetic oligonucleotide
aagggaaaugacagauuug

SEQ ID NO: 1496496 - RNA, 19 nt, Artificial Sequence
  Description of Artificial Sequence: Synthetic oligonucleotide
ccaguuuccauccuguaac

SEQ ID NO: 1496497 - RNA, 19 nt, Artificial Sequence
  Description of Artificial Sequence: Synthetic oligonucleotide
gaauggacacaagagaccu

SEQ ID NO: 1496498 - RNA, 19 nt, Artificial Sequence
  Description of Artificial Sequence: Synthetic oligonucleotide
gaaucuugucauccaguga

SEQ ID NO: 1496499 - RNA, 19 nt, Artificial Sequence
  Description of Artificial Sequence: Synthetic oligonucleotide
acgacuacugagucguggu

SEQ ID NO: 1496500 - RNA, 19 nt, Artificial Sequence
  Description of Artificial Sequence: Synthetic oligonucleotide
uggacacaagagaccuagg

SEQ ID NO: 1496501 - RNA, 19 nt, Artificial Sequence
  Description of Artificial Sequence: Synthetic oligonucleotide
uucaacacauggacugguc

SEQ ID NO: 1496502 - RNA, 19 nt, Artificial Sequence
  Description of Artificial Sequence: Synthetic oligonucleotide
gcaauccauggccucaugg

SEQ ID NO: 1496503 - RNA, 19 nt, Artificial Sequence
  Description of Artificial Sequence: Synthetic oligonucleotide
agacauggccaaaggcucc

SEQ ID NO: 1496504 - RNA, 19 nt, Artificial Sequence
  Description of Artificial Sequence: Synthetic oligonucleotide
uaugugccccagaauggac

SEQ ID NO: 1496505 - RNA, 19 nt, Artificial Sequence
  Description of Artificial Sequence: Synthetic oligonucleotide
uacugguuuguaucaccug

SEQ ID NO: 1496506 - RNA, 19 nt, Artificial Sequence
  Description of Artificial Sequence: Synthetic oligonucleotide
ugcauagcugacugccagc

SEQ ID NO: 1496507 - RNA, 19 nt, Artificial Sequence
  Description of Artificial Sequence: Synthetic oligonucleotide
ugcguccaggucaaauaca

SEQ ID NO: 1496508 - RNA, 19 nt, Artificial Sequence
  Description of Artificial Sequence: Synthetic oligonucleotide
uuucaacacauggacuggu

SEQ ID NO: 1496509 - RNA, 19 nt, Artificial Sequence
  Description of Artificial Sequence: Synthetic oligonucleotide
augucugacuggcuucgag

SEQ ID NO: 1496510 - RNA, 19 nt, Artificial Sequence
  Description of Artificial Sequence: Synthetic oligonucleotide
aaacaccucuauggugagg

SEQ ID NO: 1496511 - RNA, 19 nt, Artificial Sequence
  Description of Artificial Sequence: Synthetic oligonucleotide
aacuauugaaacaccucua

SEQ ID NO: 1496512 - RNA, 19 nt, Artificial Sequence
  Description of Artificial Sequence: Synthetic oligonucleotide
uauuagcugcauagcugac

SEQ ID NO: 1496513 - RNA, 19 nt, Artificial Sequence
  Description of Artificial Sequence: Synthetic oligonucleotide
gaacuaagaguccuuuggu

SEQ ID NO: 1496514 - RNA, 19 nt, Artificial Sequence
  Description of Artificial Sequence: Synthetic oligonucleotide
ugaaagugucuugggaaaa

SEQ ID NO: 1496515 - RNA, 19 nt, Artificial Sequence
  Description of Artificial Sequence: Synthetic oligonucleotide
agucuucagucugagaaau

SEQ ID NO: 1496516 - RNA, 19 nt, Artificial Sequence
  Description of Artificial Sequence: Synthetic oligonucleotide
gagacgacuacugagucgu

SEQ ID NO: 1496517 - RNA, 19 nt, Artificial Sequence
  Description of Artificial Sequence: Synthetic oligonucleotide
gaaauagcuaugcccuuua

SEQ ID NO: 1496518 - RNA, 19 nt, Artificial Sequence
  Description of Artificial Sequence: Synthetic oligonucleotide
uggggaaucuugucaucca

SEQ ID NO: 1496519 - RNA, 19 nt, Artificial Sequence
  Description of Artificial Sequence: Synthetic oligonucleotide
augcccuuuacagccuccc

SEQ ID NO: 1496520 - RNA, 19 nt, Artificial Sequence
  Description of Artificial Sequence: Synthetic oligonucleotide
acaagagaccuaggguagg

SEQ ID NO: 1496521 - RNA, 19 nt, Artificial Sequence
  Description of Artificial Sequence: Synthetic oligonucleotide
auagauuaaucaacuggaa

SEQ ID NO: 1496522 - RNA, 19 nt, Artificial Sequence
  Description of Artificial Sequence: Synthetic oligonucleotide
gguuggagcaauccauggc

SEQ ID NO: 1496523 - RNA, 19 nt, Artificial Sequence
  Description of Artificial Sequence: Synthetic oligonucleotide
uaggacgugcacugcaguc

SEQ ID NO: 1496524 - RNA, 19 nt, Artificial Sequence
  Description of Artificial Sequence: Synthetic oligonucleotide
gcaagaacucaggugaacc

SEQ ID NO: 1496525 - RNA, 19 nt, Artificial Sequence
  Description of Artificial Sequence: Synthetic oligonucleotide
cauagagauguagugaugu

SEQ ID NO: 1496526 - RNA, 19 nt, Artificial Sequence
  Description of Artificial Sequence: Synthetic oligonucleotide
guuauuucuuauugcggcu

SEQ ID NO: 1496527 - RNA, 19 nt, Artificial Sequence
  Description of Artificial Sequence: Synthetic oligonucleotide
uucccgagacagagaaaug

SEQ ID NO: 1496528 - RNA, 19 nt, Artificial Sequence
  Description of Artificial Sequence: Synthetic oligonucleotide
agaaauggacaggagucau

SEQ ID NO: 1496529 - RNA, 19 nt, Artificial Sequence
  Description of Artificial Sequence: Synthetic oligonucleotide
ggcuaacuagcacugcagc

SEQ ID NO: 1496530 - RNA, 19 nt, Artificial Sequence
  Description of Artificial Sequence: Synthetic oligonucleotide
gaaaggucuuugaauaggu

SEQ ID NO: 1496531 - RNA, 19 nt, Artificial Sequence
  Description of Artificial Sequence: Synthetic oligonucleotide
ugccccagaauggacacaa

SEQ ID NO: 1496532 - RNA, 19 nt, Artificial Sequence
  Description of Artificial Sequence: Synthetic oligonucleotide
agcaauuauucaagugucu

SEQ ID NO: 1496533 - RNA, 19 nt, Artificial Sequence
  Description of Artificial Sequence: Synthetic oligonucleotide
uugggccuggguccaaaac

SEQ ID NO: 1496534 - RNA, 19 nt, Artificial Sequence
  Description of Artificial Sequence: Synthetic oligonucleotide
guaacuuaugugccccaga

SEQ ID NO: 1496535 - RNA, 19 nt, Artificial Sequence
  Description of Artificial Sequence: Synthetic oligonucleotide
uggcgugcacugaaaggga

SEQ ID NO: 1496536 - RNA, 19 nt, Artificial Sequence
  Description of Artificial Sequence: Synthetic oligonucleotide
ugagugcaaacagcaauua

SEQ ID NO: 1496537 - RNA, 19 nt, Artificial Sequence
  Description of Artificial Sequence: Synthetic oligonucleotide
uuggacgcggagacuuaug

SEQ ID NO: 1496538 - RNA, 19 nt, Artificial Sequence
  Description of Artificial Sequence: Synthetic oligonucleotide
cuagcacugcagcaucaac

SEQ ID NO: 1496539 - RNA, 19 nt, Artificial Sequence
  Description of Artificial Sequence: Synthetic oligonucleotide
ggaaaggaacugauauuag

SEQ ID NO: 1496540 - RNA, 19 nt, Artificial Sequence
  Description of Artificial Sequence: Synthetic oligonucleotide
ggccuacaaaaccagcccc

SEQ ID NO: 1496541 - RNA, 19 nt, Artificial Sequence
  Description of Artificial Sequence: Synthetic oligonucleotide
aacuuauucccgagacaga

SEQ ID NO: 1496542 - RNA, 19 nt, Artificial Sequence
  Description of Artificial Sequence: Synthetic oligonucleotide
caccucuauggugaggcag

SEQ ID NO: 1496543 - RNA, 19 nt, Artificial Sequence
  Description of Artificial Sequence: Synthetic oligonucleotide
uggcaagaagcaucccagu

SEQ ID NO: 1496544 - RNA, 19 nt, Artificial Sequence
  Description of Artificial Sequence: Synthetic oligonucleotide
aggcuaacuagcacugcag

SEQ ID NO: 1496545 - RNA, 19 nt, Artificial Sequence
  Description of Artificial Sequence: Synthetic oligonucleotide
gcuaacuagcacugcagca

SEQ ID NO: 1496546 - RNA, 19 nt, Artificial Sequence
  Description of Artificial Sequence: Synthetic oligonucleotide
aggguaggaaaggaacuga

SEQ ID NO: 1496547 - RNA, 19 nt, Artificial Sequence
  Description of Artificial Sequence: Synthetic oligonucleotide
aggacgugcacugcaguca

SEQ ID NO: 1496548 - RNA, 19 nt, Artificial Sequence
  Description of Artificial Sequence: Synthetic oligonucleotide
uuacagccucccagguagc

SEQ ID NO: 1496549 - RNA, 19 nt, Artificial Sequence
  Description of Artificial Sequence: Synthetic oligonucleotide
ggacgcggagacuuauggg

SEQ ID NO: 1496550 - RNA, 19 nt, Artificial Sequence
  Description of Artificial Sequence: Synthetic oligonucleotide
cuuagacauacuggcaaga

SEQ ID NO: 1496551 - RNA, 19 nt, Artificial Sequence
  Description of Artificial Sequence: Synthetic oligonucleotide
uagaauuagguuggcccua

SEQ ID NO: 1496552 - RNA, 19 nt, Artificial Sequence
  Description of Artificial Sequence: Synthetic oligonucleotide
ccugacgcaagaacucagg

SEQ ID NO: 1496553 - RNA, 19 nt, Artificial Sequence
  Description of Artificial Sequence: Synthetic oligonucleotide
ggcaagaagcaucccaguc

SEQ ID NO: 1496554 - RNA, 19 nt, Artificial Sequence
  Description of Artificial Sequence: Synthetic oligonucleotide
gcccuuuacagccucccag

SEQ ID NO: 1496555 - RNA, 19 nt, Artificial Sequence
  Description of Artificial Sequence: Synthetic oligonucleotide
gacaaucagccagaggugu

SEQ ID NO: 1496556 - RNA, 19 nt, Artificial Sequence
  Description of Artificial Sequence: Synthetic oligonucleotide
ugcccuuuacagccuccca

SEQ ID NO: 1496557 - RNA, 19 nt, Artificial Sequence
  Description of Artificial Sequence: Synthetic oligonucleotide
guccccuugggccuggguc

SEQ ID NO: 1496558 - RNA, 19 nt, Artificial Sequence
  Description of Artificial Sequence: Synthetic oligonucleotide
ccuguaacuuaugugcccc

SEQ ID NO: 1496559 - RNA, 19 nt, Artificial Sequence
  Description of Artificial Sequence: Synthetic oligonucleotide
ggggccuacaaaaccagcc

SEQ ID NO: 1496560 - RNA, 19 nt, Artificial Sequence
  Description of Artificial Sequence: Synthetic oligonucleotide
cuaagaguccuuugguccu

SEQ ID NO: 1496561 - RNA, 19 nt, Artificial Sequence
  Description of Artificial Sequence: Synthetic oligonucleotide
accgcccacaaaaggacag

SEQ ID NO: 1496562 - RNA, 19 nt, Artificial Sequence
  Description of Artificial Sequence: Synthetic oligonucleotide
aagagaccuaggguaggaa

SEQ ID NO: 1496563 - RNA, 19 nt, Artificial Sequence
  Description of Artificial Sequence: Synthetic oligonucleotide
ggcccuaacuauugaaaca

SEQ ID NO: 1496564 - RNA, 19 nt, Artificial Sequence
  Description of Artificial Sequence: Synthetic oligonucleotide
ggacgugcacugcagucag

SEQ ID NO: 1496565 - RNA, 19 nt, Artificial Sequence
  Description of Artificial Sequence: Synthetic oligonucleotide
gaauuagguuggcccuaac

SEQ ID NO: 1496566 - RNA, 19 nt, Artificial Sequence
  Description of Artificial Sequence: Synthetic oligonucleotide
agccuggaacuaagagucc

SEQ ID NO: 1496567 - RNA, 19 nt, Artificial Sequence
  Description of Artificial Sequence: Synthetic oligonucleotide
ggaacugauauuagcugca

SEQ ID NO: 1496568 - RNA, 19 nt, Artificial Sequence
  Description of Artificial Sequence: Synthetic oligonucleotide
acauacuggcaagaagcau

SEQ ID NO: 1496569 - RNA, 19 nt, Artificial Sequence
  Description of Artificial Sequence: Synthetic oligonucleotide
aaugucugacuggcuucga

SEQ ID NO: 1496570 - RNA, 19 nt, Artificial Sequence
  Description of Artificial Sequence: Synthetic oligonucleotide
ccauacuugagacgacuac

SEQ ID NO: 1496571 - RNA, 19 nt, Artificial Sequence
  Description of Artificial Sequence: Synthetic oligonucleotide
gggcaggucaaagaauuug

SEQ ID NO: 1496572 - RNA, 19 nt, Artificial Sequence
  Description of Artificial Sequence: Synthetic oligonucleotide
cuguaaggacagacuguuc

SEQ ID NO: 1496573 - RNA, 19 nt, Artificial Sequence
  Description of Artificial Sequence: Synthetic oligonucleotide
uggaggcccaucagacagu

SEQ ID NO: 1496574 - RNA, 19 nt, Artificial Sequence
  Description of Artificial Sequence: Synthetic oligonucleotide
agaauuagguuggcccuaa

SEQ ID NO: 1496575 - RNA, 19 nt, Artificial Sequence
  Description of Artificial Sequence: Synthetic oligonucleotide
uggugaggcagggacuagu

SEQ ID NO: 1496576 - RNA, 19 nt, Artificial Sequence
  Description of Artificial Sequence: Synthetic oligonucleotide
cucccaacaccaagguuga

SEQ ID NO: 1496577 - RNA, 19 nt, Artificial Sequence
  Description of Artificial Sequence: Synthetic oligonucleotide
ccgagacagagaaauggac

SEQ ID NO: 1496578 - RNA, 19 nt, Artificial Sequence
  Description of Artificial Sequence: Synthetic oligonucleotide
cagaggcuuagaauuaggu

SEQ ID NO: 1496579 - RNA, 19 nt, Artificial Sequence
  Description of Artificial Sequence: Synthetic oligonucleotide
ugucuaggacgugcacugc

SEQ ID NO: 1496580 - RNA, 19 nt, Artificial Sequence
  Description of Artificial Sequence: Synthetic oligonucleotide
agguuggcccuaacuauug

SEQ ID NO: 1496581 - RNA, 19 nt, Artificial Sequence
  Description of Artificial Sequence: Synthetic oligonucleotide
cuccugacaaucagccaga

SEQ ID NO: 1496582 - RNA, 19 nt, Artificial Sequence
  Description of Artificial Sequence: Synthetic oligonucleotide
gcuuagaauuagguuggcc

SEQ ID NO: 1496583 - RNA, 19 nt, Artificial Sequence
  Description of Artificial Sequence: Synthetic oligonucleotide
caggccugacgcaagaacu

SEQ ID NO: 1496584 - RNA, 19 nt, Artificial Sequence
  Description of Artificial Sequence: Synthetic oligonucleotide
gcagggacuaguccucccc

SEQ ID NO: 1496585 - RNA, 19 nt, Artificial Sequence
  Description of Artificial Sequence: Synthetic oligonucleotide
agguguaguuccagguucu

SEQ ID NO: 1496586 - RNA, 19 nt, Artificial Sequence
  Description of Artificial Sequence: Synthetic oligonucleotide
agcaauccauggccucaug

SEQ ID NO: 1496587 - RNA, 19 nt, Artificial Sequence
  Description of Artificial Sequence: Synthetic oligonucleotide
cccuaacuauugaaacacc

SEQ ID NO: 1496588 - RNA, 19 nt, Artificial Sequence
  Description of Artificial Sequence: Synthetic oligonucleotide
ccuaacuauugaaacaccu

SEQ ID NO: 1496589 - RNA, 19 nt, Artificial Sequence
  Description of Artificial Sequence: Synthetic oligonucleotide
caaagaccgccaccuucug

SEQ ID NO: 1496590 - RNA, 19 nt, Artificial Sequence
  Description of Artificial Sequence: Synthetic oligonucleotide
aucaacuggaaaggucuuu

SEQ ID NO: 1496591 - RNA, 19 nt, Artificial Sequence
  Description of Artificial Sequence: Synthetic oligonucleotide
auaguacgucuuggacgcg

SEQ ID NO: 1496592 - RNA, 19 nt, Artificial Sequence
  Description of Artificial Sequence: Synthetic oligonucleotide
ggugcguccaggucaaaua

SEQ ID NO: 1496593 - RNA, 19 nt, Artificial Sequence
  Description of Artificial Sequence: Synthetic oligonucleotide
acaccucuauggugaggca

SEQ ID NO: 1496594 - RNA, 19 nt, Artificial Sequence
  Description of Artificial Sequence: Synthetic oligonucleotide
uggugcguccaggucaaau

SEQ ID NO: 1496595 - RNA, 19 nt, Artificial Sequence
  Description of Artificial Sequence: Synthetic oligonucleotide
caguuucaacacauggacu

SEQ ID NO: 1496596 - RNA, 19 nt, Artificial Sequence
  Description of Artificial Sequence: Synthetic oligonucleotide
ggcaaaacauuaagacuuc

SEQ ID NO: 1496597 - RNA, 19 nt, Artificial Sequence
  Description of Artificial Sequence: Synthetic oligonucleotide
cuuuacagccucccaggua

SEQ ID NO: 1496598 - RNA, 19 nt, Artificial Sequence
  Description of Artificial Sequence: Synthetic oligonucleotide
cuguaacuuaugugcccca

SEQ ID NO: 1496599 - RNA, 19 nt, Artificial Sequence
  Description of Artificial Sequence: Synthetic oligonucleotide
caagagaccuaggguagga

SEQ ID NO: 1496600 - RNA, 19 nt, Artificial Sequence
  Description of Artificial Sequence: Synthetic oligonucleotide
ccaagguugaaagucuuga

SEQ ID NO: 1496601 - RNA, 19 nt, Artificial Sequence
  Description of Artificial Sequence: Synthetic oligonucleotide
ggaauggugggaucucucu

SEQ ID NO: 1496602 - RNA, 19 nt, Artificial Sequence
  Description of Artificial Sequence: Synthetic oligonucleotide
gugauucuucaccgcccac

SEQ ID NO: 1496603 - RNA, 19 nt, Artificial Sequence
  Description of Artificial Sequence: Synthetic oligonucleotide
acgcggagacuuaugggga

SEQ ID NO: 1496604 - RNA, 19 nt, Artificial Sequence
  Description of Artificial Sequence: Synthetic oligonucleotide
ccagcuauagcagggagaa

SEQ ID NO: 1496605 - RNA, 19 nt, Artificial Sequence
  Description of Artificial Sequence: Synthetic oligonucleotide
cugacgcaagaacucaggu

SEQ ID NO: 1496606 - RNA, 19 nt, Artificial Sequence
  Description of Artificial Sequence: Synthetic oligonucleotide
caccucacccauccugcuc

SEQ ID NO: 1496607 - RNA, 19 nt, Artificial Sequence
  Description of Artificial Sequence: Synthetic oligonucleotide
cuacugagucgugguggag

SEQ ID NO: 1496608 - RNA, 19 nt, Artificial Sequence
  Description of Artificial Sequence: Synthetic oligonucleotide
gaugcccggaaugguggga

SEQ ID NO: 1496609 - RNA, 19 nt, Artificial Sequence
  Description of Artificial Sequence: Synthetic oligonucleotide
guaucaccuguugacacau

SEQ ID NO: 1496610 - RNA, 19 nt, Artificial Sequence
  Description of Artificial Sequence: Synthetic oligonucleotide
augcccggaauggugggau

SEQ ID NO: 1496611 - RNA, 19 nt, Artificial Sequence
  Description of Artificial Sequence: Synthetic oligonucleotide
caccgcccacaaaaggaca

SEQ ID NO: 1496612 - RNA, 19 nt, Artificial Sequence
  Description of Artificial Sequence: Synthetic oligonucleotide
cccgagacagagaaaugga

SEQ ID NO: 1496613 - RNA, 19 nt, Artificial Sequence
  Description of Artificial Sequence: Synthetic oligonucleotide
cuguugacacauacacagu

SEQ ID NO: 1496614 - RNA, 19 nt, Artificial Sequence
  Description of Artificial Sequence: Synthetic oligonucleotide
gggccuggguccaaaacca

SEQ ID NO: 1496615 - RNA, 19 nt, Artificial Sequence
  Description of Artificial Sequence: Synthetic oligonucleotide
ggaucucucuuacuccaua

SEQ ID NO: 1496616 - RNA, 19 nt, Artificial Sequence
  Description of Artificial Sequence: Synthetic oligonucleotide
gcccacaaaaggacaggcc

SEQ ID NO: 1496617 - RNA, 19 nt, Artificial Sequence
  Description of Artificial Sequence: Synthetic oligonucleotide
gagacuuauggggaaucuu

SEQ ID NO: 1496618 - RNA, 19 nt, Artificial Sequence
  Description of Artificial Sequence: Synthetic oligonucleotide
cugagucgugguggaggcc

SEQ ID NO: 1496619 - RNA, 19 nt, Artificial Sequence
  Description of Artificial Sequence: Synthetic oligonucleotide
gguuggcccuaacuauuga

SEQ ID NO: 1496620 - RNA, 19 nt, Artificial Sequence
  Description of Artificial Sequence: Synthetic oligonucleotide
gguucuggugcguccaggu

SEQ ID NO: 1496621 - RNA, 19 nt, Artificial Sequence
  Description of Artificial Sequence: Synthetic oligonucleotide
ugcccggaauggugggauc

SEQ ID NO: 1496622 - RNA, 19 nt, Artificial Sequence
  Description of Artificial Sequence: Synthetic oligonucleotide
agguuagcuaaaagaucuu

SEQ ID NO: 1496623 - RNA, 19 nt, Artificial Sequence
  Description of Artificial Sequence: Synthetic oligonucleotide
gcguccaggucaaauacaa

SEQ ID NO: 1496624 - RNA, 19 nt, Artificial Sequence
  Description of Artificial Sequence: Synthetic oligonucleotide
cuccauacuugagacgacu

SEQ ID NO: 1496625 - RNA, 19 nt, Artificial Sequence
  Description of Artificial Sequence: Synthetic oligonucleotide
caggugaaccaggcaaaga

SEQ ID NO: 1496626 - RNA, 19 nt, Artificial Sequence
  Description of Artificial Sequence: Synthetic oligonucleotide
guccugucuaggacgugca

SEQ ID NO: 1496627 - RNA, 19 nt, Artificial Sequence
  Description of Artificial Sequence: Synthetic oligonucleotide
gucuuggacgcggagacuu

SEQ ID NO: 1496628 - RNA, 19 nt, Artificial Sequence
  Description of Artificial Sequence: Synthetic oligonucleotide
gcaaagaccgccaccuucu

SEQ ID NO: 1496629 - RNA, 19 nt, Artificial Sequence
  Description of Artificial Sequence: Synthetic oligonucleotide
guagggcagaugcccggaa

SEQ ID NO: 1496630 - RNA, 19 nt, Artificial Sequence
  Description of Artificial Sequence: Synthetic oligonucleotide
cuaggacgugcacugcagu

SEQ ID NO: 1496631 - RNA, 19 nt, Artificial Sequence
  Description of Artificial Sequence: Synthetic oligonucleotide
cauuaacuacugguuugua

SEQ ID NO: 1496632 - RNA, 19 nt, Artificial Sequence
  Description of Artificial Sequence: Synthetic oligonucleotide
ccucuauggugaggcaggg

SEQ ID NO: 1496633 - RNA, 19 nt, Artificial Sequence
  Description of Artificial Sequence: Synthetic oligonucleotide
gguuagcuaaaagaucuuu

SEQ ID NO: 1496634 - RNA, 19 nt, Artificial Sequence
  Description of Artificial Sequence: Synthetic oligonucleotide
ggcuuagaauuagguuggc

SEQ ID NO: 1496635 - RNA, 19 nt, Artificial Sequence
  Description of Artificial Sequence: Synthetic oligonucleotide
ggccugacgcaagaacuca

SEQ ID NO: 1496636 - RNA, 19 nt, Artificial Sequence
  Description of Artificial Sequence: Synthetic oligonucleotide
cccaacaccaagguugaaa

SEQ ID NO: 1496637 - RNA, 19 nt, Artificial Sequence
  Description of Artificial Sequence: Synthetic oligonucleotide
cucuauggugaggcaggga

SEQ ID NO: 1496638 - RNA, 19 nt, Artificial Sequence
  Description of Artificial Sequence: Synthetic oligonucleotide
ggagacuuauggggaaucu

SEQ ID NO: 1496639 - RNA, 19 nt, Artificial Sequence
  Description of Artificial Sequence: Synthetic oligonucleotide
cuggguuugcaaacuuauu

SEQ ID NO: 1496640 - RNA, 19 nt, Artificial Sequence
  Description of Artificial Sequence: Synthetic oligonucleotide
agacgacuacugagucgug

SEQ ID NO: 1496641 - RNA, 19 nt, Artificial Sequence
  Description of Artificial Sequence: Synthetic oligonucleotide
ccgcccacaaaaggacagg

SEQ ID NO: 1496642 - RNA, 19 nt, Artificial Sequence
  Description of Artificial Sequence: Synthetic oligonucleotide
gucgugguggaggcccauc

SEQ ID NO: 1496643 - RNA, 19 nt, Artificial Sequence
  Description of Artificial Sequence: Synthetic oligonucleotide
ggcgugcacugaaagggaa

SEQ ID NO: 1496644 - RNA, 19 nt, Artificial Sequence
  Description of Artificial Sequence: Synthetic oligonucleotide
cuuggacgcggagacuuau

SEQ ID NO: 1496645 - RNA, 19 nt, Artificial Sequence
  Description of Artificial Sequence: Synthetic oligonucleotide
cggcucuguaaggacagac

SEQ ID NO: 1496646 - RNA, 19 nt, Artificial Sequence
  Description of Artificial Sequence: Synthetic oligonucleotide
agucgugguggaggcccau

SEQ ID NO: 1496647 - RNA, 19 nt, Artificial Sequence
  Description of Artificial Sequence: Synthetic oligonucleotide
ggcuucgagacagccagau

SEQ ID NO: 1496648 - RNA, 19 nt, Artificial Sequence
  Description of Artificial Sequence: Synthetic oligonucleotide
cugcagucagugggagcca

SEQ ID NO: 1496649 - RNA, 19 nt, Artificial Sequence
  Description of Artificial Sequence: Synthetic oligonucleotide
gcgugcacugaaagggaaa

SEQ ID NO: 1496650 - RNA, 19 nt, Artificial Sequence
  Description of Artificial Sequence: Synthetic oligonucleotide
guccuggcgugcacugaaa

SEQ ID NO: 1496651 - RNA, 19 nt, Artificial Sequence
  Description of Artificial Sequence: Synthetic oligonucleotide
ugccacccuugagguccug

SEQ ID NO: 1496652 - RNA, 19 nt, Artificial Sequence
  Description of Artificial Sequence: Synthetic oligonucleotide
gucugaccauacagugagu

SEQ ID NO: 1496653 - RNA, 19 nt, Artificial Sequence
  Description of Artificial Sequence: Synthetic oligonucleotide
cagcuauagcagggagaaa

SEQ ID NO: 1496654 - RNA, 19 nt, Artificial Sequence
  Description of Artificial Sequence: Synthetic oligonucleotide
gacgugcacugcagucagu

SEQ ID NO: 1496655 - RNA, 19 nt, Artificial Sequence
  Description of Artificial Sequence: Synthetic oligonucleotide
gcccggaauggugggaucu

SEQ ID NO: 1496656 - RNA, 19 nt, Artificial Sequence
  Description of Artificial Sequence: Synthetic oligonucleotide
cgcggagacuuauggggaa

SEQ ID NO: 1496657 - RNA, 19 nt, Artificial Sequence
  Description of Artificial Sequence: Synthetic oligonucleotide
gcggagacuuauggggaau

SEQ ID NO: 1496658 - RNA, 19 nt, Artificial Sequence
  Description of Artificial Sequence: Synthetic oligonucleotide
ccccuugcauagagaugua

SEQ ID NO: 1496659 - RNA, 19 nt, Artificial Sequence
  Description of Artificial Sequence: Synthetic oligonucleotide
cuggugcguccaggucaaa

SEQ ID NO: 1496660 - RNA, 19 nt, Artificial Sequence
  Description of Artificial Sequence: Synthetic oligonucleotide
cgucuuggacgcggagacu

SEQ ID NO: 1496661 - RNA, 19 nt, Artificial Sequence
  Description of Artificial Sequence: Synthetic oligonucleotide
uuugcgaugaaucgcacgg

SEQ ID NO: 1496662 - RNA, 19 nt, Artificial Sequence
  Description of Artificial Sequence: Synthetic oligonucleotide
aauauguccacccuucuug

SEQ ID NO: 1496663 - RNA, 19 nt, Artificial Sequence
  Description of Artificial Sequence: Synthetic oligonucleotide
uuuaacguccuuuggagcg

SEQ ID NO: 1496664 - RNA, 19 nt, Artificial Sequence
  Description of Artificial Sequence: Synthetic oligonucleotide
acuauaaugauuuaugaaa

SEQ ID NO: 1496665 - RNA, 19 nt, Artificial Sequence
  Description of Artificial Sequence: Synthetic oligonucleotide
uguuccauaauuauuacua

SEQ ID NO: 1496666 - RNA, 19 nt, Artificial Sequence
  Description of Artificial Sequence: Synthetic oligonucleotide
uguauguugagcacagggg

SEQ ID NO: 1496667 - RNA, 19 nt, Artificial Sequence
  Description of Artificial Sequence: Synthetic oligonucleotide
aaaccuuacucucuguguc

SEQ ID NO: 1496668 - RNA, 19 nt, Artificial Sequence
  Description of Artificial Sequence: Synthetic oligonucleotide
aagguuuugcgaugaaucg

SEQ ID NO: 1496669 - RNA, 19 nt, Artificial Sequence
  Description of Artificial Sequence: Synthetic oligonucleotide
uccauaauuauuacuauaa

SEQ ID NO: 1496670 - RNA, 19 nt, Artificial Sequence
  Description of Artificial Sequence: Synthetic oligonucleotide
aaagagugggcacaccacg

SEQ ID NO: 1496671 - RNA, 19 nt, Artificial Sequence
  Description of Artificial Sequence: Synthetic oligonucleotide
auaauauuggagaagagug

SEQ ID NO: 1496672 - RNA, 19 nt, Artificial Sequence
  Description of Artificial Sequence: Synthetic oligonucleotide
auuuuaacguccuuuggag

SEQ ID NO: 1496673 - RNA, 19 nt, Artificial Sequence
  Description of Artificial Sequence: Synthetic oligonucleotide
aauaucgagagacgucacg

SEQ ID NO: 1496674 - RNA, 19 nt, Artificial Sequence
  Description of Artificial Sequence: Synthetic oligonucleotide
aacuguguuaaauuauugu

SEQ ID NO: 1496675 - RNA, 19 nt, Artificial Sequence
  Description of Artificial Sequence: Synthetic oligonucleotide
cucucagcaaauaaggacc

SEQ ID NO: 1496676 - RNA, 19 nt, Artificial Sequence
  Description of Artificial Sequence: Synthetic oligonucleotide
uagaacaugaacccagacc

SEQ ID NO: 1496677 - RNA, 19 nt, Artificial Sequence
  Description of Artificial Sequence: Synthetic oligonucleotide
cugacucccgauuaaaugg

SEQ ID NO: 1496678 - RNA, 19 nt, Artificial Sequence
  Description of Artificial Sequence: Synthetic oligonucleotide
uuaaauggcuuucucucag

SEQ ID NO: 1496679 - RNA, 19 nt, Artificial Sequence
  Description of Artificial Sequence: Synthetic oligonucleotide
cuacaggcgagcaugaccg

SEQ ID NO: 1496680 - RNA, 19 nt, Artificial Sequence
  Description of Artificial Sequence: Synthetic oligonucleotide
auuacuauaaugauuuaug

SEQ ID NO: 1496681 - RNA, 19 nt, Artificial Sequence
  Description of Artificial Sequence: Synthetic oligonucleotide
cuuuaccucacuuaguaac

SEQ ID NO: 1496682 - RNA, 19 nt, Artificial Sequence
  Description of Artificial Sequence: Synthetic oligonucleotide
auuccuaugcuccagcuug

SEQ ID NO: 1496683 - RNA, 19 nt, Artificial Sequence
  Description of Artificial Sequence: Synthetic oligonucleotide
aaugucuacccguaugaug

SEQ ID NO: 1496684 - RNA, 19 nt, Artificial Sequence
  Description of Artificial Sequence: Synthetic oligonucleotide
accauaaucccuuccuggc

SEQ ID NO: 1496685 - RNA, 19 nt, Artificial Sequence
  Description of Artificial Sequence: Synthetic oligonucleotide
uugauuuuaacguccuuug

SEQ ID NO: 1496686 - RNA, 19 nt, Artificial Sequence
  Description of Artificial Sequence: Synthetic oligonucleotide
caggccuagaacaugaacc

SEQ ID NO: 1496687 - RNA, 19 nt, Artificial Sequence
  Description of Artificial Sequence: Synthetic oligonucleotide
aggccuagaacaugaaccc

SEQ ID NO: 1496688 - RNA, 19 nt, Artificial Sequence
  Description of Artificial Sequence: Synthetic oligonucleotide
uuuaccucacuuaguaacc

SEQ ID NO: 1496689 - RNA, 19 nt, Artificial Sequence
  Description of Artificial Sequence: Synthetic oligonucleotide
caaacuucacuguagugcc

SEQ ID NO: 1496690 - RNA, 19 nt, Artificial Sequence
  Description of Artificial Sequence: Synthetic oligonucleotide
agaucuugauuuuaacguc

SEQ ID NO: 1496691 - RNA, 19 nt, Artificial Sequence
  Description of Artificial Sequence: Synthetic oligonucleotide
uauuggagaagaguguccg

SEQ ID NO: 1496692 - RNA, 19 nt, Artificial Sequence
  Description of Artificial Sequence: Synthetic oligonucleotide
cuaucuaggacaucugccc

SEQ ID NO: 1496693 - RNA, 19 nt, Artificial Sequence
  Description of Artificial Sequence: Synthetic oligonucleotide
augucuacccguaugaugg

SEQ ID NO: 1496694 - RNA, 19 nt, Artificial Sequence
  Description of Artificial Sequence: Synthetic oligonucleotide
ugaaagagugggcacacca

SEQ ID NO: 1496695 - RNA, 19 nt, Artificial Sequence
  Description of Artificial Sequence: Synthetic oligonucleotide
gauuuuaacguccuuugga

SEQ ID NO: 1496696 - RNA, 19 nt, Artificial Sequence
  Description of Artificial Sequence: Synthetic oligonucleotide
aagaucggagcaaggaacc

SEQ ID NO: 1496697 - RNA, 19 nt, Artificial Sequence
  Description of Artificial Sequence: Synthetic oligonucleotide
uaauauuggagaagagugu

SEQ ID NO: 1496698 - RNA, 19 nt, Artificial Sequence
  Description of Artificial Sequence: Synthetic oligonucleotide
aaggaccauaaucccuucc

SEQ ID NO: 1496699 - RNA, 19 nt, Artificial Sequence
  Description of Artificial Sequence: Synthetic oligonucleotide
ugagagcauaauauuggag

SEQ ID NO: 1496700 - RNA, 19 nt, Artificial Sequence
  Description of Artificial Sequence: Synthetic oligonucleotide
ucggguugaauuccuaugc

SEQ ID NO: 1496701 - RNA, 19 nt, Artificial Sequence
  Description of Artificial Sequence: Synthetic oligonucleotide
uucuuuaccucacuuagua

SEQ ID NO: 1496702 - RNA, 19 nt, Artificial Sequence
  Description of Artificial Sequence: Synthetic oligonucleotide
uacuauaaugauuuaugaa

SEQ ID NO: 1496703 - RNA, 19 nt, Artificial Sequence
  Description of Artificial Sequence: Synthetic oligonucleotide
gagaucuugauuuuaacgu

SEQ ID NO: 1496704 - RNA, 19 nt, Artificial Sequence
  Description of Artificial Sequence: Synthetic oligonucleotide
uuaaagaguguugaacccc

SEQ ID NO: 1496705 - RNA, 19 nt, Artificial Sequence
  Description of Artificial Sequence: Synthetic oligonucleotide
acuguguuaaauuauuguu

SEQ ID NO: 1496706 - RNA, 19 nt, Artificial Sequence
  Description of Artificial Sequence: Synthetic oligonucleotide
aaggguguacugcaccuuc

SEQ ID NO: 1496707 - RNA, 19 nt, Artificial Sequence
  Description of Artificial Sequence: Synthetic oligonucleotide
gaaggccaguacuucaugg

SEQ ID NO: 1496708 - RNA, 19 nt, Artificial Sequence
  Description of Artificial Sequence: Synthetic oligonucleotide
cuaugcuccagcuugggac

SEQ ID NO: 1496709 - RNA, 19 nt, Artificial Sequence
  Description of Artificial Sequence: Synthetic oligonucleotide
ucacuuaguaaccugucuc

SEQ ID NO: 1496710 - RNA, 19 nt, Artificial Sequence
  Description of Artificial Sequence: Synthetic oligonucleotide
auaucgagagacgucacgg

SEQ ID NO: 1496711 - RNA, 19 nt, Artificial Sequence
  Description of Artificial Sequence: Synthetic oligonucleotide
uuuugcgaugaaucgcacg

SEQ ID NO: 1496712 - RNA, 19 nt, Artificial Sequence
  Description of Artificial Sequence: Synthetic oligonucleotide
auagccguuccugaggagc

SEQ ID NO: 1496713 - RNA, 19 nt, Artificial Sequence
  Description of Artificial Sequence: Synthetic oligonucleotide
aauccauguggaguauagc

SEQ ID NO: 1496714 - RNA, 19 nt, Artificial Sequence
  Description of Artificial Sequence: Synthetic oligonucleotide
aauuauuguucagcucugg

SEQ ID NO: 1496715 - RNA, 19 nt, Artificial Sequence
  Description of Artificial Sequence: Synthetic oligonucleotide
ucagccgagguguagaagu

SEQ ID NO: 1496716 - RNA, 19 nt, Artificial Sequence
  Description of Artificial Sequence: Synthetic oligonucleotide
ucaaauaucgagagacguc

SEQ ID NO: 1496717 - RNA, 19 nt, Artificial Sequence
  Description of Artificial Sequence: Synthetic oligonucleotide
caagaucggagcaaggaac

SEQ ID NO: 1496718 - RNA, 19 nt, Artificial Sequence
  Description of Artificial Sequence: Synthetic oligonucleotide
uuaaauuauuguucagcuc

SEQ ID NO: 1496719 - RNA, 19 nt, Artificial Sequence
  Description of Artificial Sequence: Synthetic oligonucleotide
gaucuugauuuuaacgucc

SEQ ID NO: 1496720 - RNA, 19 nt, Artificial Sequence
  Description of Artificial Sequence: Synthetic oligonucleotide
guuaaauuauuguucagcu

SEQ ID NO: 1496721 - RNA, 19 nt, Artificial Sequence
  Description of Artificial Sequence: Synthetic oligonucleotide
uuuuguggguugauggaca

SEQ ID NO: 1496722 - RNA, 19 nt, Artificial Sequence
  Description of Artificial Sequence: Synthetic oligonucleotide
uuaguaaccugucuccaaa

SEQ ID NO: 1496723 - RNA, 19 nt, Artificial Sequence
  Description of Artificial Sequence: Synthetic oligonucleotide
ggcauuagaagguuuugcg

SEQ ID NO: 1496724 - RNA, 19 nt, Artificial Sequence
  Description of Artificial Sequence: Synthetic oligonucleotide
augcagcuaaaccuuacuc

SEQ ID NO: 1496725 - RNA, 19 nt, Artificial Sequence
  Description of Artificial Sequence: Synthetic oligonucleotide
uccuaucuaggacaucugc

SEQ ID NO: 1496726 - RNA, 19 nt, Artificial Sequence
  Description of Artificial Sequence: Synthetic oligonucleotide
ucucccaauauguccaccc

SEQ ID NO: 1496727 - RNA, 19 nt, Artificial Sequence
  Description of Artificial Sequence: Synthetic oligonucleotide
ucaagaucggagcaaggaa

SEQ ID NO: 1496728 - RNA, 19 nt, Artificial Sequence
  Description of Artificial Sequence: Synthetic oligonucleotide
uggagaagaguguccgucg

SEQ ID NO: 1496729 - RNA, 19 nt, Artificial Sequence
  Description of Artificial Sequence: Synthetic oligonucleotide
ucccuagucaguccuaucu

SEQ ID NO: 1496730 - RNA, 19 nt, Artificial Sequence
  Description of Artificial Sequence: Synthetic oligonucleotide
aagaguguccgucgaaggu

SEQ ID NO: 1496731 - RNA, 19 nt, Artificial Sequence
  Description of Artificial Sequence: Synthetic oligonucleotide
auuagaagguuuugcgaug

SEQ ID NO: 1496732 - RNA, 19 nt, Artificial Sequence
  Description of Artificial Sequence: Synthetic oligonucleotide
agguuuugcgaugaaucgc

SEQ ID NO: 1496733 - RNA, 19 nt, Artificial Sequence
  Description of Artificial Sequence: Synthetic oligonucleotide
uuuggagcgagcuucuuua

SEQ ID NO: 1496734 - RNA, 19 nt, Artificial Sequence
  Description of Artificial Sequence: Synthetic oligonucleotide
ucucagcaaauaaggacca

SEQ ID NO: 1496735 - RNA, 19 nt, Artificial Sequence
  Description of Artificial Sequence: Synthetic oligonucleotide
aguccuaucuaggacaucu

SEQ ID NO: 1496736 - RNA, 19 nt, Artificial Sequence
  Description of Artificial Sequence: Synthetic oligonucleotide
ucaauugugcugccgucug

SEQ ID NO: 1496737 - RNA, 19 nt, Artificial Sequence
  Description of Artificial Sequence: Synthetic oligonucleotide
agugggcacaccacgagcc

SEQ ID NO: 1496738 - RNA, 19 nt, Artificial Sequence
  Description of Artificial Sequence: Synthetic oligonucleotide
uguggaguauagccguucc

SEQ ID NO: 1496739 - RNA, 19 nt, Artificial Sequence
  Description of Artificial Sequence: Synthetic oligonucleotide
auggcuuucucucagcaaa

SEQ ID NO: 1496740 - RNA, 19 nt, Artificial Sequence
  Description of Artificial Sequence: Synthetic oligonucleotide
uggaguauagccguuccug

SEQ ID NO: 1496741 - RNA, 19 nt, Artificial Sequence
  Description of Artificial Sequence: Synthetic oligonucleotide
ugacucccgauuaaauggc

SEQ ID NO: 1496742 - RNA, 19 nt, Artificial Sequence
  Description of Artificial Sequence: Synthetic oligonucleotide
aaggccaguacuucaugga

SEQ ID NO: 1496743 - RNA, 19 nt, Artificial Sequence
  Description of Artificial Sequence: Synthetic oligonucleotide
gaugaaucgcacgggagcc

SEQ ID NO: 1496744 - RNA, 19 nt, Artificial Sequence
  Description of Artificial Sequence: Synthetic oligonucleotide
uaucuaggacaucugccca

SEQ ID NO: 1496745 - RNA, 19 nt, Artificial Sequence
  Description of Artificial Sequence: Synthetic oligonucleotide
uuuguggguugauggacag

SEQ ID NO: 1496746 - RNA, 19 nt, Artificial Sequence
  Description of Artificial Sequence: Synthetic oligonucleotide
uucuugggcauuagaaggu

SEQ ID NO: 1496747 - RNA, 19 nt, Artificial Sequence
  Description of Artificial Sequence: Synthetic oligonucleotide
uccugaggagcugagaucu

SEQ ID NO: 1496748 - RNA, 19 nt, Artificial Sequence
  Description of Artificial Sequence: Synthetic oligonucleotide
uuccuugcgcaacagcagc

SEQ ID NO: 1496749 - RNA, 19 nt, Artificial Sequence
  Description of Artificial Sequence: Synthetic oligonucleotide
caaauaucgagagacguca

SEQ ID NO: 1496750 - RNA, 19 nt, Artificial Sequence
  Description of Artificial Sequence: Synthetic oligonucleotide
aaauaucgagagacgucac

SEQ ID NO: 1496751 - RNA, 19 nt, Artificial Sequence
  Description of Artificial Sequence: Synthetic oligonucleotide
gcaaacuucacuguagugc

SEQ ID NO: 1496752 - RNA, 19 nt, Artificial Sequence
  Description of Artificial Sequence: Synthetic oligonucleotide
uuguuccauaauuauuacu

SEQ ID NO: 1496753 - RNA, 19 nt, Artificial Sequence
  Description of Artificial Sequence: Synthetic oligonucleotide
aaauggggcaugugagugu

SEQ ID NO: 1496754 - RNA, 19 nt, Artificial Sequence
  Description of Artificial Sequence: Synthetic oligonucleotide
aggaccauaaucccuuccu

SEQ ID NO: 1496755 - RNA, 19 nt, Artificial Sequence
  Description of Artificial Sequence: Synthetic oligonucleotide
gaguauagccguuccugag

SEQ ID NO: 1496756 - RNA, 19 nt, Artificial Sequence
  Description of Artificial Sequence: Synthetic oligonucleotide
uucuagagggaggugagga

SEQ ID NO: 1496757 - RNA, 19 nt, Artificial Sequence
  Description of Artificial Sequence: Synthetic oligonucleotide
uggaaggguguacugcacc

SEQ ID NO: 1496758 - RNA, 19 nt, Artificial Sequence
  Description of Artificial Sequence: Synthetic oligonucleotide
agcuaaaccuuacucucug

SEQ ID NO: 1496759 - RNA, 19 nt, Artificial Sequence
  Description of Artificial Sequence: Synthetic oligonucleotide
gguugaauuccuaugcucc

SEQ ID NO: 1496760 - RNA, 19 nt, Artificial Sequence
  Description of Artificial Sequence: Synthetic oligonucleotide
ugcgaugaaucgcacggga

SEQ ID NO: 1496761 - RNA, 19 nt, Artificial Sequence
  Description of Artificial Sequence: Synthetic oligonucleotide
caguacuucauggagcccc

SEQ ID NO: 1496762 - RNA, 19 nt, Artificial Sequence
  Description of Artificial Sequence: Synthetic oligonucleotide
uaguaaccugucuccaaag

SEQ ID NO: 1496763 - RNA, 19 nt, Artificial Sequence
  Description of Artificial Sequence: Synthetic oligonucleotide
caacuguguuaaauuauug

SEQ ID NO: 1496764 - RNA, 19 nt, Artificial Sequence
  Description of Artificial Sequence: Synthetic oligonucleotide
uaugcuccagcuugggacu

SEQ ID NO: 1496765 - RNA, 19 nt, Artificial Sequence
  Description of Artificial Sequence: Synthetic oligonucleotide
agaguguccgucgaagguc

SEQ ID NO: 1496766 - RNA, 19 nt, Artificial Sequence
  Description of Artificial Sequence: Synthetic oligonucleotide
guucagggauucuagcccc

SEQ ID NO: 1496767 - RNA, 19 nt, Artificial Sequence
  Description of Artificial Sequence: Synthetic oligonucleotide
cagccucaaauaucgagag

SEQ ID NO: 1496768 - RNA, 19 nt, Artificial Sequence
  Description of Artificial Sequence: Synthetic oligonucleotide
aauuccuaugcuccagcuu

SEQ ID NO: 1496769 - RNA, 19 nt, Artificial Sequence
  Description of Artificial Sequence: Synthetic oligonucleotide
ucuaggacaucugcccagg

SEQ ID NO: 1496770 - RNA, 19 nt, Artificial Sequence
  Description of Artificial Sequence: Synthetic oligonucleotide
aggccaguacuucauggag

SEQ ID NO: 1496771 - RNA, 19 nt, Artificial Sequence
  Description of Artificial Sequence: Synthetic oligonucleotide
uaucgagagacgucacggc

SEQ ID NO: 1496772 - RNA, 19 nt, Artificial Sequence
  Description of Artificial Sequence: Synthetic oligonucleotide
aucuaggacaucugcccag

SEQ ID NO: 1496773 - RNA, 19 nt, Artificial Sequence
  Description of Artificial Sequence: Synthetic oligonucleotide
gacgucacggcccgcaaug

SEQ ID NO: 1496774 - RNA, 19 nt, Artificial Sequence
  Description of Artificial Sequence: Synthetic oligonucleotide
aauggagaacuguucccua

SEQ ID NO: 1496775 - RNA, 19 nt, Artificial Sequence
  Description of Artificial Sequence: Synthetic oligonucleotide
uggagcgagcuucuuuacc

SEQ ID NO: 1496776 - RNA, 19 nt, Artificial Sequence
  Description of Artificial Sequence: Synthetic oligonucleotide
ugaugguccggacaaccuc

SEQ ID NO: 1496777 - RNA, 19 nt, Artificial Sequence
  Description of Artificial Sequence: Synthetic oligonucleotide
acccguaugauggagugug

SEQ ID NO: 1496778 - RNA, 19 nt, Artificial Sequence
  Description of Artificial Sequence: Synthetic oligonucleotide
uugggcauuagaagguuuu

SEQ ID NO: 1496779 - RNA, 19 nt, Artificial Sequence
  Description of Artificial Sequence: Synthetic oligonucleotide
ucagcaaauaaggaccaua

SEQ ID NO: 1496780 - RNA, 19 nt, Artificial Sequence
  Description of Artificial Sequence: Synthetic oligonucleotide
ucuuuaccucacuuaguaa

SEQ ID NO: 1496781 - RNA, 19 nt, Artificial Sequence
  Description of Artificial Sequence: Synthetic oligonucleotide
auucuagccccagugggag

SEQ ID NO: 1496782 - RNA, 19 nt, Artificial Sequence
  Description of Artificial Sequence: Synthetic oligonucleotide
ggagcugucagaacaaaug

SEQ ID NO: 1496783 - RNA, 19 nt, Artificial Sequence
  Description of Artificial Sequence: Synthetic oligonucleotide
cuucaagaucggagcaagg

SEQ ID NO: 1496784 - RNA, 19 nt, Artificial Sequence
  Description of Artificial Sequence: Synthetic oligonucleotide
agagugggcacaccacgag

SEQ ID NO: 1496785 - RNA, 19 nt, Artificial Sequence
  Description of Artificial Sequence: Synthetic oligonucleotide
acaccaacucaaugucggg

SEQ ID NO: 1496786 - RNA, 19 nt, Artificial Sequence
  Description of Artificial Sequence: Synthetic oligonucleotide
cauaauauuggagaagagu

SEQ ID NO: 1496787 - RNA, 19 nt, Artificial Sequence
  Description of Artificial Sequence: Synthetic oligonucleotide
cauaaucccuuccuggcca

SEQ ID NO: 1496788 - RNA, 19 nt, Artificial Sequence
  Description of Artificial Sequence: Synthetic oligonucleotide
cuuggucucuaaagccucc

SEQ ID NO: 1496789 - RNA, 19 nt, Artificial Sequence
  Description of Artificial Sequence: Synthetic oligonucleotide
uccggacaaccucaaacuc

SEQ ID NO: 1496790 - RNA, 19 nt, Artificial Sequence
  Description of Artificial Sequence: Synthetic oligonucleotide
guauagccguuccugagga

SEQ ID NO: 1496791 - RNA, 19 nt, Artificial Sequence
  Description of Artificial Sequence: Synthetic oligonucleotide
ggagcugagaucuugauuu

SEQ ID NO: 1496792 - RNA, 19 nt, Artificial Sequence
  Description of Artificial Sequence: Synthetic oligonucleotide
agcaugaccgcaccaccug

SEQ ID NO: 1496793 - RNA, 19 nt, Artificial Sequence
  Description of Artificial Sequence: Synthetic oligonucleotide
auaaucccuuccuggccag

SEQ ID NO: 1496794 - RNA, 19 nt, Artificial Sequence
  Description of Artificial Sequence: Synthetic oligonucleotide
cuugaaagagugggcacac

SEQ ID NO: 1496795 - RNA, 19 nt, Artificial Sequence
  Description of Artificial Sequence: Synthetic oligonucleotide
gguccggacaaccucaaac

SEQ ID NO: 1496796 - RNA, 19 nt, Artificial Sequence
  Description of Artificial Sequence: Synthetic oligonucleotide
accaacucaaugucggguu

SEQ ID NO: 1496797 - RNA, 19 nt, Artificial Sequence
  Description of Artificial Sequence: Synthetic oligonucleotide
gagugggcacaccacgagc

SEQ ID NO: 1496798 - RNA, 19 nt, Artificial Sequence
  Description of Artificial Sequence: Synthetic oligonucleotide
aaugucggguugaauuccu

SEQ ID NO: 1496799 - RNA, 19 nt, Artificial Sequence
  Description of Artificial Sequence: Synthetic oligonucleotide
caaugucggguugaauucc

SEQ ID NO: 1496800 - RNA, 19 nt, Artificial Sequence
  Description of Artificial Sequence: Synthetic oligonucleotide
guagugccuugaaagagug

SEQ ID NO: 1496801 - RNA, 19 nt, Artificial Sequence
  Description of Artificial Sequence: Synthetic oligonucleotide
cugagagcauaauauugga

SEQ ID NO: 1496802 - RNA, 19 nt, Artificial Sequence
  Description of Artificial Sequence: Synthetic oligonucleotide
ugucggguugaauuccuau

SEQ ID NO: 1496803 - RNA, 19 nt, Artificial Sequence
  Description of Artificial Sequence: Synthetic oligonucleotide
gauggcgaaggccaguacu

SEQ ID NO: 1496804 - RNA, 19 nt, Artificial Sequence
  Description of Artificial Sequence: Synthetic oligonucleotide
gaguguccgucgaaggucc

SEQ ID NO: 1496805 - RNA, 19 nt, Artificial Sequence
  Description of Artificial Sequence: Synthetic oligonucleotide
aaacucagccgagguguag

SEQ ID NO: 1496806 - RNA, 19 nt, Artificial Sequence
  Description of Artificial Sequence: Synthetic oligonucleotide
uagccguuccugaggagcu

SEQ ID NO: 1496807 - RNA, 19 nt, Artificial Sequence
  Description of Artificial Sequence: Synthetic oligonucleotide
uugcgaugaaucgcacggg

SEQ ID NO: 1496808 - RNA, 19 nt, Artificial Sequence
  Description of Artificial Sequence: Synthetic oligonucleotide
uuaacguccuuuggagcga

SEQ ID NO: 1496809 - RNA, 19 nt, Artificial Sequence
  Description of Artificial Sequence: Synthetic oligonucleotide
aagagugggcacaccacga

SEQ ID NO: 1496810 - RNA, 19 nt, Artificial Sequence
  Description of Artificial Sequence: Synthetic oligonucleotide
auuggagaagaguguccgu

SEQ ID NO: 1496811 - RNA, 19 nt, Artificial Sequence
  Description of Artificial Sequence: Synthetic oligonucleotide
gauucuagccccaguggga

SEQ ID NO: 1496812 - RNA, 19 nt, Artificial Sequence
  Description of Artificial Sequence: Synthetic oligonucleotide
ggagcaaacuucacuguag

SEQ ID NO: 1496813 - RNA, 19 nt, Artificial Sequence
  Description of Artificial Sequence: Synthetic oligonucleotide
ugcucugacccuuggccac

SEQ ID NO: 1496814 - RNA, 19 nt, Artificial Sequence
  Description of Artificial Sequence: Synthetic oligonucleotide
uauagccguuccugaggag

SEQ ID NO: 1496815 - RNA, 19 nt, Artificial Sequence
  Description of Artificial Sequence: Synthetic oligonucleotide
gcaaugucuacccguauga

SEQ ID NO: 1496816 - RNA, 19 nt, Artificial Sequence
  Description of Artificial Sequence: Synthetic oligonucleotide
agacuuguggauggcgaag

SEQ ID NO: 1496817 - RNA, 19 nt, Artificial Sequence
  Description of Artificial Sequence: Synthetic oligonucleotide
aggcgagcaugaccgcacc

SEQ ID NO: 1496818 - RNA, 19 nt, Artificial Sequence
  Description of Artificial Sequence: Synthetic oligonucleotide
uggggcaugugagugucug

SEQ ID NO: 1496819 - RNA, 19 nt, Artificial Sequence
  Description of Artificial Sequence: Synthetic oligonucleotide
caucaauugugcugccguc

SEQ ID NO: 1496820 - RNA, 19 nt, Artificial Sequence
  Description of Artificial Sequence: Synthetic oligonucleotide
cacaucaauugugcugccg

SEQ ID NO: 1496821 - RNA, 19 nt, Artificial Sequence
  Description of Artificial Sequence: Synthetic oligonucleotide
cucgcucuuugaugguccg

SEQ ID NO: 1496822 - RNA, 19 nt, Artificial Sequence
  Description of Artificial Sequence: Synthetic oligonucleotide
uuccugaggagcugagauc

SEQ ID NO: 1496823 - RNA, 19 nt, Artificial Sequence
  Description of Artificial Sequence: Synthetic oligonucleotide
uuugggucugacucccgau

SEQ ID NO: 1496824 - RNA, 19 nt, Artificial Sequence
  Description of Artificial Sequence: Synthetic oligonucleotide
uguccgucgaagguccaug

SEQ ID NO: 1496825 - RNA, 19 nt, Artificial Sequence
  Description of Artificial Sequence: Synthetic oligonucleotide
ccucaaauaucgagagacg

SEQ ID NO: 1496826 - RNA, 19 nt, Artificial Sequence
  Description of Artificial Sequence: Synthetic oligonucleotide
guccuuuggagcgagcuuc

SEQ ID NO: 1496827 - RNA, 19 nt, Artificial Sequence
  Description of Artificial Sequence: Synthetic oligonucleotide
ucuugauuuuaacguccuu

SEQ ID NO: 1496828 - RNA, 19 nt, Artificial Sequence
  Description of Artificial Sequence: Synthetic oligonucleotide
gguuuugcgaugaaucgca

SEQ ID NO: 1496829 - RNA, 19 nt, Artificial Sequence
  Description of Artificial Sequence: Synthetic oligonucleotide
aggagcugagaucuugauu

SEQ ID NO: 1496830 - RNA, 19 nt, Artificial Sequence
  Description of Artificial Sequence: Synthetic oligonucleotide
aucuugauuuuaacguccu

SEQ ID NO: 1496831 - RNA, 19 nt, Artificial Sequence
  Description of Artificial Sequence: Synthetic oligonucleotide
ugucgcccacuccaguggu

SEQ ID NO: 1496832 - RNA, 19 nt, Artificial Sequence
  Description of Artificial Sequence: Synthetic oligonucleotide
gaauuccuaugcuccagcu

SEQ ID NO: 1496833 - RNA, 19 nt, Artificial Sequence
  Description of Artificial Sequence: Synthetic oligonucleotide
ggaggugaggacaugccug

SEQ ID NO: 1496834 - RNA, 19 nt, Artificial Sequence
  Description of Artificial Sequence: Synthetic oligonucleotide
ucgcacgggagccaucguc

SEQ ID NO: 1496835 - RNA, 19 nt, Artificial Sequence
  Description of Artificial Sequence: Synthetic oligonucleotide
gcaugcaggccccacauca

SEQ ID NO: 1496836 - RNA, 19 nt, Artificial Sequence
  Description of Artificial Sequence: Synthetic oligonucleotide
acggcccgcaaugucuacc

SEQ ID NO: 1496837 - RNA, 19 nt, Artificial Sequence
  Description of Artificial Sequence: Synthetic oligonucleotide
cuaggacaucugcccaggg

SEQ ID NO: 1496838 - RNA, 19 nt, Artificial Sequence
  Description of Artificial Sequence: Synthetic oligonucleotide
cacucccucauugggaaug

SEQ ID NO: 1496839 - RNA, 19 nt, Artificial Sequence
  Description of Artificial Sequence: Synthetic oligonucleotide
ugucuacccguaugaugga

SEQ ID NO: 1496840 - RNA, 19 nt, Artificial Sequence
  Description of Artificial Sequence: Synthetic oligonucleotide
uuggagcgagcuucuuuac

SEQ ID NO: 1496841 - RNA, 19 nt, Artificial Sequence
  Description of Artificial Sequence: Synthetic oligonucleotide
ggguugaauuccuaugcuc

SEQ ID NO: 1496842 - RNA, 19 nt, Artificial Sequence
  Description of Artificial Sequence: Synthetic oligonucleotide
uaacguccuuuggagcgag

SEQ ID NO: 1496843 - RNA, 19 nt, Artificial Sequence
  Description of Artificial Sequence: Synthetic oligonucleotide
cuaaagccuccuccuuuug

SEQ ID NO: 1496844 - RNA, 19 nt, Artificial Sequence
  Description of Artificial Sequence: Synthetic oligonucleotide
caaaaggggucgagggcuc

SEQ ID NO: 1496845 - RNA, 19 nt, Artificial Sequence
  Description of Artificial Sequence: Synthetic oligonucleotide
guccggacaaccucaaacu

SEQ ID NO: 1496846 - RNA, 19 nt, Artificial Sequence
  Description of Artificial Sequence: Synthetic oligonucleotide
ucccgauuaaauggcuuuc

SEQ ID NO: 1496847 - RNA, 19 nt, Artificial Sequence
  Description of Artificial Sequence: Synthetic oligonucleotide
caggcgagcaugaccgcac

SEQ ID NO: 1496848 - RNA, 19 nt, Artificial Sequence
  Description of Artificial Sequence: Synthetic oligonucleotide
cccaauauguccacccuuc

SEQ ID NO: 1496849 - RNA, 19 nt, Artificial Sequence
  Description of Artificial Sequence: Synthetic oligonucleotide
ggaguauagccguuccuga

SEQ ID NO: 1496850 - RNA, 19 nt, Artificial Sequence
  Description of Artificial Sequence: Synthetic oligonucleotide
ugaaucgcacgggagccau

SEQ ID NO: 1496851 - RNA, 19 nt, Artificial Sequence
  Description of Artificial Sequence: Synthetic oligonucleotide
agccucaaauaucgagaga

SEQ ID NO: 1496852 - RNA, 19 nt, Artificial Sequence
  Description of Artificial Sequence: Synthetic oligonucleotide
cgaugaaucgcacgggagc

SEQ ID NO: 1496853 - RNA, 19 nt, Artificial Sequence
  Description of Artificial Sequence: Synthetic oligonucleotide
gagcgagcuucuuuaccuc

SEQ ID NO: 1496854 - RNA, 19 nt, Artificial Sequence
  Description of Artificial Sequence: Synthetic oligonucleotide
ccauaaucccuuccuggcc

SEQ ID NO: 1496855 - RNA, 19 nt, Artificial Sequence
  Description of Artificial Sequence: Synthetic oligonucleotide
uguucccuagucaguccua

SEQ ID NO: 1496856 - RNA, 19 nt, Artificial Sequence
  Description of Artificial Sequence: Synthetic oligonucleotide
uccgucgaagguccauguc

SEQ ID NO: 1496857 - RNA, 19 nt, Artificial Sequence
  Description of Artificial Sequence: Synthetic oligonucleotide
cggacaaccucaaacucag

SEQ ID NO: 1496858 - RNA, 19 nt, Artificial Sequence
  Description of Artificial Sequence: Synthetic oligonucleotide
gggcauuagaagguuuugc

SEQ ID NO: 1496859 - RNA, 19 nt, Artificial Sequence
  Description of Artificial Sequence: Synthetic oligonucleotide
ucgcucuuugaugguccgg

SEQ ID NO: 1496860 - RNA, 19 nt, Artificial Sequence
  Description of Artificial Sequence: Synthetic oligonucleotide
ggagcgagcuucuuuaccu

SEQ ID NO: 1496861 - RNA, 19 nt, Artificial Sequence
  Description of Artificial Sequence: Synthetic oligonucleotide
cuuugggucugacucccga

SEQ ID NO: 1496862 - RNA, 19 nt, Artificial Sequence
  Description of Artificial Sequence: Synthetic oligonucleotide
aaccugucuccaaagccuu

SEQ ID NO: 1496863 - RNA, 19 nt, Artificial Sequence
  Description of Artificial Sequence: Synthetic oligonucleotide
ucacggcccgcaaugucua

SEQ ID NO: 1496864 - RNA, 19 nt, Artificial Sequence
  Description of Artificial Sequence: Synthetic oligonucleotide
aggucugguuggaacagca

SEQ ID NO: 1496865 - RNA, 19 nt, Artificial Sequence
  Description of Artificial Sequence: Synthetic oligonucleotide
aggggcgcuacaggcgagc

SEQ ID NO: 1496866 - RNA, 19 nt, Artificial Sequence
  Description of Artificial Sequence: Synthetic oligonucleotide
uacaggcgagcaugaccgc

SEQ ID NO: 1496867 - RNA, 19 nt, Artificial Sequence
  Description of Artificial Sequence: Synthetic oligonucleotide
gagggucgcccacaccaac

SEQ ID NO: 1496868 - RNA, 19 nt, Artificial Sequence
  Description of Artificial Sequence: Synthetic oligonucleotide
uggauggcgaaggccagua

SEQ ID NO: 1496869 - RNA, 19 nt, Artificial Sequence
  Description of Artificial Sequence: Synthetic oligonucleotide
agcuucaagaucggagcaa

SEQ ID NO: 1496870 - RNA, 19 nt, Artificial Sequence
  Description of Artificial Sequence: Synthetic oligonucleotide
aguacuucauggagccccu

SEQ ID NO: 1496871 - RNA, 19 nt, Artificial Sequence
  Description of Artificial Sequence: Synthetic oligonucleotide
gcugucgcccacuccagug

SEQ ID NO: 1496872 - RNA, 19 nt, Artificial Sequence
  Description of Artificial Sequence: Synthetic oligonucleotide
agaucggagcaaggaacca

SEQ ID NO: 1496873 - RNA, 19 nt, Artificial Sequence
  Description of Artificial Sequence: Synthetic oligonucleotide
ggccaguacuucauggagc

SEQ ID NO: 1496874 - RNA, 19 nt, Artificial Sequence
  Description of Artificial Sequence: Synthetic oligonucleotide
acaggcgagcaugaccgca

SEQ ID NO: 1496875 - RNA, 19 nt, Artificial Sequence
  Description of Artificial Sequence: Synthetic oligonucleotide
gaagaccuuucuagaggga

SEQ ID NO: 1496876 - RNA, 19 nt, Artificial Sequence
  Description of Artificial Sequence: Synthetic oligonucleotide
uucccuagucaguccuauc

SEQ ID NO: 1496877 - RNA, 19 nt, Artificial Sequence
  Description of Artificial Sequence: Synthetic oligonucleotide
cuuugaugguccggacaac

SEQ ID NO: 1496878 - RNA, 19 nt, Artificial Sequence
  Description of Artificial Sequence: Synthetic oligonucleotide
ucgcccacuccagugguuc

SEQ ID NO: 1496879 - RNA, 19 nt, Artificial Sequence
  Description of Artificial Sequence: Synthetic oligonucleotide
cagccgagguguagaaguc

SEQ ID NO: 1496880 - RNA, 19 nt, Artificial Sequence
  Description of Artificial Sequence: Synthetic oligonucleotide
uagcaggcucgcucuuuga

SEQ ID NO: 1496881 - RNA, 19 nt, Artificial Sequence
  Description of Artificial Sequence: Synthetic oligonucleotide
cacuccagugguucaggga

SEQ ID NO: 1496882 - RNA, 19 nt, Artificial Sequence
  Description of Artificial Sequence: Synthetic oligonucleotide
auggcgaaggccaguacuu

SEQ ID NO: 1496883 - RNA, 19 nt, Artificial Sequence
  Description of Artificial Sequence: Synthetic oligonucleotide
cucucccaauauguccacc

SEQ ID NO: 1496884 - RNA, 19 nt, Artificial Sequence
  Description of Artificial Sequence: Synthetic oligonucleotide
guuuugcgaugaaucgcac

SEQ ID NO: 1496885 - RNA, 19 nt, Artificial Sequence
  Description of Artificial Sequence: Synthetic oligonucleotide
gaacaugaacccagaccaa

SEQ ID NO: 1496886 - RNA, 19 nt, Artificial Sequence
  Description of Artificial Sequence: Synthetic oligonucleotide
ggggcaugugagugucugg

SEQ ID NO: 1496887 - RNA, 19 nt, Artificial Sequence
  Description of Artificial Sequence: Synthetic oligonucleotide
gcaugugagugucuggucu

SEQ ID NO: 1496888 - RNA, 19 nt, Artificial Sequence
  Description of Artificial Sequence: Synthetic oligonucleotide
uacccguaugauggagugu

SEQ ID NO: 1496889 - RNA, 19 nt, Artificial Sequence
  Description of Artificial Sequence: Synthetic oligonucleotide
caugcagcuaaaccuuacu

SEQ ID NO: 1496890 - RNA, 19 nt, Artificial Sequence
  Description of Artificial Sequence: Synthetic oligonucleotide
ucgcccacaccaacucaau

SEQ ID NO: 1496891 - RNA, 19 nt, Artificial Sequence
  Description of Artificial Sequence: Synthetic oligonucleotide
gccuugaaagagugggcac

SEQ ID NO: 1496892 - RNA, 19 nt, Artificial Sequence
  Description of Artificial Sequence: Synthetic oligonucleotide
augaaucgcacgggagcca

SEQ ID NO: 1496893 - RNA, 19 nt, Artificial Sequence
  Description of Artificial Sequence: Synthetic oligonucleotide
gccgagguguagaagucag

SEQ ID NO: 1496894 - RNA, 19 nt, Artificial Sequence
  Description of Artificial Sequence: Synthetic oligonucleotide
guccuaucuaggacaucug

SEQ ID NO: 1496895 - RNA, 19 nt, Artificial Sequence
  Description of Artificial Sequence: Synthetic oligonucleotide
cccuucuugggcauuagaa

SEQ ID NO: 1496896 - RNA, 19 nt, Artificial Sequence
  Description of Artificial Sequence: Synthetic oligonucleotide
ccgauuaaauggcuuucuc

SEQ ID NO: 1496897 - RNA, 19 nt, Artificial Sequence
  Description of Artificial Sequence: Synthetic oligonucleotide
uggcgaaggccaguacuuc

SEQ ID NO: 1496898 - RNA, 19 nt, Artificial Sequence
  Description of Artificial Sequence: Synthetic oligonucleotide
caacucaaugucggguuga

SEQ ID NO: 1496899 - RNA, 19 nt, Artificial Sequence
  Description of Artificial Sequence: Synthetic oligonucleotide
gggagcaaacuucacugua

SEQ ID NO: 1496900 - RNA, 19 nt, Artificial Sequence
  Description of Artificial Sequence: Synthetic oligonucleotide
ccgucgaagguccauguca

SEQ ID NO: 1496901 - RNA, 19 nt, Artificial Sequence
  Description of Artificial Sequence: Synthetic oligonucleotide
ccguaugauggaguguggc

SEQ ID NO: 1496902 - RNA, 19 nt, Artificial Sequence
  Description of Artificial Sequence: Synthetic oligonucleotide
ccaugcagcuaaaccuuac

SEQ ID NO: 1496903 - RNA, 19 nt, Artificial Sequence
  Description of Artificial Sequence: Synthetic oligonucleotide
ggucuuggagcuucaagau

SEQ ID NO: 1496904 - RNA, 19 nt, Artificial Sequence
  Description of Artificial Sequence: Synthetic oligonucleotide
agggucgcccacaccaacu

SEQ ID NO: 1496905 - RNA, 19 nt, Artificial Sequence
  Description of Artificial Sequence: Synthetic oligonucleotide
gucgcccacaccaacucaa

SEQ ID NO: 1496906 - RNA, 19 nt, Artificial Sequence
  Description of Artificial Sequence: Synthetic oligonucleotide
acucccgauuaaauggcuu

SEQ ID NO: 1496907 - RNA, 19 nt, Artificial Sequence
  Description of Artificial Sequence: Synthetic oligonucleotide
cuguucccuagucaguccu

SEQ ID NO: 1496908 - RNA, 19 nt, Artificial Sequence
  Description of Artificial Sequence: Synthetic oligonucleotide
cacaccacgagccguggcu

SEQ ID NO: 1496909 - RNA, 19 nt, Artificial Sequence
  Description of Artificial Sequence: Synthetic oligonucleotide
cagguagcaggcucgcucu

SEQ ID NO: 1496910 - RNA, 19 nt, Artificial Sequence
  Description of Artificial Sequence: Synthetic oligonucleotide
cccagaccaaaaggggucg

SEQ ID NO: 1496911 - RNA, 19 nt, Artificial Sequence
  Description of Artificial Sequence: Synthetic oligonucleotide
ccuagaacaugaacccaga

SEQ ID NO: 1496912 - RNA, 19 nt, Artificial Sequence
  Description of Artificial Sequence: Synthetic oligonucleotide
cagcuaaaccuuacucucu

SEQ ID NO: 1496913 - RNA, 19 nt, Artificial Sequence
  Description of Artificial Sequence: Synthetic oligonucleotide
gucacggcccgcaaugucu

SEQ ID NO: 1496914 - RNA, 19 nt, Artificial Sequence
  Description of Artificial Sequence: Synthetic oligonucleotide
gaacuguucccuagucagu

SEQ ID NO: 1496915 - RNA, 19 nt, Artificial Sequence
  Description of Artificial Sequence: Synthetic oligonucleotide
cucccgauuaaauggcuuu

SEQ ID NO: 1496916 - RNA, 19 nt, Artificial Sequence
  Description of Artificial Sequence: Synthetic oligonucleotide
gagcaugaccgcaccaccu

SEQ ID NO: 1496917 - RNA, 19 nt, Artificial Sequence
  Description of Artificial Sequence: Synthetic oligonucleotide
acucaaugucggguugaau

SEQ ID NO: 1496918 - RNA, 19 nt, Artificial Sequence
  Description of Artificial Sequence: Synthetic oligonucleotide
ccuugaaagagugggcaca

SEQ ID NO: 1496919 - RNA, 19 nt, Artificial Sequence
  Description of Artificial Sequence: Synthetic oligonucleotide
cccguaugauggagugugg

SEQ ID NO: 1496920 - RNA, 19 nt, Artificial Sequence
  Description of Artificial Sequence: Synthetic oligonucleotide
gcgagcaugaccgcaccac

SEQ ID NO: 1496921 - RNA, 19 nt, Artificial Sequence
  Description of Artificial Sequence: Synthetic oligonucleotide
caugaccgcaccaccugcu

SEQ ID NO: 1496922 - RNA, 19 nt, Artificial Sequence
  Description of Artificial Sequence: Synthetic oligonucleotide
cagugguucagggauucua

SEQ ID NO: 1496923 - RNA, 19 nt, Artificial Sequence
  Description of Artificial Sequence: Synthetic oligonucleotide
caauauguccacccuucuu

SEQ ID NO: 1496924 - RNA, 19 nt, Artificial Sequence
  Description of Artificial Sequence: Synthetic oligonucleotide
aucgcacgggagccaucgu

SEQ ID NO: 1496925 - RNA, 19 nt, Artificial Sequence
  Description of Artificial Sequence: Synthetic oligonucleotide
caugugagugucuggucuu

SEQ ID NO: 1496926 - RNA, 19 nt, Artificial Sequence
  Description of Artificial Sequence: Synthetic oligonucleotide
gggucgcccacaccaacuc

SEQ ID NO: 1496927 - RNA, 19 nt, Artificial Sequence
  Description of Artificial Sequence: Synthetic oligonucleotide
ggcccgcaaugucuacccg

SEQ ID NO: 1496928 - RNA, 19 nt, Artificial Sequence
  Description of Artificial Sequence: Synthetic oligonucleotide
gacucccgauuaaauggcu

SEQ ID NO: 1496929 - RNA, 19 nt, Artificial Sequence
  Description of Artificial Sequence: Synthetic oligonucleotide
caccaacucaaugucgggu

SEQ ID NO: 1496930 - RNA, 19 nt, Artificial Sequence
  Description of Artificial Sequence: Synthetic oligonucleotide
ccacacucccucauuggga

SEQ ID NO: 1496931 - RNA, 19 nt, Artificial Sequence
  Description of Artificial Sequence: Synthetic oligonucleotide
gaggggcgcuacaggcgag

SEQ ID NO: 1496932 - RNA, 19 nt, Artificial Sequence
  Description of Artificial Sequence: Synthetic oligonucleotide
cacccuucuugggcauuag

SEQ ID NO: 1496933 - RNA, 19 nt, Artificial Sequence
  Description of Artificial Sequence: Synthetic oligonucleotide
guccgucgaagguccaugu

SEQ ID NO: 1496934 - RNA, 19 nt, Artificial Sequence
  Description of Artificial Sequence: Synthetic oligonucleotide
gagcugagaucuugauuuu

SEQ ID NO: 1496935 - RNA, 19 nt, Artificial Sequence
  Description of Artificial Sequence: Synthetic oligonucleotide
ggauggcgaaggccaguac

SEQ ID NO: 1496936 - RNA, 19 nt, Artificial Sequence
  Description of Artificial Sequence: Synthetic oligonucleotide
ccaaaaggggucgagggcu

SEQ ID NO: 1496937 - RNA, 19 nt, Artificial Sequence
  Description of Artificial Sequence: Synthetic oligonucleotide
cacggcccgcaaugucuac

SEQ ID NO: 1496938 - RNA, 19 nt, Artificial Sequence
  Description of Artificial Sequence: Synthetic oligonucleotide
gaaucgcacgggagccauc

SEQ ID NO: 1496939 - RNA, 19 nt, Artificial Sequence
  Description of Artificial Sequence: Synthetic oligonucleotide
agagggucgcccacaccaa

SEQ ID NO: 1496940 - RNA, 19 nt, Artificial Sequence
  Description of Artificial Sequence: Synthetic oligonucleotide
ccuuugggucugacucccg

SEQ ID NO: 1496941 - RNA, 19 nt, Artificial Sequence
  Description of Artificial Sequence: Synthetic oligonucleotide
ggucgcccacaccaacuca

SEQ ID NO: 1496942 - RNA, 19 nt, Artificial Sequence
  Description of Artificial Sequence: Synthetic oligonucleotide
ggccuagaacaugaaccca

SEQ ID NO: 1496943 - RNA, 19 nt, Artificial Sequence
  Description of Artificial Sequence: Synthetic oligonucleotide
agguagcaggcucgcucuu

SEQ ID NO: 1496944 - RNA, 19 nt, Artificial Sequence
  Description of Artificial Sequence: Synthetic oligonucleotide
ccacaucaauugugcugcc

SEQ ID NO: 1496945 - RNA, 19 nt, Artificial Sequence
  Description of Artificial Sequence: Synthetic oligonucleotide
gucugacucccgauuaaau

SEQ ID NO: 1496946 - RNA, 19 nt, Artificial Sequence
  Description of Artificial Sequence: Synthetic oligonucleotide
cggcccgcaaugucuaccc

SEQ ID NO: 1496947 - RNA, 19 nt, Artificial Sequence
  Description of Artificial Sequence: Synthetic oligonucleotide
gggucugacucccgauuaa

SEQ ID NO: 1496948 - RNA, 19 nt, Artificial Sequence
  Description of Artificial Sequence: Synthetic oligonucleotide
cccacuccagugguucagg

SEQ ID NO: 1496949 - RNA, 19 nt, Artificial Sequence
  Description of Artificial Sequence: Synthetic oligonucleotide
gggcaugugagugucuggu

SEQ ID NO: 1496950 - RNA, 19 nt, Artificial Sequence
  Description of Artificial Sequence: Synthetic oligonucleotide
gcuaaaccuuacucucugu

SEQ ID NO: 1496951 - RNA, 19 nt, Artificial Sequence
  Description of Artificial Sequence: Synthetic oligonucleotide
guucccuagucaguccuau

SEQ ID NO: 1496952 - RNA, 19 nt, Artificial Sequence
  Description of Artificial Sequence: Synthetic oligonucleotide
ggggagcaaacuucacugu

SEQ ID NO: 1496953 - RNA, 19 nt, Artificial Sequence
  Description of Artificial Sequence: Synthetic oligonucleotide
ugccgucuggaagggugua

SEQ ID NO: 1496954 - RNA, 19 nt, Artificial Sequence
  Description of Artificial Sequence: Synthetic oligonucleotide
gcacaccacgagccguggc

SEQ ID NO: 1496955 - RNA, 19 nt, Artificial Sequence
  Description of Artificial Sequence: Synthetic oligonucleotide
cuagccccagugggagcug

SEQ ID NO: 1496956 - RNA, 19 nt, Artificial Sequence
  Description of Artificial Sequence: Synthetic oligonucleotide
gcccacuccagugguucag

SEQ ID NO: 1496957 - RNA, 19 nt, Artificial Sequence
  Description of Artificial Sequence: Synthetic oligonucleotide
ggcgagcaugaccgcacca

SEQ ID NO: 1496958 - RNA, 19 nt, Artificial Sequence
  Description of Artificial Sequence: Synthetic oligonucleotide
uccacccuucuugggcauu

SEQ ID NO: 1496959 - RNA, 19 nt, Artificial Sequence
  Description of Artificial Sequence: Synthetic oligonucleotide
caguccuaucuaggacauc

SEQ ID NO: 1496960 - RNA, 19 nt, Artificial Sequence
  Description of Artificial Sequence: Synthetic oligonucleotide
caaugucuacccguaugau

SEQ ID NO: 1496961 - RNA, 19 nt, Artificial Sequence
  Description of Artificial Sequence: Synthetic oligonucleotide
gguguagaagucagccccu

SEQ ID NO: 1496962 - RNA, 19 nt, Artificial Sequence
  Description of Artificial Sequence: Synthetic oligonucleotide
aguguccgucgaaggucca

SEQ ID NO: 1496963 - RNA, 19 nt, Artificial Sequence
  Description of Artificial Sequence: Synthetic oligonucleotide
cugccgucuggaagggugu

SEQ ID NO: 1496964 - RNA, 19 nt, Artificial Sequence
  Description of Artificial Sequence: Synthetic oligonucleotide
augucggguugaauuccua

SEQ ID NO: 1496965 - RNA, 19 nt, Artificial Sequence
  Description of Artificial Sequence: Synthetic oligonucleotide
cauguggaguauagccguu

SEQ ID NO: 1496966 - RNA, 19 nt, Artificial Sequence
  Description of Artificial Sequence: Synthetic oligonucleotide
ggcuuucucucagcaaaua

SEQ ID NO: 1496967 - RNA, 19 nt, Artificial Sequence
  Description of Artificial Sequence: Synthetic oligonucleotide
gcccgcaaugucuacccgu

SEQ ID NO: 1496968 - RNA, 19 nt, Artificial Sequence
  Description of Artificial Sequence: Synthetic oligonucleotide
auggggcaugugagugucu

SEQ ID NO: 1496969 - RNA, 19 nt, Artificial Sequence
  Description of Artificial Sequence: Synthetic oligonucleotide
cccgcaaugucuacccgua

SEQ ID NO: 1496970 - RNA, 19 nt, Artificial Sequence
  Description of Artificial Sequence: Synthetic oligonucleotide
cagggauucuagccccagu

SEQ ID NO: 1496971 - RNA, 19 nt, Artificial Sequence
  Description of Artificial Sequence: Synthetic oligonucleotide
cccuagucaguccuaucua

SEQ ID NO: 1496972 - RNA, 19 nt, Artificial Sequence
  Description of Artificial Sequence: Synthetic oligonucleotide
gccgucuggaaggguguac

SEQ ID NO: 1496973 - RNA, 19 nt, Artificial Sequence
  Description of Artificial Sequence: Synthetic oligonucleotide
acgagccguggcugcccau

SEQ ID NO: 1496974 - RNA, 19 nt, Artificial Sequence
  Description of Artificial Sequence: Synthetic oligonucleotide
cucccucauugggaaugga

SEQ ID NO: 1496975 - RNA, 19 nt, Artificial Sequence
  Description of Artificial Sequence: Synthetic oligonucleotide
ccaauauguccacccuucu

SEQ ID NO: 1496976 - RNA, 19 nt, Artificial Sequence
  Description of Artificial Sequence: Synthetic oligonucleotide
aggggcccggaagcaugca

SEQ ID NO: 1496977 - RNA, 19 nt, Artificial Sequence
  Description of Artificial Sequence: Synthetic oligonucleotide
cuccagugguucagggauu

SEQ ID NO: 1496978 - RNA, 19 nt, Artificial Sequence
  Description of Artificial Sequence: Synthetic oligonucleotide
cucagcaaauaaggaccau

SEQ ID NO: 1496979 - RNA, 19 nt, Artificial Sequence
  Description of Artificial Sequence: Synthetic oligonucleotide
cacaggccaaaguggccuu

SEQ ID NO: 1496980 - RNA, 19 nt, Artificial Sequence
  Description of Artificial Sequence: Synthetic oligonucleotide
cccgauuaaauggcuuucu

SEQ ID NO: 1496981 - RNA, 19 nt, Artificial Sequence
  Description of Artificial Sequence: Synthetic oligonucleotide
ggggcgcuacaggcgagca

SEQ ID NO: 1496982 - RNA, 19 nt, Artificial Sequence
  Description of Artificial Sequence: Synthetic oligonucleotide
cgcacgggagccaucgucu

SEQ ID NO: 1496983 - RNA, 19 nt, Artificial Sequence
  Description of Artificial Sequence: Synthetic oligonucleotide
cccaacaggucugguugga

SEQ ID NO: 1496984 - RNA, 19 nt, Artificial Sequence
  Description of Artificial Sequence: Synthetic oligonucleotide
ccccugagagcauaauauu

SEQ ID NO: 1496985 - RNA, 19 nt, Artificial Sequence
  Description of Artificial Sequence: Synthetic oligonucleotide
ccaacaggucugguuggaa

SEQ ID NO: 1496986 - RNA, 19 nt, Artificial Sequence
  Description of Artificial Sequence: Synthetic oligonucleotide
gcgcuacaggcgagcauga

SEQ ID NO: 1496987 - RNA, 19 nt, Artificial Sequence
  Description of Artificial Sequence: Synthetic oligonucleotide
ccagaccaaaaggggucga

SEQ ID NO: 1496988 - RNA, 19 nt, Artificial Sequence
  Description of Artificial Sequence: Synthetic oligonucleotide
ggccauggugaagaccuuu

SEQ ID NO: 1496989 - RNA, 19 nt, Artificial Sequence
  Description of Artificial Sequence: Synthetic oligonucleotide
cgcuacaggcgagcaugac

SEQ ID NO: 1496990 - RNA, 19 nt, Artificial Sequence
  Description of Artificial Sequence: Synthetic oligonucleotide
ccacccuucuugggcauua

SEQ ID NO: 1496991 - RNA, 19 nt, Artificial Sequence
  Description of Artificial Sequence: Synthetic oligonucleotide
gggcgcuacaggcgagcau

SEQ ID NO: 1496992 - RNA, 19 nt, Artificial Sequence
  Description of Artificial Sequence: Synthetic oligonucleotide
ccgcaaugucuacccguau

SEQ ID NO: 1496993 - RNA, 19 nt, Artificial Sequence
  Description of Artificial Sequence: Synthetic oligonucleotide
auuuauaaaacccaccucc

SEQ ID NO: 1496994 - RNA, 19 nt, Artificial Sequence
  Description of Artificial Sequence: Synthetic oligonucleotide
aaauuaaucugguuggucc

SEQ ID NO: 1496995 - RNA, 19 nt, Artificial Sequence
  Description of Artificial Sequence: Synthetic oligonucleotide
aauaaguauguauauuugg

SEQ ID NO: 1496996 - RNA, 19 nt, Artificial Sequence
  Description of Artificial Sequence: Synthetic oligonucleotide
aauggaaagacugacaauc

SEQ ID NO: 1496997 - RNA, 19 nt, Artificial Sequence
  Description of Artificial Sequence: Synthetic oligonucleotide
uauauauauauauauauau

SEQ ID NO: 1496998 - RNA, 19 nt, Artificial Sequence
  Description of Artificial Sequence: Synthetic oligonucleotide
aagacugacaaucucauca

SEQ ID NO: 1496999 - RNA, 19 nt, Artificial Sequence
  Description of Artificial Sequence: Synthetic oligonucleotide
acuccauacaaacacauac

SEQ ID NO: 1497000 - RNA, 19 nt, Artificial Sequence
  Description of Artificial Sequence: Synthetic oligonucleotide
uauauauauauauauauuu

SEQ ID NO: 1497001 - RNA, 19 nt, Artificial Sequence
  Description of Artificial Sequence: Synthetic oligonucleotide
uguacauauauauauauau

SEQ ID NO: 1497002 - RNA, 19 nt, Artificial Sequence
  Description of Artificial Sequence: Synthetic oligonucleotide
auuuuaauccguguggucc

SEQ ID NO: 1497003 - RNA, 19 nt, Artificial Sequence
  Description of Artificial Sequence: Synthetic oligonucleotide
auauauauauauuuuauuu

SEQ ID NO: 1497004 - RNA, 19 nt, Artificial Sequence
  Description of Artificial Sequence: Synthetic oligonucleotide
uacauauauauauauauau

SEQ ID NO: 1497005 - RNA, 19 nt, Artificial Sequence
  Description of Artificial Sequence: Synthetic oligonucleotide
aauccgugugguccgaugc

SEQ ID NO: 1497006 - RNA, 19 nt, Artificial Sequence
  Description of Artificial Sequence: Synthetic oligonucleotide
uauauauauauauauuuua

SEQ ID NO: 1497007 - RNA, 19 nt, Artificial Sequence
  Description of Artificial Sequence: Synthetic oligonucleotide
uuugcgaggugcaugacag

SEQ ID NO: 1497008 - RNA, 19 nt, Artificial Sequence
  Description of Artificial Sequence: Synthetic oligonucleotide
ucaauggaaagacugacaa

SEQ ID NO: 1497009 - RNA, 19 nt, Artificial Sequence
  Description of Artificial Sequence: Synthetic oligonucleotide
uggcauuuaaauuaaucug

SEQ ID NO: 1497010 - RNA, 19 nt, Artificial Sequence
  Description of Artificial Sequence: Synthetic oligonucleotide
uuauuacaaaaccaagaga

SEQ ID NO: 1497011 - RNA, 19 nt, Artificial Sequence
  Description of Artificial Sequence: Synthetic oligonucleotide
gguacauccauuuuguugc

SEQ ID NO: 1497012 - RNA, 19 nt, Artificial Sequence
  Description of Artificial Sequence: Synthetic oligonucleotide
uauguacauauauauauau

SEQ ID NO: 1497013 - RNA, 19 nt, Artificial Sequence
  Description of Artificial Sequence: Synthetic oligonucleotide
uaguggucggguuuuaugg

SEQ ID NO: 1497014 - RNA, 19 nt, Artificial Sequence
  Description of Artificial Sequence: Synthetic oligonucleotide
uuuuaauccgugugguccg

SEQ ID NO: 1497015 - RNA, 19 nt, Artificial Sequence
  Description of Artificial Sequence: Synthetic oligonucleotide
uauaaaacccaccucccac

SEQ ID NO: 1497016 - RNA, 19 nt, Artificial Sequence
  Description of Artificial Sequence: Synthetic oligonucleotide
  modified_base (4)..(4): a, c, u, g, unknown or other
uccnguggcauuuaaauua

SEQ ID NO: 1497017 - RNA, 19 nt, Artificial Sequence
  Description of Artificial Sequence: Synthetic oligonucleotide
uuuguuggucuccaaguag

SEQ ID NO: 1497018 - RNA, 19 nt, Artificial Sequence
  Description of Artificial Sequence: Synthetic oligonucleotide
uuugcaggcaguucgaagu

SEQ ID NO: 1497019 - RNA, 19 nt, Artificial Sequence
  Description of Artificial Sequence: Synthetic oligonucleotide
aauuaaucugguuggucca

SEQ ID NO: 1497020 - RNA, 19 nt, Artificial Sequence
  Description of Artificial Sequence: Synthetic oligonucleotide
uauauauauauauuuuauu

SEQ ID NO: 1497021 - RNA, 19 nt, Artificial Sequence
  Description of Artificial Sequence: Synthetic oligonucleotide
uaugcugcauagaaguccc

SEQ ID NO: 1497022 - RNA, 19 nt, Artificial Sequence
  Description of Artificial Sequence: Synthetic oligonucleotide
cuucucuugcucuaggacc

SEQ ID NO: 1497023 - RNA, 19 nt, Artificial Sequence
  Description of Artificial Sequence: Synthetic oligonucleotide
  modified_base (6)..(6): a, c, u, g, unknown or other
uuuccnguggcauuuaaau

SEQ ID NO: 1497024 - RNA, 19 nt, Artificial Sequence
  Description of Artificial Sequence: Synthetic oligonucleotide
aggugcaugacagucaugg

SEQ ID NO: 1497025 - RNA, 19 nt, Artificial Sequence
  Description of Artificial Sequence: Synthetic oligonucleotide
aaucucaucaucgcccagg

SEQ ID NO: 1497026 - RNA, 19 nt, Artificial Sequence
  Description of Artificial Sequence: Synthetic oligonucleotide
aggacugggagccuugucg

SEQ ID NO: 1497027 - RNA, 19 nt, Artificial Sequence
  Description of Artificial Sequence: Synthetic oligonucleotide
aaugcaagcacuccacaau

SEQ ID NO: 1497028 - RNA, 19 nt, Artificial Sequence
  Description of Artificial Sequence: Synthetic oligonucleotide
gcaucaaugaaauaacccc

SEQ ID NO: 1497029 - RNA, 19 nt, Artificial Sequence
  Description of Artificial Sequence: Synthetic oligonucleotide
aggaccucagacuccauac

SEQ ID NO: 1497030 - RNA, 19 nt, Artificial Sequence
  Description of Artificial Sequence: Synthetic oligonucleotide
accuggacgucacacaugg

SEQ ID NO: 1497031 - RNA, 19 nt, Artificial Sequence
  Description of Artificial Sequence: Synthetic oligonucleotide
cuggacgucacacaugggg

SEQ ID NO: 1497032 - RNA, 19 nt, Artificial Sequence
  Description of Artificial Sequence: Synthetic oligonucleotide
uccuucguagaacucaaug

SEQ ID NO: 1497033 - RNA, 19 nt, Artificial Sequence
  Description of Artificial Sequence: Synthetic oligonucleotide
uuuugcagaaggaaugcaa

SEQ ID NO: 1497034 - RNA, 19 nt, Artificial Sequence
  Description of Artificial Sequence: Synthetic oligonucleotide
aacuuugcgaggugcauga

SEQ ID NO: 1497035 - RNA, 19 nt, Artificial Sequence
  Description of Artificial Sequence: Synthetic oligonucleotide
cauauauauauauauauau

SEQ ID NO: 1497036 - RNA, 19 nt, Artificial Sequence
  Description of Artificial Sequence: Synthetic oligonucleotide
aguaugcagcauuuauuac

SEQ ID NO: 1497037 - RNA, 19 nt, Artificial Sequence
  Description of Artificial Sequence: Synthetic oligonucleotide
aaacccaccucccacugug

SEQ ID NO: 1497038 - RNA, 19 nt, Artificial Sequence
  Description of Artificial Sequence: Synthetic oligonucleotide
uccaaguagcgcacgaugc

SEQ ID NO: 1497039 - RNA, 19 nt, Artificial Sequence
  Description of Artificial Sequence: Synthetic oligonucleotide
gguguaauauuccuucagg

SEQ ID NO: 1497040 - RNA, 19 nt, Artificial Sequence
  Description of Artificial Sequence: Synthetic oligonucleotide
aaaaguagaagggcgggga

SEQ ID NO: 1497041 - RNA, 19 nt, Artificial Sequence
  Description of Artificial Sequence: Synthetic oligonucleotide
auaaguauguauauuuggu

SEQ ID NO: 1497042 - RNA, 19 nt, Artificial Sequence
  Description of Artificial Sequence: Synthetic oligonucleotide
auauauauauauauuuuau

SEQ ID NO: 1497043 - RNA, 19 nt, Artificial Sequence
  Description of Artificial Sequence: Synthetic oligonucleotide
gaggguguaauauuccuuc

SEQ ID NO: 1497044 - RNA, 19 nt, Artificial Sequence
  Description of Artificial Sequence: Synthetic oligonucleotide
ugcaagcacuccacaaugg

SEQ ID NO: 1497045 - RNA, 19 nt, Artificial Sequence
  Description of Artificial Sequence: Synthetic oligonucleotide
cucaucuucauagaggauc

SEQ ID NO: 1497046 - RNA, 19 nt, Artificial Sequence
  Description of Artificial Sequence: Synthetic oligonucleotide
gaguaugcagcauuuauua

SEQ ID NO: 1497047 - RNA, 19 nt, Artificial Sequence
  Description of Artificial Sequence: Synthetic oligonucleotide
uggacgucacacauggggc

SEQ ID NO: 1497048 - RNA, 19 nt, Artificial Sequence
  Description of Artificial Sequence: Synthetic oligonucleotide
ucugaugccccgcuggugu

SEQ ID NO: 1497049 - RNA, 19 nt, Artificial Sequence
  Description of Artificial Sequence: Synthetic oligonucleotide
ucguagaacucaauggaaa

SEQ ID NO: 1497050 - RNA, 19 nt, Artificial Sequence
  Description of Artificial Sequence: Synthetic oligonucleotide
ucggguuuuauggaccugg

SEQ ID NO: 1497051 - RNA, 19 nt, Artificial Sequence
  Description of Artificial Sequence: Synthetic oligonucleotide
ugugguccgaugcaugaug

SEQ ID NO: 1497052 - RNA, 19 nt, Artificial Sequence
  Description of Artificial Sequence: Synthetic oligonucleotide
  modified_base (7)..(7): a, c, u, g, unknown or other
uuuuccnguggcauuuaaa

SEQ ID NO: 1497053 - RNA, 19 nt, Artificial Sequence
  Description of Artificial Sequence: Synthetic oligonucleotide
aguauguauauuugguuuu

SEQ ID NO: 1497054 - RNA, 19 nt, Artificial Sequence
  Description of Artificial Sequence: Synthetic oligonucleotide
auauauauauauauauuuu

SEQ ID NO: 1497055 - RNA, 19 nt, Artificial Sequence
  Description of Artificial Sequence: Synthetic oligonucleotide
guggcauuuaaauuaaucu

SEQ ID NO: 1497056 - RNA, 19 nt, Artificial Sequence
  Description of Artificial Sequence: Synthetic oligonucleotide
guugcggaggaacuuugcg

SEQ ID NO: 1497057 - RNA, 19 nt, Artificial Sequence
  Description of Artificial Sequence: Synthetic oligonucleotide
gagagggucccuuuccucc

SEQ ID NO: 1497058 - RNA, 19 nt, Artificial Sequence
  Description of Artificial Sequence: Synthetic oligonucleotide
uaaucugguugguccauag

SEQ ID NO: 1497059 - RNA, 19 nt, Artificial Sequence
  Description of Artificial Sequence: Synthetic oligonucleotide
aggagcuccguuaacaguc

SEQ ID NO: 1497060 - RNA, 19 nt, Artificial Sequence
  Description of Artificial Sequence: Synthetic oligonucleotide
uucguagaacucaauggaa

SEQ ID NO: 1497061 - RNA, 19 nt, Artificial Sequence
  Description of Artificial Sequence: Synthetic oligonucleotide
cacgaugcagguuuugcag

SEQ ID NO: 1497062 - RNA, 19 nt, Artificial Sequence
  Description of Artificial Sequence: Synthetic oligonucleotide
uugucugaccugaugcuca

SEQ ID NO: 1497063 - RNA, 19 nt, Artificial Sequence
  Description of Artificial Sequence: Synthetic oligonucleotide
cuggacacgguacuugagg

SEQ ID NO: 1497064 - RNA, 19 nt, Artificial Sequence
  Description of Artificial Sequence: Synthetic oligonucleotide
gaggauggcguuugcaggc

SEQ ID NO: 1497065 - RNA, 19 nt, Artificial Sequence
  Description of Artificial Sequence: Synthetic oligonucleotide
ugcauagaagucccgccgc

SEQ ID NO: 1497066 - RNA, 19 nt, Artificial Sequence
  Description of Artificial Sequence: Synthetic oligonucleotide
gaggauguggcuggcaggg

SEQ ID NO: 1497067 - RNA, 19 nt, Artificial Sequence
  Description of Artificial Sequence: Synthetic oligonucleotide
cuucguagaacucaaugga

SEQ ID NO: 1497068 - RNA, 19 nt, Artificial Sequence
  Description of Artificial Sequence: Synthetic oligonucleotide
uaaaacccaccucccacug

SEQ ID NO: 1497069 - RNA, 19 nt, Artificial Sequence
  Description of Artificial Sequence: Synthetic oligonucleotide
guaugcugcauagaagucc

SEQ ID NO: 1497070 - RNA, 19 nt, Artificial Sequence
  Description of Artificial Sequence: Synthetic oligonucleotide
uccgugauuuuaauccgug

SEQ ID NO: 1497071 - RNA, 19 nt, Artificial Sequence
  Description of Artificial Sequence: Synthetic oligonucleotide
ggcguuugcaggcaguucg

SEQ ID NO: 1497072 - RNA, 19 nt, Artificial Sequence
  Description of Artificial Sequence: Synthetic oligonucleotide
agaugggagagccauggga

SEQ ID NO: 1497073 - RNA, 19 nt, Artificial Sequence
  Description of Artificial Sequence: Synthetic oligonucleotide
auauauauauauauauaua

SEQ ID NO: 1497074 - RNA, 19 nt, Artificial Sequence
  Description of Artificial Sequence: Synthetic oligonucleotide
auauauauauauauauauu

SEQ ID NO: 1497075 - RNA, 19 nt, Artificial Sequence
  Description of Artificial Sequence: Synthetic oligonucleotide
cugcauagaagucccgccg

SEQ ID NO: 1497076 - RNA, 19 nt, Artificial Sequence
  Description of Artificial Sequence: Synthetic oligonucleotide
agucacaggaccucagacu

SEQ ID NO: 1497077 - RNA, 19 nt, Artificial Sequence
  Description of Artificial Sequence: Synthetic oligonucleotide
uaaauuaaucugguugguc

SEQ ID NO: 1497078 - RNA, 19 nt, Artificial Sequence
  Description of Artificial Sequence: Synthetic oligonucleotide
uguagacaauguccugaag

SEQ ID NO: 1497079 - RNA, 19 nt, Artificial Sequence
  Description of Artificial Sequence: Synthetic oligonucleotide
guuuuauggaccuggacgu

SEQ ID NO: 1497080 - RNA, 19 nt, Artificial Sequence
  Description of Artificial Sequence: Synthetic oligonucleotide
ugcucuaggaccucgccuc

SEQ ID NO: 1497081 - RNA, 19 nt, Artificial Sequence
  Description of Artificial Sequence: Synthetic oligonucleotide
aguagaagggcggggagag

SEQ ID NO: 1497082 - RNA, 19 nt, Artificial Sequence
  Description of Artificial Sequence: Synthetic oligonucleotide
uggaaagacugacaaucuc

SEQ ID NO: 1497083 - RNA, 19 nt, Artificial Sequence
  Description of Artificial Sequence: Synthetic oligonucleotide
agggugagccgcuugcagg

SEQ ID NO: 1497084 - RNA, 19 nt, Artificial Sequence
  Description of Artificial Sequence: Synthetic oligonucleotide
ugaagaugggaggaaccag

SEQ ID NO: 1497085 - RNA, 19 nt, Artificial Sequence
  Description of Artificial Sequence: Synthetic oligonucleotide
auccauuuuguugcggagg

SEQ ID NO: 1497086 - RNA, 19 nt, Artificial Sequence
  Description of Artificial Sequence: Synthetic oligonucleotide
aaggagcuccguuaacagu

SEQ ID NO: 1497087 - RNA, 19 nt, Artificial Sequence
  Description of Artificial Sequence: Synthetic oligonucleotide
acaaucucaucaucgccca

SEQ ID NO: 1497088 - RNA, 19 nt, Artificial Sequence
  Description of Artificial Sequence: Synthetic oligonucleotide
aggcaguucgaagugcccc

SEQ ID NO: 1497089 - RNA, 19 nt, Artificial Sequence
  Description of Artificial Sequence: Synthetic oligonucleotide
caagcacuccacaauggug

SEQ ID NO: 1497090 - RNA, 19 nt, Artificial Sequence
  Description of Artificial Sequence: Synthetic oligonucleotide
aaguagcgcacgaugcagg

SEQ ID NO: 1497091 - RNA, 19 nt, Artificial Sequence
  Description of Artificial Sequence: Synthetic oligonucleotide
uaggaccucgccucggucc

SEQ ID NO: 1497092 - RNA, 19 nt, Artificial Sequence
  Description of Artificial Sequence: Synthetic oligonucleotide
uaacagucaucuugcgccc

SEQ ID NO: 1497093 - RNA, 19 nt, Artificial Sequence
  Description of Artificial Sequence: Synthetic oligonucleotide
ggguacauccauuuuguug

SEQ ID NO: 1497094 - RNA, 19 nt, Artificial Sequence
  Description of Artificial Sequence: Synthetic oligonucleotide
acauauauauauauauaua

SEQ ID NO: 1497095 - RNA, 19 nt, Artificial Sequence
  Description of Artificial Sequence: Synthetic oligonucleotide
guuugcaggcaguucgaag

SEQ ID NO: 1497096 - RNA, 19 nt, Artificial Sequence
  Description of Artificial Sequence: Synthetic oligonucleotide
uggucggguuuuauggacc

SEQ ID NO: 1497097 - RNA, 19 nt, Artificial Sequence
  Description of Artificial Sequence: Synthetic oligonucleotide
gaguuggccccacuggcag

SEQ ID NO: 1497098 - RNA, 19 nt, Artificial Sequence
  Description of Artificial Sequence: Synthetic oligonucleotide
guaguggucggguuuuaug

SEQ ID NO: 1497099 - RNA, 19 nt, Artificial Sequence
  Description of Artificial Sequence: Synthetic oligonucleotide
guugguagcggaguuggcc

SEQ ID NO: 1497100 - RNA, 19 nt, Artificial Sequence
  Description of Artificial Sequence: Synthetic oligonucleotide
ggaggguacagucacagga

SEQ ID NO: 1497101 - RNA, 19 nt, Artificial Sequence
  Description of Artificial Sequence: Synthetic oligonucleotide
uagcgcacgaugcagguuu

SEQ ID NO: 1497102 - RNA, 19 nt, Artificial Sequence
  Description of Artificial Sequence: Synthetic oligonucleotide
acucacacucugaugcccc

SEQ ID NO: 1497103 - RNA, 19 nt, Artificial Sequence
  Description of Artificial Sequence: Synthetic oligonucleotide
guccauagaaaauaaguau

SEQ ID NO: 1497104 - RNA, 19 nt, Artificial Sequence
  Description of Artificial Sequence: Synthetic oligonucleotide
uuauggaccuggacgucac

SEQ ID NO: 1497105 - RNA, 19 nt, Artificial Sequence
  Description of Artificial Sequence: Synthetic oligonucleotide
cacucugaugccccgcugg

SEQ ID NO: 1497106 - RNA, 19 nt, Artificial Sequence
  Description of Artificial Sequence: Synthetic oligonucleotide
ugaggguguaauauuccuu

SEQ ID NO: 1497107 - RNA, 19 nt, Artificial Sequence
  Description of Artificial Sequence: Synthetic oligonucleotide
uuguugcggaggaacuuug

SEQ ID NO: 1497108 - RNA, 19 nt, Artificial Sequence
  Description of Artificial Sequence: Synthetic oligonucleotide
uccgaugcaugaugccagg

SEQ ID NO: 1497109 - RNA, 19 nt, Artificial Sequence
  Description of Artificial Sequence: Synthetic oligonucleotide
ucaucaucgcccagggcuc

SEQ ID NO: 1497110 - RNA, 19 nt, Artificial Sequence
  Description of Artificial Sequence: Synthetic oligonucleotide
gaggaacuuugcgaggugc

SEQ ID NO: 1497111 - RNA, 19 nt, Artificial Sequence
  Description of Artificial Sequence: Synthetic oligonucleotide
ugcugcauagaagucccgc

SEQ ID NO: 1497112 - RNA, 19 nt, Artificial Sequence
  Description of Artificial Sequence: Synthetic oligonucleotide
gaacuuugcgaggugcaug

SEQ ID NO: 1497113 - RNA, 19 nt, Artificial Sequence
  Description of Artificial Sequence: Synthetic oligonucleotide
aaaugacccaggacaggag

SEQ ID NO: 1497114 - RNA, 19 nt, Artificial Sequence
  Description of Artificial Sequence: Synthetic oligonucleotide
cuccaaguagcgcacgaug

SEQ ID NO: 1497115 - RNA, 19 nt, Artificial Sequence
  Description of Artificial Sequence: Synthetic oligonucleotide
guacauccauuuuguugcg

SEQ ID NO: 1497116 - RNA, 19 nt, Artificial Sequence
  Description of Artificial Sequence: Synthetic oligonucleotide
caggcaccaacuuguagac

SEQ ID NO: 1497117 - RNA, 19 nt, Artificial Sequence
  Description of Artificial Sequence: Synthetic oligonucleotide
ggaggaaccagggagaguc

SEQ ID NO: 1497118 - RNA, 19 nt, Artificial Sequence
  Description of Artificial Sequence: Synthetic oligonucleotide
gacuccuucguagaacuca

SEQ ID NO: 1497119 - RNA, 19 nt, Artificial Sequence
  Description of Artificial Sequence: Synthetic oligonucleotide
aggguuuugucugaccuga

SEQ ID NO: 1497120 - RNA, 19 nt, Artificial Sequence
  Description of Artificial Sequence: Synthetic oligonucleotide
auagaagucccgccgccgu

SEQ ID NO: 1497121 - RNA, 19 nt, Artificial Sequence
  Description of Artificial Sequence: Synthetic oligonucleotide
  modified_base (5)..(5): a, c, u, g, unknown or other
uuccnguggcauuuaaauu

SEQ ID NO: 1497122 - RNA, 19 nt, Artificial Sequence
  Description of Artificial Sequence: Synthetic oligonucleotide
aguggucggguuuuaugga

SEQ ID NO: 1497123 - RNA, 19 nt, Artificial Sequence
  Description of Artificial Sequence: Synthetic oligonucleotide
ugucugaccugaugcucag

SEQ ID NO: 1497124 - RNA, 19 nt, Artificial Sequence
  Description of Artificial Sequence: Synthetic oligonucleotide
uacauccauuuuguugcgg

SEQ ID NO: 1497125 - RNA, 19 nt, Artificial Sequence
  Description of Artificial Sequence: Synthetic oligonucleotide
aguagcgcacgaugcaggu

SEQ ID NO: 1497126 - RNA, 19 nt, Artificial Sequence
  Description of Artificial Sequence: Synthetic oligonucleotide
caucgcaggaagcgcaccc

SEQ ID NO: 1497127 - RNA, 19 nt, Artificial Sequence
  Description of Artificial Sequence: Synthetic oligonucleotide
caaguagcgcacgaugcag

SEQ ID NO: 1497128 - RNA, 19 nt, Artificial Sequence
  Description of Artificial Sequence: Synthetic oligonucleotide
guacauauauauauauaua

SEQ ID NO: 1497129 - RNA, 19 nt, Artificial Sequence
  Description of Artificial Sequence: Synthetic oligonucleotide
aaagcccaggcaccaacuu

SEQ ID NO: 1497130 - RNA, 19 nt, Artificial Sequence
  Description of Artificial Sequence: Synthetic oligonucleotide
ugcgaggugcaugacaguc

SEQ ID NO: 1497131 - RNA, 19 nt, Artificial Sequence
  Description of Artificial Sequence: Synthetic oligonucleotide
guagaacucaauggaaaga

SEQ ID NO: 1497132 - RNA, 19 nt, Artificial Sequence
  Description of Artificial Sequence: Synthetic oligonucleotide
cugaccugaugcucaguag

SEQ ID NO: 1497133 - RNA, 19 nt, Artificial Sequence
  Description of Artificial Sequence: Synthetic oligonucleotide
accugaugcucaguagugg

SEQ ID NO: 1497134 - RNA, 19 nt, Artificial Sequence
  Description of Artificial Sequence: Synthetic oligonucleotide
ggguguaauauuccuucag

SEQ ID NO: 1497135 - RNA, 19 nt, Artificial Sequence
  Description of Artificial Sequence: Synthetic oligonucleotide
gagaugggagagccauggg

SEQ ID NO: 1497136 - RNA, 19 nt, Artificial Sequence
  Description of Artificial Sequence: Synthetic oligonucleotide
gaccucagacuccauacaa

SEQ ID NO: 1497137 - RNA, 19 nt, Artificial Sequence
  Description of Artificial Sequence: Synthetic oligonucleotide
caaaugacccaggacagga

SEQ ID NO: 1497138 - RNA, 19 nt, Artificial Sequence
  Description of Artificial Sequence: Synthetic oligonucleotide
cauagaagucccgccgccg

SEQ ID NO: 1497139 - RNA, 19 nt, Artificial Sequence
  Description of Artificial Sequence: Synthetic oligonucleotide
uggaccuggacgucacaca

SEQ ID NO: 1497140 - RNA, 19 nt, Artificial Sequence
  Description of Artificial Sequence: Synthetic oligonucleotide
gacucacacucugaugccc

SEQ ID NO: 1497141 - RNA, 19 nt, Artificial Sequence
  Description of Artificial Sequence: Synthetic oligonucleotide
aggguguaauauuccuuca

SEQ ID NO: 1497142 - RNA, 19 nt, Artificial Sequence
  Description of Artificial Sequence: Synthetic oligonucleotide
gguguuggugcccucugag

SEQ ID NO: 1497143 - RNA, 19 nt, Artificial Sequence
  Description of Artificial Sequence: Synthetic oligonucleotide
agcggaguuggccccacug

SEQ ID NO: 1497144 - RNA, 19 nt, Artificial Sequence
  Description of Artificial Sequence: Synthetic oligonucleotide
gguuuugcagaaggaaugc

SEQ ID NO: 1497145 - RNA, 19 nt, Artificial Sequence
  Description of Artificial Sequence: Synthetic oligonucleotide
gagaggcccauuccgccgc

SEQ ID NO: 1497146 - RNA, 19 nt, Artificial Sequence
  Description of Artificial Sequence: Synthetic oligonucleotide
gcagaaggaaugcaagcac

SEQ ID NO: 1497147 - RNA, 19 nt, Artificial Sequence
  Description of Artificial Sequence: Synthetic oligonucleotide
ggguaugcugcauagaagu

SEQ ID NO: 1497148 - RNA, 19 nt, Artificial Sequence
  Description of Artificial Sequence: Synthetic oligonucleotide
cucacacucugaugccccg

SEQ ID NO: 1497149 - RNA, 19 nt, Artificial Sequence
  Description of Artificial Sequence: Synthetic oligonucleotide
agaguaugcagcauuuauu

SEQ ID NO: 1497150 - RNA, 19 nt, Artificial Sequence
  Description of Artificial Sequence: Synthetic oligonucleotide
cgugauuuuaauccgugug

SEQ ID NO: 1497151 - RNA, 19 nt, Artificial Sequence
  Description of Artificial Sequence: Synthetic oligonucleotide
auguacauauauauauaua

SEQ ID NO: 1497152 - RNA, 19 nt, Artificial Sequence
  Description of Artificial Sequence: Synthetic oligonucleotide
uguacuugcuggguacauc

SEQ ID NO: 1497153 - RNA, 19 nt, Artificial Sequence
  Description of Artificial Sequence: Synthetic oligonucleotide
guccgaugcaugaugccag

SEQ ID NO: 1497154 - RNA, 19 nt, Artificial Sequence
  Description of Artificial Sequence: Synthetic oligonucleotide
gcugcauagaagucccgcc

SEQ ID NO: 1497155 - RNA, 19 nt, Artificial Sequence
  Description of Artificial Sequence: Synthetic oligonucleotide
cuuugcgaggugcaugaca

SEQ ID NO: 1497156 - RNA, 19 nt, Artificial Sequence
  Description of Artificial Sequence: Synthetic oligonucleotide
ggacacgguacuugagggg

SEQ ID NO: 1497157 - RNA, 19 nt, Artificial Sequence
  Description of Artificial Sequence: Synthetic oligonucleotide
agacaauguccugaagggu

SEQ ID NO: 1497158 - RNA, 19 nt, Artificial Sequence
  Description of Artificial Sequence: Synthetic oligonucleotide
ucccugacuccuucguaga

SEQ ID NO: 1497159 - RNA, 19 nt, Artificial Sequence
  Description of Artificial Sequence: Synthetic oligonucleotide
aagcgcaccccugucuucu

SEQ ID NO: 1497160 - RNA, 19 nt, Artificial Sequence
  Description of Artificial Sequence: Synthetic oligonucleotide
ugcucaguaguggucgggu

SEQ ID NO: 1497161 - RNA, 19 nt, Artificial Sequence
  Description of Artificial Sequence: Synthetic oligonucleotide
gaugccccgcugguguugg

SEQ ID NO: 1497162 - RNA, 19 nt, Artificial Sequence
  Description of Artificial Sequence: Synthetic oligonucleotide
aggaagcgcaccccugucu

SEQ ID NO: 1497163 - RNA, 19 nt, Artificial Sequence
  Description of Artificial Sequence: Synthetic oligonucleotide
ugguagcggaguuggcccc

SEQ ID NO: 1497164 - RNA, 19 nt, Artificial Sequence
  Description of Artificial Sequence: Synthetic oligonucleotide
ggagaggcccauuccgccg

SEQ ID NO: 1497165 - RNA, 19 nt, Artificial Sequence
  Description of Artificial Sequence: Synthetic oligonucleotide
agacuccauacaaacacau

SEQ ID NO: 1497166 - RNA, 19 nt, Artificial Sequence
  Description of Artificial Sequence: Synthetic oligonucleotide
ugguguuggugcccucuga

SEQ ID NO: 1497167 - RNA, 19 nt, Artificial Sequence
  Description of Artificial Sequence: Synthetic oligonucleotide
uuuaauccgugugguccga

SEQ ID NO: 1497168 - RNA, 19 nt, Artificial Sequence
  Description of Artificial Sequence: Synthetic oligonucleotide
ucgccucgguccucguugg

SEQ ID NO: 1497169 - RNA, 19 nt, Artificial Sequence
  Description of Artificial Sequence: Synthetic oligonucleotide
cagacuccauacaaacaca

SEQ ID NO: 1497170 - RNA, 19 nt, Artificial Sequence
  Description of Artificial Sequence: Synthetic oligonucleotide
uuuuauggaccuggacguc

SEQ ID NO: 1497171 - RNA, 19 nt, Artificial Sequence
  Description of Artificial Sequence: Synthetic oligonucleotide
ggacugggagccuugucgc

SEQ ID NO: 1497172 - RNA, 19 nt, Artificial Sequence
  Description of Artificial Sequence: Synthetic oligonucleotide
auuaaucugguugguccau

SEQ ID NO: 1497173 - RNA, 19 nt, Artificial Sequence
  Description of Artificial Sequence: Synthetic oligonucleotide
gagccguugggaaccuccg

SEQ ID NO: 1497174 - RNA, 19 nt, Artificial Sequence
  Description of Artificial Sequence: Synthetic oligonucleotide
agcuccguuaacagucauc

SEQ ID NO: 1497175 - RNA, 19 nt, Artificial Sequence
  Description of Artificial Sequence: Synthetic oligonucleotide
ggauguggcuggcagggug

SEQ ID NO: 1497176 - RNA, 19 nt, Artificial Sequence
  Description of Artificial Sequence: Synthetic oligonucleotide
cacagagggcacacaugag

SEQ ID NO: 1497177 - RNA, 19 nt, Artificial Sequence
  Description of Artificial Sequence: Synthetic oligonucleotide
ugggcaucgcaggaagcgc

SEQ ID NO: 1497178 - RNA, 19 nt, Artificial Sequence
  Description of Artificial Sequence: Synthetic oligonucleotide
uauggaccuggacgucaca

SEQ ID NO: 1497179 - RNA, 19 nt, Artificial Sequence
  Description of Artificial Sequence: Synthetic oligonucleotide
aagguggaguuggggaggu

SEQ ID NO: 1497180 - RNA, 19 nt, Artificial Sequence
  Description of Artificial Sequence: Synthetic oligonucleotide
ucggcgggaggggagaaac

SEQ ID NO: 1497181 - RNA, 19 nt, Artificial Sequence
  Description of Artificial Sequence: Synthetic oligonucleotide
ggagagguggcugcugagg

SEQ ID NO: 1497182 - RNA, 19 nt, Artificial Sequence
  Description of Artificial Sequence: Synthetic oligonucleotide
agcacuccacaaugguggu

SEQ ID NO: 1497183 - RNA, 19 nt, Artificial Sequence
  Description of Artificial Sequence: Synthetic oligonucleotide
caggcaguucgaagugccc

SEQ ID NO: 1497184 - RNA, 19 nt, Artificial Sequence
  Description of Artificial Sequence: Synthetic oligonucleotide
ccuuguacuugcuggguac

SEQ ID NO: 1497185 - RNA, 19 nt, Artificial Sequence
  Description of Artificial Sequence: Synthetic oligonucleotide
cugucgcucgcucggucgg

SEQ ID NO: 1497186 - RNA, 19 nt, Artificial Sequence
  Description of Artificial Sequence: Synthetic oligonucleotide
ucgcugacugacucacacu

SEQ ID NO: 1497187 - RNA, 19 nt, Artificial Sequence
  Description of Artificial Sequence: Synthetic oligonucleotide
cuggguacauccauuuugu

SEQ ID NO: 1497188 - RNA, 19 nt, Artificial Sequence
  Description of Artificial Sequence: Synthetic oligonucleotide
uggcuggacacgguacuug

SEQ ID NO: 1497189 - RNA, 19 nt, Artificial Sequence
  Description of Artificial Sequence: Synthetic oligonucleotide
cugacuccuucguagaacu

SEQ ID NO: 1497190 - RNA, 19 nt, Artificial Sequence
  Description of Artificial Sequence: Synthetic oligonucleotide
guuuugcagaaggaaugca

SEQ ID NO: 1497191 - RNA, 19 nt, Artificial Sequence
  Description of Artificial Sequence: Synthetic oligonucleotide
auccgugugguccgaugca

SEQ ID NO: 1497192 - RNA, 19 nt, Artificial Sequence
  Description of Artificial Sequence: Synthetic oligonucleotide
cuugucgcugacugacuca

SEQ ID NO: 1497193 - RNA, 19 nt, Artificial Sequence
  Description of Artificial Sequence: Synthetic oligonucleotide
cagggugagccgcuugcag

SEQ ID NO: 1497194 - RNA, 19 nt, Artificial Sequence
  Description of Artificial Sequence: Synthetic oligonucleotide
aggaccucgccucgguccu

SEQ ID NO: 1497195 - RNA, 19 nt, Artificial Sequence
  Description of Artificial Sequence: Synthetic oligonucleotide
ugcaggcuggcuggacacg

SEQ ID NO: 1497196 - RNA, 19 nt, Artificial Sequence
  Description of Artificial Sequence: Synthetic oligonucleotide
acugugaagaugggaggaa

SEQ ID NO: 1497197 - RNA, 19 nt, Artificial Sequence
  Description of Artificial Sequence: Synthetic oligonucleotide
aggaacuuugcgaggugca

SEQ ID NO: 1497198 - RNA, 19 nt, Artificial Sequence
  Description of Artificial Sequence: Synthetic oligonucleotide
cuggcagucgaagguggag

SEQ ID NO: 1497199 - RNA, 19 nt, Artificial Sequence
  Description of Artificial Sequence: Synthetic oligonucleotide
cagguuuugcagaaggaau

SEQ ID NO: 1497200 - RNA, 19 nt, Artificial Sequence
  Description of Artificial Sequence: Synthetic oligonucleotide
ucuccaaguagcgcacgau

SEQ ID NO: 1497201 - RNA, 19 nt, Artificial Sequence
  Description of Artificial Sequence: Synthetic oligonucleotide
gugaggguucagcuccgug

SEQ ID NO: 1497202 - RNA, 19 nt, Artificial Sequence
  Description of Artificial Sequence: Synthetic oligonucleotide
ugcuggguacauccauuuu

SEQ ID NO: 1497203 - RNA, 19 nt, Artificial Sequence
  Description of Artificial Sequence: Synthetic oligonucleotide
ugucgcugacugacucaca

SEQ ID NO: 1497204 - RNA, 19 nt, Artificial Sequence
  Description of Artificial Sequence: Synthetic oligonucleotide
gaccucgccucgguccucg

SEQ ID NO: 1497205 - RNA, 19 nt, Artificial Sequence
  Description of Artificial Sequence: Synthetic oligonucleotide
uucaggggcucaucuucau

SEQ ID NO: 1497206 - RNA, 19 nt, Artificial Sequence
  Description of Artificial Sequence: Synthetic oligonucleotide
aucaucgcccagggcuccc

SEQ ID NO: 1497207 - RNA, 19 nt, Artificial Sequence
  Description of Artificial Sequence: Synthetic oligonucleotide
gguacagucacaggaccuc

SEQ ID NO: 1497208 - RNA, 19 nt, Artificial Sequence
  Description of Artificial Sequence: Synthetic oligonucleotide
acacucugaugccccgcug

SEQ ID NO: 1497209 - RNA, 19 nt, Artificial Sequence
  Description of Artificial Sequence: Synthetic oligonucleotide
ugagggagagggucccuuu

SEQ ID NO: 1497210 - RNA, 19 nt, Artificial Sequence
  Description of Artificial Sequence: Synthetic oligonucleotide
ggagccguugggaaccucc

SEQ ID NO: 1497211 - RNA, 19 nt, Artificial Sequence
  Description of Artificial Sequence: Synthetic oligonucleotide
gcauagaagucccgccgcc

SEQ ID NO: 1497212 - RNA, 19 nt, Artificial Sequence
  Description of Artificial Sequence: Synthetic oligonucleotide
gcaaggagcuccguuaaca

SEQ ID NO: 1497213 - RNA, 19 nt, Artificial Sequence
  Description of Artificial Sequence: Synthetic oligonucleotide
ggagagucaaagguggaaa

SEQ ID NO: 1497214 - RNA, 19 nt, Artificial Sequence
  Description of Artificial Sequence: Synthetic oligonucleotide
acuccuucguagaacucaa

SEQ ID NO: 1497215 - RNA, 19 nt, Artificial Sequence
  Description of Artificial Sequence: Synthetic oligonucleotide
gcuccguuaacagucaucu

SEQ ID NO: 1497216 - RNA, 19 nt, Artificial Sequence
  Description of Artificial Sequence: Synthetic oligonucleotide
ugaugccccgcugguguug

SEQ ID NO: 1497217 - RNA, 19 nt, Artificial Sequence
  Description of Artificial Sequence: Synthetic oligonucleotide
gguccgaugcaugaugcca

SEQ ID NO: 1497218 - RNA, 19 nt, Artificial Sequence
  Description of Artificial Sequence: Synthetic oligonucleotide
uccgugugguccgaugcau

SEQ ID NO: 1497219 - RNA, 19 nt, Artificial Sequence
  Description of Artificial Sequence: Synthetic oligonucleotide
ggacgucacacauggggca

SEQ ID NO: 1497220 - RNA, 19 nt, Artificial Sequence
  Description of Artificial Sequence: Synthetic oligonucleotide
gaccuggacgucacacaug

SEQ ID NO: 1497221 - RNA, 19 nt, Artificial Sequence
  Description of Artificial Sequence: Synthetic oligonucleotide
guacagucacaggaccuca

SEQ ID NO: 1497222 - RNA, 19 nt, Artificial Sequence
  Description of Artificial Sequence: Synthetic oligonucleotide
cucguuggagccguuggga

SEQ ID NO: 1497223 - RNA, 19 nt, Artificial Sequence
  Description of Artificial Sequence: Synthetic oligonucleotide
aggaaccagggagagucaa

SEQ ID NO: 1497224 - RNA, 19 nt, Artificial Sequence
  Description of Artificial Sequence: Synthetic oligonucleotide
uugcgaggugcaugacagu

SEQ ID NO: 1497225 - RNA, 19 nt, Artificial Sequence
  Description of Artificial Sequence: Synthetic oligonucleotide
accucagacuccauacaaa

SEQ ID NO: 1497226 - RNA, 19 nt, Artificial Sequence
  Description of Artificial Sequence: Synthetic oligonucleotide
cauuccgccgccaggggua

SEQ ID NO: 1497227 - RNA, 19 nt, Artificial Sequence
  Description of Artificial Sequence: Synthetic oligonucleotide
aguaguggucggguuuuau

SEQ ID NO: 1497228 - RNA, 19 nt, Artificial Sequence
  Description of Artificial Sequence: Synthetic oligonucleotide
cuaggaccucgccucgguc

SEQ ID NO: 1497229 - RNA, 19 nt, Artificial Sequence
  Description of Artificial Sequence: Synthetic oligonucleotide
cgcugacugacucacacuc

SEQ ID NO: 1497230 - RNA, 19 nt, Artificial Sequence
  Description of Artificial Sequence: Synthetic oligonucleotide
agcgcaccccugucuucuc

SEQ ID NO: 1497231 - RNA, 19 nt, Artificial Sequence
  Description of Artificial Sequence: Synthetic oligonucleotide
gcauuuaaauuaaucuggu

SEQ ID NO: 1497232 - RNA, 19 nt, Artificial Sequence
  Description of Artificial Sequence: Synthetic oligonucleotide
ggaggaacuuugcgaggug

SEQ ID NO: 1497233 - RNA, 19 nt, Artificial Sequence
  Description of Artificial Sequence: Synthetic oligonucleotide
gcggaggaacuuugcgagg

SEQ ID NO: 1497234 - RNA, 19 nt, Artificial Sequence
  Description of Artificial Sequence: Synthetic oligonucleotide
aagucccgccgccguuuca

SEQ ID NO: 1497235 - RNA, 19 nt, Artificial Sequence
  Description of Artificial Sequence: Synthetic oligonucleotide
cguuaacagucaucuugcg

SEQ ID NO: 1497236 - RNA, 19 nt, Artificial Sequence
  Description of Artificial Sequence: Synthetic oligonucleotide
caucaucgcccagggcucc

SEQ ID NO: 1497237 - RNA, 19 nt, Artificial Sequence
  Description of Artificial Sequence: Synthetic oligonucleotide
uuaauccgugugguccgau

SEQ ID NO: 1497238 - RNA, 19 nt, Artificial Sequence
  Description of Artificial Sequence: Synthetic oligonucleotide
cucccuucucuugcucuag

SEQ ID NO: 1497239 - RNA, 19 nt, Artificial Sequence
  Description of Artificial Sequence: Synthetic oligonucleotide
uggccccacuggcagucga

SEQ ID NO: 1497240 - RNA, 19 nt, Artificial Sequence
  Description of Artificial Sequence: Synthetic oligonucleotide
gccguugggaaccuccguc

SEQ ID NO: 1497241 - RNA, 19 nt, Artificial Sequence
  Description of Artificial Sequence: Synthetic oligonucleotide
cauccccauucuccaugag

SEQ ID NO: 1497242 - RNA, 19 nt, Artificial Sequence
  Description of Artificial Sequence: Synthetic oligonucleotide
ggauggcguuugcaggcag

SEQ ID NO: 1497243 - RNA, 19 nt, Artificial Sequence
  Description of Artificial Sequence: Synthetic oligonucleotide
ccuugucgcugacugacuc

SEQ ID NO: 1497244 - RNA, 19 nt, Artificial Sequence
  Description of Artificial Sequence: Synthetic oligonucleotide
aggauggcguuugcaggca

SEQ ID NO: 1497245 - RNA, 19 nt, Artificial Sequence
  Description of Artificial Sequence: Synthetic oligonucleotide
gucgcucgcucggucggcg

SEQ ID NO: 1497246 - RNA, 19 nt, Artificial Sequence
  Description of Artificial Sequence: Synthetic oligonucleotide
aggugaggguucagcuccg

SEQ ID NO: 1497247 - RNA, 19 nt, Artificial Sequence
  Description of Artificial Sequence: Synthetic oligonucleotide
ucgcucggucggcgggagg

SEQ ID NO: 1497248 - RNA, 19 nt, Artificial Sequence
  Description of Artificial Sequence: Synthetic oligonucleotide
  modified_base (3)..(3): a, c, u, g, unknown or other
ccnguggcauuuaaauuaa

SEQ ID NO: 1497249 - RNA, 19 nt, Artificial Sequence
  Description of Artificial Sequence: Synthetic oligonucleotide
ggggcaaggagcuccguua

SEQ ID NO: 1497250 - RNA, 19 nt, Artificial Sequence
  Description of Artificial Sequence: Synthetic oligonucleotide
ccgcuugcaggcuggcugg

SEQ ID NO: 1497251 - RNA, 19 nt, Artificial Sequence
  Description of Artificial Sequence: Synthetic oligonucleotide
agaagucccgccgccguuu

SEQ ID NO: 1497252 - RNA, 19 nt, Artificial Sequence
  Description of Artificial Sequence: Synthetic oligonucleotide
agucccgccgccguuucau

SEQ ID NO: 1497253 - RNA, 19 nt, Artificial Sequence
  Description of Artificial Sequence: Synthetic oligonucleotide
acaugaggugaggguucag

SEQ ID NO: 1497254 - RNA, 19 nt, Artificial Sequence
  Description of Artificial Sequence: Synthetic oligonucleotide
augcugcauagaagucccg

SEQ ID NO: 1497255 - RNA, 19 nt, Artificial Sequence
  Description of Artificial Sequence: Synthetic oligonucleotide
auuccgccgccagggguag

SEQ ID NO: 1497256 - RNA, 19 nt, Artificial Sequence
  Description of Artificial Sequence: Synthetic oligonucleotide
aacccaccucccacuguga

SEQ ID NO: 1497257 - RNA, 19 nt, Artificial Sequence
  Description of Artificial Sequence: Synthetic oligonucleotide
agggucccuuuccuccagu

SEQ ID NO: 1497258 - RNA, 19 nt, Artificial Sequence
  Description of Artificial Sequence: Synthetic oligonucleotide
ccccacuggcagucgaagg

SEQ ID NO: 1497259 - RNA, 19 nt, Artificial Sequence
  Description of Artificial Sequence: Synthetic oligonucleotide
cuccgugauuuuaauccgu

SEQ ID NO: 1497260 - RNA, 19 nt, Artificial Sequence
  Description of Artificial Sequence: Synthetic oligonucleotide
ugucgcucgcucggucggc

SEQ ID NO: 1497261 - RNA, 19 nt, Artificial Sequence
  Description of Artificial Sequence: Synthetic oligonucleotide
uccgccgccagggguagau

SEQ ID NO: 1497262 - RNA, 19 nt, Artificial Sequence
  Description of Artificial Sequence: Synthetic oligonucleotide
uggcguuugcaggcaguuc

SEQ ID NO: 1497263 - RNA, 19 nt, Artificial Sequence
  Description of Artificial Sequence: Synthetic oligonucleotide
cucaguaguggucggguuu

SEQ ID NO: 1497264 - RNA, 19 nt, Artificial Sequence
  Description of Artificial Sequence: Synthetic oligonucleotide
gccgugggagaugggagag

SEQ ID NO: 1497265 - RNA, 19 nt, Artificial Sequence
  Description of Artificial Sequence: Synthetic oligonucleotide
gucggguuuuauggaccug

SEQ ID NO: 1497266 - RNA, 19 nt, Artificial Sequence
  Description of Artificial Sequence: Synthetic oligonucleotide
ucaucgcccagggcucccu

SEQ ID NO: 1497267 - RNA, 19 nt, Artificial Sequence
  Description of Artificial Sequence: Synthetic oligonucleotide
ccucugagggagugggcac

SEQ ID NO: 1497268 - RNA, 19 nt, Artificial Sequence
  Description of Artificial Sequence: Synthetic oligonucleotide
ggcaaggagcuccguuaac

SEQ ID NO: 1497269 - RNA, 19 nt, Artificial Sequence
  Description of Artificial Sequence: Synthetic oligonucleotide
ggacaggaggguacaguca

SEQ ID NO: 1497270 - RNA, 19 nt, Artificial Sequence
  Description of Artificial Sequence: Synthetic oligonucleotide
gccucgguccucguuggag

SEQ ID NO: 1497271 - RNA, 19 nt, Artificial Sequence
  Description of Artificial Sequence: Synthetic oligonucleotide
uagcggaguuggccccacu

SEQ ID NO: 1497272 - RNA, 19 nt, Artificial Sequence
  Description of Artificial Sequence: Synthetic oligonucleotide
ggucggguuuuauggaccu

SEQ ID NO: 1497273 - RNA, 19 nt, Artificial Sequence
  Description of Artificial Sequence: Synthetic oligonucleotide
gggagagucaaagguggaa

SEQ ID NO: 1497274 - RNA, 19 nt, Artificial Sequence
  Description of Artificial Sequence: Synthetic oligonucleotide
acgucacacauggggcagu

SEQ ID NO: 1497275 - RNA, 19 nt, Artificial Sequence
  Description of Artificial Sequence: Synthetic oligonucleotide
gucgcggggcugggcaagg

SEQ ID NO: 1497276 - RNA, 19 nt, Artificial Sequence
  Description of Artificial Sequence: Synthetic oligonucleotide
aggguucagcuccgugauu

SEQ ID NO: 1497277 - RNA, 19 nt, Artificial Sequence
  Description of Artificial Sequence: Synthetic oligonucleotide
gggcaaggagcuccguuaa

SEQ ID NO: 1497278 - RNA, 19 nt, Artificial Sequence
  Description of Artificial Sequence: Synthetic oligonucleotide
gccguuucaucucaucuuu

SEQ ID NO: 1497279 - RNA, 19 nt, Artificial Sequence
  Description of Artificial Sequence: Synthetic oligonucleotide
cgcacgaugcagguuuugc

SEQ ID NO: 1497280 - RNA, 19 nt, Artificial Sequence
  Description of Artificial Sequence: Synthetic oligonucleotide
aggauguggcuggcagggu

SEQ ID NO: 1497281 - RNA, 19 nt, Artificial Sequence
  Description of Artificial Sequence: Synthetic oligonucleotide
uggcaggacugggagccuu

SEQ ID NO: 1497282 - RNA, 19 nt, Artificial Sequence
  Description of Artificial Sequence: Synthetic oligonucleotide
ccgaugcaugaugccaggg

SEQ ID NO: 1497283 - RNA, 19 nt, Artificial Sequence
  Description of Artificial Sequence: Synthetic oligonucleotide
ccguugggaaccuccguca

SEQ ID NO: 1497284 - RNA, 19 nt, Artificial Sequence
  Description of Artificial Sequence: Synthetic oligonucleotide
cguugggaaccuccgucag

SEQ ID NO: 1497285 - RNA, 19 nt, Artificial Sequence
  Description of Artificial Sequence: Synthetic oligonucleotide
gggcaucgcaggaagcgca

SEQ ID NO: 1497286 - RNA, 19 nt, Artificial Sequence
  Description of Artificial Sequence: Synthetic oligonucleotide
cucgcucggucggcgggag

SEQ ID NO: 1497287 - RNA, 19 nt, Artificial Sequence
  Description of Artificial Sequence: Synthetic oligonucleotide
ccuggacgucacacauggg

SEQ ID NO: 1497288 - RNA, 19 nt, Artificial Sequence
  Description of Artificial Sequence: Synthetic oligonucleotide
ccgugugguccgaugcaug

SEQ ID NO: 1497289 - RNA, 19 nt, Artificial Sequence
  Description of Artificial Sequence: Synthetic oligonucleotide
ggcaucgcaggaagcgcac

SEQ ID NO: 1497290 - RNA, 19 nt, Artificial Sequence
  Description of Artificial Sequence: Synthetic oligonucleotide
guagcggaguuggccccac

SEQ ID NO: 1497291 - RNA, 19 nt, Artificial Sequence
  Description of Artificial Sequence: Synthetic oligonucleotide
ccgccagggguagauguag

SEQ ID NO: 1497292 - RNA, 19 nt, Artificial Sequence
  Description of Artificial Sequence: Synthetic oligonucleotide
gcgaggugcaugacaguca

SEQ ID NO: 1497293 - RNA, 19 nt, Artificial Sequence
  Description of Artificial Sequence: Synthetic oligonucleotide
gccccacuggcagucgaag

SEQ ID NO: 1497294 - RNA, 19 nt, Artificial Sequence
  Description of Artificial Sequence: Synthetic oligonucleotide
ggcgggaggggagaaaccu

SEQ ID NO: 1497295 - RNA, 19 nt, Artificial Sequence
  Description of Artificial Sequence: Synthetic oligonucleotide
gcaucgcaggaagcgcacc

SEQ ID NO: 1497296 - RNA, 19 nt, Artificial Sequence
  Description of Artificial Sequence: Synthetic oligonucleotide
cgcucggucggcgggaggg

SEQ ID NO: 1497297 - RNA, 19 nt, Artificial Sequence
  Description of Artificial Sequence: Synthetic oligonucleotide
ggucccugacuccuucgua

SEQ ID NO: 1497298 - RNA, 19 nt, Artificial Sequence
  Description of Artificial Sequence: Synthetic oligonucleotide
gcgcaccccugucuucucc

SEQ ID NO: 1497299 - RNA, 19 nt, Artificial Sequence
  Description of Artificial Sequence: Synthetic oligonucleotide
ggucgcggggcugggcaag

SEQ ID NO: 1497300 - RNA, 19 nt, Artificial Sequence
  Description of Artificial Sequence: Synthetic oligonucleotide
ggguacagucacaggaccu

SEQ ID NO: 1497301 - RNA, 19 nt, Artificial Sequence
  Description of Artificial Sequence: Synthetic oligonucleotide
gagcuccguuaacagucau

SEQ ID NO: 1497302 - RNA, 19 nt, Artificial Sequence
  Description of Artificial Sequence: Synthetic oligonucleotide
gccgccguuucaucucauc

SEQ ID NO: 1497303 - RNA, 19 nt, Artificial Sequence
  Description of Artificial Sequence: Synthetic oligonucleotide
gguagcggaguuggcccca

SEQ ID NO: 1497304 - RNA, 19 nt, Artificial Sequence
  Description of Artificial Sequence: Synthetic oligonucleotide
gucccgccgccguuucauc

SEQ ID NO: 1497305 - RNA, 19 nt, Artificial Sequence
  Description of Artificial Sequence: Synthetic oligonucleotide
ucgcggggcugggcaagga

SEQ ID NO: 1497306 - RNA, 19 nt, Artificial Sequence
  Description of Artificial Sequence: Synthetic oligonucleotide
ggaacuuugcgaggugcau

SEQ ID NO: 1497307 - RNA, 19 nt, Artificial Sequence
  Description of Artificial Sequence: Synthetic oligonucleotide
cccguugguagcggaguug

SEQ ID NO: 1497308 - RNA, 19 nt, Artificial Sequence
  Description of Artificial Sequence: Synthetic oligonucleotide
cguugguagcggaguuggc

SEQ ID NO: 1497309 - RNA, 19 nt, Artificial Sequence
  Description of Artificial Sequence: Synthetic oligonucleotide
  modified_base (2)..(2): a, c, u, g, unknown or other
cnguggcauuuaaauuaau

SEQ ID NO: 1497310 - RNA, 19 nt, Artificial Sequence
  Description of Artificial Sequence: Synthetic oligonucleotide
gcucggucggcgggagggg

SEQ ID NO: 1497311 - RNA, 19 nt, Artificial Sequence
  Description of Artificial Sequence: Synthetic oligonucleotide
gaggcccauuccgccgcca

SEQ ID NO: 1497312 - RNA, 19 nt, Artificial Sequence
  Description of Artificial Sequence: Synthetic oligonucleotide
accucgccucgguccucgu

SEQ ID NO: 1497313 - RNA, 19 nt, Artificial Sequence
  Description of Artificial Sequence: Synthetic oligonucleotide
ccgccguuucaucucaucu

SEQ ID NO: 1497314 - RNA, 19 nt, Artificial Sequence
  Description of Artificial Sequence: Synthetic oligonucleotide
gcagggugagccgcuugca

SEQ ID NO: 1497315 - RNA, 19 nt, Artificial Sequence
  Description of Artificial Sequence: Synthetic oligonucleotide
ccgugauuuuaauccgugu

SEQ ID NO: 1497316 - RNA, 19 nt, Artificial Sequence
  Description of Artificial Sequence: Synthetic oligonucleotide
gcugguguuggugcccucu

SEQ ID NO: 1497317 - RNA, 19 nt, Artificial Sequence
  Description of Artificial Sequence: Synthetic oligonucleotide
gggcaaggaggaggaugug

SEQ ID NO: 1497318 - RNA, 19 nt, Artificial Sequence
  Description of Artificial Sequence: Synthetic oligonucleotide
cuccuucguagaacucaau

SEQ ID NO: 1497319 - RNA, 19 nt, Artificial Sequence
  Description of Artificial Sequence: Synthetic oligonucleotide
cgcucgcucggucggcggg

SEQ ID NO: 1497320 - RNA, 19 nt, Artificial Sequence
  Description of Artificial Sequence: Synthetic oligonucleotide
ccgugggagaugggagagc

SEQ ID NO: 1497321 - RNA, 19 nt, Artificial Sequence
  Description of Artificial Sequence: Synthetic oligonucleotide
cuccguuaacagucaucuu

SEQ ID NO: 1497322 - RNA, 19 nt, Artificial Sequence
  Description of Artificial Sequence: Synthetic oligonucleotide
cggguuuuauggaccugga

SEQ ID NO: 1497323 - RNA, 19 nt, Artificial Sequence
  Description of Artificial Sequence: Synthetic oligonucleotide
ccguuucaucucaucuuua

SEQ ID NO: 1497324 - RNA, 19 nt, Artificial Sequence
  Description of Artificial Sequence: Synthetic oligonucleotide
gcgcacgaugcagguuuug

SEQ ID NO: 1497325 - RNA, 19 nt, Artificial Sequence
  Description of Artificial Sequence: Synthetic oligonucleotide
cggcgggaggggagaaacc

SEQ ID NO: 1497326 - RNA, 19 nt, Artificial Sequence
  Description of Artificial Sequence: Synthetic oligonucleotide
gucggcgggaggggagaaa

SEQ ID NO: 1497327 - RNA, 19 nt, Artificial Sequence
  Description of Artificial Sequence: Synthetic oligonucleotide
cccugacuccuucguagaa

SEQ ID NO: 1497328 - RNA, 19 nt, Artificial Sequence
  Description of Artificial Sequence: Synthetic oligonucleotide
guagcgcacgaugcagguu

SEQ ID NO: 1497329 - RNA, 19 nt, Artificial Sequence
  Description of Artificial Sequence: Synthetic oligonucleotide
ccacagcccugucgcucgc

SEQ ID NO: 1497330 - RNA, 19 nt, Artificial Sequence
  Description of Artificial Sequence: Synthetic oligonucleotide
gucugaccugaugcucagu

SEQ ID NO: 1497331 - RNA, 19 nt, Artificial Sequence
  Description of Artificial Sequence: Synthetic oligonucleotide
cccugucgcucgcucgguc

SEQ ID NO: 1497332 - RNA, 19 nt, Artificial Sequence
  Description of Artificial Sequence: Synthetic oligonucleotide
cgaggugcaugacagucau

SEQ ID NO: 1497333 - RNA, 19 nt, Artificial Sequence
  Description of Artificial Sequence: Synthetic oligonucleotide
gucacacauggggcaguau

SEQ ID NO: 1497334 - RNA, 19 nt, Artificial Sequence
  Description of Artificial Sequence: Synthetic oligonucleotide
caguaguggucggguuuua

SEQ ID NO: 1497335 - RNA, 19 nt, Artificial Sequence
  Description of Artificial Sequence: Synthetic oligonucleotide
ccccacagagggcacacau

SEQ ID NO: 1497336 - RNA, 19 nt, Artificial Sequence
  Description of Artificial Sequence: Synthetic oligonucleotide
gggucgcggggcugggcaa

SEQ ID NO: 1497337 - RNA, 19 nt, Artificial Sequence
  Description of Artificial Sequence: Synthetic oligonucleotide
gcucgcucggucggcggga

SEQ ID NO: 1497338 - RNA, 19 nt, Artificial Sequence
  Description of Artificial Sequence: Synthetic oligonucleotide
ccauuuuguugcggaggaa

SEQ ID NO: 1497339 - RNA, 19 nt, Artificial Sequence
  Description of Artificial Sequence: Synthetic oligonucleotide
ccgccgccguuucaucuca

SEQ ID NO: 1497340 - RNA, 19 nt, Artificial Sequence
  Description of Artificial Sequence: Synthetic oligonucleotide
caccucccacugugaagau

SEQ ID NO: 1497341 - RNA, 19 nt, Artificial Sequence
  Description of Artificial Sequence: Synthetic oligonucleotide
gccgccagggguagaugua

SEQ ID NO: 1497342 - RNA, 19 nt, Artificial Sequence
  Description of Artificial Sequence: Synthetic oligonucleotide
gggaggaaccagggagagu

SEQ ID NO: 1497343 - RNA, 19 nt, Artificial Sequence
  Description of Artificial Sequence: Synthetic oligonucleotide
cgccguuucaucucaucuu

SEQ ID NO: 1497344 - RNA, 19 nt, Artificial Sequence
  Description of Artificial Sequence: Synthetic oligonucleotide
cguuugcaggcaguucgaa

SEQ ID NO: 1497345 - RNA, 19 nt, Artificial Sequence
  Description of Artificial Sequence: Synthetic oligonucleotide
ggucggcgggaggggagaa

SEQ ID NO: 1497346 - RNA, 19 nt, Artificial Sequence
  Description of Artificial Sequence: Synthetic oligonucleotide
gccuugucgcugacugacu

SEQ ID NO: 1497347 - RNA, 19 nt, Artificial Sequence
  Description of Artificial Sequence: Synthetic oligonucleotide
ggaccucgccucgguccuc

SEQ ID NO: 1497348 - RNA, 19 nt, Artificial Sequence
  Description of Artificial Sequence: Synthetic oligonucleotide
caucgcccagggcucccuu

SEQ ID NO: 1497349 - RNA, 19 nt, Artificial Sequence
  Description of Artificial Sequence: Synthetic oligonucleotide
cgucacacauggggcagua

SEQ ID NO: 1497350 - RNA, 19 nt, Artificial Sequence
  Description of Artificial Sequence: Synthetic oligonucleotide
ccgccgccagggguagaug

SEQ ID NO: 1497351 - RNA, 19 nt, Artificial Sequence
  Description of Artificial Sequence: Synthetic oligonucleotide
ccccguugguagcggaguu

SEQ ID NO: 1497352 - RNA, 19 nt, Artificial Sequence
  Description of Artificial Sequence: Synthetic oligonucleotide
cgguccucguuggagccgu

SEQ ID NO: 1497353 - RNA, 19 nt, Artificial Sequence
  Description of Artificial Sequence: Synthetic oligonucleotide
gguccucguuggagccguu

SEQ ID NO: 1497354 - RNA, 19 nt, Artificial Sequence
  Description of Artificial Sequence: Synthetic oligonucleotide
  modified_base (1)..(1): a, c, u, g, unknown or other
nguggcauuuaaauuaauc

SEQ ID NO: 1497355 - RNA, 19 nt, Artificial Sequence
  Description of Artificial Sequence: Synthetic oligonucleotide
ucuuaauuaucugaggugg

SEQ ID NO: 1497356 - RNA, 19 nt, Artificial Sequence
  Description of Artificial Sequence: Synthetic oligonucleotide
ucuaaaggaaauuuguccc

SEQ ID NO: 1497357 - RNA, 19 nt, Artificial Sequence
  Description of Artificial Sequence: Synthetic oligonucleotide
aauacaaacccagcgauuc

SEQ ID NO: 1497358 - RNA, 19 nt, Artificial Sequence
  Description of Artificial Sequence: Synthetic oligonucleotide
uuuaauucaccccaccugc

SEQ ID NO: 1497359 - RNA, 19 nt, Artificial Sequence
  Description of Artificial Sequence: Synthetic oligonucleotide
caaaauacuagguaaggag

SEQ ID NO: 1497360 - RNA, 19 nt, Artificial Sequence
  Description of Artificial Sequence: Synthetic oligonucleotide
uaucuuaauuaucugaggu

SEQ ID NO: 1497361 - RNA, 19 nt, Artificial Sequence
  Description of Artificial Sequence: Synthetic oligonucleotide
cuagaugucacacaggaug

SEQ ID NO: 1497362 - RNA, 19 nt, Artificial Sequence
  Description of Artificial Sequence: Synthetic oligonucleotide
uuauaaaccaaaaggucca

SEQ ID NO: 1497363 - RNA, 19 nt, Artificial Sequence
  Description of Artificial Sequence: Synthetic oligonucleotide
aaaauacaaacccagcgau

SEQ ID NO: 1497364 - RNA, 19 nt, Artificial Sequence
  Description of Artificial Sequence: Synthetic oligonucleotide
ucugauuaggcucaccacc

SEQ ID NO: 1497365 - RNA, 19 nt, Artificial Sequence
  Description of Artificial Sequence: Synthetic oligonucleotide
uuuuaauucaccccaccug

SEQ ID NO: 1497366 - RNA, 19 nt, Artificial Sequence
  Description of Artificial Sequence: Synthetic oligonucleotide
ugcacggugccaaagaugc

SEQ ID NO: 1497367 - RNA, 19 nt, Artificial Sequence
  Description of Artificial Sequence: Synthetic oligonucleotide
aaaugcgaugucuucugcg

SEQ ID NO: 1497368 - RNA, 19 nt, Artificial Sequence
  Description of Artificial Sequence: Synthetic oligonucleotide
gauaacgggaccgauauug

SEQ ID NO: 1497369 - RNA, 19 nt, Artificial Sequence
  Description of Artificial Sequence: Synthetic oligonucleotide
uguguugaaggucaugaug

SEQ ID NO: 1497370 - RNA, 19 nt, Artificial Sequence
  Description of Artificial Sequence: Synthetic oligonucleotide
aacacucuacuccuaguuc

SEQ ID NO: 1497371 - RNA, 19 nt, Artificial Sequence
  Description of Artificial Sequence: Synthetic oligonucleotide
uggacugagggcaaaauac

SEQ ID NO: 1497372 - RNA, 19 nt, Artificial Sequence
  Description of Artificial Sequence: Synthetic oligonucleotide
uaacaggcaaacacgaagc

SEQ ID NO: 1497373 - RNA, 19 nt, Artificial Sequence
  Description of Artificial Sequence: Synthetic oligonucleotide
aaaauacuagguaaggagu

SEQ ID NO: 1497374 - RNA, 19 nt, Artificial Sequence
  Description of Artificial Sequence: Synthetic oligonucleotide
ugcgcuagaugucacacag

SEQ ID NO: 1497375 - RNA, 19 nt, Artificial Sequence
  Description of Artificial Sequence: Synthetic oligonucleotide
uuaauuaucugaggugggg

SEQ ID NO: 1497376 - RNA, 19 nt, Artificial Sequence
  Description of Artificial Sequence: Synthetic oligonucleotide
accgauauugcacggugcc

SEQ ID NO: 1497377 - RNA, 19 nt, Artificial Sequence
  Description of Artificial Sequence: Synthetic oligonucleotide
uaaagccuuacugugaggc

SEQ ID NO: 1497378 - RNA, 19 nt, Artificial Sequence
  Description of Artificial Sequence: Synthetic oligonucleotide
aagggauuaucuuaauuau

SEQ ID NO: 1497379 - RNA, 19 nt, Artificial Sequence
  Description of Artificial Sequence: Synthetic oligonucleotide
uuaguuuccauaucugcac

SEQ ID NO: 1497380 - RNA, 19 nt, Artificial Sequence
  Description of Artificial Sequence: Synthetic oligonucleotide
uggucuaaaggaaauuugu

SEQ ID NO: 1497381 - RNA, 19 nt, Artificial Sequence
  Description of Artificial Sequence: Synthetic oligonucleotide
aaauacuagguaaggagug

SEQ ID NO: 1497382 - RNA, 19 nt, Artificial Sequence
  Description of Artificial Sequence: Synthetic oligonucleotide
gauccgagcuccuuuacag

SEQ ID NO: 1497383 - RNA, 19 nt, Artificial Sequence
  Description of Artificial Sequence: Synthetic oligonucleotide
aucuuaauuaucugaggug

SEQ ID NO: 1497384 - RNA, 19 nt, Artificial Sequence
  Description of Artificial Sequence: Synthetic oligonucleotide
aacccuaaaguccggcuag

SEQ ID NO: 1497385 - RNA, 19 nt, Artificial Sequence
  Description of Artificial Sequence: Synthetic oligonucleotide
caaaacccggcuuauaaac

SEQ ID NO: 1497386 - RNA, 19 nt, Artificial Sequence
  Description of Artificial Sequence: Synthetic oligonucleotide
ucacuaaagccuuacugug

SEQ ID NO: 1497387 - RNA, 19 nt, Artificial Sequence
  Description of Artificial Sequence: Synthetic oligonucleotide
ugcauggauaccagggagg

SEQ ID NO: 1497388 - RNA, 19 nt, Artificial Sequence
  Description of Artificial Sequence: Synthetic oligonucleotide
ugaggcuccagcaagucac

SEQ ID NO: 1497389 - RNA, 19 nt, Artificial Sequence
  Description of Artificial Sequence: Synthetic oligonucleotide
agugacggagaugacaugg

SEQ ID NO: 1497390 - RNA, 19 nt, Artificial Sequence
  Description of Artificial Sequence: Synthetic oligonucleotide
aaacccggcuuauaaacca

SEQ ID NO: 1497391 - RNA, 19 nt, Artificial Sequence
  Description of Artificial Sequence: Synthetic oligonucleotide
auaggagucaaagccaccg

SEQ ID NO: 1497392 - RNA, 19 nt, Artificial Sequence
  Description of Artificial Sequence: Synthetic oligonucleotide
ugagggaugagauggggug

SEQ ID NO: 1497393 - RNA, 19 nt, Artificial Sequence
  Description of Artificial Sequence: Synthetic oligonucleotide
uagcccagcgaacugacag

SEQ ID NO: 1497394 - RNA, 19 nt, Artificial Sequence
  Description of Artificial Sequence: Synthetic oligonucleotide
aauuaucugagguggggaa

SEQ ID NO: 1497395 - RNA, 19 nt, Artificial Sequence
  Description of Artificial Sequence: Synthetic oligonucleotide
uacccugacguguacagag

SEQ ID NO: 1497396 - RNA, 19 nt, Artificial Sequence
  Description of Artificial Sequence: Synthetic oligonucleotide
gauguagggguaaucaagc

SEQ ID NO: 1497397 - RNA, 19 nt, Artificial Sequence
  Description of Artificial Sequence: Synthetic oligonucleotide
cuuaauuaucugagguggg

SEQ ID NO: 1497398 - RNA, 19 nt, Artificial Sequence
  Description of Artificial Sequence: Synthetic oligonucleotide
aacgggaccgauauugcac

SEQ ID NO: 1497399 - RNA, 19 nt, Artificial Sequence
  Description of Artificial Sequence: Synthetic oligonucleotide
aacacuuugcucacauaac

SEQ ID NO: 1497400 - RNA, 19 nt, Artificial Sequence
  Description of Artificial Sequence: Synthetic oligonucleotide
ugcaaaacccggcuuauaa

SEQ ID NO: 1497401 - RNA, 19 nt, Artificial Sequence
  Description of Artificial Sequence: Synthetic oligonucleotide
auucaccccaccugcaugg

SEQ ID NO: 1497402 - RNA, 19 nt, Artificial Sequence
  Description of Artificial Sequence: Synthetic oligonucleotide
uuugcucacauaacaggca

SEQ ID NO: 1497403 - RNA, 19 nt, Artificial Sequence
  Description of Artificial Sequence: Synthetic oligonucleotide
gagcccaacacucuacucc

SEQ ID NO: 1497404 - RNA, 19 nt, Artificial Sequence
  Description of Artificial Sequence: Synthetic oligonucleotide
cacaggaugucagugaugc

SEQ ID NO: 1497405 - RNA, 19 nt, Artificial Sequence
  Description of Artificial Sequence: Synthetic oligonucleotide
aauucaccccaccugcaug

SEQ ID NO: 1497406 - RNA, 19 nt, Artificial Sequence
  Description of Artificial Sequence: Synthetic oligonucleotide
agggcaaaauacuagguaa

SEQ ID NO: 1497407 - RNA, 19 nt, Artificial Sequence
  Description of Artificial Sequence: Synthetic oligonucleotide
gauguguugaaggucauga

SEQ ID NO: 1497408 - RNA, 19 nt, Artificial Sequence
  Description of Artificial Sequence: Synthetic oligonucleotide
uguaaaugcgaugucuucu

SEQ ID NO: 1497409 - RNA, 19 nt, Artificial Sequence
  Description of Artificial Sequence: Synthetic oligonucleotide
caaaugacagugcuagaag

SEQ ID NO: 1497410 - RNA, 19 nt, Artificial Sequence
  Description of Artificial Sequence: Synthetic oligonucleotide
auacaaacccagcgauucc

SEQ ID NO: 1497411 - RNA, 19 nt, Artificial Sequence
  Description of Artificial Sequence: Synthetic oligonucleotide
aagccuuacugugaggcuc

SEQ ID NO: 1497412 - RNA, 19 nt, Artificial Sequence
  Description of Artificial Sequence: Synthetic oligonucleotide
cugauuaggcucaccaccc

SEQ ID NO: 1497413 - RNA, 19 nt, Artificial Sequence
  Description of Artificial Sequence: Synthetic oligonucleotide
aucugauuaggcucaccac

SEQ ID NO: 1497414 - RNA, 19 nt, Artificial Sequence
  Description of Artificial Sequence: Synthetic oligonucleotide
acuccuaguucacaauauc

SEQ ID NO: 1497415 - RNA, 19 nt, Artificial Sequence
  Description of Artificial Sequence: Synthetic oligonucleotide
ugcuaagggauuaucuuaa

SEQ ID NO: 1497416 - RNA, 19 nt, Artificial Sequence
  Description of Artificial Sequence: Synthetic oligonucleotide
uauugcacggugccaaaga

SEQ ID NO: 1497417 - RNA, 19 nt, Artificial Sequence
  Description of Artificial Sequence: Synthetic oligonucleotide
guaaaugcgaugucuucug

SEQ ID NO: 1497418 - RNA, 19 nt, Artificial Sequence
  Description of Artificial Sequence: Synthetic oligonucleotide
acacucuacuccuaguuca

SEQ ID NO: 1497419 - RNA, 19 nt, Artificial Sequence
  Description of Artificial Sequence: Synthetic oligonucleotide
auaucugcacuguagccca

SEQ ID NO: 1497420 - RNA, 19 nt, Artificial Sequence
  Description of Artificial Sequence: Synthetic oligonucleotide
aggagcaagugcuucgcgg

SEQ ID NO: 1497421 - RNA, 19 nt, Artificial Sequence
  Description of Artificial Sequence: Synthetic oligonucleotide
ugcgaugucuucugcggcg

SEQ ID NO: 1497422 - RNA, 19 nt, Artificial Sequence
  Description of Artificial Sequence: Synthetic oligonucleotide
aauacuagguaaggaguga

SEQ ID NO: 1497423 - RNA, 19 nt, Artificial Sequence
  Description of Artificial Sequence: Synthetic oligonucleotide
uacuagguaaggagugaag

SEQ ID NO: 1497424 - RNA, 19 nt, Artificial Sequence
  Description of Artificial Sequence: Synthetic oligonucleotide
uggcuaaaccuuugagugg

SEQ ID NO: 1497425 - RNA, 19 nt, Artificial Sequence
  Description of Artificial Sequence: Synthetic oligonucleotide
gaguggaagaggucugggg

SEQ ID NO: 1497426 - RNA, 19 nt, Artificial Sequence
  Description of Artificial Sequence: Synthetic oligonucleotide
cacuuugcucacauaacag

SEQ ID NO: 1497427 - RNA, 19 nt, Artificial Sequence
  Description of Artificial Sequence: Synthetic oligonucleotide
uccuaguucacaauaucuu

SEQ ID NO: 1497428 - RNA, 19 nt, Artificial Sequence
  Description of Artificial Sequence: Synthetic oligonucleotide
agguccaaagcaccagugg

SEQ ID NO: 1497429 - RNA, 19 nt, Artificial Sequence
  Description of Artificial Sequence: Synthetic oligonucleotide
caggaugagauaacgggac

SEQ ID NO: 1497430 - RNA, 19 nt, Artificial Sequence
  Description of Artificial Sequence: Synthetic oligonucleotide
cuggucuaaaggaaauuug

SEQ ID NO: 1497431 - RNA, 19 nt, Artificial Sequence
  Description of Artificial Sequence: Synthetic oligonucleotide
aaagccugccuucacuaaa

SEQ ID NO: 1497432 - RNA, 19 nt, Artificial Sequence
  Description of Artificial Sequence: Synthetic oligonucleotide
uaaaggaaauuugucccca

SEQ ID NO: 1497433 - RNA, 19 nt, Artificial Sequence
  Description of Artificial Sequence: Synthetic oligonucleotide
uaauuaucugaggugggga

SEQ ID NO: 1497434 - RNA, 19 nt, Artificial Sequence
  Description of Artificial Sequence: Synthetic oligonucleotide
guacccauaggagucaaag

SEQ ID NO: 1497435 - RNA, 19 nt, Artificial Sequence
  Description of Artificial Sequence: Synthetic oligonucleotide
acgggaccgauauugcacg

SEQ ID NO: 1497436 - RNA, 19 nt, Artificial Sequence
  Description of Artificial Sequence: Synthetic oligonucleotide
ugagggcaaaauacuaggu

SEQ ID NO: 1497437 - RNA, 19 nt, Artificial Sequence
  Description of Artificial Sequence: Synthetic oligonucleotide
uaaaugcgaugucuucugc

SEQ ID NO: 1497438 - RNA, 19 nt, Artificial Sequence
  Description of Artificial Sequence: Synthetic oligonucleotide
gaacugacagccaaaugac

SEQ ID NO: 1497439 - RNA, 19 nt, Artificial Sequence
  Description of Artificial Sequence: Synthetic oligonucleotide
ugggauagcuguccaaccu

SEQ ID NO: 1497440 - RNA, 19 nt, Artificial Sequence
  Description of Artificial Sequence: Synthetic oligonucleotide
uuaauucaccccaccugca

SEQ ID NO: 1497441 - RNA, 19 nt, Artificial Sequence
  Description of Artificial Sequence: Synthetic oligonucleotide
uccggcuagagccaggguc

SEQ ID NO: 1497442 - RNA, 19 nt, Artificial Sequence
  Description of Artificial Sequence: Synthetic oligonucleotide
augcgaugucuucugcggc

SEQ ID NO: 1497443 - RNA, 19 nt, Artificial Sequence
  Description of Artificial Sequence: Synthetic oligonucleotide
auaacgggaccgauauugc

SEQ ID NO: 1497444 - RNA, 19 nt, Artificial Sequence
  Description of Artificial Sequence: Synthetic oligonucleotide
uacccauaggagucaaagc

SEQ ID NO: 1497445 - RNA, 19 nt, Artificial Sequence
  Description of Artificial Sequence: Synthetic oligonucleotide
uaaaguccggcuagagcca

SEQ ID NO: 1497446 - RNA, 19 nt, Artificial Sequence
  Description of Artificial Sequence: Synthetic oligonucleotide
ugacggagaugacauggug

SEQ ID NO: 1497447 - RNA, 19 nt, Artificial Sequence
  Description of Artificial Sequence: Synthetic oligonucleotide
ugggccuuaguuuccauau

SEQ ID NO: 1497448 - RNA, 19 nt, Artificial Sequence
  Description of Artificial Sequence: Synthetic oligonucleotide
ugagauaacgggaccgaua

SEQ ID NO: 1497449 - RNA, 19 nt, Artificial Sequence
  Description of Artificial Sequence: Synthetic oligonucleotide
agaggagcaagugcuucgc

SEQ ID NO: 1497450 - RNA, 19 nt, Artificial Sequence
  Description of Artificial Sequence: Synthetic oligonucleotide
agcccagcgaacugacagc

SEQ ID NO: 1497451 - RNA, 19 nt, Artificial Sequence
  Description of Artificial Sequence: Synthetic oligonucleotide
uuaucugagguggggaaac

SEQ ID NO: 1497452 - RNA, 19 nt, Artificial Sequence
  Description of Artificial Sequence: Synthetic oligonucleotide
guacaggaugagauaacgg

SEQ ID NO: 1497453 - RNA, 19 nt, Artificial Sequence
  Description of Artificial Sequence: Synthetic oligonucleotide
agggauuaucuuaauuauc

SEQ ID NO: 1497454 - RNA, 19 nt, Artificial Sequence
  Description of Artificial Sequence: Synthetic oligonucleotide
ugauccgagcuccuuuaca

SEQ ID NO: 1497455 - RNA, 19 nt, Artificial Sequence
  Description of Artificial Sequence: Synthetic oligonucleotide
caucugauuaggcucacca

SEQ ID NO: 1497456 - RNA, 19 nt, Artificial Sequence
  Description of Artificial Sequence: Synthetic oligonucleotide
aggaagaucugcagggcac

SEQ ID NO: 1497457 - RNA, 19 nt, Artificial Sequence
  Description of Artificial Sequence: Synthetic oligonucleotide
uacuccuaguucacaauau

SEQ ID NO: 1497458 - RNA, 19 nt, Artificial Sequence
  Description of Artificial Sequence: Synthetic oligonucleotide
ggcaaaauacuagguaagg

SEQ ID NO: 1497459 - RNA, 19 nt, Artificial Sequence
  Description of Artificial Sequence: Synthetic oligonucleotide
gguccaaagcaccaguggc

SEQ ID NO: 1497460 - RNA, 19 nt, Artificial Sequence
  Description of Artificial Sequence: Synthetic oligonucleotide
aaggcugcgcuagauguca

SEQ ID NO: 1497461 - RNA, 19 nt, Artificial Sequence
  Description of Artificial Sequence: Synthetic oligonucleotide
gagcuaggaagaucugcag

SEQ ID NO: 1497462 - RNA, 19 nt, Artificial Sequence
  Description of Artificial Sequence: Synthetic oligonucleotide
gagauaacgggaccgauau

SEQ ID NO: 1497463 - RNA, 19 nt, Artificial Sequence
  Description of Artificial Sequence: Synthetic oligonucleotide
aagccgaacagagcuagga

SEQ ID NO: 1497464 - RNA, 19 nt, Artificial Sequence
  Description of Artificial Sequence: Synthetic oligonucleotide
cacggugccaaagaugccc

SEQ ID NO: 1497465 - RNA, 19 nt, Artificial Sequence
  Description of Artificial Sequence: Synthetic oligonucleotide
ggaaauuuguccccaucug

SEQ ID NO: 1497466 - RNA, 19 nt, Artificial Sequence
  Description of Artificial Sequence: Synthetic oligonucleotide
ugacguguacagaggcugc

SEQ ID NO: 1497467 - RNA, 19 nt, Artificial Sequence
  Description of Artificial Sequence: Synthetic oligonucleotide
uguagcccagcgaacugac

SEQ ID NO: 1497468 - RNA, 19 nt, Artificial Sequence
  Description of Artificial Sequence: Synthetic oligonucleotide
uaauucaccccaccugcau

SEQ ID NO: 1497469 - RNA, 19 nt, Artificial Sequence
  Description of Artificial Sequence: Synthetic oligonucleotide
accgaugaagucaaagcug

SEQ ID NO: 1497470 - RNA, 19 nt, Artificial Sequence
  Description of Artificial Sequence: Synthetic oligonucleotide
uaacgggaccgauauugca

SEQ ID NO: 1497471 - RNA, 19 nt, Artificial Sequence
  Description of Artificial Sequence: Synthetic oligonucleotide
cugacguguacagaggcug

SEQ ID NO: 1497472 - RNA, 19 nt, Artificial Sequence
  Description of Artificial Sequence: Synthetic oligonucleotide
aggugaaugagggaugaga

SEQ ID NO: 1497473 - RNA, 19 nt, Artificial Sequence
  Description of Artificial Sequence: Synthetic oligonucleotide
caaaagguccaaagcacca

SEQ ID NO: 1497474 - RNA, 19 nt, Artificial Sequence
  Description of Artificial Sequence: Synthetic oligonucleotide
aagccugccuucacuaaag

SEQ ID NO: 1497475 - RNA, 19 nt, Artificial Sequence
  Description of Artificial Sequence: Synthetic oligonucleotide
gagggcaaaauacuaggua

SEQ ID NO: 1497476 - RNA, 19 nt, Artificial Sequence
  Description of Artificial Sequence: Synthetic oligonucleotide
agcccaacacucuacuccu

SEQ ID NO: 1497477 - RNA, 19 nt, Artificial Sequence
  Description of Artificial Sequence: Synthetic oligonucleotide
agggauguguugaagguca

SEQ ID NO: 1497478 - RNA, 19 nt, Artificial Sequence
  Description of Artificial Sequence: Synthetic oligonucleotide
auugcacggugccaaagau

SEQ ID NO: 1497479 - RNA, 19 nt, Artificial Sequence
  Description of Artificial Sequence: Synthetic oligonucleotide
ggauuaucuuaauuaucug

SEQ ID NO: 1497480 - RNA, 19 nt, Artificial Sequence
  Description of Artificial Sequence: Synthetic oligonucleotide
gccgaacagagcuaggaag

SEQ ID NO: 1497481 - RNA, 19 nt, Artificial Sequence
  Description of Artificial Sequence: Synthetic oligonucleotide
caggcacguaccaaggcug

SEQ ID NO: 1497482 - RNA, 19 nt, Artificial Sequence
  Description of Artificial Sequence: Synthetic oligonucleotide
ugauuaggcucaccaccca

SEQ ID NO: 1497483 - RNA, 19 nt, Artificial Sequence
  Description of Artificial Sequence: Synthetic oligonucleotide
aaaguccggcuagagccag

SEQ ID NO: 1497484 - RNA, 19 nt, Artificial Sequence
  Description of Artificial Sequence: Synthetic oligonucleotide
uaggagucaaagccaccga

SEQ ID NO: 1497485 - RNA, 19 nt, Artificial Sequence
  Description of Artificial Sequence: Synthetic oligonucleotide
gaggagcaagugcuucgcg

SEQ ID NO: 1497486 - RNA, 19 nt, Artificial Sequence
  Description of Artificial Sequence: Synthetic oligonucleotide
cauaggagucaaagccacc

SEQ ID NO: 1497487 - RNA, 19 nt, Artificial Sequence
  Description of Artificial Sequence: Synthetic oligonucleotide
auggggugaguccaucugu

SEQ ID NO: 1497488 - RNA, 19 nt, Artificial Sequence
  Description of Artificial Sequence: Synthetic oligonucleotide
gaugagauaacgggaccga

SEQ ID NO: 1497489 - RNA, 19 nt, Artificial Sequence
  Description of Artificial Sequence: Synthetic oligonucleotide
agccuuacugugaggcucc

SEQ ID NO: 1497490 - RNA, 19 nt, Artificial Sequence
  Description of Artificial Sequence: Synthetic oligonucleotide
cugcccaucgugauccgag

SEQ ID NO: 1497491 - RNA, 19 nt, Artificial Sequence
  Description of Artificial Sequence: Synthetic oligonucleotide
aaauacaaacccagcgauu

SEQ ID NO: 1497492 - RNA, 19 nt, Artificial Sequence
  Description of Artificial Sequence: Synthetic oligonucleotide
agguagaagcagaugauaa

SEQ ID NO: 1497493 - RNA, 19 nt, Artificial Sequence
  Description of Artificial Sequence: Synthetic oligonucleotide
caguggcuaaaccuuugag

SEQ ID NO: 1497494 - RNA, 19 nt, Artificial Sequence
  Description of Artificial Sequence: Synthetic oligonucleotide
agccaggcggcguacagga

SEQ ID NO: 1497495 - RNA, 19 nt, Artificial Sequence
  Description of Artificial Sequence: Synthetic oligonucleotide
gggauuaucuuaauuaucu

SEQ ID NO: 1497496 - RNA, 19 nt, Artificial Sequence
  Description of Artificial Sequence: Synthetic oligonucleotide
agguacgcggguugcugcg

SEQ ID NO: 1497497 - RNA, 19 nt, Artificial Sequence
  Description of Artificial Sequence: Synthetic oligonucleotide
cgaacugacagccaaauga

SEQ ID NO: 1497498 - RNA, 19 nt, Artificial Sequence
  Description of Artificial Sequence: Synthetic oligonucleotide
uggggugaguccaucuguc

SEQ ID NO: 1497499 - RNA, 19 nt, Artificial Sequence
  Description of Artificial Sequence: Synthetic oligonucleotide
uucugcggcgccugguacc

SEQ ID NO: 1497500 - RNA, 19 nt, Artificial Sequence
  Description of Artificial Sequence: Synthetic oligonucleotide
aaggcccaggcacguacca

SEQ ID NO: 1497501 - RNA, 19 nt, Artificial Sequence
  Description of Artificial Sequence: Synthetic oligonucleotide
agaggcuacccugacgugu

SEQ ID NO: 1497502 - RNA, 19 nt, Artificial Sequence
  Description of Artificial Sequence: Synthetic oligonucleotide
cuccgcaaguugcagucag

SEQ ID NO: 1497503 - RNA, 19 nt, Artificial Sequence
  Description of Artificial Sequence: Synthetic oligonucleotide
cacucuacuccuaguucac

SEQ ID NO: 1497504 - RNA, 19 nt, Artificial Sequence
  Description of Artificial Sequence: Synthetic oligonucleotide
agaugucacacaggauguc

SEQ ID NO: 1497505 - RNA, 19 nt, Artificial Sequence
  Description of Artificial Sequence: Synthetic oligonucleotide
ugcucacauaacaggcaaa

SEQ ID NO: 1497506 - RNA, 19 nt, Artificial Sequence
  Description of Artificial Sequence: Synthetic oligonucleotide
uuuggacugagggcaaaau

SEQ ID NO: 1497507 - RNA, 19 nt, Artificial Sequence
  Description of Artificial Sequence: Synthetic oligonucleotide
ucuucugcggcgccuggua

SEQ ID NO: 1497508 - RNA, 19 nt, Artificial Sequence
  Description of Artificial Sequence: Synthetic oligonucleotide
cuccuaguucacaauaucu

SEQ ID NO: 1497509 - RNA, 19 nt, Artificial Sequence
  Description of Artificial Sequence: Synthetic oligonucleotide
auacuagguaaggagugaa

SEQ ID NO: 1497510 - RNA, 19 nt, Artificial Sequence
  Description of Artificial Sequence: Synthetic oligonucleotide
gguaaucaagcaggcagcc

SEQ ID NO: 1497511 - RNA, 19 nt, Artificial Sequence
  Description of Artificial Sequence: Synthetic oligonucleotide
ggaccgauauugcacggug

SEQ ID NO: 1497512 - RNA, 19 nt, Artificial Sequence
  Description of Artificial Sequence: Synthetic oligonucleotide
auuaucugagguggggaaa

SEQ ID NO: 1497513 - RNA, 19 nt, Artificial Sequence
  Description of Artificial Sequence: Synthetic oligonucleotide
auguguugaaggucaugau

SEQ ID NO: 1497514 - RNA, 19 nt, Artificial Sequence
  Description of Artificial Sequence: Synthetic oligonucleotide
auuugcuccaggggcccac

SEQ ID NO: 1497515 - RNA, 19 nt, Artificial Sequence
  Description of Artificial Sequence: Synthetic oligonucleotide
cugcuaagggauuaucuua

SEQ ID NO: 1497516 - RNA, 19 nt, Artificial Sequence
  Description of Artificial Sequence: Synthetic oligonucleotide
cgauguagggguaaucaag

SEQ ID NO: 1497517 - RNA, 19 nt, Artificial Sequence
  Description of Artificial Sequence: Synthetic oligonucleotide
ugcccagguacgcggguug

SEQ ID NO: 1497518 - RNA, 19 nt, Artificial Sequence
  Description of Artificial Sequence: Synthetic oligonucleotide
agugggccgccagagggcg

SEQ ID NO: 1497519 - RNA, 19 nt, Artificial Sequence
  Description of Artificial Sequence: Synthetic oligonucleotide
cagguacgcggguugcugc

SEQ ID NO: 1497520 - RNA, 19 nt, Artificial Sequence
  Description of Artificial Sequence: Synthetic oligonucleotide
gauauugcacggugccaaa

SEQ ID NO: 1497521 - RNA, 19 nt, Artificial Sequence
  Description of Artificial Sequence: Synthetic oligonucleotide
gaccgauauugcacggugc

SEQ ID NO: 1497522 - RNA, 19 nt, Artificial Sequence
  Description of Artificial Sequence: Synthetic oligonucleotide
caggcggaguucagaacag

SEQ ID NO: 1497523 - RNA, 19 nt, Artificial Sequence
  Description of Artificial Sequence: Synthetic oligonucleotide
caccacgagcgaugcaggg

SEQ ID NO: 1497524 - RNA, 19 nt, Artificial Sequence
  Description of Artificial Sequence: Synthetic oligonucleotide
ccggcuuauaaaccaaaag

SEQ ID NO: 1497525 - RNA, 19 nt, Artificial Sequence
  Description of Artificial Sequence: Synthetic oligonucleotide
ucgugauccgagcuccuuu

SEQ ID NO: 1497526 - RNA, 19 nt, Artificial Sequence
  Description of Artificial Sequence: Synthetic oligonucleotide
ggucuaaaggaaauuuguc

SEQ ID NO: 1497527 - RNA, 19 nt, Artificial Sequence
  Description of Artificial Sequence: Synthetic oligonucleotide
cuacuccuaguucacaaua

SEQ ID NO: 1497528 - RNA, 19 nt, Artificial Sequence
  Description of Artificial Sequence: Synthetic oligonucleotide
aucugagguggggaaacug

SEQ ID NO: 1497529 - RNA, 19 nt, Artificial Sequence
  Description of Artificial Sequence: Synthetic oligonucleotide
uccaaccuccagguagaag

SEQ ID NO: 1497530 - RNA, 19 nt, Artificial Sequence
  Description of Artificial Sequence: Synthetic oligonucleotide
gcaaaauacuagguaagga

SEQ ID NO: 1497531 - RNA, 19 nt, Artificial Sequence
  Description of Artificial Sequence: Synthetic oligonucleotide
ucugcggcgccugguaccc

SEQ ID NO: 1497532 - RNA, 19 nt, Artificial Sequence
  Description of Artificial Sequence: Synthetic oligonucleotide
cuagagccagggucaaguc

SEQ ID NO: 1497533 - RNA, 19 nt, Artificial Sequence
  Description of Artificial Sequence: Synthetic oligonucleotide
gcucacauaacaggcaaac

SEQ ID NO: 1497534 - RNA, 19 nt, Artificial Sequence
  Description of Artificial Sequence: Synthetic oligonucleotide
gaagccgaacagagcuagg

SEQ ID NO: 1497535 - RNA, 19 nt, Artificial Sequence
  Description of Artificial Sequence: Synthetic oligonucleotide
cuggagcccaacacucuac

SEQ ID NO: 1497536 - RNA, 19 nt, Artificial Sequence
  Description of Artificial Sequence: Synthetic oligonucleotide
agccgaacagagcuaggaa

SEQ ID NO: 1497537 - RNA, 19 nt, Artificial Sequence
  Description of Artificial Sequence: Synthetic oligonucleotide
ccgcauuugcuccaggggc

SEQ ID NO: 1497538 - RNA, 19 nt, Artificial Sequence
  Description of Artificial Sequence: Synthetic oligonucleotide
cguacaggaugagauaacg

SEQ ID NO: 1497539 - RNA, 19 nt, Artificial Sequence
  Description of Artificial Sequence: Synthetic oligonucleotide
guacgcggguugcugcggg

SEQ ID NO: 1497540 - RNA, 19 nt, Artificial Sequence
  Description of Artificial Sequence: Synthetic oligonucleotide
agucaaagccaccgaugaa

SEQ ID NO: 1497541 - RNA, 19 nt, Artificial Sequence
  Description of Artificial Sequence: Synthetic oligonucleotide
ggcuaaaccuuugagugga

SEQ ID NO: 1497542 - RNA, 19 nt, Artificial Sequence
  Description of Artificial Sequence: Synthetic oligonucleotide
ggagucaaagccugccuuc

SEQ ID NO: 1497543 - RNA, 19 nt, Artificial Sequence
  Description of Artificial Sequence: Synthetic oligonucleotide
ggguaaucaagcaggcagc

SEQ ID NO: 1497544 - RNA, 19 nt, Artificial Sequence
  Description of Artificial Sequence: Synthetic oligonucleotide
ggagucaaagccaccgaug

SEQ ID NO: 1497545 - RNA, 19 nt, Artificial Sequence
  Description of Artificial Sequence: Synthetic oligonucleotide
uacgcggguugcugcgggg

SEQ ID NO: 1497546 - RNA, 19 nt, Artificial Sequence
  Description of Artificial Sequence: Synthetic oligonucleotide
agcgaacugacagccaaau

SEQ ID NO: 1497547 - RNA, 19 nt, Artificial Sequence
  Description of Artificial Sequence: Synthetic oligonucleotide
ggcccaggcacguaccaag

SEQ ID NO: 1497548 - RNA, 19 nt, Artificial Sequence
  Description of Artificial Sequence: Synthetic oligonucleotide
gcagcuguaaaugcgaugu

SEQ ID NO: 1497549 - RNA, 19 nt, Artificial Sequence
  Description of Artificial Sequence: Synthetic oligonucleotide
gaaggcccaggcacguacc

SEQ ID NO: 1497550 - RNA, 19 nt, Artificial Sequence
  Description of Artificial Sequence: Synthetic oligonucleotide
cauccaccacgagcgaugc

SEQ ID NO: 1497551 - RNA, 19 nt, Artificial Sequence
  Description of Artificial Sequence: Synthetic oligonucleotide
acguguacagaggcugcag

SEQ ID NO: 1497552 - RNA, 19 nt, Artificial Sequence
  Description of Artificial Sequence: Synthetic oligonucleotide
aguccgcauuugcuccagg

SEQ ID NO: 1497553 - RNA, 19 nt, Artificial Sequence
  Description of Artificial Sequence: Synthetic oligonucleotide
ggaaggcccaggcacguac

SEQ ID NO: 1497554 - RNA, 19 nt, Artificial Sequence
  Description of Artificial Sequence: Synthetic oligonucleotide
gucaccaggcagccuggcc

SEQ ID NO: 1497555 - RNA, 19 nt, Artificial Sequence
  Description of Artificial Sequence: Synthetic oligonucleotide
cagucagccagugggccgc

SEQ ID NO: 1497556 - RNA, 19 nt, Artificial Sequence
  Description of Artificial Sequence: Synthetic oligonucleotide
gcagucagccagugggccg

SEQ ID NO: 1497557 - RNA, 19 nt, Artificial Sequence
  Description of Artificial Sequence: Synthetic oligonucleotide
ccagugacaagaggcagcc

SEQ ID NO: 1497558 - RNA, 19 nt, Artificial Sequence
  Description of Artificial Sequence: Synthetic oligonucleotide
uaucugagguggggaaacu

SEQ ID NO: 1497559 - RNA, 19 nt, Artificial Sequence
  Description of Artificial Sequence: Synthetic oligonucleotide
acgagcgaugcagggaugu

SEQ ID NO: 1497560 - RNA, 19 nt, Artificial Sequence
  Description of Artificial Sequence: Synthetic oligonucleotide
cagggauguguugaagguc

SEQ ID NO: 1497561 - RNA, 19 nt, Artificial Sequence
  Description of Artificial Sequence: Synthetic oligonucleotide
cccagugacaagaggcagc

SEQ ID NO: 1497562 - RNA, 19 nt, Artificial Sequence
  Description of Artificial Sequence: Synthetic oligonucleotide
cuucugcggcgccugguac

SEQ ID NO: 1497563 - RNA, 19 nt, Artificial Sequence
  Description of Artificial Sequence: Synthetic oligonucleotide
gauagcuguccaaccucca

SEQ ID NO: 1497564 - RNA, 19 nt, Artificial Sequence
  Description of Artificial Sequence: Synthetic oligonucleotide
aggcggaguucagaacagg

SEQ ID NO: 1497565 - RNA, 19 nt, Artificial Sequence
  Description of Artificial Sequence: Synthetic oligonucleotide
aggcuacccugacguguac

SEQ ID NO: 1497566 - RNA, 19 nt, Artificial Sequence
  Description of Artificial Sequence: Synthetic oligonucleotide
cagugcuagaaguguccuc

SEQ ID NO: 1497567 - RNA, 19 nt, Artificial Sequence
  Description of Artificial Sequence: Synthetic oligonucleotide
gcugagggcuucgauguag

SEQ ID NO: 1497568 - RNA, 19 nt, Artificial Sequence
  Description of Artificial Sequence: Synthetic oligonucleotide
cccaacacucuacuccuag

SEQ ID NO: 1497569 - RNA, 19 nt, Artificial Sequence
  Description of Artificial Sequence: Synthetic oligonucleotide
caggcggcguacaggauga

SEQ ID NO: 1497570 - RNA, 19 nt, Artificial Sequence
  Description of Artificial Sequence: Synthetic oligonucleotide
caacccuaaaguccggcua

SEQ ID NO: 1497571 - RNA, 19 nt, Artificial Sequence
  Description of Artificial Sequence: Synthetic oligonucleotide
gcgccugguacccauagga

SEQ ID NO: 1497572 - RNA, 19 nt, Artificial Sequence
  Description of Artificial Sequence: Synthetic oligonucleotide
aacccggcuuauaaaccaa

SEQ ID NO: 1497573 - RNA, 19 nt, Artificial Sequence
  Description of Artificial Sequence: Synthetic oligonucleotide
accacgagcgaugcaggga

SEQ ID NO: 1497574 - RNA, 19 nt, Artificial Sequence
  Description of Artificial Sequence: Synthetic oligonucleotide
gacguguacagaggcugca

SEQ ID NO: 1497575 - RNA, 19 nt, Artificial Sequence
  Description of Artificial Sequence: Synthetic oligonucleotide
uguuuggacugagggcaaa

SEQ ID NO: 1497576 - RNA, 19 nt, Artificial Sequence
  Description of Artificial Sequence: Synthetic oligonucleotide
augagauaacgggaccgau

SEQ ID NO: 1497577 - RNA, 19 nt, Artificial Sequence
  Description of Artificial Sequence: Synthetic oligonucleotide
gaagucccgguccugggau

SEQ ID NO: 1497578 - RNA, 19 nt, Artificial Sequence
  Description of Artificial Sequence: Synthetic oligonucleotide
gugauccgagcuccuuuac

SEQ ID NO: 1497579 - RNA, 19 nt, Artificial Sequence
  Description of Artificial Sequence: Synthetic oligonucleotide
aaguccggcuagagccagg

SEQ ID NO: 1497580 - RNA, 19 nt, Artificial Sequence
  Description of Artificial Sequence: Synthetic oligonucleotide
cguaccaaggcugagauua

SEQ ID NO: 1497581 - RNA, 19 nt, Artificial Sequence
  Description of Artificial Sequence: Synthetic oligonucleotide
ggcguacaggaugagauaa

SEQ ID NO: 1497582 - RNA, 19 nt, Artificial Sequence
  Description of Artificial Sequence: Synthetic oligonucleotide
ccauccaccacgagcgaug

SEQ ID NO: 1497583 - RNA, 19 nt, Artificial Sequence
  Description of Artificial Sequence: Synthetic oligonucleotide
ccugggauagcuguccaac

SEQ ID NO: 1497584 - RNA, 19 nt, Artificial Sequence
  Description of Artificial Sequence: Synthetic oligonucleotide
gaguccgcauuugcuccag

SEQ ID NO: 1497585 - RNA, 19 nt, Artificial Sequence
  Description of Artificial Sequence: Synthetic oligonucleotide
gcaaaacccggcuuauaaa

SEQ ID NO: 1497586 - RNA, 19 nt, Artificial Sequence
  Description of Artificial Sequence: Synthetic oligonucleotide
accucacaucucugggccu

SEQ ID NO: 1497587 - RNA, 19 nt, Artificial Sequence
  Description of Artificial Sequence: Synthetic oligonucleotide
agggcgcgccugcccaucg

SEQ ID NO: 1497588 - RNA, 19 nt, Artificial Sequence
  Description of Artificial Sequence: Synthetic oligonucleotide
cagugacggagaugacaug

SEQ ID NO: 1497589 - RNA, 19 nt, Artificial Sequence
  Description of Artificial Sequence: Synthetic oligonucleotide
gcugcgcuagaugucacac

SEQ ID NO: 1497590 - RNA, 19 nt, Artificial Sequence
  Description of Artificial Sequence: Synthetic oligonucleotide
acacaggaugucagugaug

SEQ ID NO: 1497591 - RNA, 19 nt, Artificial Sequence
  Description of Artificial Sequence: Synthetic oligonucleotide
ccgagcuccuuuacagugc

SEQ ID NO: 1497592 - RNA, 19 nt, Artificial Sequence
  Description of Artificial Sequence: Synthetic oligonucleotide
gccuuaguuuccauaucug

SEQ ID NO: 1497593 - RNA, 19 nt, Artificial Sequence
  Description of Artificial Sequence: Synthetic oligonucleotide
cagcuguaaaugcgauguc

SEQ ID NO: 1497594 - RNA, 19 nt, Artificial Sequence
  Description of Artificial Sequence: Synthetic oligonucleotide
cagaggcuacccugacgug

SEQ ID NO: 1497595 - RNA, 19 nt, Artificial Sequence
  Description of Artificial Sequence: Synthetic oligonucleotide
caacacucuacuccuaguu

SEQ ID NO: 1497596 - RNA, 19 nt, Artificial Sequence
  Description of Artificial Sequence: Synthetic oligonucleotide
gcgaacugacagccaaaug

SEQ ID NO: 1497597 - RNA, 19 nt, Artificial Sequence
  Description of Artificial Sequence: Synthetic oligonucleotide
acggugccaaagaugccca

SEQ ID NO: 1497598 - RNA, 19 nt, Artificial Sequence
  Description of Artificial Sequence: Synthetic oligonucleotide
cacacaggaugucagugau

SEQ ID NO: 1497599 - RNA, 19 nt, Artificial Sequence
  Description of Artificial Sequence: Synthetic oligonucleotide
cacguaccaaggcugagau

SEQ ID NO: 1497600 - RNA, 19 nt, Artificial Sequence
  Description of Artificial Sequence: Synthetic oligonucleotide
ugguacccauaggagucaa

SEQ ID NO: 1497601 - RNA, 19 nt, Artificial Sequence
  Description of Artificial Sequence: Synthetic oligonucleotide
cugcgcuagaugucacaca

SEQ ID NO: 1497602 - RNA, 19 nt, Artificial Sequence
  Description of Artificial Sequence: Synthetic oligonucleotide
gaggcuacccugacgugua

SEQ ID NO: 1497603 - RNA, 19 nt, Artificial Sequence
  Description of Artificial Sequence: Synthetic oligonucleotide
uucaccccaccugcaugga

SEQ ID NO: 1497604 - RNA, 19 nt, Artificial Sequence
  Description of Artificial Sequence: Synthetic oligonucleotide
ggcggaguucagaacagga

SEQ ID NO: 1497605 - RNA, 19 nt, Artificial Sequence
  Description of Artificial Sequence: Synthetic oligonucleotide
cauggauaccagggagguc

SEQ ID NO: 1497606 - RNA, 19 nt, Artificial Sequence
  Description of Artificial Sequence: Synthetic oligonucleotide
cacgagcgaugcagggaug

SEQ ID NO: 1497607 - RNA, 19 nt, Artificial Sequence
  Description of Artificial Sequence: Synthetic oligonucleotide
ggggcccacauauccagga

SEQ ID NO: 1497608 - RNA, 19 nt, Artificial Sequence
  Description of Artificial Sequence: Synthetic oligonucleotide
gccagugacggagaugaca

SEQ ID NO: 1497609 - RNA, 19 nt, Artificial Sequence
  Description of Artificial Sequence: Synthetic oligonucleotide
ggagcccaacacucuacuc

SEQ ID NO: 1497610 - RNA, 19 nt, Artificial Sequence
  Description of Artificial Sequence: Synthetic oligonucleotide
ggcgccugguacccauagg

SEQ ID NO: 1497611 - RNA, 19 nt, Artificial Sequence
  Description of Artificial Sequence: Synthetic oligonucleotide
ccuuugaguggaagagguc

SEQ ID NO: 1497612 - RNA, 19 nt, Artificial Sequence
  Description of Artificial Sequence: Synthetic oligonucleotide
ccggcuagagccaggguca

SEQ ID NO: 1497613 - RNA, 19 nt, Artificial Sequence
  Description of Artificial Sequence: Synthetic oligonucleotide
aggcacguaccaaggcuga

SEQ ID NO: 1497614 - RNA, 19 nt, Artificial Sequence
  Description of Artificial Sequence: Synthetic oligonucleotide
gguacgcggguugcugcgg

SEQ ID NO: 1497615 - RNA, 19 nt, Artificial Sequence
  Description of Artificial Sequence: Synthetic oligonucleotide
acccuaaaguccggcuaga

SEQ ID NO: 1497616 - RNA, 19 nt, Artificial Sequence
  Description of Artificial Sequence: Synthetic oligonucleotide
cacuguagcccagcgaacu

SEQ ID NO: 1497617 - RNA, 19 nt, Artificial Sequence
  Description of Artificial Sequence: Synthetic oligonucleotide
gccuucacuaaagccuuac

SEQ ID NO: 1497618 - RNA, 19 nt, Artificial Sequence
  Description of Artificial Sequence: Synthetic oligonucleotide
acguaccaaggcugagauu

SEQ ID NO: 1497619 - RNA, 19 nt, Artificial Sequence
  Description of Artificial Sequence: Synthetic oligonucleotide
aggcugcgcuagaugucac

SEQ ID NO: 1497620 - RNA, 19 nt, Artificial Sequence
  Description of Artificial Sequence: Synthetic oligonucleotide
ccagcgaacugacagccaa

SEQ ID NO: 1497621 - RNA, 19 nt, Artificial Sequence
  Description of Artificial Sequence: Synthetic oligonucleotide
uuccccagugcaggugaau

SEQ ID NO: 1497622 - RNA, 19 nt, Artificial Sequence
  Description of Artificial Sequence: Synthetic oligonucleotide
aucgugauccgagcuccuu

SEQ ID NO: 1497623 - RNA, 19 nt, Artificial Sequence
  Description of Artificial Sequence: Synthetic oligonucleotide
ccccaucugauuaggcuca

SEQ ID NO: 1497624 - RNA, 19 nt, Artificial Sequence
  Description of Artificial Sequence: Synthetic oligonucleotide
cccaggcacguaccaaggc

SEQ ID NO: 1497625 - RNA, 19 nt, Artificial Sequence
  Description of Artificial Sequence: Synthetic oligonucleotide
acccggcuuauaaaccaaa

SEQ ID NO: 1497626 - RNA, 19 nt, Artificial Sequence
  Description of Artificial Sequence: Synthetic oligonucleotide
uugcccagguacgcggguu

SEQ ID NO: 1497627 - RNA, 19 nt, Artificial Sequence
  Description of Artificial Sequence: Synthetic oligonucleotide
gcccaggcacguaccaagg

SEQ ID NO: 1497628 - RNA, 19 nt, Artificial Sequence
  Description of Artificial Sequence: Synthetic oligonucleotide
gcgaugucuucugcggcgc

SEQ ID NO: 1497629 - RNA, 19 nt, Artificial Sequence
  Description of Artificial Sequence: Synthetic oligonucleotide
cagcgaacugacagccaaa

SEQ ID NO: 1497630 - RNA, 19 nt, Artificial Sequence
  Description of Artificial Sequence: Synthetic oligonucleotide
gcacguaccaaggcugaga

SEQ ID NO: 1497631 - RNA, 19 nt, Artificial Sequence
  Description of Artificial Sequence: Synthetic oligonucleotide
gcgcuagaugucacacagg

SEQ ID NO: 1497632 - RNA, 19 nt, Artificial Sequence
  Description of Artificial Sequence: Synthetic oligonucleotide
cgccugguacccauaggag

SEQ ID NO: 1497633 - RNA, 19 nt, Artificial Sequence
  Description of Artificial Sequence: Synthetic oligonucleotide
guaccaaggcugagauuaa

SEQ ID NO: 1497634 - RNA, 19 nt, Artificial Sequence
  Description of Artificial Sequence: Synthetic oligonucleotide
ggcacguaccaaggcugag

SEQ ID NO: 1497635 - RNA, 19 nt, Artificial Sequence
  Description of Artificial Sequence: Synthetic oligonucleotide
gugacggagaugacauggu

SEQ ID NO: 1497636 - RNA, 19 nt, Artificial Sequence
  Description of Artificial Sequence: Synthetic oligonucleotide
caaguccaaguccgagucu

SEQ ID NO: 1497637 - RNA, 19 nt, Artificial Sequence
  Description of Artificial Sequence: Synthetic oligonucleotide
ggcugcgcuagaugucaca

SEQ ID NO: 1497638 - RNA, 19 nt, Artificial Sequence
  Description of Artificial Sequence: Synthetic oligonucleotide
acgaagccgaacagagcua

SEQ ID NO: 1497639 - RNA, 19 nt, Artificial Sequence
  Description of Artificial Sequence: Synthetic oligonucleotide
gcguacaggaugagauaac

SEQ ID NO: 1497640 - RNA, 19 nt, Artificial Sequence
  Description of Artificial Sequence: Synthetic oligonucleotide
ccagguacgcggguugcug

SEQ ID NO: 1497641 - RNA, 19 nt, Artificial Sequence
  Description of Artificial Sequence: Synthetic oligonucleotide
guagcccagcgaacugaca

SEQ ID NO: 1497642 - RNA, 19 nt, Artificial Sequence
  Description of Artificial Sequence: Synthetic oligonucleotide
gguaaggagugaagcugaa

SEQ ID NO: 1497643 - RNA, 19 nt, Artificial Sequence
  Description of Artificial Sequence: Synthetic oligonucleotide
ggggcuccgcaaguugcag

SEQ ID NO: 1497644 - RNA, 19 nt, Artificial Sequence
  Description of Artificial Sequence: Synthetic oligonucleotide
gcggcguacaggaugagau

SEQ ID NO: 1497645 - RNA, 19 nt, Artificial Sequence
  Description of Artificial Sequence: Synthetic oligonucleotide
cccggcuuauaaaccaaaa

SEQ ID NO: 1497646 - RNA, 19 nt, Artificial Sequence
  Description of Artificial Sequence: Synthetic oligonucleotide
guugcccagguacgcgggu

SEQ ID NO: 1497647 - RNA, 19 nt, Artificial Sequence
  Description of Artificial Sequence: Synthetic oligonucleotide
ccaucugauuaggcucacc

SEQ ID NO: 1497648 - RNA, 19 nt, Artificial Sequence
  Description of Artificial Sequence: Synthetic oligonucleotide
ccaggcacguaccaaggcu

SEQ ID NO: 1497649 - RNA, 19 nt, Artificial Sequence
  Description of Artificial Sequence: Synthetic oligonucleotide
cccugcaaaacccggcuua

SEQ ID NO: 1497650 - RNA, 19 nt, Artificial Sequence
  Description of Artificial Sequence: Synthetic oligonucleotide
ggcuacccugacguguaca

SEQ ID NO: 1497651 - RNA, 19 nt, Artificial Sequence
  Description of Artificial Sequence: Synthetic oligonucleotide
gcaagucaccucacaucuc

SEQ ID NO: 1497652 - RNA, 19 nt, Artificial Sequence
  Description of Artificial Sequence: Synthetic oligonucleotide
ccuggucuaaaggaaauuu

SEQ ID NO: 1497653 - RNA, 19 nt, Artificial Sequence
  Description of Artificial Sequence: Synthetic oligonucleotide
ccuuacugugaggcuccag

SEQ ID NO: 1497654 - RNA, 19 nt, Artificial Sequence
  Description of Artificial Sequence: Synthetic oligonucleotide
ccaacccuaaaguccggcu

SEQ ID NO: 1497655 - RNA, 19 nt, Artificial Sequence
  Description of Artificial Sequence: Synthetic oligonucleotide
caucgugauccgagcuccu

SEQ ID NO: 1497656 - RNA, 19 nt, Artificial Sequence
  Description of Artificial Sequence: Synthetic oligonucleotide
cugcaaaacccggcuuaua

SEQ ID NO: 1497657 - RNA, 19 nt, Artificial Sequence
  Description of Artificial Sequence: Synthetic oligonucleotide
aggaaggcccaggcacgua

SEQ ID NO: 1497658 - RNA, 19 nt, Artificial Sequence
  Description of Artificial Sequence: Synthetic oligonucleotide
cgugauccgagcuccuuua

SEQ ID NO: 1497659 - RNA, 19 nt, Artificial Sequence
  Description of Artificial Sequence: Synthetic oligonucleotide
gcccagguacgcggguugc

SEQ ID NO: 1497660 - RNA, 19 nt, Artificial Sequence
  Description of Artificial Sequence: Synthetic oligonucleotide
ccgauauugcacggugcca

SEQ ID NO: 1497661 - RNA, 19 nt, Artificial Sequence
  Description of Artificial Sequence: Synthetic oligonucleotide
gguacccauaggagucaaa

SEQ ID NO: 1497662 - RNA, 19 nt, Artificial Sequence
  Description of Artificial Sequence: Synthetic oligonucleotide
ccgguccugggauagcugu

SEQ ID NO: 1497663 - RNA, 19 nt, Artificial Sequence
  Description of Artificial Sequence: Synthetic oligonucleotide
cacugcugagggcuucgau

SEQ ID NO: 1497664 - RNA, 19 nt, Artificial Sequence
  Description of Artificial Sequence: Synthetic oligonucleotide
gcgccugcccaucgugauc

SEQ ID NO: 1497665 - RNA, 19 nt, Artificial Sequence
  Description of Artificial Sequence: Synthetic oligonucleotide
gggcuccgcaaguugcagu

SEQ ID NO: 1497666 - RNA, 19 nt, Artificial Sequence
  Description of Artificial Sequence: Synthetic oligonucleotide
gcuaaaccuuugaguggaa

SEQ ID NO: 1497667 - RNA, 19 nt, Artificial Sequence
  Description of Artificial Sequence: Synthetic oligonucleotide
gcuccgcaaguugcaguca

SEQ ID NO: 1497668 - RNA, 19 nt, Artificial Sequence
  Description of Artificial Sequence: Synthetic oligonucleotide
caccacccaggggagucaa

SEQ ID NO: 1497669 - RNA, 19 nt, Artificial Sequence
  Description of Artificial Sequence: Synthetic oligonucleotide
gcuagaugucacacaggau

SEQ ID NO: 1497670 - RNA, 19 nt, Artificial Sequence
  Description of Artificial Sequence: Synthetic oligonucleotide
gugggccgccagagggcgc

SEQ ID NO: 1497671 - RNA, 19 nt, Artificial Sequence
  Description of Artificial Sequence: Synthetic oligonucleotide
cggcgccugguacccauag

SEQ ID NO: 1497672 - RNA, 19 nt, Artificial Sequence
  Description of Artificial Sequence: Synthetic oligonucleotide
cccaucugauuaggcucac

SEQ ID NO: 1497673 - RNA, 19 nt, Artificial Sequence
  Description of Artificial Sequence: Synthetic oligonucleotide
accacccaggggagucaaa

SEQ ID NO: 1497674 - RNA, 19 nt, Artificial Sequence
  Description of Artificial Sequence: Synthetic oligonucleotide
gcauuccagccaacccaga

SEQ ID NO: 1497675 - RNA, 19 nt, Artificial Sequence
  Description of Artificial Sequence: Synthetic oligonucleotide
ccguccugccccaacccua

SEQ ID NO: 1497676 - RNA, 19 nt, Artificial Sequence
  Description of Artificial Sequence: Synthetic oligonucleotide
guccggcuagagccagggu

SEQ ID NO: 1497677 - RNA, 19 nt, Artificial Sequence
  Description of Artificial Sequence: Synthetic oligonucleotide
cgagcgaugcagggaugug

SEQ ID NO: 1497678 - RNA, 19 nt, Artificial Sequence
  Description of Artificial Sequence: Synthetic oligonucleotide
cgucccguccugccccaac

SEQ ID NO: 1497679 - RNA, 19 nt, Artificial Sequence
  Description of Artificial Sequence: Synthetic oligonucleotide
agccaccgaugaagucaaa

SEQ ID NO: 1497680 - RNA, 19 nt, Artificial Sequence
  Description of Artificial Sequence: Synthetic oligonucleotide
ccugcaaaacccggcuuau

SEQ ID NO: 1497681 - RNA, 19 nt, Artificial Sequence
  Description of Artificial Sequence: Synthetic oligonucleotide
cggcguacaggaugagaua

SEQ ID NO: 1497682 - RNA, 19 nt, Artificial Sequence
  Description of Artificial Sequence: Synthetic oligonucleotide
gggauguguugaaggucau

SEQ ID NO: 1497683 - RNA, 19 nt, Artificial Sequence
  Description of Artificial Sequence: Synthetic oligonucleotide
cccguccugccccaacccu

SEQ ID NO: 1497684 - RNA, 19 nt, Artificial Sequence
  Description of Artificial Sequence: Synthetic oligonucleotide
cugcggcgccugguaccca

SEQ ID NO: 1497685 - RNA, 19 nt, Artificial Sequence
  Description of Artificial Sequence: Synthetic oligonucleotide
ccccugcaaaacccggcuu

SEQ ID NO: 1497686 - RNA, 19 nt, Artificial Sequence
  Description of Artificial Sequence: Synthetic oligonucleotide
cccagguacgcggguugcu

SEQ ID NO: 1497687 - RNA, 19 nt, Artificial Sequence
  Description of Artificial Sequence: Synthetic oligonucleotide
gcggcgccugguacccaua

SEQ ID NO: 1497688 - RNA, 19 nt, Artificial Sequence
  Description of Artificial Sequence: Synthetic oligonucleotide
cggcuagagccagggucaa

SEQ ID NO: 1497689 - RNA, 19 nt, Artificial Sequence
  Description of Artificial Sequence: Synthetic oligonucleotide
gccaggcggcguacaggau

SEQ ID NO: 1497690 - RNA, 19 nt, Artificial Sequence
  Description of Artificial Sequence: Synthetic oligonucleotide
ccgucccguccugccccaa

SEQ ID NO: 1497691 - RNA, 19 nt, Artificial Sequence
  Description of Artificial Sequence: Synthetic oligonucleotide
aaaaguugggcuugucugc

SEQ ID NO: 1497692 - RNA, 19 nt, Artificial Sequence
  Description of Artificial Sequence: Synthetic oligonucleotide
uacauaaugaaaagcauca

SEQ ID NO: 1497693 - RNA, 19 nt, Artificial Sequence
  Description of Artificial Sequence: Synthetic oligonucleotide
ugagaagauauccauaaac

SEQ ID NO: 1497694 - RNA, 19 nt, Artificial Sequence
  Description of Artificial Sequence: Synthetic oligonucleotide
gacgaagaaagucaaacag

SEQ ID NO: 1497695 - RNA, 19 nt, Artificial Sequence
  Description of Artificial Sequence: Synthetic oligonucleotide
gaagauauccauaaacugc

SEQ ID NO: 1497696 - RNA, 19 nt, Artificial Sequence
  Description of Artificial Sequence: Synthetic oligonucleotide
uuucgaaaaggcuugcgcc

SEQ ID NO: 1497697 - RNA, 19 nt, Artificial Sequence
  Description of Artificial Sequence: Synthetic oligonucleotide
acugcaaauguuucauccc

SEQ ID NO: 1497698 - RNA, 19 nt, Artificial Sequence
  Description of Artificial Sequence: Synthetic oligonucleotide
ucuuguucaauccacuggu

SEQ ID NO: 1497699 - RNA, 19 nt, Artificial Sequence
  Description of Artificial Sequence: Synthetic oligonucleotide
uguuucauccccucugagg

SEQ ID NO: 1497700 - RNA, 19 nt, Artificial Sequence
  Description of Artificial Sequence: Synthetic oligonucleotide
acaugaacgucccggaugg

SEQ ID NO: 1497701 - RNA, 19 nt, Artificial Sequence
  Description of Artificial Sequence: Synthetic oligonucleotide
uucgaaaaggcuugcgccg

SEQ ID NO: 1497702 - RNA, 19 nt, Artificial Sequence
  Description of Artificial Sequence: Synthetic oligonucleotide
cuggacgaugacuacaucg

SEQ ID NO: 1497703 - RNA, 19 nt, Artificial Sequence
  Description of Artificial Sequence: Synthetic oligonucleotide
aagauauccauaaacugcu

SEQ ID NO: 1497704 - RNA, 19 nt, Artificial Sequence
  Description of Artificial Sequence: Synthetic oligonucleotide
gaugacuacaucgaagagc

SEQ ID NO: 1497705 - RNA, 19 nt, Artificial Sequence
  Description of Artificial Sequence: Synthetic oligonucleotide
agugagaagauauccauaa

SEQ ID NO: 1497706 - RNA, 19 nt, Artificial Sequence
  Description of Artificial Sequence: Synthetic oligonucleotide
aaaguugggcuugucugcc

SEQ ID NO: 1497707 - RNA, 19 nt, Artificial Sequence
  Description of Artificial Sequence: Synthetic oligonucleotide
uguacauaaugaaaagcau

SEQ ID NO: 1497708 - RNA, 19 nt, Artificial Sequence
  Description of Artificial Sequence: Synthetic oligonucleotide
guauaggucaaucacuuca

SEQ ID NO: 1497709 - RNA, 19 nt, Artificial Sequence
  Description of Artificial Sequence: Synthetic oligonucleotide
aauguuucauccccucuga

SEQ ID NO: 1497710 - RNA, 19 nt, Artificial Sequence
  Description of Artificial Sequence: Synthetic oligonucleotide
aggacuguuggugauaagg

SEQ ID NO: 1497711 - RNA, 19 nt, Artificial Sequence
  Description of Artificial Sequence: Synthetic oligonucleotide
aaaacuggggucauaguca

SEQ ID NO: 1497712 - RNA, 19 nt, Artificial Sequence
  Description of Artificial Sequence: Synthetic oligonucleotide
ucaacgagugcauguauug

SEQ ID NO: 1497713 - RNA, 19 nt, Artificial Sequence
  Description of Artificial Sequence: Synthetic oligonucleotide
uuggucaaacuccaggcca

SEQ ID NO: 1497714 - RNA, 19 nt, Artificial Sequence
  Description of Artificial Sequence: Synthetic oligonucleotide
uguucaauccacugguaca

SEQ ID NO: 1497715 - RNA, 19 nt, Artificial Sequence
  Description of Artificial Sequence: Synthetic oligonucleotide
acgaugacuacaucgaaga

SEQ ID NO: 1497716 - RNA, 19 nt, Artificial Sequence
  Description of Artificial Sequence: Synthetic oligonucleotide
gauacggucccaguggagg

SEQ ID NO: 1497717 - RNA, 19 nt, Artificial Sequence
  Description of Artificial Sequence: Synthetic oligonucleotide
cuuucgaaaaggcuugcgc

SEQ ID NO: 1497718 - RNA, 19 nt, Artificial Sequence
  Description of Artificial Sequence: Synthetic oligonucleotide
acuuguagugcucuaucag

SEQ ID NO: 1497719 - RNA, 19 nt, Artificial Sequence
  Description of Artificial Sequence: Synthetic oligonucleotide
uggacgaugacuacaucga

SEQ ID NO: 1497720 - RNA, 19 nt, Artificial Sequence
  Description of Artificial Sequence: Synthetic oligonucleotide
uaguggagaccacggaugg

SEQ ID NO: 1497721 - RNA, 19 nt, Artificial Sequence
  Description of Artificial Sequence: Synthetic oligonucleotide
augacuacaucgaagagcu

SEQ ID NO: 1497722 - RNA, 19 nt, Artificial Sequence
  Description of Artificial Sequence: Synthetic oligonucleotide
ucugaggauguacuucucc

SEQ ID NO: 1497723 - RNA, 19 nt, Artificial Sequence
  Description of Artificial Sequence: Synthetic oligonucleotide
caugcguucgagcagcccg

SEQ ID NO: 1497724 - RNA, 19 nt, Artificial Sequence
  Description of Artificial Sequence: Synthetic oligonucleotide
uuguucaauccacugguac

SEQ ID NO: 1497725 - RNA, 19 nt, Artificial Sequence
  Description of Artificial Sequence: Synthetic oligonucleotide
cuuccgaauucccucaggg

SEQ ID NO: 1497726 - RNA, 19 nt, Artificial Sequence
  Description of Artificial Sequence: Synthetic oligonucleotide
uuuuccaggcgagugauac

SEQ ID NO: 1497727 - RNA, 19 nt, Artificial Sequence
  Description of Artificial Sequence: Synthetic oligonucleotide
ugagcauugaacagggcuu

SEQ ID NO: 1497728 - RNA, 19 nt, Artificial Sequence
  Description of Artificial Sequence: Synthetic oligonucleotide
cugcaaauguuucaucccc

SEQ ID NO: 1497729 - RNA, 19 nt, Artificial Sequence
  Description of Artificial Sequence: Synthetic oligonucleotide
uguccaggacaauaaaagu

SEQ ID NO: 1497730 - RNA, 19 nt, Artificial Sequence
  Description of Artificial Sequence: Synthetic oligonucleotide
ugaugaugcggaucucacg

SEQ ID NO: 1497731 - RNA, 19 nt, Artificial Sequence
  Description of Artificial Sequence: Synthetic oligonucleotide
aguaguccaccacacaaga

SEQ ID NO: 1497732 - RNA, 19 nt, Artificial Sequence
  Description of Artificial Sequence: Synthetic oligonucleotide
augucgcagcaugagaucc

SEQ ID NO: 1497733 - RNA, 19 nt, Artificial Sequence
  Description of Artificial Sequence: Synthetic oligonucleotide
ugaaaagacagaggguaug

SEQ ID NO: 1497734 - RNA, 19 nt, Artificial Sequence
  Description of Artificial Sequence: Synthetic oligonucleotide
cauguauuguucuguguug

SEQ ID NO: 1497735 - RNA, 19 nt, Artificial Sequence
  Description of Artificial Sequence: Synthetic oligonucleotide
accgaaguagagcacacgu

SEQ ID NO: 1497736 - RNA, 19 nt, Artificial Sequence
  Description of Artificial Sequence: Synthetic oligonucleotide
aacgagugcauguauuguu

SEQ ID NO: 1497737 - RNA, 19 nt, Artificial Sequence
  Description of Artificial Sequence: Synthetic oligonucleotide
acuacaucgaagagcuggc

SEQ ID NO: 1497738 - RNA, 19 nt, Artificial Sequence
  Description of Artificial Sequence: Synthetic oligonucleotide
aaggugcggaagaugcucc

SEQ ID NO: 1497739 - RNA, 19 nt, Artificial Sequence
  Description of Artificial Sequence: Synthetic oligonucleotide
gauggaagggcccuugcca

SEQ ID NO: 1497740 - RNA, 19 nt, Artificial Sequence
  Description of Artificial Sequence: Synthetic oligonucleotide
gacaauaaaagugcccuca

SEQ ID NO: 1497741 - RNA, 19 nt, Artificial Sequence
  Description of Artificial Sequence: Synthetic oligonucleotide
uccgucacauccuuguaga

SEQ ID NO: 1497742 - RNA, 19 nt, Artificial Sequence
  Description of Artificial Sequence: Synthetic oligonucleotide
uacuuguagugcucuauca

SEQ ID NO: 1497743 - RNA, 19 nt, Artificial Sequence
  Description of Artificial Sequence: Synthetic oligonucleotide
acgccauucugucagacga

SEQ ID NO: 1497744 - RNA, 19 nt, Artificial Sequence
  Description of Artificial Sequence: Synthetic oligonucleotide
caguuguacauaaugaaaa

SEQ ID NO: 1497745 - RNA, 19 nt, Artificial Sequence
  Description of Artificial Sequence: Synthetic oligonucleotide
guacauaaugaaaagcauc

SEQ ID NO: 1497746 - RNA, 19 nt, Artificial Sequence
  Description of Artificial Sequence: Synthetic oligonucleotide
aggcgagugauacgguccc

SEQ ID NO: 1497747 - RNA, 19 nt, Artificial Sequence
  Description of Artificial Sequence: Synthetic oligonucleotide
auaaacugcuugauggaag

SEQ ID NO: 1497748 - RNA, 19 nt, Artificial Sequence
  Description of Artificial Sequence: Synthetic oligonucleotide
gacgaugacuacaucgaag

SEQ ID NO: 1497749 - RNA, 19 nt, Artificial Sequence
  Description of Artificial Sequence: Synthetic oligonucleotide
cuuggucaaacuccaggcc

SEQ ID NO: 1497750 - RNA, 19 nt, Artificial Sequence
  Description of Artificial Sequence: Synthetic oligonucleotide
cugaaugucauaguggaga

SEQ ID NO: 1497751 - RNA, 19 nt, Artificial Sequence
  Description of Artificial Sequence: Synthetic oligonucleotide
uucacaugaacgucccgga

SEQ ID NO: 1497752 - RNA, 19 nt, Artificial Sequence
  Description of Artificial Sequence: Synthetic oligonucleotide
ugucgcagcaugagauccg

SEQ ID NO: 1497753 - RNA, 19 nt, Artificial Sequence
  Description of Artificial Sequence: Synthetic oligonucleotide
auaagucugcaugcguucg

SEQ ID NO: 1497754 - RNA, 19 nt, Artificial Sequence
  Description of Artificial Sequence: Synthetic oligonucleotide
ugcaaauguuucauccccu

SEQ ID NO: 1497755 - RNA, 19 nt, Artificial Sequence
  Description of Artificial Sequence: Synthetic oligonucleotide
gucauaguggagaccacgg

SEQ ID NO: 1497756 - RNA, 19 nt, Artificial Sequence
  Description of Artificial Sequence: Synthetic oligonucleotide
uagucauacuuccgaauuc

SEQ ID NO: 1497757 - RNA, 19 nt, Artificial Sequence
  Description of Artificial Sequence: Synthetic oligonucleotide
ugugcgccagccaugucgc

SEQ ID NO: 1497758 - RNA, 19 nt, Artificial Sequence
  Description of Artificial Sequence: Synthetic oligonucleotide
aauucccucaggguacuug

SEQ ID NO: 1497759 - RNA, 19 nt, Artificial Sequence
  Description of Artificial Sequence: Synthetic oligonucleotide
aggaccuaccaugugccgc

SEQ ID NO: 1497760 - RNA, 19 nt, Artificial Sequence
  Description of Artificial Sequence: Synthetic oligonucleotide
augauggcgccugugcgcc

SEQ ID NO: 1497761 - RNA, 19 nt, Artificial Sequence
  Description of Artificial Sequence: Synthetic oligonucleotide
caccguauaggucaaucac

SEQ ID NO: 1497762 - RNA, 19 nt, Artificial Sequence
  Description of Artificial Sequence: Synthetic oligonucleotide
auacggucccaguggaggg

SEQ ID NO: 1497763 - RNA, 19 nt, Artificial Sequence
  Description of Artificial Sequence: Synthetic oligonucleotide
ugcauccugauaagucugc

SEQ ID NO: 1497764 - RNA, 19 nt, Artificial Sequence
  Description of Artificial Sequence: Synthetic oligonucleotide
aaaggacuguuggugauaa

SEQ ID NO: 1497765 - RNA, 19 nt, Artificial Sequence
  Description of Artificial Sequence: Synthetic oligonucleotide
caugcugcagggguguucg

SEQ ID NO: 1497766 - RNA, 19 nt, Artificial Sequence
  Description of Artificial Sequence: Synthetic oligonucleotide
aagcaucaauuuucaucag

SEQ ID NO: 1497767 - RNA, 19 nt, Artificial Sequence
  Description of Artificial Sequence: Synthetic oligonucleotide
aagcgcacaaggcgccugg

SEQ ID NO: 1497768 - RNA, 19 nt, Artificial Sequence
  Description of Artificial Sequence: Synthetic oligonucleotide
ugccgcaugccuuugucca

SEQ ID NO: 1497769 - RNA, 19 nt, Artificial Sequence
  Description of Artificial Sequence: Synthetic oligonucleotide
ucgaaaaggcuugcgccgg

SEQ ID NO: 1497770 - RNA, 19 nt, Artificial Sequence
  Description of Artificial Sequence: Synthetic oligonucleotide
uuuccaggcgagugauacg

SEQ ID NO: 1497771 - RNA, 19 nt, Artificial Sequence
  Description of Artificial Sequence: Synthetic oligonucleotide
cacaugaacgucccggaug

SEQ ID NO: 1497772 - RNA, 19 nt, Artificial Sequence
  Description of Artificial Sequence: Synthetic oligonucleotide
uaccaugugccgcaugccu

SEQ ID NO: 1497773 - RNA, 19 nt, Artificial Sequence
  Description of Artificial Sequence: Synthetic oligonucleotide
agagaccacuuuuauugcu

SEQ ID NO: 1497774 - RNA, 19 nt, Artificial Sequence
  Description of Artificial Sequence: Synthetic oligonucleotide
ccaaucaggaccuaccaug

SEQ ID NO: 1497775 - RNA, 19 nt, Artificial Sequence
  Description of Artificial Sequence: Synthetic oligonucleotide
auaguggagaccacggaug

SEQ ID NO: 1497776 - RNA, 19 nt, Artificial Sequence
  Description of Artificial Sequence: Synthetic oligonucleotide
cagaaaguaguccaccaca

SEQ ID NO: 1497777 - RNA, 19 nt, Artificial Sequence
  Description of Artificial Sequence: Synthetic oligonucleotide
cuuuggugaugcaucucag

SEQ ID NO: 1497778 - RNA, 19 nt, Artificial Sequence
  Description of Artificial Sequence: Synthetic oligonucleotide
ugaacgucccggauggcau

SEQ ID NO: 1497779 - RNA, 19 nt, Artificial Sequence
  Description of Artificial Sequence: Synthetic oligonucleotide
gaaguagagcacacguggc

SEQ ID NO: 1497780 - RNA, 19 nt, Artificial Sequence
  Description of Artificial Sequence: Synthetic oligonucleotide
caggcgagugauacggucc

SEQ ID NO: 1497781 - RNA, 19 nt, Artificial Sequence
  Description of Artificial Sequence: Synthetic oligonucleotide
uagugagaagauauccaua

SEQ ID NO: 1497782 - RNA, 19 nt, Artificial Sequence
  Description of Artificial Sequence: Synthetic oligonucleotide
uuccaugggccaccaggcg

SEQ ID NO: 1497783 - RNA, 19 nt, Artificial Sequence
  Description of Artificial Sequence: Synthetic oligonucleotide
uggggucauagucauacuu

SEQ ID NO: 1497784 - RNA, 19 nt, Artificial Sequence
  Description of Artificial Sequence: Synthetic oligonucleotide
aggcccuucacaugaacgu

SEQ ID NO: 1497785 - RNA, 19 nt, Artificial Sequence
  Description of Artificial Sequence: Synthetic oligonucleotide
acuuccgaauucccucagg

SEQ ID NO: 1497786 - RNA, 19 nt, Artificial Sequence
  Description of Artificial Sequence: Synthetic oligonucleotide
caaacagguuucccugccg

SEQ ID NO: 1497787 - RNA, 19 nt, Artificial Sequence
  Description of Artificial Sequence: Synthetic oligonucleotide
acgagugcauguauuguuc

SEQ ID NO: 1497788 - RNA, 19 nt, Artificial Sequence
  Description of Artificial Sequence: Synthetic oligonucleotide
cagagaccacuuuuauugc

SEQ ID NO: 1497789 - RNA, 19 nt, Artificial Sequence
  Description of Artificial Sequence: Synthetic oligonucleotide
cugggugccaccguauagg

SEQ ID NO: 1497790 - RNA, 19 nt, Artificial Sequence
  Description of Artificial Sequence: Synthetic oligonucleotide
aagacagagaccacuuuua

SEQ ID NO: 1497791 - RNA, 19 nt, Artificial Sequence
  Description of Artificial Sequence: Synthetic oligonucleotide
aggugcggaagaugcuccc

SEQ ID NO: 1497792 - RNA, 19 nt, Artificial Sequence
  Description of Artificial Sequence: Synthetic oligonucleotide
ucugguauagugggaugug

SEQ ID NO: 1497793 - RNA, 19 nt, Artificial Sequence
  Description of Artificial Sequence: Synthetic oligonucleotide
ucagggaugauggcgccug

SEQ ID NO: 1497794 - RNA, 19 nt, Artificial Sequence
  Description of Artificial Sequence: Synthetic oligonucleotide
ugcuugucagggugacugg

SEQ ID NO: 1497795 - RNA, 19 nt, Artificial Sequence
  Description of Artificial Sequence: Synthetic oligonucleotide
auguauuguucuguguuga

SEQ ID NO: 1497796 - RNA, 19 nt, Artificial Sequence
  Description of Artificial Sequence: Synthetic oligonucleotide
uguguugaugaugcggauc

SEQ ID NO: 1497797 - RNA, 19 nt, Artificial Sequence
  Description of Artificial Sequence: Synthetic oligonucleotide
agaugcucccaaacugagc

SEQ ID NO: 1497798 - RNA, 19 nt, Artificial Sequence
  Description of Artificial Sequence: Synthetic oligonucleotide
uguagugcucuaucaggau

SEQ ID NO: 1497799 - RNA, 19 nt, Artificial Sequence
  Description of Artificial Sequence: Synthetic oligonucleotide
cauaaugaaaagcaucaau

SEQ ID NO: 1497800 - RNA, 19 nt, Artificial Sequence
  Description of Artificial Sequence: Synthetic oligonucleotide
uuccgaauucccucagggu

SEQ ID NO: 1497801 - RNA, 19 nt, Artificial Sequence
  Description of Artificial Sequence: Synthetic oligonucleotide
ucaccgaaguagagcacac

SEQ ID NO: 1497802 - RNA, 19 nt, Artificial Sequence
  Description of Artificial Sequence: Synthetic oligonucleotide
gucuucauacagccagugc

SEQ ID NO: 1497803 - RNA, 19 nt, Artificial Sequence
  Description of Artificial Sequence: Synthetic oligonucleotide
gaggguauguccaggacaa

SEQ ID NO: 1497804 - RNA, 19 nt, Artificial Sequence
  Description of Artificial Sequence: Synthetic oligonucleotide
agguguacuuggucaaacu

SEQ ID NO: 1497805 - RNA, 19 nt, Artificial Sequence
  Description of Artificial Sequence: Synthetic oligonucleotide
gugcauguauuguucugug

SEQ ID NO: 1497806 - RNA, 19 nt, Artificial Sequence
  Description of Artificial Sequence: Synthetic oligonucleotide
guacuuguagugcucuauc

SEQ ID NO: 1497807 - RNA, 19 nt, Artificial Sequence
  Description of Artificial Sequence: Synthetic oligonucleotide
agacagagaccacuuuuau

SEQ ID NO: 1497808 - RNA, 19 nt, Artificial Sequence
  Description of Artificial Sequence: Synthetic oligonucleotide
guagugagaagauauccau

SEQ ID NO: 1497809 - RNA, 19 nt, Artificial Sequence
  Description of Artificial Sequence: Synthetic oligonucleotide
cuaucaggaugucccgggc

SEQ ID NO: 1497810 - RNA, 19 nt, Artificial Sequence
  Description of Artificial Sequence: Synthetic oligonucleotide
gaaugucauaguggagacc

SEQ ID NO: 1497811 - RNA, 19 nt, Artificial Sequence
  Description of Artificial Sequence: Synthetic oligonucleotide
ugugccgcaugccuuuguc

SEQ ID NO: 1497812 - RNA, 19 nt, Artificial Sequence
  Description of Artificial Sequence: Synthetic oligonucleotide
accguauaggucaaucacu

SEQ ID NO: 1497813 - RNA, 19 nt, Artificial Sequence
  Description of Artificial Sequence: Synthetic oligonucleotide
cugguauagugggaugugc

SEQ ID NO: 1497814 - RNA, 19 nt, Artificial Sequence
  Description of Artificial Sequence: Synthetic oligonucleotide
aaaaggacuguuggugaua

SEQ ID NO: 1497815 - RNA, 19 nt, Artificial Sequence
  Description of Artificial Sequence: Synthetic oligonucleotide
uugccgcuccuucauccag

SEQ ID NO: 1497816 - RNA, 19 nt, Artificial Sequence
  Description of Artificial Sequence: Synthetic oligonucleotide
uauugcuugucagggugac

SEQ ID NO: 1497817 - RNA, 19 nt, Artificial Sequence
  Description of Artificial Sequence: Synthetic oligonucleotide
ucgugacucugcauccuga

SEQ ID NO: 1497818 - RNA, 19 nt, Artificial Sequence
  Description of Artificial Sequence: Synthetic oligonucleotide
agauccgccaggucacugu

SEQ ID NO: 1497819 - RNA, 19 nt, Artificial Sequence
  Description of Artificial Sequence: Synthetic oligonucleotide
cucuaucaggaugucccgg

SEQ ID NO: 1497820 - RNA, 19 nt, Artificial Sequence
  Description of Artificial Sequence: Synthetic oligonucleotide
ccuaccaugugccgcaugc

SEQ ID NO: 1497821 - RNA, 19 nt, Artificial Sequence
  Description of Artificial Sequence: Synthetic oligonucleotide
aaaagugcccucagcggau

SEQ ID NO: 1497822 - RNA, 19 nt, Artificial Sequence
  Description of Artificial Sequence: Synthetic oligonucleotide
ucaccaagaaagggugucu

SEQ ID NO: 1497823 - RNA, 19 nt, Artificial Sequence
  Description of Artificial Sequence: Synthetic oligonucleotide
acaugaggcccuucacaug

SEQ ID NO: 1497824 - RNA, 19 nt, Artificial Sequence
  Description of Artificial Sequence: Synthetic oligonucleotide
caugucgcagcaugagauc

SEQ ID NO: 1497825 - RNA, 19 nt, Artificial Sequence
  Description of Artificial Sequence: Synthetic oligonucleotide
ugccauagaagccgcucau

SEQ ID NO: 1497826 - RNA, 19 nt, Artificial Sequence
  Description of Artificial Sequence: Synthetic oligonucleotide
ucacaugaacgucccggau

SEQ ID NO: 1497827 - RNA, 19 nt, Artificial Sequence
  Description of Artificial Sequence: Synthetic oligonucleotide
cugcaugcguucgagcagc

SEQ ID NO: 1497828 - RNA, 19 nt, Artificial Sequence
  Description of Artificial Sequence: Synthetic oligonucleotide
cuacaucgaagagcuggcg

SEQ ID NO: 1497829 - RNA, 19 nt, Artificial Sequence
  Description of Artificial Sequence: Synthetic oligonucleotide
aaagugcccucagcggaug

SEQ ID NO: 1497830 - RNA, 19 nt, Artificial Sequence
  Description of Artificial Sequence: Synthetic oligonucleotide
ugggugccaccguauaggu

SEQ ID NO: 1497831 - RNA, 19 nt, Artificial Sequence
  Description of Artificial Sequence: Synthetic oligonucleotide
gucaccaagaaaggguguc

SEQ ID NO: 1497832 - RNA, 19 nt, Artificial Sequence
  Description of Artificial Sequence: Synthetic oligonucleotide
aagccgcucaucugguaua

SEQ ID NO: 1497833 - RNA, 19 nt, Artificial Sequence
  Description of Artificial Sequence: Synthetic oligonucleotide
agaccacggauggcaaaac

SEQ ID NO: 1497834 - RNA, 19 nt, Artificial Sequence
  Description of Artificial Sequence: Synthetic oligonucleotide
gagcacacguggcccacgc

SEQ ID NO: 1497835 - RNA, 19 nt, Artificial Sequence
  Description of Artificial Sequence: Synthetic oligonucleotide
gcaucucaguucuugccgc

SEQ ID NO: 1497836 - RNA, 19 nt, Artificial Sequence
  Description of Artificial Sequence: Synthetic oligonucleotide
acaagacagcagugccauc

SEQ ID NO: 1497837 - RNA, 19 nt, Artificial Sequence
  Description of Artificial Sequence: Synthetic oligonucleotide
gucgugacucugcauccug

SEQ ID NO: 1497838 - RNA, 19 nt, Artificial Sequence
  Description of Artificial Sequence: Synthetic oligonucleotide
agcaugagauccgccaggu

SEQ ID NO: 1497839 - RNA, 19 nt, Artificial Sequence
  Description of Artificial Sequence: Synthetic oligonucleotide
gcucuaucaggaugucccg

SEQ ID NO: 1497840 - RNA, 19 nt, Artificial Sequence
  Description of Artificial Sequence: Synthetic oligonucleotide
caggaccuaccaugugccg

SEQ ID NO: 1497841 - RNA, 19 nt, Artificial Sequence
  Description of Artificial Sequence: Synthetic oligonucleotide
ccugauaagucugcaugcg

SEQ ID NO: 1497842 - RNA, 19 nt, Artificial Sequence
  Description of Artificial Sequence: Synthetic oligonucleotide
gagaccacggauggcaaaa

SEQ ID NO: 1497843 - RNA, 19 nt, Artificial Sequence
  Description of Artificial Sequence: Synthetic oligonucleotide
gcggaugugggccauguca

SEQ ID NO: 1497844 - RNA, 19 nt, Artificial Sequence
  Description of Artificial Sequence: Synthetic oligonucleotide
cauccuuguagagguguac

SEQ ID NO: 1497845 - RNA, 19 nt, Artificial Sequence
  Description of Artificial Sequence: Synthetic oligonucleotide
uggagggagcccuucucau

SEQ ID NO: 1497846 - RNA, 19 nt, Artificial Sequence
  Description of Artificial Sequence: Synthetic oligonucleotide
agccaugucgcagcaugag

SEQ ID NO: 1497847 - RNA, 19 nt, Artificial Sequence
  Description of Artificial Sequence: Synthetic oligonucleotide
cuugucugccuggacgaug

SEQ ID NO: 1497848 - RNA, 19 nt, Artificial Sequence
  Description of Artificial Sequence: Synthetic oligonucleotide
gguauguccaggacaauaa

SEQ ID NO: 1497849 - RNA, 19 nt, Artificial Sequence
  Description of Artificial Sequence: Synthetic oligonucleotide
uguuuuccaugggccacca

SEQ ID NO: 1497850 - RNA, 19 nt, Artificial Sequence
  Description of Artificial Sequence: Synthetic oligonucleotide
agaggucggagaagcgcac

SEQ ID NO: 1497851 - RNA, 19 nt, Artificial Sequence
  Description of Artificial Sequence: Synthetic oligonucleotide
gaagccgcucaucugguau

SEQ ID NO: 1497852 - RNA, 19 nt, Artificial Sequence
  Description of Artificial Sequence: Synthetic oligonucleotide
gugccgcaugccuuugucc

SEQ ID NO: 1497853 - RNA, 19 nt, Artificial Sequence
  Description of Artificial Sequence: Synthetic oligonucleotide
caucucugguagugagaag

SEQ ID NO: 1497854 - RNA, 19 nt, Artificial Sequence
  Description of Artificial Sequence: Synthetic oligonucleotide
aaggcuugcgccggucggu

SEQ ID NO: 1497855 - RNA, 19 nt, Artificial Sequence
  Description of Artificial Sequence: Synthetic oligonucleotide
cauaguggagaccacggau

SEQ ID NO: 1497856 - RNA, 19 nt, Artificial Sequence
  Description of Artificial Sequence: Synthetic oligonucleotide
gcaaauguuucauccccuc

SEQ ID NO: 1497857 - RNA, 19 nt, Artificial Sequence
  Description of Artificial Sequence: Synthetic oligonucleotide
cacuguagagguggucacc

SEQ ID NO: 1497858 - RNA, 19 nt, Artificial Sequence
  Description of Artificial Sequence: Synthetic oligonucleotide
augcguucgagcagcccgg

SEQ ID NO: 1497859 - RNA, 19 nt, Artificial Sequence
  Description of Artificial Sequence: Synthetic oligonucleotide
caaucaggaccuaccaugu

SEQ ID NO: 1497860 - RNA, 19 nt, Artificial Sequence
  Description of Artificial Sequence: Synthetic oligonucleotide
guaggcuguucccaguugu

SEQ ID NO: 1497861 - RNA, 19 nt, Artificial Sequence
  Description of Artificial Sequence: Synthetic oligonucleotide
ugacuacaucgaagagcug

SEQ ID NO: 1497862 - RNA, 19 nt, Artificial Sequence
  Description of Artificial Sequence: Synthetic oligonucleotide
ccaugucaccaagaaaggg

SEQ ID NO: 1497863 - RNA, 19 nt, Artificial Sequence
  Description of Artificial Sequence: Synthetic oligonucleotide
aggucggagaagcgcacaa

SEQ ID NO: 1497864 - RNA, 19 nt, Artificial Sequence
  Description of Artificial Sequence: Synthetic oligonucleotide
ccgcucaucugguauagug

SEQ ID NO: 1497865 - RNA, 19 nt, Artificial Sequence
  Description of Artificial Sequence: Synthetic oligonucleotide
cuaccaugugccgcaugcc

SEQ ID NO: 1497866 - RNA, 19 nt, Artificial Sequence
  Description of Artificial Sequence: Synthetic oligonucleotide
acaaggcgccuggagaagu

SEQ ID NO: 1497867 - RNA, 19 nt, Artificial Sequence
  Description of Artificial Sequence: Synthetic oligonucleotide
ugucgugacucugcauccu

SEQ ID NO: 1497868 - RNA, 19 nt, Artificial Sequence
  Description of Artificial Sequence: Synthetic oligonucleotide
augucauaguggagaccac

SEQ ID NO: 1497869 - RNA, 19 nt, Artificial Sequence
  Description of Artificial Sequence: Synthetic oligonucleotide
gaacgucccggauggcauc

SEQ ID NO: 1497870 - RNA, 19 nt, Artificial Sequence
  Description of Artificial Sequence: Synthetic oligonucleotide
ucgcagcaugagauccgcc

SEQ ID NO: 1497871 - RNA, 19 nt, Artificial Sequence
  Description of Artificial Sequence: Synthetic oligonucleotide
ggugcagugcaucugcaua

SEQ ID NO: 1497872 - RNA, 19 nt, Artificial Sequence
  Description of Artificial Sequence: Synthetic oligonucleotide
gaagcgcacaaggcgccug

SEQ ID NO: 1497873 - RNA, 19 nt, Artificial Sequence
  Description of Artificial Sequence: Synthetic oligonucleotide
gcuuucgaaaaggcuugcg

SEQ ID NO: 1497874 - RNA, 19 nt, Artificial Sequence
  Description of Artificial Sequence: Synthetic oligonucleotide
guaguccaccacacaagac

SEQ ID NO: 1497875 - RNA, 19 nt, Artificial Sequence
  Description of Artificial Sequence: Synthetic oligonucleotide
agccgcucaucugguauag

SEQ ID NO: 1497876 - RNA, 19 nt, Artificial Sequence
  Description of Artificial Sequence: Synthetic oligonucleotide
ggaccuaccaugugccgca

SEQ ID NO: 1497877 - RNA, 19 nt, Artificial Sequence
  Description of Artificial Sequence: Synthetic oligonucleotide
gccuggagaaguagguagg

SEQ ID NO: 1497878 - RNA, 19 nt, Artificial Sequence
  Description of Artificial Sequence: Synthetic oligonucleotide
ggcuguucccaguuguaca

SEQ ID NO: 1497879 - RNA, 19 nt, Artificial Sequence
  Description of Artificial Sequence: Synthetic oligonucleotide
agcuggcgccaaucaggac

SEQ ID NO: 1497880 - RNA, 19 nt, Artificial Sequence
  Description of Artificial Sequence: Synthetic oligonucleotide
augcggaucucacgcucca

SEQ ID NO: 1497881 - RNA, 19 nt, Artificial Sequence
  Description of Artificial Sequence: Synthetic oligonucleotide
ggcuugucugccuggacga

SEQ ID NO: 1497882 - RNA, 19 nt, Artificial Sequence
  Description of Artificial Sequence: Synthetic oligonucleotide
gcugggugccaccguauag

SEQ ID NO: 1497883 - RNA, 19 nt, Artificial Sequence
  Description of Artificial Sequence: Synthetic oligonucleotide
gaaaaggcuugcgccgguc

SEQ ID NO: 1497884 - RNA, 19 nt, Artificial Sequence
  Description of Artificial Sequence: Synthetic oligonucleotide
gugcucuaucaggaugucc

SEQ ID NO: 1497885 - RNA, 19 nt, Artificial Sequence
  Description of Artificial Sequence: Synthetic oligonucleotide
aggcgccuggagaaguagg

SEQ ID NO: 1497886 - RNA, 19 nt, Artificial Sequence
  Description of Artificial Sequence: Synthetic oligonucleotide
caaauguuucauccccucu

SEQ ID NO: 1497887 - RNA, 19 nt, Artificial Sequence
  Description of Artificial Sequence: Synthetic oligonucleotide
cuuguucaauccacuggua

SEQ ID NO: 1497888 - RNA, 19 nt, Artificial Sequence
  Description of Artificial Sequence: Synthetic oligonucleotide
uacggucccaguggaggga

SEQ ID NO: 1497889 - RNA, 19 nt, Artificial Sequence
  Description of Artificial Sequence: Synthetic oligonucleotide
ccgaaguagagcacacgug

SEQ ID NO: 1497890 - RNA, 19 nt, Artificial Sequence
  Description of Artificial Sequence: Synthetic oligonucleotide
guacuuggucaaacuccag

SEQ ID NO: 1497891 - RNA, 19 nt, Artificial Sequence
  Description of Artificial Sequence: Synthetic oligonucleotide
agguggucaccgaaguaga

SEQ ID NO: 1497892 - RNA, 19 nt, Artificial Sequence
  Description of Artificial Sequence: Synthetic oligonucleotide
agagcacacguggcccacg

SEQ ID NO: 1497893 - RNA, 19 nt, Artificial Sequence
  Description of Artificial Sequence: Synthetic oligonucleotide
cuugccgcuccuucaucca

SEQ ID NO: 1497894 - RNA, 19 nt, Artificial Sequence
  Description of Artificial Sequence: Synthetic oligonucleotide
uggcauccgucacauccuu

SEQ ID NO: 1497895 - RNA, 19 nt, Artificial Sequence
  Description of Artificial Sequence: Synthetic oligonucleotide
gaccacggauggcaaaacu

SEQ ID NO: 1497896 - RNA, 19 nt, Artificial Sequence
  Description of Artificial Sequence: Synthetic oligonucleotide
acagcugagggaggccaug

SEQ ID NO: 1497897 - RNA, 19 nt, Artificial Sequence
  Description of Artificial Sequence: Synthetic oligonucleotide
ugcggaucucacgcuccag

SEQ ID NO: 1497898 - RNA, 19 nt, Artificial Sequence
  Description of Artificial Sequence: Synthetic oligonucleotide
caggucaacgagugcaugu

SEQ ID NO: 1497899 - RNA, 19 nt, Artificial Sequence
  Description of Artificial Sequence: Synthetic oligonucleotide
cugauaagucugcaugcgu

SEQ ID NO: 1497900 - RNA, 19 nt, Artificial Sequence
  Description of Artificial Sequence: Synthetic oligonucleotide
auugcuugucagggugacu

SEQ ID NO: 1497901 - RNA, 19 nt, Artificial Sequence
  Description of Artificial Sequence: Synthetic oligonucleotide
cugaaaagacagaggguau

SEQ ID NO: 1497902 - RNA, 19 nt, Artificial Sequence
  Description of Artificial Sequence: Synthetic oligonucleotide
gcccuucacaugaacgucc

SEQ ID NO: 1497903 - RNA, 19 nt, Artificial Sequence
  Description of Artificial Sequence: Synthetic oligonucleotide
gcacaaggcgccuggagaa

SEQ ID NO: 1497904 - RNA, 19 nt, Artificial Sequence
  Description of Artificial Sequence: Synthetic oligonucleotide
gcuguuuuccaugggccac

SEQ ID NO: 1497905 - RNA, 19 nt, Artificial Sequence
  Description of Artificial Sequence: Synthetic oligonucleotide
agggaugauggcgccugug

SEQ ID NO: 1497906 - RNA, 19 nt, Artificial Sequence
  Description of Artificial Sequence: Synthetic oligonucleotide
accuaccaugugccgcaug

SEQ ID NO: 1497907 - RNA, 19 nt, Artificial Sequence
  Description of Artificial Sequence: Synthetic oligonucleotide
gcgagugauacggucccag

SEQ ID NO: 1497908 - RNA, 19 nt, Artificial Sequence
  Description of Artificial Sequence: Synthetic oligonucleotide
augugccgcaugccuuugu

SEQ ID NO: 1497909 - RNA, 19 nt, Artificial Sequence
  Description of Artificial Sequence: Synthetic oligonucleotide
caagaaagggugucuucau

SEQ ID NO: 1497910 - RNA, 19 nt, Artificial Sequence
  Description of Artificial Sequence: Synthetic oligonucleotide
cggaugugggccaugucac

SEQ ID NO: 1497911 - RNA, 19 nt, Artificial Sequence
  Description of Artificial Sequence: Synthetic oligonucleotide
ggucggagaagcgcacaag

SEQ ID NO: 1497912 - RNA, 19 nt, Artificial Sequence
  Description of Artificial Sequence: Synthetic oligonucleotide
agauauccauaaacugcuu

SEQ ID NO: 1497913 - RNA, 19 nt, Artificial Sequence
  Description of Artificial Sequence: Synthetic oligonucleotide
ccaggcgagugauacgguc

SEQ ID NO: 1497914 - RNA, 19 nt, Artificial Sequence
  Description of Artificial Sequence: Synthetic oligonucleotide
cacgguaguugagcaaaca

SEQ ID NO: 1497915 - RNA, 19 nt, Artificial Sequence
  Description of Artificial Sequence: Synthetic oligonucleotide
gaggucggagaagcgcaca

SEQ ID NO: 1497916 - RNA, 19 nt, Artificial Sequence
  Description of Artificial Sequence: Synthetic oligonucleotide
caucgaagagcuggcgcca

SEQ ID NO: 1497917 - RNA, 19 nt, Artificial Sequence
  Description of Artificial Sequence: Synthetic oligonucleotide
caaagcuaaaaggacuguu

SEQ ID NO: 1497918 - RNA, 19 nt, Artificial Sequence
  Description of Artificial Sequence: Synthetic oligonucleotide
cccggugagcgccugcugc

SEQ ID NO: 1497919 - RNA, 19 nt, Artificial Sequence
  Description of Artificial Sequence: Synthetic oligonucleotide
cacauccuuguagaggugu

SEQ ID NO: 1497920 - RNA, 19 nt, Artificial Sequence
  Description of Artificial Sequence: Synthetic oligonucleotide
cuggcgccaaucaggaccu

SEQ ID NO: 1497921 - RNA, 19 nt, Artificial Sequence
  Description of Artificial Sequence: Synthetic oligonucleotide
guaagacagagaccacuuu

SEQ ID NO: 1497922 - RNA, 19 nt, Artificial Sequence
  Description of Artificial Sequence: Synthetic oligonucleotide
ccaugucuuguucaaucca

SEQ ID NO: 1497923 - RNA, 19 nt, Artificial Sequence
  Description of Artificial Sequence: Synthetic oligonucleotide
ccaccguauaggucaauca

SEQ ID NO: 1497924 - RNA, 19 nt, Artificial Sequence
  Description of Artificial Sequence: Synthetic oligonucleotide
ggacgaugacuacaucgaa

SEQ ID NO: 1497925 - RNA, 19 nt, Artificial Sequence
  Description of Artificial Sequence: Synthetic oligonucleotide
ggguauguccaggacaaua

SEQ ID NO: 1497926 - RNA, 19 nt, Artificial Sequence
  Description of Artificial Sequence: Synthetic oligonucleotide
cacguggcccacgccauuc

SEQ ID NO: 1497927 - RNA, 19 nt, Artificial Sequence
  Description of Artificial Sequence: Synthetic oligonucleotide
gccaugucgcagcaugaga

SEQ ID NO: 1497928 - RNA, 19 nt, Artificial Sequence
  Description of Artificial Sequence: Synthetic oligonucleotide
cagccaugucgcagcauga

SEQ ID NO: 1497929 - RNA, 19 nt, Artificial Sequence
  Description of Artificial Sequence: Synthetic oligonucleotide
gcgccaaucaggaccuacc

SEQ ID NO: 1497930 - RNA, 19 nt, Artificial Sequence
  Description of Artificial Sequence: Synthetic oligonucleotide
gcaccugucgugacucugc

SEQ ID NO: 1497931 - RNA, 19 nt, Artificial Sequence
  Description of Artificial Sequence: Synthetic oligonucleotide
gcgccagccaugucgcagc

SEQ ID NO: 1497932 - RNA, 19 nt, Artificial Sequence
  Description of Artificial Sequence: Synthetic oligonucleotide
ugauggcgccugugcgcca

SEQ ID NO: 1497933 - RNA, 19 nt, Artificial Sequence
  Description of Artificial Sequence: Synthetic oligonucleotide
aggcuugcgccggucggug

SEQ ID NO: 1497934 - RNA, 19 nt, Artificial Sequence
  Description of Artificial Sequence: Synthetic oligonucleotide
agggguguucggcgcgggu

SEQ ID NO: 1497935 - RNA, 19 nt, Artificial Sequence
  Description of Artificial Sequence: Synthetic oligonucleotide
gagcauugaacagggcuuu

SEQ ID NO: 1497936 - RNA, 19 nt, Artificial Sequence
  Description of Artificial Sequence: Synthetic oligonucleotide
gccaccguauaggucaauc

SEQ ID NO: 1497937 - RNA, 19 nt, Artificial Sequence
  Description of Artificial Sequence: Synthetic oligonucleotide
cccuugccauagaagccgc

SEQ ID NO: 1497938 - RNA, 19 nt, Artificial Sequence
  Description of Artificial Sequence: Synthetic oligonucleotide
agcccggugagcgccugcu

SEQ ID NO: 1497939 - RNA, 19 nt, Artificial Sequence
  Description of Artificial Sequence: Synthetic oligonucleotide
ugcguucgagcagcccggu

SEQ ID NO: 1497940 - RNA, 19 nt, Artificial Sequence
  Description of Artificial Sequence: Synthetic oligonucleotide
agggagcccuucucaucaa

SEQ ID NO: 1497941 - RNA, 19 nt, Artificial Sequence
  Description of Artificial Sequence: Synthetic oligonucleotide
gucaacgagugcauguauu

SEQ ID NO: 1497942 - RNA, 19 nt, Artificial Sequence
  Description of Artificial Sequence: Synthetic oligonucleotide
ccaugucgcagcaugagau

SEQ ID NO: 1497943 - RNA, 19 nt, Artificial Sequence
  Description of Artificial Sequence: Synthetic oligonucleotide
caacgagugcauguauugu

SEQ ID NO: 1497944 - RNA, 19 nt, Artificial Sequence
  Description of Artificial Sequence: Synthetic oligonucleotide
cccucugaggauguacuuc

SEQ ID NO: 1497945 - RNA, 19 nt, Artificial Sequence
  Description of Artificial Sequence: Synthetic oligonucleotide
cuuuuccaggcgagugaua

SEQ ID NO: 1497946 - RNA, 19 nt, Artificial Sequence
  Description of Artificial Sequence: Synthetic oligonucleotide
uugcgccggucggugaaaa

SEQ ID NO: 1497947 - RNA, 19 nt, Artificial Sequence
  Description of Artificial Sequence: Synthetic oligonucleotide
ggcccuucacaugaacguc

SEQ ID NO: 1497948 - RNA, 19 nt, Artificial Sequence
  Description of Artificial Sequence: Synthetic oligonucleotide
cucugguagugagaagaua

SEQ ID NO: 1497949 - RNA, 19 nt, Artificial Sequence
  Description of Artificial Sequence: Synthetic oligonucleotide
acgucccggauggcauccg

SEQ ID NO: 1497950 - RNA, 19 nt, Artificial Sequence
  Description of Artificial Sequence: Synthetic oligonucleotide
ggguguucggcgcggguaa

SEQ ID NO: 1497951 - RNA, 19 nt, Artificial Sequence
  Description of Artificial Sequence: Synthetic oligonucleotide
ggcgccaaucaggaccuac

SEQ ID NO: 1497952 - RNA, 19 nt, Artificial Sequence
  Description of Artificial Sequence: Synthetic oligonucleotide
auccagagaggcgccucau

SEQ ID NO: 1497953 - RNA, 19 nt, Artificial Sequence
  Description of Artificial Sequence: Synthetic oligonucleotide
gucugccuggacgaugacu

SEQ ID NO: 1497954 - RNA, 19 nt, Artificial Sequence
  Description of Artificial Sequence: Synthetic oligonucleotide
ggccauggaccagaaagua

SEQ ID NO: 1497955 - RNA, 19 nt, Artificial Sequence
  Description of Artificial Sequence: Synthetic oligonucleotide
cagggguguucggcgcggg

SEQ ID NO: 1497956 - RNA, 19 nt, Artificial Sequence
  Description of Artificial Sequence: Synthetic oligonucleotide
aucucagggugcagugcau

SEQ ID NO: 1497957 - RNA, 19 nt, Artificial Sequence
  Description of Artificial Sequence: Synthetic oligonucleotide
ggugcggaagaugcuccca

SEQ ID NO: 1497958 - RNA, 19 nt, Artificial Sequence
  Description of Artificial Sequence: Synthetic oligonucleotide
ccguauaggucaaucacuu

SEQ ID NO: 1497959 - RNA, 19 nt, Artificial Sequence
  Description of Artificial Sequence: Synthetic oligonucleotide
ggcauccgucacauccuug

SEQ ID NO: 1497960 - RNA, 19 nt, Artificial Sequence
  Description of Artificial Sequence: Synthetic oligonucleotide
agcgcacaaggcgccugga

SEQ ID NO: 1497961 - RNA, 19 nt, Artificial Sequence
  Description of Artificial Sequence: Synthetic oligonucleotide
ggucaacgagugcauguau

SEQ ID NO: 1497962 - RNA, 19 nt, Artificial Sequence
  Description of Artificial Sequence: Synthetic oligonucleotide
gcaugagauccgccagguc

SEQ ID NO: 1497963 - RNA, 19 nt, Artificial Sequence
  Description of Artificial Sequence: Synthetic oligonucleotide
ccaggucaacgagugcaug

SEQ ID NO: 1497964 - RNA, 19 nt, Artificial Sequence
  Description of Artificial Sequence: Synthetic oligonucleotide
aggaugucccgggcagcau

SEQ ID NO: 1497965 - RNA, 19 nt, Artificial Sequence
  Description of Artificial Sequence: Synthetic oligonucleotide
guguucggcgcggguaaaa

SEQ ID NO: 1497966 - RNA, 19 nt, Artificial Sequence
  Description of Artificial Sequence: Synthetic oligonucleotide
cccggauggcauccgucac

SEQ ID NO: 1497967 - RNA, 19 nt, Artificial Sequence
  Description of Artificial Sequence: Synthetic oligonucleotide
gcaugcguucgagcagccc

SEQ ID NO: 1497968 - RNA, 19 nt, Artificial Sequence
  Description of Artificial Sequence: Synthetic oligonucleotide
gccaaucaggaccuaccau

SEQ ID NO: 1497969 - RNA, 19 nt, Artificial Sequence
  Description of Artificial Sequence: Synthetic oligonucleotide
ccuggacgaugacuacauc

SEQ ID NO: 1497970 - RNA, 19 nt, Artificial Sequence
  Description of Artificial Sequence: Synthetic oligonucleotide
ccggauggcauccgucaca

SEQ ID NO: 1497971 - RNA, 19 nt, Artificial Sequence
  Description of Artificial Sequence: Synthetic oligonucleotide
cgaagagcuggcgccaauc

SEQ ID NO: 1497972 - RNA, 19 nt, Artificial Sequence
  Description of Artificial Sequence: Synthetic oligonucleotide
caccaagaaagggugucuu

SEQ ID NO: 1497973 - RNA, 19 nt, Artificial Sequence
  Description of Artificial Sequence: Synthetic oligonucleotide
ggcgccuggagaaguaggu

SEQ ID NO: 1497974 - RNA, 19 nt, Artificial Sequence
  Description of Artificial Sequence: Synthetic oligonucleotide
ggaugucccgggcagcauu

SEQ ID NO: 1497975 - RNA, 19 nt, Artificial Sequence
  Description of Artificial Sequence: Synthetic oligonucleotide
ccacgccauucugucagac

SEQ ID NO: 1497976 - RNA, 19 nt, Artificial Sequence
  Description of Artificial Sequence: Synthetic oligonucleotide
gcguucgagcagcccggug

SEQ ID NO: 1497977 - RNA, 19 nt, Artificial Sequence
  Description of Artificial Sequence: Synthetic oligonucleotide
cgccaaucaggaccuacca

SEQ ID NO: 1497978 - RNA, 19 nt, Artificial Sequence
  Description of Artificial Sequence: Synthetic oligonucleotide
ugccaccguauaggucaau

SEQ ID NO: 1497979 - RNA, 19 nt, Artificial Sequence
  Description of Artificial Sequence: Synthetic oligonucleotide
gggguguucggcgcgggua

SEQ ID NO: 1497980 - RNA, 19 nt, Artificial Sequence
  Description of Artificial Sequence: Synthetic oligonucleotide
ccacacgguaguugagcaa

SEQ ID NO: 1497981 - RNA, 19 nt, Artificial Sequence
  Description of Artificial Sequence: Synthetic oligonucleotide
gugcgccagccaugucgca

SEQ ID NO: 1497982 - RNA, 19 nt, Artificial Sequence
  Description of Artificial Sequence: Synthetic oligonucleotide
gggugcagugcaucugcau

SEQ ID NO: 1497983 - RNA, 19 nt, Artificial Sequence
  Description of Artificial Sequence: Synthetic oligonucleotide
ccucagcggaugugggcca

SEQ ID NO: 1497984 - RNA, 19 nt, Artificial Sequence
  Description of Artificial Sequence: Synthetic oligonucleotide
cguggcccacgccauucug

SEQ ID NO: 1497985 - RNA, 19 nt, Artificial Sequence
  Description of Artificial Sequence: Synthetic oligonucleotide
gcggcucaggacugcaaau

SEQ ID NO: 1497986 - RNA, 19 nt, Artificial Sequence
  Description of Artificial Sequence: Synthetic oligonucleotide
gcccggugagcgccugcug

SEQ ID NO: 1497987 - RNA, 19 nt, Artificial Sequence
  Description of Artificial Sequence: Synthetic oligonucleotide
ggcgagugauacgguccca

SEQ ID NO: 1497988 - RNA, 19 nt, Artificial Sequence
  Description of Artificial Sequence: Synthetic oligonucleotide
ccgcaugccuuuguccaca

SEQ ID NO: 1497989 - RNA, 19 nt, Artificial Sequence
  Description of Artificial Sequence: Synthetic oligonucleotide
gcgccuggagaaguaggua

SEQ ID NO: 1497990 - RNA, 19 nt, Artificial Sequence
  Description of Artificial Sequence: Synthetic oligonucleotide
gccugugcgccagccaugu

SEQ ID NO: 1497991 - RNA, 19 nt, Artificial Sequence
  Description of Artificial Sequence: Synthetic oligonucleotide
gguguucggcgcggguaaa

SEQ ID NO: 1497992 - RNA, 19 nt, Artificial Sequence
  Description of Artificial Sequence: Synthetic oligonucleotide
gccgguagaucuugcccuu

SEQ ID NO: 1497993 - RNA, 19 nt, Artificial Sequence
  Description of Artificial Sequence: Synthetic oligonucleotide
gugcugggugccaccguau

SEQ ID NO: 1497994 - RNA, 19 nt, Artificial Sequence
  Description of Artificial Sequence: Synthetic oligonucleotide
gaccuaccaugugccgcau

SEQ ID NO: 1497995 - RNA, 19 nt, Artificial Sequence
  Description of Artificial Sequence: Synthetic oligonucleotide
gccaggucaacgagugcau

SEQ ID NO: 1497996 - RNA, 19 nt, Artificial Sequence
  Description of Artificial Sequence: Synthetic oligonucleotide
cgccucaugcugcaggggu

SEQ ID NO: 1497997 - RNA, 19 nt, Artificial Sequence
  Description of Artificial Sequence: Synthetic oligonucleotide
cccacgccauucugucaga

SEQ ID NO: 1497998 - RNA, 19 nt, Artificial Sequence
  Description of Artificial Sequence: Synthetic oligonucleotide
uggcgccaaucaggaccua

SEQ ID NO: 1497999 - RNA, 19 nt, Artificial Sequence
  Description of Artificial Sequence: Synthetic oligonucleotide
cauccccucugaggaugua

SEQ ID NO: 1498000 - RNA, 19 nt, Artificial Sequence
  Description of Artificial Sequence: Synthetic oligonucleotide
ccccucugaggauguacuu

SEQ ID NO: 1498001 - RNA, 19 nt, Artificial Sequence
  Description of Artificial Sequence: Synthetic oligonucleotide
cgaauucccucaggguacu

SEQ ID NO: 1498002 - RNA, 19 nt, Artificial Sequence
  Description of Artificial Sequence: Synthetic oligonucleotide
cgaaaaggcuugcgccggu

SEQ ID NO: 1498003 - RNA, 19 nt, Artificial Sequence
  Description of Artificial Sequence: Synthetic oligonucleotide
cgccugcugccaggucaac

SEQ ID NO: 1498004 - RNA, 19 nt, Artificial Sequence
  Description of Artificial Sequence: Synthetic oligonucleotide
aaaggaaucaauuuucaag

SEQ ID NO: 1498005 - RNA, 19 nt, Artificial Sequence
  Description of Artificial Sequence: Synthetic oligonucleotide
acuugaacgggccagaggc

SEQ ID NO: 1498006 - RNA, 19 nt, Artificial Sequence
  Description of Artificial Sequence: Synthetic oligonucleotide
ucaagauucaucaaaucag

SEQ ID NO: 1498007 - RNA, 19 nt, Artificial Sequence
  Description of Artificial Sequence: Synthetic oligonucleotide
ucaauaaacuguuugaaga

SEQ ID NO: 1498008 - RNA, 19 nt, Artificial Sequence
  Description of Artificial Sequence: Synthetic oligonucleotide
aauugagaaggucuagucg

SEQ ID NO: 1498009 - RNA, 19 nt, Artificial Sequence
  Description of Artificial Sequence: Synthetic oligonucleotide
aaggaaucaauuuucaaga

SEQ ID NO: 1498010 - RNA, 19 nt, Artificial Sequence
  Description of Artificial Sequence: Synthetic oligonucleotide
cuuugauugacauaagccc

SEQ ID NO: 1498011 - RNA, 19 nt, Artificial Sequence
  Description of Artificial Sequence: Synthetic oligonucleotide
ucuccuauaaaccagaguu

SEQ ID NO: 1498012 - RNA, 19 nt, Artificial Sequence
  Description of Artificial Sequence: Synthetic oligonucleotide
uucaagauucaucaaauca

SEQ ID NO: 1498013 - RNA, 19 nt, Artificial Sequence
  Description of Artificial Sequence: Synthetic oligonucleotide
aauguucggauccuggagg

SEQ ID NO: 1498014 - RNA, 19 nt, Artificial Sequence
  Description of Artificial Sequence: Synthetic oligonucleotide
gaucacaucauuugggagg

SEQ ID NO: 1498015 - RNA, 19 nt, Artificial Sequence
  Description of Artificial Sequence: Synthetic oligonucleotide
uugacauaagcccagaggu

SEQ ID NO: 1498016 - RNA, 19 nt, Artificial Sequence
  Description of Artificial Sequence: Synthetic oligonucleotide
ugagccuaagcuuugauug

SEQ ID NO: 1498017 - RNA, 19 nt, Artificial Sequence
  Description of Artificial Sequence: Synthetic oligonucleotide
aagguaagaaggaaaagcg

SEQ ID NO: 1498018 - RNA, 19 nt, Artificial Sequence
  Description of Artificial Sequence: Synthetic oligonucleotide
agugcauuccgguagcugc

SEQ ID NO: 1498019 - RNA, 19 nt, Artificial Sequence
  Description of Artificial Sequence: Synthetic oligonucleotide
aaauggauugaguggcggc

SEQ ID NO: 1498020 - RNA, 19 nt, Artificial Sequence
  Description of Artificial Sequence: Synthetic oligonucleotide
uaagcuuugauugacauaa

SEQ ID NO: 1498021 - RNA, 19 nt, Artificial Sequence
  Description of Artificial Sequence: Synthetic oligonucleotide
auugacauaagcccagagg

SEQ ID NO: 1498022 - RNA, 19 nt, Artificial Sequence
  Description of Artificial Sequence: Synthetic oligonucleotide
uuugauugacauaagccca

SEQ ID NO: 1498023 - RNA, 19 nt, Artificial Sequence
  Description of Artificial Sequence: Synthetic oligonucleotide
uaagguaagaaggaaaagc

SEQ ID NO: 1498024 - RNA, 19 nt, Artificial Sequence
  Description of Artificial Sequence: Synthetic oligonucleotide
uauaaaccagaguugcugg

SEQ ID NO: 1498025 - RNA, 19 nt, Artificial Sequence
  Description of Artificial Sequence: Synthetic oligonucleotide
uuaaguggguccaggaggg

SEQ ID NO: 1498026 - RNA, 19 nt, Artificial Sequence
  Description of Artificial Sequence: Synthetic oligonucleotide
caauuuucaagauucauca

SEQ ID NO: 1498027 - RNA, 19 nt, Artificial Sequence
  Description of Artificial Sequence: Synthetic oligonucleotide
uucgccggaauugagaagg

SEQ ID NO: 1498028 - RNA, 19 nt, Artificial Sequence
  Description of Artificial Sequence: Synthetic oligonucleotide
ucggccaucaauaaacugu

SEQ ID NO: 1498029 - RNA, 19 nt, Artificial Sequence
  Description of Artificial Sequence: Synthetic oligonucleotide
ggguauagaagccagaacc

SEQ ID NO: 1498030 - RNA, 19 nt, Artificial Sequence
  Description of Artificial Sequence: Synthetic oligonucleotide
gacaaauggauugaguggc

SEQ ID NO: 1498031 - RNA, 19 nt, Artificial Sequence
  Description of Artificial Sequence: Synthetic oligonucleotide
agcgagaucaaagaaauug

SEQ ID NO: 1498032 - RNA, 19 nt, Artificial Sequence
  Description of Artificial Sequence: Synthetic oligonucleotide
uugaguuggaaucuggguc

SEQ ID NO: 1498033 - RNA, 19 nt, Artificial Sequence
  Description of Artificial Sequence: Synthetic oligonucleotide
uuauugaaaggaaucaauu

SEQ ID NO: 1498034 - RNA, 19 nt, Artificial Sequence
  Description of Artificial Sequence: Synthetic oligonucleotide
uagucggccaucaauaaac

SEQ ID NO: 1498035 - RNA, 19 nt, Artificial Sequence
  Description of Artificial Sequence: Synthetic oligonucleotide
gaaucugggucauuguugc

SEQ ID NO: 1498036 - RNA, 19 nt, Artificial Sequence
  Description of Artificial Sequence: Synthetic oligonucleotide
uguuugaagagcugcagcu

SEQ ID NO: 1498037 - RNA, 19 nt, Artificial Sequence
  Description of Artificial Sequence: Synthetic oligonucleotide
ucauugaaaccuucgccgg

SEQ ID NO: 1498038 - RNA, 19 nt, Artificial Sequence
  Description of Artificial Sequence: Synthetic oligonucleotide
agaaauuguccuuugaguu

SEQ ID NO: 1498039 - RNA, 19 nt, Artificial Sequence
  Description of Artificial Sequence: Synthetic oligonucleotide
gaggagaucacaucauuug

SEQ ID NO: 1498040 - RNA, 19 nt, Artificial Sequence
  Description of Artificial Sequence: Synthetic oligonucleotide
acugugggcacccaugggg

SEQ ID NO: 1498041 - RNA, 19 nt, Artificial Sequence
  Description of Artificial Sequence: Synthetic oligonucleotide
aaagcgagaucaaagaaau

SEQ ID NO: 1498042 - RNA, 19 nt, Artificial Sequence
  Description of Artificial Sequence: Synthetic oligonucleotide
ucgggcucaauuuucagug

SEQ ID NO: 1498043 - RNA, 19 nt, Artificial Sequence
  Description of Artificial Sequence: Synthetic oligonucleotide
uccuauaaaccagaguugc

SEQ ID NO: 1498044 - RNA, 19 nt, Artificial Sequence
  Description of Artificial Sequence: Synthetic oligonucleotide
agauucaucaaaucaguaa

SEQ ID NO: 1498045 - RNA, 19 nt, Artificial Sequence
  Description of Artificial Sequence: Synthetic oligonucleotide
caucauugaaaccuucgcc

SEQ ID NO: 1498046 - RNA, 19 nt, Artificial Sequence
  Description of Artificial Sequence: Synthetic oligonucleotide
aucgcuaccagcauacucg

SEQ ID NO: 1498047 - RNA, 19 nt, Artificial Sequence
  Description of Artificial Sequence: Synthetic oligonucleotide
cuuaucgcuaccagcauac

SEQ ID NO: 1498048 - RNA, 19 nt, Artificial Sequence
  Description of Artificial Sequence: Synthetic oligonucleotide
gaagagaagucaccaaaug

SEQ ID NO: 1498049 - RNA, 19 nt, Artificial Sequence
  Description of Artificial Sequence: Synthetic oligonucleotide
ugguguagagcccagggac

SEQ ID NO: 1498050 - RNA, 19 nt, Artificial Sequence
  Description of Artificial Sequence: Synthetic oligonucleotide
acaauucccagcucagggg

SEQ ID NO: 1498051 - RNA, 19 nt, Artificial Sequence
  Description of Artificial Sequence: Synthetic oligonucleotide
aaaagcgagaucaaagaaa

SEQ ID NO: 1498052 - RNA, 19 nt, Artificial Sequence
  Description of Artificial Sequence: Synthetic oligonucleotide
cuaccacucagauuucugg

SEQ ID NO: 1498053 - RNA, 19 nt, Artificial Sequence
  Description of Artificial Sequence: Synthetic oligonucleotide
cacaauucccagcucaggg

SEQ ID NO: 1498054 - RNA, 19 nt, Artificial Sequence
  Description of Artificial Sequence: Synthetic oligonucleotide
uggugagcagcccugguag

SEQ ID NO: 1498055 - RNA, 19 nt, Artificial Sequence
  Description of Artificial Sequence: Synthetic oligonucleotide
caagcagggaaucacugcc

SEQ ID NO: 1498056 - RNA, 19 nt, Artificial Sequence
  Description of Artificial Sequence: Synthetic oligonucleotide
aguagggcugagcucaggg

SEQ ID NO: 1498057 - RNA, 19 nt, Artificial Sequence
  Description of Artificial Sequence: Synthetic oligonucleotide
agaaccggacaauaggaug

SEQ ID NO: 1498058 - RNA, 19 nt, Artificial Sequence
  Description of Artificial Sequence: Synthetic oligonucleotide
ugagggguauagaagccag

SEQ ID NO: 1498059 - RNA, 19 nt, Artificial Sequence
  Description of Artificial Sequence: Synthetic oligonucleotide
gaauugagaaggucuaguc

SEQ ID NO: 1498060 - RNA, 19 nt, Artificial Sequence
  Description of Artificial Sequence: Synthetic oligonucleotide
gguaagaaggaaaagcgag

SEQ ID NO: 1498061 - RNA, 19 nt, Artificial Sequence
  Description of Artificial Sequence: Synthetic oligonucleotide
gggacaaauggauugagug

SEQ ID NO: 1498062 - RNA, 19 nt, Artificial Sequence
  Description of Artificial Sequence: Synthetic oligonucleotide
guuccuaccacucagauuu

SEQ ID NO: 1498063 - RNA, 19 nt, Artificial Sequence
  Description of Artificial Sequence: Synthetic oligonucleotide
agaagucaccaaaugggcc

SEQ ID NO: 1498064 - RNA, 19 nt, Artificial Sequence
  Description of Artificial Sequence: Synthetic oligonucleotide
ugcaagggacuacuguggg

SEQ ID NO: 1498065 - RNA, 19 nt, Artificial Sequence
  Description of Artificial Sequence: Synthetic oligonucleotide
gaaccggacaauaggaugc

SEQ ID NO: 1498066 - RNA, 19 nt, Artificial Sequence
  Description of Artificial Sequence: Synthetic oligonucleotide
caagcucuucccauaaagc

SEQ ID NO: 1498067 - RNA, 19 nt, Artificial Sequence
  Description of Artificial Sequence: Synthetic oligonucleotide
ucaaagaaauuguccuuug

SEQ ID NO: 1498068 - RNA, 19 nt, Artificial Sequence
  Description of Artificial Sequence: Synthetic oligonucleotide
gaaaccuucgccggaauug

SEQ ID NO: 1498069 - RNA, 19 nt, Artificial Sequence
  Description of Artificial Sequence: Synthetic oligonucleotide
aaucacugccugugccugc

SEQ ID NO: 1498070 - RNA, 19 nt, Artificial Sequence
  Description of Artificial Sequence: Synthetic oligonucleotide
agcauacucgcccauguug

SEQ ID NO: 1498071 - RNA, 19 nt, Artificial Sequence
  Description of Artificial Sequence: Synthetic oligonucleotide
ggacaaauggauugagugg

SEQ ID NO: 1498072 - RNA, 19 nt, Artificial Sequence
  Description of Artificial Sequence: Synthetic oligonucleotide
uacucgcccauguugaucu

SEQ ID NO: 1498073 - RNA, 19 nt, Artificial Sequence
  Description of Artificial Sequence: Synthetic oligonucleotide
auucaucaaaucaguaagg

SEQ ID NO: 1498074 - RNA, 19 nt, Artificial Sequence
  Description of Artificial Sequence: Synthetic oligonucleotide
guaugaggguggcagagag

SEQ ID NO: 1498075 - RNA, 19 nt, Artificial Sequence
  Description of Artificial Sequence: Synthetic oligonucleotide
uuucuccuauaaaccagag

SEQ ID NO: 1498076 - RNA, 19 nt, Artificial Sequence
  Description of Artificial Sequence: Synthetic oligonucleotide
agcuccaaguggcaggagg

SEQ ID NO: 1498077 - RNA, 19 nt, Artificial Sequence
  Description of Artificial Sequence: Synthetic oligonucleotide
uguguuaaguggguccagg

SEQ ID NO: 1498078 - RNA, 19 nt, Artificial Sequence
  Description of Artificial Sequence: Synthetic oligonucleotide
gaaaagcgagaucaaagaa

SEQ ID NO: 1498079 - RNA, 19 nt, Artificial Sequence
  Description of Artificial Sequence: Synthetic oligonucleotide
gauugacauaagcccagag

SEQ ID NO: 1498080 - RNA, 19 nt, Artificial Sequence
  Description of Artificial Sequence: Synthetic oligonucleotide
uccgguagcugccaaagaa

SEQ ID NO: 1498081 - RNA, 19 nt, Artificial Sequence
  Description of Artificial Sequence: Synthetic oligonucleotide
acagguugggcugagaccu

SEQ ID NO: 1498082 - RNA, 19 nt, Artificial Sequence
  Description of Artificial Sequence: Synthetic oligonucleotide
aagguaguuccuaccacuc

SEQ ID NO: 1498083 - RNA, 19 nt, Artificial Sequence
  Description of Artificial Sequence: Synthetic oligonucleotide
gagaagucaccaaaugggc

SEQ ID NO: 1498084 - RNA, 19 nt, Artificial Sequence
  Description of Artificial Sequence: Synthetic oligonucleotide
uggugguacagcuuaucgc

SEQ ID NO: 1498085 - RNA, 19 nt, Artificial Sequence
  Description of Artificial Sequence: Synthetic oligonucleotide
agggcuaacccuugcuugg

SEQ ID NO: 1498086 - RNA, 19 nt, Artificial Sequence
  Description of Artificial Sequence: Synthetic oligonucleotide
guuggaaucugggucauug

SEQ ID NO: 1498087 - RNA, 19 nt, Artificial Sequence
  Description of Artificial Sequence: Synthetic oligonucleotide
uuucaagauucaucaaauc

SEQ ID NO: 1498088 - RNA, 19 nt, Artificial Sequence
  Description of Artificial Sequence: Synthetic oligonucleotide
gguauagaagccagaaccg

SEQ ID NO: 1498089 - RNA, 19 nt, Artificial Sequence
  Description of Artificial Sequence: Synthetic oligonucleotide
ccauaaagcuccaaguggc

SEQ ID NO: 1498090 - RNA, 19 nt, Artificial Sequence
  Description of Artificial Sequence: Synthetic oligonucleotide
gguaguuccuaccacucag

SEQ ID NO: 1498091 - RNA, 19 nt, Artificial Sequence
  Description of Artificial Sequence: Synthetic oligonucleotide
uucagugcauuccgguagc

SEQ ID NO: 1498092 - RNA, 19 nt, Artificial Sequence
  Description of Artificial Sequence: Synthetic oligonucleotide
agggcagcuugucuuugcc

SEQ ID NO: 1498093 - RNA, 19 nt, Artificial Sequence
  Description of Artificial Sequence: Synthetic oligonucleotide
agggaaucacugccugugc

SEQ ID NO: 1498094 - RNA, 19 nt, Artificial Sequence
  Description of Artificial Sequence: Synthetic oligonucleotide
ugagcgggaacagagggcu

SEQ ID NO: 1498095 - RNA, 19 nt, Artificial Sequence
  Description of Artificial Sequence: Synthetic oligonucleotide
caauguucggauccuggag

SEQ ID NO: 1498096 - RNA, 19 nt, Artificial Sequence
  Description of Artificial Sequence: Synthetic oligonucleotide
uaucgcuaccagcauacuc

SEQ ID NO: 1498097 - RNA, 19 nt, Artificial Sequence
  Description of Artificial Sequence: Synthetic oligonucleotide
guaggaacugccucauggc

SEQ ID NO: 1498098 - RNA, 19 nt, Artificial Sequence
  Description of Artificial Sequence: Synthetic oligonucleotide
aagggacuacugugggcac

SEQ ID NO: 1498099 - RNA, 19 nt, Artificial Sequence
  Description of Artificial Sequence: Synthetic oligonucleotide
uucuccuauaaaccagagu

SEQ ID NO: 1498100 - RNA, 19 nt, Artificial Sequence
  Description of Artificial Sequence: Synthetic oligonucleotide
aaagcuccaaguggcagga

SEQ ID NO: 1498101 - RNA, 19 nt, Artificial Sequence
  Description of Artificial Sequence: Synthetic oligonucleotide
gcuaccagcauacucgccc

SEQ ID NO: 1498102 - RNA, 19 nt, Artificial Sequence
  Description of Artificial Sequence: Synthetic oligonucleotide
uuuucagugcauuccggua

SEQ ID NO: 1498103 - RNA, 19 nt, Artificial Sequence
  Description of Artificial Sequence: Synthetic oligonucleotide
ugagaaaggcucuggccac

SEQ ID NO: 1498104 - RNA, 19 nt, Artificial Sequence
  Description of Artificial Sequence: Synthetic oligonucleotide
gucccaaaaggccuggcug

SEQ ID NO: 1498105 - RNA, 19 nt, Artificial Sequence
  Description of Artificial Sequence: Synthetic oligonucleotide
ugccucauggcuccagagc

SEQ ID NO: 1498106 - RNA, 19 nt, Artificial Sequence
  Description of Artificial Sequence: Synthetic oligonucleotide
aucaguaagguaagaagga

SEQ ID NO: 1498107 - RNA, 19 nt, Artificial Sequence
  Description of Artificial Sequence: Synthetic oligonucleotide
cagcuuaucgcuaccagca

SEQ ID NO: 1498108 - RNA, 19 nt, Artificial Sequence
  Description of Artificial Sequence: Synthetic oligonucleotide
caaauggauugaguggcgg

SEQ ID NO: 1498109 - RNA, 19 nt, Artificial Sequence
  Description of Artificial Sequence: Synthetic oligonucleotide
auaaaccagaguugcuggu

SEQ ID NO: 1498110 - RNA, 19 nt, Artificial Sequence
  Description of Artificial Sequence: Synthetic oligonucleotide
gccucauggcuccagagcg

SEQ ID NO: 1498111 - RNA, 19 nt, Artificial Sequence
  Description of Artificial Sequence: Synthetic oligonucleotide
ggaugcucggugcauaugc

SEQ ID NO: 1498112 - RNA, 19 nt, Artificial Sequence
  Description of Artificial Sequence: Synthetic oligonucleotide
guagagcccagggacauag

SEQ ID NO: 1498113 - RNA, 19 nt, Artificial Sequence
  Description of Artificial Sequence: Synthetic oligonucleotide
aaaccuucgccggaauuga

SEQ ID NO: 1498114 - RNA, 19 nt, Artificial Sequence
  Description of Artificial Sequence: Synthetic oligonucleotide
gguucaccaggccucaggg

SEQ ID NO: 1498115 - RNA, 19 nt, Artificial Sequence
  Description of Artificial Sequence: Synthetic oligonucleotide
agccgaagguaguuccuac

SEQ ID NO: 1498116 - RNA, 19 nt, Artificial Sequence
  Description of Artificial Sequence: Synthetic oligonucleotide
ucuagucggccaucaauaa

SEQ ID NO: 1498117 - RNA, 19 nt, Artificial Sequence
  Description of Artificial Sequence: Synthetic oligonucleotide
agccuaagcuuugauugac

SEQ ID NO: 1498118 - RNA, 19 nt, Artificial Sequence
  Description of Artificial Sequence: Synthetic oligonucleotide
gaagguaguuccuaccacu

SEQ ID NO: 1498119 - RNA, 19 nt, Artificial Sequence
  Description of Artificial Sequence: Synthetic oligonucleotide
uaugaggguggcagagagc

SEQ ID NO: 1498120 - RNA, 19 nt, Artificial Sequence
  Description of Artificial Sequence: Synthetic oligonucleotide
accacucagauuucugggu

SEQ ID NO: 1498121 - RNA, 19 nt, Artificial Sequence
  Description of Artificial Sequence: Synthetic oligonucleotide
ugguacagcuuaucgcuac

SEQ ID NO: 1498122 - RNA, 19 nt, Artificial Sequence
  Description of Artificial Sequence: Synthetic oligonucleotide
gauugaguggcggcugucc

SEQ ID NO: 1498123 - RNA, 19 nt, Artificial Sequence
  Description of Artificial Sequence: Synthetic oligonucleotide
gguaguagggcugagcuca

SEQ ID NO: 1498124 - RNA, 19 nt, Artificial Sequence
  Description of Artificial Sequence: Synthetic oligonucleotide
aggaaucaauuuucaagau

SEQ ID NO: 1498125 - RNA, 19 nt, Artificial Sequence
  Description of Artificial Sequence: Synthetic oligonucleotide
uggguggugcuacuggcac

SEQ ID NO: 1498126 - RNA, 19 nt, Artificial Sequence
  Description of Artificial Sequence: Synthetic oligonucleotide
ugacauaagcccagaggua

SEQ ID NO: 1498127 - RNA, 19 nt, Artificial Sequence
  Description of Artificial Sequence: Synthetic oligonucleotide
agaaaggcucuggccaccc

SEQ ID NO: 1498128 - RNA, 19 nt, Artificial Sequence
  Description of Artificial Sequence: Synthetic oligonucleotide
ugcauaugcuggccccagg

SEQ ID NO: 1498129 - RNA, 19 nt, Artificial Sequence
  Description of Artificial Sequence: Synthetic oligonucleotide
agcagggaaucacugccug

SEQ ID NO: 1498130 - RNA, 19 nt, Artificial Sequence
  Description of Artificial Sequence: Synthetic oligonucleotide
aauaggaugcucggugcau

SEQ ID NO: 1498131 - RNA, 19 nt, Artificial Sequence
  Description of Artificial Sequence: Synthetic oligonucleotide
ucaccaaaugggccaccag

SEQ ID NO: 1498132 - RNA, 19 nt, Artificial Sequence
  Description of Artificial Sequence: Synthetic oligonucleotide
cagggcuaacccuugcuug

SEQ ID NO: 1498133 - RNA, 19 nt, Artificial Sequence
  Description of Artificial Sequence: Synthetic oligonucleotide
cacgaaggcuuccucacug

SEQ ID NO: 1498134 - RNA, 19 nt, Artificial Sequence
  Description of Artificial Sequence: Synthetic oligonucleotide
ucagggcuaacccuugcuu

SEQ ID NO: 1498135 - RNA, 19 nt, Artificial Sequence
  Description of Artificial Sequence: Synthetic oligonucleotide
cauggcuccagagcgguag

SEQ ID NO: 1498136 - RNA, 19 nt, Artificial Sequence
  Description of Artificial Sequence: Synthetic oligonucleotide
ugucuuugccgguccagcu

SEQ ID NO: 1498137 - RNA, 19 nt, Artificial Sequence
  Description of Artificial Sequence: Synthetic oligonucleotide
agcuuggucaggcgggcag

SEQ ID NO: 1498138 - RNA, 19 nt, Artificial Sequence
  Description of Artificial Sequence: Synthetic oligonucleotide
cugguucuagacccugggg

SEQ ID NO: 1498139 - RNA, 19 nt, Artificial Sequence
  Description of Artificial Sequence: Synthetic oligonucleotide
acaaauggauugaguggcg

SEQ ID NO: 1498140 - RNA, 19 nt, Artificial Sequence
  Description of Artificial Sequence: Synthetic oligonucleotide
ccggacaauaggaugcucg

SEQ ID NO: 1498141 - RNA, 19 nt, Artificial Sequence
  Description of Artificial Sequence: Synthetic oligonucleotide
caagggacuacugugggca

SEQ ID NO: 1498142 - RNA, 19 nt, Artificial Sequence
  Description of Artificial Sequence: Synthetic oligonucleotide
uccagagcgguagugggac

SEQ ID NO: 1498143 - RNA, 19 nt, Artificial Sequence
  Description of Artificial Sequence: Synthetic oligonucleotide
gcauaugcuggccccaggg

SEQ ID NO: 1498144 - RNA, 19 nt, Artificial Sequence
  Description of Artificial Sequence: Synthetic oligonucleotide
ugagaaggucuagucggcc

SEQ ID NO: 1498145 - RNA, 19 nt, Artificial Sequence
  Description of Artificial Sequence: Synthetic oligonucleotide
ucuucagggaggagaucac

SEQ ID NO: 1498146 - RNA, 19 nt, Artificial Sequence
  Description of Artificial Sequence: Synthetic oligonucleotide
gaagggacaaauggauuga

SEQ ID NO: 1498147 - RNA, 19 nt, Artificial Sequence
  Description of Artificial Sequence: Synthetic oligonucleotide
aagauucaucaaaucagua

SEQ ID NO: 1498148 - RNA, 19 nt, Artificial Sequence
  Description of Artificial Sequence: Synthetic oligonucleotide
uugucuuugccgguccagc

SEQ ID NO: 1498149 - RNA, 19 nt, Artificial Sequence
  Description of Artificial Sequence: Synthetic oligonucleotide
agagagccgaagguaguuc

SEQ ID NO: 1498150 - RNA, 19 nt, Artificial Sequence
  Description of Artificial Sequence: Synthetic oligonucleotide
ggcuguguuaagugggucc

SEQ ID NO: 1498151 - RNA, 19 nt, Artificial Sequence
  Description of Artificial Sequence: Synthetic oligonucleotide
caguaagguaagaaggaaa

SEQ ID NO: 1498152 - RNA, 19 nt, Artificial Sequence
  Description of Artificial Sequence: Synthetic oligonucleotide
ggaaucugggucauuguug

SEQ ID NO: 1498153 - RNA, 19 nt, Artificial Sequence
  Description of Artificial Sequence: Synthetic oligonucleotide
ucgcuaccagcauacucgc

SEQ ID NO: 1498154 - RNA, 19 nt, Artificial Sequence
  Description of Artificial Sequence: Synthetic oligonucleotide
ggugguacagcuuaucgcu

SEQ ID NO: 1498155 - RNA, 19 nt, Artificial Sequence
  Description of Artificial Sequence: Synthetic oligonucleotide
acccuugcuuggcccagcc

SEQ ID NO: 1498156 - RNA, 19 nt, Artificial Sequence
  Description of Artificial Sequence: Synthetic oligonucleotide
acuacugugggcacccaug

SEQ ID NO: 1498157 - RNA, 19 nt, Artificial Sequence
  Description of Artificial Sequence: Synthetic oligonucleotide
guuucuccuauaaaccaga

SEQ ID NO: 1498158 - RNA, 19 nt, Artificial Sequence
  Description of Artificial Sequence: Synthetic oligonucleotide
ugccgguccagcuguagcu

SEQ ID NO: 1498159 - RNA, 19 nt, Artificial Sequence
  Description of Artificial Sequence: Synthetic oligonucleotide
ugaaaccuucgccggaauu

SEQ ID NO: 1498160 - RNA, 19 nt, Artificial Sequence
  Description of Artificial Sequence: Synthetic oligonucleotide
cacuugaacgggccagagg

SEQ ID NO: 1498161 - RNA, 19 nt, Artificial Sequence
  Description of Artificial Sequence: Synthetic oligonucleotide
gucaucaaaagggguuucc

SEQ ID NO: 1498162 - RNA, 19 nt, Artificial Sequence
  Description of Artificial Sequence: Synthetic oligonucleotide
uccaaguggcaggaggcug

SEQ ID NO: 1498163 - RNA, 19 nt, Artificial Sequence
  Description of Artificial Sequence: Synthetic oligonucleotide
auacucgcccauguugauc

SEQ ID NO: 1498164 - RNA, 19 nt, Artificial Sequence
  Description of Artificial Sequence: Synthetic oligonucleotide
aaggucuagucggccauca

SEQ ID NO: 1498165 - RNA, 19 nt, Artificial Sequence
  Description of Artificial Sequence: Synthetic oligonucleotide
ugaccaggcuguguuaagu

SEQ ID NO: 1498166 - RNA, 19 nt, Artificial Sequence
  Description of Artificial Sequence: Synthetic oligonucleotide
cuggguuugucaaaggggu

SEQ ID NO: 1498167 - RNA, 19 nt, Artificial Sequence
  Description of Artificial Sequence: Synthetic oligonucleotide
uggauugaguggcggcugu

SEQ ID NO: 1498168 - RNA, 19 nt, Artificial Sequence
  Description of Artificial Sequence: Synthetic oligonucleotide
gagccuaagcuuugauuga

SEQ ID NO: 1498169 - RNA, 19 nt, Artificial Sequence
  Description of Artificial Sequence: Synthetic oligonucleotide
cauaaagcuccaaguggca

SEQ ID NO: 1498170 - RNA, 19 nt, Artificial Sequence
  Description of Artificial Sequence: Synthetic oligonucleotide
gacauaagcccagagguau

SEQ ID NO: 1498171 - RNA, 19 nt, Artificial Sequence
  Description of Artificial Sequence: Synthetic oligonucleotide
uugaacgggccagaggcaa

SEQ ID NO: 1498172 - RNA, 19 nt, Artificial Sequence
  Description of Artificial Sequence: Synthetic oligonucleotide
agguaguuccuaccacuca

SEQ ID NO: 1498173 - RNA, 19 nt, Artificial Sequence
  Description of Artificial Sequence: Synthetic oligonucleotide
ugccaagcucuucccauaa

SEQ ID NO: 1498174 - RNA, 19 nt, Artificial Sequence
  Description of Artificial Sequence: Synthetic oligonucleotide
cuucgggcucaauuuucag

SEQ ID NO: 1498175 - RNA, 19 nt, Artificial Sequence
  Description of Artificial Sequence: Synthetic oligonucleotide
auugaaaccuucgccggaa

SEQ ID NO: 1498176 - RNA, 19 nt, Artificial Sequence
  Description of Artificial Sequence: Synthetic oligonucleotide
uguucggauccuggagggg

SEQ ID NO: 1498177 - RNA, 19 nt, Artificial Sequence
  Description of Artificial Sequence: Synthetic oligonucleotide
gucuuugccgguccagcug

SEQ ID NO: 1498178 - RNA, 19 nt, Artificial Sequence
  Description of Artificial Sequence: Synthetic oligonucleotide
gucggccaucaauaaacug

SEQ ID NO: 1498179 - RNA, 19 nt, Artificial Sequence
  Description of Artificial Sequence: Synthetic oligonucleotide
ugauugacauaagcccaga

SEQ ID NO: 1498180 - RNA, 19 nt, Artificial Sequence
  Description of Artificial Sequence: Synthetic oligonucleotide
guggcggcuguccugacca

SEQ ID NO: 1498181 - RNA, 19 nt, Artificial Sequence
  Description of Artificial Sequence: Synthetic oligonucleotide
uggguuugucaaagggguc

SEQ ID NO: 1498182 - RNA, 19 nt, Artificial Sequence
  Description of Artificial Sequence: Synthetic oligonucleotide
aaccggacaauaggaugcu

SEQ ID NO: 1498183 - RNA, 19 nt, Artificial Sequence
  Description of Artificial Sequence: Synthetic oligonucleotide
ggcagagagccgaagguag

SEQ ID NO: 1498184 - RNA, 19 nt, Artificial Sequence
  Description of Artificial Sequence: Synthetic oligonucleotide
ggcaauguucggauccugg

SEQ ID NO: 1498185 - RNA, 19 nt, Artificial Sequence
  Description of Artificial Sequence: Synthetic oligonucleotide
gcaagcagggaaucacugc

SEQ ID NO: 1498186 - RNA, 19 nt, Artificial Sequence
  Description of Artificial Sequence: Synthetic oligonucleotide
gcuacuggcacagaaggga

SEQ ID NO: 1498187 - RNA, 19 nt, Artificial Sequence
  Description of Artificial Sequence: Synthetic oligonucleotide
gaacgggccagaggcaaug

SEQ ID NO: 1498188 - RNA, 19 nt, Artificial Sequence
  Description of Artificial Sequence: Synthetic oligonucleotide
cuucgccggaauugagaag

SEQ ID NO: 1498189 - RNA, 19 nt, Artificial Sequence
  Description of Artificial Sequence: Synthetic oligonucleotide
uuccgguagcugccaaaga

SEQ ID NO: 1498190 - RNA, 19 nt, Artificial Sequence
  Description of Artificial Sequence: Synthetic oligonucleotide
auaagcccagagguaugag

SEQ ID NO: 1498191 - RNA, 19 nt, Artificial Sequence
  Description of Artificial Sequence: Synthetic oligonucleotide
gcuaacccuugcuuggccc

SEQ ID NO: 1498192 - RNA, 19 nt, Artificial Sequence
  Description of Artificial Sequence: Synthetic oligonucleotide
aagccagaaccggacaaua

SEQ ID NO: 1498193 - RNA, 19 nt, Artificial Sequence
  Description of Artificial Sequence: Synthetic oligonucleotide
aaccagaguugcugguguu

SEQ ID NO: 1498194 - RNA, 19 nt, Artificial Sequence
  Description of Artificial Sequence: Synthetic oligonucleotide
caauaggaugcucggugca

SEQ ID NO: 1498195 - RNA, 19 nt, Artificial Sequence
  Description of Artificial Sequence: Synthetic oligonucleotide
gucuagucggccaucaaua

SEQ ID NO: 1498196 - RNA, 19 nt, Artificial Sequence
  Description of Artificial Sequence: Synthetic oligonucleotide
gagguaugaggguggcaga

SEQ ID NO: 1498197 - RNA, 19 nt, Artificial Sequence
  Description of Artificial Sequence: Synthetic oligonucleotide
gguacagcuuaucgcuacc

SEQ ID NO: 1498198 - RNA, 19 nt, Artificial Sequence
  Description of Artificial Sequence: Synthetic oligonucleotide
uugaaaccuucgccggaau

SEQ ID NO: 1498199 - RNA, 19 nt, Artificial Sequence
  Description of Artificial Sequence: Synthetic oligonucleotide
cugaccaggcuguguuaag

SEQ ID NO: 1498200 - RNA, 19 nt, Artificial Sequence
  Description of Artificial Sequence: Synthetic oligonucleotide
uguuucaccuugguuuauu

SEQ ID NO: 1498201 - RNA, 19 nt, Artificial Sequence
  Description of Artificial Sequence: Synthetic oligonucleotide
aaagcagccugggccuuga

SEQ ID NO: 1498202 - RNA, 19 nt, Artificial Sequence
  Description of Artificial Sequence: Synthetic oligonucleotide
acacgaaggcuuccucacu

SEQ ID NO: 1498203 - RNA, 19 nt, Artificial Sequence
  Description of Artificial Sequence: Synthetic oligonucleotide
cauugaaaccuucgccgga

SEQ ID NO: 1498204 - RNA, 19 nt, Artificial Sequence
  Description of Artificial Sequence: Synthetic oligonucleotide
uaacccuugcuuggcccag

SEQ ID NO: 1498205 - RNA, 19 nt, Artificial Sequence
  Description of Artificial Sequence: Synthetic oligonucleotide
cauaagcccagagguauga

SEQ ID NO: 1498206 - RNA, 19 nt, Artificial Sequence
  Description of Artificial Sequence: Synthetic oligonucleotide
agagcgguagugggacacg

SEQ ID NO: 1498207 - RNA, 19 nt, Artificial Sequence
  Description of Artificial Sequence: Synthetic oligonucleotide
agccagaaccggacaauag

SEQ ID NO: 1498208 - RNA, 19 nt, Artificial Sequence
  Description of Artificial Sequence: Synthetic oligonucleotide
cuaccagcauacucgccca

SEQ ID NO: 1498209 - RNA, 19 nt, Artificial Sequence
  Description of Artificial Sequence: Synthetic oligonucleotide
cucgcccauguugaucucc

SEQ ID NO: 1498210 - RNA, 19 nt, Artificial Sequence
  Description of Artificial Sequence: Synthetic oligonucleotide
agcuuaucgcuaccagcau

SEQ ID NO: 1498211 - RNA, 19 nt, Artificial Sequence
  Description of Artificial Sequence: Synthetic oligonucleotide
ccagaaccggacaauagga

SEQ ID NO: 1498212 - RNA, 19 nt, Artificial Sequence
  Description of Artificial Sequence: Synthetic oligonucleotide
gcaauguucggauccugga

SEQ ID NO: 1498213 - RNA, 19 nt, Artificial Sequence
  Description of Artificial Sequence: Synthetic oligonucleotide
cauaugcuggccccaggga

SEQ ID NO: 1498214 - RNA, 19 nt, Artificial Sequence
  Description of Artificial Sequence: Synthetic oligonucleotide
ugaacgggccagaggcaau

SEQ ID NO: 1498215 - RNA, 19 nt, Artificial Sequence
  Description of Artificial Sequence: Synthetic oligonucleotide
cagagcgguagugggacac

SEQ ID NO: 1498216 - RNA, 19 nt, Artificial Sequence
  Description of Artificial Sequence: Synthetic oligonucleotide
ggacacgaaggcuuccuca

SEQ ID NO: 1498217 - RNA, 19 nt, Artificial Sequence
  Description of Artificial Sequence: Synthetic oligonucleotide
aggcuguguuaaguggguc

SEQ ID NO: 1498218 - RNA, 19 nt, Artificial Sequence
  Description of Artificial Sequence: Synthetic oligonucleotide
acauaagcccagagguaug

SEQ ID NO: 1498219 - RNA, 19 nt, Artificial Sequence
  Description of Artificial Sequence: Synthetic oligonucleotide
gggucucuggccugagcgg

SEQ ID NO: 1498220 - RNA, 19 nt, Artificial Sequence
  Description of Artificial Sequence: Synthetic oligonucleotide
cuagucggccaucaauaaa

SEQ ID NO: 1498221 - RNA, 19 nt, Artificial Sequence
  Description of Artificial Sequence: Synthetic oligonucleotide
accccgucaccugugguug

SEQ ID NO: 1498222 - RNA, 19 nt, Artificial Sequence
  Description of Artificial Sequence: Synthetic oligonucleotide
cggacaauaggaugcucgg

SEQ ID NO: 1498223 - RNA, 19 nt, Artificial Sequence
  Description of Artificial Sequence: Synthetic oligonucleotide
agggacauaguggguggug

SEQ ID NO: 1498224 - RNA, 19 nt, Artificial Sequence
  Description of Artificial Sequence: Synthetic oligonucleotide
cuugaacgggccagaggca

SEQ ID NO: 1498225 - RNA, 19 nt, Artificial Sequence
  Description of Artificial Sequence: Synthetic oligonucleotide
cugguguagagcccaggga

SEQ ID NO: 1498226 - RNA, 19 nt, Artificial Sequence
  Description of Artificial Sequence: Synthetic oligonucleotide
gggcucaauuuucagugca

SEQ ID NO: 1498227 - RNA, 19 nt, Artificial Sequence
  Description of Artificial Sequence: Synthetic oligonucleotide
gguggaggcacaauuccca

SEQ ID NO: 1498228 - RNA, 19 nt, Artificial Sequence
  Description of Artificial Sequence: Synthetic oligonucleotide
uuaucgcuaccagcauacu

SEQ ID NO: 1498229 - RNA, 19 nt, Artificial Sequence
  Description of Artificial Sequence: Synthetic oligonucleotide
agucggccaucaauaaacu

SEQ ID NO: 1498230 - RNA, 19 nt, Artificial Sequence
  Description of Artificial Sequence: Synthetic oligonucleotide
ggaaucaauuuucaagauu

SEQ ID NO: 1498231 - RNA, 19 nt, Artificial Sequence
  Description of Artificial Sequence: Synthetic oligonucleotide
ucgccggaauugagaaggu

SEQ ID NO: 1498232 - RNA, 19 nt, Artificial Sequence
  Description of Artificial Sequence: Synthetic oligonucleotide
cauuguugccaagcucuuc

SEQ ID NO: 1498233 - RNA, 19 nt, Artificial Sequence
  Description of Artificial Sequence: Synthetic oligonucleotide
gccgaagguaguuccuacc

SEQ ID NO: 1498234 - RNA, 19 nt, Artificial Sequence
  Description of Artificial Sequence: Synthetic oligonucleotide
cagaggcaauguucggauc

SEQ ID NO: 1498235 - RNA, 19 nt, Artificial Sequence
  Description of Artificial Sequence: Synthetic oligonucleotide
gcaagggacuacugugggc

SEQ ID NO: 1498236 - RNA, 19 nt, Artificial Sequence
  Description of Artificial Sequence: Synthetic oligonucleotide
aacgggccagaggcaaugu

SEQ ID NO: 1498237 - RNA, 19 nt, Artificial Sequence
  Description of Artificial Sequence: Synthetic oligonucleotide
uguccugaccaggcugugu

SEQ ID NO: 1498238 - RNA, 19 nt, Artificial Sequence
  Description of Artificial Sequence: Synthetic oligonucleotide
gaggcugagccuaagcuuu

SEQ ID NO: 1498239 - RNA, 19 nt, Artificial Sequence
  Description of Artificial Sequence: Synthetic oligonucleotide
gguucuucgggcucaauuu

SEQ ID NO: 1498240 - RNA, 19 nt, Artificial Sequence
  Description of Artificial Sequence: Synthetic oligonucleotide
ucagugcauuccgguagcu

SEQ ID NO: 1498241 - RNA, 19 nt, Artificial Sequence
  Description of Artificial Sequence: Synthetic oligonucleotide
accggacaauaggaugcuc

SEQ ID NO: 1498242 - RNA, 19 nt, Artificial Sequence
  Description of Artificial Sequence: Synthetic oligonucleotide
gggacuacugugggcaccc

SEQ ID NO: 1498243 - RNA, 19 nt, Artificial Sequence
  Description of Artificial Sequence: Synthetic oligonucleotide
gacauaguggguggugcua

SEQ ID NO: 1498244 - RNA, 19 nt, Artificial Sequence
  Description of Artificial Sequence: Synthetic oligonucleotide
uuccuaccacucagauuuc

SEQ ID NO: 1498245 - RNA, 19 nt, Artificial Sequence
  Description of Artificial Sequence: Synthetic oligonucleotide
gcacaauucccagcucagg

SEQ ID NO: 1498246 - RNA, 19 nt, Artificial Sequence
  Description of Artificial Sequence: Synthetic oligonucleotide
cuguguuaaguggguccag

SEQ ID NO: 1498247 - RNA, 19 nt, Artificial Sequence
  Description of Artificial Sequence: Synthetic oligonucleotide
cagugcauuccgguagcug

SEQ ID NO: 1498248 - RNA, 19 nt, Artificial Sequence
  Description of Artificial Sequence: Synthetic oligonucleotide
gaaggucuagucggccauc

SEQ ID NO: 1498249 - RNA, 19 nt, Artificial Sequence
  Description of Artificial Sequence: Synthetic oligonucleotide
agcccugguaguagggcug

SEQ ID NO: 1498250 - RNA, 19 nt, Artificial Sequence
  Description of Artificial Sequence: Synthetic oligonucleotide
gcuguguuaagugggucca

SEQ ID NO: 1498251 - RNA, 19 nt, Artificial Sequence
  Description of Artificial Sequence: Synthetic oligonucleotide
ugagaccugugagggguau

SEQ ID NO: 1498252 - RNA, 19 nt, Artificial Sequence
  Description of Artificial Sequence: Synthetic oligonucleotide
uccugaccaggcuguguua

SEQ ID NO: 1498253 - RNA, 19 nt, Artificial Sequence
  Description of Artificial Sequence: Synthetic oligonucleotide
ggcuaacccuugcuuggcc

SEQ ID NO: 1498254 - RNA, 19 nt, Artificial Sequence
  Description of Artificial Sequence: Synthetic oligonucleotide
uaccagcauacucgcccau

SEQ ID NO: 1498255 - RNA, 19 nt, Artificial Sequence
  Description of Artificial Sequence: Synthetic oligonucleotide
aagcuccaaguggcaggag

SEQ ID NO: 1498256 - RNA, 19 nt, Artificial Sequence
  Description of Artificial Sequence: Synthetic oligonucleotide
gagggguauagaagccaga

SEQ ID NO: 1498257 - RNA, 19 nt, Artificial Sequence
  Description of Artificial Sequence: Synthetic oligonucleotide
aagcgagaucaaagaaauu

SEQ ID NO: 1498258 - RNA, 19 nt, Artificial Sequence
  Description of Artificial Sequence: Synthetic oligonucleotide
gagcgguagugggacacga

SEQ ID NO: 1498259 - RNA, 19 nt, Artificial Sequence
  Description of Artificial Sequence: Synthetic oligonucleotide
aggcaauguucggauccug

SEQ ID NO: 1498260 - RNA, 19 nt, Artificial Sequence
  Description of Artificial Sequence: Synthetic oligonucleotide
ccgaagguaguuccuacca

SEQ ID NO: 1498261 - RNA, 19 nt, Artificial Sequence
  Description of Artificial Sequence: Synthetic oligonucleotide
gugauggguucuucgggcu

SEQ ID NO: 1498262 - RNA, 19 nt, Artificial Sequence
  Description of Artificial Sequence: Synthetic oligonucleotide
agggaggagaucacaucau

SEQ ID NO: 1498263 - RNA, 19 nt, Artificial Sequence
  Description of Artificial Sequence: Synthetic oligonucleotide
gguguagagcccagggaca

SEQ ID NO: 1498264 - RNA, 19 nt, Artificial Sequence
  Description of Artificial Sequence: Synthetic oligonucleotide
gaugcucggugcauaugcu

SEQ ID NO: 1498265 - RNA, 19 nt, Artificial Sequence
  Description of Artificial Sequence: Synthetic oligonucleotide
guucuucgggcucaauuuu

SEQ ID NO: 1498266 - RNA, 19 nt, Artificial Sequence
  Description of Artificial Sequence: Synthetic oligonucleotide
gccggaauugagaaggucu

SEQ ID NO: 1498267 - RNA, 19 nt, Artificial Sequence
  Description of Artificial Sequence: Synthetic oligonucleotide
ccuucgccggaauugagaa

SEQ ID NO: 1498268 - RNA, 19 nt, Artificial Sequence
  Description of Artificial Sequence: Synthetic oligonucleotide
cugagccuaagcuuugauu

SEQ ID NO: 1498269 - RNA, 19 nt, Artificial Sequence
  Description of Artificial Sequence: Synthetic oligonucleotide
aagcccuggaagggcuggu

SEQ ID NO: 1498270 - RNA, 19 nt, Artificial Sequence
  Description of Artificial Sequence: Synthetic oligonucleotide
gcuuaucgcuaccagcaua

SEQ ID NO: 1498271 - RNA, 19 nt, Artificial Sequence
  Description of Artificial Sequence: Synthetic oligonucleotide
ggcugguucuagacccugg

SEQ ID NO: 1498272 - RNA, 19 nt, Artificial Sequence
  Description of Artificial Sequence: Synthetic oligonucleotide
gcgagaucaaagaaauugu

SEQ ID NO: 1498273 - RNA, 19 nt, Artificial Sequence
  Description of Artificial Sequence: Synthetic oligonucleotide
ggucuagucggccaucaau

SEQ ID NO: 1498274 - RNA, 19 nt, Artificial Sequence
  Description of Artificial Sequence: Synthetic oligonucleotide
cagaaccggacaauaggau

SEQ ID NO: 1498275 - RNA, 19 nt, Artificial Sequence
  Description of Artificial Sequence: Synthetic oligonucleotide
ucauggcuccagagcggua

SEQ ID NO: 1498276 - RNA, 19 nt, Artificial Sequence
  Description of Artificial Sequence: Synthetic oligonucleotide
ccauguugaucuccucuuc

SEQ ID NO: 1498277 - RNA, 19 nt, Artificial Sequence
  Description of Artificial Sequence: Synthetic oligonucleotide
uggcggcuguccugaccag

SEQ ID NO: 1498278 - RNA, 19 nt, Artificial Sequence
  Description of Artificial Sequence: Synthetic oligonucleotide
aggucuagucggccaucaa

SEQ ID NO: 1498279 - RNA, 19 nt, Artificial Sequence
  Description of Artificial Sequence: Synthetic oligonucleotide
uguagagcccagggacaua

SEQ ID NO: 1498280 - RNA, 19 nt, Artificial Sequence
  Description of Artificial Sequence: Synthetic oligonucleotide
cgaagguaguuccuaccac

SEQ ID NO: 1498281 - RNA, 19 nt, Artificial Sequence
  Description of Artificial Sequence: Synthetic oligonucleotide
ccaaguggcaggaggcuga

SEQ ID NO: 1498282 - RNA, 19 nt, Artificial Sequence
  Description of Artificial Sequence: Synthetic oligonucleotide
guggcugcaagggacuacu

SEQ ID NO: 1498283 - RNA, 19 nt, Artificial Sequence
  Description of Artificial Sequence: Synthetic oligonucleotide
acgggccagaggcaauguu

SEQ ID NO: 1498284 - RNA, 19 nt, Artificial Sequence
  Description of Artificial Sequence: Synthetic oligonucleotide
gcagcccugguaguagggc

SEQ ID NO: 1498285 - RNA, 19 nt, Artificial Sequence
  Description of Artificial Sequence: Synthetic oligonucleotide
ggcggcuguccugaccagg

SEQ ID NO: 1498286 - RNA, 19 nt, Artificial Sequence
  Description of Artificial Sequence: Synthetic oligonucleotide
gggucauuguugccaagcu

SEQ ID NO: 1498287 - RNA, 19 nt, Artificial Sequence
  Description of Artificial Sequence: Synthetic oligonucleotide
gugguuguggagaccuucu

SEQ ID NO: 1498288 - RNA, 19 nt, Artificial Sequence
  Description of Artificial Sequence: Synthetic oligonucleotide
ccuaagcuuugauugacau

SEQ ID NO: 1498289 - RNA, 19 nt, Artificial Sequence
  Description of Artificial Sequence: Synthetic oligonucleotide
gcggcuguccugaccaggc

SEQ ID NO: 1498290 - RNA, 19 nt, Artificial Sequence
  Description of Artificial Sequence: Synthetic oligonucleotide
gcacuugaacgggccagag

SEQ ID NO: 1498291 - RNA, 19 nt, Artificial Sequence
  Description of Artificial Sequence: Synthetic oligonucleotide
cggugcauaugcuggcccc

SEQ ID NO: 1498292 - RNA, 19 nt, Artificial Sequence
  Description of Artificial Sequence: Synthetic oligonucleotide
aggcugagccuaagcuuug

SEQ ID NO: 1498293 - RNA, 19 nt, Artificial Sequence
  Description of Artificial Sequence: Synthetic oligonucleotide
cucuggccaccccgucacc

SEQ ID NO: 1498294 - RNA, 19 nt, Artificial Sequence
  Description of Artificial Sequence: Synthetic oligonucleotide
ggacauaguggguggugcu

SEQ ID NO: 1498295 - RNA, 19 nt, Artificial Sequence
  Description of Artificial Sequence: Synthetic oligonucleotide
ccggaauugagaaggucua

SEQ ID NO: 1498296 - RNA, 19 nt, Artificial Sequence
  Description of Artificial Sequence: Synthetic oligonucleotide
ccagagguaugaggguggc

SEQ ID NO: 1498297 - RNA, 19 nt, Artificial Sequence
  Description of Artificial Sequence: Synthetic oligonucleotide
ccacuggugguacagcuua

SEQ ID NO: 1498298 - RNA, 19 nt, Artificial Sequence
  Description of Artificial Sequence: Synthetic oligonucleotide
ccgguagcugccaaagaaa

SEQ ID NO: 1498299 - RNA, 19 nt, Artificial Sequence
  Description of Artificial Sequence: Synthetic oligonucleotide
cauaguggguggugcuacu

SEQ ID NO: 1498300 - RNA, 19 nt, Artificial Sequence
  Description of Artificial Sequence: Synthetic oligonucleotide
agggcugguucuagacccu

SEQ ID NO: 1498301 - RNA, 19 nt, Artificial Sequence
  Description of Artificial Sequence: Synthetic oligonucleotide
gugguacagcuuaucgcua

SEQ ID NO: 1498302 - RNA, 19 nt, Artificial Sequence
  Description of Artificial Sequence: Synthetic oligonucleotide
cgggcucaauuuucagugc

SEQ ID NO: 1498303 - RNA, 19 nt, Artificial Sequence
  Description of Artificial Sequence: Synthetic oligonucleotide
ggguucuucgggcucaauu

SEQ ID NO: 1498304 - RNA, 19 nt, Artificial Sequence
  Description of Artificial Sequence: Synthetic oligonucleotide
ggcacuugaacgggccaga

SEQ ID NO: 1498305 - RNA, 19 nt, Artificial Sequence
  Description of Artificial Sequence: Synthetic oligonucleotide
gccuaagcuuugauugaca

SEQ ID NO: 1498306 - RNA, 19 nt, Artificial Sequence
  Description of Artificial Sequence: Synthetic oligonucleotide
cggaauugagaaggucuag

SEQ ID NO: 1498307 - RNA, 19 nt, Artificial Sequence
  Description of Artificial Sequence: Synthetic oligonucleotide
cugagaccugugaggggua

SEQ ID NO: 1498308 - RNA, 19 nt, Artificial Sequence
  Description of Artificial Sequence: Synthetic oligonucleotide
gggcugaguggcugcagaa

SEQ ID NO: 1498309 - RNA, 19 nt, Artificial Sequence
  Description of Artificial Sequence: Synthetic oligonucleotide
gagaccugugagggguaua

SEQ ID NO: 1498310 - RNA, 19 nt, Artificial Sequence
  Description of Artificial Sequence: Synthetic oligonucleotide
cagagguaugaggguggca

SEQ ID NO: 1498311 - RNA, 19 nt, Artificial Sequence
  Description of Artificial Sequence: Synthetic oligonucleotide
ggauugaguggcggcuguc

SEQ ID NO: 1498312 - RNA, 19 nt, Artificial Sequence
  Description of Artificial Sequence: Synthetic oligonucleotide
caccccgucaccugugguu

SEQ ID NO: 1498313 - RNA, 19 nt, Artificial Sequence
  Description of Artificial Sequence: Synthetic oligonucleotide
cuccaaguggcaggaggcu

SEQ ID NO: 1498314 - RNA, 19 nt, Artificial Sequence
  Description of Artificial Sequence: Synthetic oligonucleotide
ccugaccaggcuguguuaa

SEQ ID NO: 1498315 - RNA, 19 nt, Artificial Sequence
  Description of Artificial Sequence: Synthetic oligonucleotide
accaggccucagggcuaac

SEQ ID NO: 1498316 - RNA, 19 nt, Artificial Sequence
  Description of Artificial Sequence: Synthetic oligonucleotide
uggguucuucgggcucaau

SEQ ID NO: 1498317 - RNA, 19 nt, Artificial Sequence
  Description of Artificial Sequence: Synthetic oligonucleotide
cagagagccgaagguaguu

SEQ ID NO: 1498318 - RNA, 19 nt, Artificial Sequence
  Description of Artificial Sequence: Synthetic oligonucleotide
ggcucaauuuucagugcau

SEQ ID NO: 1498319 - RNA, 19 nt, Artificial Sequence
  Description of Artificial Sequence: Synthetic oligonucleotide
gcugagccuaagcuuugau

SEQ ID NO: 1498320 - RNA, 19 nt, Artificial Sequence
  Description of Artificial Sequence: Synthetic oligonucleotide
cgcuaccagcauacucgcc

SEQ ID NO: 1498321 - RNA, 19 nt, Artificial Sequence
  Description of Artificial Sequence: Synthetic oligonucleotide
gcgggcaguggguggugga

SEQ ID NO: 1498322 - RNA, 19 nt, Artificial Sequence
  Description of Artificial Sequence: Synthetic oligonucleotide
gcagagagccgaagguagu

SEQ ID NO: 1498323 - RNA, 19 nt, Artificial Sequence
  Description of Artificial Sequence: Synthetic oligonucleotide
gcccugguaguagggcuga

SEQ ID NO: 1498324 - RNA, 19 nt, Artificial Sequence
  Description of Artificial Sequence: Synthetic oligonucleotide
cccgucaccugugguugug

SEQ ID NO: 1498325 - RNA, 19 nt, Artificial Sequence
  Description of Artificial Sequence: Synthetic oligonucleotide
cagcauacucgcccauguu

SEQ ID NO: 1498326 - RNA, 19 nt, Artificial Sequence
  Description of Artificial Sequence: Synthetic oligonucleotide
guguuucaccuugguuuau

SEQ ID NO: 1498327 - RNA, 19 nt, Artificial Sequence
  Description of Artificial Sequence: Synthetic oligonucleotide
ggccucagggcuaacccuu

SEQ ID NO: 1498328 - RNA, 19 nt, Artificial Sequence
  Description of Artificial Sequence: Synthetic oligonucleotide
cggccaucaauaaacuguu

SEQ ID NO: 1498329 - RNA, 19 nt, Artificial Sequence
  Description of Artificial Sequence: Synthetic oligonucleotide
ggucaggcgggcagugggu

SEQ ID NO: 1498330 - RNA, 19 nt, Artificial Sequence
  Description of Artificial Sequence: Synthetic oligonucleotide
gcuuggucaggcgggcagu

SEQ ID NO: 1498331 - RNA, 19 nt, Artificial Sequence
  Description of Artificial Sequence: Synthetic oligonucleotide
cgccggaauugagaagguc

SEQ ID NO: 1498332 - RNA, 19 nt, Artificial Sequence
  Description of Artificial Sequence: Synthetic oligonucleotide
ggacuacugugggcaccca

SEQ ID NO: 1498333 - RNA, 19 nt, Artificial Sequence
  Description of Artificial Sequence: Synthetic oligonucleotide
ggggaccaaguggcugcaa

SEQ ID NO: 1498334 - RNA, 19 nt, Artificial Sequence
  Description of Artificial Sequence: Synthetic oligonucleotide
ccaccccgucaccuguggu

SEQ ID NO: 1498335 - RNA, 19 nt, Artificial Sequence
  Description of Artificial Sequence: Synthetic oligonucleotide
ccccgucaccugugguugu

SEQ ID NO: 1498336 - RNA, 19 nt, Artificial Sequence
  Description of Artificial Sequence: Synthetic oligonucleotide
uugauucaaaauuacagcg

SEQ ID NO: 1498337 - RNA, 19 nt, Artificial Sequence
  Description of Artificial Sequence: Synthetic oligonucleotide
auagauucuacauccaacc

SEQ ID NO: 1498338 - RNA, 19 nt, Artificial Sequence
  Description of Artificial Sequence: Synthetic oligonucleotide
agugaugcaaaacagcacc

SEQ ID NO: 1498339 - RNA, 19 nt, Artificial Sequence
  Description of Artificial Sequence: Synthetic oligonucleotide
auuuguaugggcuaugaac

SEQ ID NO: 1498340 - RNA, 19 nt, Artificial Sequence
  Description of Artificial Sequence: Synthetic oligonucleotide
uacaauagauucuacaucc

SEQ ID NO: 1498341 - RNA, 19 nt, Artificial Sequence
  Description of Artificial Sequence: Synthetic oligonucleotide
aaaaguacaugcuuccggg

SEQ ID NO: 1498342 - RNA, 19 nt, Artificial Sequence
  Description of Artificial Sequence: Synthetic oligonucleotide
guuuagaugauuuccaagg

SEQ ID NO: 1498343 - RNA, 19 nt, Artificial Sequence
  Description of Artificial Sequence: Synthetic oligonucleotide
uuuguaugggcuaugaaca

SEQ ID NO: 1498344 - RNA, 19 nt, Artificial Sequence
  Description of Artificial Sequence: Synthetic oligonucleotide
uuugauucaaaauuacagc

SEQ ID NO: 1498345 - RNA, 19 nt, Artificial Sequence
  Description of Artificial Sequence: Synthetic oligonucleotide
acaaauuuugcaauaauac

SEQ ID NO: 1498346 - RNA, 19 nt, Artificial Sequence
  Description of Artificial Sequence: Synthetic oligonucleotide
uauaagguuaacaaaauuu

SEQ ID NO: 1498347 - RNA, 19 nt, Artificial Sequence
  Description of Artificial Sequence: Synthetic oligonucleotide
aacuaagugaugcaaaaca

SEQ ID NO: 1498348 - RNA, 19 nt, Artificial Sequence
  Description of Artificial Sequence: Synthetic oligonucleotide
uuugcaauaauacuucccu

SEQ ID NO: 1498349 - RNA, 19 nt, Artificial Sequence
  Description of Artificial Sequence: Synthetic oligonucleotide
acaauugcagagcagguac

SEQ ID NO: 1498350 - RNA, 19 nt, Artificial Sequence
  Description of Artificial Sequence: Synthetic oligonucleotide
ucaaaaguacuuauaaggu

SEQ ID NO: 1498351 - RNA, 19 nt, Artificial Sequence
  Description of Artificial Sequence: Synthetic oligonucleotide
aacaguguggacuuccuag

SEQ ID NO: 1498352 - RNA, 19 nt, Artificial Sequence
  Description of Artificial Sequence: Synthetic oligonucleotide
uuggaagaaggaaauaaag

SEQ ID NO: 1498353 - RNA, 19 nt, Artificial Sequence
  Description of Artificial Sequence: Synthetic oligonucleotide
aucaauagagaggacaggc

SEQ ID NO: 1498354 - RNA, 19 nt, Artificial Sequence
  Description of Artificial Sequence: Synthetic oligonucleotide
gaaaaguacaugcuuccgg

SEQ ID NO: 1498355 - RNA, 19 nt, Artificial Sequence
  Description of Artificial Sequence: Synthetic oligonucleotide
gauucaaaauuacagcgug

SEQ ID NO: 1498356 - RNA, 19 nt, Artificial Sequence
  Description of Artificial Sequence: Synthetic oligonucleotide
uucaaaauuacagcguggg

SEQ ID NO: 1498357 - RNA, 19 nt, Artificial Sequence
  Description of Artificial Sequence: Synthetic oligonucleotide
ugcuuauuaacuaagugau

SEQ ID NO: 1498358 - RNA, 19 nt, Artificial Sequence
  Description of Artificial Sequence: Synthetic oligonucleotide
aggauaugaaacaugauuc

SEQ ID NO: 1498359 - RNA, 19 nt, Artificial Sequence
  Description of Artificial Sequence: Synthetic oligonucleotide
auacaauagauucuacauc

SEQ ID NO: 1498360 - RNA, 19 nt, Artificial Sequence
  Description of Artificial Sequence: Synthetic oligonucleotide
gacucuguaaugaaggagg

SEQ ID NO: 1498361 - RNA, 19 nt, Artificial Sequence
  Description of Artificial Sequence: Synthetic oligonucleotide
aaguaaacuuugcccaugg

SEQ ID NO: 1498362 - RNA, 19 nt, Artificial Sequence
  Description of Artificial Sequence: Synthetic oligonucleotide
auuuugcaauaauacuucc

SEQ ID NO: 1498363 - RNA, 19 nt, Artificial Sequence
  Description of Artificial Sequence: Synthetic oligonucleotide
uuuuccacgcuucauauau

SEQ ID NO: 1498364 - RNA, 19 nt, Artificial Sequence
  Description of Artificial Sequence: Synthetic oligonucleotide
ucuucagugaacugaagca

SEQ ID NO: 1498365 - RNA, 19 nt, Artificial Sequence
  Description of Artificial Sequence: Synthetic oligonucleotide
aaagucacaucuguggcuc

SEQ ID NO: 1498366 - RNA, 19 nt, Artificial Sequence
  Description of Artificial Sequence: Synthetic oligonucleotide
uuuugcaauaauacuuccc

SEQ ID NO: 1498367 - RNA, 19 nt, Artificial Sequence
  Description of Artificial Sequence: Synthetic oligonucleotide
ucuauggugucuaaaucug

SEQ ID NO: 1498368 - RNA, 19 nt, Artificial Sequence
  Description of Artificial Sequence: Synthetic oligonucleotide
gacacuaggcuucugagac

SEQ ID NO: 1498369 - RNA, 19 nt, Artificial Sequence
  Description of Artificial Sequence: Synthetic oligonucleotide
uauuaaagauucuuauacu

SEQ ID NO: 1498370 - RNA, 19 nt, Artificial Sequence
  Description of Artificial Sequence: Synthetic oligonucleotide
agaaaugaaugccuccuuc

SEQ ID NO: 1498371 - RNA, 19 nt, Artificial Sequence
  Description of Artificial Sequence: Synthetic oligonucleotide
aaaaguacuuauaagguua

SEQ ID NO: 1498372 - RNA, 19 nt, Artificial Sequence
  Description of Artificial Sequence: Synthetic oligonucleotide
aacauugugcuuauuaacu

SEQ ID NO: 1498373 - RNA, 19 nt, Artificial Sequence
  Description of Artificial Sequence: Synthetic oligonucleotide
uuacuuuucaugcucaauu

SEQ ID NO: 1498374 - RNA, 19 nt, Artificial Sequence
  Description of Artificial Sequence: Synthetic oligonucleotide
uuaagaagagacuccaaaa

SEQ ID NO: 1498375 - RNA, 19 nt, Artificial Sequence
  Description of Artificial Sequence: Synthetic oligonucleotide
aucuauggugucuaaaucu

SEQ ID NO: 1498376 - RNA, 19 nt, Artificial Sequence
  Description of Artificial Sequence: Synthetic oligonucleotide
aagugcacguuuccguggc

SEQ ID NO: 1498377 - RNA, 19 nt, Artificial Sequence
  Description of Artificial Sequence: Synthetic oligonucleotide
ugauucaaaauuacagcgu

SEQ ID NO: 1498378 - RNA, 19 nt, Artificial Sequence
  Description of Artificial Sequence: Synthetic oligonucleotide
uggcccuugauaucuaugg

SEQ ID NO: 1498379 - RNA, 19 nt, Artificial Sequence
  Description of Artificial Sequence: Synthetic oligonucleotide
uuaacuaagugaugcaaaa

SEQ ID NO: 1498380 - RNA, 19 nt, Artificial Sequence
  Description of Artificial Sequence: Synthetic oligonucleotide
aaagugcacguuuccgugg

SEQ ID NO: 1498381 - RNA, 19 nt, Artificial Sequence
  Description of Artificial Sequence: Synthetic oligonucleotide
acaagcuugaguuuggcaa

SEQ ID NO: 1498382 - RNA, 19 nt, Artificial Sequence
  Description of Artificial Sequence: Synthetic oligonucleotide
agauucuacauccaaccug

SEQ ID NO: 1498383 - RNA, 19 nt, Artificial Sequence
  Description of Artificial Sequence: Synthetic oligonucleotide
ucuuaaagccucuugggaa

SEQ ID NO: 1498384 - RNA, 19 nt, Artificial Sequence
  Description of Artificial Sequence: Synthetic oligonucleotide
accacacuaucacauuugc

SEQ ID NO: 1498385 - RNA, 19 nt, Artificial Sequence
  Description of Artificial Sequence: Synthetic oligonucleotide
uucuuaaagccucuuggga

SEQ ID NO: 1498386 - RNA, 19 nt, Artificial Sequence
  Description of Artificial Sequence: Synthetic oligonucleotide
ugaacauugugcuuauuaa

SEQ ID NO: 1498387 - RNA, 19 nt, Artificial Sequence
  Description of Artificial Sequence: Synthetic oligonucleotide
uccaauggugauucaagag

SEQ ID NO: 1498388 - RNA, 19 nt, Artificial Sequence
  Description of Artificial Sequence: Synthetic oligonucleotide
uucaacaagcuugaguuug

SEQ ID NO: 1498389 - RNA, 19 nt, Artificial Sequence
  Description of Artificial Sequence: Synthetic oligonucleotide
auaucuauggugucuaaau

SEQ ID NO: 1498390 - RNA, 19 nt, Artificial Sequence
  Description of Artificial Sequence: Synthetic oligonucleotide
gugcuuauuaacuaaguga

SEQ ID NO: 1498391 - RNA, 19 nt, Artificial Sequence
  Description of Artificial Sequence: Synthetic oligonucleotide
uuagaugauuuccaagguc

SEQ ID NO: 1498392 - RNA, 19 nt, Artificial Sequence
  Description of Artificial Sequence: Synthetic oligonucleotide
uuauuaacuaagugaugca

SEQ ID NO: 1498393 - RNA, 19 nt, Artificial Sequence
  Description of Artificial Sequence: Synthetic oligonucleotide
ugauucaagagcuuccauc

SEQ ID NO: 1498394 - RNA, 19 nt, Artificial Sequence
  Description of Artificial Sequence: Synthetic oligonucleotide
uuggguguagccagaagcc

SEQ ID NO: 1498395 - RNA, 19 nt, Artificial Sequence
  Description of Artificial Sequence: Synthetic oligonucleotide
auuaugccggcuuugacaa

SEQ ID NO: 1498396 - RNA, 19 nt, Artificial Sequence
  Description of Artificial Sequence: Synthetic oligonucleotide
uguuugaaagucacaucug

SEQ ID NO: 1498397 - RNA, 19 nt, Artificial Sequence
  Description of Artificial Sequence: Synthetic oligonucleotide
agugauggcagggaauggc

SEQ ID NO: 1498398 - RNA, 19 nt, Artificial Sequence
  Description of Artificial Sequence: Synthetic oligonucleotide
acugcuacugagcucagca

SEQ ID NO: 1498399 - RNA, 19 nt, Artificial Sequence
  Description of Artificial Sequence: Synthetic oligonucleotide
uacaugaagaaagaggaua

SEQ ID NO: 1498400 - RNA, 19 nt, Artificial Sequence
  Description of Artificial Sequence: Synthetic oligonucleotide
cuaggcucagcaucaauag

SEQ ID NO: 1498401 - RNA, 19 nt, Artificial Sequence
  Description of Artificial Sequence: Synthetic oligonucleotide
uacagcgugggcauuuaag

SEQ ID NO: 1498402 - RNA, 19 nt, Artificial Sequence
  Description of Artificial Sequence: Synthetic oligonucleotide
acuaagugaugcaaaacag

SEQ ID NO: 1498403 - RNA, 19 nt, Artificial Sequence
  Description of Artificial Sequence: Synthetic oligonucleotide
ugcaauaauacuucccuuu

SEQ ID NO: 1498404 - RNA, 19 nt, Artificial Sequence
  Description of Artificial Sequence: Synthetic oligonucleotide
uauuaacuaagugaugcaa

SEQ ID NO: 1498405 - RNA, 19 nt, Artificial Sequence
  Description of Artificial Sequence: Synthetic oligonucleotide
uccucacuaagcucagugg

SEQ ID NO: 1498406 - RNA, 19 nt, Artificial Sequence
  Description of Artificial Sequence: Synthetic oligonucleotide
ucaauagagaggacaggcu

SEQ ID NO: 1498407 - RNA, 19 nt, Artificial Sequence
  Description of Artificial Sequence: Synthetic oligonucleotide
uaucuauggugucuaaauc

SEQ ID NO: 1498408 - RNA, 19 nt, Artificial Sequence
  Description of Artificial Sequence: Synthetic oligonucleotide
aagugaugcaaaacagcac

SEQ ID NO: 1498409 - RNA, 19 nt, Artificial Sequence
  Description of Artificial Sequence: Synthetic oligonucleotide
ucagggaaaaguacaugcu

SEQ ID NO: 1498410 - RNA, 19 nt, Artificial Sequence
  Description of Artificial Sequence: Synthetic oligonucleotide
augaacauugugcuuauua

SEQ ID NO: 1498411 - RNA, 19 nt, Artificial Sequence
  Description of Artificial Sequence: Synthetic oligonucleotide
cacgcuucauauauuuugc

SEQ ID NO: 1498412 - RNA, 19 nt, Artificial Sequence
  Description of Artificial Sequence: Synthetic oligonucleotide
gauguacucacugcuacug

SEQ ID NO: 1498413 - RNA, 19 nt, Artificial Sequence
  Description of Artificial Sequence: Synthetic oligonucleotide
ugauucaaaaguacuuaua

SEQ ID NO: 1498414 - RNA, 19 nt, Artificial Sequence
  Description of Artificial Sequence: Synthetic oligonucleotide
aggcuauucaacaagcuug

SEQ ID NO: 1498415 - RNA, 19 nt, Artificial Sequence
  Description of Artificial Sequence: Synthetic oligonucleotide
acaaugaguuaaauguuuc

SEQ ID NO: 1498416 - RNA, 19 nt, Artificial Sequence
  Description of Artificial Sequence: Synthetic oligonucleotide
gucccgaugucgcugaagg

SEQ ID NO: 1498417 - RNA, 19 nt, Artificial Sequence
  Description of Artificial Sequence: Synthetic oligonucleotide
agcagguuuagaugauuuc

SEQ ID NO: 1498418 - RNA, 19 nt, Artificial Sequence
  Description of Artificial Sequence: Synthetic oligonucleotide
acagcgugggcauuuaagu

SEQ ID NO: 1498419 - RNA, 19 nt, Artificial Sequence
  Description of Artificial Sequence: Synthetic oligonucleotide
agcaucaauagagaggaca

SEQ ID NO: 1498420 - RNA, 19 nt, Artificial Sequence
  Description of Artificial Sequence: Synthetic oligonucleotide
augaguuaaauguuucuua

SEQ ID NO: 1498421 - RNA, 19 nt, Artificial Sequence
  Description of Artificial Sequence: Synthetic oligonucleotide
aauugcagagcagguacug

SEQ ID NO: 1498422 - RNA, 19 nt, Artificial Sequence
  Description of Artificial Sequence: Synthetic oligonucleotide
uagauucuacauccaaccu

SEQ ID NO: 1498423 - RNA, 19 nt, Artificial Sequence
  Description of Artificial Sequence: Synthetic oligonucleotide
cucagaaaugaaugccucc

SEQ ID NO: 1498424 - RNA, 19 nt, Artificial Sequence
  Description of Artificial Sequence: Synthetic oligonucleotide
uuaaguaaacuuugcccau

SEQ ID NO: 1498425 - RNA, 19 nt, Artificial Sequence
  Description of Artificial Sequence: Synthetic oligonucleotide
uguaaugaaggaggacuag

SEQ ID NO: 1498426 - RNA, 19 nt, Artificial Sequence
  Description of Artificial Sequence: Synthetic oligonucleotide
uccaaggucccgaugucgc

SEQ ID NO: 1498427 - RNA, 19 nt, Artificial Sequence
  Description of Artificial Sequence: Synthetic oligonucleotide
gaggauaugaaacaugauu

SEQ ID NO: 1498428 - RNA, 19 nt, Artificial Sequence
  Description of Artificial Sequence: Synthetic oligonucleotide
uggcacgacagcaacaaau

SEQ ID NO: 1498429 - RNA, 19 nt, Artificial Sequence
  Description of Artificial Sequence: Synthetic oligonucleotide
ugucugaggucaccuuugg

SEQ ID NO: 1498430 - RNA, 19 nt, Artificial Sequence
  Description of Artificial Sequence: Synthetic oligonucleotide
uucauauauuuugcaaucu

SEQ ID NO: 1498431 - RNA, 19 nt, Artificial Sequence
  Description of Artificial Sequence: Synthetic oligonucleotide
ccaauggugauucaagagc

SEQ ID NO: 1498432 - RNA, 19 nt, Artificial Sequence
  Description of Artificial Sequence: Synthetic oligonucleotide
acuacucaucuccauuuug

SEQ ID NO: 1498433 - RNA, 19 nt, Artificial Sequence
  Description of Artificial Sequence: Synthetic oligonucleotide
guaugggcuaugaacauug

SEQ ID NO: 1498434 - RNA, 19 nt, Artificial Sequence
  Description of Artificial Sequence: Synthetic oligonucleotide
ugcucaauucucaaaccau

SEQ ID NO: 1498435 - RNA, 19 nt, Artificial Sequence
  Description of Artificial Sequence: Synthetic oligonucleotide
acgacagcaacaaauuuug

SEQ ID NO: 1498436 - RNA, 19 nt, Artificial Sequence
  Description of Artificial Sequence: Synthetic oligonucleotide
cauuaugccggcuuugaca

SEQ ID NO: 1498437 - RNA, 19 nt, Artificial Sequence
  Description of Artificial Sequence: Synthetic oligonucleotide
aaguacuuauaagguuaac

SEQ ID NO: 1498438 - RNA, 19 nt, Artificial Sequence
  Description of Artificial Sequence: Synthetic oligonucleotide
uaggcuauucaacaagcuu

SEQ ID NO: 1498439 - RNA, 19 nt, Artificial Sequence
  Description of Artificial Sequence: Synthetic oligonucleotide
gauggggauggcuuccgag

SEQ ID NO: 1498440 - RNA, 19 nt, Artificial Sequence
  Description of Artificial Sequence: Synthetic oligonucleotide
uccgagacucaggagaugc

SEQ ID NO: 1498441 - RNA, 19 nt, Artificial Sequence
  Description of Artificial Sequence: Synthetic oligonucleotide
agaugauuuccaagguccc

SEQ ID NO: 1498442 - RNA, 19 nt, Artificial Sequence
  Description of Artificial Sequence: Synthetic oligonucleotide
gguuuagaugauuuccaag

SEQ ID NO: 1498443 - RNA, 19 nt, Artificial Sequence
  Description of Artificial Sequence: Synthetic oligonucleotide
caugcuuccgggacucugg

SEQ ID NO: 1498444 - RNA, 19 nt, Artificial Sequence
  Description of Artificial Sequence: Synthetic oligonucleotide
cuagguccaggagaaauag

SEQ ID NO: 1498445 - RNA, 19 nt, Artificial Sequence
  Description of Artificial Sequence: Synthetic oligonucleotide
uuucuaggcuauucaacaa

SEQ ID NO: 1498446 - RNA, 19 nt, Artificial Sequence
  Description of Artificial Sequence: Synthetic oligonucleotide
aguacaugcuuccgggacu

SEQ ID NO: 1498447 - RNA, 19 nt, Artificial Sequence
  Description of Artificial Sequence: Synthetic oligonucleotide
accuguucuuggucgcugc

SEQ ID NO: 1498448 - RNA, 19 nt, Artificial Sequence
  Description of Artificial Sequence: Synthetic oligonucleotide
uugcccaugggcugcuacg

SEQ ID NO: 1498449 - RNA, 19 nt, Artificial Sequence
  Description of Artificial Sequence: Synthetic oligonucleotide
auaugaaacaugauucaaa

SEQ ID NO: 1498450 - RNA, 19 nt, Artificial Sequence
  Description of Artificial Sequence: Synthetic oligonucleotide
gaaaugaaugccuccuucu

SEQ ID NO: 1498451 - RNA, 19 nt, Artificial Sequence
  Description of Artificial Sequence: Synthetic oligonucleotide
agcauccgaguucucuugg

SEQ ID NO: 1498452 - RNA, 19 nt, Artificial Sequence
  Description of Artificial Sequence: Synthetic oligonucleotide
uggcuuccgagacucagga

SEQ ID NO: 1498453 - RNA, 19 nt, Artificial Sequence
  Description of Artificial Sequence: Synthetic oligonucleotide
auucaagagcuuccaucag

SEQ ID NO: 1498454 - RNA, 19 nt, Artificial Sequence
  Description of Artificial Sequence: Synthetic oligonucleotide
ucugaagugauggcaggga

SEQ ID NO: 1498455 - RNA, 19 nt, Artificial Sequence
  Description of Artificial Sequence: Synthetic oligonucleotide
uccgaguucucuuggcugu

SEQ ID NO: 1498456 - RNA, 19 nt, Artificial Sequence
  Description of Artificial Sequence: Synthetic oligonucleotide
uucauuaugccggcuuuga

SEQ ID NO: 1498457 - RNA, 19 nt, Artificial Sequence
  Description of Artificial Sequence: Synthetic oligonucleotide
ucauuaugccggcuuugac

SEQ ID NO: 1498458 - RNA, 19 nt, Artificial Sequence
  Description of Artificial Sequence: Synthetic oligonucleotide
caauaauacuucccuuuuc

SEQ ID NO: 1498459 - RNA, 19 nt, Artificial Sequence
  Description of Artificial Sequence: Synthetic oligonucleotide
ggauaugaaacaugauuca

SEQ ID NO: 1498460 - RNA, 19 nt, Artificial Sequence
  Description of Artificial Sequence: Synthetic oligonucleotide
aacaauugcagagcaggua

SEQ ID NO: 1498461 - RNA, 19 nt, Artificial Sequence
  Description of Artificial Sequence: Synthetic oligonucleotide
gagaagcauguuuccgugc

SEQ ID NO: 1498462 - RNA, 19 nt, Artificial Sequence
  Description of Artificial Sequence: Synthetic oligonucleotide
agcauguuuccgugccucg

SEQ ID NO: 1498463 - RNA, 19 nt, Artificial Sequence
  Description of Artificial Sequence: Synthetic oligonucleotide
cuuaaagccucuugggaaa

SEQ ID NO: 1498464 - RNA, 19 nt, Artificial Sequence
  Description of Artificial Sequence: Synthetic oligonucleotide
aauuacagcgugggcauuu

SEQ ID NO: 1498465 - RNA, 19 nt, Artificial Sequence
  Description of Artificial Sequence: Synthetic oligonucleotide
ugucuaaaucuguucugau

SEQ ID NO: 1498466 - RNA, 19 nt, Artificial Sequence
  Description of Artificial Sequence: Synthetic oligonucleotide
caucaauagagaggacagg

SEQ ID NO: 1498467 - RNA, 19 nt, Artificial Sequence
  Description of Artificial Sequence: Synthetic oligonucleotide
gguacuguuugaaagucac

SEQ ID NO: 1498468 - RNA, 19 nt, Artificial Sequence
  Description of Artificial Sequence: Synthetic oligonucleotide
auagauggagcagguuuag

SEQ ID NO: 1498469 - RNA, 19 nt, Artificial Sequence
  Description of Artificial Sequence: Synthetic oligonucleotide
acuaagcucaguggccuuc

SEQ ID NO: 1498470 - RNA, 19 nt, Artificial Sequence
  Description of Artificial Sequence: Synthetic oligonucleotide
gcuuccgagacucaggaga

SEQ ID NO: 1498471 - RNA, 19 nt, Artificial Sequence
  Description of Artificial Sequence: Synthetic oligonucleotide
agcagauuuggggagcuca

SEQ ID NO: 1498472 - RNA, 19 nt, Artificial Sequence
  Description of Artificial Sequence: Synthetic oligonucleotide
gucgcugcuugacuccugg

SEQ ID NO: 1498473 - RNA, 19 nt, Artificial Sequence
  Description of Artificial Sequence: Synthetic oligonucleotide
gaccacacuaucacauuug

SEQ ID NO: 1498474 - RNA, 19 nt, Artificial Sequence
  Description of Artificial Sequence: Synthetic oligonucleotide
gauuuccaaggucccgaug

SEQ ID NO: 1498475 - RNA, 19 nt, Artificial Sequence
  Description of Artificial Sequence: Synthetic oligonucleotide
ucgcugaaggacuggauuu

SEQ ID NO: 1498476 - RNA, 19 nt, Artificial Sequence
  Description of Artificial Sequence: Synthetic oligonucleotide
ggugucuaaaucuguucug

SEQ ID NO: 1498477 - RNA, 19 nt, Artificial Sequence
  Description of Artificial Sequence: Synthetic oligonucleotide
uucccuuuuccacgcuuca

SEQ ID NO: 1498478 - RNA, 19 nt, Artificial Sequence
  Description of Artificial Sequence: Synthetic oligonucleotide
ccucacuaagcucaguggc

SEQ ID NO: 1498479 - RNA, 19 nt, Artificial Sequence
  Description of Artificial Sequence: Synthetic oligonucleotide
uuguaugggcuaugaacau

SEQ ID NO: 1498480 - RNA, 19 nt, Artificial Sequence
  Description of Artificial Sequence: Synthetic oligonucleotide
gauaucuauggugucuaaa

SEQ ID NO: 1498481 - RNA, 19 nt, Artificial Sequence
  Description of Artificial Sequence: Synthetic oligonucleotide
agcgggaaggacuguuuug

SEQ ID NO: 1498482 - RNA, 19 nt, Artificial Sequence
  Description of Artificial Sequence: Synthetic oligonucleotide
ggagaagcauguuuccgug

SEQ ID NO: 1498483 - RNA, 19 nt, Artificial Sequence
  Description of Artificial Sequence: Synthetic oligonucleotide
uugcaauaauacuucccuu

SEQ ID NO: 1498484 - RNA, 19 nt, Artificial Sequence
  Description of Artificial Sequence: Synthetic oligonucleotide
uuuccaaggucccgauguc

SEQ ID NO: 1498485 - RNA, 19 nt, Artificial Sequence
  Description of Artificial Sequence: Synthetic oligonucleotide
acgcuucauauauuuugca

SEQ ID NO: 1498486 - RNA, 19 nt, Artificial Sequence
  Description of Artificial Sequence: Synthetic oligonucleotide
aggacuacucaucuccauu

SEQ ID NO: 1498487 - RNA, 19 nt, Artificial Sequence
  Description of Artificial Sequence: Synthetic oligonucleotide
aagcgggaaggacuguuuu

SEQ ID NO: 1498488 - RNA, 19 nt, Artificial Sequence
  Description of Artificial Sequence: Synthetic oligonucleotide
gcccuugauaucuauggug

SEQ ID NO: 1498489 - RNA, 19 nt, Artificial Sequence
  Description of Artificial Sequence: Synthetic oligonucleotide
auguacucacugcuacuga

SEQ ID NO: 1498490 - RNA, 19 nt, Artificial Sequence
  Description of Artificial Sequence: Synthetic oligonucleotide
cacaaauugugcauuugua

SEQ ID NO: 1498491 - RNA, 19 nt, Artificial Sequence
  Description of Artificial Sequence: Synthetic oligonucleotide
uguuuccgugccucgggga

SEQ ID NO: 1498492 - RNA, 19 nt, Artificial Sequence
  Description of Artificial Sequence: Synthetic oligonucleotide
gacuccuggcccuugauau

SEQ ID NO: 1498493 - RNA, 19 nt, Artificial Sequence
  Description of Artificial Sequence: Synthetic oligonucleotide
ggaaacaguguggacuucc

SEQ ID NO: 1498494 - RNA, 19 nt, Artificial Sequence
  Description of Artificial Sequence: Synthetic oligonucleotide
aaccuguucuuggucgcug

SEQ ID NO: 1498495 - RNA, 19 nt, Artificial Sequence
  Description of Artificial Sequence: Synthetic oligonucleotide
ugauaucuauggugucuaa

SEQ ID NO: 1498496 - RNA, 19 nt, Artificial Sequence
  Description of Artificial Sequence: Synthetic oligonucleotide
cuacucaucuccauuuugu

SEQ ID NO: 1498497 - RNA, 19 nt, Artificial Sequence
  Description of Artificial Sequence: Synthetic oligonucleotide
caggcuuccauaugucuga

SEQ ID NO: 1498498 - RNA, 19 nt, Artificial Sequence
  Description of Artificial Sequence: Synthetic oligonucleotide
uggcucaggagaagcggga

SEQ ID NO: 1498499 - RNA, 19 nt, Artificial Sequence
  Description of Artificial Sequence: Synthetic oligonucleotide
gcuaugaacauugugcuua

SEQ ID NO: 1498500 - RNA, 19 nt, Artificial Sequence
  Description of Artificial Sequence: Synthetic oligonucleotide
ugauuuccaaggucccgau

SEQ ID NO: 1498501 - RNA, 19 nt, Artificial Sequence
  Description of Artificial Sequence: Synthetic oligonucleotide
gcgggaaggacuguuuugg

SEQ ID NO: 1498502 - RNA, 19 nt, Artificial Sequence
  Description of Artificial Sequence: Synthetic oligonucleotide
ugacuccuggcccuugaua

SEQ ID NO: 1498503 - RNA, 19 nt, Artificial Sequence
  Description of Artificial Sequence: Synthetic oligonucleotide
cagguacuguuugaaaguc

SEQ ID NO: 1498504 - RNA, 19 nt, Artificial Sequence
  Description of Artificial Sequence: Synthetic oligonucleotide
gcuacugagcucagcaucc

SEQ ID NO: 1498505 - RNA, 19 nt, Artificial Sequence
  Description of Artificial Sequence: Synthetic oligonucleotide
uguaugggcuaugaacauu

SEQ ID NO: 1498506 - RNA, 19 nt, Artificial Sequence
  Description of Artificial Sequence: Synthetic oligonucleotide
ggugauacugcuggggcug

SEQ ID NO: 1498507 - RNA, 19 nt, Artificial Sequence
  Description of Artificial Sequence: Synthetic oligonucleotide
ugaugcaaaacagcaccuu

SEQ ID NO: 1498508 - RNA, 19 nt, Artificial Sequence
  Description of Artificial Sequence: Synthetic oligonucleotide
uucuuggucgcugcuugac

SEQ ID NO: 1498509 - RNA, 19 nt, Artificial Sequence
  Description of Artificial Sequence: Synthetic oligonucleotide
auggcuuccgagacucagg

SEQ ID NO: 1498510 - RNA, 19 nt, Artificial Sequence
  Description of Artificial Sequence: Synthetic oligonucleotide
ucugagcaucagagaacac

SEQ ID NO: 1498511 - RNA, 19 nt, Artificial Sequence
  Description of Artificial Sequence: Synthetic oligonucleotide
ucugggaaaagugcacguu

SEQ ID NO: 1498512 - RNA, 19 nt, Artificial Sequence
  Description of Artificial Sequence: Synthetic oligonucleotide
auugcagagcagguacugu

SEQ ID NO: 1498513 - RNA, 19 nt, Artificial Sequence
  Description of Artificial Sequence: Synthetic oligonucleotide
cuugauaucuauggugucu

SEQ ID NO: 1498514 - RNA, 19 nt, Artificial Sequence
  Description of Artificial Sequence: Synthetic oligonucleotide
acucuguaaugaaggagga

SEQ ID NO: 1498515 - RNA, 19 nt, Artificial Sequence
  Description of Artificial Sequence: Synthetic oligonucleotide
caggaaccuggugauacug

SEQ ID NO: 1498516 - RNA, 19 nt, Artificial Sequence
  Description of Artificial Sequence: Synthetic oligonucleotide
uuuccgugccucggggaag

SEQ ID NO: 1498517 - RNA, 19 nt, Artificial Sequence
  Description of Artificial Sequence: Synthetic oligonucleotide
ucccacaaauugugcauuu

SEQ ID NO: 1498518 - RNA, 19 nt, Artificial Sequence
  Description of Artificial Sequence: Synthetic oligonucleotide
caacaagcuugaguuuggc

SEQ ID NO: 1498519 - RNA, 19 nt, Artificial Sequence
  Description of Artificial Sequence: Synthetic oligonucleotide
acacuaggcuucugagacu

SEQ ID NO: 1498520 - RNA, 19 nt, Artificial Sequence
  Description of Artificial Sequence: Synthetic oligonucleotide
uccguggcucugaagugau

SEQ ID NO: 1498521 - RNA, 19 nt, Artificial Sequence
  Description of Artificial Sequence: Synthetic oligonucleotide
cucuguaaugaaggaggac

SEQ ID NO: 1498522 - RNA, 19 nt, Artificial Sequence
  Description of Artificial Sequence: Synthetic oligonucleotide
uuuccacgcuucauauauu

SEQ ID NO: 1498523 - RNA, 19 nt, Artificial Sequence
  Description of Artificial Sequence: Synthetic oligonucleotide
uggagcagguuuagaugau

SEQ ID NO: 1498524 - RNA, 19 nt, Artificial Sequence
  Description of Artificial Sequence: Synthetic oligonucleotide
aauggugauucaagagcuu

SEQ ID NO: 1498525 - RNA, 19 nt, Artificial Sequence
  Description of Artificial Sequence: Synthetic oligonucleotide
uggaccacacuaucacauu

SEQ ID NO: 1498526 - RNA, 19 nt, Artificial Sequence
  Description of Artificial Sequence: Synthetic oligonucleotide
uggacugcucaggacuacu

SEQ ID NO: 1498527 - RNA, 19 nt, Artificial Sequence
  Description of Artificial Sequence: Synthetic oligonucleotide
guuuccgugccucggggaa

SEQ ID NO: 1498528 - RNA, 19 nt, Artificial Sequence
  Description of Artificial Sequence: Synthetic oligonucleotide
acuagguccaggagaaaua

SEQ ID NO: 1498529 - RNA, 19 nt, Artificial Sequence
  Description of Artificial Sequence: Synthetic oligonucleotide
uccuaggcucagcaucaau

SEQ ID NO: 1498530 - RNA, 19 nt, Artificial Sequence
  Description of Artificial Sequence: Synthetic oligonucleotide
cgugccucggggaagacac

SEQ ID NO: 1498531 - RNA, 19 nt, Artificial Sequence
  Description of Artificial Sequence: Synthetic oligonucleotide
acagcagauuuggggagcu

SEQ ID NO: 1498532 - RNA, 19 nt, Artificial Sequence
  Description of Artificial Sequence: Synthetic oligonucleotide
acuggauuuccaaggccga

SEQ ID NO: 1498533 - RNA, 19 nt, Artificial Sequence
  Description of Artificial Sequence: Synthetic oligonucleotide
ucccgaugucgcugaagga

SEQ ID NO: 1498534 - RNA, 19 nt, Artificial Sequence
  Description of Artificial Sequence: Synthetic oligonucleotide
agguacuguuugaaaguca

SEQ ID NO: 1498535 - RNA, 19 nt, Artificial Sequence
  Description of Artificial Sequence: Synthetic oligonucleotide
ugcccaugggcugcuacgu

SEQ ID NO: 1498536 - RNA, 19 nt, Artificial Sequence
  Description of Artificial Sequence: Synthetic oligonucleotide
ucacugcuacugagcucag

SEQ ID NO: 1498537 - RNA, 19 nt, Artificial Sequence
  Description of Artificial Sequence: Synthetic oligonucleotide
ggcuauucaacaagcuuga

SEQ ID NO: 1498538 - RNA, 19 nt, Artificial Sequence
  Description of Artificial Sequence: Synthetic oligonucleotide
gcaacaaauuuugcaauaa

SEQ ID NO: 1498539 - RNA, 19 nt, Artificial Sequence
  Description of Artificial Sequence: Synthetic oligonucleotide
cuggaccacacuaucacau

SEQ ID NO: 1498540 - RNA, 19 nt, Artificial Sequence
  Description of Artificial Sequence: Synthetic oligonucleotide
gcucaggagaagcgggaag

SEQ ID NO: 1498541 - RNA, 19 nt, Artificial Sequence
  Description of Artificial Sequence: Synthetic oligonucleotide
augucgcugaaggacugga

SEQ ID NO: 1498542 - RNA, 19 nt, Artificial Sequence
  Description of Artificial Sequence: Synthetic oligonucleotide
uucuuggguguagccagaa

SEQ ID NO: 1498543 - RNA, 19 nt, Artificial Sequence
  Description of Artificial Sequence: Synthetic oligonucleotide
agaggauaugaaacaugau

SEQ ID NO: 1498544 - RNA, 19 nt, Artificial Sequence
  Description of Artificial Sequence: Synthetic oligonucleotide
agaagcgggaaggacuguu

SEQ ID NO: 1498545 - RNA, 19 nt, Artificial Sequence
  Description of Artificial Sequence: Synthetic oligonucleotide
uuccgugccucggggaaga

SEQ ID NO: 1498546 - RNA, 19 nt, Artificial Sequence
  Description of Artificial Sequence: Synthetic oligonucleotide
aaauuacagcgugggcauu

SEQ ID NO: 1498547 - RNA, 19 nt, Artificial Sequence
  Description of Artificial Sequence: Synthetic oligonucleotide
ccucggggaagacacuagg

SEQ ID NO: 1498548 - RNA, 19 nt, Artificial Sequence
  Description of Artificial Sequence: Synthetic oligonucleotide
ccaaccuguucuuggucgc

SEQ ID NO: 1498549 - RNA, 19 nt, Artificial Sequence
  Description of Artificial Sequence: Synthetic oligonucleotide
cauaugucugaggucaccu

SEQ ID NO: 1498550 - RNA, 19 nt, Artificial Sequence
  Description of Artificial Sequence: Synthetic oligonucleotide
uccgggacucugggaaaag

SEQ ID NO: 1498551 - RNA, 19 nt, Artificial Sequence
  Description of Artificial Sequence: Synthetic oligonucleotide
gcauguuuccgugccucgg

SEQ ID NO: 1498552 - RNA, 19 nt, Artificial Sequence
  Description of Artificial Sequence: Synthetic oligonucleotide
uuccgggacucugggaaaa

SEQ ID NO: 1498553 - RNA, 19 nt, Artificial Sequence
  Description of Artificial Sequence: Synthetic oligonucleotide
ccggcuuugacaaugaguu

SEQ ID NO: 1498554 - RNA, 19 nt, Artificial Sequence
  Description of Artificial Sequence: Synthetic oligonucleotide
uuggacugcucaggacuac

SEQ ID NO: 1498555 - RNA, 19 nt, Artificial Sequence
  Description of Artificial Sequence: Synthetic oligonucleotide
agugcacguuuccguggcu

SEQ ID NO: 1498556 - RNA, 19 nt, Artificial Sequence
  Description of Artificial Sequence: Synthetic oligonucleotide
uuccgagacucaggagaug

SEQ ID NO: 1498557 - RNA, 19 nt, Artificial Sequence
  Description of Artificial Sequence: Synthetic oligonucleotide
gucgcugaaggacuggauu

SEQ ID NO: 1498558 - RNA, 19 nt, Artificial Sequence
  Description of Artificial Sequence: Synthetic oligonucleotide
caggaaacaguguggacuu

SEQ ID NO: 1498559 - RNA, 19 nt, Artificial Sequence
  Description of Artificial Sequence: Synthetic oligonucleotide
ggaaccuggugauacugcu

SEQ ID NO: 1498560 - RNA, 19 nt, Artificial Sequence
  Description of Artificial Sequence: Synthetic oligonucleotide
guggacuuccuaggcucag

SEQ ID NO: 1498561 - RNA, 19 nt, Artificial Sequence
  Description of Artificial Sequence: Synthetic oligonucleotide
cauccaaccuguucuuggu

SEQ ID NO: 1498562 - RNA, 19 nt, Artificial Sequence
  Description of Artificial Sequence: Synthetic oligonucleotide
cuuccgagacucaggagau

SEQ ID NO: 1498563 - RNA, 19 nt, Artificial Sequence
  Description of Artificial Sequence: Synthetic oligonucleotide
ucccuuuuccacgcuucau

SEQ ID NO: 1498564 - RNA, 19 nt, Artificial Sequence
  Description of Artificial Sequence: Synthetic oligonucleotide
auuacagcgugggcauuua

SEQ ID NO: 1498565 - RNA, 19 nt, Artificial Sequence
  Description of Artificial Sequence: Synthetic oligonucleotide
uuaugccggcuuugacaau

SEQ ID NO: 1498566 - RNA, 19 nt, Artificial Sequence
  Description of Artificial Sequence: Synthetic oligonucleotide
caauugcagagcagguacu

SEQ ID NO: 1498567 - RNA, 19 nt, Artificial Sequence
  Description of Artificial Sequence: Synthetic oligonucleotide
auggcacgacagcaacaaa

SEQ ID NO: 1498568 - RNA, 19 nt, Artificial Sequence
  Description of Artificial Sequence: Synthetic oligonucleotide
gacuacucaucuccauuuu

SEQ ID NO: 1498569 - RNA, 19 nt, Artificial Sequence
  Description of Artificial Sequence: Synthetic oligonucleotide
gugaugcaaaacagcaccu

SEQ ID NO: 1498570 - RNA, 19 nt, Artificial Sequence
  Description of Artificial Sequence: Synthetic oligonucleotide
gcaauaauacuucccuuuu

SEQ ID NO: 1498571 - RNA, 19 nt, Artificial Sequence
  Description of Artificial Sequence: Synthetic oligonucleotide
cauccgaguucucuuggcu

SEQ ID NO: 1498572 - RNA, 19 nt, Artificial Sequence
  Description of Artificial Sequence: Synthetic oligonucleotide
gcuauucaacaagcuugag

SEQ ID NO: 1498573 - RNA, 19 nt, Artificial Sequence
  Description of Artificial Sequence: Synthetic oligonucleotide
ggacuacucaucuccauuu

SEQ ID NO: 1498574 - RNA, 19 nt, Artificial Sequence
  Description of Artificial Sequence: Synthetic oligonucleotide
cacugcuacugagcucagc

SEQ ID NO: 1498575 - RNA, 19 nt, Artificial Sequence
  Description of Artificial Sequence: Synthetic oligonucleotide
ggcuuccgagacucaggag

SEQ ID NO: 1498576 - RNA, 19 nt, Artificial Sequence
  Description of Artificial Sequence: Synthetic oligonucleotide
uuccaaggccgaggagaac

SEQ ID NO: 1498577 - RNA, 19 nt, Artificial Sequence
  Description of Artificial Sequence: Synthetic oligonucleotide
ccacacuaucacauuugca

SEQ ID NO: 1498578 - RNA, 19 nt, Artificial Sequence
  Description of Artificial Sequence: Synthetic oligonucleotide
augccggcuuugacaauga

SEQ ID NO: 1498579 - RNA, 19 nt, Artificial Sequence
  Description of Artificial Sequence: Synthetic oligonucleotide
ggacugcucaggacuacuc

SEQ ID NO: 1498580 - RNA, 19 nt, Artificial Sequence
  Description of Artificial Sequence: Synthetic oligonucleotide
gaagcgggaaggacuguuu

SEQ ID NO: 1498581 - RNA, 19 nt, Artificial Sequence
  Description of Artificial Sequence: Synthetic oligonucleotide
gugcauuuguaugggcuau

SEQ ID NO: 1498582 - RNA, 19 nt, Artificial Sequence
  Description of Artificial Sequence: Synthetic oligonucleotide
ggcccuugauaucuauggu

SEQ ID NO: 1498583 - RNA, 19 nt, Artificial Sequence
  Description of Artificial Sequence: Synthetic oligonucleotide
ggcacgacagcaacaaauu

SEQ ID NO: 1498584 - RNA, 19 nt, Artificial Sequence
  Description of Artificial Sequence: Synthetic oligonucleotide
cugcuacugagcucagcau

SEQ ID NO: 1498585 - RNA, 19 nt, Artificial Sequence
  Description of Artificial Sequence: Synthetic oligonucleotide
ggcuaugaacauugugcuu

SEQ ID NO: 1498586 - RNA, 19 nt, Artificial Sequence
  Description of Artificial Sequence: Synthetic oligonucleotide
ccgaggagaaccagguggu

SEQ ID NO: 1498587 - RNA, 19 nt, Artificial Sequence
  Description of Artificial Sequence: Synthetic oligonucleotide
gcacgacagcaacaaauuu

SEQ ID NO: 1498588 - RNA, 19 nt, Artificial Sequence
  Description of Artificial Sequence: Synthetic oligonucleotide
aggucccgaugucgcugaa

SEQ ID NO: 1498589 - RNA, 19 nt, Artificial Sequence
  Description of Artificial Sequence: Synthetic oligonucleotide
caaccuguucuuggucgcu

SEQ ID NO: 1498590 - RNA, 19 nt, Artificial Sequence
  Description of Artificial Sequence: Synthetic oligonucleotide
gguguagccagaagcccuu

SEQ ID NO: 1498591 - RNA, 19 nt, Artificial Sequence
  Description of Artificial Sequence: Synthetic oligonucleotide
ggagcagguuuagaugauu

SEQ ID NO: 1498592 - RNA, 19 nt, Artificial Sequence
  Description of Artificial Sequence: Synthetic oligonucleotide
cacuaagcucaguggccuu

SEQ ID NO: 1498593 - RNA, 19 nt, Artificial Sequence
  Description of Artificial Sequence: Synthetic oligonucleotide
ccguggcucugaagugaug

SEQ ID NO: 1498594 - RNA, 19 nt, Artificial Sequence
  Description of Artificial Sequence: Synthetic oligonucleotide
ccgaguucucuuggcuguc

SEQ ID NO: 1498595 - RNA, 19 nt, Artificial Sequence
  Description of Artificial Sequence: Synthetic oligonucleotide
ccgugccucggggaagaca

SEQ ID NO: 1498596 - RNA, 19 nt, Artificial Sequence
  Description of Artificial Sequence: Synthetic oligonucleotide
gugccucggggaagacacu

SEQ ID NO: 1498597 - RNA, 19 nt, Artificial Sequence
  Description of Artificial Sequence: Synthetic oligonucleotide
cgaguucucuuggcugucu

SEQ ID NO: 1498598 - RNA, 19 nt, Artificial Sequence
  Description of Artificial Sequence: Synthetic oligonucleotide
aaaucugccauacaggugc

SEQ ID NO: 1498599 - RNA, 19 nt, Artificial Sequence
  Description of Artificial Sequence: Synthetic oligonucleotide
aaagugucaaucuccaccc

SEQ ID NO: 1498600 - RNA, 19 nt, Artificial Sequence
  Description of Artificial Sequence: Synthetic oligonucleotide
aaucuuuugcucuccaugc

SEQ ID NO: 1498601 - RNA, 19 nt, Artificial Sequence
  Description of Artificial Sequence: Synthetic oligonucleotide
aaaucuaccuuugugaguc

SEQ ID NO: 1498602 - RNA, 19 nt, Artificial Sequence
  Description of Artificial Sequence: Synthetic oligonucleotide
aaauuaccagccuucaggg

SEQ ID NO: 1498603 - RNA, 19 nt, Artificial Sequence
  Description of Artificial Sequence: Synthetic oligonucleotide
aagguguugggucaaguac

SEQ ID NO: 1498604 - RNA, 19 nt, Artificial Sequence
  Description of Artificial Sequence: Synthetic oligonucleotide
gaaagugucaaucuccacc

SEQ ID NO: 1498605 - RNA, 19 nt, Artificial Sequence
  Description of Artificial Sequence: Synthetic oligonucleotide
auagguuagguccagcaac

SEQ ID NO: 1498606 - RNA, 19 nt, Artificial Sequence
  Description of Artificial Sequence: Synthetic oligonucleotide
caaauuaccagccuucagg

SEQ ID NO: 1498607 - RNA, 19 nt, Artificial Sequence
  Description of Artificial Sequence: Synthetic oligonucleotide
aggcccauagguuaggucc

SEQ ID NO: 1498608 - RNA, 19 nt, Artificial Sequence
  Description of Artificial Sequence: Synthetic oligonucleotide
acugccuuugaccugagcg

SEQ ID NO: 1498609 - RNA, 19 nt, Artificial Sequence
  Description of Artificial Sequence: Synthetic oligonucleotide
uucccuuagacuuaagcag

SEQ ID NO: 1498610 - RNA, 19 nt, Artificial Sequence
  Description of Artificial Sequence: Synthetic oligonucleotide
agacuuaagcagcaagucc

SEQ ID NO: 1498611 - RNA, 19 nt, Artificial Sequence
  Description of Artificial Sequence: Synthetic oligonucleotide
aauggugcuauggucagcg

SEQ ID NO: 1498612 - RNA, 19 nt, Artificial Sequence
  Description of Artificial Sequence: Synthetic oligonucleotide
uggaaaucuaccuuuguga

SEQ ID NO: 1498613 - RNA, 19 nt, Artificial Sequence
  Description of Artificial Sequence: Synthetic oligonucleotide
uuagacuuaagcagcaagu

SEQ ID NO: 1498614 - RNA, 19 nt, Artificial Sequence
  Description of Artificial Sequence: Synthetic oligonucleotide
gaagacuucgcgcucacag

SEQ ID NO: 1498615 - RNA, 19 nt, Artificial Sequence
  Description of Artificial Sequence: Synthetic oligonucleotide
aaucugcccauagucagcc

SEQ ID NO: 1498616 - RNA, 19 nt, Artificial Sequence
  Description of Artificial Sequence: Synthetic oligonucleotide
gaugaaagugucaaucucc

SEQ ID NO: 1498617 - RNA, 19 nt, Artificial Sequence
  Description of Artificial Sequence: Synthetic oligonucleotide
uuggucaccucuccuaugg

SEQ ID NO: 1498618 - RNA, 19 nt, Artificial Sequence
  Description of Artificial Sequence: Synthetic oligonucleotide
agacuucgcgcucacaggc

SEQ ID NO: 1498619 - RNA, 19 nt, Artificial Sequence
  Description of Artificial Sequence: Synthetic oligonucleotide
uacaggugcucccagacgc

SEQ ID NO: 1498620 - RNA, 19 nt, Artificial Sequence
  Description of Artificial Sequence: Synthetic oligonucleotide
uuuuauuugggccgcuggc

SEQ ID NO: 1498621 - RNA, 19 nt, Artificial Sequence
  Description of Artificial Sequence: Synthetic oligonucleotide
aacauaggggcagguaacc

SEQ ID NO: 1498622 - RNA, 19 nt, Artificial Sequence
  Description of Artificial Sequence: Synthetic oligonucleotide
uccuauggaguccagguga

SEQ ID NO: 1498623 - RNA, 19 nt, Artificial Sequence
  Description of Artificial Sequence: Synthetic oligonucleotide
uuugugagucccuaaggug

SEQ ID NO: 1498624 - RNA, 19 nt, Artificial Sequence
  Description of Artificial Sequence: Synthetic oligonucleotide
uugaugaaagugucaaucu

SEQ ID NO: 1498625 - RNA, 19 nt, Artificial Sequence
  Description of Artificial Sequence: Synthetic oligonucleotide
acagaugguucacagcagg

SEQ ID NO: 1498626 - RNA, 19 nt, Artificial Sequence
  Description of Artificial Sequence: Synthetic oligonucleotide
aagacuucgcgcucacagg

SEQ ID NO: 1498627 - RNA, 19 nt, Artificial Sequence
  Description of Artificial Sequence: Synthetic oligonucleotide
ucuggugucucccauucug

SEQ ID NO: 1498628 - RNA, 19 nt, Artificial Sequence
  Description of Artificial Sequence: Synthetic oligonucleotide
cuguagaagagcacguagg

SEQ ID NO: 1498629 - RNA, 19 nt, Artificial Sequence
  Description of Artificial Sequence: Synthetic oligonucleotide
agcucucugggucuggggc

SEQ ID NO: 1498630 - RNA, 19 nt, Artificial Sequence
  Description of Artificial Sequence: Synthetic oligonucleotide
uuuggggacacggugauga

SEQ ID NO: 1498631 - RNA, 19 nt, Artificial Sequence
  Description of Artificial Sequence: Synthetic oligonucleotide
agaaaauacucaaaaggug

SEQ ID NO: 1498632 - RNA, 19 nt, Artificial Sequence
  Description of Artificial Sequence: Synthetic oligonucleotide
auggaaaucuaccuuugug

SEQ ID NO: 1498633 - RNA, 19 nt, Artificial Sequence
  Description of Artificial Sequence: Synthetic oligonucleotide
cuuccuguagaagagcacg

SEQ ID NO: 1498634 - RNA, 19 nt, Artificial Sequence
  Description of Artificial Sequence: Synthetic oligonucleotide
aaaucugcccauagucagc

SEQ ID NO: 1498635 - RNA, 19 nt, Artificial Sequence
  Description of Artificial Sequence: Synthetic oligonucleotide
uugggucaaguacacaaca

SEQ ID NO: 1498636 - RNA, 19 nt, Artificial Sequence
  Description of Artificial Sequence: Synthetic oligonucleotide
ggaaaucuaccuuugugag

SEQ ID NO: 1498637 - RNA, 19 nt, Artificial Sequence
  Description of Artificial Sequence: Synthetic oligonucleotide
aaucuaccuuugugagucc

SEQ ID NO: 1498638 - RNA, 19 nt, Artificial Sequence
  Description of Artificial Sequence: Synthetic oligonucleotide
guuagguccagcaacacca

SEQ ID NO: 1498639 - RNA, 19 nt, Artificial Sequence
  Description of Artificial Sequence: Synthetic oligonucleotide
ugcaggguugucuggagag

SEQ ID NO: 1498640 - RNA, 19 nt, Artificial Sequence
  Description of Artificial Sequence: Synthetic oligonucleotide
uccaggugagggcagaugu

SEQ ID NO: 1498641 - RNA, 19 nt, Artificial Sequence
  Description of Artificial Sequence: Synthetic oligonucleotide
uuuagcuggaucuggccac

SEQ ID NO: 1498642 - RNA, 19 nt, Artificial Sequence
  Description of Artificial Sequence: Synthetic oligonucleotide
ugggucaaguacacaacag

SEQ ID NO: 1498643 - RNA, 19 nt, Artificial Sequence
  Description of Artificial Sequence: Synthetic oligonucleotide
ugagcgauccugcuguugu

SEQ ID NO: 1498644 - RNA, 19 nt, Artificial Sequence
  Description of Artificial Sequence: Synthetic oligonucleotide
uuauuugggccgcuggcca

SEQ ID NO: 1498645 - RNA, 19 nt, Artificial Sequence
  Description of Artificial Sequence: Synthetic oligonucleotide
uuuauuugggccgcuggcc

SEQ ID NO: 1498646 - RNA, 19 nt, Artificial Sequence
  Description of Artificial Sequence: Synthetic oligonucleotide
cuuagucucugcaccaggc

SEQ ID NO: 1498647 - RNA, 19 nt, Artificial Sequence
  Description of Artificial Sequence: Synthetic oligonucleotide
ugaauggugcuauggucag

SEQ ID NO: 1498648 - RNA, 19 nt, Artificial Sequence
  Description of Artificial Sequence: Synthetic oligonucleotide
uuccccuugacgaaagccu

SEQ ID NO: 1498649 - RNA, 19 nt, Artificial Sequence
  Description of Artificial Sequence: Synthetic oligonucleotide
uagguuagguccagcaaca

SEQ ID NO: 1498650 - RNA, 19 nt, Artificial Sequence
  Description of Artificial Sequence: Synthetic oligonucleotide
uccagcaacaccacaugac

SEQ ID NO: 1498651 - RNA, 19 nt, Artificial Sequence
  Description of Artificial Sequence: Synthetic oligonucleotide
accagccgcacuuagucuc

SEQ ID NO: 1498652 - RNA, 19 nt, Artificial Sequence
  Description of Artificial Sequence: Synthetic oligonucleotide
caggcauagcaccacaccc

SEQ ID NO: 1498653 - RNA, 19 nt, Artificial Sequence
  Description of Artificial Sequence: Synthetic oligonucleotide
uugaccugagcgauccugc

SEQ ID NO: 1498654 - RNA, 19 nt, Artificial Sequence
  Description of Artificial Sequence: Synthetic oligonucleotide
ugucuggagagggaguagg

SEQ ID NO: 1498655 - RNA, 19 nt, Artificial Sequence
  Description of Artificial Sequence: Synthetic oligonucleotide
uauaggcuguucagauagg

SEQ ID NO: 1498656 - RNA, 19 nt, Artificial Sequence
  Description of Artificial Sequence: Synthetic oligonucleotide
ugcgugaauggugcuaugg

SEQ ID NO: 1498657 - RNA, 19 nt, Artificial Sequence
  Description of Artificial Sequence: Synthetic oligonucleotide
acacccggaacguagucag

SEQ ID NO: 1498658 - RNA, 19 nt, Artificial Sequence
  Description of Artificial Sequence: Synthetic oligonucleotide
caaguuuggggacacggug

SEQ ID NO: 1498659 - RNA, 19 nt, Artificial Sequence
  Description of Artificial Sequence: Synthetic oligonucleotide
ugccggauggcaaucucag

SEQ ID NO: 1498660 - RNA, 19 nt, Artificial Sequence
  Description of Artificial Sequence: Synthetic oligonucleotide
agggcauggaaaucuaccu

SEQ ID NO: 1498661 - RNA, 19 nt, Artificial Sequence
  Description of Artificial Sequence: Synthetic oligonucleotide
gauccugcuguugucaaug

SEQ ID NO: 1498662 - RNA, 19 nt, Artificial Sequence
  Description of Artificial Sequence: Synthetic oligonucleotide
uugacgaaagccucccacu

SEQ ID NO: 1498663 - RNA, 19 nt, Artificial Sequence
  Description of Artificial Sequence: Synthetic oligonucleotide
ucagauagguccaggucuc

SEQ ID NO: 1498664 - RNA, 19 nt, Artificial Sequence
  Description of Artificial Sequence: Synthetic oligonucleotide
ucucucauggccgacggac

SEQ ID NO: 1498665 - RNA, 19 nt, Artificial Sequence
  Description of Artificial Sequence: Synthetic oligonucleotide
uggaacgccuuguucagcu

SEQ ID NO: 1498666 - RNA, 19 nt, Artificial Sequence
  Description of Artificial Sequence: Synthetic oligonucleotide
uggcaaauuaccagccuuc

SEQ ID NO: 1498667 - RNA, 19 nt, Artificial Sequence
  Description of Artificial Sequence: Synthetic oligonucleotide
auaggggcagguaaccugg

SEQ ID NO: 1498668 - RNA, 19 nt, Artificial Sequence
  Description of Artificial Sequence: Synthetic oligonucleotide
gauagguccaggucucuuc

SEQ ID NO: 1498669 - RNA, 19 nt, Artificial Sequence
  Description of Artificial Sequence: Synthetic oligonucleotide
accugagcgauccugcugu

SEQ ID NO: 1498670 - RNA, 19 nt, Artificial Sequence
  Description of Artificial Sequence: Synthetic oligonucleotide
ugggcacucagcaggacac

SEQ ID NO: 1498671 - RNA, 19 nt, Artificial Sequence
  Description of Artificial Sequence: Synthetic oligonucleotide
auagcaccacacccggaac

SEQ ID NO: 1498672 - RNA, 19 nt, Artificial Sequence
  Description of Artificial Sequence: Synthetic oligonucleotide
accugugcgugaauggugc

SEQ ID NO: 1498673 - RNA, 19 nt, Artificial Sequence
  Description of Artificial Sequence: Synthetic oligonucleotide
cucaaaagguggcagccac

SEQ ID NO: 1498674 - RNA, 19 nt, Artificial Sequence
  Description of Artificial Sequence: Synthetic oligonucleotide
cauaggggcagguaaccug

SEQ ID NO: 1498675 - RNA, 19 nt, Artificial Sequence
  Description of Artificial Sequence: Synthetic oligonucleotide
cuuggaacgccuuguucag

SEQ ID NO: 1498676 - RNA, 19 nt, Artificial Sequence
  Description of Artificial Sequence: Synthetic oligonucleotide
uagacuuaagcagcaaguc

SEQ ID NO: 1498677 - RNA, 19 nt, Artificial Sequence
  Description of Artificial Sequence: Synthetic oligonucleotide
cacggugaugacaggagag

SEQ ID NO: 1498678 - RNA, 19 nt, Artificial Sequence
  Description of Artificial Sequence: Synthetic oligonucleotide
gggauggcaaauuaccagc

SEQ ID NO: 1498679 - RNA, 19 nt, Artificial Sequence
  Description of Artificial Sequence: Synthetic oligonucleotide
aucuaccuuugugaguccc

SEQ ID NO: 1498680 - RNA, 19 nt, Artificial Sequence
  Description of Artificial Sequence: Synthetic oligonucleotide
cuguccuuccccuugacga

SEQ ID NO: 1498681 - RNA, 19 nt, Artificial Sequence
  Description of Artificial Sequence: Synthetic oligonucleotide
gacaggagagaauauauuu

SEQ ID NO: 1498682 - RNA, 19 nt, Artificial Sequence
  Description of Artificial Sequence: Synthetic oligonucleotide
uuaccagccuucagggaca

SEQ ID NO: 1498683 - RNA, 19 nt, Artificial Sequence
  Description of Artificial Sequence: Synthetic oligonucleotide
agaaaucugcccauaguca

SEQ ID NO: 1498684 - RNA, 19 nt, Artificial Sequence
  Description of Artificial Sequence: Synthetic oligonucleotide
ugagucccuaagguguugg

SEQ ID NO: 1498685 - RNA, 19 nt, Artificial Sequence
  Description of Artificial Sequence: Synthetic oligonucleotide
ugacgaaagccucccacuc

SEQ ID NO: 1498686 - RNA, 19 nt, Artificial Sequence
  Description of Artificial Sequence: Synthetic oligonucleotide
agcuuggaacgccuuguuc

SEQ ID NO: 1498687 - RNA, 19 nt, Artificial Sequence
  Description of Artificial Sequence: Synthetic oligonucleotide
gacuuaagcagcaaguccu

SEQ ID NO: 1498688 - RNA, 19 nt, Artificial Sequence
  Description of Artificial Sequence: Synthetic oligonucleotide
ggagagaauauauuuccca

SEQ ID NO: 1498689 - RNA, 19 nt, Artificial Sequence
  Description of Artificial Sequence: Synthetic oligonucleotide
ucucggaaccagugcaugc

SEQ ID NO: 1498690 - RNA, 19 nt, Artificial Sequence
  Description of Artificial Sequence: Synthetic oligonucleotide
uaagguguugggucaagua

SEQ ID NO: 1498691 - RNA, 19 nt, Artificial Sequence
  Description of Artificial Sequence: Synthetic oligonucleotide
caacauaggggcagguaac

SEQ ID NO: 1498692 - RNA, 19 nt, Artificial Sequence
  Description of Artificial Sequence: Synthetic oligonucleotide
ugcggcaggaugaccacca

SEQ ID NO: 1498693 - RNA, 19 nt, Artificial Sequence
  Description of Artificial Sequence: Synthetic oligonucleotide
gguucccuuagacuuaagc

SEQ ID NO: 1498694 - RNA, 19 nt, Artificial Sequence
  Description of Artificial Sequence: Synthetic oligonucleotide
ucuaccuuugugagucccu

SEQ ID NO: 1498695 - RNA, 19 nt, Artificial Sequence
  Description of Artificial Sequence: Synthetic oligonucleotide
gacacggugaugacaggag

SEQ ID NO: 1498696 - RNA, 19 nt, Artificial Sequence
  Description of Artificial Sequence: Synthetic oligonucleotide
ugagggcagaugucucugg

SEQ ID NO: 1498697 - RNA, 19 nt, Artificial Sequence
  Description of Artificial Sequence: Synthetic oligonucleotide
agcacguaggcuuccacau

SEQ ID NO: 1498698 - RNA, 19 nt, Artificial Sequence
  Description of Artificial Sequence: Synthetic oligonucleotide
ugacaggagagaauauauu

SEQ ID NO: 1498699 - RNA, 19 nt, Artificial Sequence
  Description of Artificial Sequence: Synthetic oligonucleotide
uggugcuauggucagcgaa

SEQ ID NO: 1498700 - RNA, 19 nt, Artificial Sequence
  Description of Artificial Sequence: Synthetic oligonucleotide
uuugcucuccaugcaagcu

SEQ ID NO: 1498701 - RNA, 19 nt, Artificial Sequence
  Description of Artificial Sequence: Synthetic oligonucleotide
auggcaaauuaccagccuu

SEQ ID NO: 1498702 - RNA, 19 nt, Artificial Sequence
  Description of Artificial Sequence: Synthetic oligonucleotide
auggcaaucucagggccac

SEQ ID NO: 1498703 - RNA, 19 nt, Artificial Sequence
  Description of Artificial Sequence: Synthetic oligonucleotide
cuuuagcuggaucuggcca

SEQ ID NO: 1498704 - RNA, 19 nt, Artificial Sequence
  Description of Artificial Sequence: Synthetic oligonucleotide
ccggauggcaaucucaggg

SEQ ID NO: 1498705 - RNA, 19 nt, Artificial Sequence
  Description of Artificial Sequence: Synthetic oligonucleotide
uauuugggccgcuggccag

SEQ ID NO: 1498706 - RNA, 19 nt, Artificial Sequence
  Description of Artificial Sequence: Synthetic oligonucleotide
augaaagugucaaucucca

SEQ ID NO: 1498707 - RNA, 19 nt, Artificial Sequence
  Description of Artificial Sequence: Synthetic oligonucleotide
uucgcgcucacaggcauag

SEQ ID NO: 1498708 - RNA, 19 nt, Artificial Sequence
  Description of Artificial Sequence: Synthetic oligonucleotide
aggcauagcaccacacccg

SEQ ID NO: 1498709 - RNA, 19 nt, Artificial Sequence
  Description of Artificial Sequence: Synthetic oligonucleotide
ucggaaccagugcaugcug

SEQ ID NO: 1498710 - RNA, 19 nt, Artificial Sequence
  Description of Artificial Sequence: Synthetic oligonucleotide
cugggccacacucugccgg

SEQ ID NO: 1498711 - RNA, 19 nt, Artificial Sequence
  Description of Artificial Sequence: Synthetic oligonucleotide
ucagcuuggaacgccuugu

SEQ ID NO: 1498712 - RNA, 19 nt, Artificial Sequence
  Description of Artificial Sequence: Synthetic oligonucleotide
uggggaguccugcucugag

SEQ ID NO: 1498713 - RNA, 19 nt, Artificial Sequence
  Description of Artificial Sequence: Synthetic oligonucleotide
cagcaacaccacaugacug

SEQ ID NO: 1498714 - RNA, 19 nt, Artificial Sequence
  Description of Artificial Sequence: Synthetic oligonucleotide
gucaaugggcccaggaggc

SEQ ID NO: 1498715 - RNA, 19 nt, Artificial Sequence
  Description of Artificial Sequence: Synthetic oligonucleotide
uggaguccaggugagggca

SEQ ID NO: 1498716 - RNA, 19 nt, Artificial Sequence
  Description of Artificial Sequence: Synthetic oligonucleotide
gggcagguaaccuggaggc

SEQ ID NO: 1498717 - RNA, 19 nt, Artificial Sequence
  Description of Artificial Sequence: Synthetic oligonucleotide
ggcaaguuuggggacacgg

SEQ ID NO: 1498718 - RNA, 19 nt, Artificial Sequence
  Description of Artificial Sequence: Synthetic oligonucleotide
aucuuuugcucuccaugca

SEQ ID NO: 1498719 - RNA, 19 nt, Artificial Sequence
  Description of Artificial Sequence: Synthetic oligonucleotide
ugugcgugaauggugcuau

SEQ ID NO: 1498720 - RNA, 19 nt, Artificial Sequence
  Description of Artificial Sequence: Synthetic oligonucleotide
ccagcauuggcugaggagc

SEQ ID NO: 1498721 - RNA, 19 nt, Artificial Sequence
  Description of Artificial Sequence: Synthetic oligonucleotide
caggguugucuggagaggg

SEQ ID NO: 1498722 - RNA, 19 nt, Artificial Sequence
  Description of Artificial Sequence: Synthetic oligonucleotide
gagucccuaagguguuggg

SEQ ID NO: 1498723 - RNA, 19 nt, Artificial Sequence
  Description of Artificial Sequence: Synthetic oligonucleotide
ggugcuauggucagcgaag

SEQ ID NO: 1498724 - RNA, 19 nt, Artificial Sequence
  Description of Artificial Sequence: Synthetic oligonucleotide
gaaaagcugcacccgagcu

SEQ ID NO: 1498725 - RNA, 19 nt, Artificial Sequence
  Description of Artificial Sequence: Synthetic oligonucleotide
cuggcagguucccuuagac

SEQ ID NO: 1498726 - RNA, 19 nt, Artificial Sequence
  Description of Artificial Sequence: Synthetic oligonucleotide
agggacagugggcacucag

SEQ ID NO: 1498727 - RNA, 19 nt, Artificial Sequence
  Description of Artificial Sequence: Synthetic oligonucleotide
uccccuugacgaaagccuc

SEQ ID NO: 1498728 - RNA, 19 nt, Artificial Sequence
  Description of Artificial Sequence: Synthetic oligonucleotide
aggaagacuucgcgcucac

SEQ ID NO: 1498729 - RNA, 19 nt, Artificial Sequence
  Description of Artificial Sequence: Synthetic oligonucleotide
gaaaucuaccuuugugagu

SEQ ID NO: 1498730 - RNA, 19 nt, Artificial Sequence
  Description of Artificial Sequence: Synthetic oligonucleotide
auuugggccgcuggccagc

SEQ ID NO: 1498731 - RNA, 19 nt, Artificial Sequence
  Description of Artificial Sequence: Synthetic oligonucleotide
ugucaaucuccacccuccu

SEQ ID NO: 1498732 - RNA, 19 nt, Artificial Sequence
  Description of Artificial Sequence: Synthetic oligonucleotide
gguuagguccagcaacacc

SEQ ID NO: 1498733 - RNA, 19 nt, Artificial Sequence
  Description of Artificial Sequence: Synthetic oligonucleotide
gagcacguaggcuuccaca

SEQ ID NO: 1498734 - RNA, 19 nt, Artificial Sequence
  Description of Artificial Sequence: Synthetic oligonucleotide
ggggacacggugaugacag

SEQ ID NO: 1498735 - RNA, 19 nt, Artificial Sequence
  Description of Artificial Sequence: Synthetic oligonucleotide
auggccgacggaccagccg

SEQ ID NO: 1498736 - RNA, 19 nt, Artificial Sequence
  Description of Artificial Sequence: Synthetic oligonucleotide
cucugcggcaggaugacca

SEQ ID NO: 1498737 - RNA, 19 nt, Artificial Sequence
  Description of Artificial Sequence: Synthetic oligonucleotide
gcuauggucagcgaaggac

SEQ ID NO: 1498738 - RNA, 19 nt, Artificial Sequence
  Description of Artificial Sequence: Synthetic oligonucleotide
ggucaccucuccuauggag

SEQ ID NO: 1498739 - RNA, 19 nt, Artificial Sequence
  Description of Artificial Sequence: Synthetic oligonucleotide
augacuggcagguucccuu

SEQ ID NO: 1498740 - RNA, 19 nt, Artificial Sequence
  Description of Artificial Sequence: Synthetic oligonucleotide
uccucagcuuggaacgccu

SEQ ID NO: 1498741 - RNA, 19 nt, Artificial Sequence
  Description of Artificial Sequence: Synthetic oligonucleotide
ugcacccgagcuagcaaga

SEQ ID NO: 1498742 - RNA, 19 nt, Artificial Sequence
  Description of Artificial Sequence: Synthetic oligonucleotide
cuuugugagucccuaaggu

SEQ ID NO: 1498743 - RNA, 19 nt, Artificial Sequence
  Description of Artificial Sequence: Synthetic oligonucleotide
ccuguagaagagcacguag

SEQ ID NO: 1498744 - RNA, 19 nt, Artificial Sequence
  Description of Artificial Sequence: Synthetic oligonucleotide
ugugagucccuaagguguu

SEQ ID NO: 1498745 - RNA, 19 nt, Artificial Sequence
  Description of Artificial Sequence: Synthetic oligonucleotide
agccgcacuuagucucugc

SEQ ID NO: 1498746 - RNA, 19 nt, Artificial Sequence
  Description of Artificial Sequence: Synthetic oligonucleotide
acaugacuggcagguuccc

SEQ ID NO: 1498747 - RNA, 19 nt, Artificial Sequence
  Description of Artificial Sequence: Synthetic oligonucleotide
ggacuccucagcuuggaac

SEQ ID NO: 1498748 - RNA, 19 nt, Artificial Sequence
  Description of Artificial Sequence: Synthetic oligonucleotide
gaccugagcgauccugcug

SEQ ID NO: 1498749 - RNA, 19 nt, Artificial Sequence
  Description of Artificial Sequence: Synthetic oligonucleotide
ggauggcaaucucagggcc

SEQ ID NO: 1498750 - RNA, 19 nt, Artificial Sequence
  Description of Artificial Sequence: Synthetic oligonucleotide
gugcuauggucagcgaagg

SEQ ID NO: 1498751 - RNA, 19 nt, Artificial Sequence
  Description of Artificial Sequence: Synthetic oligonucleotide
ugcuauggucagcgaagga

SEQ ID NO: 1498752 - RNA, 19 nt, Artificial Sequence
  Description of Artificial Sequence: Synthetic oligonucleotide
cuauggucagcgaaggacu

SEQ ID NO: 1498753 - RNA, 19 nt, Artificial Sequence
  Description of Artificial Sequence: Synthetic oligonucleotide
caggcgcuguuccaggaag

SEQ ID NO: 1498754 - RNA, 19 nt, Artificial Sequence
  Description of Artificial Sequence: Synthetic oligonucleotide
cucagcuuggaacgccuug

SEQ ID NO: 1498755 - RNA, 19 nt, Artificial Sequence
  Description of Artificial Sequence: Synthetic oligonucleotide
cacccgagcuagcaagagg

SEQ ID NO: 1498756 - RNA, 19 nt, Artificial Sequence
  Description of Artificial Sequence: Synthetic oligonucleotide
cuccuauggaguccaggug

SEQ ID NO: 1498757 - RNA, 19 nt, Artificial Sequence
  Description of Artificial Sequence: Synthetic oligonucleotide
gucaaguacacaacagaaa

SEQ ID NO: 1498758 - RNA, 19 nt, Artificial Sequence
  Description of Artificial Sequence: Synthetic oligonucleotide
uuccacauucugggguggg

SEQ ID NO: 1498759 - RNA, 19 nt, Artificial Sequence
  Description of Artificial Sequence: Synthetic oligonucleotide
cagccacuggcccaaauca

SEQ ID NO: 1498760 - RNA, 19 nt, Artificial Sequence
  Description of Artificial Sequence: Synthetic oligonucleotide
augcaagcucucugggucu

SEQ ID NO: 1498761 - RNA, 19 nt, Artificial Sequence
  Description of Artificial Sequence: Synthetic oligonucleotide
cgaaggacucuccacagcc

SEQ ID NO: 1498762 - RNA, 19 nt, Artificial Sequence
  Description of Artificial Sequence: Synthetic oligonucleotide
gcaaauuaccagccuucag

SEQ ID NO: 1498763 - RNA, 19 nt, Artificial Sequence
  Description of Artificial Sequence: Synthetic oligonucleotide
aacgccuuguucagcuuga

SEQ ID NO: 1498764 - RNA, 19 nt, Artificial Sequence
  Description of Artificial Sequence: Synthetic oligonucleotide
caccugugcgugaauggug

SEQ ID NO: 1498765 - RNA, 19 nt, Artificial Sequence
  Description of Artificial Sequence: Synthetic oligonucleotide
agucccuaagguguugggu

SEQ ID NO: 1498766 - RNA, 19 nt, Artificial Sequence
  Description of Artificial Sequence: Synthetic oligonucleotide
cucuccuauggaguccagg

SEQ ID NO: 1498767 - RNA, 19 nt, Artificial Sequence
  Description of Artificial Sequence: Synthetic oligonucleotide
ugguucacagcagggccgc

SEQ ID NO: 1498768 - RNA, 19 nt, Artificial Sequence
  Description of Artificial Sequence: Synthetic oligonucleotide
ugaccugagcgauccugcu

SEQ ID NO: 1498769 - RNA, 19 nt, Artificial Sequence
  Description of Artificial Sequence: Synthetic oligonucleotide
gucaaucuccacccuccug

SEQ ID NO: 1498770 - RNA, 19 nt, Artificial Sequence
  Description of Artificial Sequence: Synthetic oligonucleotide
cauagguuagguccagcaa

SEQ ID NO: 1498771 - RNA, 19 nt, Artificial Sequence
  Description of Artificial Sequence: Synthetic oligonucleotide
ggaccagccgcacuuaguc

SEQ ID NO: 1498772 - RNA, 19 nt, Artificial Sequence
  Description of Artificial Sequence: Synthetic oligonucleotide
agguuagguccagcaacac

SEQ ID NO: 1498773 - RNA, 19 nt, Artificial Sequence
  Description of Artificial Sequence: Synthetic oligonucleotide
uugucuggagagggaguag

SEQ ID NO: 1498774 - RNA, 19 nt, Artificial Sequence
  Description of Artificial Sequence: Synthetic oligonucleotide
gauggcaaauuaccagccu

SEQ ID NO: 1498775 - RNA, 19 nt, Artificial Sequence
  Description of Artificial Sequence: Synthetic oligonucleotide
cugagagcuuggcugagga

SEQ ID NO: 1498776 - RNA, 19 nt, Artificial Sequence
  Description of Artificial Sequence: Synthetic oligonucleotide
acuucgcgcucacaggcau

SEQ ID NO: 1498777 - RNA, 19 nt, Artificial Sequence
  Description of Artificial Sequence: Synthetic oligonucleotide
ccucacauccauugugacc

SEQ ID NO: 1498778 - RNA, 19 nt, Artificial Sequence
  Description of Artificial Sequence: Synthetic oligonucleotide
gacuggcagguucccuuag

SEQ ID NO: 1498779 - RNA, 19 nt, Artificial Sequence
  Description of Artificial Sequence: Synthetic oligonucleotide
ucauggccgacggaccagc

SEQ ID NO: 1498780 - RNA, 19 nt, Artificial Sequence
  Description of Artificial Sequence: Synthetic oligonucleotide
augcaguagaugacuccgg

SEQ ID NO: 1498781 - RNA, 19 nt, Artificial Sequence
  Description of Artificial Sequence: Synthetic oligonucleotide
cuguucagauagguccagg

SEQ ID NO: 1498782 - RNA, 19 nt, Artificial Sequence
  Description of Artificial Sequence: Synthetic oligonucleotide
gcuuuagcuggaucuggcc

SEQ ID NO: 1498783 - RNA, 19 nt, Artificial Sequence
  Description of Artificial Sequence: Synthetic oligonucleotide
ugccuuugaccugagcgau

SEQ ID NO: 1498784 - RNA, 19 nt, Artificial Sequence
  Description of Artificial Sequence: Synthetic oligonucleotide
uggucagcgaaggacucuc

SEQ ID NO: 1498785 - RNA, 19 nt, Artificial Sequence
  Description of Artificial Sequence: Synthetic oligonucleotide
acuggcagguucccuuaga

SEQ ID NO: 1498786 - RNA, 19 nt, Artificial Sequence
  Description of Artificial Sequence: Synthetic oligonucleotide
acucaaaagguggcagcca

SEQ ID NO: 1498787 - RNA, 19 nt, Artificial Sequence
  Description of Artificial Sequence: Synthetic oligonucleotide
acccggaacguagucaggu

SEQ ID NO: 1498788 - RNA, 19 nt, Artificial Sequence
  Description of Artificial Sequence: Synthetic oligonucleotide
gaagagcacguaggcuucc

SEQ ID NO: 1498789 - RNA, 19 nt, Artificial Sequence
  Description of Artificial Sequence: Synthetic oligonucleotide
ucccagacgcucugcggca

SEQ ID NO: 1498790 - RNA, 19 nt, Artificial Sequence
  Description of Artificial Sequence: Synthetic oligonucleotide
cauuggcugaggagcagca

SEQ ID NO: 1498791 - RNA, 19 nt, Artificial Sequence
  Description of Artificial Sequence: Synthetic oligonucleotide
cagcauggggcuccuggag

SEQ ID NO: 1498792 - RNA, 19 nt, Artificial Sequence
  Description of Artificial Sequence: Synthetic oligonucleotide
agcgauccugcuguuguca

SEQ ID NO: 1498793 - RNA, 19 nt, Artificial Sequence
  Description of Artificial Sequence: Synthetic oligonucleotide
cauauaggcuguucagaua

SEQ ID NO: 1498794 - RNA, 19 nt, Artificial Sequence
  Description of Artificial Sequence: Synthetic oligonucleotide
acauaggggcagguaaccu

SEQ ID NO: 1498795 - RNA, 19 nt, Artificial Sequence
  Description of Artificial Sequence: Synthetic oligonucleotide
cacuuagucucugcaccag

SEQ ID NO: 1498796 - RNA, 19 nt, Artificial Sequence
  Description of Artificial Sequence: Synthetic oligonucleotide
acggaccagccgcacuuag

SEQ ID NO: 1498797 - RNA, 19 nt, Artificial Sequence
  Description of Artificial Sequence: Synthetic oligonucleotide
ugacuggcagguucccuua

SEQ ID NO: 1498798 - RNA, 19 nt, Artificial Sequence
  Description of Artificial Sequence: Synthetic oligonucleotide
ugggccacacucugccgga

SEQ ID NO: 1498799 - RNA, 19 nt, Artificial Sequence
  Description of Artificial Sequence: Synthetic oligonucleotide
ggcagccacuccuagcccc

SEQ ID NO: 1498800 - RNA, 19 nt, Artificial Sequence
  Description of Artificial Sequence: Synthetic oligonucleotide
uccacauucugggguggga

SEQ ID NO: 1498801 - RNA, 19 nt, Artificial Sequence
  Description of Artificial Sequence: Synthetic oligonucleotide
uccuguagaagagcacgua

SEQ ID NO: 1498802 - RNA, 19 nt, Artificial Sequence
  Description of Artificial Sequence: Synthetic oligonucleotide
guugucuggagagggagua

SEQ ID NO: 1498803 - RNA, 19 nt, Artificial Sequence
  Description of Artificial Sequence: Synthetic oligonucleotide
gaaggacucuccacagcca

SEQ ID NO: 1498804 - RNA, 19 nt, Artificial Sequence
  Description of Artificial Sequence: Synthetic oligonucleotide
ucccacucucggaaccagu

SEQ ID NO: 1498805 - RNA, 19 nt, Artificial Sequence
  Description of Artificial Sequence: Synthetic oligonucleotide
aaucugccauacaggugcu

SEQ ID NO: 1498806 - RNA, 19 nt, Artificial Sequence
  Description of Artificial Sequence: Synthetic oligonucleotide
ggcaaucucagggccaccc

SEQ ID NO: 1498807 - RNA, 19 nt, Artificial Sequence
  Description of Artificial Sequence: Synthetic oligonucleotide
ggguugucuggagagggag

SEQ ID NO: 1498808 - RNA, 19 nt, Artificial Sequence
  Description of Artificial Sequence: Synthetic oligonucleotide
gacgaaagccucccacucu

SEQ ID NO: 1498809 - RNA, 19 nt, Artificial Sequence
  Description of Artificial Sequence: Synthetic oligonucleotide
cucucggaaccagugcaug

SEQ ID NO: 1498810 - RNA, 19 nt, Artificial Sequence
  Description of Artificial Sequence: Synthetic oligonucleotide
gaccagcauuggcugagga

SEQ ID NO: 1498811 - RNA, 19 nt, Artificial Sequence
  Description of Artificial Sequence: Synthetic oligonucleotide
ccccauauaggcuguucag

SEQ ID NO: 1498812 - RNA, 19 nt, Artificial Sequence
  Description of Artificial Sequence: Synthetic oligonucleotide
ccaaaucugccauacaggu

SEQ ID NO: 1498813 - RNA, 19 nt, Artificial Sequence
  Description of Artificial Sequence: Synthetic oligonucleotide
ccaaaucacacagcccggg

SEQ ID NO: 1498814 - RNA, 19 nt, Artificial Sequence
  Description of Artificial Sequence: Synthetic oligonucleotide
gaacguagucagguucaca

SEQ ID NO: 1498815 - RNA, 19 nt, Artificial Sequence
  Description of Artificial Sequence: Synthetic oligonucleotide
agcauuggcugaggagcag

SEQ ID NO: 1498816 - RNA, 19 nt, Artificial Sequence
  Description of Artificial Sequence: Synthetic oligonucleotide
cgugaauggugcuaugguc

SEQ ID NO: 1498817 - RNA, 19 nt, Artificial Sequence
  Description of Artificial Sequence: Synthetic oligonucleotide
cagcauuggcugaggagca

SEQ ID NO: 1498818 - RNA, 19 nt, Artificial Sequence
  Description of Artificial Sequence: Synthetic oligonucleotide
cugccggauggcaaucuca

SEQ ID NO: 1498819 - RNA, 19 nt, Artificial Sequence
  Description of Artificial Sequence: Synthetic oligonucleotide
agugggcacucagcaggac

SEQ ID NO: 1498820 - RNA, 19 nt, Artificial Sequence
  Description of Artificial Sequence: Synthetic oligonucleotide
gcaucucucauggccgacg

SEQ ID NO: 1498821 - RNA, 19 nt, Artificial Sequence
  Description of Artificial Sequence: Synthetic oligonucleotide
cuagcaagagggcaaguuu

SEQ ID NO: 1498822 - RNA, 19 nt, Artificial Sequence
  Description of Artificial Sequence: Synthetic oligonucleotide
gggaugcaggguugucugg

SEQ ID NO: 1498823 - RNA, 19 nt, Artificial Sequence
  Description of Artificial Sequence: Synthetic oligonucleotide
ccacaugacuggcagguuc

SEQ ID NO: 1498824 - RNA, 19 nt, Artificial Sequence
  Description of Artificial Sequence: Synthetic oligonucleotide
ccauagguuagguccagca

SEQ ID NO: 1498825 - RNA, 19 nt, Artificial Sequence
  Description of Artificial Sequence: Synthetic oligonucleotide
gcauggaaaucuaccuuug

SEQ ID NO: 1498826 - RNA, 19 nt, Artificial Sequence
  Description of Artificial Sequence: Synthetic oligonucleotide
ggcauggaaaucuaccuuu

SEQ ID NO: 1498827 - RNA, 19 nt, Artificial Sequence
  Description of Artificial Sequence: Synthetic oligonucleotide
gccccucacauccauugug

SEQ ID NO: 1498828 - RNA, 19 nt, Artificial Sequence
  Description of Artificial Sequence: Synthetic oligonucleotide
agccccucacauccauugu

SEQ ID NO: 1498829 - RNA, 19 nt, Artificial Sequence
  Description of Artificial Sequence: Synthetic oligonucleotide
cacccggaacguagucagg

SEQ ID NO: 1498830 - RNA, 19 nt, Artificial Sequence
  Description of Artificial Sequence: Synthetic oligonucleotide
auggucagcgaaggacucu

SEQ ID NO: 1498831 - RNA, 19 nt, Artificial Sequence
  Description of Artificial Sequence: Synthetic oligonucleotide
agcugcacccgagcuagca

SEQ ID NO: 1498832 - RNA, 19 nt, Artificial Sequence
  Description of Artificial Sequence: Synthetic oligonucleotide
gcucccagacgcucugcgg

SEQ ID NO: 1498833 - RNA, 19 nt, Artificial Sequence
  Description of Artificial Sequence: Synthetic oligonucleotide
gagcgauccugcuguuguc

SEQ ID NO: 1498834 - RNA, 19 nt, Artificial Sequence
  Description of Artificial Sequence: Synthetic oligonucleotide
gcacuuagucucugcacca

SEQ ID NO: 1498835 - RNA, 19 nt, Artificial Sequence
  Description of Artificial Sequence: Synthetic oligonucleotide
aucucucauggccgacgga

SEQ ID NO: 1498836 - RNA, 19 nt, Artificial Sequence
  Description of Artificial Sequence: Synthetic oligonucleotide
cucauggccgacggaccag

SEQ ID NO: 1498837 - RNA, 19 nt, Artificial Sequence
  Description of Artificial Sequence: Synthetic oligonucleotide
gcaacaccacaugacuggc

SEQ ID NO: 1498838 - RNA, 19 nt, Artificial Sequence
  Description of Artificial Sequence: Synthetic oligonucleotide
ggcaaauuaccagccuuca

SEQ ID NO: 1498839 - RNA, 19 nt, Artificial Sequence
  Description of Artificial Sequence: Synthetic oligonucleotide
aagcugcacccgagcuagc

SEQ ID NO: 1498840 - RNA, 19 nt, Artificial Sequence
  Description of Artificial Sequence: Synthetic oligonucleotide
cauggaaaucuaccuuugu

SEQ ID NO: 1498841 - RNA, 19 nt, Artificial Sequence
  Description of Artificial Sequence: Synthetic oligonucleotide
ggugcucccagacgcucug

SEQ ID NO: 1498842 - RNA, 19 nt, Artificial Sequence
  Description of Artificial Sequence: Synthetic oligonucleotide
gacuucgcgcucacaggca

SEQ ID NO: 1498843 - RNA, 19 nt, Artificial Sequence
  Description of Artificial Sequence: Synthetic oligonucleotide
agauagguccaggucucuu

SEQ ID NO: 1498844 - RNA, 19 nt, Artificial Sequence
  Description of Artificial Sequence: Synthetic oligonucleotide
cugagcgauccugcuguug

SEQ ID NO: 1498845 - RNA, 19 nt, Artificial Sequence
  Description of Artificial Sequence: Synthetic oligonucleotide
aggcaggcccauagguuag

SEQ ID NO: 1498846 - RNA, 19 nt, Artificial Sequence
  Description of Artificial Sequence: Synthetic oligonucleotide
gcauuggcugaggagcagc

SEQ ID NO: 1498847 - RNA, 19 nt, Artificial Sequence
  Description of Artificial Sequence: Synthetic oligonucleotide
uuugggccgcuggccagca

SEQ ID NO: 1498848 - RNA, 19 nt, Artificial Sequence
  Description of Artificial Sequence: Synthetic oligonucleotide
caccacaugacuggcaggu

SEQ ID NO: 1498849 - RNA, 19 nt, Artificial Sequence
  Description of Artificial Sequence: Synthetic oligonucleotide
gccggauggcaaucucagg

SEQ ID NO: 1498850 - RNA, 19 nt, Artificial Sequence
  Description of Artificial Sequence: Synthetic oligonucleotide
caggucucuucagaaaucu

SEQ ID NO: 1498851 - RNA, 19 nt, Artificial Sequence
  Description of Artificial Sequence: Synthetic oligonucleotide
uccugcgcuuggccagcgc

SEQ ID NO: 1498852 - RNA, 19 nt, Artificial Sequence
  Description of Artificial Sequence: Synthetic oligonucleotide
gcgaaggacucuccacagc

SEQ ID NO: 1498853 - RNA, 19 nt, Artificial Sequence
  Description of Artificial Sequence: Synthetic oligonucleotide
ccacucucggaaccagugc

SEQ ID NO: 1498854 - RNA, 19 nt, Artificial Sequence
  Description of Artificial Sequence: Synthetic oligonucleotide
gugacccagggcauggaaa

SEQ ID NO: 1498855 - RNA, 19 nt, Artificial Sequence
  Description of Artificial Sequence: Synthetic oligonucleotide
gcugaugcaguagaugacu

SEQ ID NO: 1498856 - RNA, 19 nt, Artificial Sequence
  Description of Artificial Sequence: Synthetic oligonucleotide
gguaaccuggaggcaggcc

SEQ ID NO: 1498857 - RNA, 19 nt, Artificial Sequence
  Description of Artificial Sequence: Synthetic oligonucleotide
cacugccuuugaccugagc

SEQ ID NO: 1498858 - RNA, 19 nt, Artificial Sequence
  Description of Artificial Sequence: Synthetic oligonucleotide
acucucggaaccagugcau

SEQ ID NO: 1498859 - RNA, 19 nt, Artificial Sequence
  Description of Artificial Sequence: Synthetic oligonucleotide
caaaucacacagcccgggu

SEQ ID NO: 1498860 - RNA, 19 nt, Artificial Sequence
  Description of Artificial Sequence: Synthetic oligonucleotide
ugcgcuuggccagcgccuc

SEQ ID NO: 1498861 - RNA, 19 nt, Artificial Sequence
  Description of Artificial Sequence: Synthetic oligonucleotide
cagcaucucucauggccga

SEQ ID NO: 1498862 - RNA, 19 nt, Artificial Sequence
  Description of Artificial Sequence: Synthetic oligonucleotide
gugagucccuaagguguug

SEQ ID NO: 1498863 - RNA, 19 nt, Artificial Sequence
  Description of Artificial Sequence: Synthetic oligonucleotide
cugcggcaggaugaccacc

SEQ ID NO: 1498864 - RNA, 19 nt, Artificial Sequence
  Description of Artificial Sequence: Synthetic oligonucleotide
guuuggggacacggugaug

SEQ ID NO: 1498865 - RNA, 19 nt, Artificial Sequence
  Description of Artificial Sequence: Synthetic oligonucleotide
gccgcacuuagucucugca

SEQ ID NO: 1498866 - RNA, 19 nt, Artificial Sequence
  Description of Artificial Sequence: Synthetic oligonucleotide
gugcgugaauggugcuaug

SEQ ID NO: 1498867 - RNA, 19 nt, Artificial Sequence
  Description of Artificial Sequence: Synthetic oligonucleotide
caucccagggaccagcauu

SEQ ID NO: 1498868 - RNA, 19 nt, Artificial Sequence
  Description of Artificial Sequence: Synthetic oligonucleotide
cuaccuuugugagucccua

SEQ ID NO: 1498869 - RNA, 19 nt, Artificial Sequence
  Description of Artificial Sequence: Synthetic oligonucleotide
ccccuugacgaaagccucc

SEQ ID NO: 1498870 - RNA, 19 nt, Artificial Sequence
  Description of Artificial Sequence: Synthetic oligonucleotide
ccagggcauggaaaucuac

SEQ ID NO: 1498871 - RNA, 19 nt, Artificial Sequence
  Description of Artificial Sequence: Synthetic oligonucleotide
ccgcacuuagucucugcac

SEQ ID NO: 1498872 - RNA, 19 nt, Artificial Sequence
  Description of Artificial Sequence: Synthetic oligonucleotide
aggguugucuggagaggga

SEQ ID NO: 1498873 - RNA, 19 nt, Artificial Sequence
  Description of Artificial Sequence: Synthetic oligonucleotide
acguaggcuuccacauucu

SEQ ID NO: 1498874 - RNA, 19 nt, Artificial Sequence
  Description of Artificial Sequence: Synthetic oligonucleotide
gcagcauggggcuccugga

SEQ ID NO: 1498875 - RNA, 19 nt, Artificial Sequence
  Description of Artificial Sequence: Synthetic oligonucleotide
ccucaaucuuuugcucucc

SEQ ID NO: 1498876 - RNA, 19 nt, Artificial Sequence
  Description of Artificial Sequence: Synthetic oligonucleotide
ccagcaacaccacaugacu

SEQ ID NO: 1498877 - RNA, 19 nt, Artificial Sequence
  Description of Artificial Sequence: Synthetic oligonucleotide
cccuugacgaaagccuccc

SEQ ID NO: 1498878 - RNA, 19 nt, Artificial Sequence
  Description of Artificial Sequence: Synthetic oligonucleotide
caggugcucccagacgcuc

SEQ ID NO: 1498879 - RNA, 19 nt, Artificial Sequence
  Description of Artificial Sequence: Synthetic oligonucleotide
ggaacguagucagguucac

SEQ ID NO: 1498880 - RNA, 19 nt, Artificial Sequence
  Description of Artificial Sequence: Synthetic oligonucleotide
gcauggggcuccuggagaa

SEQ ID NO: 1498881 - RNA, 19 nt, Artificial Sequence
  Description of Artificial Sequence: Synthetic oligonucleotide
cucggaaccagugcaugcu

SEQ ID NO: 1498882 - RNA, 19 nt, Artificial Sequence
  Description of Artificial Sequence: Synthetic oligonucleotide
ccagugcaugcugaugcag

SEQ ID NO: 1498883 - RNA, 19 nt, Artificial Sequence
  Description of Artificial Sequence: Synthetic oligonucleotide
ggaccagcauuggcugagg

SEQ ID NO: 1498884 - RNA, 19 nt, Artificial Sequence
  Description of Artificial Sequence: Synthetic oligonucleotide
cccauauaggcuguucaga

SEQ ID NO: 1498885 - RNA, 19 nt, Artificial Sequence
  Description of Artificial Sequence: Synthetic oligonucleotide
ggcgcuguuccaggaagac

SEQ ID NO: 1498886 - RNA, 19 nt, Artificial Sequence
  Description of Artificial Sequence: Synthetic oligonucleotide
uggcaaucucagggccacc

SEQ ID NO: 1498887 - RNA, 19 nt, Artificial Sequence
  Description of Artificial Sequence: Synthetic oligonucleotide
aggugcucccagacgcucu

SEQ ID NO: 1498888 - RNA, 19 nt, Artificial Sequence
  Description of Artificial Sequence: Synthetic oligonucleotide
cgaaagccucccacucucg

SEQ ID NO: 1498889 - RNA, 19 nt, Artificial Sequence
  Description of Artificial Sequence: Synthetic oligonucleotide
aggcgcuguuccaggaaga

SEQ ID NO: 1498890 - RNA, 19 nt, Artificial Sequence
  Description of Artificial Sequence: Synthetic oligonucleotide
cuaagguguugggucaagu

SEQ ID NO: 1498891 - RNA, 19 nt, Artificial Sequence
  Description of Artificial Sequence: Synthetic oligonucleotide
aguccaggugagggcagau

SEQ ID NO: 1498892 - RNA, 19 nt, Artificial Sequence
  Description of Artificial Sequence: Synthetic oligonucleotide
gcgugaauggugcuauggu

SEQ ID NO: 1498893 - RNA, 19 nt, Artificial Sequence
  Description of Artificial Sequence: Synthetic oligonucleotide
gcuuggcugaggagcuggg

SEQ ID NO: 1498894 - RNA, 19 nt, Artificial Sequence
  Description of Artificial Sequence: Synthetic oligonucleotide
ggcaggcccauagguuagg

SEQ ID NO: 1498895 - RNA, 19 nt, Artificial Sequence
  Description of Artificial Sequence: Synthetic oligonucleotide
cggaacguagucagguuca

SEQ ID NO: 1498896 - RNA, 19 nt, Artificial Sequence
  Description of Artificial Sequence: Synthetic oligonucleotide
cgagcuagcaagagggcaa

SEQ ID NO: 1498897 - RNA, 19 nt, Artificial Sequence
  Description of Artificial Sequence: Synthetic oligonucleotide
ggcccauagguuaggucca

SEQ ID NO: 1498898 - RNA, 19 nt, Artificial Sequence
  Description of Artificial Sequence: Synthetic oligonucleotide
cguaggcuuccacauucug

SEQ ID NO: 1498899 - RNA, 19 nt, Artificial Sequence
  Description of Artificial Sequence: Synthetic oligonucleotide
cacucugccggauggcaau

SEQ ID NO: 1498900 - RNA, 19 nt, Artificial Sequence
  Description of Artificial Sequence: Synthetic oligonucleotide
gcaagcucucugggucugg

SEQ ID NO: 1498901 - RNA, 19 nt, Artificial Sequence
  Description of Artificial Sequence: Synthetic oligonucleotide
ccuaagguguugggucaag

SEQ ID NO: 1498902 - RNA, 19 nt, Artificial Sequence
  Description of Artificial Sequence: Synthetic oligonucleotide
cugugcgugaauggugcua

SEQ ID NO: 1498903 - RNA, 19 nt, Artificial Sequence
  Description of Artificial Sequence: Synthetic oligonucleotide
gguucacagucagguugug

SEQ ID NO: 1498904 - RNA, 19 nt, Artificial Sequence
  Description of Artificial Sequence: Synthetic oligonucleotide
cuccugcgcuuggccagcg

SEQ ID NO: 1498905 - RNA, 19 nt, Artificial Sequence
  Description of Artificial Sequence: Synthetic oligonucleotide
accacaugacuggcagguu

SEQ ID NO: 1498906 - RNA, 19 nt, Artificial Sequence
  Description of Artificial Sequence: Synthetic oligonucleotide
ccagacgcucugcggcagg

SEQ ID NO: 1498907 - RNA, 19 nt, Artificial Sequence
  Description of Artificial Sequence: Synthetic oligonucleotide
ucgcgcucacaggcauagc

SEQ ID NO: 1498908 - RNA, 19 nt, Artificial Sequence
  Description of Artificial Sequence: Synthetic oligonucleotide
gggcauggaaaucuaccuu

SEQ ID NO: 1498909 - RNA, 19 nt, Artificial Sequence
  Description of Artificial Sequence: Synthetic oligonucleotide
gcgauccugcuguugucaa

SEQ ID NO: 1498910 - RNA, 19 nt, Artificial Sequence
  Description of Artificial Sequence: Synthetic oligonucleotide
ccgagcuagcaagagggca

SEQ ID NO: 1498911 - RNA, 19 nt, Artificial Sequence
  Description of Artificial Sequence: Synthetic oligonucleotide
cuucgcgcucacaggcaua

SEQ ID NO: 1498912 - RNA, 19 nt, Artificial Sequence
  Description of Artificial Sequence: Synthetic oligonucleotide
agguucccuuagacuuaag

SEQ ID NO: 1498913 - RNA, 19 nt, Artificial Sequence
  Description of Artificial Sequence: Synthetic oligonucleotide
gcaaguuuggggacacggu

SEQ ID NO: 1498914 - RNA, 19 nt, Artificial Sequence
  Description of Artificial Sequence: Synthetic oligonucleotide
cccaggaggcucgcugucc

SEQ ID NO: 1498915 - RNA, 19 nt, Artificial Sequence
  Description of Artificial Sequence: Synthetic oligonucleotide
cugcgcuuggccagcgccu

SEQ ID NO: 1498916 - RNA, 19 nt, Artificial Sequence
  Description of Artificial Sequence: Synthetic oligonucleotide
gcccauagguuagguccag

SEQ ID NO: 1498917 - RNA, 19 nt, Artificial Sequence
  Description of Artificial Sequence: Synthetic oligonucleotide
ggcagguaaccuggaggca

SEQ ID NO: 1498918 - RNA, 19 nt, Artificial Sequence
  Description of Artificial Sequence: Synthetic oligonucleotide
ggugguggggaguccugcu

SEQ ID NO: 1498919 - RNA, 19 nt, Artificial Sequence
  Description of Artificial Sequence: Synthetic oligonucleotide
gccagcgccucaaucucca

SEQ ID NO: 1498920 - RNA, 19 nt, Artificial Sequence
  Description of Artificial Sequence: Synthetic oligonucleotide
cagccgcacuuagucucug

SEQ ID NO: 1498921 - RNA, 19 nt, Artificial Sequence
  Description of Artificial Sequence: Synthetic oligonucleotide
acgccuuguucagcuugau

SEQ ID NO: 1498922 - RNA, 19 nt, Artificial Sequence
  Description of Artificial Sequence: Synthetic oligonucleotide
ggaagacuucgcgcucaca

SEQ ID NO: 1498923 - RNA, 19 nt, Artificial Sequence
  Description of Artificial Sequence: Synthetic oligonucleotide
gcagguucccuuagacuua

SEQ ID NO: 1498924 - RNA, 19 nt, Artificial Sequence
  Description of Artificial Sequence: Synthetic oligonucleotide
cggaaccagugcaugcuga

SEQ ID NO: 1498925 - RNA, 19 nt, Artificial Sequence
  Description of Artificial Sequence: Synthetic oligonucleotide
cauucuggggugggagggu

SEQ ID NO: 1498926 - RNA, 19 nt, Artificial Sequence
  Description of Artificial Sequence: Synthetic oligonucleotide
cucuggugucucccauucu

SEQ ID NO: 1498927 - RNA, 19 nt, Artificial Sequence
  Description of Artificial Sequence: Synthetic oligonucleotide
ccucuccuauggaguccag

SEQ ID NO: 1498928 - RNA, 19 nt, Artificial Sequence
  Description of Artificial Sequence: Synthetic oligonucleotide
ggaggcaggcccauagguu

SEQ ID NO: 1498929 - RNA, 19 nt, Artificial Sequence
  Description of Artificial Sequence: Synthetic oligonucleotide
cccagacgcucugcggcag

SEQ ID NO: 1498930 - RNA, 19 nt, Artificial Sequence
  Description of Artificial Sequence: Synthetic oligonucleotide
ccacccuccugcgcuuggc

SEQ ID NO: 1498931 - RNA, 19 nt, Artificial Sequence
  Description of Artificial Sequence: Synthetic oligonucleotide
cagauagguccaggucucu

SEQ ID NO: 1498932 - RNA, 19 nt, Artificial Sequence
  Description of Artificial Sequence: Synthetic oligonucleotide
gggcacucagcaggacaca

SEQ ID NO: 1498933 - RNA, 19 nt, Artificial Sequence
  Description of Artificial Sequence: Synthetic oligonucleotide
cagcuuggaacgccuuguu

SEQ ID NO: 1498934 - RNA, 19 nt, Artificial Sequence
  Description of Artificial Sequence: Synthetic oligonucleotide
ccccugcuuuagcuggauc

SEQ ID NO: 1498935 - RNA, 19 nt, Artificial Sequence
  Description of Artificial Sequence: Synthetic oligonucleotide
ccaggcgcuguuccaggaa

SEQ ID NO: 1498936 - RNA, 19 nt, Artificial Sequence
  Description of Artificial Sequence: Synthetic oligonucleotide
ggaacgccuuguucagcuu

SEQ ID NO: 1498937 - RNA, 19 nt, Artificial Sequence
  Description of Artificial Sequence: Synthetic oligonucleotide
ccagccgcacuuagucucu

SEQ ID NO: 1498938 - RNA, 19 nt, Artificial Sequence
  Description of Artificial Sequence: Synthetic oligonucleotide
gcgcuguuccaggaagacu

SEQ ID NO: 1498939 - RNA, 19 nt, Artificial Sequence
  Description of Artificial Sequence: Synthetic oligonucleotide
gcacguaggcuuccacauu

SEQ ID NO: 1498940 - RNA, 19 nt, Artificial Sequence
  Description of Artificial Sequence: Synthetic oligonucleotide
cagggacagugggcacuca

SEQ ID NO: 1498941 - RNA, 19 nt, Artificial Sequence
  Description of Artificial Sequence: Synthetic oligonucleotide
cgcucugcggcaggaugac

SEQ ID NO: 1498942 - RNA, 19 nt, Artificial Sequence
  Description of Artificial Sequence: Synthetic oligonucleotide
gccgacggaccagccgcac

SEQ ID NO: 1498943 - RNA, 19 nt, Artificial Sequence
  Description of Artificial Sequence: Synthetic oligonucleotide
gcaggcccauagguuaggu

SEQ ID NO: 1498944 - RNA, 19 nt, Artificial Sequence
  Description of Artificial Sequence: Synthetic oligonucleotide
gcgcuuggccagcgccuca

SEQ ID NO: 1498945 - RNA, 19 nt, Artificial Sequence
  Description of Artificial Sequence: Synthetic oligonucleotide
ggccgacggaccagccgca

SEQ ID NO: 1498946 - RNA, 19 nt, Artificial Sequence
  Description of Artificial Sequence: Synthetic oligonucleotide
cgacggaccagccgcacuu

SEQ ID NO: 1498947 - RNA, 19 nt, Artificial Sequence
  Description of Artificial Sequence: Synthetic oligonucleotide
cggaccagccgcacuuagu

SEQ ID NO: 1498948 - RNA, 19 nt, Artificial Sequence
  Description of Artificial Sequence: Synthetic oligonucleotide
ccgacggaccagccgcacu

SEQ ID NO: 1498949 - RNA, 19 nt, Artificial Sequence
  Description of Artificial Sequence: Synthetic oligonucleotide
gcccgggucucagccucaa

SEQ ID NO: 1498950 - RNA, 19 nt, Artificial Sequence
  Description of Artificial Sequence: Synthetic oligonucleotide
ccugagcgauccugcuguu

SEQ ID NO: 1498951 - RNA, 19 nt, Artificial Sequence
  Description of Artificial Sequence: Synthetic oligonucleotide
ucaaauaagagcaaaaggu

SEQ ID NO: 1498952 - RNA, 19 nt, Artificial Sequence
  Description of Artificial Sequence: Synthetic oligonucleotide
aagcugacaaauuuaagcg

SEQ ID NO: 1498953 - RNA, 19 nt, Artificial Sequence
  Description of Artificial Sequence: Synthetic oligonucleotide
acaggaaucaccuuggagg

SEQ ID NO: 1498954 - RNA, 19 nt, Artificial Sequence
  Description of Artificial Sequence: Synthetic oligonucleotide
aaagaguaccgguacaugg

SEQ ID NO: 1498955 - RNA, 19 nt, Artificial Sequence
  Description of Artificial Sequence: Synthetic oligonucleotide
guagaaucaagccugagag

SEQ ID NO: 1498956 - RNA, 19 nt, Artificial Sequence
  Description of Artificial Sequence: Synthetic oligonucleotide
aacaugcuaacuccaaugg

SEQ ID NO: 1498957 - RNA, 19 nt, Artificial Sequence
  Description of Artificial Sequence: Synthetic oligonucleotide
caaaacuugagcaaggaac

SEQ ID NO: 1498958 - RNA, 19 nt, Artificial Sequence
  Description of Artificial Sequence: Synthetic oligonucleotide
agugcaaacucacugugcc

SEQ ID NO: 1498959 - RNA, 19 nt, Artificial Sequence
  Description of Artificial Sequence: Synthetic oligonucleotide
cauagcuucgucuagacac

SEQ ID NO: 1498960 - RNA, 19 nt, Artificial Sequence
  Description of Artificial Sequence: Synthetic oligonucleotide
aauaagagcaaaaggugac

SEQ ID NO: 1498961 - RNA, 19 nt, Artificial Sequence
  Description of Artificial Sequence: Synthetic oligonucleotide
ugugccgucccauaaagcg

SEQ ID NO: 1498962 - RNA, 19 nt, Artificial Sequence
  Description of Artificial Sequence: Synthetic oligonucleotide
uuaaguauugcaccaggag

SEQ ID NO: 1498963 - RNA, 19 nt, Artificial Sequence
  Description of Artificial Sequence: Synthetic oligonucleotide
aagcacguuagacagacug

SEQ ID NO: 1498964 - RNA, 19 nt, Artificial Sequence
  Description of Artificial Sequence: Synthetic oligonucleotide
ugggcuuaaggcaaaagag

SEQ ID NO: 1498965 - RNA, 19 nt, Artificial Sequence
  Description of Artificial Sequence: Synthetic oligonucleotide
aaauuuaagcgcuucguau

SEQ ID NO: 1498966 - RNA, 19 nt, Artificial Sequence
  Description of Artificial Sequence: Synthetic oligonucleotide
ucuuaaguauugcaccagg

SEQ ID NO: 1498967 - RNA, 19 nt, Artificial Sequence
  Description of Artificial Sequence: Synthetic oligonucleotide
aagcgcuucguauuggcac

SEQ ID NO: 1498968 - RNA, 19 nt, Artificial Sequence
  Description of Artificial Sequence: Synthetic oligonucleotide
agagcaaaaggugacauuc

SEQ ID NO: 1498969 - RNA, 19 nt, Artificial Sequence
  Description of Artificial Sequence: Synthetic oligonucleotide
ugcuaagcacguuagacag

SEQ ID NO: 1498970 - RNA, 19 nt, Artificial Sequence
  Description of Artificial Sequence: Synthetic oligonucleotide
gaauaaauugaccccaaac

SEQ ID NO: 1498971 - RNA, 19 nt, Artificial Sequence
  Description of Artificial Sequence: Synthetic oligonucleotide
aaauugaccccaaacauca

SEQ ID NO: 1498972 - RNA, 19 nt, Artificial Sequence
  Description of Artificial Sequence: Synthetic oligonucleotide
agcaaaaggugacauuccc

SEQ ID NO: 1498973 - RNA, 19 nt, Artificial Sequence
  Description of Artificial Sequence: Synthetic oligonucleotide
aguaccgguacaugggugc

SEQ ID NO: 1498974 - RNA, 19 nt, Artificial Sequence
  Description of Artificial Sequence: Synthetic oligonucleotide
agucagauaggacaccugg

SEQ ID NO: 1498975 - RNA, 19 nt, Artificial Sequence
  Description of Artificial Sequence: Synthetic oligonucleotide
agcugacaaauuuaagcgc

SEQ ID NO: 1498976 - RNA, 19 nt, Artificial Sequence
  Description of Artificial Sequence: Synthetic oligonucleotide
auaaauugaccccaaacau

SEQ ID NO: 1498977 - RNA, 19 nt, Artificial Sequence
  Description of Artificial Sequence: Synthetic oligonucleotide
aauguagccugccaguaga

SEQ ID NO: 1498978 - RNA, 19 nt, Artificial Sequence
  Description of Artificial Sequence: Synthetic oligonucleotide
aaaacuugagcaaggaaca

SEQ ID NO: 1498979 - RNA, 19 nt, Artificial Sequence
  Description of Artificial Sequence: Synthetic oligonucleotide
agaaucaagccugagagug

SEQ ID NO: 1498980 - RNA, 19 nt, Artificial Sequence
  Description of Artificial Sequence: Synthetic oligonucleotide
ugcaguacaccccaaguca

SEQ ID NO: 1498981 - RNA, 19 nt, Artificial Sequence
  Description of Artificial Sequence: Synthetic oligonucleotide
aaaagcaauguagccugcc

SEQ ID NO: 1498982 - RNA, 19 nt, Artificial Sequence
  Description of Artificial Sequence: Synthetic oligonucleotide
aauuuaagcgcuucguauu

SEQ ID NO: 1498983 - RNA, 19 nt, Artificial Sequence
  Description of Artificial Sequence: Synthetic oligonucleotide
auagaagaugaagagcugg

SEQ ID NO: 1498984 - RNA, 19 nt, Artificial Sequence
  Description of Artificial Sequence: Synthetic oligonucleotide
uaccauaaaacuggcauag

SEQ ID NO: 1498985 - RNA, 19 nt, Artificial Sequence
  Description of Artificial Sequence: Synthetic oligonucleotide
uaaucaaauaagagcaaaa

SEQ ID NO: 1498986 - RNA, 19 nt, Artificial Sequence
  Description of Artificial Sequence: Synthetic oligonucleotide
aagcaauguagccugccag

SEQ ID NO: 1498987 - RNA, 19 nt, Artificial Sequence
  Description of Artificial Sequence: Synthetic oligonucleotide
cuuauaggcaaacagggca

SEQ ID NO: 1498988 - RNA, 19 nt, Artificial Sequence
  Description of Artificial Sequence: Synthetic oligonucleotide
uuguccaaugguauagaag

SEQ ID NO: 1498989 - RNA, 19 nt, Artificial Sequence
  Description of Artificial Sequence: Synthetic oligonucleotide
ucaucagaggccuugggcu

SEQ ID NO: 1498990 - RNA, 19 nt, Artificial Sequence
  Description of Artificial Sequence: Synthetic oligonucleotide
ugacaguguggccauagag

SEQ ID NO: 1498991 - RNA, 19 nt, Artificial Sequence
  Description of Artificial Sequence: Synthetic oligonucleotide
aguagaaucaagccugaga

SEQ ID NO: 1498992 - RNA, 19 nt, Artificial Sequence
  Description of Artificial Sequence: Synthetic oligonucleotide
uccgucuuaaguauugcac

SEQ ID NO: 1498993 - RNA, 19 nt, Artificial Sequence
  Description of Artificial Sequence: Synthetic oligonucleotide
aaaaggugacauucccaag

SEQ ID NO: 1498994 - RNA, 19 nt, Artificial Sequence
  Description of Artificial Sequence: Synthetic oligonucleotide
aaagcaauguagccugcca

SEQ ID NO: 1498995 - RNA, 19 nt, Artificial Sequence
  Description of Artificial Sequence: Synthetic oligonucleotide
aagaguaccgguacauggg

SEQ ID NO: 1498996 - RNA, 19 nt, Artificial Sequence
  Description of Artificial Sequence: Synthetic oligonucleotide
gaucagugccagcacacgg

SEQ ID NO: 1498997 - RNA, 19 nt, Artificial Sequence
  Description of Artificial Sequence: Synthetic oligonucleotide
auuuaagcgcuucguauug

SEQ ID NO: 1498998 - RNA, 19 nt, Artificial Sequence
  Description of Artificial Sequence: Synthetic oligonucleotide
uaguucuuccgucuuaagu

SEQ ID NO: 1498999 - RNA, 19 nt, Artificial Sequence
  Description of Artificial Sequence: Synthetic oligonucleotide
aaagcgggcucccuccagg

SEQ ID NO: 1499000 - RNA, 19 nt, Artificial Sequence
  Description of Artificial Sequence: Synthetic oligonucleotide
uauagaagaugaagagcug

SEQ ID NO: 1499001 - RNA, 19 nt, Artificial Sequence
  Description of Artificial Sequence: Synthetic oligonucleotide
guagcaaaacuugagcaag

SEQ ID NO: 1499002 - RNA, 19 nt, Artificial Sequence
  Description of Artificial Sequence: Synthetic oligonucleotide
agagucaugaugaugguga

SEQ ID NO: 1499003 - RNA, 19 nt, Artificial Sequence
  Description of Artificial Sequence: Synthetic oligonucleotide
ugccgucccauaaagcggg

SEQ ID NO: 1499004 - RNA, 19 nt, Artificial Sequence
  Description of Artificial Sequence: Synthetic oligonucleotide
aguguucauagcuucgucu

SEQ ID NO: 1499005 - RNA, 19 nt, Artificial Sequence
  Description of Artificial Sequence: Synthetic oligonucleotide
ugccaguagaaucaagccu

SEQ ID NO: 1499006 - RNA, 19 nt, Artificial Sequence
  Description of Artificial Sequence: Synthetic oligonucleotide
agcgcuucguauuggcacc

SEQ ID NO: 1499007 - RNA, 19 nt, Artificial Sequence
  Description of Artificial Sequence: Synthetic oligonucleotide
uguucauagcuucgucuag

SEQ ID NO: 1499008 - RNA, 19 nt, Artificial Sequence
  Description of Artificial Sequence: Synthetic oligonucleotide
uuauaggcaaacagggcau

SEQ ID NO: 1499009 - RNA, 19 nt, Artificial Sequence
  Description of Artificial Sequence: Synthetic oligonucleotide
cauaaagcgggcucccucc

SEQ ID NO: 1499010 - RNA, 19 nt, Artificial Sequence
  Description of Artificial Sequence: Synthetic oligonucleotide
ugguacaaccuucuuuccc

SEQ ID NO: 1499011 - RNA, 19 nt, Artificial Sequence
  Description of Artificial Sequence: Synthetic oligonucleotide
caggaaucaccuuggaggc

SEQ ID NO: 1499012 - RNA, 19 nt, Artificial Sequence
  Description of Artificial Sequence: Synthetic oligonucleotide
uagccugccaguagaauca

SEQ ID NO: 1499013 - RNA, 19 nt, Artificial Sequence
  Description of Artificial Sequence: Synthetic oligonucleotide
auagcugccggucaucacu

SEQ ID NO: 1499014 - RNA, 19 nt, Artificial Sequence
  Description of Artificial Sequence: Synthetic oligonucleotide
uuaagcgcuucguauuggc

SEQ ID NO: 1499015 - RNA, 19 nt, Artificial Sequence
  Description of Artificial Sequence: Synthetic oligonucleotide
aaaagaguaccgguacaug

SEQ ID NO: 1499016 - RNA, 19 nt, Artificial Sequence
  Description of Artificial Sequence: Synthetic oligonucleotide
cacugaugacaucuuauag

SEQ ID NO: 1499017 - RNA, 19 nt, Artificial Sequence
  Description of Artificial Sequence: Synthetic oligonucleotide
uagagaccugccacgauca

SEQ ID NO: 1499018 - RNA, 19 nt, Artificial Sequence
  Description of Artificial Sequence: Synthetic oligonucleotide
caguggaaccucaucagag

SEQ ID NO: 1499019 - RNA, 19 nt, Artificial Sequence
  Description of Artificial Sequence: Synthetic oligonucleotide
gaaagcagagaccccugcc

SEQ ID NO: 1499020 - RNA, 19 nt, Artificial Sequence
  Description of Artificial Sequence: Synthetic oligonucleotide
ugagccuacugugaaaaga

SEQ ID NO: 1499021 - RNA, 19 nt, Artificial Sequence
  Description of Artificial Sequence: Synthetic oligonucleotide
cuaacuccaauggagauga

SEQ ID NO: 1499022 - RNA, 19 nt, Artificial Sequence
  Description of Artificial Sequence: Synthetic oligonucleotide
agccagguaccauaaaacu

SEQ ID NO: 1499023 - RNA, 19 nt, Artificial Sequence
  Description of Artificial Sequence: Synthetic oligonucleotide
agccaguggaaccucauca

SEQ ID NO: 1499024 - RNA, 19 nt, Artificial Sequence
  Description of Artificial Sequence: Synthetic oligonucleotide
cucaucagaggccuugggc

SEQ ID NO: 1499025 - RNA, 19 nt, Artificial Sequence
  Description of Artificial Sequence: Synthetic oligonucleotide
aacuugagcaaggaacaca

SEQ ID NO: 1499026 - RNA, 19 nt, Artificial Sequence
  Description of Artificial Sequence: Synthetic oligonucleotide
auagcuucgucuagacacc

SEQ ID NO: 1499027 - RNA, 19 nt, Artificial Sequence
  Description of Artificial Sequence: Synthetic oligonucleotide
uuuaagcgcuucguauugg

SEQ ID NO: 1499028 - RNA, 19 nt, Artificial Sequence
  Description of Artificial Sequence: Synthetic oligonucleotide
ucauaccuucugcacuggg

SEQ ID NO: 1499029 - RNA, 19 nt, Artificial Sequence
  Description of Artificial Sequence: Synthetic oligonucleotide
uuguuugcguaggacacag

SEQ ID NO: 1499030 - RNA, 19 nt, Artificial Sequence
  Description of Artificial Sequence: Synthetic oligonucleotide
ugcaaacucacugugccgu

SEQ ID NO: 1499031 - RNA, 19 nt, Artificial Sequence
  Description of Artificial Sequence: Synthetic oligonucleotide
aguugguacaaccuucuuu

SEQ ID NO: 1499032 - RNA, 19 nt, Artificial Sequence
  Description of Artificial Sequence: Synthetic oligonucleotide
ccauaaaacuggcauagcc

SEQ ID NO: 1499033 - RNA, 19 nt, Artificial Sequence
  Description of Artificial Sequence: Synthetic oligonucleotide
ucgucuagacaccagcuuu

SEQ ID NO: 1499034 - RNA, 19 nt, Artificial Sequence
  Description of Artificial Sequence: Synthetic oligonucleotide
guagccugccaguagaauc

SEQ ID NO: 1499035 - RNA, 19 nt, Artificial Sequence
  Description of Artificial Sequence: Synthetic oligonucleotide
ugugaaaagacaggagaau

SEQ ID NO: 1499036 - RNA, 19 nt, Artificial Sequence
  Description of Artificial Sequence: Synthetic oligonucleotide
guggaaccucaucagaggc

SEQ ID NO: 1499037 - RNA, 19 nt, Artificial Sequence
  Description of Artificial Sequence: Synthetic oligonucleotide
gagccuacugugaaaagac

SEQ ID NO: 1499038 - RNA, 19 nt, Artificial Sequence
  Description of Artificial Sequence: Synthetic oligonucleotide
ugcguaggacacaguagag

SEQ ID NO: 1499039 - RNA, 19 nt, Artificial Sequence
  Description of Artificial Sequence: Synthetic oligonucleotide
agcaauguagccugccagu

SEQ ID NO: 1499040 - RNA, 19 nt, Artificial Sequence
  Description of Artificial Sequence: Synthetic oligonucleotide
acguuagacagacuggcaa

SEQ ID NO: 1499041 - RNA, 19 nt, Artificial Sequence
  Description of Artificial Sequence: Synthetic oligonucleotide
aauuguccaaugguauaga

SEQ ID NO: 1499042 - RNA, 19 nt, Artificial Sequence
  Description of Artificial Sequence: Synthetic oligonucleotide
uaagagcaaaaggugacau

SEQ ID NO: 1499043 - RNA, 19 nt, Artificial Sequence
  Description of Artificial Sequence: Synthetic oligonucleotide
cuguacucauaccuucugc

SEQ ID NO: 1499044 - RNA, 19 nt, Artificial Sequence
  Description of Artificial Sequence: Synthetic oligonucleotide
agaccugccacgaucagug

SEQ ID NO: 1499045 - RNA, 19 nt, Artificial Sequence
  Description of Artificial Sequence: Synthetic oligonucleotide
cuuaaguauugcaccagga

SEQ ID NO: 1499046 - RNA, 19 nt, Artificial Sequence
  Description of Artificial Sequence: Synthetic oligonucleotide
ccugccaguagaaucaagc

SEQ ID NO: 1499047 - RNA, 19 nt, Artificial Sequence
  Description of Artificial Sequence: Synthetic oligonucleotide
cagcacacgguucauuagc

SEQ ID NO: 1499048 - RNA, 19 nt, Artificial Sequence
  Description of Artificial Sequence: Synthetic oligonucleotide
guagagaccugccacgauc

SEQ ID NO: 1499049 - RNA, 19 nt, Artificial Sequence
  Description of Artificial Sequence: Synthetic oligonucleotide
uaagcgcuucguauuggca

SEQ ID NO: 1499050 - RNA, 19 nt, Artificial Sequence
  Description of Artificial Sequence: Synthetic oligonucleotide
agaguaccgguacaugggu

SEQ ID NO: 1499051 - RNA, 19 nt, Artificial Sequence
  Description of Artificial Sequence: Synthetic oligonucleotide
aagagcaaaaggugacauu

SEQ ID NO: 1499052 - RNA, 19 nt, Artificial Sequence
  Description of Artificial Sequence: Synthetic oligonucleotide
uggcaaaagaguaccggua

SEQ ID NO: 1499053 - RNA, 19 nt, Artificial Sequence
  Description of Artificial Sequence: Synthetic oligonucleotide
uagaaucaagccugagagu

SEQ ID NO: 1499054 - RNA, 19 nt, Artificial Sequence
  Description of Artificial Sequence: Synthetic oligonucleotide
auuguccaaugguauagaa

SEQ ID NO: 1499055 - RNA, 19 nt, Artificial Sequence
  Description of Artificial Sequence: Synthetic oligonucleotide
aggaccugccaagagggac

SEQ ID NO: 1499056 - RNA, 19 nt, Artificial Sequence
  Description of Artificial Sequence: Synthetic oligonucleotide
guuugcguaggacacagua

SEQ ID NO: 1499057 - RNA, 19 nt, Artificial Sequence
  Description of Artificial Sequence: Synthetic oligonucleotide
gggcuuaaggcaaaagagg

SEQ ID NO: 1499058 - RNA, 19 nt, Artificial Sequence
  Description of Artificial Sequence: Synthetic oligonucleotide
acaaccuucuuuccccgcu

SEQ ID NO: 1499059 - RNA, 19 nt, Artificial Sequence
  Description of Artificial Sequence: Synthetic oligonucleotide
accauaaaacuggcauagc

SEQ ID NO: 1499060 - RNA, 19 nt, Artificial Sequence
  Description of Artificial Sequence: Synthetic oligonucleotide
gacgggguuguuugcguag

SEQ ID NO: 1499061 - RNA, 19 nt, Artificial Sequence
  Description of Artificial Sequence: Synthetic oligonucleotide
caugacgggguuguuugcg

SEQ ID NO: 1499062 - RNA, 19 nt, Artificial Sequence
  Description of Artificial Sequence: Synthetic oligonucleotide
accgguacaugggugcccc

SEQ ID NO: 1499063 - RNA, 19 nt, Artificial Sequence
  Description of Artificial Sequence: Synthetic oligonucleotide
agugagccuacugugaaaa

SEQ ID NO: 1499064 - RNA, 19 nt, Artificial Sequence
  Description of Artificial Sequence: Synthetic oligonucleotide
acugcggaggggcuucggg

SEQ ID NO: 1499065 - RNA, 19 nt, Artificial Sequence
  Description of Artificial Sequence: Synthetic oligonucleotide
ugccaagagggacuacugu

SEQ ID NO: 1499066 - RNA, 19 nt, Artificial Sequence
  Description of Artificial Sequence: Synthetic oligonucleotide
agcacguuagacagacugg

SEQ ID NO: 1499067 - RNA, 19 nt, Artificial Sequence
  Description of Artificial Sequence: Synthetic oligonucleotide
ggcaaaagaguaccgguac

SEQ ID NO: 1499068 - RNA, 19 nt, Artificial Sequence
  Description of Artificial Sequence: Synthetic oligonucleotide
aggcaaacagggcauccug

SEQ ID NO: 1499069 - RNA, 19 nt, Artificial Sequence
  Description of Artificial Sequence: Synthetic oligonucleotide
agagggacuacugucugcu

SEQ ID NO: 1499070 - RNA, 19 nt, Artificial Sequence
  Description of Artificial Sequence: Synthetic oligonucleotide
agagcuucggggcucuggu

SEQ ID NO: 1499071 - RNA, 19 nt, Artificial Sequence
  Description of Artificial Sequence: Synthetic oligonucleotide
ccgucuuaaguauugcacc

SEQ ID NO: 1499072 - RNA, 19 nt, Artificial Sequence
  Description of Artificial Sequence: Synthetic oligonucleotide
caauguagccugccaguag

SEQ ID NO: 1499073 - RNA, 19 nt, Artificial Sequence
  Description of Artificial Sequence: Synthetic oligonucleotide
ggugaagcugucaaaagca

SEQ ID NO: 1499074 - RNA, 19 nt, Artificial Sequence
  Description of Artificial Sequence: Synthetic oligonucleotide
acgaucagugccagcacac

SEQ ID NO: 1499075 - RNA, 19 nt, Artificial Sequence
  Description of Artificial Sequence: Synthetic oligonucleotide
uaaagcgggcucccuccag

SEQ ID NO: 1499076 - RNA, 19 nt, Artificial Sequence
  Description of Artificial Sequence: Synthetic oligonucleotide
uucgucuagacaccagcuu

SEQ ID NO: 1499077 - RNA, 19 nt, Artificial Sequence
  Description of Artificial Sequence: Synthetic oligonucleotide
cugcaguacaccccaaguc

SEQ ID NO: 1499078 - RNA, 19 nt, Artificial Sequence
  Description of Artificial Sequence: Synthetic oligonucleotide
cuuuccccgcugcuuacgg

SEQ ID NO: 1499079 - RNA, 19 nt, Artificial Sequence
  Description of Artificial Sequence: Synthetic oligonucleotide
cagguaccauaaaacuggc

SEQ ID NO: 1499080 - RNA, 19 nt, Artificial Sequence
  Description of Artificial Sequence: Synthetic oligonucleotide
caaaagcaauguagccugc

SEQ ID NO: 1499081 - RNA, 19 nt, Artificial Sequence
  Description of Artificial Sequence: Synthetic oligonucleotide
cguaggacacaguagagac

SEQ ID NO: 1499082 - RNA, 19 nt, Artificial Sequence
  Description of Artificial Sequence: Synthetic oligonucleotide
gacuggcaaaagaguaccg

SEQ ID NO: 1499083 - RNA, 19 nt, Artificial Sequence
  Description of Artificial Sequence: Synthetic oligonucleotide
ucucuguccggggagccag

SEQ ID NO: 1499084 - RNA, 19 nt, Artificial Sequence
  Description of Artificial Sequence: Synthetic oligonucleotide
uauucccaguguucauagc

SEQ ID NO: 1499085 - RNA, 19 nt, Artificial Sequence
  Description of Artificial Sequence: Synthetic oligonucleotide
ggugauguggcgguggccc

SEQ ID NO: 1499086 - RNA, 19 nt, Artificial Sequence
  Description of Artificial Sequence: Synthetic oligonucleotide
aguagugagccuacuguga

SEQ ID NO: 1499087 - RNA, 19 nt, Artificial Sequence
  Description of Artificial Sequence: Synthetic oligonucleotide
cugcuguacucauaccuuc

SEQ ID NO: 1499088 - RNA, 19 nt, Artificial Sequence
  Description of Artificial Sequence: Synthetic oligonucleotide
cugcggaggggcuucgggg

SEQ ID NO: 1499089 - RNA, 19 nt, Artificial Sequence
  Description of Artificial Sequence: Synthetic oligonucleotide
cagaaacaugcuaacucca

SEQ ID NO: 1499090 - RNA, 19 nt, Artificial Sequence
  Description of Artificial Sequence: Synthetic oligonucleotide
ugaccccaaacaucaucug

SEQ ID NO: 1499091 - RNA, 19 nt, Artificial Sequence
  Description of Artificial Sequence: Synthetic oligonucleotide
ugacauucccaaguagcaa

SEQ ID NO: 1499092 - RNA, 19 nt, Artificial Sequence
  Description of Artificial Sequence: Synthetic oligonucleotide
uggcgguggccccauagcu

SEQ ID NO: 1499093 - RNA, 19 nt, Artificial Sequence
  Description of Artificial Sequence: Synthetic oligonucleotide
gcuucgucuagacaccagc

SEQ ID NO: 1499094 - RNA, 19 nt, Artificial Sequence
  Description of Artificial Sequence: Synthetic oligonucleotide
ggcucauugccaaacacac

SEQ ID NO: 1499095 - RNA, 19 nt, Artificial Sequence
  Description of Artificial Sequence: Synthetic oligonucleotide
uacaaccuucuuuccccgc

SEQ ID NO: 1499096 - RNA, 19 nt, Artificial Sequence
  Description of Artificial Sequence: Synthetic oligonucleotide
gcaaacagggcauccugcc

SEQ ID NO: 1499097 - RNA, 19 nt, Artificial Sequence
  Description of Artificial Sequence: Synthetic oligonucleotide
guagugagccuacugugaa

SEQ ID NO: 1499098 - RNA, 19 nt, Artificial Sequence
  Description of Artificial Sequence: Synthetic oligonucleotide
agggcaugaagugcaaacu

SEQ ID NO: 1499099 - RNA, 19 nt, Artificial Sequence
  Description of Artificial Sequence: Synthetic oligonucleotide
acgguucauuagcaccagg

SEQ ID NO: 1499100 - RNA, 19 nt, Artificial Sequence
  Description of Artificial Sequence: Synthetic oligonucleotide
gguuguuugcguaggacac

SEQ ID NO: 1499101 - RNA, 19 nt, Artificial Sequence
  Description of Artificial Sequence: Synthetic oligonucleotide
cagcugcuaagcacguuag

SEQ ID NO: 1499102 - RNA, 19 nt, Artificial Sequence
  Description of Artificial Sequence: Synthetic oligonucleotide
ugcuccaguagugagccua

SEQ ID NO: 1499103 - RNA, 19 nt, Artificial Sequence
  Description of Artificial Sequence: Synthetic oligonucleotide
gagagcuucggggcucugg

SEQ ID NO: 1499104 - RNA, 19 nt, Artificial Sequence
  Description of Artificial Sequence: Synthetic oligonucleotide
gaaacaugcuaacuccaau

SEQ ID NO: 1499105 - RNA, 19 nt, Artificial Sequence
  Description of Artificial Sequence: Synthetic oligonucleotide
aagucagauaggacaccug

SEQ ID NO: 1499106 - RNA, 19 nt, Artificial Sequence
  Description of Artificial Sequence: Synthetic oligonucleotide
agcggaagaaccacagcug

SEQ ID NO: 1499107 - RNA, 19 nt, Artificial Sequence
  Description of Artificial Sequence: Synthetic oligonucleotide
caaacucacugugccgucc

SEQ ID NO: 1499108 - RNA, 19 nt, Artificial Sequence
  Description of Artificial Sequence: Synthetic oligonucleotide
auaaagcgggcucccucca

SEQ ID NO: 1499109 - RNA, 19 nt, Artificial Sequence
  Description of Artificial Sequence: Synthetic oligonucleotide
gcaauagccuggcggagag

SEQ ID NO: 1499110 - RNA, 19 nt, Artificial Sequence
  Description of Artificial Sequence: Synthetic oligonucleotide
aguacaccccaagucagau

SEQ ID NO: 1499111 - RNA, 19 nt, Artificial Sequence
  Description of Artificial Sequence: Synthetic oligonucleotide
ccaggagguagccagguac

SEQ ID NO: 1499112 - RNA, 19 nt, Artificial Sequence
  Description of Artificial Sequence: Synthetic oligonucleotide
guacaugggugccccauga

SEQ ID NO: 1499113 - RNA, 19 nt, Artificial Sequence
  Description of Artificial Sequence: Synthetic oligonucleotide
augacgggguuguuugcgu

SEQ ID NO: 1499114 - RNA, 19 nt, Artificial Sequence
  Description of Artificial Sequence: Synthetic oligonucleotide
aacucacugugccguccca

SEQ ID NO: 1499115 - RNA, 19 nt, Artificial Sequence
  Description of Artificial Sequence: Synthetic oligonucleotide
gucccauaaagcgggcucc

SEQ ID NO: 1499116 - RNA, 19 nt, Artificial Sequence
  Description of Artificial Sequence: Synthetic oligonucleotide
gccagguaccauaaaacug

SEQ ID NO: 1499117 - RNA, 19 nt, Artificial Sequence
  Description of Artificial Sequence: Synthetic oligonucleotide
gcacguuagacagacuggc

SEQ ID NO: 1499118 - RNA, 19 nt, Artificial Sequence
  Description of Artificial Sequence: Synthetic oligonucleotide
gccaagagggacuacuguc

SEQ ID NO: 1499119 - RNA, 19 nt, Artificial Sequence
  Description of Artificial Sequence: Synthetic oligonucleotide
gugagccuacugugaaaag

SEQ ID NO: 1499120 - RNA, 19 nt, Artificial Sequence
  Description of Artificial Sequence: Synthetic oligonucleotide
gagaccccugccugucucc

SEQ ID NO: 1499121 - RNA, 19 nt, Artificial Sequence
  Description of Artificial Sequence: Synthetic oligonucleotide
cuuacggccccgggcauag

SEQ ID NO: 1499122 - RNA, 19 nt, Artificial Sequence
  Description of Artificial Sequence: Synthetic oligonucleotide
uagugagccuacugugaaa

SEQ ID NO: 1499123 - RNA, 19 nt, Artificial Sequence
  Description of Artificial Sequence: Synthetic oligonucleotide
gaguaccgguacaugggug

SEQ ID NO: 1499124 - RNA, 19 nt, Artificial Sequence
  Description of Artificial Sequence: Synthetic oligonucleotide
agagaccugccacgaucag

SEQ ID NO: 1499125 - RNA, 19 nt, Artificial Sequence
  Description of Artificial Sequence: Synthetic oligonucleotide
aagacgggagcgcggcgaa

SEQ ID NO: 1499126 - RNA, 19 nt, Artificial Sequence
  Description of Artificial Sequence: Synthetic oligonucleotide
aaaggccccgaaaggggcu

SEQ ID NO: 1499127 - RNA, 19 nt, Artificial Sequence
  Description of Artificial Sequence: Synthetic oligonucleotide
ugccggucaucacucuuuc

SEQ ID NO: 1499128 - RNA, 19 nt, Artificial Sequence
  Description of Artificial Sequence: Synthetic oligonucleotide
gaagacgggagcgcggcga

SEQ ID NO: 1499129 - RNA, 19 nt, Artificial Sequence
  Description of Artificial Sequence: Synthetic oligonucleotide
agcacacgguucauuagca

SEQ ID NO: 1499130 - RNA, 19 nt, Artificial Sequence
  Description of Artificial Sequence: Synthetic oligonucleotide
cccaugacgggguuguuug

SEQ ID NO: 1499131 - RNA, 19 nt, Artificial Sequence
  Description of Artificial Sequence: Synthetic oligonucleotide
cugcuuacggccccgggca

SEQ ID NO: 1499132 - RNA, 19 nt, Artificial Sequence
  Description of Artificial Sequence: Synthetic oligonucleotide
cuggcaaaagaguaccggu

SEQ ID NO: 1499133 - RNA, 19 nt, Artificial Sequence
  Description of Artificial Sequence: Synthetic oligonucleotide
caaacaucaucugcacuga

SEQ ID NO: 1499134 - RNA, 19 nt, Artificial Sequence
  Description of Artificial Sequence: Synthetic oligonucleotide
aggggaaagcagagacccc

SEQ ID NO: 1499135 - RNA, 19 nt, Artificial Sequence
  Description of Artificial Sequence: Synthetic oligonucleotide
caguguucauagcuucguc

SEQ ID NO: 1499136 - RNA, 19 nt, Artificial Sequence
  Description of Artificial Sequence: Synthetic oligonucleotide
caaccuucuuuccccgcug

SEQ ID NO: 1499137 - RNA, 19 nt, Artificial Sequence
  Description of Artificial Sequence: Synthetic oligonucleotide
aguagagaccugccacgau

SEQ ID NO: 1499138 - RNA, 19 nt, Artificial Sequence
  Description of Artificial Sequence: Synthetic oligonucleotide
agcugcuaagcacguuaga

SEQ ID NO: 1499139 - RNA, 19 nt, Artificial Sequence
  Description of Artificial Sequence: Synthetic oligonucleotide
uguuugcguaggacacagu

SEQ ID NO: 1499140 - RNA, 19 nt, Artificial Sequence
  Description of Artificial Sequence: Synthetic oligonucleotide
accccaagucagauaggac

SEQ ID NO: 1499141 - RNA, 19 nt, Artificial Sequence
  Description of Artificial Sequence: Synthetic oligonucleotide
aggaacacaaaggccccga

SEQ ID NO: 1499142 - RNA, 19 nt, Artificial Sequence
  Description of Artificial Sequence: Synthetic oligonucleotide
aagugcucgccuggugaug

SEQ ID NO: 1499143 - RNA, 19 nt, Artificial Sequence
  Description of Artificial Sequence: Synthetic oligonucleotide
acgggagcgcggcgaacac

SEQ ID NO: 1499144 - RNA, 19 nt, Artificial Sequence
  Description of Artificial Sequence: Synthetic oligonucleotide
ugucucuguccggggagcc

SEQ ID NO: 1499145 - RNA, 19 nt, Artificial Sequence
  Description of Artificial Sequence: Synthetic oligonucleotide
uagcuucgucuagacacca

SEQ ID NO: 1499146 - RNA, 19 nt, Artificial Sequence
  Description of Artificial Sequence: Synthetic oligonucleotide
uggcaauagccuggcggag

SEQ ID NO: 1499147 - RNA, 19 nt, Artificial Sequence
  Description of Artificial Sequence: Synthetic oligonucleotide
gagggacuacugucugcug

SEQ ID NO: 1499148 - RNA, 19 nt, Artificial Sequence
  Description of Artificial Sequence: Synthetic oligonucleotide
cuccaauccucugcuguac

SEQ ID NO: 1499149 - RNA, 19 nt, Artificial Sequence
  Description of Artificial Sequence: Synthetic oligonucleotide
gcaaaagaguaccgguaca

SEQ ID NO: 1499150 - RNA, 19 nt, Artificial Sequence
  Description of Artificial Sequence: Synthetic oligonucleotide
gguacaugggugccccaug

SEQ ID NO: 1499151 - RNA, 19 nt, Artificial Sequence
  Description of Artificial Sequence: Synthetic oligonucleotide
gcgguggccccauagcugc

SEQ ID NO: 1499152 - RNA, 19 nt, Artificial Sequence
  Description of Artificial Sequence: Synthetic oligonucleotide
cacguuagacagacuggca

SEQ ID NO: 1499153 - RNA, 19 nt, Artificial Sequence
  Description of Artificial Sequence: Synthetic oligonucleotide
ugacgggguuguuugcgua

SEQ ID NO: 1499154 - RNA, 19 nt, Artificial Sequence
  Description of Artificial Sequence: Synthetic oligonucleotide
ucaugacaggaaucaccuu

SEQ ID NO: 1499155 - RNA, 19 nt, Artificial Sequence
  Description of Artificial Sequence: Synthetic oligonucleotide
agguaguucuuccgucuua

SEQ ID NO: 1499156 - RNA, 19 nt, Artificial Sequence
  Description of Artificial Sequence: Synthetic oligonucleotide
agguauucccaguguucau

SEQ ID NO: 1499157 - RNA, 19 nt, Artificial Sequence
  Description of Artificial Sequence: Synthetic oligonucleotide
gacgggagcgcggcgaaca

SEQ ID NO: 1499158 - RNA, 19 nt, Artificial Sequence
  Description of Artificial Sequence: Synthetic oligonucleotide
cuucgucuagacaccagcu

SEQ ID NO: 1499159 - RNA, 19 nt, Artificial Sequence
  Description of Artificial Sequence: Synthetic oligonucleotide
gcaaaacuugagcaaggaa

SEQ ID NO: 1499160 - RNA, 19 nt, Artificial Sequence
  Description of Artificial Sequence: Synthetic oligonucleotide
aauugaccccaaacaucau

SEQ ID NO: 1499161 - RNA, 19 nt, Artificial Sequence
  Description of Artificial Sequence: Synthetic oligonucleotide
ggcaaacagggcauccugc

SEQ ID NO: 1499162 - RNA, 19 nt, Artificial Sequence
  Description of Artificial Sequence: Synthetic oligonucleotide
guaccgguacaugggugcc

SEQ ID NO: 1499163 - RNA, 19 nt, Artificial Sequence
  Description of Artificial Sequence: Synthetic oligonucleotide
cacuagacagcagaaacau

SEQ ID NO: 1499164 - RNA, 19 nt, Artificial Sequence
  Description of Artificial Sequence: Synthetic oligonucleotide
uaccgguacaugggugccc

SEQ ID NO: 1499165 - RNA, 19 nt, Artificial Sequence
  Description of Artificial Sequence: Synthetic oligonucleotide
gcuucguauuggcaccagc

SEQ ID NO: 1499166 - RNA, 19 nt, Artificial Sequence
  Description of Artificial Sequence: Synthetic oligonucleotide
guuugaggugaagcuguca

SEQ ID NO: 1499167 - RNA, 19 nt, Artificial Sequence
  Description of Artificial Sequence: Synthetic oligonucleotide
gaccugccacgaucagugc

SEQ ID NO: 1499168 - RNA, 19 nt, Artificial Sequence
  Description of Artificial Sequence: Synthetic oligonucleotide
agcgggcucccuccaggag

SEQ ID NO: 1499169 - RNA, 19 nt, Artificial Sequence
  Description of Artificial Sequence: Synthetic oligonucleotide
gaagugcucgccuggugau

SEQ ID NO: 1499170 - RNA, 19 nt, Artificial Sequence
  Description of Artificial Sequence: Synthetic oligonucleotide
ccacuagacagcagaaaca

SEQ ID NO: 1499171 - RNA, 19 nt, Artificial Sequence
  Description of Artificial Sequence: Synthetic oligonucleotide
caagucagauaggacaccu

SEQ ID NO: 1499172 - RNA, 19 nt, Artificial Sequence
  Description of Artificial Sequence: Synthetic oligonucleotide
cacgguucauuagcaccag

SEQ ID NO: 1499173 - RNA, 19 nt, Artificial Sequence
  Description of Artificial Sequence: Synthetic oligonucleotide
gaaucaagccugagagugu

SEQ ID NO: 1499174 - RNA, 19 nt, Artificial Sequence
  Description of Artificial Sequence: Synthetic oligonucleotide
cccaaguagcaaaacuuga

SEQ ID NO: 1499175 - RNA, 19 nt, Artificial Sequence
  Description of Artificial Sequence: Synthetic oligonucleotide
cauagccagcaacauucaa

SEQ ID NO: 1499176 - RNA, 19 nt, Artificial Sequence
  Description of Artificial Sequence: Synthetic oligonucleotide
caauggagaugaggccggc

SEQ ID NO: 1499177 - RNA, 19 nt, Artificial Sequence
  Description of Artificial Sequence: Synthetic oligonucleotide
agguaccauaaaacuggca

SEQ ID NO: 1499178 - RNA, 19 nt, Artificial Sequence
  Description of Artificial Sequence: Synthetic oligonucleotide
ccagcacacgguucauuag

SEQ ID NO: 1499179 - RNA, 19 nt, Artificial Sequence
  Description of Artificial Sequence: Synthetic oligonucleotide
agcuucgucuagacaccag

SEQ ID NO: 1499180 - RNA, 19 nt, Artificial Sequence
  Description of Artificial Sequence: Synthetic oligonucleotide
ccauaaagcgggcucccuc

SEQ ID NO: 1499181 - RNA, 19 nt, Artificial Sequence
  Description of Artificial Sequence: Synthetic oligonucleotide
gguauucccaguguucaua

SEQ ID NO: 1499182 - RNA, 19 nt, Artificial Sequence
  Description of Artificial Sequence: Synthetic oligonucleotide
ggagccccgaggcacagaa

SEQ ID NO: 1499183 - RNA, 19 nt, Artificial Sequence
  Description of Artificial Sequence: Synthetic oligonucleotide
caguagagaccugccacga

SEQ ID NO: 1499184 - RNA, 19 nt, Artificial Sequence
  Description of Artificial Sequence: Synthetic oligonucleotide
gagcuucggggcucugguc

SEQ ID NO: 1499185 - RNA, 19 nt, Artificial Sequence
  Description of Artificial Sequence: Synthetic oligonucleotide
cgggcauagacucugagua

SEQ ID NO: 1499186 - RNA, 19 nt, Artificial Sequence
  Description of Artificial Sequence: Synthetic oligonucleotide
ugcuuacggccccgggcau

SEQ ID NO: 1499187 - RNA, 19 nt, Artificial Sequence
  Description of Artificial Sequence: Synthetic oligonucleotide
gcacacgguucauuagcac

SEQ ID NO: 1499188 - RNA, 19 nt, Artificial Sequence
  Description of Artificial Sequence: Synthetic oligonucleotide
cuggagagcuucggggcuc

SEQ ID NO: 1499189 - RNA, 19 nt, Artificial Sequence
  Description of Artificial Sequence: Synthetic oligonucleotide
cucacugugccgucccaua

SEQ ID NO: 1499190 - RNA, 19 nt, Artificial Sequence
  Description of Artificial Sequence: Synthetic oligonucleotide
gagaccugccacgaucagu

SEQ ID NO: 1499191 - RNA, 19 nt, Artificial Sequence
  Description of Artificial Sequence: Synthetic oligonucleotide
guccacuagacagcagaaa

SEQ ID NO: 1499192 - RNA, 19 nt, Artificial Sequence
  Description of Artificial Sequence: Synthetic oligonucleotide
gcguaggacacaguagaga

SEQ ID NO: 1499193 - RNA, 19 nt, Artificial Sequence
  Description of Artificial Sequence: Synthetic oligonucleotide
cgucuagacaccagcuuuc

SEQ ID NO: 1499194 - RNA, 19 nt, Artificial Sequence
  Description of Artificial Sequence: Synthetic oligonucleotide
gcggagagucaugaugaug

SEQ ID NO: 1499195 - RNA, 19 nt, Artificial Sequence
  Description of Artificial Sequence: Synthetic oligonucleotide
ggcauccugccaguuugag

SEQ ID NO: 1499196 - RNA, 19 nt, Artificial Sequence
  Description of Artificial Sequence: Synthetic oligonucleotide
ccaagucagauaggacacc

SEQ ID NO: 1499197 - RNA, 19 nt, Artificial Sequence
  Description of Artificial Sequence: Synthetic oligonucleotide
agacgggagcgcggcgaac

SEQ ID NO: 1499198 - RNA, 19 nt, Artificial Sequence
  Description of Artificial Sequence: Synthetic oligonucleotide
cugccacgaucagugccag

SEQ ID NO: 1499199 - RNA, 19 nt, Artificial Sequence
  Description of Artificial Sequence: Synthetic oligonucleotide
ccggggagccaguggaacc

SEQ ID NO: 1499200 - RNA, 19 nt, Artificial Sequence
  Description of Artificial Sequence: Synthetic oligonucleotide
ccagcugcuaagcacguua

SEQ ID NO: 1499201 - RNA, 19 nt, Artificial Sequence
  Description of Artificial Sequence: Synthetic oligonucleotide
gcaaacucacugugccguc

SEQ ID NO: 1499202 - RNA, 19 nt, Artificial Sequence
  Description of Artificial Sequence: Synthetic oligonucleotide
ggcaauagccuggcggaga

SEQ ID NO: 1499203 - RNA, 19 nt, Artificial Sequence
  Description of Artificial Sequence: Synthetic oligonucleotide
ccggucaucacucuuuccu

SEQ ID NO: 1499204 - RNA, 19 nt, Artificial Sequence
  Description of Artificial Sequence: Synthetic oligonucleotide
ggcgguggccccauagcug

SEQ ID NO: 1499205 - RNA, 19 nt, Artificial Sequence
  Description of Artificial Sequence: Synthetic oligonucleotide
cgucccauaaagcgggcuc

SEQ ID NO: 1499206 - RNA, 19 nt, Artificial Sequence
  Description of Artificial Sequence: Synthetic oligonucleotide
cccgaagacgggagcgcgg

SEQ ID NO: 1499207 - RNA, 19 nt, Artificial Sequence
  Description of Artificial Sequence: Synthetic oligonucleotide
accugccaagagggacuac

SEQ ID NO: 1499208 - RNA, 19 nt, Artificial Sequence
  Description of Artificial Sequence: Synthetic oligonucleotide
gcuuaaggcaaaagaggcu

SEQ ID NO: 1499209 - RNA, 19 nt, Artificial Sequence
  Description of Artificial Sequence: Synthetic oligonucleotide
ccgaagacgggagcgcggc

SEQ ID NO: 1499210 - RNA, 19 nt, Artificial Sequence
  Description of Artificial Sequence: Synthetic oligonucleotide
gcuccaauccucugcugua

SEQ ID NO: 1499211 - RNA, 19 nt, Artificial Sequence
  Description of Artificial Sequence: Synthetic oligonucleotide
caggaccugccaagaggga

SEQ ID NO: 1499212 - RNA, 19 nt, Artificial Sequence
  Description of Artificial Sequence: Synthetic oligonucleotide
aggccccgaaaggggcugg

SEQ ID NO: 1499213 - RNA, 19 nt, Artificial Sequence
  Description of Artificial Sequence: Synthetic oligonucleotide
gaccugccaagagggacua

SEQ ID NO: 1499214 - RNA, 19 nt, Artificial Sequence
  Description of Artificial Sequence: Synthetic oligonucleotide
gccggucaucacucuuucc

SEQ ID NO: 1499215 - RNA, 19 nt, Artificial Sequence
  Description of Artificial Sequence: Synthetic oligonucleotide
caugaagugcucgccuggu

SEQ ID NO: 1499216 - RNA, 19 nt, Artificial Sequence
  Description of Artificial Sequence: Synthetic oligonucleotide
guccaaugguauagaagau

SEQ ID NO: 1499217 - RNA, 19 nt, Artificial Sequence
  Description of Artificial Sequence: Synthetic oligonucleotide
agccugccaguagaaucaa

SEQ ID NO: 1499218 - RNA, 19 nt, Artificial Sequence
  Description of Artificial Sequence: Synthetic oligonucleotide
ccagguaguucuuccgucu

SEQ ID NO: 1499219 - RNA, 19 nt, Artificial Sequence
  Description of Artificial Sequence: Synthetic oligonucleotide
cugccggucaucacucuuu

SEQ ID NO: 1499220 - RNA, 19 nt, Artificial Sequence
  Description of Artificial Sequence: Synthetic oligonucleotide
ggaccugccaagagggacu

SEQ ID NO: 1499221 - RNA, 19 nt, Artificial Sequence
  Description of Artificial Sequence: Synthetic oligonucleotide
aggagggcaugaagugcaa

SEQ ID NO: 1499222 - RNA, 19 nt, Artificial Sequence
  Description of Artificial Sequence: Synthetic oligonucleotide
ccugcaguacaccccaagu

SEQ ID NO: 1499223 - RNA, 19 nt, Artificial Sequence
  Description of Artificial Sequence: Synthetic oligonucleotide
gccccgggcauagacucug

SEQ ID NO: 1499224 - RNA, 19 nt, Artificial Sequence
  Description of Artificial Sequence: Synthetic oligonucleotide
ccccgaggcacagaagauc

SEQ ID NO: 1499225 - RNA, 19 nt, Artificial Sequence
  Description of Artificial Sequence: Synthetic oligonucleotide
gccccauagcugccgguca

SEQ ID NO: 1499226 - RNA, 19 nt, Artificial Sequence
  Description of Artificial Sequence: Synthetic oligonucleotide
accagcugcuaagcacguu

SEQ ID NO: 1499227 - RNA, 19 nt, Artificial Sequence
  Description of Artificial Sequence: Synthetic oligonucleotide
gccggcagucagguauucc

SEQ ID NO: 1499228 - RNA, 19 nt, Artificial Sequence
  Description of Artificial Sequence: Synthetic oligonucleotide
ccagggcuccaauccucug

SEQ ID NO: 1499229 - RNA, 19 nt, Artificial Sequence
  Description of Artificial Sequence: Synthetic oligonucleotide
cagguaguucuuccgucuu

SEQ ID NO: 1499230 - RNA, 19 nt, Artificial Sequence
  Description of Artificial Sequence: Synthetic oligonucleotide
ggccccgaaaggggcuggg

SEQ ID NO: 1499231 - RNA, 19 nt, Artificial Sequence
  Description of Artificial Sequence: Synthetic oligonucleotide
uuacggccccgggcauaga

SEQ ID NO: 1499232 - RNA, 19 nt, Artificial Sequence
  Description of Artificial Sequence: Synthetic oligonucleotide
cggcgaacaccaccacugc

SEQ ID NO: 1499233 - RNA, 19 nt, Artificial Sequence
  Description of Artificial Sequence: Synthetic oligonucleotide
cgaagacgggagcgcggcg

SEQ ID NO: 1499234 - RNA, 19 nt, Artificial Sequence
  Description of Artificial Sequence: Synthetic oligonucleotide
aggccggcagucagguauu

SEQ ID NO: 1499235 - RNA, 19 nt, Artificial Sequence
  Description of Artificial Sequence: Synthetic oligonucleotide
gauguggcgguggccccau

SEQ ID NO: 1499236 - RNA, 19 nt, Artificial Sequence
  Description of Artificial Sequence: Synthetic oligonucleotide
ccaguguucauagcuucgu

SEQ ID NO: 1499237 - RNA, 19 nt, Artificial Sequence
  Description of Artificial Sequence: Synthetic oligonucleotide
gccccgaaaggggcugggc

SEQ ID NO: 1499238 - RNA, 19 nt, Artificial Sequence
  Description of Artificial Sequence: Synthetic oligonucleotide
gcgcuucguauuggcacca

SEQ ID NO: 1499239 - RNA, 19 nt, Artificial Sequence
  Description of Artificial Sequence: Synthetic oligonucleotide
cccgcugcuuacggccccg

SEQ ID NO: 1499240 - RNA, 19 nt, Artificial Sequence
  Description of Artificial Sequence: Synthetic oligonucleotide
cgcugcuuacggccccggg

SEQ ID NO: 1499241 - RNA, 19 nt, Artificial Sequence
  Description of Artificial Sequence: Synthetic oligonucleotide
ggcggagagucaugaugau

SEQ ID NO: 1499242 - RNA, 19 nt, Artificial Sequence
  Description of Artificial Sequence: Synthetic oligonucleotide
ccccgaaaggggcugggcu

SEQ ID NO: 1499243 - RNA, 19 nt, Artificial Sequence
  Description of Artificial Sequence: Synthetic oligonucleotide
gccgucccauaaagcgggc

SEQ ID NO: 1499244 - RNA, 19 nt, Artificial Sequence
  Description of Artificial Sequence: Synthetic oligonucleotide
caauagccuggcggagagu

SEQ ID NO: 1499245 - RNA, 19 nt, Artificial Sequence
  Description of Artificial Sequence: Synthetic oligonucleotide
gaaccucaucagaggccuu

SEQ ID NO: 1499246 - RNA, 19 nt, Artificial Sequence
  Description of Artificial Sequence: Synthetic oligonucleotide
auguggcgguggccccaua

SEQ ID NO: 1499247 - RNA, 19 nt, Artificial Sequence
  Description of Artificial Sequence: Synthetic oligonucleotide
gcgcggcgaacaccaccac

SEQ ID NO: 1499248 - RNA, 19 nt, Artificial Sequence
  Description of Artificial Sequence: Synthetic oligonucleotide
gcuuacggccccgggcaua

SEQ ID NO: 1499249 - RNA, 19 nt, Artificial Sequence
  Description of Artificial Sequence: Synthetic oligonucleotide
cgggagcgcggcgaacacc

SEQ ID NO: 1499250 - RNA, 19 nt, Artificial Sequence
  Description of Artificial Sequence: Synthetic oligonucleotide
ggccggcagucagguauuc

SEQ ID NO: 1499251 - RNA, 19 nt, Artificial Sequence
  Description of Artificial Sequence: Synthetic oligonucleotide
cgcuucguauuggcaccag

SEQ ID NO: 1499252 - RNA, 19 nt, Artificial Sequence
  Description of Artificial Sequence: Synthetic oligonucleotide
gggugccccaugacggggu

SEQ ID NO: 1499253 - RNA, 19 nt, Artificial Sequence
  Description of Artificial Sequence: Synthetic oligonucleotide
ggugccccaugacgggguu

SEQ ID NO: 1499254 - RNA, 19 nt, Artificial Sequence
  Description of Artificial Sequence: Synthetic oligonucleotide
gugccagcacacgguucau

SEQ ID NO: 1499255 - RNA, 19 nt, Artificial Sequence
  Description of Artificial Sequence: Synthetic oligonucleotide
ccgucccauaaagcgggcu

SEQ ID NO: 1499256 - RNA, 19 nt, Artificial Sequence
  Description of Artificial Sequence: Synthetic oligonucleotide
ccccaugacgggguuguuu

SEQ ID NO: 1499257 - RNA, 19 nt, Artificial Sequence
  Description of Artificial Sequence: Synthetic oligonucleotide
gccccaugacgggguuguu

SEQ ID NO: 1499258 - RNA, 19 nt, Artificial Sequence
  Description of Artificial Sequence: Synthetic oligonucleotide
aaaaccgggaauuauacac

SEQ ID NO: 1499259 - RNA, 19 nt, Artificial Sequence
  Description of Artificial Sequence: Synthetic oligonucleotide
aauagcacaaauuuagugu

SEQ ID NO: 1499260 - RNA, 19 nt, Artificial Sequence
  Description of Artificial Sequence: Synthetic oligonucleotide
aaaaugucuaacucagagc

SEQ ID NO: 1499261 - RNA, 19 nt, Artificial Sequence
  Description of Artificial Sequence: Synthetic oligonucleotide
acaaauuuaguguaaggac

SEQ ID NO: 1499262 - RNA, 19 nt, Artificial Sequence
  Description of Artificial Sequence: Synthetic oligonucleotide
ugcaauagcacaaauuuag

SEQ ID NO: 1499263 - RNA, 19 nt, Artificial Sequence
  Description of Artificial Sequence: Synthetic oligonucleotide
aagauggcuacauguaugc

SEQ ID NO: 1499264 - RNA, 19 nt, Artificial Sequence
  Description of Artificial Sequence: Synthetic oligonucleotide
uuuaagauuggccugcaag

SEQ ID NO: 1499265 - RNA, 19 nt, Artificial Sequence
  Description of Artificial Sequence: Synthetic oligonucleotide
uuuacaagagucaaacaug

SEQ ID NO: 1499266 - RNA, 19 nt, Artificial Sequence
  Description of Artificial Sequence: Synthetic oligonucleotide
auaguugugugcuucuucc

SEQ ID NO: 1499267 - RNA, 19 nt, Artificial Sequence
  Description of Artificial Sequence: Synthetic oligonucleotide
aagacuucuacaaaugagg

SEQ ID NO: 1499268 - RNA, 19 nt, Artificial Sequence
  Description of Artificial Sequence: Synthetic oligonucleotide
agagaucagagguuuaggc

SEQ ID NO: 1499269 - RNA, 19 nt, Artificial Sequence
  Description of Artificial Sequence: Synthetic oligonucleotide
uuacaagagucaaacaugc

SEQ ID NO: 1499270 - RNA, 19 nt, Artificial Sequence
  Description of Artificial Sequence: Synthetic oligonucleotide
uuuugaacuacugauaaac

SEQ ID NO: 1499271 - RNA, 19 nt, Artificial Sequence
  Description of Artificial Sequence: Synthetic oligonucleotide
aaacaccccauucuggaac

SEQ ID NO: 1499272 - RNA, 19 nt, Artificial Sequence
  Description of Artificial Sequence: Synthetic oligonucleotide
ugaacuacugauaaacacu

SEQ ID NO: 1499273 - RNA, 19 nt, Artificial Sequence
  Description of Artificial Sequence: Synthetic oligonucleotide
uuuagggauagauacaccu

SEQ ID NO: 1499274 - RNA, 19 nt, Artificial Sequence
  Description of Artificial Sequence: Synthetic oligonucleotide
aaauccuagucccugcuag

SEQ ID NO: 1499275 - RNA, 19 nt, Artificial Sequence
  Description of Artificial Sequence: Synthetic oligonucleotide
uacugauaaacacugcugc

SEQ ID NO: 1499276 - RNA, 19 nt, Artificial Sequence
  Description of Artificial Sequence: Synthetic oligonucleotide
aaucauuuugaacuacuga

SEQ ID NO: 1499277 - RNA, 19 nt, Artificial Sequence
  Description of Artificial Sequence: Synthetic oligonucleotide
uuccuuuagggauagauac

SEQ ID NO: 1499278 - RNA, 19 nt, Artificial Sequence
  Description of Artificial Sequence: Synthetic oligonucleotide
aucuauucggacaaguugc

SEQ ID NO: 1499279 - RNA, 19 nt, Artificial Sequence
  Description of Artificial Sequence: Synthetic oligonucleotide
ugcaagucuauuuuaacca

SEQ ID NO: 1499280 - RNA, 19 nt, Artificial Sequence
  Description of Artificial Sequence: Synthetic oligonucleotide
uaaauuauacagcaacuau

SEQ ID NO: 1499281 - RNA, 19 nt, Artificial Sequence
  Description of Artificial Sequence: Synthetic oligonucleotide
auaguaguagaacuuucgg

SEQ ID NO: 1499282 - RNA, 19 nt, Artificial Sequence
  Description of Artificial Sequence: Synthetic oligonucleotide
aguaguagaacuuucggau

SEQ ID NO: 1499283 - RNA, 19 nt, Artificial Sequence
  Description of Artificial Sequence: Synthetic oligonucleotide
aaauuuaguguaaggacag

SEQ ID NO: 1499284 - RNA, 19 nt, Artificial Sequence
  Description of Artificial Sequence: Synthetic oligonucleotide
aaacaugccuauuaauaca

SEQ ID NO: 1499285 - RNA, 19 nt, Artificial Sequence
  Description of Artificial Sequence: Synthetic oligonucleotide
ucuauucucuuucuguccc

SEQ ID NO: 1499286 - RNA, 19 nt, Artificial Sequence
  Description of Artificial Sequence: Synthetic oligonucleotide
gaucuauucggacaaguug

SEQ ID NO: 1499287 - RNA, 19 nt, Artificial Sequence
  Description of Artificial Sequence: Synthetic oligonucleotide
aacgccuuuguguugaaca

SEQ ID NO: 1499288 - RNA, 19 nt, Artificial Sequence
  Description of Artificial Sequence: Synthetic oligonucleotide
aggagauacaaacacaaga

SEQ ID NO: 1499289 - RNA, 19 nt, Artificial Sequence
  Description of Artificial Sequence: Synthetic oligonucleotide
uuaagauuggccugcaagu

SEQ ID NO: 1499290 - RNA, 19 nt, Artificial Sequence
  Description of Artificial Sequence: Synthetic oligonucleotide
uuuaguguaaggacagcug

SEQ ID NO: 1499291 - RNA, 19 nt, Artificial Sequence
  Description of Artificial Sequence: Synthetic oligonucleotide
aauggggagcuccacuugg

SEQ ID NO: 1499292 - RNA, 19 nt, Artificial Sequence
  Description of Artificial Sequence: Synthetic oligonucleotide
aacacccaccccucuaugc

SEQ ID NO: 1499293 - RNA, 19 nt, Artificial Sequence
  Description of Artificial Sequence: Synthetic oligonucleotide
aagugcauuuguuuauauc

SEQ ID NO: 1499294 - RNA, 19 nt, Artificial Sequence
  Description of Artificial Sequence: Synthetic oligonucleotide
uuaguguaaggacagcugu

SEQ ID NO: 1499295 - RNA, 19 nt, Artificial Sequence
  Description of Artificial Sequence: Synthetic oligonucleotide
caaacaugccuauuaauac

SEQ ID NO: 1499296 - RNA, 19 nt, Artificial Sequence
  Description of Artificial Sequence: Synthetic oligonucleotide
uuucggauguaagagauca

SEQ ID NO: 1499297 - RNA, 19 nt, Artificial Sequence
  Description of Artificial Sequence: Synthetic oligonucleotide
ucuaacucagagcucuucc

SEQ ID NO: 1499298 - RNA, 19 nt, Artificial Sequence
  Description of Artificial Sequence: Synthetic oligonucleotide
aaucuauagggacauccca

SEQ ID NO: 1499299 - RNA, 19 nt, Artificial Sequence
  Description of Artificial Sequence: Synthetic oligonucleotide
cuaaucuauagggacaucc

SEQ ID NO: 1499300 - RNA, 19 nt, Artificial Sequence
  Description of Artificial Sequence: Synthetic oligonucleotide
agaacuuucggauguaaga

SEQ ID NO: 1499301 - RNA, 19 nt, Artificial Sequence
  Description of Artificial Sequence: Synthetic oligonucleotide
uaaucuauagggacauccc

SEQ ID NO: 1499302 - RNA, 19 nt, Artificial Sequence
  Description of Artificial Sequence: Synthetic oligonucleotide
aacaugccuauuaauacag

SEQ ID NO: 1499303 - RNA, 19 nt, Artificial Sequence
  Description of Artificial Sequence: Synthetic oligonucleotide
ugaugacuagaaauaaaac

SEQ ID NO: 1499304 - RNA, 19 nt, Artificial Sequence
  Description of Artificial Sequence: Synthetic oligonucleotide
agaaugacaccccucagcu

SEQ ID NO: 1499305 - RNA, 19 nt, Artificial Sequence
  Description of Artificial Sequence: Synthetic oligonucleotide
acccauuuaagauuggccu

SEQ ID NO: 1499306 - RNA, 19 nt, Artificial Sequence
  Description of Artificial Sequence: Synthetic oligonucleotide
gauacaaacacaagaguca

SEQ ID NO: 1499307 - RNA, 19 nt, Artificial Sequence
  Description of Artificial Sequence: Synthetic oligonucleotide
gaacuuucggauguaagag

SEQ ID NO: 1499308 - RNA, 19 nt, Artificial Sequence
  Description of Artificial Sequence: Synthetic oligonucleotide
caagacuucuacaaaugag

SEQ ID NO: 1499309 - RNA, 19 nt, Artificial Sequence
  Description of Artificial Sequence: Synthetic oligonucleotide
caauagcacaaauuuagug

SEQ ID NO: 1499310 - RNA, 19 nt, Artificial Sequence
  Description of Artificial Sequence: Synthetic oligonucleotide
uucuggaacuaaucuauag

SEQ ID NO: 1499311 - RNA, 19 nt, Artificial Sequence
  Description of Artificial Sequence: Synthetic oligonucleotide
gacuucuacaaaugagggg

SEQ ID NO: 1499312 - RNA, 19 nt, Artificial Sequence
  Description of Artificial Sequence: Synthetic oligonucleotide
augucucccgcacugacac

SEQ ID NO: 1499313 - RNA, 19 nt, Artificial Sequence
  Description of Artificial Sequence: Synthetic oligonucleotide
uagggauagauacaccucu

SEQ ID NO: 1499314 - RNA, 19 nt, Artificial Sequence
  Description of Artificial Sequence: Synthetic oligonucleotide
aagguuuuacuccccagga

SEQ ID NO: 1499315 - RNA, 19 nt, Artificial Sequence
  Description of Artificial Sequence: Synthetic oligonucleotide
cauugcugaaucuggauac

SEQ ID NO: 1499316 - RNA, 19 nt, Artificial Sequence
  Description of Artificial Sequence: Synthetic oligonucleotide
gaacuacugauaaacacug

SEQ ID NO: 1499317 - RNA, 19 nt, Artificial Sequence
  Description of Artificial Sequence: Synthetic oligonucleotide
uuugguucuucaaaccgga

SEQ ID NO: 1499318 - RNA, 19 nt, Artificial Sequence
  Description of Artificial Sequence: Synthetic oligonucleotide
uccggaaucugcaaagaug

SEQ ID NO: 1499319 - RNA, 19 nt, Artificial Sequence
  Description of Artificial Sequence: Synthetic oligonucleotide
ugguucuucaaaccggagc

SEQ ID NO: 1499320 - RNA, 19 nt, Artificial Sequence
  Description of Artificial Sequence: Synthetic oligonucleotide
uaguaguagaacuuucgga

SEQ ID NO: 1499321 - RNA, 19 nt, Artificial Sequence
  Description of Artificial Sequence: Synthetic oligonucleotide
uaguagaacuuucggaugu

SEQ ID NO: 1499322 - RNA, 19 nt, Artificial Sequence
  Description of Artificial Sequence: Synthetic oligonucleotide
ucccauagggaaaaugucu

SEQ ID NO: 1499323 - RNA, 19 nt, Artificial Sequence
  Description of Artificial Sequence: Synthetic oligonucleotide
ugauaaacacugcugcagu

SEQ ID NO: 1499324 - RNA, 19 nt, Artificial Sequence
  Description of Artificial Sequence: Synthetic oligonucleotide
uggaacuaaucuauaggga

SEQ ID NO: 1499325 - RNA, 19 nt, Artificial Sequence
  Description of Artificial Sequence: Synthetic oligonucleotide
uaagagaucagagguuuag

SEQ ID NO: 1499326 - RNA, 19 nt, Artificial Sequence
  Description of Artificial Sequence: Synthetic oligonucleotide
aaccauuuauccacucccc

SEQ ID NO: 1499327 - RNA, 19 nt, Artificial Sequence
  Description of Artificial Sequence: Synthetic oligonucleotide
uagaacuuucggauguaag

SEQ ID NO: 1499328 - RNA, 19 nt, Artificial Sequence
  Description of Artificial Sequence: Synthetic oligonucleotide
ggaacuaaucuauagggac

SEQ ID NO: 1499329 - RNA, 19 nt, Artificial Sequence
  Description of Artificial Sequence: Synthetic oligonucleotide
agaggauucccauagggaa

SEQ ID NO: 1499330 - RNA, 19 nt, Artificial Sequence
  Description of Artificial Sequence: Synthetic oligonucleotide
aggaucauaguaguagaac

SEQ ID NO: 1499331 - RNA, 19 nt, Artificial Sequence
  Description of Artificial Sequence: Synthetic oligonucleotide
auaugaucuauucggacaa

SEQ ID NO: 1499332 - RNA, 19 nt, Artificial Sequence
  Description of Artificial Sequence: Synthetic oligonucleotide
ucauuuugaacuacugaua

SEQ ID NO: 1499333 - RNA, 19 nt, Artificial Sequence
  Description of Artificial Sequence: Synthetic oligonucleotide
aaacaaauccuagucccug

SEQ ID NO: 1499334 - RNA, 19 nt, Artificial Sequence
  Description of Artificial Sequence: Synthetic oligonucleotide
ugccuauuaauacaguauu

SEQ ID NO: 1499335 - RNA, 19 nt, Artificial Sequence
  Description of Artificial Sequence: Synthetic oligonucleotide
auagcacaaauuuagugua

SEQ ID NO: 1499336 - RNA, 19 nt, Artificial Sequence
  Description of Artificial Sequence: Synthetic oligonucleotide
cugaggaucauaguaguag

SEQ ID NO: 1499337 - RNA, 19 nt, Artificial Sequence
  Description of Artificial Sequence: Synthetic oligonucleotide
ugugguagcuucauuuggu

SEQ ID NO: 1499338 - RNA, 19 nt, Artificial Sequence
  Description of Artificial Sequence: Synthetic oligonucleotide
aagagaucagagguuuagg

SEQ ID NO: 1499339 - RNA, 19 nt, Artificial Sequence
  Description of Artificial Sequence: Synthetic oligonucleotide
aucaaaacgccuuuguguu

SEQ ID NO: 1499340 - RNA, 19 nt, Artificial Sequence
  Description of Artificial Sequence: Synthetic oligonucleotide
gaauaaaggaggaaaacua

SEQ ID NO: 1499341 - RNA, 19 nt, Artificial Sequence
  Description of Artificial Sequence: Synthetic oligonucleotide
ucuauucggacaaguugcc

SEQ ID NO: 1499342 - RNA, 19 nt, Artificial Sequence
  Description of Artificial Sequence: Synthetic oligonucleotide
ucuauagggacaucccaac

SEQ ID NO: 1499343 - RNA, 19 nt, Artificial Sequence
  Description of Artificial Sequence: Synthetic oligonucleotide
augcucucaacacuccgac

SEQ ID NO: 1499344 - RNA, 19 nt, Artificial Sequence
  Description of Artificial Sequence: Synthetic oligonucleotide
uuggcaaucaaaacgccuu

SEQ ID NO: 1499345 - RNA, 19 nt, Artificial Sequence
  Description of Artificial Sequence: Synthetic oligonucleotide
agauacaccucuuccugag

SEQ ID NO: 1499346 - RNA, 19 nt, Artificial Sequence
  Description of Artificial Sequence: Synthetic oligonucleotide
gagguuuaggcagugggag

SEQ ID NO: 1499347 - RNA, 19 nt, Artificial Sequence
  Description of Artificial Sequence: Synthetic oligonucleotide
uuggaaaugagcugggcuu

SEQ ID NO: 1499348 - RNA, 19 nt, Artificial Sequence
  Description of Artificial Sequence: Synthetic oligonucleotide
gagaucagagguuuaggca

SEQ ID NO: 1499349 - RNA, 19 nt, Artificial Sequence
  Description of Artificial Sequence: Synthetic oligonucleotide
auuuaguguaaggacagcu

SEQ ID NO: 1499350 - RNA, 19 nt, Artificial Sequence
  Description of Artificial Sequence: Synthetic oligonucleotide
acuaaaugggaagacaaaa

SEQ ID NO: 1499351 - RNA, 19 nt, Artificial Sequence
  Description of Artificial Sequence: Synthetic oligonucleotide
uuauacacaggguuuccaa

SEQ ID NO: 1499352 - RNA, 19 nt, Artificial Sequence
  Description of Artificial Sequence: Synthetic oligonucleotide
uuagggauagauacaccuc

SEQ ID NO: 1499353 - RNA, 19 nt, Artificial Sequence
  Description of Artificial Sequence: Synthetic oligonucleotide
aacuacugauaaacacugc

SEQ ID NO: 1499354 - RNA, 19 nt, Artificial Sequence
  Description of Artificial Sequence: Synthetic oligonucleotide
aacuaaucuauagggacau

SEQ ID NO: 1499355 - RNA, 19 nt, Artificial Sequence
  Description of Artificial Sequence: Synthetic oligonucleotide
auaaauuauacagcaacua

SEQ ID NO: 1499356 - RNA, 19 nt, Artificial Sequence
  Description of Artificial Sequence: Synthetic oligonucleotide
uccuagucccugcuagugg

SEQ ID NO: 1499357 - RNA, 19 nt, Artificial Sequence
  Description of Artificial Sequence: Synthetic oligonucleotide
cuuuaugaaaauaaauuau

SEQ ID NO: 1499358 - RNA, 19 nt, Artificial Sequence
  Description of Artificial Sequence: Synthetic oligonucleotide
cucuauucucuuucugucc

SEQ ID NO: 1499359 - RNA, 19 nt, Artificial Sequence
  Description of Artificial Sequence: Synthetic oligonucleotide
ucaacacuccgacugcaga

SEQ ID NO: 1499360 - RNA, 19 nt, Artificial Sequence
  Description of Artificial Sequence: Synthetic oligonucleotide
ccgggaauuauacacaggg

SEQ ID NO: 1499361 - RNA, 19 nt, Artificial Sequence
  Description of Artificial Sequence: Synthetic oligonucleotide
ucggauguaagagaucaga

SEQ ID NO: 1499362 - RNA, 19 nt, Artificial Sequence
  Description of Artificial Sequence: Synthetic oligonucleotide
agccagacagagugguugc

SEQ ID NO: 1499363 - RNA, 19 nt, Artificial Sequence
  Description of Artificial Sequence: Synthetic oligonucleotide
ucaaaccggagcuuggcaa

SEQ ID NO: 1499364 - RNA, 19 nt, Artificial Sequence
  Description of Artificial Sequence: Synthetic oligonucleotide
aucacaccccucucuauuc

SEQ ID NO: 1499365 - RNA, 19 nt, Artificial Sequence
  Description of Artificial Sequence: Synthetic oligonucleotide
cagaaugacaccccucagc

SEQ ID NO: 1499366 - RNA, 19 nt, Artificial Sequence
  Description of Artificial Sequence: Synthetic oligonucleotide
aaucacaccccucucuauu

SEQ ID NO: 1499367 - RNA, 19 nt, Artificial Sequence
  Description of Artificial Sequence: Synthetic oligonucleotide
ggauagauacaccucuucc

SEQ ID NO: 1499368 - RNA, 19 nt, Artificial Sequence
  Description of Artificial Sequence: Synthetic oligonucleotide
uaguguaaggacagcugug

SEQ ID NO: 1499369 - RNA, 19 nt, Artificial Sequence
  Description of Artificial Sequence: Synthetic oligonucleotide
ccggaaucugcaaagaugc

SEQ ID NO: 1499370 - RNA, 19 nt, Artificial Sequence
  Description of Artificial Sequence: Synthetic oligonucleotide
uggaggauaguugugugcu

SEQ ID NO: 1499371 - RNA, 19 nt, Artificial Sequence
  Description of Artificial Sequence: Synthetic oligonucleotide
uuggaggauaguugugugc

SEQ ID NO: 1499372 - RNA, 19 nt, Artificial Sequence
  Description of Artificial Sequence: Synthetic oligonucleotide
uacuaaugucccuuuuaca

SEQ ID NO: 1499373 - RNA, 19 nt, Artificial Sequence
  Description of Artificial Sequence: Synthetic oligonucleotide
cgggauaugaucuauucgg

SEQ ID NO: 1499374 - RNA, 19 nt, Artificial Sequence
  Description of Artificial Sequence: Synthetic oligonucleotide
aaugucuaacucagagcuc

SEQ ID NO: 1499375 - RNA, 19 nt, Artificial Sequence
  Description of Artificial Sequence: Synthetic oligonucleotide
aguugugugcuucuuccca

SEQ ID NO: 1499376 - RNA, 19 nt, Artificial Sequence
  Description of Artificial Sequence: Synthetic oligonucleotide
uguaugcaauagcacaaau

SEQ ID NO: 1499377 - RNA, 19 nt, Artificial Sequence
  Description of Artificial Sequence: Synthetic oligonucleotide
aagaggauucccauaggga

SEQ ID NO: 1499378 - RNA, 19 nt, Artificial Sequence
  Description of Artificial Sequence: Synthetic oligonucleotide
ugugccggaaucacacccc

SEQ ID NO: 1499379 - RNA, 19 nt, Artificial Sequence
  Description of Artificial Sequence: Synthetic oligonucleotide
aguugccggauccggaauc

SEQ ID NO: 1499380 - RNA, 19 nt, Artificial Sequence
  Description of Artificial Sequence: Synthetic oligonucleotide
gacaaguugccggauccgg

SEQ ID NO: 1499381 - RNA, 19 nt, Artificial Sequence
  Description of Artificial Sequence: Synthetic oligonucleotide
uucaaaccggagcuuggca

SEQ ID NO: 1499382 - RNA, 19 nt, Artificial Sequence
  Description of Artificial Sequence: Synthetic oligonucleotide
ugaucuauucggacaaguu

SEQ ID NO: 1499383 - RNA, 19 nt, Artificial Sequence
  Description of Artificial Sequence: Synthetic oligonucleotide
gaacuaaucuauagggaca

SEQ ID NO: 1499384 - RNA, 19 nt, Artificial Sequence
  Description of Artificial Sequence: Synthetic oligonucleotide
aauccuagucccugcuagu

SEQ ID NO: 1499385 - RNA, 19 nt, Artificial Sequence
  Description of Artificial Sequence: Synthetic oligonucleotide
ugggagauccgggauauga

SEQ ID NO: 1499386 - RNA, 19 nt, Artificial Sequence
  Description of Artificial Sequence: Synthetic oligonucleotide
aaaccgggaauuauacaca

SEQ ID NO: 1499387 - RNA, 19 nt, Artificial Sequence
  Description of Artificial Sequence: Synthetic oligonucleotide
acauugcugaaucuggaua

SEQ ID NO: 1499388 - RNA, 19 nt, Artificial Sequence
  Description of Artificial Sequence: Synthetic oligonucleotide
auaaacacugcugcaguga

SEQ ID NO: 1499389 - RNA, 19 nt, Artificial Sequence
  Description of Artificial Sequence: Synthetic oligonucleotide
cauguaugcaauagcacaa

SEQ ID NO: 1499390 - RNA, 19 nt, Artificial Sequence
  Description of Artificial Sequence: Synthetic oligonucleotide
uccgggauaugaucuauuc

SEQ ID NO: 1499391 - RNA, 19 nt, Artificial Sequence
  Description of Artificial Sequence: Synthetic oligonucleotide
ucaaaacgccuuuguguug

SEQ ID NO: 1499392 - RNA, 19 nt, Artificial Sequence
  Description of Artificial Sequence: Synthetic oligonucleotide
acgccuuuguguugaacag

SEQ ID NO: 1499393 - RNA, 19 nt, Artificial Sequence
  Description of Artificial Sequence: Synthetic oligonucleotide
uucccacaaaccaaaccaa

SEQ ID NO: 1499394 - RNA, 19 nt, Artificial Sequence
  Description of Artificial Sequence: Synthetic oligonucleotide
gcuacauguaugcaauagc

SEQ ID NO: 1499395 - RNA, 19 nt, Artificial Sequence
  Description of Artificial Sequence: Synthetic oligonucleotide
accauuuauccacuccccu

SEQ ID NO: 1499396 - RNA, 19 nt, Artificial Sequence
  Description of Artificial Sequence: Synthetic oligonucleotide
ggagccaaagucugugccg

SEQ ID NO: 1499397 - RNA, 19 nt, Artificial Sequence
  Description of Artificial Sequence: Synthetic oligonucleotide
agaauggggagcuccacuu

SEQ ID NO: 1499398 - RNA, 19 nt, Artificial Sequence
  Description of Artificial Sequence: Synthetic oligonucleotide
gucgguacagcaaucauaa

SEQ ID NO: 1499399 - RNA, 19 nt, Artificial Sequence
  Description of Artificial Sequence: Synthetic oligonucleotide
aacacuccgacugcagaca

SEQ ID NO: 1499400 - RNA, 19 nt, Artificial Sequence
  Description of Artificial Sequence: Synthetic oligonucleotide
uauuuacaaacaccccauu

SEQ ID NO: 1499401 - RNA, 19 nt, Artificial Sequence
  Description of Artificial Sequence: Synthetic oligonucleotide
ccacaaaccaaaccaagag

SEQ ID NO: 1499402 - RNA, 19 nt, Artificial Sequence
  Description of Artificial Sequence: Synthetic oligonucleotide
uugguucuucaaaccggag

SEQ ID NO: 1499403 - RNA, 19 nt, Artificial Sequence
  Description of Artificial Sequence: Synthetic oligonucleotide
aaacgccuuuguguugaac

SEQ ID NO: 1499404 - RNA, 19 nt, Artificial Sequence
  Description of Artificial Sequence: Synthetic oligonucleotide
aaaccggagcuuggcaauc

SEQ ID NO: 1499405 - RNA, 19 nt, Artificial Sequence
  Description of Artificial Sequence: Synthetic oligonucleotide
caggccacgcuuuggcucg

SEQ ID NO: 1499406 - RNA, 19 nt, Artificial Sequence
  Description of Artificial Sequence: Synthetic oligonucleotide
guuggguagaauggggagc

SEQ ID NO: 1499407 - RNA, 19 nt, Artificial Sequence
  Description of Artificial Sequence: Synthetic oligonucleotide
caugccuauuaauacagua

SEQ ID NO: 1499408 - RNA, 19 nt, Artificial Sequence
  Description of Artificial Sequence: Synthetic oligonucleotide
uacguggagggcuccaccu

SEQ ID NO: 1499409 - RNA, 19 nt, Artificial Sequence
  Description of Artificial Sequence: Synthetic oligonucleotide
acuccgacugcagacaaga

SEQ ID NO: 1499410 - RNA, 19 nt, Artificial Sequence
  Description of Artificial Sequence: Synthetic oligonucleotide
ggauaugaucuauucggac

SEQ ID NO: 1499411 - RNA, 19 nt, Artificial Sequence
  Description of Artificial Sequence: Synthetic oligonucleotide
gcagacaagacuucuacaa

SEQ ID NO: 1499412 - RNA, 19 nt, Artificial Sequence
  Description of Artificial Sequence: Synthetic oligonucleotide
gacaugggucgguacagca

SEQ ID NO: 1499413 - RNA, 19 nt, Artificial Sequence
  Description of Artificial Sequence: Synthetic oligonucleotide
uaugaucuauucggacaag

SEQ ID NO: 1499414 - RNA, 19 nt, Artificial Sequence
  Description of Artificial Sequence: Synthetic oligonucleotide
uaaccacugaguccagaau

SEQ ID NO: 1499415 - RNA, 19 nt, Artificial Sequence
  Description of Artificial Sequence: Synthetic oligonucleotide
ggaucauaguaguagaacu

SEQ ID NO: 1499416 - RNA, 19 nt, Artificial Sequence
  Description of Artificial Sequence: Synthetic oligonucleotide
uuuauccacuccccucuuc

SEQ ID NO: 1499417 - RNA, 19 nt, Artificial Sequence
  Description of Artificial Sequence: Synthetic oligonucleotide
gguuggguagaauggggag

SEQ ID NO: 1499418 - RNA, 19 nt, Artificial Sequence
  Description of Artificial Sequence: Synthetic oligonucleotide
uggccugcaagucuauuuu

SEQ ID NO: 1499419 - RNA, 19 nt, Artificial Sequence
  Description of Artificial Sequence: Synthetic oligonucleotide
cuauucggacaaguugccg

SEQ ID NO: 1499420 - RNA, 19 nt, Artificial Sequence
  Description of Artificial Sequence: Synthetic oligonucleotide
gaggauaguugugugcuuc

SEQ ID NO: 1499421 - RNA, 19 nt, Artificial Sequence
  Description of Artificial Sequence: Synthetic oligonucleotide
ucccugcuaguggagaugc

SEQ ID NO: 1499422 - RNA, 19 nt, Artificial Sequence
  Description of Artificial Sequence: Synthetic oligonucleotide
uauccacuccccucuuccc

SEQ ID NO: 1499423 - RNA, 19 nt, Artificial Sequence
  Description of Artificial Sequence: Synthetic oligonucleotide
ugguugcaggaguaugggc

SEQ ID NO: 1499424 - RNA, 19 nt, Artificial Sequence
  Description of Artificial Sequence: Synthetic oligonucleotide
augaucuauucggacaagu

SEQ ID NO: 1499425 - RNA, 19 nt, Artificial Sequence
  Description of Artificial Sequence: Synthetic oligonucleotide
uugcugaaucuggauacug

SEQ ID NO: 1499426 - RNA, 19 nt, Artificial Sequence
  Description of Artificial Sequence: Synthetic oligonucleotide
cuaaccacugaguccagaa

SEQ ID NO: 1499427 - RNA, 19 nt, Artificial Sequence
  Description of Artificial Sequence: Synthetic oligonucleotide
agacaugggucgguacagc

SEQ ID NO: 1499428 - RNA, 19 nt, Artificial Sequence
  Description of Artificial Sequence: Synthetic oligonucleotide
aggauaguugugugcuucu

SEQ ID NO: 1499429 - RNA, 19 nt, Artificial Sequence
  Description of Artificial Sequence: Synthetic oligonucleotide
augggcuccccucuaguga

SEQ ID NO: 1499430 - RNA, 19 nt, Artificial Sequence
  Description of Artificial Sequence: Synthetic oligonucleotide
ucacaccccucucuauucu

SEQ ID NO: 1499431 - RNA, 19 nt, Artificial Sequence
  Description of Artificial Sequence: Synthetic oligonucleotide
gucugugccggaaucacac

SEQ ID NO: 1499432 - RNA, 19 nt, Artificial Sequence
  Description of Artificial Sequence: Synthetic oligonucleotide
aucuauagggacaucccaa

SEQ ID NO: 1499433 - RNA, 19 nt, Artificial Sequence
  Description of Artificial Sequence: Synthetic oligonucleotide
ugggcuccccucuagugaa

SEQ ID NO: 1499434 - RNA, 19 nt, Artificial Sequence
  Description of Artificial Sequence: Synthetic oligonucleotide
cuuucggauguaagagauc

SEQ ID NO: 1499435 - RNA, 19 nt, Artificial Sequence
  Description of Artificial Sequence: Synthetic oligonucleotide
aaguugccggauccggaau

SEQ ID NO: 1499436 - RNA, 19 nt, Artificial Sequence
  Description of Artificial Sequence: Synthetic oligonucleotide
ugggucgguacagcaauca

SEQ ID NO: 1499437 - RNA, 19 nt, Artificial Sequence
  Description of Artificial Sequence: Synthetic oligonucleotide
cauuuauccacuccccucu

SEQ ID NO: 1499438 - RNA, 19 nt, Artificial Sequence
  Description of Artificial Sequence: Synthetic oligonucleotide
cucucuauucucuuucugu

SEQ ID NO: 1499439 - RNA, 19 nt, Artificial Sequence
  Description of Artificial Sequence: Synthetic oligonucleotide
auccggaaucugcaaagau

SEQ ID NO: 1499440 - RNA, 19 nt, Artificial Sequence
  Description of Artificial Sequence: Synthetic oligonucleotide
uggcaaucaaaacgccuuu

SEQ ID NO: 1499441 - RNA, 19 nt, Artificial Sequence
  Description of Artificial Sequence: Synthetic oligonucleotide
ccauuuaagauuggccugc

SEQ ID NO: 1499442 - RNA, 19 nt, Artificial Sequence
  Description of Artificial Sequence: Synthetic oligonucleotide
acuaaucuauagggacauc

SEQ ID NO: 1499443 - RNA, 19 nt, Artificial Sequence
  Description of Artificial Sequence: Synthetic oligonucleotide
gagauccgggauaugaucu

SEQ ID NO: 1499444 - RNA, 19 nt, Artificial Sequence
  Description of Artificial Sequence: Synthetic oligonucleotide
cucagagcucuuccccucc

SEQ ID NO: 1499445 - RNA, 19 nt, Artificial Sequence
  Description of Artificial Sequence: Synthetic oligonucleotide
cuauagggacaucccaaca

SEQ ID NO: 1499446 - RNA, 19 nt, Artificial Sequence
  Description of Artificial Sequence: Synthetic oligonucleotide
cuacguggagggcuccacc

SEQ ID NO: 1499447 - RNA, 19 nt, Artificial Sequence
  Description of Artificial Sequence: Synthetic oligonucleotide
auccuagucccugcuagug

SEQ ID NO: 1499448 - RNA, 19 nt, Artificial Sequence
  Description of Artificial Sequence: Synthetic oligonucleotide
auuuaagauuggccugcaa

SEQ ID NO: 1499449 - RNA, 19 nt, Artificial Sequence
  Description of Artificial Sequence: Synthetic oligonucleotide
acguggagggcuccaccuc

SEQ ID NO: 1499450 - RNA, 19 nt, Artificial Sequence
  Description of Artificial Sequence: Synthetic oligonucleotide
auugcugaaucuggauacu

SEQ ID NO: 1499451 - RNA, 19 nt, Artificial Sequence
  Description of Artificial Sequence: Synthetic oligonucleotide
aggauucccauagggaaaa

SEQ ID NO: 1499452 - RNA, 19 nt, Artificial Sequence
  Description of Artificial Sequence: Synthetic oligonucleotide
cccauuuaagauuggccug

SEQ ID NO: 1499453 - RNA, 19 nt, Artificial Sequence
  Description of Artificial Sequence: Synthetic oligonucleotide
guugugugcuucuucccaa

SEQ ID NO: 1499454 - RNA, 19 nt, Artificial Sequence
  Description of Artificial Sequence: Synthetic oligonucleotide
uacaccucuuccugaggau

SEQ ID NO: 1499455 - RNA, 19 nt, Artificial Sequence
  Description of Artificial Sequence: Synthetic oligonucleotide
agugggagauccgggauau

SEQ ID NO: 1499456 - RNA, 19 nt, Artificial Sequence
  Description of Artificial Sequence: Synthetic oligonucleotide
agcagcuacuaaugucccu

SEQ ID NO: 1499457 - RNA, 19 nt, Artificial Sequence
  Description of Artificial Sequence: Synthetic oligonucleotide
cuccccucuagugaagaac

SEQ ID NO: 1499458 - RNA, 19 nt, Artificial Sequence
  Description of Artificial Sequence: Synthetic oligonucleotide
ccgggauaugaucuauucg

SEQ ID NO: 1499459 - RNA, 19 nt, Artificial Sequence
  Description of Artificial Sequence: Synthetic oligonucleotide
agggguggcuaagccagac

SEQ ID NO: 1499460 - RNA, 19 nt, Artificial Sequence
  Description of Artificial Sequence: Synthetic oligonucleotide
gaggaucauaguaguagaa

SEQ ID NO: 1499461 - RNA, 19 nt, Artificial Sequence
  Description of Artificial Sequence: Synthetic oligonucleotide
agucccugcuaguggagau

SEQ ID NO: 1499462 - RNA, 19 nt, Artificial Sequence
  Description of Artificial Sequence: Synthetic oligonucleotide
ugcucucaacacuccgacu

SEQ ID NO: 1499463 - RNA, 19 nt, Artificial Sequence
  Description of Artificial Sequence: Synthetic oligonucleotide
auguaugcaauagcacaaa

SEQ ID NO: 1499464 - RNA, 19 nt, Artificial Sequence
  Description of Artificial Sequence: Synthetic oligonucleotide
gauccggaaucugcaaaga

SEQ ID NO: 1499465 - RNA, 19 nt, Artificial Sequence
  Description of Artificial Sequence: Synthetic oligonucleotide
cagacaagacuucuacaaa

SEQ ID NO: 1499466 - RNA, 19 nt, Artificial Sequence
  Description of Artificial Sequence: Synthetic oligonucleotide
ccugcaagucuauuuuaac

SEQ ID NO: 1499467 - RNA, 19 nt, Artificial Sequence
  Description of Artificial Sequence: Synthetic oligonucleotide
aaccggagcuuggcaauca

SEQ ID NO: 1499468 - RNA, 19 nt, Artificial Sequence
  Description of Artificial Sequence: Synthetic oligonucleotide
uggcuaagccagacagagu

SEQ ID NO: 1499469 - RNA, 19 nt, Artificial Sequence
  Description of Artificial Sequence: Synthetic oligonucleotide
gggacaucccaacacccac

SEQ ID NO: 1499470 - RNA, 19 nt, Artificial Sequence
  Description of Artificial Sequence: Synthetic oligonucleotide
caaguugccggauccggaa

SEQ ID NO: 1499471 - RNA, 19 nt, Artificial Sequence
  Description of Artificial Sequence: Synthetic oligonucleotide
agauccgggauaugaucua

SEQ ID NO: 1499472 - RNA, 19 nt, Artificial Sequence
  Description of Artificial Sequence: Synthetic oligonucleotide
uagucccugcuaguggaga

SEQ ID NO: 1499473 - RNA, 19 nt, Artificial Sequence
  Description of Artificial Sequence: Synthetic oligonucleotide
augcaauagcacaaauuua

SEQ ID NO: 1499474 - RNA, 19 nt, Artificial Sequence
  Description of Artificial Sequence: Synthetic oligonucleotide
auuuauccacuccccucuu

SEQ ID NO: 1499475 - RNA, 19 nt, Artificial Sequence
  Description of Artificial Sequence: Synthetic oligonucleotide
ccuauuaauacaguauuua

SEQ ID NO: 1499476 - RNA, 19 nt, Artificial Sequence
  Description of Artificial Sequence: Synthetic oligonucleotide
aucagagguuuaggcagug

SEQ ID NO: 1499477 - RNA, 19 nt, Artificial Sequence
  Description of Artificial Sequence: Synthetic oligonucleotide
acaaguugccggauccgga

SEQ ID NO: 1499478 - RNA, 19 nt, Artificial Sequence
  Description of Artificial Sequence: Synthetic oligonucleotide
ugcaggaguaugggcuccc

SEQ ID NO: 1499479 - RNA, 19 nt, Artificial Sequence
  Description of Artificial Sequence: Synthetic oligonucleotide
cagcaacuauuuuaauaaa

SEQ ID NO: 1499480 - RNA, 19 nt, Artificial Sequence
  Description of Artificial Sequence: Synthetic oligonucleotide
gcuaagccagacagagugg

SEQ ID NO: 1499481 - RNA, 19 nt, Artificial Sequence
  Description of Artificial Sequence: Synthetic oligonucleotide
cacaccccucucuauucuc

SEQ ID NO: 1499482 - RNA, 19 nt, Artificial Sequence
  Description of Artificial Sequence: Synthetic oligonucleotide
agauggcuacauguaugca

SEQ ID NO: 1499483 - RNA, 19 nt, Artificial Sequence
  Description of Artificial Sequence: Synthetic oligonucleotide
gggcaugccauucucuuaa

SEQ ID NO: 1499484 - RNA, 19 nt, Artificial Sequence
  Description of Artificial Sequence: Synthetic oligonucleotide
ggaaucacaccccucucua

SEQ ID NO: 1499485 - RNA, 19 nt, Artificial Sequence
  Description of Artificial Sequence: Synthetic oligonucleotide
ggcaaucaaaacgccuuug

SEQ ID NO: 1499486 - RNA, 19 nt, Artificial Sequence
  Description of Artificial Sequence: Synthetic oligonucleotide
caaacaccccauucuggaa

SEQ ID NO: 1499487 - RNA, 19 nt, Artificial Sequence
  Description of Artificial Sequence: Synthetic oligonucleotide
agggacaucccaacaccca

SEQ ID NO: 1499488 - RNA, 19 nt, Artificial Sequence
  Description of Artificial Sequence: Synthetic oligonucleotide
ggacaaguugccggauccg

SEQ ID NO: 1499489 - RNA, 19 nt, Artificial Sequence
  Description of Artificial Sequence: Synthetic oligonucleotide
gucuaacucagagcucuuc

SEQ ID NO: 1499490 - RNA, 19 nt, Artificial Sequence
  Description of Artificial Sequence: Synthetic oligonucleotide
cuaagccagacagaguggu

SEQ ID NO: 1499491 - RNA, 19 nt, Artificial Sequence
  Description of Artificial Sequence: Synthetic oligonucleotide
acaugccuauuaauacagu

SEQ ID NO: 1499492 - RNA, 19 nt, Artificial Sequence
  Description of Artificial Sequence: Synthetic oligonucleotide
cccacaaaccaaaccaaga

SEQ ID NO: 1499493 - RNA, 19 nt, Artificial Sequence
  Description of Artificial Sequence: Synthetic oligonucleotide
aguagaacuuucggaugua

SEQ ID NO: 1499494 - RNA, 19 nt, Artificial Sequence
  Description of Artificial Sequence: Synthetic oligonucleotide
ggaauuauacacaggguuu

SEQ ID NO: 1499495 - RNA, 19 nt, Artificial Sequence
  Description of Artificial Sequence: Synthetic oligonucleotide
cuccgacugcagacaagac

SEQ ID NO: 1499496 - RNA, 19 nt, Artificial Sequence
  Description of Artificial Sequence: Synthetic oligonucleotide
caugggucgguacagcaau

SEQ ID NO: 1499497 - RNA, 19 nt, Artificial Sequence
  Description of Artificial Sequence: Synthetic oligonucleotide
ucgguacagcaaucauaaa

SEQ ID NO: 1499498 - RNA, 19 nt, Artificial Sequence
  Description of Artificial Sequence: Synthetic oligonucleotide
cggacaaguugccggaucc

SEQ ID NO: 1499499 - RNA, 19 nt, Artificial Sequence
  Description of Artificial Sequence: Synthetic oligonucleotide
gguagaauggggagcucca

SEQ ID NO: 1499500 - RNA, 19 nt, Artificial Sequence
  Description of Artificial Sequence: Synthetic oligonucleotide
agagucaaacaugccuauu

SEQ ID NO: 1499501 - RNA, 19 nt, Artificial Sequence
  Description of Artificial Sequence: Synthetic oligonucleotide
acaugggucgguacagcaa

SEQ ID NO: 1499502 - RNA, 19 nt, Artificial Sequence
  Description of Artificial Sequence: Synthetic oligonucleotide
cauuuaagauuggccugca

SEQ ID NO: 1499503 - RNA, 19 nt, Artificial Sequence
  Description of Artificial Sequence: Synthetic oligonucleotide
gaucagagguuuaggcagu

SEQ ID NO: 1499504 - RNA, 19 nt, Artificial Sequence
  Description of Artificial Sequence: Synthetic oligonucleotide
cagagugguugcaggagua

SEQ ID NO: 1499505 - RNA, 19 nt, Artificial Sequence
  Description of Artificial Sequence: Synthetic oligonucleotide
caaauccuagucccugcua

SEQ ID NO: 1499506 - RNA, 19 nt, Artificial Sequence
  Description of Artificial Sequence: Synthetic oligonucleotide
ugcuacguggagggcucca

SEQ ID NO: 1499507 - RNA, 19 nt, Artificial Sequence
  Description of Artificial Sequence: Synthetic oligonucleotide
ugccggaaucacaccccuc

SEQ ID NO: 1499508 - RNA, 19 nt, Artificial Sequence
  Description of Artificial Sequence: Synthetic oligonucleotide
ccccuaaccacugagucca

SEQ ID NO: 1499509 - RNA, 19 nt, Artificial Sequence
  Description of Artificial Sequence: Synthetic oligonucleotide
guuuaggcagugggagauc

SEQ ID NO: 1499510 - RNA, 19 nt, Artificial Sequence
  Description of Artificial Sequence: Synthetic oligonucleotide
caaaccggagcuuggcaau

SEQ ID NO: 1499511 - RNA, 19 nt, Artificial Sequence
  Description of Artificial Sequence: Synthetic oligonucleotide
uucggacaaguugccggau

SEQ ID NO: 1499512 - RNA, 19 nt, Artificial Sequence
  Description of Artificial Sequence: Synthetic oligonucleotide
ggguuggguagaaugggga

SEQ ID NO: 1499513 - RNA, 19 nt, Artificial Sequence
  Description of Artificial Sequence: Synthetic oligonucleotide
gaguaugggcuccccucua

SEQ ID NO: 1499514 - RNA, 19 nt, Artificial Sequence
  Description of Artificial Sequence: Synthetic oligonucleotide
guaagagaucagagguuua

SEQ ID NO: 1499515 - RNA, 19 nt, Artificial Sequence
  Description of Artificial Sequence: Synthetic oligonucleotide
ggucgguacagcaaucaua

SEQ ID NO: 1499516 - RNA, 19 nt, Artificial Sequence
  Description of Artificial Sequence: Synthetic oligonucleotide
gccggaaucacaccccucu

SEQ ID NO: 1499517 - RNA, 19 nt, Artificial Sequence
  Description of Artificial Sequence: Synthetic oligonucleotide
ccgacugcagacaagacuu

SEQ ID NO: 1499518 - RNA, 19 nt, Artificial Sequence
  Description of Artificial Sequence: Synthetic oligonucleotide
gcuaguggagaugcucuca

SEQ ID NO: 1499519 - RNA, 19 nt, Artificial Sequence
  Description of Artificial Sequence: Synthetic oligonucleotide
guaugggcuccccucuagu

SEQ ID NO: 1499520 - RNA, 19 nt, Artificial Sequence
  Description of Artificial Sequence: Synthetic oligonucleotide
gauccgggauaugaucuau

SEQ ID NO: 1499521 - RNA, 19 nt, Artificial Sequence
  Description of Artificial Sequence: Synthetic oligonucleotide
ccccucuagugaagaaccc

SEQ ID NO: 1499522 - RNA, 19 nt, Artificial Sequence
  Description of Artificial Sequence: Synthetic oligonucleotide
auuggccugcaagucuauu

SEQ ID NO: 1499523 - RNA, 19 nt, Artificial Sequence
  Description of Artificial Sequence: Synthetic oligonucleotide
ccccucuaugcccagaaaa

SEQ ID NO: 1499524 - RNA, 19 nt, Artificial Sequence
  Description of Artificial Sequence: Synthetic oligonucleotide
acuccccucuucccacaaa

SEQ ID NO: 1499525 - RNA, 19 nt, Artificial Sequence
  Description of Artificial Sequence: Synthetic oligonucleotide
accccucuaugcccagaaa

SEQ ID NO: 1499526 - RNA, 19 nt, Artificial Sequence
  Description of Artificial Sequence: Synthetic oligonucleotide
gaaugacaccccucagcuu

SEQ ID NO: 1499527 - RNA, 19 nt, Artificial Sequence
  Description of Artificial Sequence: Synthetic oligonucleotide
caccccucuaugcccagaa

SEQ ID NO: 1499528 - RNA, 19 nt, Artificial Sequence
  Description of Artificial Sequence: Synthetic oligonucleotide
ggguuuccaaacaggaccu

SEQ ID NO: 1499529 - RNA, 19 nt, Artificial Sequence
  Description of Artificial Sequence: Synthetic oligonucleotide
guugccggauccggaaucu

SEQ ID NO: 1499530 - RNA, 19 nt, Artificial Sequence
  Description of Artificial Sequence: Synthetic oligonucleotide
ccauagggaaaaugucuaa

SEQ ID NO: 1499531 - RNA, 19 nt, Artificial Sequence
  Description of Artificial Sequence: Synthetic oligonucleotide
gggcuuccuuuagggauag

SEQ ID NO: 1499532 - RNA, 19 nt, Artificial Sequence
  Description of Artificial Sequence: Synthetic oligonucleotide
auccgggauaugaucuauu

SEQ ID NO: 1499533 - RNA, 19 nt, Artificial Sequence
  Description of Artificial Sequence: Synthetic oligonucleotide
gugccggaaucacaccccu

SEQ ID NO: 1499534 - RNA, 19 nt, Artificial Sequence
  Description of Artificial Sequence: Synthetic oligonucleotide
gccggauccggaaucugca

SEQ ID NO: 1499535 - RNA, 19 nt, Artificial Sequence
  Description of Artificial Sequence: Synthetic oligonucleotide
cccuuuuacaagagucaaa

SEQ ID NO: 1499536 - RNA, 19 nt, Artificial Sequence
  Description of Artificial Sequence: Synthetic oligonucleotide
ggccugcaagucuauuuua

SEQ ID NO: 1499537 - RNA, 19 nt, Artificial Sequence
  Description of Artificial Sequence: Synthetic oligonucleotide
caccccauucuggaacuaa

SEQ ID NO: 1499538 - RNA, 19 nt, Artificial Sequence
  Description of Artificial Sequence: Synthetic oligonucleotide
ggacuugacauugcugaau

SEQ ID NO: 1499539 - RNA, 19 nt, Artificial Sequence
  Description of Artificial Sequence: Synthetic oligonucleotide
cgccuuuguguugaacagc

SEQ ID NO: 1499540 - RNA, 19 nt, Artificial Sequence
  Description of Artificial Sequence: Synthetic oligonucleotide
caggaguaugggcuccccu

SEQ ID NO: 1499541 - RNA, 19 nt, Artificial Sequence
  Description of Artificial Sequence: Synthetic oligonucleotide
gccuauuaauacaguauuu

SEQ ID NO: 1499542 - RNA, 19 nt, Artificial Sequence
  Description of Artificial Sequence: Synthetic oligonucleotide
ccggaaucacaccccucuc

SEQ ID NO: 1499543 - RNA, 19 nt, Artificial Sequence
  Description of Artificial Sequence: Synthetic oligonucleotide
caggggagccaaagucugu

SEQ ID NO: 1499544 - RNA, 19 nt, Artificial Sequence
  Description of Artificial Sequence: Synthetic oligonucleotide
cagcuacuaaugucccuuu

SEQ ID NO: 1499545 - RNA, 19 nt, Artificial Sequence
  Description of Artificial Sequence: Synthetic oligonucleotide
gggucgguacagcaaucau

SEQ ID NO: 1499546 - RNA, 19 nt, Artificial Sequence
  Description of Artificial Sequence: Synthetic oligonucleotide
ggaggauaguugugugcuu

SEQ ID NO: 1499547 - RNA, 19 nt, Artificial Sequence
  Description of Artificial Sequence: Synthetic oligonucleotide
cgggaauuauacacagggu

SEQ ID NO: 1499548 - RNA, 19 nt, Artificial Sequence
  Description of Artificial Sequence: Synthetic oligonucleotide
gggcuccccucuagugaag

SEQ ID NO: 1499549 - RNA, 19 nt, Artificial Sequence
  Description of Artificial Sequence: Synthetic oligonucleotide
ggauaguugugugcuucuu

SEQ ID NO: 1499550 - RNA, 19 nt, Artificial Sequence
  Description of Artificial Sequence: Synthetic oligonucleotide
ccggauccggaaucugcaa

SEQ ID NO: 1499551 - RNA, 19 nt, Artificial Sequence
  Description of Artificial Sequence: Synthetic oligonucleotide
cccucucuauucucuuucu

SEQ ID NO: 1499552 - RNA, 19 nt, Artificial Sequence
  Description of Artificial Sequence: Synthetic oligonucleotide
ggauucccauagggaaaau

SEQ ID NO: 1499553 - RNA, 19 nt, Artificial Sequence
  Description of Artificial Sequence: Synthetic oligonucleotide
ccuuuguguugaacagcuu

SEQ ID NO: 1499554 - RNA, 19 nt, Artificial Sequence
  Description of Artificial Sequence: Synthetic oligonucleotide
ccaccccucuaugcccaga

SEQ ID NO: 1499555 - RNA, 19 nt, Artificial Sequence
  Description of Artificial Sequence: Synthetic oligonucleotide
cccugcuaguggagaugcu

SEQ ID NO: 1499556 - RNA, 19 nt, Artificial Sequence
  Description of Artificial Sequence: Synthetic oligonucleotide
uuugcaaucauaauuaggg

SEQ ID NO: 1499557 - RNA, 19 nt, Artificial Sequence
  Description of Artificial Sequence: Synthetic oligonucleotide
aauaaaagauuccagacca

SEQ ID NO: 1499558 - RNA, 19 nt, Artificial Sequence
  Description of Artificial Sequence: Synthetic oligonucleotide
aauugcuuuauucuggauc

SEQ ID NO: 1499559 - RNA, 19 nt, Artificial Sequence
  Description of Artificial Sequence: Synthetic oligonucleotide
cauaauagugaccaaaucg

SEQ ID NO: 1499560 - RNA, 19 nt, Artificial Sequence
  Description of Artificial Sequence: Synthetic oligonucleotide
uccguuuuaacuuaaaagc

SEQ ID NO: 1499561 - RNA, 19 nt, Artificial Sequence
  Description of Artificial Sequence: Synthetic oligonucleotide
aacuugguaagccugugac

SEQ ID NO: 1499562 - RNA, 19 nt, Artificial Sequence
  Description of Artificial Sequence: Synthetic oligonucleotide
ugaugauacaggcugacag

SEQ ID NO: 1499563 - RNA, 19 nt, Artificial Sequence
  Description of Artificial Sequence: Synthetic oligonucleotide
aagucaaguuauuaagccg

SEQ ID NO: 1499564 - RNA, 19 nt, Artificial Sequence
  Description of Artificial Sequence: Synthetic oligonucleotide
ugauaauccuuauauaaug

SEQ ID NO: 1499565 - RNA, 19 nt, Artificial Sequence
  Description of Artificial Sequence: Synthetic oligonucleotide
aagaucugaaguuaugugu

SEQ ID NO: 1499566 - RNA, 19 nt, Artificial Sequence
  Description of Artificial Sequence: Synthetic oligonucleotide
ugugguauuguuuuggugu

SEQ ID NO: 1499567 - RNA, 19 nt, Artificial Sequence
  Description of Artificial Sequence: Synthetic oligonucleotide
uuccguuuuaacuuaaaag

SEQ ID NO: 1499568 - RNA, 19 nt, Artificial Sequence
  Description of Artificial Sequence: Synthetic oligonucleotide
aaaagcuaagucuuugaca

SEQ ID NO: 1499569 - RNA, 19 nt, Artificial Sequence
  Description of Artificial Sequence: Synthetic oligonucleotide
aagauuccagaccaacuac

SEQ ID NO: 1499570 - RNA, 19 nt, Artificial Sequence
  Description of Artificial Sequence: Synthetic oligonucleotide
uuugauacaucauaauagu

SEQ ID NO: 1499571 - RNA, 19 nt, Artificial Sequence
  Description of Artificial Sequence: Synthetic oligonucleotide
caaaucgugaagaugacac

SEQ ID NO: 1499572 - RNA, 19 nt, Artificial Sequence
  Description of Artificial Sequence: Synthetic oligonucleotide
ucaguauaaaugauguucu

SEQ ID NO: 1499573 - RNA, 19 nt, Artificial Sequence
  Description of Artificial Sequence: Synthetic oligonucleotide
uccuuauauaaugaguugg

SEQ ID NO: 1499574 - RNA, 19 nt, Artificial Sequence
  Description of Artificial Sequence: Synthetic oligonucleotide
aaugaugguauuucugcug

SEQ ID NO: 1499575 - RNA, 19 nt, Artificial Sequence
  Description of Artificial Sequence: Synthetic oligonucleotide
auugcuuuauucuggauca

SEQ ID NO: 1499576 - RNA, 19 nt, Artificial Sequence
  Description of Artificial Sequence: Synthetic oligonucleotide
aucgugaugauacaggcug

SEQ ID NO: 1499577 - RNA, 19 nt, Artificial Sequence
  Description of Artificial Sequence: Synthetic oligonucleotide
acauagaagaacuugguaa

SEQ ID NO: 1499578 - RNA, 19 nt, Artificial Sequence
  Description of Artificial Sequence: Synthetic oligonucleotide
aaugaguugguuucuuucu

SEQ ID NO: 1499579 - RNA, 19 nt, Artificial Sequence
  Description of Artificial Sequence: Synthetic oligonucleotide
agaauuaugaacaucuuca

SEQ ID NO: 1499580 - RNA, 19 nt, Artificial Sequence
  Description of Artificial Sequence: Synthetic oligonucleotide
auaauccuuauauaaugag

SEQ ID NO: 1499581 - RNA, 19 nt, Artificial Sequence
  Description of Artificial Sequence: Synthetic oligonucleotide
uaauuagggugucagauaa

SEQ ID NO: 1499582 - RNA, 19 nt, Artificial Sequence
  Description of Artificial Sequence: Synthetic oligonucleotide
aaauuucucacacgagcag

SEQ ID NO: 1499583 - RNA, 19 nt, Artificial Sequence
  Description of Artificial Sequence: Synthetic oligonucleotide
uaauccuuauauaaugagu

SEQ ID NO: 1499584 - RNA, 19 nt, Artificial Sequence
  Description of Artificial Sequence: Synthetic oligonucleotide
agaacauagaagaacuugg

SEQ ID NO: 1499585 - RNA, 19 nt, Artificial Sequence
  Description of Artificial Sequence: Synthetic oligonucleotide
uguguuggcaucgugauga

SEQ ID NO: 1499586 - RNA, 19 nt, Artificial Sequence
  Description of Artificial Sequence: Synthetic oligonucleotide
uuauauaaugaguugguuu

SEQ ID NO: 1499587 - RNA, 19 nt, Artificial Sequence
  Description of Artificial Sequence: Synthetic oligonucleotide
ucuccuuuaagaucugaag

SEQ ID NO: 1499588 - RNA, 19 nt, Artificial Sequence
  Description of Artificial Sequence: Synthetic oligonucleotide
uauggaucaaaccaugaua

SEQ ID NO: 1499589 - RNA, 19 nt, Artificial Sequence
  Description of Artificial Sequence: Synthetic oligonucleotide
aaucgugaagaugacacug

SEQ ID NO: 1499590 - RNA, 19 nt, Artificial Sequence
  Description of Artificial Sequence: Synthetic oligonucleotide
uaaaagcuaagucuuugac

SEQ ID NO: 1499591 - RNA, 19 nt, Artificial Sequence
  Description of Artificial Sequence: Synthetic oligonucleotide
uuuaagaucugaaguuaug

SEQ ID NO: 1499592 - RNA, 19 nt, Artificial Sequence
  Description of Artificial Sequence: Synthetic oligonucleotide
uagaauuaugaacaucuuc

SEQ ID NO: 1499593 - RNA, 19 nt, Artificial Sequence
  Description of Artificial Sequence: Synthetic oligonucleotide
guauaaaugauguucugga

SEQ ID NO: 1499594 - RNA, 19 nt, Artificial Sequence
  Description of Artificial Sequence: Synthetic oligonucleotide
acagaagaaugauggcucc

SEQ ID NO: 1499595 - RNA, 19 nt, Artificial Sequence
  Description of Artificial Sequence: Synthetic oligonucleotide
acagaguaugcccauugac

SEQ ID NO: 1499596 - RNA, 19 nt, Artificial Sequence
  Description of Artificial Sequence: Synthetic oligonucleotide
aggaggauucccuagaagu

SEQ ID NO: 1499597 - RNA, 19 nt, Artificial Sequence
  Description of Artificial Sequence: Synthetic oligonucleotide
uugauacaucauaauagug

SEQ ID NO: 1499598 - RNA, 19 nt, Artificial Sequence
  Description of Artificial Sequence: Synthetic oligonucleotide
auaauagugaccaaaucgu

SEQ ID NO: 1499599 - RNA, 19 nt, Artificial Sequence
  Description of Artificial Sequence: Synthetic oligonucleotide
uccgauucaucacaaguca

SEQ ID NO: 1499600 - RNA, 19 nt, Artificial Sequence
  Description of Artificial Sequence: Synthetic oligonucleotide
uuuucauguuaacaucuga

SEQ ID NO: 1499601 - RNA, 19 nt, Artificial Sequence
  Description of Artificial Sequence: Synthetic oligonucleotide
uccgcaugcaguuacuaag

SEQ ID NO: 1499602 - RNA, 19 nt, Artificial Sequence
  Description of Artificial Sequence: Synthetic oligonucleotide
caagucuggaggcaaaugc

SEQ ID NO: 1499603 - RNA, 19 nt, Artificial Sequence
  Description of Artificial Sequence: Synthetic oligonucleotide
gaccaaaucgugaagauga

SEQ ID NO: 1499604 - RNA, 19 nt, Artificial Sequence
  Description of Artificial Sequence: Synthetic oligonucleotide
uaauagugaccaaaucgug

SEQ ID NO: 1499605 - RNA, 19 nt, Artificial Sequence
  Description of Artificial Sequence: Synthetic oligonucleotide
aagaauccaugccauuuug

SEQ ID NO: 1499606 - RNA, 19 nt, Artificial Sequence
  Description of Artificial Sequence: Synthetic oligonucleotide
uccaccuaagagcuggucc

SEQ ID NO: 1499607 - RNA, 19 nt, Artificial Sequence
  Description of Artificial Sequence: Synthetic oligonucleotide
aucauaauuagggugucag

SEQ ID NO: 1499608 - RNA, 19 nt, Artificial Sequence
  Description of Artificial Sequence: Synthetic oligonucleotide
aauagugaccaaaucguga

SEQ ID NO: 1499609 - RNA, 19 nt, Artificial Sequence
  Description of Artificial Sequence: Synthetic oligonucleotide
uaaacagaagaaugauggc

SEQ ID NO: 1499610 - RNA, 19 nt, Artificial Sequence
  Description of Artificial Sequence: Synthetic oligonucleotide
caaccaacagaguaugccc

SEQ ID NO: 1499611 - RNA, 19 nt, Artificial Sequence
  Description of Artificial Sequence: Synthetic oligonucleotide
uaccauugucaucaaguag

SEQ ID NO: 1499612 - RNA, 19 nt, Artificial Sequence
  Description of Artificial Sequence: Synthetic oligonucleotide
uggguugcaacugguaucg

SEQ ID NO: 1499613 - RNA, 19 nt, Artificial Sequence
  Description of Artificial Sequence: Synthetic oligonucleotide
aaugucggcaggcuuuucu

SEQ ID NO: 1499614 - RNA, 19 nt, Artificial Sequence
  Description of Artificial Sequence: Synthetic oligonucleotide
uccuaguagcuccugagga

SEQ ID NO: 1499615 - RNA, 19 nt, Artificial Sequence
  Description of Artificial Sequence: Synthetic oligonucleotide
guuggcaucgugaugauac

SEQ ID NO: 1499616 - RNA, 19 nt, Artificial Sequence
  Description of Artificial Sequence: Synthetic oligonucleotide
acggagaacauagaagaac

SEQ ID NO: 1499617 - RNA, 19 nt, Artificial Sequence
  Description of Artificial Sequence: Synthetic oligonucleotide
ucacaagucaaguuauuaa

SEQ ID NO: 1499618 - RNA, 19 nt, Artificial Sequence
  Description of Artificial Sequence: Synthetic oligonucleotide
uuccguauauggaucaaac

SEQ ID NO: 1499619 - RNA, 19 nt, Artificial Sequence
  Description of Artificial Sequence: Synthetic oligonucleotide
agaguaugcccauugacaa

SEQ ID NO: 1499620 - RNA, 19 nt, Artificial Sequence
  Description of Artificial Sequence: Synthetic oligonucleotide
uuacuaaggaggauucccu

SEQ ID NO: 1499621 - RNA, 19 nt, Artificial Sequence
  Description of Artificial Sequence: Synthetic oligonucleotide
guuacuaaggaggauuccc

SEQ ID NO: 1499622 - RNA, 19 nt, Artificial Sequence
  Description of Artificial Sequence: Synthetic oligonucleotide
aaaucgugaagaugacacu

SEQ ID NO: 1499623 - RNA, 19 nt, Artificial Sequence
  Description of Artificial Sequence: Synthetic oligonucleotide
uaaugaguugguuucuuuc

SEQ ID NO: 1499624 - RNA, 19 nt, Artificial Sequence
  Description of Artificial Sequence: Synthetic oligonucleotide
auagugaccaaaucgugaa

SEQ ID NO: 1499625 - RNA, 19 nt, Artificial Sequence
  Description of Artificial Sequence: Synthetic oligonucleotide
gaaugauggcuccauuuug

SEQ ID NO: 1499626 - RNA, 19 nt, Artificial Sequence
  Description of Artificial Sequence: Synthetic oligonucleotide
uccuuuaagaucugaaguu

SEQ ID NO: 1499627 - RNA, 19 nt, Artificial Sequence
  Description of Artificial Sequence: Synthetic oligonucleotide
uagaagaacuugguaagcc

SEQ ID NO: 1499628 - RNA, 19 nt, Artificial Sequence
  Description of Artificial Sequence: Synthetic oligonucleotide
uguuaacaucugauucugg

SEQ ID NO: 1499629 - RNA, 19 nt, Artificial Sequence
  Description of Artificial Sequence: Synthetic oligonucleotide
uuuucaaagauuggagggu

SEQ ID NO: 1499630 - RNA, 19 nt, Artificial Sequence
  Description of Artificial Sequence: Synthetic oligonucleotide
uguccauuccgcaccgacg

SEQ ID NO: 1499631 - RNA, 19 nt, Artificial Sequence
  Description of Artificial Sequence: Synthetic oligonucleotide
agaugcaaccaacagagua

SEQ ID NO: 1499632 - RNA, 19 nt, Artificial Sequence
  Description of Artificial Sequence: Synthetic oligonucleotide
caguaauugcuuuauucug

SEQ ID NO: 1499633 - RNA, 19 nt, Artificial Sequence
  Description of Artificial Sequence: Synthetic oligonucleotide
aacuaaacagaagaaugau

SEQ ID NO: 1499634 - RNA, 19 nt, Artificial Sequence
  Description of Artificial Sequence: Synthetic oligonucleotide
agggaguuccuguaaaaug

SEQ ID NO: 1499635 - RNA, 19 nt, Artificial Sequence
  Description of Artificial Sequence: Synthetic oligonucleotide
ucugaaccaauaaaagauu

SEQ ID NO: 1499636 - RNA, 19 nt, Artificial Sequence
  Description of Artificial Sequence: Synthetic oligonucleotide
aagaacaggguucuccuuu

SEQ ID NO: 1499637 - RNA, 19 nt, Artificial Sequence
  Description of Artificial Sequence: Synthetic oligonucleotide
uccguauauggaucaaacc

SEQ ID NO: 1499638 - RNA, 19 nt, Artificial Sequence
  Description of Artificial Sequence: Synthetic oligonucleotide
uaauuccgcaugcaguuac

SEQ ID NO: 1499639 - RNA, 19 nt, Artificial Sequence
  Description of Artificial Sequence: Synthetic oligonucleotide
aguucugaauuccuauucu

SEQ ID NO: 1499640 - RNA, 19 nt, Artificial Sequence
  Description of Artificial Sequence: Synthetic oligonucleotide
aaugauggcuccauuuugu

SEQ ID NO: 1499641 - RNA, 19 nt, Artificial Sequence
  Description of Artificial Sequence: Synthetic oligonucleotide
uaagccgaggaaucuuccg

SEQ ID NO: 1499642 - RNA, 19 nt, Artificial Sequence
  Description of Artificial Sequence: Synthetic oligonucleotide
aauauuuacauaagcuauu

SEQ ID NO: 1499643 - RNA, 19 nt, Artificial Sequence
  Description of Artificial Sequence: Synthetic oligonucleotide
guccauuccgcaccgacgg

SEQ ID NO: 1499644 - RNA, 19 nt, Artificial Sequence
  Description of Artificial Sequence: Synthetic oligonucleotide
augaguugguuucuuucuc

SEQ ID NO: 1499645 - RNA, 19 nt, Artificial Sequence
  Description of Artificial Sequence: Synthetic oligonucleotide
agcagcuaaaugucaaaug

SEQ ID NO: 1499646 - RNA, 19 nt, Artificial Sequence
  Description of Artificial Sequence: Synthetic oligonucleotide
uauaaaugauguucuggau

SEQ ID NO: 1499647 - RNA, 19 nt, Artificial Sequence
  Description of Artificial Sequence: Synthetic oligonucleotide
agucaaguuauuaagccga

SEQ ID NO: 1499648 - RNA, 19 nt, Artificial Sequence
  Description of Artificial Sequence: Synthetic oligonucleotide
caaauuucucacacgagca

SEQ ID NO: 1499649 - RNA, 19 nt, Artificial Sequence
  Description of Artificial Sequence: Synthetic oligonucleotide
cagauaauuccgcaugcag

SEQ ID NO: 1499650 - RNA, 19 nt, Artificial Sequence
  Description of Artificial Sequence: Synthetic oligonucleotide
agcuaaaugucaaaugaug

SEQ ID NO: 1499651 - RNA, 19 nt, Artificial Sequence
  Description of Artificial Sequence: Synthetic oligonucleotide
uucccuagaaguccaggug

SEQ ID NO: 1499652 - RNA, 19 nt, Artificial Sequence
  Description of Artificial Sequence: Synthetic oligonucleotide
aucaaguaguggugcaggg

SEQ ID NO: 1499653 - RNA, 19 nt, Artificial Sequence
  Description of Artificial Sequence: Synthetic oligonucleotide
acagcgagguucuuagaag

SEQ ID NO: 1499654 - RNA, 19 nt, Artificial Sequence
  Description of Artificial Sequence: Synthetic oligonucleotide
uuaagccgaggaaucuucc

SEQ ID NO: 1499655 - RNA, 19 nt, Artificial Sequence
  Description of Artificial Sequence: Synthetic oligonucleotide
ggcggauucugccagaucc

SEQ ID NO: 1499656 - RNA, 19 nt, Artificial Sequence
  Description of Artificial Sequence: Synthetic oligonucleotide
aacagaguaugcccauuga

SEQ ID NO: 1499657 - RNA, 19 nt, Artificial Sequence
  Description of Artificial Sequence: Synthetic oligonucleotide
auauggaucaaaccaugau

SEQ ID NO: 1499658 - RNA, 19 nt, Artificial Sequence
  Description of Artificial Sequence: Synthetic oligonucleotide
ugaagcaguuucauauagu

SEQ ID NO: 1499659 - RNA, 19 nt, Artificial Sequence
  Description of Artificial Sequence: Synthetic oligonucleotide
agucuccugacaaagaaca

SEQ ID NO: 1499660 - RNA, 19 nt, Artificial Sequence
  Description of Artificial Sequence: Synthetic oligonucleotide
uuaccauugucaucaagua

SEQ ID NO: 1499661 - RNA, 19 nt, Artificial Sequence
  Description of Artificial Sequence: Synthetic oligonucleotide
aguuacuaaggaggauucc

SEQ ID NO: 1499662 - RNA, 19 nt, Artificial Sequence
  Description of Artificial Sequence: Synthetic oligonucleotide
cuccccaaaauggugaacc

SEQ ID NO: 1499663 - RNA, 19 nt, Artificial Sequence
  Description of Artificial Sequence: Synthetic oligonucleotide
auggaucaaaccaugauaa

SEQ ID NO: 1499664 - RNA, 19 nt, Artificial Sequence
  Description of Artificial Sequence: Synthetic oligonucleotide
uccuauucuuaaaauguuu

SEQ ID NO: 1499665 - RNA, 19 nt, Artificial Sequence
  Description of Artificial Sequence: Synthetic oligonucleotide
ucauaauuagggugucaga

SEQ ID NO: 1499666 - RNA, 19 nt, Artificial Sequence
  Description of Artificial Sequence: Synthetic oligonucleotide
ugucaucaaguaguggugc

SEQ ID NO: 1499667 - RNA, 19 nt, Artificial Sequence
  Description of Artificial Sequence: Synthetic oligonucleotide
guuauuaagccgaggaauc

SEQ ID NO: 1499668 - RNA, 19 nt, Artificial Sequence
  Description of Artificial Sequence: Synthetic oligonucleotide
agguucuuagaagaccacg

SEQ ID NO: 1499669 - RNA, 19 nt, Artificial Sequence
  Description of Artificial Sequence: Synthetic oligonucleotide
uucaaagauuggaggguca

SEQ ID NO: 1499670 - RNA, 19 nt, Artificial Sequence
  Description of Artificial Sequence: Synthetic oligonucleotide
ucucacacgagcaguaauu

SEQ ID NO: 1499671 - RNA, 19 nt, Artificial Sequence
  Description of Artificial Sequence: Synthetic oligonucleotide
uaugcccauugacaauucc

SEQ ID NO: 1499672 - RNA, 19 nt, Artificial Sequence
  Description of Artificial Sequence: Synthetic oligonucleotide
uggaggcaaaugcagucgc

SEQ ID NO: 1499673 - RNA, 19 nt, Artificial Sequence
  Description of Artificial Sequence: Synthetic oligonucleotide
cucugaaccaauaaaagau

SEQ ID NO: 1499674 - RNA, 19 nt, Artificial Sequence
  Description of Artificial Sequence: Synthetic oligonucleotide
cagaguaugcccauugaca

SEQ ID NO: 1499675 - RNA, 19 nt, Artificial Sequence
  Description of Artificial Sequence: Synthetic oligonucleotide
gauuccagaccaacuacug

SEQ ID NO: 1499676 - RNA, 19 nt, Artificial Sequence
  Description of Artificial Sequence: Synthetic oligonucleotide
uuucaaagauuggaggguc

SEQ ID NO: 1499677 - RNA, 19 nt, Artificial Sequence
  Description of Artificial Sequence: Synthetic oligonucleotide
ugcagucgcucaaugguga

SEQ ID NO: 1499678 - RNA, 19 nt, Artificial Sequence
  Description of Artificial Sequence: Synthetic oligonucleotide
auaauuagggugucagaua

SEQ ID NO: 1499679 - RNA, 19 nt, Artificial Sequence
  Description of Artificial Sequence: Synthetic oligonucleotide
gauaauuccgcaugcaguu

SEQ ID NO: 1499680 - RNA, 19 nt, Artificial Sequence
  Description of Artificial Sequence: Synthetic oligonucleotide
agauaauuccgcaugcagu

SEQ ID NO: 1499681 - RNA, 19 nt, Artificial Sequence
  Description of Artificial Sequence: Synthetic oligonucleotide
ucacacgagcaguaauugc

SEQ ID NO: 1499682 - RNA, 19 nt, Artificial Sequence
  Description of Artificial Sequence: Synthetic oligonucleotide
uuccuauucuuaaaauguu

SEQ ID NO: 1499683 - RNA, 19 nt, Artificial Sequence
  Description of Artificial Sequence: Synthetic oligonucleotide
uagucuccugacaaagaac

SEQ ID NO: 1499684 - RNA, 19 nt, Artificial Sequence
  Description of Artificial Sequence: Synthetic oligonucleotide
guauauggaucaaaccaug

SEQ ID NO: 1499685 - RNA, 19 nt, Artificial Sequence
  Description of Artificial Sequence: Synthetic oligonucleotide
aucaaaccaugauaauccu

SEQ ID NO: 1499686 - RNA, 19 nt, Artificial Sequence
  Description of Artificial Sequence: Synthetic oligonucleotide
gauucccuagaaguccagg

SEQ ID NO: 1499687 - RNA, 19 nt, Artificial Sequence
  Description of Artificial Sequence: Synthetic oligonucleotide
ugaccaaaucgugaagaug

SEQ ID NO: 1499688 - RNA, 19 nt, Artificial Sequence
  Description of Artificial Sequence: Synthetic oligonucleotide
gacagcgagguucuuagaa

SEQ ID NO: 1499689 - RNA, 19 nt, Artificial Sequence
  Description of Artificial Sequence: Synthetic oligonucleotide
uaucgccaggcuauuuuca

SEQ ID NO: 1499690 - RNA, 19 nt, Artificial Sequence
  Description of Artificial Sequence: Synthetic oligonucleotide
uggagggucaaaucauuaa

SEQ ID NO: 1499691 - RNA, 19 nt, Artificial Sequence
  Description of Artificial Sequence: Synthetic oligonucleotide
ugcccauugacaauuccuu

SEQ ID NO: 1499692 - RNA, 19 nt, Artificial Sequence
  Description of Artificial Sequence: Synthetic oligonucleotide
cauuccgcaccgacggucg

SEQ ID NO: 1499693 - RNA, 19 nt, Artificial Sequence
  Description of Artificial Sequence: Synthetic oligonucleotide
aaucauaauuaggguguca

SEQ ID NO: 1499694 - RNA, 19 nt, Artificial Sequence
  Description of Artificial Sequence: Synthetic oligonucleotide
uugagcgacucacuguguc

SEQ ID NO: 1499695 - RNA, 19 nt, Artificial Sequence
  Description of Artificial Sequence: Synthetic oligonucleotide
aaaugucaucuccccaaaa

SEQ ID NO: 1499696 - RNA, 19 nt, Artificial Sequence
  Description of Artificial Sequence: Synthetic oligonucleotide
augauaauccuuauauaau

SEQ ID NO: 1499697 - RNA, 19 nt, Artificial Sequence
  Description of Artificial Sequence: Synthetic oligonucleotide
auuccagaccaacuacugu

SEQ ID NO: 1499698 - RNA, 19 nt, Artificial Sequence
  Description of Artificial Sequence: Synthetic oligonucleotide
uaguggugcagggaguucc

SEQ ID NO: 1499699 - RNA, 19 nt, Artificial Sequence
  Description of Artificial Sequence: Synthetic oligonucleotide
aaccaacagaguaugccca

SEQ ID NO: 1499700 - RNA, 19 nt, Artificial Sequence
  Description of Artificial Sequence: Synthetic oligonucleotide
gaucugaaguuauguguuc

SEQ ID NO: 1499701 - RNA, 19 nt, Artificial Sequence
  Description of Artificial Sequence: Synthetic oligonucleotide
aucgugaagaugacacugg

SEQ ID NO: 1499702 - RNA, 19 nt, Artificial Sequence
  Description of Artificial Sequence: Synthetic oligonucleotide
aacugguaucgccaggcua

SEQ ID NO: 1499703 - RNA, 19 nt, Artificial Sequence
  Description of Artificial Sequence: Synthetic oligonucleotide
aguaugcccauugacaauu

SEQ ID NO: 1499704 - RNA, 19 nt, Artificial Sequence
  Description of Artificial Sequence: Synthetic oligonucleotide
aacagcagcuaaaugucaa

SEQ ID NO: 1499705 - RNA, 19 nt, Artificial Sequence
  Description of Artificial Sequence: Synthetic oligonucleotide
ugccauuuugaacuuccua

SEQ ID NO: 1499706 - RNA, 19 nt, Artificial Sequence
  Description of Artificial Sequence: Synthetic oligonucleotide
caguauaaaugauguucug

SEQ ID NO: 1499707 - RNA, 19 nt, Artificial Sequence
  Description of Artificial Sequence: Synthetic oligonucleotide
ggaucaaaccaugauaauc

SEQ ID NO: 1499708 - RNA, 19 nt, Artificial Sequence
  Description of Artificial Sequence: Synthetic oligonucleotide
uccagaccaacuacuguau

SEQ ID NO: 1499709 - RNA, 19 nt, Artificial Sequence
  Description of Artificial Sequence: Synthetic oligonucleotide
guugcaacugguaucgcca

SEQ ID NO: 1499710 - RNA, 19 nt, Artificial Sequence
  Description of Artificial Sequence: Synthetic oligonucleotide
ucaaagauuggagggucaa

SEQ ID NO: 1499711 - RNA, 19 nt, Artificial Sequence
  Description of Artificial Sequence: Synthetic oligonucleotide
uuggagggucaaaucauua

SEQ ID NO: 1499712 - RNA, 19 nt, Artificial Sequence
  Description of Artificial Sequence: Synthetic oligonucleotide
ugagcgacucacugugucu

SEQ ID NO: 1499713 - RNA, 19 nt, Artificial Sequence
  Description of Artificial Sequence: Synthetic oligonucleotide
auaaugaguugguuucuuu

SEQ ID NO: 1499714 - RNA, 19 nt, Artificial Sequence
  Description of Artificial Sequence: Synthetic oligonucleotide
uucucacacgagcaguaau

SEQ ID NO: 1499715 - RNA, 19 nt, Artificial Sequence
  Description of Artificial Sequence: Synthetic oligonucleotide
ugcagggaguuccuguaaa

SEQ ID NO: 1499716 - RNA, 19 nt, Artificial Sequence
  Description of Artificial Sequence: Synthetic oligonucleotide
auauaaugaguugguuucu

SEQ ID NO: 1499717 - RNA, 19 nt, Artificial Sequence
  Description of Artificial Sequence: Synthetic oligonucleotide
uggggauuagauccaucaa

SEQ ID NO: 1499718 - RNA, 19 nt, Artificial Sequence
  Description of Artificial Sequence: Synthetic oligonucleotide
gcuauuugcaaucauaauu

SEQ ID NO: 1499719 - RNA, 19 nt, Artificial Sequence
  Description of Artificial Sequence: Synthetic oligonucleotide
ugcuugagcgacucacugu

SEQ ID NO: 1499720 - RNA, 19 nt, Artificial Sequence
  Description of Artificial Sequence: Synthetic oligonucleotide
agcuauuugcaaucauaau

SEQ ID NO: 1499721 - RNA, 19 nt, Artificial Sequence
  Description of Artificial Sequence: Synthetic oligonucleotide
cauuuuguaauccuguguu

SEQ ID NO: 1499722 - RNA, 19 nt, Artificial Sequence
  Description of Artificial Sequence: Synthetic oligonucleotide
aucugaaguuauguguucu

SEQ ID NO: 1499723 - RNA, 19 nt, Artificial Sequence
  Description of Artificial Sequence: Synthetic oligonucleotide
gguugcaacugguaucgcc

SEQ ID NO: 1499724 - RNA, 19 nt, Artificial Sequence
  Description of Artificial Sequence: Synthetic oligonucleotide
ucgugaugauacaggcuga

SEQ ID NO: 1499725 - RNA, 19 nt, Artificial Sequence
  Description of Artificial Sequence: Synthetic oligonucleotide
uggcccaaccugcaucuug

SEQ ID NO: 1499726 - RNA, 19 nt, Artificial Sequence
  Description of Artificial Sequence: Synthetic oligonucleotide
gcaaccaacagaguaugcc

SEQ ID NO: 1499727 - RNA, 19 nt, Artificial Sequence
  Description of Artificial Sequence: Synthetic oligonucleotide
uacuaaggaggauucccua

SEQ ID NO: 1499728 - RNA, 19 nt, Artificial Sequence
  Description of Artificial Sequence: Synthetic oligonucleotide
cuaaggaggauucccuaga

SEQ ID NO: 1499729 - RNA, 19 nt, Artificial Sequence
  Description of Artificial Sequence: Synthetic oligonucleotide
agauuccagaccaacuacu

SEQ ID NO: 1499730 - RNA, 19 nt, Artificial Sequence
  Description of Artificial Sequence: Synthetic oligonucleotide
cucacacgagcaguaauug

SEQ ID NO: 1499731 - RNA, 19 nt, Artificial Sequence
  Description of Artificial Sequence: Synthetic oligonucleotide
gucggcaggcuuuucuuug

SEQ ID NO: 1499732 - RNA, 19 nt, Artificial Sequence
  Description of Artificial Sequence: Synthetic oligonucleotide
gauguguuggcaucgugau

SEQ ID NO: 1499733 - RNA, 19 nt, Artificial Sequence
  Description of Artificial Sequence: Synthetic oligonucleotide
uauuaagccgaggaaucuu

SEQ ID NO: 1499734 - RNA, 19 nt, Artificial Sequence
  Description of Artificial Sequence: Synthetic oligonucleotide
ucuuggguugcaacuggua

SEQ ID NO: 1499735 - RNA, 19 nt, Artificial Sequence
  Description of Artificial Sequence: Synthetic oligonucleotide
gaacuugguaagccuguga

SEQ ID NO: 1499736 - RNA, 19 nt, Artificial Sequence
  Description of Artificial Sequence: Synthetic oligonucleotide
cagcuuggcggauucugcc

SEQ ID NO: 1499737 - RNA, 19 nt, Artificial Sequence
  Description of Artificial Sequence: Synthetic oligonucleotide
agcgagguucuuagaagac

SEQ ID NO: 1499738 - RNA, 19 nt, Artificial Sequence
  Description of Artificial Sequence: Synthetic oligonucleotide
guaucgccaggcuauuuuc

SEQ ID NO: 1499739 - RNA, 19 nt, Artificial Sequence
  Description of Artificial Sequence: Synthetic oligonucleotide
aaaaugucggcaggcuuuu

SEQ ID NO: 1499740 - RNA, 19 nt, Artificial Sequence
  Description of Artificial Sequence: Synthetic oligonucleotide
gaugcaaccaacagaguau

SEQ ID NO: 1499741 - RNA, 19 nt, Artificial Sequence
  Description of Artificial Sequence: Synthetic oligonucleotide
uuccgcaugcaguuacuaa

SEQ ID NO: 1499742 - RNA, 19 nt, Artificial Sequence
  Description of Artificial Sequence: Synthetic oligonucleotide
gagcgacucacugugucug

SEQ ID NO: 1499743 - RNA, 19 nt, Artificial Sequence
  Description of Artificial Sequence: Synthetic oligonucleotide
uggaucaaaccaugauaau

SEQ ID NO: 1499744 - RNA, 19 nt, Artificial Sequence
  Description of Artificial Sequence: Synthetic oligonucleotide
ucgagucgccgcaauggac

SEQ ID NO: 1499745 - RNA, 19 nt, Artificial Sequence
  Description of Artificial Sequence: Synthetic oligonucleotide
gucaaguuauuaagccgag

SEQ ID NO: 1499746 - RNA, 19 nt, Artificial Sequence
  Description of Artificial Sequence: Synthetic oligonucleotide
accaaaucgugaagaugac

SEQ ID NO: 1499747 - RNA, 19 nt, Artificial Sequence
  Description of Artificial Sequence: Synthetic oligonucleotide
cauauagucuccugacaaa

SEQ ID NO: 1499748 - RNA, 19 nt, Artificial Sequence
  Description of Artificial Sequence: Synthetic oligonucleotide
cuguuccaacagcuaaacc

SEQ ID NO: 1499749 - RNA, 19 nt, Artificial Sequence
  Description of Artificial Sequence: Synthetic oligonucleotide
cuuccguuuuaacuuaaaa

SEQ ID NO: 1499750 - RNA, 19 nt, Artificial Sequence
  Description of Artificial Sequence: Synthetic oligonucleotide
gagucgccgcaauggacag

SEQ ID NO: 1499751 - RNA, 19 nt, Artificial Sequence
  Description of Artificial Sequence: Synthetic oligonucleotide
ucgccaggcuauuuucaug

SEQ ID NO: 1499752 - RNA, 19 nt, Artificial Sequence
  Description of Artificial Sequence: Synthetic oligonucleotide
uaauugcuuuauucuggau

SEQ ID NO: 1499753 - RNA, 19 nt, Artificial Sequence
  Description of Artificial Sequence: Synthetic oligonucleotide
acagcuaaaccuccaccua

SEQ ID NO: 1499754 - RNA, 19 nt, Artificial Sequence
  Description of Artificial Sequence: Synthetic oligonucleotide
ggucgagucgccgcaaugg

SEQ ID NO: 1499755 - RNA, 19 nt, Artificial Sequence
  Description of Artificial Sequence: Synthetic oligonucleotide
cagcgagguucuuagaaga

SEQ ID NO: 1499756 - RNA, 19 nt, Artificial Sequence
  Description of Artificial Sequence: Synthetic oligonucleotide
cuguccauuccgcaccgac

SEQ ID NO: 1499757 - RNA, 19 nt, Artificial Sequence
  Description of Artificial Sequence: Synthetic oligonucleotide
uagauccaucaaauccuuc

SEQ ID NO: 1499758 - RNA, 19 nt, Artificial Sequence
  Description of Artificial Sequence: Synthetic oligonucleotide
ucaaauccuucaguauaaa

SEQ ID NO: 1499759 - RNA, 19 nt, Artificial Sequence
  Description of Artificial Sequence: Synthetic oligonucleotide
uguuugcuugagcgacuca

SEQ ID NO: 1499760 - RNA, 19 nt, Artificial Sequence
  Description of Artificial Sequence: Synthetic oligonucleotide
uaguagcuccugaggaauc

SEQ ID NO: 1499761 - RNA, 19 nt, Artificial Sequence
  Description of Artificial Sequence: Synthetic oligonucleotide
cuaagucuuugacauccga

SEQ ID NO: 1499762 - RNA, 19 nt, Artificial Sequence
  Description of Artificial Sequence: Synthetic oligonucleotide
ggauuagauccaucaaauc

SEQ ID NO: 1499763 - RNA, 19 nt, Artificial Sequence
  Description of Artificial Sequence: Synthetic oligonucleotide
agcuuggcggauucugcca

SEQ ID NO: 1499764 - RNA, 19 nt, Artificial Sequence
  Description of Artificial Sequence: Synthetic oligonucleotide
agaacuugguaagccugug

SEQ ID NO: 1499765 - RNA, 19 nt, Artificial Sequence
  Description of Artificial Sequence: Synthetic oligonucleotide
aucgccaggcuauuuucau

SEQ ID NO: 1499766 - RNA, 19 nt, Artificial Sequence
  Description of Artificial Sequence: Synthetic oligonucleotide
aaccugcaucuuggguugc

SEQ ID NO: 1499767 - RNA, 19 nt, Artificial Sequence
  Description of Artificial Sequence: Synthetic oligonucleotide
aaaugucggcaggcuuuuc

SEQ ID NO: 1499768 - RNA, 19 nt, Artificial Sequence
  Description of Artificial Sequence: Synthetic oligonucleotide
gaagaauccaugccauuuu

SEQ ID NO: 1499769 - RNA, 19 nt, Artificial Sequence
  Description of Artificial Sequence: Synthetic oligonucleotide
ccgcaugcaguuacuaagg

SEQ ID NO: 1499770 - RNA, 19 nt, Artificial Sequence
  Description of Artificial Sequence: Synthetic oligonucleotide
gcaacugguaucgccaggc

SEQ ID NO: 1499771 - RNA, 19 nt, Artificial Sequence
  Description of Artificial Sequence: Synthetic oligonucleotide
aauuagggugucagauaau

SEQ ID NO: 1499772 - RNA, 19 nt, Artificial Sequence
  Description of Artificial Sequence: Synthetic oligonucleotide
gucgccgcaauggacagca

SEQ ID NO: 1499773 - RNA, 19 nt, Artificial Sequence
  Description of Artificial Sequence: Synthetic oligonucleotide
cagaccaacuacuguaucu

SEQ ID NO: 1499774 - RNA, 19 nt, Artificial Sequence
  Description of Artificial Sequence: Synthetic oligonucleotide
uuucucacacgagcaguaa

SEQ ID NO: 1499775 - RNA, 19 nt, Artificial Sequence
  Description of Artificial Sequence: Synthetic oligonucleotide
ccauugacaauuccuucug

SEQ ID NO: 1499776 - RNA, 19 nt, Artificial Sequence
  Description of Artificial Sequence: Synthetic oligonucleotide
ggaaucuuccguauaugga

SEQ ID NO: 1499777 - RNA, 19 nt, Artificial Sequence
  Description of Artificial Sequence: Synthetic oligonucleotide
augcagucgcucaauggug

SEQ ID NO: 1499778 - RNA, 19 nt, Artificial Sequence
  Description of Artificial Sequence: Synthetic oligonucleotide
gccgcaauggacagcagcc

SEQ ID NO: 1499779 - RNA, 19 nt, Artificial Sequence
  Description of Artificial Sequence: Synthetic oligonucleotide
agccgaggaaucuuccgua

SEQ ID NO: 1499780 - RNA, 19 nt, Artificial Sequence
  Description of Artificial Sequence: Synthetic oligonucleotide
acuuaaaagcuaagucuuu

SEQ ID NO: 1499781 - RNA, 19 nt, Artificial Sequence
  Description of Artificial Sequence: Synthetic oligonucleotide
gcuuggcggauucugccag

SEQ ID NO: 1499782 - RNA, 19 nt, Artificial Sequence
  Description of Artificial Sequence: Synthetic oligonucleotide
gagguucuuagaagaccac

SEQ ID NO: 1499783 - RNA, 19 nt, Artificial Sequence
  Description of Artificial Sequence: Synthetic oligonucleotide
cuuggguugcaacugguau

SEQ ID NO: 1499784 - RNA, 19 nt, Artificial Sequence
  Description of Artificial Sequence: Synthetic oligonucleotide
ggaggauucccuagaaguc

SEQ ID NO: 1499785 - RNA, 19 nt, Artificial Sequence
  Description of Artificial Sequence: Synthetic oligonucleotide
gacauccgauucaucacaa

SEQ ID NO: 1499786 - RNA, 19 nt, Artificial Sequence
  Description of Artificial Sequence: Synthetic oligonucleotide
gggaguuccuguaaaaugu

SEQ ID NO: 1499787 - RNA, 19 nt, Artificial Sequence
  Description of Artificial Sequence: Synthetic oligonucleotide
cacugugucugacaagucu

SEQ ID NO: 1499788 - RNA, 19 nt, Artificial Sequence
  Description of Artificial Sequence: Synthetic oligonucleotide
caaauccuucaguauaaau

SEQ ID NO: 1499789 - RNA, 19 nt, Artificial Sequence
  Description of Artificial Sequence: Synthetic oligonucleotide
uccauuccgcaccgacggu

SEQ ID NO: 1499790 - RNA, 19 nt, Artificial Sequence
  Description of Artificial Sequence: Synthetic oligonucleotide
gucgagucgccgcaaugga

SEQ ID NO: 1499791 - RNA, 19 nt, Artificial Sequence
  Description of Artificial Sequence: Synthetic oligonucleotide
agucgccgcaauggacagc

SEQ ID NO: 1499792 - RNA, 19 nt, Artificial Sequence
  Description of Artificial Sequence: Synthetic oligonucleotide
gcgagguucuuagaagacc

SEQ ID NO: 1499793 - RNA, 19 nt, Artificial Sequence
  Description of Artificial Sequence: Synthetic oligonucleotide
ugggagcccgguugacacc

SEQ ID NO: 1499794 - RNA, 19 nt, Artificial Sequence
  Description of Artificial Sequence: Synthetic oligonucleotide
agcgacucacugugucuga

SEQ ID NO: 1499795 - RNA, 19 nt, Artificial Sequence
  Description of Artificial Sequence: Synthetic oligonucleotide
gagcccgguugacaccagc

SEQ ID NO: 1499796 - RNA, 19 nt, Artificial Sequence
  Description of Artificial Sequence: Synthetic oligonucleotide
uuccgcaccgacggucgag

SEQ ID NO: 1499797 - RNA, 19 nt, Artificial Sequence
  Description of Artificial Sequence: Synthetic oligonucleotide
gcaauggacagcagccgag

SEQ ID NO: 1499798 - RNA, 19 nt, Artificial Sequence
  Description of Artificial Sequence: Synthetic oligonucleotide
cacggagaacauagaagaa

SEQ ID NO: 1499799 - RNA, 19 nt, Artificial Sequence
  Description of Artificial Sequence: Synthetic oligonucleotide
auggugaaccaaaguucug

SEQ ID NO: 1499800 - RNA, 19 nt, Artificial Sequence
  Description of Artificial Sequence: Synthetic oligonucleotide
auaauuccgcaugcaguua

SEQ ID NO: 1499801 - RNA, 19 nt, Artificial Sequence
  Description of Artificial Sequence: Synthetic oligonucleotide
ccguuuuaacuuaaaagcu

SEQ ID NO: 1499802 - RNA, 19 nt, Artificial Sequence
  Description of Artificial Sequence: Synthetic oligonucleotide
cgagguucuuagaagacca

SEQ ID NO: 1499803 - RNA, 19 nt, Artificial Sequence
  Description of Artificial Sequence: Synthetic oligonucleotide
ccaccuaagagcuggucca

SEQ ID NO: 1499804 - RNA, 19 nt, Artificial Sequence
  Description of Artificial Sequence: Synthetic oligonucleotide
gggugucagauaauuccgc

SEQ ID NO: 1499805 - RNA, 19 nt, Artificial Sequence
  Description of Artificial Sequence: Synthetic oligonucleotide
gugaugauacaggcugaca

SEQ ID NO: 1499806 - RNA, 19 nt, Artificial Sequence
  Description of Artificial Sequence: Synthetic oligonucleotide
gcaccgacggucgagucgc

SEQ ID NO: 1499807 - RNA, 19 nt, Artificial Sequence
  Description of Artificial Sequence: Synthetic oligonucleotide
cguuuuaacuuaaaagcua

SEQ ID NO: 1499808 - RNA, 19 nt, Artificial Sequence
  Description of Artificial Sequence: Synthetic oligonucleotide
uccgcaccgacggucgagu

SEQ ID NO: 1499809 - RNA, 19 nt, Artificial Sequence
  Description of Artificial Sequence: Synthetic oligonucleotide
ccuuauauaaugaguuggu

SEQ ID NO: 1499810 - RNA, 19 nt, Artificial Sequence
  Description of Artificial Sequence: Synthetic oligonucleotide
gggauuagauccaucaaau

SEQ ID NO: 1499811 - RNA, 19 nt, Artificial Sequence
  Description of Artificial Sequence: Synthetic oligonucleotide
uuggcggauucugccagau

SEQ ID NO: 1499812 - RNA, 19 nt, Artificial Sequence
  Description of Artificial Sequence: Synthetic oligonucleotide
cuuccguauauggaucaaa

SEQ ID NO: 1499813 - RNA, 19 nt, Artificial Sequence
  Description of Artificial Sequence: Synthetic oligonucleotide
aucuuggguugcaacuggu

SEQ ID NO: 1499814 - RNA, 19 nt, Artificial Sequence
  Description of Artificial Sequence: Synthetic oligonucleotide
gugaacagcuuccguuuua

SEQ ID NO: 1499815 - RNA, 19 nt, Artificial Sequence
  Description of Artificial Sequence: Synthetic oligonucleotide
gcuaaaccuccaccuaaga

SEQ ID NO: 1499816 - RNA, 19 nt, Artificial Sequence
  Description of Artificial Sequence: Synthetic oligonucleotide
acacgagcaguaauugcuu

SEQ ID NO: 1499817 - RNA, 19 nt, Artificial Sequence
  Description of Artificial Sequence: Synthetic oligonucleotide
accgacggucgagucgccg

SEQ ID NO: 1499818 - RNA, 19 nt, Artificial Sequence
  Description of Artificial Sequence: Synthetic oligonucleotide
auuccgcaugcaguuacua

SEQ ID NO: 1499819 - RNA, 19 nt, Artificial Sequence
  Description of Artificial Sequence: Synthetic oligonucleotide
cagucgcucaauggugaac

SEQ ID NO: 1499820 - RNA, 19 nt, Artificial Sequence
  Description of Artificial Sequence: Synthetic oligonucleotide
agcccgguugacaccagca

SEQ ID NO: 1499821 - RNA, 19 nt, Artificial Sequence
  Description of Artificial Sequence: Synthetic oligonucleotide
gugguauuguuuugguguu

SEQ ID NO: 1499822 - RNA, 19 nt, Artificial Sequence
  Description of Artificial Sequence: Synthetic oligonucleotide
gcccauugacaauuccuuc

SEQ ID NO: 1499823 - RNA, 19 nt, Artificial Sequence
  Description of Artificial Sequence: Synthetic oligonucleotide
aguggugcagggaguuccu

SEQ ID NO: 1499824 - RNA, 19 nt, Artificial Sequence
  Description of Artificial Sequence: Synthetic oligonucleotide
ggugcagggaguuccugua

SEQ ID NO: 1499825 - RNA, 19 nt, Artificial Sequence
  Description of Artificial Sequence: Synthetic oligonucleotide
cuuggcggauucugccaga

SEQ ID NO: 1499826 - RNA, 19 nt, Artificial Sequence
  Description of Artificial Sequence: Synthetic oligonucleotide
auuccgcaccgacggucga

SEQ ID NO: 1499827 - RNA, 19 nt, Artificial Sequence
  Description of Artificial Sequence: Synthetic oligonucleotide
cuucaguauaaaugauguu

SEQ ID NO: 1499828 - RNA, 19 nt, Artificial Sequence
  Description of Artificial Sequence: Synthetic oligonucleotide
gcaguuacuaaggaggauu

SEQ ID NO: 1499829 - RNA, 19 nt, Artificial Sequence
  Description of Artificial Sequence: Synthetic oligonucleotide
ccaugauaauccuuauaua

SEQ ID NO: 1499830 - RNA, 19 nt, Artificial Sequence
  Description of Artificial Sequence: Synthetic oligonucleotide
ccgacggucgagucgccgc

SEQ ID NO: 1499831 - RNA, 19 nt, Artificial Sequence
  Description of Artificial Sequence: Synthetic oligonucleotide
cggagaacauagaagaacu

SEQ ID NO: 1499832 - RNA, 19 nt, Artificial Sequence
  Description of Artificial Sequence: Synthetic oligonucleotide
ccuaguagcuccugaggaa

SEQ ID NO: 1499833 - RNA, 19 nt, Artificial Sequence
  Description of Artificial Sequence: Synthetic oligonucleotide
gguaucgccaggcuauuuu

SEQ ID NO: 1499834 - RNA, 19 nt, Artificial Sequence
  Description of Artificial Sequence: Synthetic oligonucleotide
gacaagucuggaggcaaau

SEQ ID NO: 1499835 - RNA, 19 nt, Artificial Sequence
  Description of Artificial Sequence: Synthetic oligonucleotide
ucgccgcaauggacagcag

SEQ ID NO: 1499836 - RNA, 19 nt, Artificial Sequence
  Description of Artificial Sequence: Synthetic oligonucleotide
cgagucgccgcaauggaca

SEQ ID NO: 1499837 - RNA, 19 nt, Artificial Sequence
  Description of Artificial Sequence: Synthetic oligonucleotide
guaguggugcagggaguuc

SEQ ID NO: 1499838 - RNA, 19 nt, Artificial Sequence
  Description of Artificial Sequence: Synthetic oligonucleotide
gugcagggaguuccuguaa

SEQ ID NO: 1499839 - RNA, 19 nt, Artificial Sequence
  Description of Artificial Sequence: Synthetic oligonucleotide
gcagggaguuccuguaaaa

SEQ ID NO: 1499840 - RNA, 19 nt, Artificial Sequence
  Description of Artificial Sequence: Synthetic oligonucleotide
cuccaccuaagagcugguc

SEQ ID NO: 1499841 - RNA, 19 nt, Artificial Sequence
  Description of Artificial Sequence: Synthetic oligonucleotide
gaacuuccuaguagcuccu

SEQ ID NO: 1499842 - RNA, 19 nt, Artificial Sequence
  Description of Artificial Sequence: Synthetic oligonucleotide
acggucgagucgccgcaau

SEQ ID NO: 1499843 - RNA, 19 nt, Artificial Sequence
  Description of Artificial Sequence: Synthetic oligonucleotide
ggauucccuagaaguccag

SEQ ID NO: 1499844 - RNA, 19 nt, Artificial Sequence
  Description of Artificial Sequence: Synthetic oligonucleotide
ccagaccaacuacuguauc

SEQ ID NO: 1499845 - RNA, 19 nt, Artificial Sequence
  Description of Artificial Sequence: Synthetic oligonucleotide
caggugcuuccugccuccg

SEQ ID NO: 1499846 - RNA, 19 nt, Artificial Sequence
  Description of Artificial Sequence: Synthetic oligonucleotide
cgcaccgacggucgagucg

SEQ ID NO: 1499847 - RNA, 19 nt, Artificial Sequence
  Description of Artificial Sequence: Synthetic oligonucleotide
cuugagcgacucacugugu

SEQ ID NO: 1499848 - RNA, 19 nt, Artificial Sequence
  Description of Artificial Sequence: Synthetic oligonucleotide
ccgauucaucacaagucaa

SEQ ID NO: 1499849 - RNA, 19 nt, Artificial Sequence
  Description of Artificial Sequence: Synthetic oligonucleotide
cagggaguuccuguaaaau

SEQ ID NO: 1499850 - RNA, 19 nt, Artificial Sequence
  Description of Artificial Sequence: Synthetic oligonucleotide
guagcuccugaggaauccu

SEQ ID NO: 1499851 - RNA, 19 nt, Artificial Sequence
  Description of Artificial Sequence: Synthetic oligonucleotide
ccauuccgcaccgacgguc

SEQ ID NO: 1499852 - RNA, 19 nt, Artificial Sequence
  Description of Artificial Sequence: Synthetic oligonucleotide
ccagauccuguuugcuuga

SEQ ID NO: 1499853 - RNA, 19 nt, Artificial Sequence
  Description of Artificial Sequence: Synthetic oligonucleotide
gcugacagcgagguucuua

SEQ ID NO: 1499854 - RNA, 19 nt, Artificial Sequence
  Description of Artificial Sequence: Synthetic oligonucleotide
caacugguaucgccaggcu

SEQ ID NO: 1499855 - RNA, 19 nt, Artificial Sequence
  Description of Artificial Sequence: Synthetic oligonucleotide
uccugccuccggccaucau

SEQ ID NO: 1499856 - RNA, 19 nt, Artificial Sequence
  Description of Artificial Sequence: Synthetic oligonucleotide
gcgacucacugugucugac

SEQ ID NO: 1499857 - RNA, 19 nt, Artificial Sequence
  Description of Artificial Sequence: Synthetic oligonucleotide
caccgacggucgagucgcc

SEQ ID NO: 1499858 - RNA, 19 nt, Artificial Sequence
  Description of Artificial Sequence: Synthetic oligonucleotide
gacggucgagucgccgcaa

SEQ ID NO: 1499859 - RNA, 19 nt, Artificial Sequence
  Description of Artificial Sequence: Synthetic oligonucleotide
cgaggaaucuuccguauau

SEQ ID NO: 1499860 - RNA, 19 nt, Artificial Sequence
  Description of Artificial Sequence: Synthetic oligonucleotide
ggguugcaacugguaucgc

SEQ ID NO: 1499861 - RNA, 19 nt, Artificial Sequence
  Description of Artificial Sequence: Synthetic oligonucleotide
guguuggcaucgugaugau

SEQ ID NO: 1499862 - RNA, 19 nt, Artificial Sequence
  Description of Artificial Sequence: Synthetic oligonucleotide
ccgaggaaucuuccguaua

SEQ ID NO: 1499863 - RNA, 19 nt, Artificial Sequence
  Description of Artificial Sequence: Synthetic oligonucleotide
ggagcccgguugacaccag

SEQ ID NO: 1499864 - RNA, 19 nt, Artificial Sequence
  Description of Artificial Sequence: Synthetic oligonucleotide
cggucgagucgccgcaaug

SEQ ID NO: 1499865 - RNA, 19 nt, Artificial Sequence
  Description of Artificial Sequence: Synthetic oligonucleotide
gcggauucugccagauccu

SEQ ID NO: 1499866 - RNA, 19 nt, Artificial Sequence
  Description of Artificial Sequence: Synthetic oligonucleotide
cgagcaguaauugcuuuau

SEQ ID NO: 1499867 - RNA, 19 nt, Artificial Sequence
  Description of Artificial Sequence: Synthetic oligonucleotide
ccgcaccgacggucgaguc

SEQ ID NO: 1499868 - RNA, 19 nt, Artificial Sequence
  Description of Artificial Sequence: Synthetic oligonucleotide
cgacggucgagucgccgca

SEQ ID NO: 1499869 - RNA, 19 nt, Artificial Sequence
  Description of Artificial Sequence: Synthetic oligonucleotide
gccaggcuauuuucauguu

SEQ ID NO: 1499870 - RNA, 19 nt, Artificial Sequence
  Description of Artificial Sequence: Synthetic oligonucleotide
cugguaucgccaggcuauu

SEQ ID NO: 1499871 - RNA, 19 nt, Artificial Sequence
  Description of Artificial Sequence: Synthetic oligonucleotide
ccuccaccuaagagcuggu

SEQ ID NO: 1499872 - RNA, 19 nt, Artificial Sequence
  Description of Artificial Sequence: Synthetic oligonucleotide
aaaugcaugaagcagaauc

SEQ ID NO: 1499873 - RNA, 19 nt, Artificial Sequence
  Description of Artificial Sequence: Synthetic oligonucleotide
uaaguuaacauaaauagga

SEQ ID NO: 1499874 - RNA, 19 nt, Artificial Sequence
  Description of Artificial Sequence: Synthetic oligonucleotide
uaaaauaaaauaaaauaaa

SEQ ID NO: 1499875 - RNA, 19 nt, Artificial Sequence
  Description of Artificial Sequence: Synthetic oligonucleotide
gauauaguaauaaauagac

SEQ ID NO: 1499876 - RNA, 19 nt, Artificial Sequence
  Description of Artificial Sequence: Synthetic oligonucleotide
uaagcuaccaguuugucag

SEQ ID NO: 1499877 - RNA, 19 nt, Artificial Sequence
  Description of Artificial Sequence: Synthetic oligonucleotide
ugaagugauggcaagaccc

SEQ ID NO: 1499878 - RNA, 19 nt, Artificial Sequence
  Description of Artificial Sequence: Synthetic oligonucleotide
aaugcaugaagcagaaucc

SEQ ID NO: 1499879 - RNA, 19 nt, Artificial Sequence
  Description of Artificial Sequence: Synthetic oligonucleotide
uuaacguugccauuuaaag

SEQ ID NO: 1499880 - RNA, 19 nt, Artificial Sequence
  Description of Artificial Sequence: Synthetic oligonucleotide
guaauaaauagacagcagc

SEQ ID NO: 1499881 - RNA, 19 nt, Artificial Sequence
  Description of Artificial Sequence: Synthetic oligonucleotide
auuucuuuaugaauggugc

SEQ ID NO: 1499882 - RNA, 19 nt, Artificial Sequence
  Description of Artificial Sequence: Synthetic oligonucleotide
aaauaaaauaaaauaaaau

SEQ ID NO: 1499883 - RNA, 19 nt, Artificial Sequence
  Description of Artificial Sequence: Synthetic oligonucleotide
aaaauaaaauaaaauaaaa

SEQ ID NO: 1499884 - RNA, 19 nt, Artificial Sequence
  Description of Artificial Sequence: Synthetic oligonucleotide
ucuagcaucccugagaccc

SEQ ID NO: 1499885 - RNA, 19 nt, Artificial Sequence
  Description of Artificial Sequence: Synthetic oligonucleotide
cauugugugaccaccaggg

SEQ ID NO: 1499886 - RNA, 19 nt, Artificial Sequence
  Description of Artificial Sequence: Synthetic oligonucleotide
uaggauauaguaauaaaua

SEQ ID NO: 1499887 - RNA, 19 nt, Artificial Sequence
  Description of Artificial Sequence: Synthetic oligonucleotide
auucugugaguguuuaggc

SEQ ID NO: 1499888 - RNA, 19 nt, Artificial Sequence
  Description of Artificial Sequence: Synthetic oligonucleotide
aauaggauauaguaauaaa

SEQ ID NO: 1499889 - RNA, 19 nt, Artificial Sequence
  Description of Artificial Sequence: Synthetic oligonucleotide
guauuguggagccagaggc

SEQ ID NO: 1499890 - RNA, 19 nt, Artificial Sequence
  Description of Artificial Sequence: Synthetic oligonucleotide
uguauuguggagccagagg

SEQ ID NO: 1499891 - RNA, 19 nt, Artificial Sequence
  Description of Artificial Sequence: Synthetic oligonucleotide
uuaugaauggugcaccgca

SEQ ID NO: 1499892 - RNA, 19 nt, Artificial Sequence
  Description of Artificial Sequence: Synthetic oligonucleotide
cuaaccuucuauucuaagc

SEQ ID NO: 1499893 - RNA, 19 nt, Artificial Sequence
  Description of Artificial Sequence: Synthetic oligonucleotide
ucaaguaccauugugugac

SEQ ID NO: 1499894 - RNA, 19 nt, Artificial Sequence
  Description of Artificial Sequence: Synthetic oligonucleotide
uuuaaagcaccaauaaguu

SEQ ID NO: 1499895 - RNA, 19 nt, Artificial Sequence
  Description of Artificial Sequence: Synthetic oligonucleotide
auaaauagacagcagcacu

SEQ ID NO: 1499896 - RNA, 19 nt, Artificial Sequence
  Description of Artificial Sequence: Synthetic oligonucleotide
ugcuuagagaaugacaaag

SEQ ID NO: 1499897 - RNA, 19 nt, Artificial Sequence
  Description of Artificial Sequence: Synthetic oligonucleotide
auagguugugaagugaugg

SEQ ID NO: 1499898 - RNA, 19 nt, Artificial Sequence
  Description of Artificial Sequence: Synthetic oligonucleotide
agagaauccaugcccauag

SEQ ID NO: 1499899 - RNA, 19 nt, Artificial Sequence
  Description of Artificial Sequence: Synthetic oligonucleotide
ucugggaucucuagcaucc

SEQ ID NO: 1499900 - RNA, 19 nt, Artificial Sequence
  Description of Artificial Sequence: Synthetic oligonucleotide
agcacuguggcacaaaaca

SEQ ID NO: 1499901 - RNA, 19 nt, Artificial Sequence
  Description of Artificial Sequence: Synthetic oligonucleotide
uguggcacaaaacaacaac

SEQ ID NO: 1499902 - RNA, 19 nt, Artificial Sequence
  Description of Artificial Sequence: Synthetic oligonucleotide
uucuauucuaagcuaccag

SEQ ID NO: 1499903 - RNA, 19 nt, Artificial Sequence
  Description of Artificial Sequence: Synthetic oligonucleotide
aauucaaggccugcacugc

SEQ ID NO: 1499904 - RNA, 19 nt, Artificial Sequence
  Description of Artificial Sequence: Synthetic oligonucleotide
uuuuagacaaguugccucu

SEQ ID NO: 1499905 - RNA, 19 nt, Artificial Sequence
  Description of Artificial Sequence: Synthetic oligonucleotide
uuucggggaauuaacguug

SEQ ID NO: 1499906 - RNA, 19 nt, Artificial Sequence
  Description of Artificial Sequence: Synthetic oligonucleotide
uaacguugccauuuaaagc

SEQ ID NO: 1499907 - RNA, 19 nt, Artificial Sequence
  Description of Artificial Sequence: Synthetic oligonucleotide
ugcaacuaccccagcaugg

SEQ ID NO: 1499908 - RNA, 19 nt, Artificial Sequence
  Description of Artificial Sequence: Synthetic oligonucleotide
cuauuucggggaauuaacg

SEQ ID NO: 1499909 - RNA, 19 nt, Artificial Sequence
  Description of Artificial Sequence: Synthetic oligonucleotide
cuacccugcucccagaucg

SEQ ID NO: 1499910 - RNA, 19 nt, Artificial Sequence
  Description of Artificial Sequence: Synthetic oligonucleotide
aaagugcuuagagaaugac

SEQ ID NO: 1499911 - RNA, 19 nt, Artificial Sequence
  Description of Artificial Sequence: Synthetic oligonucleotide
ugaauggugcaccgcauag

SEQ ID NO: 1499912 - RNA, 19 nt, Artificial Sequence
  Description of Artificial Sequence: Synthetic oligonucleotide
uugugugaccaccagggcc

SEQ ID NO: 1499913 - RNA, 19 nt, Artificial Sequence
  Description of Artificial Sequence: Synthetic oligonucleotide
uauuucggggaauuaacgu

SEQ ID NO: 1499914 - RNA, 19 nt, Artificial Sequence
  Description of Artificial Sequence: Synthetic oligonucleotide
cauucugugaguguuuagg

SEQ ID NO: 1499915 - RNA, 19 nt, Artificial Sequence
  Description of Artificial Sequence: Synthetic oligonucleotide
aaaccugcagucugcaacu

SEQ ID NO: 1499916 - RNA, 19 nt, Artificial Sequence
  Description of Artificial Sequence: Synthetic oligonucleotide
aucccugagacccugaccu

SEQ ID NO: 1499917 - RNA, 19 nt, Artificial Sequence
  Description of Artificial Sequence: Synthetic oligonucleotide
agacaaguugccucucagc

SEQ ID NO: 1499918 - RNA, 19 nt, Artificial Sequence
  Description of Artificial Sequence: Synthetic oligonucleotide
cuuuaugaauggugcaccg

SEQ ID NO: 1499919 - RNA, 19 nt, Artificial Sequence
  Description of Artificial Sequence: Synthetic oligonucleotide
ucuuuaugaauggugcacc

SEQ ID NO: 1499920 - RNA, 19 nt, Artificial Sequence
  Description of Artificial Sequence: Synthetic oligonucleotide
uaaacugcaagggaccgcc

SEQ ID NO: 1499921 - RNA, 19 nt, Artificial Sequence
  Description of Artificial Sequence: Synthetic oligonucleotide
agugcuuagagaaugacaa

SEQ ID NO: 1499922 - RNA, 19 nt, Artificial Sequence
  Description of Artificial Sequence: Synthetic oligonucleotide
aguaccauugugugaccac

SEQ ID NO: 1499923 - RNA, 19 nt, Artificial Sequence
  Description of Artificial Sequence: Synthetic oligonucleotide
agcaccaauaaguuaacau

SEQ ID NO: 1499924 - RNA, 19 nt, Artificial Sequence
  Description of Artificial Sequence: Synthetic oligonucleotide
ugaguguuuaggccacccg

SEQ ID NO: 1499925 - RNA, 19 nt, Artificial Sequence
  Description of Artificial Sequence: Synthetic oligonucleotide
uggaugccgagucaggaug

SEQ ID NO: 1499926 - RNA, 19 nt, Artificial Sequence
  Description of Artificial Sequence: Synthetic oligonucleotide
uguuuaggccacccgagga

SEQ ID NO: 1499927 - RNA, 19 nt, Artificial Sequence
  Description of Artificial Sequence: Synthetic oligonucleotide
uaaagugcuuagagaauga

SEQ ID NO: 1499928 - RNA, 19 nt, Artificial Sequence
  Description of Artificial Sequence: Synthetic oligonucleotide
auugugugaccaccagggc

SEQ ID NO: 1499929 - RNA, 19 nt, Artificial Sequence
  Description of Artificial Sequence: Synthetic oligonucleotide
uguagucagccacugcccc

SEQ ID NO: 1499930 - RNA, 19 nt, Artificial Sequence
  Description of Artificial Sequence: Synthetic oligonucleotide
uagacaaguugccucucag

SEQ ID NO: 1499931 - RNA, 19 nt, Artificial Sequence
  Description of Artificial Sequence: Synthetic oligonucleotide
aguuugucaguucaggauu

SEQ ID NO: 1499932 - RNA, 19 nt, Artificial Sequence
  Description of Artificial Sequence: Synthetic oligonucleotide
agaccuaaccuucuauucu

SEQ ID NO: 1499933 - RNA, 19 nt, Artificial Sequence
  Description of Artificial Sequence: Synthetic oligonucleotide
agcuaaacugcaagggacc

SEQ ID NO: 1499934 - RNA, 19 nt, Artificial Sequence
  Description of Artificial Sequence: Synthetic oligonucleotide
gagaaugacaaagaaaggu

SEQ ID NO: 1499935 - RNA, 19 nt, Artificial Sequence
  Description of Artificial Sequence: Synthetic oligonucleotide
ugugaagugauggcaagac

SEQ ID NO: 1499936 - RNA, 19 nt, Artificial Sequence
  Description of Artificial Sequence: Synthetic oligonucleotide
acccgaggagcuuccaugc

SEQ ID NO: 1499937 - RNA, 19 nt, Artificial Sequence
  Description of Artificial Sequence: Synthetic oligonucleotide
agacccugaccucaaguuc

SEQ ID NO: 1499938 - RNA, 19 nt, Artificial Sequence
  Description of Artificial Sequence: Synthetic oligonucleotide
cucucgggacccaagacag

SEQ ID NO: 1499939 - RNA, 19 nt, Artificial Sequence
  Description of Artificial Sequence: Synthetic oligonucleotide
uucuaagcuaccaguuugu

SEQ ID NO: 1499940 - RNA, 19 nt, Artificial Sequence
  Description of Artificial Sequence: Synthetic oligonucleotide
cagcuaaacugcaagggac

SEQ ID NO: 1499941 - RNA, 19 nt, Artificial Sequence
  Description of Artificial Sequence: Synthetic oligonucleotide
uauucuaagcuaccaguuu

SEQ ID NO: 1499942 - RNA, 19 nt, Artificial Sequence
  Description of Artificial Sequence: Synthetic oligonucleotide
uuagacaaguugccucuca

SEQ ID NO: 1499943 - RNA, 19 nt, Artificial Sequence
  Description of Artificial Sequence: Synthetic oligonucleotide
aauuaacguugccauuuaa

SEQ ID NO: 1499944 - RNA, 19 nt, Artificial Sequence
  Description of Artificial Sequence: Synthetic oligonucleotide
auuucggggaauuaacguu

SEQ ID NO: 1499945 - RNA, 19 nt, Artificial Sequence
  Description of Artificial Sequence: Synthetic oligonucleotide
gaucggauucccugccugg

SEQ ID NO: 1499946 - RNA, 19 nt, Artificial Sequence
  Description of Artificial Sequence: Synthetic oligonucleotide
gugguuguauuguggagcc

SEQ ID NO: 1499947 - RNA, 19 nt, Artificial Sequence
  Description of Artificial Sequence: Synthetic oligonucleotide
uucuccggagcacugggca

SEQ ID NO: 1499948 - RNA, 19 nt, Artificial Sequence
  Description of Artificial Sequence: Synthetic oligonucleotide
ucagaucggauucccugcc

SEQ ID NO: 1499949 - RNA, 19 nt, Artificial Sequence
  Description of Artificial Sequence: Synthetic oligonucleotide
uuuaugaauggugcaccgc

SEQ ID NO: 1499950 - RNA, 19 nt, Artificial Sequence
  Description of Artificial Sequence: Synthetic oligonucleotide
aggauugucuguccuccgg

SEQ ID NO: 1499951 - RNA, 19 nt, Artificial Sequence
  Description of Artificial Sequence: Synthetic oligonucleotide
uauuguggagccagaggcu

SEQ ID NO: 1499952 - RNA, 19 nt, Artificial Sequence
  Description of Artificial Sequence: Synthetic oligonucleotide
guuuaggccacccgaggag

SEQ ID NO: 1499953 - RNA, 19 nt, Artificial Sequence
  Description of Artificial Sequence: Synthetic oligonucleotide
ugcucccagaucgagggcg

SEQ ID NO: 1499954 - RNA, 19 nt, Artificial Sequence
  Description of Artificial Sequence: Synthetic oligonucleotide
agagaaugacaaagaaagg

SEQ ID NO: 1499955 - RNA, 19 nt, Artificial Sequence
  Description of Artificial Sequence: Synthetic oligonucleotide
gacaaguugccucucagcu

SEQ ID NO: 1499956 - RNA, 19 nt, Artificial Sequence
  Description of Artificial Sequence: Synthetic oligonucleotide
aucgagggcguuccucugc

SEQ ID NO: 1499957 - RNA, 19 nt, Artificial Sequence
  Description of Artificial Sequence: Synthetic oligonucleotide
gaguguuuaggccacccga

SEQ ID NO: 1499958 - RNA, 19 nt, Artificial Sequence
  Description of Artificial Sequence: Synthetic oligonucleotide
cacuaggugaggcuugacc

SEQ ID NO: 1499959 - RNA, 19 nt, Artificial Sequence
  Description of Artificial Sequence: Synthetic oligonucleotide
aacugcaagggaccgcccu

SEQ ID NO: 1499960 - RNA, 19 nt, Artificial Sequence
  Description of Artificial Sequence: Synthetic oligonucleotide
ugagacccugaccucaagu

SEQ ID NO: 1499961 - RNA, 19 nt, Artificial Sequence
  Description of Artificial Sequence: Synthetic oligonucleotide
agccguucaggcccaauuc

SEQ ID NO: 1499962 - RNA, 19 nt, Artificial Sequence
  Description of Artificial Sequence: Synthetic oligonucleotide
aacuaccccagcauggcug

SEQ ID NO: 1499963 - RNA, 19 nt, Artificial Sequence
  Description of Artificial Sequence: Synthetic oligonucleotide
auauaguaauaaauagaca

SEQ ID NO: 1499964 - RNA, 19 nt, Artificial Sequence
  Description of Artificial Sequence: Synthetic oligonucleotide
ggauauaguaauaaauaga

SEQ ID NO: 1499965 - RNA, 19 nt, Artificial Sequence
  Description of Artificial Sequence: Synthetic oligonucleotide
cagaccuaaccuucuauuc

SEQ ID NO: 1499966 - RNA, 19 nt, Artificial Sequence
  Description of Artificial Sequence: Synthetic oligonucleotide
uccuccggggucaacaaaa

SEQ ID NO: 1499967 - RNA, 19 nt, Artificial Sequence
  Description of Artificial Sequence: Synthetic oligonucleotide
ucagaccuaaccuucuauu

SEQ ID NO: 1499968 - RNA, 19 nt, Artificial Sequence
  Description of Artificial Sequence: Synthetic oligonucleotide
uuguauuguggagccagag

SEQ ID NO: 1499969 - RNA, 19 nt, Artificial Sequence
  Description of Artificial Sequence: Synthetic oligonucleotide
ugggagcccagacaugggc

SEQ ID NO: 1499970 - RNA, 19 nt, Artificial Sequence
  Description of Artificial Sequence: Synthetic oligonucleotide
caaagggccagaccagacc

SEQ ID NO: 1499971 - RNA, 19 nt, Artificial Sequence
  Description of Artificial Sequence: Synthetic oligonucleotide
uuuaggccacccgaggagc

SEQ ID NO: 1499972 - RNA, 19 nt, Artificial Sequence
  Description of Artificial Sequence: Synthetic oligonucleotide
gaguccauuggucccugag

SEQ ID NO: 1499973 - RNA, 19 nt, Artificial Sequence
  Description of Artificial Sequence: Synthetic oligonucleotide
uucggggaauuaacguugc

SEQ ID NO: 1499974 - RNA, 19 nt, Artificial Sequence
  Description of Artificial Sequence: Synthetic oligonucleotide
gagaccaaagggccagacc

SEQ ID NO: 1499975 - RNA, 19 nt, Artificial Sequence
  Description of Artificial Sequence: Synthetic oligonucleotide
ugcuauuucggggaauuaa

SEQ ID NO: 1499976 - RNA, 19 nt, Artificial Sequence
  Description of Artificial Sequence: Synthetic oligonucleotide
auccagguaaagugcuuag

SEQ ID NO: 1499977 - RNA, 19 nt, Artificial Sequence
  Description of Artificial Sequence: Synthetic oligonucleotide
auuaacguugccauuuaaa

SEQ ID NO: 1499978 - RNA, 19 nt, Artificial Sequence
  Description of Artificial Sequence: Synthetic oligonucleotide
aagcaugcuggaugccgag

SEQ ID NO: 1499979 - RNA, 19 nt, Artificial Sequence
  Description of Artificial Sequence: Synthetic oligonucleotide
gaauugggcagccaguccu

SEQ ID NO: 1499980 - RNA, 19 nt, Artificial Sequence
  Description of Artificial Sequence: Synthetic oligonucleotide
uaccauugugugaccacca

SEQ ID NO: 1499981 - RNA, 19 nt, Artificial Sequence
  Description of Artificial Sequence: Synthetic oligonucleotide
agaucggauucccugccug

SEQ ID NO: 1499982 - RNA, 19 nt, Artificial Sequence
  Description of Artificial Sequence: Synthetic oligonucleotide
cuaagcuaccaguuuguca

SEQ ID NO: 1499983 - RNA, 19 nt, Artificial Sequence
  Description of Artificial Sequence: Synthetic oligonucleotide
cauagguugugaagugaug

SEQ ID NO: 1499984 - RNA, 19 nt, Artificial Sequence
  Description of Artificial Sequence: Synthetic oligonucleotide
cuagccuccugccauccag

SEQ ID NO: 1499985 - RNA, 19 nt, Artificial Sequence
  Description of Artificial Sequence: Synthetic oligonucleotide
uaugaauggugcaccgcau

SEQ ID NO: 1499986 - RNA, 19 nt, Artificial Sequence
  Description of Artificial Sequence: Synthetic oligonucleotide
ggugguuguauuguggagc

SEQ ID NO: 1499987 - RNA, 19 nt, Artificial Sequence
  Description of Artificial Sequence: Synthetic oligonucleotide
gugaagugauggcaagacc

SEQ ID NO: 1499988 - RNA, 19 nt, Artificial Sequence
  Description of Artificial Sequence: Synthetic oligonucleotide
cuaccaguuugucaguuca

SEQ ID NO: 1499989 - RNA, 19 nt, Artificial Sequence
  Description of Artificial Sequence: Synthetic oligonucleotide
cucgggacccaagacagcc

SEQ ID NO: 1499990 - RNA, 19 nt, Artificial Sequence
  Description of Artificial Sequence: Synthetic oligonucleotide
ucucagugcuuuucagcug

SEQ ID NO: 1499991 - RNA, 19 nt, Artificial Sequence
  Description of Artificial Sequence: Synthetic oligonucleotide
accugcagucugcaacuac

SEQ ID NO: 1499992 - RNA, 19 nt, Artificial Sequence
  Description of Artificial Sequence: Synthetic oligonucleotide
guaccauugugugaccacc

SEQ ID NO: 1499993 - RNA, 19 nt, Artificial Sequence
  Description of Artificial Sequence: Synthetic oligonucleotide
agcgaugaagcaaggagca

SEQ ID NO: 1499994 - RNA, 19 nt, Artificial Sequence
  Description of Artificial Sequence: Synthetic oligonucleotide
ugcaccgcauagcaggaau

SEQ ID NO: 1499995 - RNA, 19 nt, Artificial Sequence
  Description of Artificial Sequence: Synthetic oligonucleotide
guuugucaguucaggauug

SEQ ID NO: 1499996 - RNA, 19 nt, Artificial Sequence
  Description of Artificial Sequence: Synthetic oligonucleotide
ggauugucuguccuccggg

SEQ ID NO: 1499997 - RNA, 19 nt, Artificial Sequence
  Description of Artificial Sequence: Synthetic oligonucleotide
ggaagcaugcuggaugccg

SEQ ID NO: 1499998 - RNA, 19 nt, Artificial Sequence
  Description of Artificial Sequence: Synthetic oligonucleotide
aggagcacagcuuccuggu

SEQ ID NO: 1499999 - RNA, 19 nt, Artificial Sequence
  Description of Artificial Sequence: Synthetic oligonucleotide
ccaugugagggccucaugc

SEQ ID NO: 1500000 - RNA, 19 nt, Artificial Sequence
  Description of Artificial Sequence: Synthetic oligonucleotide
gauucccugccugggagcc

SEQ ID NO: 1500001 - RNA, 19 nt, Artificial Sequence
  Description of Artificial Sequence: Synthetic oligonucleotide
uccccuacccugcucccag

SEQ ID NO: 1500002 - RNA, 19 nt, Artificial Sequence
  Description of Artificial Sequence: Synthetic oligonucleotide
ugggaucucuagcaucccu

SEQ ID NO: 1500003 - RNA, 19 nt, Artificial Sequence
  Description of Artificial Sequence: Synthetic oligonucleotide
agguugugaagugauggca

SEQ ID NO: 1500004 - RNA, 19 nt, Artificial Sequence
  Description of Artificial Sequence: Synthetic oligonucleotide
gcaccaauaaguuaacaua

SEQ ID NO: 1500005 - RNA, 19 nt, Artificial Sequence
  Description of Artificial Sequence: Synthetic oligonucleotide
gacccuggcuccaugugag

SEQ ID NO: 1500006 - RNA, 19 nt, Artificial Sequence
  Description of Artificial Sequence: Synthetic oligonucleotide
gccucaugcuauuucgggg

SEQ ID NO: 1500007 - RNA, 19 nt, Artificial Sequence
  Description of Artificial Sequence: Synthetic oligonucleotide
ugccuugcucccucccugg

SEQ ID NO: 1500008 - RNA, 19 nt, Artificial Sequence
  Description of Artificial Sequence: Synthetic oligonucleotide
augggcgggagugggaagg

SEQ ID NO: 1500009 - RNA, 19 nt, Artificial Sequence
  Description of Artificial Sequence: Synthetic oligonucleotide
cacccgaggagcuuccaug

SEQ ID NO: 1500010 - RNA, 19 nt, Artificial Sequence
  Description of Artificial Sequence: Synthetic oligonucleotide
aucucaggccuugcucucc

SEQ ID NO: 1500011 - RNA, 19 nt, Artificial Sequence
  Description of Artificial Sequence: Synthetic oligonucleotide
uuaggccacccgaggagcu

SEQ ID NO: 1500012 - RNA, 19 nt, Artificial Sequence
  Description of Artificial Sequence: Synthetic oligonucleotide
uccagguaaagugcuuaga

SEQ ID NO: 1500013 - RNA, 19 nt, Artificial Sequence
  Description of Artificial Sequence: Synthetic oligonucleotide
caccgcauagcaggaaucc

SEQ ID NO: 1500014 - RNA, 19 nt, Artificial Sequence
  Description of Artificial Sequence: Synthetic oligonucleotide
cugugaguguuuaggccac

SEQ ID NO: 1500015 - RNA, 19 nt, Artificial Sequence
  Description of Artificial Sequence: Synthetic oligonucleotide
cucaaguaccauuguguga

SEQ ID NO: 1500016 - RNA, 19 nt, Artificial Sequence
  Description of Artificial Sequence: Synthetic oligonucleotide
gaauuaacguugccauuua

SEQ ID NO: 1500017 - RNA, 19 nt, Artificial Sequence
  Description of Artificial Sequence: Synthetic oligonucleotide
ucuaagcuaccaguuuguc

SEQ ID NO: 1500018 - RNA, 19 nt, Artificial Sequence
  Description of Artificial Sequence: Synthetic oligonucleotide
aucggauucccugccuggg

SEQ ID NO: 1500019 - RNA, 19 nt, Artificial Sequence
  Description of Artificial Sequence: Synthetic oligonucleotide
ccucaaguaccauugugug

SEQ ID NO: 1500020 - RNA, 19 nt, Artificial Sequence
  Description of Artificial Sequence: Synthetic oligonucleotide
gcccagagaauccaugccc

SEQ ID NO: 1500021 - RNA, 19 nt, Artificial Sequence
  Description of Artificial Sequence: Synthetic oligonucleotide
gcuaaacugcaagggaccg

SEQ ID NO: 1500022 - RNA, 19 nt, Artificial Sequence
  Description of Artificial Sequence: Synthetic oligonucleotide
uccuagagguacagauccu

SEQ ID NO: 1500023 - RNA, 19 nt, Artificial Sequence
  Description of Artificial Sequence: Synthetic oligonucleotide
uggcgucccaggcaucuca

SEQ ID NO: 1500024 - RNA, 19 nt, Artificial Sequence
  Description of Artificial Sequence: Synthetic oligonucleotide
ucgagggcguuccucugcu

SEQ ID NO: 1500025 - RNA, 19 nt, Artificial Sequence
  Description of Artificial Sequence: Synthetic oligonucleotide
ucggggaauuaacguugcc

SEQ ID NO: 1500026 - RNA, 19 nt, Artificial Sequence
  Description of Artificial Sequence: Synthetic oligonucleotide
agguugagaggcagcuagc

SEQ ID NO: 1500027 - RNA, 19 nt, Artificial Sequence
  Description of Artificial Sequence: Synthetic oligonucleotide
gaccaaagggccagaccag

SEQ ID NO: 1500028 - RNA, 19 nt, Artificial Sequence
  Description of Artificial Sequence: Synthetic oligonucleotide
gcuauuucggggaauuaac

SEQ ID NO: 1500029 - RNA, 19 nt, Artificial Sequence
  Description of Artificial Sequence: Synthetic oligonucleotide
augaauggugcaccgcaua

SEQ ID NO: 1500030 - RNA, 19 nt, Artificial Sequence
  Description of Artificial Sequence: Synthetic oligonucleotide
caggauugucuguccuccg

SEQ ID NO: 1500031 - RNA, 19 nt, Artificial Sequence
  Description of Artificial Sequence: Synthetic oligonucleotide
ggcuuuuagacaaguugcc

SEQ ID NO: 1500032 - RNA, 19 nt, Artificial Sequence
  Description of Artificial Sequence: Synthetic oligonucleotide
uuugucaguucaggauugu

SEQ ID NO: 1500033 - RNA, 19 nt, Artificial Sequence
  Description of Artificial Sequence: Synthetic oligonucleotide
acguugccauuuaaagcac

SEQ ID NO: 1500034 - RNA, 19 nt, Artificial Sequence
  Description of Artificial Sequence: Synthetic oligonucleotide
ccaagacagccucuggucc

SEQ ID NO: 1500035 - RNA, 19 nt, Artificial Sequence
  Description of Artificial Sequence: Synthetic oligonucleotide
uuuagacaaguugccucuc

SEQ ID NO: 1500036 - RNA, 19 nt, Artificial Sequence
  Description of Artificial Sequence: Synthetic oligonucleotide
aagggaccgcccugcucag

SEQ ID NO: 1500037 - RNA, 19 nt, Artificial Sequence
  Description of Artificial Sequence: Synthetic oligonucleotide
gcagcuaaacugcaaggga

SEQ ID NO: 1500038 - RNA, 19 nt, Artificial Sequence
  Description of Artificial Sequence: Synthetic oligonucleotide
aggcccguccuacccagag

SEQ ID NO: 1500039 - RNA, 19 nt, Artificial Sequence
  Description of Artificial Sequence: Synthetic oligonucleotide
gaucgagggcguuccucug

SEQ ID NO: 1500040 - RNA, 19 nt, Artificial Sequence
  Description of Artificial Sequence: Synthetic oligonucleotide
gccauucauuucuuuauga

SEQ ID NO: 1500041 - RNA, 19 nt, Artificial Sequence
  Description of Artificial Sequence: Synthetic oligonucleotide
ccauugugugaccaccagg

SEQ ID NO: 1500042 - RNA, 19 nt, Artificial Sequence
  Description of Artificial Sequence: Synthetic oligonucleotide
cagacccacuaggugaggc

SEQ ID NO: 1500043 - RNA, 19 nt, Artificial Sequence
  Description of Artificial Sequence: Synthetic oligonucleotide
acucugggaucucuagcau

SEQ ID NO: 1500044 - RNA, 19 nt, Artificial Sequence
  Description of Artificial Sequence: Synthetic oligonucleotide
cuauucuaagcuaccaguu

SEQ ID NO: 1500045 - RNA, 19 nt, Artificial Sequence
  Description of Artificial Sequence: Synthetic oligonucleotide
ccgcauagcaggaauccag

SEQ ID NO: 1500046 - RNA, 19 nt, Artificial Sequence
  Description of Artificial Sequence: Synthetic oligonucleotide
agggcguuccucugcuugu

SEQ ID NO: 1500047 - RNA, 19 nt, Artificial Sequence
  Description of Artificial Sequence: Synthetic oligonucleotide
augaaaccugcagucugca

SEQ ID NO: 1500048 - RNA, 19 nt, Artificial Sequence
  Description of Artificial Sequence: Synthetic oligonucleotide
aggucccagagccauucau

SEQ ID NO: 1500049 - RNA, 19 nt, Artificial Sequence
  Description of Artificial Sequence: Synthetic oligonucleotide
ccuaaccuucuauucuaag

SEQ ID NO: 1500050 - RNA, 19 nt, Artificial Sequence
  Description of Artificial Sequence: Synthetic oligonucleotide
gggucaacaaaagcagaug

SEQ ID NO: 1500051 - RNA, 19 nt, Artificial Sequence
  Description of Artificial Sequence: Synthetic oligonucleotide
cacugccccggcuuggcug

SEQ ID NO: 1500052 - RNA, 19 nt, Artificial Sequence
  Description of Artificial Sequence: Synthetic oligonucleotide
ggagagaucagaucggauu

SEQ ID NO: 1500053 - RNA, 19 nt, Artificial Sequence
  Description of Artificial Sequence: Synthetic oligonucleotide
ucgggacccaagacagccu

SEQ ID NO: 1500054 - RNA, 19 nt, Artificial Sequence
  Description of Artificial Sequence: Synthetic oligonucleotide
uccccucaaguaccauugu

SEQ ID NO: 1500055 - RNA, 19 nt, Artificial Sequence
  Description of Artificial Sequence: Synthetic oligonucleotide
ggggaauuaacguugccau

SEQ ID NO: 1500056 - RNA, 19 nt, Artificial Sequence
  Description of Artificial Sequence: Synthetic oligonucleotide
gagcacuguggcacaaaac

SEQ ID NO: 1500057 - RNA, 19 nt, Artificial Sequence
  Description of Artificial Sequence: Synthetic oligonucleotide
ggaucucuagcaucccuga

SEQ ID NO: 1500058 - RNA, 19 nt, Artificial Sequence
  Description of Artificial Sequence: Synthetic oligonucleotide
gggaucucuagcaucccug

SEQ ID NO: 1500059 - RNA, 19 nt, Artificial Sequence
  Description of Artificial Sequence: Synthetic oligonucleotide
gggaccgcccugcucagag

SEQ ID NO: 1500060 - RNA, 19 nt, Artificial Sequence
  Description of Artificial Sequence: Synthetic oligonucleotide
ggcaucucaggccuugcuc

SEQ ID NO: 1500061 - RNA, 19 nt, Artificial Sequence
  Description of Artificial Sequence: Synthetic oligonucleotide
gagcccagacaugggcggg

SEQ ID NO: 1500062 - RNA, 19 nt, Artificial Sequence
  Description of Artificial Sequence: Synthetic oligonucleotide
ggaauuaacguugccauuu

SEQ ID NO: 1500063 - RNA, 19 nt, Artificial Sequence
  Description of Artificial Sequence: Synthetic oligonucleotide
ccucaugcuauuucgggga

SEQ ID NO: 1500064 - RNA, 19 nt, Artificial Sequence
  Description of Artificial Sequence: Synthetic oligonucleotide
cuggcuccuagagguacag

SEQ ID NO: 1500065 - RNA, 19 nt, Artificial Sequence
  Description of Artificial Sequence: Synthetic oligonucleotide
gcaugcuggaugccgaguc

SEQ ID NO: 1500066 - RNA, 19 nt, Artificial Sequence
  Description of Artificial Sequence: Synthetic oligonucleotide
cugcaagggaccgcccugc

SEQ ID NO: 1500067 - RNA, 19 nt, Artificial Sequence
  Description of Artificial Sequence: Synthetic oligonucleotide
gguugugaagugauggcaa

SEQ ID NO: 1500068 - RNA, 19 nt, Artificial Sequence
  Description of Artificial Sequence: Synthetic oligonucleotide
gcacaaaggagagaucaga

SEQ ID NO: 1500069 - RNA, 19 nt, Artificial Sequence
  Description of Artificial Sequence: Synthetic oligonucleotide
ucaugcuauuucggggaau

SEQ ID NO: 1500070 - RNA, 19 nt, Artificial Sequence
  Description of Artificial Sequence: Synthetic oligonucleotide
acaugggcgggagugggaa

SEQ ID NO: 1500071 - RNA, 19 nt, Artificial Sequence
  Description of Artificial Sequence: Synthetic oligonucleotide
agaucagaucggauucccu

SEQ ID NO: 1500072 - RNA, 19 nt, Artificial Sequence
  Description of Artificial Sequence: Synthetic oligonucleotide
gugcuuagagaaugacaaa

SEQ ID NO: 1500073 - RNA, 19 nt, Artificial Sequence
  Description of Artificial Sequence: Synthetic oligonucleotide
caugggcgggagugggaag

SEQ ID NO: 1500074 - RNA, 19 nt, Artificial Sequence
  Description of Artificial Sequence: Synthetic oligonucleotide
cccaauucaaggccugcac

SEQ ID NO: 1500075 - RNA, 19 nt, Artificial Sequence
  Description of Artificial Sequence: Synthetic oligonucleotide
cuagcacuguagucagcca

SEQ ID NO: 1500076 - RNA, 19 nt, Artificial Sequence
  Description of Artificial Sequence: Synthetic oligonucleotide
aggagcuuccaugcugagu

SEQ ID NO: 1500077 - RNA, 19 nt, Artificial Sequence
  Description of Artificial Sequence: Synthetic oligonucleotide
accgcauagcaggaaucca

SEQ ID NO: 1500078 - RNA, 19 nt, Artificial Sequence
  Description of Artificial Sequence: Synthetic oligonucleotide
caugugagggccucaugcu

SEQ ID NO: 1500079 - RNA, 19 nt, Artificial Sequence
  Description of Artificial Sequence: Synthetic oligonucleotide
uggaagcaugcuggaugcc

SEQ ID NO: 1500080 - RNA, 19 nt, Artificial Sequence
  Description of Artificial Sequence: Synthetic oligonucleotide
ggcagcuagcacuguaguc

SEQ ID NO: 1500081 - RNA, 19 nt, Artificial Sequence
  Description of Artificial Sequence: Synthetic oligonucleotide
gaccgcccugcucagaggu

SEQ ID NO: 1500082 - RNA, 19 nt, Artificial Sequence
  Description of Artificial Sequence: Synthetic oligonucleotide
ccugguuggcgucccaggc

SEQ ID NO: 1500083 - RNA, 19 nt, Artificial Sequence
  Description of Artificial Sequence: Synthetic oligonucleotide
gaccucaaguucugcuucu

SEQ ID NO: 1500084 - RNA, 19 nt, Artificial Sequence
  Description of Artificial Sequence: Synthetic oligonucleotide
acccaugguuacaggcccg

SEQ ID NO: 1500085 - RNA, 19 nt, Artificial Sequence
  Description of Artificial Sequence: Synthetic oligonucleotide
cagaucgagggcguuccuc

SEQ ID NO: 1500086 - RNA, 19 nt, Artificial Sequence
  Description of Artificial Sequence: Synthetic oligonucleotide
cugguuggcgucccaggca

SEQ ID NO: 1500087 - RNA, 19 nt, Artificial Sequence
  Description of Artificial Sequence: Synthetic oligonucleotide
auggugcaccgcauagcag

SEQ ID NO: 1500088 - RNA, 19 nt, Artificial Sequence
  Description of Artificial Sequence: Synthetic oligonucleotide
gcuaccaguuugucaguuc

SEQ ID NO: 1500089 - RNA, 19 nt, Artificial Sequence
  Description of Artificial Sequence: Synthetic oligonucleotide
ggcgggagugggaaggcag

SEQ ID NO: 1500090 - RNA, 19 nt, Artificial Sequence
  Description of Artificial Sequence: Synthetic oligonucleotide
cuguccuccggggucaaca

SEQ ID NO: 1500091 - RNA, 19 nt, Artificial Sequence
  Description of Artificial Sequence: Synthetic oligonucleotide
gccguucaggcccaauuca

SEQ ID NO: 1500092 - RNA, 19 nt, Artificial Sequence
  Description of Artificial Sequence: Synthetic oligonucleotide
cucaggccuugcucucccc

SEQ ID NO: 1500093 - RNA, 19 nt, Artificial Sequence
  Description of Artificial Sequence: Synthetic oligonucleotide
ggacccaagacagccucug

SEQ ID NO: 1500094 - RNA, 19 nt, Artificial Sequence
  Description of Artificial Sequence: Synthetic oligonucleotide
gcgccagagagcacugugg

SEQ ID NO: 1500095 - RNA, 19 nt, Artificial Sequence
  Description of Artificial Sequence: Synthetic oligonucleotide
ugguuacaggcccguccua

SEQ ID NO: 1500096 - RNA, 19 nt, Artificial Sequence
  Description of Artificial Sequence: Synthetic oligonucleotide
ccgaggagcuuccaugcug

SEQ ID NO: 1500097 - RNA, 19 nt, Artificial Sequence
  Description of Artificial Sequence: Synthetic oligonucleotide
cucaugcuauuucggggaa

SEQ ID NO: 1500098 - RNA, 19 nt, Artificial Sequence
  Description of Artificial Sequence: Synthetic oligonucleotide
cguugccauuuaaagcacc

SEQ ID NO: 1500099 - RNA, 19 nt, Artificial Sequence
  Description of Artificial Sequence: Synthetic oligonucleotide
accuaaccuucuauucuaa

SEQ ID NO: 1500100 - RNA, 19 nt, Artificial Sequence
  Description of Artificial Sequence: Synthetic oligonucleotide
cugaccucaaguucugcuu

SEQ ID NO: 1500101 - RNA, 19 nt, Artificial Sequence
  Description of Artificial Sequence: Synthetic oligonucleotide
aggagagaucagaucggau

SEQ ID NO: 1500102 - RNA, 19 nt, Artificial Sequence
  Description of Artificial Sequence: Synthetic oligonucleotide
ggugaggcuugacccuggc

SEQ ID NO: 1500103 - RNA, 19 nt, Artificial Sequence
  Description of Artificial Sequence: Synthetic oligonucleotide
acccacuaggugaggcuug

SEQ ID NO: 1500104 - RNA, 19 nt, Artificial Sequence
  Description of Artificial Sequence: Synthetic oligonucleotide
ccccucaaguaccauugug

SEQ ID NO: 1500105 - RNA, 19 nt, Artificial Sequence
  Description of Artificial Sequence: Synthetic oligonucleotide
cccucaaguaccauugugu

SEQ ID NO: 1500106 - RNA, 19 nt, Artificial Sequence
  Description of Artificial Sequence: Synthetic oligonucleotide
cccagaucgagggcguucc

SEQ ID NO: 1500107 - RNA, 19 nt, Artificial Sequence
  Description of Artificial Sequence: Synthetic oligonucleotide
ccuccggggucaacaaaag

SEQ ID NO: 1500108 - RNA, 19 nt, Artificial Sequence
  Description of Artificial Sequence: Synthetic oligonucleotide
ccaacuuccugcauucugu

SEQ ID NO: 1500109 - RNA, 19 nt, Artificial Sequence
  Description of Artificial Sequence: Synthetic oligonucleotide
cugguccccucaaguacca

SEQ ID NO: 1500110 - RNA, 19 nt, Artificial Sequence
  Description of Artificial Sequence: Synthetic oligonucleotide
caugcuauuucggggaauu

SEQ ID NO: 1500111 - RNA, 19 nt, Artificial Sequence
  Description of Artificial Sequence: Synthetic oligonucleotide
aaccugcagucugcaacua

SEQ ID NO: 1500112 - RNA, 19 nt, Artificial Sequence
  Description of Artificial Sequence: Synthetic oligonucleotide
ggccagaccagacccacua

SEQ ID NO: 1500113 - RNA, 19 nt, Artificial Sequence
  Description of Artificial Sequence: Synthetic oligonucleotide
guuggcgucccaggcaucu

SEQ ID NO: 1500114 - RNA, 19 nt, Artificial Sequence
  Description of Artificial Sequence: Synthetic oligonucleotide
ggagaccaaagggccagac

SEQ ID NO: 1500115 - RNA, 19 nt, Artificial Sequence
  Description of Artificial Sequence: Synthetic oligonucleotide
ggccucagaccuaaccuuc

SEQ ID NO: 1500116 - RNA, 19 nt, Artificial Sequence
  Description of Artificial Sequence: Synthetic oligonucleotide
ggaccgcccugcucagagg

SEQ ID NO: 1500117 - RNA, 19 nt, Artificial Sequence
  Description of Artificial Sequence: Synthetic oligonucleotide
ugagggccucaugcuauuu

SEQ ID NO: 1500118 - RNA, 19 nt, Artificial Sequence
  Description of Artificial Sequence: Synthetic oligonucleotide
cagagaauccaugcccaua

SEQ ID NO: 1500119 - RNA, 19 nt, Artificial Sequence
  Description of Artificial Sequence: Synthetic oligonucleotide
gcccguccuacccagagcu

SEQ ID NO: 1500120 - RNA, 19 nt, Artificial Sequence
  Description of Artificial Sequence: Synthetic oligonucleotide
augcuauuucggggaauua

SEQ ID NO: 1500121 - RNA, 19 nt, Artificial Sequence
  Description of Artificial Sequence: Synthetic oligonucleotide
ggagugggaaggcagcgau

SEQ ID NO: 1500122 - RNA, 19 nt, Artificial Sequence
  Description of Artificial Sequence: Synthetic oligonucleotide
uggaaucaucuuggcuuuu

SEQ ID NO: 1500123 - RNA, 19 nt, Artificial Sequence
  Description of Artificial Sequence: Synthetic oligonucleotide
ggaaucaucuuggcuuuua

SEQ ID NO: 1500124 - RNA, 19 nt, Artificial Sequence
  Description of Artificial Sequence: Synthetic oligonucleotide
agcccagacaugggcggga

SEQ ID NO: 1500125 - RNA, 19 nt, Artificial Sequence
  Description of Artificial Sequence: Synthetic oligonucleotide
gccgagucaggaugucuca

SEQ ID NO: 1500126 - RNA, 19 nt, Artificial Sequence
  Description of Artificial Sequence: Synthetic oligonucleotide
ggggucaacaaaagcagau

SEQ ID NO: 1500127 - RNA, 19 nt, Artificial Sequence
  Description of Artificial Sequence: Synthetic oligonucleotide
cuggaugccgagucaggau

SEQ ID NO: 1500128 - RNA, 19 nt, Artificial Sequence
  Description of Artificial Sequence: Synthetic oligonucleotide
ggcccguccuacccagagc

SEQ ID NO: 1500129 - RNA, 19 nt, Artificial Sequence
  Description of Artificial Sequence: Synthetic oligonucleotide
aggcuugacccuggcucca

SEQ ID NO: 1500130 - RNA, 19 nt, Artificial Sequence
  Description of Artificial Sequence: Synthetic oligonucleotide
ggugcaccgcauagcagga

SEQ ID NO: 1500131 - RNA, 19 nt, Artificial Sequence
  Description of Artificial Sequence: Synthetic oligonucleotide
ggcgucccaggcaucucag

SEQ ID NO: 1500132 - RNA, 19 nt, Artificial Sequence
  Description of Artificial Sequence: Synthetic oligonucleotide
ccauagguugugaagugau

SEQ ID NO: 1500133 - RNA, 19 nt, Artificial Sequence
  Description of Artificial Sequence: Synthetic oligonucleotide
cccagcacaaaggagagau

SEQ ID NO: 1500134 - RNA, 19 nt, Artificial Sequence
  Description of Artificial Sequence: Synthetic oligonucleotide
cuaccccagcauggcugcc

SEQ ID NO: 1500135 - RNA, 19 nt, Artificial Sequence
  Description of Artificial Sequence: Synthetic oligonucleotide
ccgagucaggaugucucag

SEQ ID NO: 1500136 - RNA, 19 nt, Artificial Sequence
  Description of Artificial Sequence: Synthetic oligonucleotide
ccguccuacccagagcuuc

SEQ ID NO: 1500137 - RNA, 19 nt, Artificial Sequence
  Description of Artificial Sequence: Synthetic oligonucleotide
cggggaauuaacguugcca

SEQ ID NO: 1500138 - RNA, 19 nt, Artificial Sequence
  Description of Artificial Sequence: Synthetic oligonucleotide
caacuaccccagcauggcu

SEQ ID NO: 1500139 - RNA, 19 nt, Artificial Sequence
  Description of Artificial Sequence: Synthetic oligonucleotide
guccuccggggucaacaaa

SEQ ID NO: 1500140 - RNA, 19 nt, Artificial Sequence
  Description of Artificial Sequence: Synthetic oligonucleotide
gaguggaagcaugcuggau

SEQ ID NO: 1500141 - RNA, 19 nt, Artificial Sequence
  Description of Artificial Sequence: Synthetic oligonucleotide
ggggcuagccuccugccau

SEQ ID NO: 1500142 - RNA, 19 nt, Artificial Sequence
  Description of Artificial Sequence: Synthetic oligonucleotide
gcaccgcauagcaggaauc

SEQ ID NO: 1500143 - RNA, 19 nt, Artificial Sequence
  Description of Artificial Sequence: Synthetic oligonucleotide
ccguucaggcccaauucaa

SEQ ID NO: 1500144 - RNA, 19 nt, Artificial Sequence
  Description of Artificial Sequence: Synthetic oligonucleotide
gcgaugaagcaaggagcac

SEQ ID NO: 1500145 - RNA, 19 nt, Artificial Sequence
  Description of Artificial Sequence: Synthetic oligonucleotide
ccuacccugcucccagauc

SEQ ID NO: 1500146 - RNA, 19 nt, Artificial Sequence
  Description of Artificial Sequence: Synthetic oligonucleotide
gggaauuaacguugccauu

SEQ ID NO: 1500147 - RNA, 19 nt, Artificial Sequence
  Description of Artificial Sequence: Synthetic oligonucleotide
ugguccccucaaguaccau

SEQ ID NO: 1500148 - RNA, 19 nt, Artificial Sequence
  Description of Artificial Sequence: Synthetic oligonucleotide
ccugccauccagguaaagu

SEQ ID NO: 1500149 - RNA, 19 nt, Artificial Sequence
  Description of Artificial Sequence: Synthetic oligonucleotide
cagccguucaggcccaauu

SEQ ID NO: 1500150 - RNA, 19 nt, Artificial Sequence
  Description of Artificial Sequence: Synthetic oligonucleotide
agacagccucugguccccu

SEQ ID NO: 1500151 - RNA, 19 nt, Artificial Sequence
  Description of Artificial Sequence: Synthetic oligonucleotide
caagacccagcaggcccca

SEQ ID NO: 1500152 - RNA, 19 nt, Artificial Sequence
  Description of Artificial Sequence: Synthetic oligonucleotide
cgggagugggaaggcagcg

SEQ ID NO: 1500153 - RNA, 19 nt, Artificial Sequence
  Description of Artificial Sequence: Synthetic oligonucleotide
ccuggcuccuagagguaca

SEQ ID NO: 1500154 - RNA, 19 nt, Artificial Sequence
  Description of Artificial Sequence: Synthetic oligonucleotide
ggaugccgagucaggaugu

SEQ ID NO: 1500155 - RNA, 19 nt, Artificial Sequence
  Description of Artificial Sequence: Synthetic oligonucleotide
gcuagccuccugccaucca

SEQ ID NO: 1500156 - RNA, 19 nt, Artificial Sequence
  Description of Artificial Sequence: Synthetic oligonucleotide
ggucccagagccauucauu

SEQ ID NO: 1500157 - RNA, 19 nt, Artificial Sequence
  Description of Artificial Sequence: Synthetic oligonucleotide
cggggucaacaaaagcaga

SEQ ID NO: 1500158 - RNA, 19 nt, Artificial Sequence
  Description of Artificial Sequence: Synthetic oligonucleotide
gugugaccaccagggccuc

SEQ ID NO: 1500159 - RNA, 19 nt, Artificial Sequence
  Description of Artificial Sequence: Synthetic oligonucleotide
gcuuggaauugggcagcca

SEQ ID NO: 1500160 - RNA, 19 nt, Artificial Sequence
  Description of Artificial Sequence: Synthetic oligonucleotide
cguccuacccagagcuuca

SEQ ID NO: 1500161 - RNA, 19 nt, Artificial Sequence
  Description of Artificial Sequence: Synthetic oligonucleotide
agggaccgcccugcucaga

SEQ ID NO: 1500162 - RNA, 19 nt, Artificial Sequence
  Description of Artificial Sequence: Synthetic oligonucleotide
ggcguuccucugcuugucu

SEQ ID NO: 1500163 - RNA, 19 nt, Artificial Sequence
  Description of Artificial Sequence: Synthetic oligonucleotide
gugcaccgcauagcaggaa

SEQ ID NO: 1500164 - RNA, 19 nt, Artificial Sequence
  Description of Artificial Sequence: Synthetic oligonucleotide
gggcguuccucugcuuguc

SEQ ID NO: 1500165 - RNA, 19 nt, Artificial Sequence
  Description of Artificial Sequence: Synthetic oligonucleotide
cuccaugugagggccucau

SEQ ID NO: 1500166 - RNA, 19 nt, Artificial Sequence
  Description of Artificial Sequence: Synthetic oligonucleotide
caggcccguccuacccaga

SEQ ID NO: 1500167 - RNA, 19 nt, Artificial Sequence
  Description of Artificial Sequence: Synthetic oligonucleotide
ccuagagguacagauccuu

SEQ ID NO: 1500168 - RNA, 19 nt, Artificial Sequence
  Description of Artificial Sequence: Synthetic oligonucleotide
ccaugguuacaggcccguc

SEQ ID NO: 1500169 - RNA, 19 nt, Artificial Sequence
  Description of Artificial Sequence: Synthetic oligonucleotide
cccacuaggugaggcuuga

SEQ ID NO: 1500170 - RNA, 19 nt, Artificial Sequence
  Description of Artificial Sequence: Synthetic oligonucleotide
gggcgggagugggaaggca

SEQ ID NO: 1500171 - RNA, 19 nt, Artificial Sequence
  Description of Artificial Sequence: Synthetic oligonucleotide
gggacccaagacagccucu

SEQ ID NO: 1500172 - RNA, 19 nt, Artificial Sequence
  Description of Artificial Sequence: Synthetic oligonucleotide
gucuguccuccggggucaa

SEQ ID NO: 1500173 - RNA, 19 nt, Artificial Sequence
  Description of Artificial Sequence: Synthetic oligonucleotide
gcucccagaucgagggcgu

SEQ ID NO: 1500174 - RNA, 19 nt, Artificial Sequence
  Description of Artificial Sequence: Synthetic oligonucleotide
cccaugguuacaggcccgu

SEQ ID NO: 1500175 - RNA, 19 nt, Artificial Sequence
  Description of Artificial Sequence: Synthetic oligonucleotide
ggagcacugggcagccguu

SEQ ID NO: 1500176 - RNA, 19 nt, Artificial Sequence
  Description of Artificial Sequence: Synthetic oligonucleotide
gccacccgaggagcuucca

SEQ ID NO: 1500177 - RNA, 19 nt, Artificial Sequence
  Description of Artificial Sequence: Synthetic oligonucleotide
cgcccugcucagagguuga

SEQ ID NO: 1500178 - RNA, 19 nt, Artificial Sequence
  Description of Artificial Sequence: Synthetic oligonucleotide
cccuacccugcucccagau

SEQ ID NO: 1500179 - RNA, 19 nt, Artificial Sequence
  Description of Artificial Sequence: Synthetic oligonucleotide
ccacccgaggagcuuccau

SEQ ID NO: 1500180 - RNA, 19 nt, Artificial Sequence
  Description of Artificial Sequence: Synthetic oligonucleotide
ccagaucgagggcguuccu

SEQ ID NO: 1500181 - RNA, 19 nt, Artificial Sequence
  Description of Artificial Sequence: Synthetic oligonucleotide
ccaaggucccagagccauu

SEQ ID NO: 1500182 - RNA, 19 nt, Artificial Sequence
  Description of Artificial Sequence: Synthetic oligonucleotide
cccguccuacccagagcuu

SEQ ID NO: 1500183 - RNA, 19 nt, Artificial Sequence
  Description of Artificial Sequence: Synthetic oligonucleotide
aaggguugagcuuuggccc

SEQ ID NO: 1500184 - RNA, 19 nt, Artificial Sequence
  Description of Artificial Sequence: Synthetic oligonucleotide
uguaacgugggguauagcg

SEQ ID NO: 1500185 - RNA, 19 nt, Artificial Sequence
  Description of Artificial Sequence: Synthetic oligonucleotide
aaugcggccacucugcaac

SEQ ID NO: 1500186 - RNA, 19 nt, Artificial Sequence
  Description of Artificial Sequence: Synthetic oligonucleotide
agcauagucauaaagcgcc

SEQ ID NO: 1500187 - RNA, 19 nt, Artificial Sequence
  Description of Artificial Sequence: Synthetic oligonucleotide
ucauauuggguuuucaucu

SEQ ID NO: 1500188 - RNA, 19 nt, Artificial Sequence
  Description of Artificial Sequence: Synthetic oligonucleotide
agcaacauauccuugaaga

SEQ ID NO: 1500189 - RNA, 19 nt, Artificial Sequence
  Description of Artificial Sequence: Synthetic oligonucleotide
acuucaugggcccuaagac

SEQ ID NO: 1500190 - RNA, 19 nt, Artificial Sequence
  Description of Artificial Sequence: Synthetic oligonucleotide
uggaacuugucacugcugg

SEQ ID NO: 1500191 - RNA, 19 nt, Artificial Sequence
  Description of Artificial Sequence: Synthetic oligonucleotide
cauucuacauaauuggcag

SEQ ID NO: 1500192 - RNA, 19 nt, Artificial Sequence
  Description of Artificial Sequence: Synthetic oligonucleotide
ugcaauagggcugucaggg

SEQ ID NO: 1500193 - RNA, 19 nt, Artificial Sequence
  Description of Artificial Sequence: Synthetic oligonucleotide
ugcaaggugagcaacauau

SEQ ID NO: 1500194 - RNA, 19 nt, Artificial Sequence
  Description of Artificial Sequence: Synthetic oligonucleotide
gaaggguugagcuuuggcc

SEQ ID NO: 1500195 - RNA, 19 nt, Artificial Sequence
  Description of Artificial Sequence: Synthetic oligonucleotide
cagaguaaccucaucaggg

SEQ ID NO: 1500196 - RNA, 19 nt, Artificial Sequence
  Description of Artificial Sequence: Synthetic oligonucleotide
gaggucaagguguugaugc

SEQ ID NO: 1500197 - RNA, 19 nt, Artificial Sequence
  Description of Artificial Sequence: Synthetic oligonucleotide
agaguaaccucaucagggc

SEQ ID NO: 1500198 - RNA, 19 nt, Artificial Sequence
  Description of Artificial Sequence: Synthetic oligonucleotide
aagguguugaugcaaggug

SEQ ID NO: 1500199 - RNA, 19 nt, Artificial Sequence
  Description of Artificial Sequence: Synthetic oligonucleotide
caauuuucgaagcugcucc

SEQ ID NO: 1500200 - RNA, 19 nt, Artificial Sequence
  Description of Artificial Sequence: Synthetic oligonucleotide
uacaaugcuggucagagua

SEQ ID NO: 1500201 - RNA, 19 nt, Artificial Sequence
  Description of Artificial Sequence: Synthetic oligonucleotide
ucuucaacacgcugcaccg

SEQ ID NO: 1500202 - RNA, 19 nt, Artificial Sequence
  Description of Artificial Sequence: Synthetic oligonucleotide
uuuggcccaggauagagag

SEQ ID NO: 1500203 - RNA, 19 nt, Artificial Sequence
  Description of Artificial Sequence: Synthetic oligonucleotide
ugagcuuuggcccaggaua

SEQ ID NO: 1500204 - RNA, 19 nt, Artificial Sequence
  Description of Artificial Sequence: Synthetic oligonucleotide
uaauuggcaggguagagac

SEQ ID NO: 1500205 - RNA, 19 nt, Artificial Sequence
  Description of Artificial Sequence: Synthetic oligonucleotide
auagcgauuuagcucugcc

SEQ ID NO: 1500206 - RNA, 19 nt, Artificial Sequence
  Description of Artificial Sequence: Synthetic oligonucleotide
caggauagagagaaggugc

SEQ ID NO: 1500207 - RNA, 19 nt, Artificial Sequence
  Description of Artificial Sequence: Synthetic oligonucleotide
aacauauccuugaagaaga

SEQ ID NO: 1500208 - RNA, 19 nt, Artificial Sequence
  Description of Artificial Sequence: Synthetic oligonucleotide
agagagaaggugcaauagg

SEQ ID NO: 1500209 - RNA, 19 nt, Artificial Sequence
  Description of Artificial Sequence: Synthetic oligonucleotide
cuuggaagcagcuaaccac

SEQ ID NO: 1500210 - RNA, 19 nt, Artificial Sequence
  Description of Artificial Sequence: Synthetic oligonucleotide
aaagcauccucugcagccc

SEQ ID NO: 1500211 - RNA, 19 nt, Artificial Sequence
  Description of Artificial Sequence: Synthetic oligonucleotide
guagguacaaugcugguca

SEQ ID NO: 1500212 - RNA, 19 nt, Artificial Sequence
  Description of Artificial Sequence: Synthetic oligonucleotide
uguugaugcaaggugagca

SEQ ID NO: 1500213 - RNA, 19 nt, Artificial Sequence
  Description of Artificial Sequence: Synthetic oligonucleotide
auauccuugaagaagagaa

SEQ ID NO: 1500214 - RNA, 19 nt, Artificial Sequence
  Description of Artificial Sequence: Synthetic oligonucleotide
ucauaaagcgcccgcaccu

SEQ ID NO: 1500215 - RNA, 19 nt, Artificial Sequence
  Description of Artificial Sequence: Synthetic oligonucleotide
ugggguauagcgauuuagc

SEQ ID NO: 1500216 - RNA, 19 nt, Artificial Sequence
  Description of Artificial Sequence: Synthetic oligonucleotide
aagcagcuaaccacggucc

SEQ ID NO: 1500217 - RNA, 19 nt, Artificial Sequence
  Description of Artificial Sequence: Synthetic oligonucleotide
uucaugggcccuaagacau

SEQ ID NO: 1500218 - RNA, 19 nt, Artificial Sequence
  Description of Artificial Sequence: Synthetic oligonucleotide
uguaucuagggaccacucc

SEQ ID NO: 1500219 - RNA, 19 nt, Artificial Sequence
  Description of Artificial Sequence: Synthetic oligonucleotide
agucauaaagcgcccgcac

SEQ ID NO: 1500220 - RNA, 19 nt, Artificial Sequence
  Description of Artificial Sequence: Synthetic oligonucleotide
aaccacccagcacuggacg

SEQ ID NO: 1500221 - RNA, 19 nt, Artificial Sequence
  Description of Artificial Sequence: Synthetic oligonucleotide
cucauauuggguuuucauc

SEQ ID NO: 1500222 - RNA, 19 nt, Artificial Sequence
  Description of Artificial Sequence: Synthetic oligonucleotide
gaagcagcuaaccacgguc

SEQ ID NO: 1500223 - RNA, 19 nt, Artificial Sequence
  Description of Artificial Sequence: Synthetic oligonucleotide
caacauauccuugaagaag

SEQ ID NO: 1500224 - RNA, 19 nt, Artificial Sequence
  Description of Artificial Sequence: Synthetic oligonucleotide
ugcucggaagcucagcuca

SEQ ID NO: 1500225 - RNA, 19 nt, Artificial Sequence
  Description of Artificial Sequence: Synthetic oligonucleotide
auauuggguuuucaucuuc

SEQ ID NO: 1500226 - RNA, 19 nt, Artificial Sequence
  Description of Artificial Sequence: Synthetic oligonucleotide
aucugaccaguccucgucc

SEQ ID NO: 1500227 - RNA, 19 nt, Artificial Sequence
  Description of Artificial Sequence: Synthetic oligonucleotide
cacauucuacauaauuggc

SEQ ID NO: 1500228 - RNA, 19 nt, Artificial Sequence
  Description of Artificial Sequence: Synthetic oligonucleotide
gucagaguaaccucaucag

SEQ ID NO: 1500229 - RNA, 19 nt, Artificial Sequence
  Description of Artificial Sequence: Synthetic oligonucleotide
uauuggguuuucaucuucu

SEQ ID NO: 1500230 - RNA, 19 nt, Artificial Sequence
  Description of Artificial Sequence: Synthetic oligonucleotide
aauagggcugucagggcac

SEQ ID NO: 1500231 - RNA, 19 nt, Artificial Sequence
  Description of Artificial Sequence: Synthetic oligonucleotide
uccauguccuccauguaac

SEQ ID NO: 1500232 - RNA, 19 nt, Artificial Sequence
  Description of Artificial Sequence: Synthetic oligonucleotide
ugcggaaacagagggacag

SEQ ID NO: 1500233 - RNA, 19 nt, Artificial Sequence
  Description of Artificial Sequence: Synthetic oligonucleotide
acagcaccccuccacuugc

SEQ ID NO: 1500234 - RNA, 19 nt, Artificial Sequence
  Description of Artificial Sequence: Synthetic oligonucleotide
aauggcagccuuccgggga

SEQ ID NO: 1500235 - RNA, 19 nt, Artificial Sequence
  Description of Artificial Sequence: Synthetic oligonucleotide
ugcucucuguguaucuagg

SEQ ID NO: 1500236 - RNA, 19 nt, Artificial Sequence
  Description of Artificial Sequence: Synthetic oligonucleotide
aaccacgguccccacacag

SEQ ID NO: 1500237 - RNA, 19 nt, Artificial Sequence
  Description of Artificial Sequence: Synthetic oligonucleotide
uguacguucccacgccucc

SEQ ID NO: 1500238 - RNA, 19 nt, Artificial Sequence
  Description of Artificial Sequence: Synthetic oligonucleotide
ugaugcaaggugagcaaca

SEQ ID NO: 1500239 - RNA, 19 nt, Artificial Sequence
  Description of Artificial Sequence: Synthetic oligonucleotide
aucacuagccgcugcaaug

SEQ ID NO: 1500240 - RNA, 19 nt, Artificial Sequence
  Description of Artificial Sequence: Synthetic oligonucleotide
uagagagaaggugcaauag

SEQ ID NO: 1500241 - RNA, 19 nt, Artificial Sequence
  Description of Artificial Sequence: Synthetic oligonucleotide
uggugcaucgucccacccg

SEQ ID NO: 1500242 - RNA, 19 nt, Artificial Sequence
  Description of Artificial Sequence: Synthetic oligonucleotide
gguauagcgauuuagcucu

SEQ ID NO: 1500243 - RNA, 19 nt, Artificial Sequence
  Description of Artificial Sequence: Synthetic oligonucleotide
uucaucacuagccgcugca

SEQ ID NO: 1500244 - RNA, 19 nt, Artificial Sequence
  Description of Artificial Sequence: Synthetic oligonucleotide
uggaccgugcaacuucucc

SEQ ID NO: 1500245 - RNA, 19 nt, Artificial Sequence
  Description of Artificial Sequence: Synthetic oligonucleotide
cagcauagucauaaagcgc

SEQ ID NO: 1500246 - RNA, 19 nt, Artificial Sequence
  Description of Artificial Sequence: Synthetic oligonucleotide
ucucgauucgggcacguuc

SEQ ID NO: 1500247 - RNA, 19 nt, Artificial Sequence
  Description of Artificial Sequence: Synthetic oligonucleotide
acuugucacugcuggagag

SEQ ID NO: 1500248 - RNA, 19 nt, Artificial Sequence
  Description of Artificial Sequence: Synthetic oligonucleotide
cuccugcggaaacagaggg

SEQ ID NO: 1500249 - RNA, 19 nt, Artificial Sequence
  Description of Artificial Sequence: Synthetic oligonucleotide
aguaaccucaucagggcuc

SEQ ID NO: 1500250 - RNA, 19 nt, Artificial Sequence
  Description of Artificial Sequence: Synthetic oligonucleotide
uacggaaagcauccucugc

SEQ ID NO: 1500251 - RNA, 19 nt, Artificial Sequence
  Description of Artificial Sequence: Synthetic oligonucleotide
agcagcuaaccacgguccc

SEQ ID NO: 1500252 - RNA, 19 nt, Artificial Sequence
  Description of Artificial Sequence: Synthetic oligonucleotide
aaagcgcccgcaccuucac

SEQ ID NO: 1500253 - RNA, 19 nt, Artificial Sequence
  Description of Artificial Sequence: Synthetic oligonucleotide
cuucuucaucacuagccgc

SEQ ID NO: 1500254 - RNA, 19 nt, Artificial Sequence
  Description of Artificial Sequence: Synthetic oligonucleotide
gguacaaugcuggucagag

SEQ ID NO: 1500255 - RNA, 19 nt, Artificial Sequence
  Description of Artificial Sequence: Synthetic oligonucleotide
ugagcaacauauccuugaa

SEQ ID NO: 1500256 - RNA, 19 nt, Artificial Sequence
  Description of Artificial Sequence: Synthetic oligonucleotide
uaacgugggguauagcgau

SEQ ID NO: 1500257 - RNA, 19 nt, Artificial Sequence
  Description of Artificial Sequence: Synthetic oligonucleotide
uuacggaaagcauccucug

SEQ ID NO: 1500258 - RNA, 19 nt, Artificial Sequence
  Description of Artificial Sequence: Synthetic oligonucleotide
uugcucucuguguaucuag

SEQ ID NO: 1500259 - RNA, 19 nt, Artificial Sequence
  Description of Artificial Sequence: Synthetic oligonucleotide
ucacucagccucucagccg

SEQ ID NO: 1500260 - RNA, 19 nt, Artificial Sequence
  Description of Artificial Sequence: Synthetic oligonucleotide
uggaagcagcuaaccacgg

SEQ ID NO: 1500261 - RNA, 19 nt, Artificial Sequence
  Description of Artificial Sequence: Synthetic oligonucleotide
accaaugcggccacucugc

SEQ ID NO: 1500262 - RNA, 19 nt, Artificial Sequence
  Description of Artificial Sequence: Synthetic oligonucleotide
gcuccugcaauuuucgaag

SEQ ID NO: 1500263 - RNA, 19 nt, Artificial Sequence
  Description of Artificial Sequence: Synthetic oligonucleotide
ucuccuuccggcugauugc

SEQ ID NO: 1500264 - RNA, 19 nt, Artificial Sequence
  Description of Artificial Sequence: Synthetic oligonucleotide
gucuucucauccuugcgug

SEQ ID NO: 1500265 - RNA, 19 nt, Artificial Sequence
  Description of Artificial Sequence: Synthetic oligonucleotide
auaauuggcaggguagaga

SEQ ID NO: 1500266 - RNA, 19 nt, Artificial Sequence
  Description of Artificial Sequence: Synthetic oligonucleotide
uucaacacgcugcaccguc

SEQ ID NO: 1500267 - RNA, 19 nt, Artificial Sequence
  Description of Artificial Sequence: Synthetic oligonucleotide
uacagcaccccuccacuug

SEQ ID NO: 1500268 - RNA, 19 nt, Artificial Sequence
  Description of Artificial Sequence: Synthetic oligonucleotide
gucauaaagcgcccgcacc

SEQ ID NO: 1500269 - RNA, 19 nt, Artificial Sequence
  Description of Artificial Sequence: Synthetic oligonucleotide
uguguaucuagggaccacu

SEQ ID NO: 1500270 - RNA, 19 nt, Artificial Sequence
  Description of Artificial Sequence: Synthetic oligonucleotide
ucacuagccgcugcaaugc

SEQ ID NO: 1500271 - RNA, 19 nt, Artificial Sequence
  Description of Artificial Sequence: Synthetic oligonucleotide
gacgguggaaagccccucg

SEQ ID NO: 1500272 - RNA, 19 nt, Artificial Sequence
  Description of Artificial Sequence: Synthetic oligonucleotide
ucauggaacuugucacugc

SEQ ID NO: 1500273 - RNA, 19 nt, Artificial Sequence
  Description of Artificial Sequence: Synthetic oligonucleotide
cacucagccucucagccgc

SEQ ID NO: 1500274 - RNA, 19 nt, Artificial Sequence
  Description of Artificial Sequence: Synthetic oligonucleotide
ggucagaguaaccucauca

SEQ ID NO: 1500275 - RNA, 19 nt, Artificial Sequence
  Description of Artificial Sequence: Synthetic oligonucleotide
agcacuggacgguggaaag

SEQ ID NO: 1500276 - RNA, 19 nt, Artificial Sequence
  Description of Artificial Sequence: Synthetic oligonucleotide
ucccgaaaaccacccagca

SEQ ID NO: 1500277 - RNA, 19 nt, Artificial Sequence
  Description of Artificial Sequence: Synthetic oligonucleotide
uaucuagggaccacuccuc

SEQ ID NO: 1500278 - RNA, 19 nt, Artificial Sequence
  Description of Artificial Sequence: Synthetic oligonucleotide
ucuggaccgugcaacuucu

SEQ ID NO: 1500279 - RNA, 19 nt, Artificial Sequence
  Description of Artificial Sequence: Synthetic oligonucleotide
gacuuucccgaaaaccacc

SEQ ID NO: 1500280 - RNA, 19 nt, Artificial Sequence
  Description of Artificial Sequence: Synthetic oligonucleotide
auggcagccuuccggggac

SEQ ID NO: 1500281 - RNA, 19 nt, Artificial Sequence
  Description of Artificial Sequence: Synthetic oligonucleotide
gacucuccucaucugacca

SEQ ID NO: 1500282 - RNA, 19 nt, Artificial Sequence
  Description of Artificial Sequence: Synthetic oligonucleotide
ucaacacgcugcaccgucc

SEQ ID NO: 1500283 - RNA, 19 nt, Artificial Sequence
  Description of Artificial Sequence: Synthetic oligonucleotide
cuggacgguggaaagcccc

SEQ ID NO: 1500284 - RNA, 19 nt, Artificial Sequence
  Description of Artificial Sequence: Synthetic oligonucleotide
gccagcauagucauaaagc

SEQ ID NO: 1500285 - RNA, 19 nt, Artificial Sequence
  Description of Artificial Sequence: Synthetic oligonucleotide
uaaagcgcccgcaccuuca

SEQ ID NO: 1500286 - RNA, 19 nt, Artificial Sequence
  Description of Artificial Sequence: Synthetic oligonucleotide
guagagaccaaugcggcca

SEQ ID NO: 1500287 - RNA, 19 nt, Artificial Sequence
  Description of Artificial Sequence: Synthetic oligonucleotide
cuugcgugcugugugguag

SEQ ID NO: 1500288 - RNA, 19 nt, Artificial Sequence
  Description of Artificial Sequence: Synthetic oligonucleotide
cuucaugggcccuaagaca

SEQ ID NO: 1500289 - RNA, 19 nt, Artificial Sequence
  Description of Artificial Sequence: Synthetic oligonucleotide
cugcugcaggucucgaugg

SEQ ID NO: 1500290 - RNA, 19 nt, Artificial Sequence
  Description of Artificial Sequence: Synthetic oligonucleotide
cacuggacgguggaaagcc

SEQ ID NO: 1500291 - RNA, 19 nt, Artificial Sequence
  Description of Artificial Sequence: Synthetic oligonucleotide
auccuugcgugcugugugg

SEQ ID NO: 1500292 - RNA, 19 nt, Artificial Sequence
  Description of Artificial Sequence: Synthetic oligonucleotide
cuugucacugcuggagagg

SEQ ID NO: 1500293 - RNA, 19 nt, Artificial Sequence
  Description of Artificial Sequence: Synthetic oligonucleotide
ucuguacguucccacgccu

SEQ ID NO: 1500294 - RNA, 19 nt, Artificial Sequence
  Description of Artificial Sequence: Synthetic oligonucleotide
gucaagguguugaugcaag

SEQ ID NO: 1500295 - RNA, 19 nt, Artificial Sequence
  Description of Artificial Sequence: Synthetic oligonucleotide
cauccuugcgugcugugug

SEQ ID NO: 1500296 - RNA, 19 nt, Artificial Sequence
  Description of Artificial Sequence: Synthetic oligonucleotide
cauguaacgugggguauag

SEQ ID NO: 1500297 - RNA, 19 nt, Artificial Sequence
  Description of Artificial Sequence: Synthetic oligonucleotide
guaucuagggaccacuccu

SEQ ID NO: 1500298 - RNA, 19 nt, Artificial Sequence
  Description of Artificial Sequence: Synthetic oligonucleotide
acgcucgcugucuggaccg

SEQ ID NO: 1500299 - RNA, 19 nt, Artificial Sequence
  Description of Artificial Sequence: Synthetic oligonucleotide
ggguauagcgauuuagcuc

SEQ ID NO: 1500300 - RNA, 19 nt, Artificial Sequence
  Description of Artificial Sequence: Synthetic oligonucleotide
acuagccgcugcaaugccc

SEQ ID NO: 1500301 - RNA, 19 nt, Artificial Sequence
  Description of Artificial Sequence: Synthetic oligonucleotide
ucuguguaucuagggacca

SEQ ID NO: 1500302 - RNA, 19 nt, Artificial Sequence
  Description of Artificial Sequence: Synthetic oligonucleotide
cuuggugcaucgucccacc

SEQ ID NO: 1500303 - RNA, 19 nt, Artificial Sequence
  Description of Artificial Sequence: Synthetic oligonucleotide
cucaucugaccaguccucg

SEQ ID NO: 1500304 - RNA, 19 nt, Artificial Sequence
  Description of Artificial Sequence: Synthetic oligonucleotide
uccacuugcgggcccaguc

SEQ ID NO: 1500305 - RNA, 19 nt, Artificial Sequence
  Description of Artificial Sequence: Synthetic oligonucleotide
uugaugcaaggugagcaac

SEQ ID NO: 1500306 - RNA, 19 nt, Artificial Sequence
  Description of Artificial Sequence: Synthetic oligonucleotide
gugggguauagcgauuuag

SEQ ID NO: 1500307 - RNA, 19 nt, Artificial Sequence
  Description of Artificial Sequence: Synthetic oligonucleotide
ugccacgccaccagcgcag

SEQ ID NO: 1500308 - RNA, 19 nt, Artificial Sequence
  Description of Artificial Sequence: Synthetic oligonucleotide
uagucauaaagcgcccgca

SEQ ID NO: 1500309 - RNA, 19 nt, Artificial Sequence
  Description of Artificial Sequence: Synthetic oligonucleotide
cugccaaguccgcacacgc

SEQ ID NO: 1500310 - RNA, 19 nt, Artificial Sequence
  Description of Artificial Sequence: Synthetic oligonucleotide
acucuccucaucugaccag

SEQ ID NO: 1500311 - RNA, 19 nt, Artificial Sequence
  Description of Artificial Sequence: Synthetic oligonucleotide
caugccgggcccaugugug

SEQ ID NO: 1500312 - RNA, 19 nt, Artificial Sequence
  Description of Artificial Sequence: Synthetic oligonucleotide
caauagggcugucagggca

SEQ ID NO: 1500313 - RNA, 19 nt, Artificial Sequence
  Description of Artificial Sequence: Synthetic oligonucleotide
cuucucuacagcaccccuc

SEQ ID NO: 1500314 - RNA, 19 nt, Artificial Sequence
  Description of Artificial Sequence: Synthetic oligonucleotide
ucuucccuccugcggaaac

SEQ ID NO: 1500315 - RNA, 19 nt, Artificial Sequence
  Description of Artificial Sequence: Synthetic oligonucleotide
agguguugaugcaagguga

SEQ ID NO: 1500316 - RNA, 19 nt, Artificial Sequence
  Description of Artificial Sequence: Synthetic oligonucleotide
uccgucuguacguucccac

SEQ ID NO: 1500317 - RNA, 19 nt, Artificial Sequence
  Description of Artificial Sequence: Synthetic oligonucleotide
uagguacaaugcuggucag

SEQ ID NO: 1500318 - RNA, 19 nt, Artificial Sequence
  Description of Artificial Sequence: Synthetic oligonucleotide
uauagcgauuuagcucugc

SEQ ID NO: 1500319 - RNA, 19 nt, Artificial Sequence
  Description of Artificial Sequence: Synthetic oligonucleotide
guaaccucaucagggcucc

SEQ ID NO: 1500320 - RNA, 19 nt, Artificial Sequence
  Description of Artificial Sequence: Synthetic oligonucleotide
ggugcaucgucccacccgc

SEQ ID NO: 1500321 - RNA, 19 nt, Artificial Sequence
  Description of Artificial Sequence: Synthetic oligonucleotide
gucuguacguucccacgcc

SEQ ID NO: 1500322 - RNA, 19 nt, Artificial Sequence
  Description of Artificial Sequence: Synthetic oligonucleotide
caacacgcugcaccguccg

SEQ ID NO: 1500323 - RNA, 19 nt, Artificial Sequence
  Description of Artificial Sequence: Synthetic oligonucleotide
cucgcugccaaguccgcac

SEQ ID NO: 1500324 - RNA, 19 nt, Artificial Sequence
  Description of Artificial Sequence: Synthetic oligonucleotide
ggaccgugcaacuucuccc

SEQ ID NO: 1500325 - RNA, 19 nt, Artificial Sequence
  Description of Artificial Sequence: Synthetic oligonucleotide
uuguagguacaaugcuggu

SEQ ID NO: 1500326 - RNA, 19 nt, Artificial Sequence
  Description of Artificial Sequence: Synthetic oligonucleotide
cuccuuggugcaucguccc

SEQ ID NO: 1500327 - RNA, 19 nt, Artificial Sequence
  Description of Artificial Sequence: Synthetic oligonucleotide
aucuagggaccacuccuca

SEQ ID NO: 1500328 - RNA, 19 nt, Artificial Sequence
  Description of Artificial Sequence: Synthetic oligonucleotide
uccugcggaaacagaggga

SEQ ID NO: 1500329 - RNA, 19 nt, Artificial Sequence
  Description of Artificial Sequence: Synthetic oligonucleotide
cacuucaugggcccuaaga

SEQ ID NO: 1500330 - RNA, 19 nt, Artificial Sequence
  Description of Artificial Sequence: Synthetic oligonucleotide
ucugaccaguccucguccu

SEQ ID NO: 1500331 - RNA, 19 nt, Artificial Sequence
  Description of Artificial Sequence: Synthetic oligonucleotide
guaacgugggguauagcga

SEQ ID NO: 1500332 - RNA, 19 nt, Artificial Sequence
  Description of Artificial Sequence: Synthetic oligonucleotide
ucaucugaccaguccucgu

SEQ ID NO: 1500333 - RNA, 19 nt, Artificial Sequence
  Description of Artificial Sequence: Synthetic oligonucleotide
aggauagagagaaggugca

SEQ ID NO: 1500334 - RNA, 19 nt, Artificial Sequence
  Description of Artificial Sequence: Synthetic oligonucleotide
cugucugccuucccguggc

SEQ ID NO: 1500335 - RNA, 19 nt, Artificial Sequence
  Description of Artificial Sequence: Synthetic oligonucleotide
cuacauaauuggcagggua

SEQ ID NO: 1500336 - RNA, 19 nt, Artificial Sequence
  Description of Artificial Sequence: Synthetic oligonucleotide
auuuucgaagcugcuccug

SEQ ID NO: 1500337 - RNA, 19 nt, Artificial Sequence
  Description of Artificial Sequence: Synthetic oligonucleotide
cucgauggagcucauggaa

SEQ ID NO: 1500338 - RNA, 19 nt, Artificial Sequence
  Description of Artificial Sequence: Synthetic oligonucleotide
cucccucaccuccaagugc

SEQ ID NO: 1500339 - RNA, 19 nt, Artificial Sequence
  Description of Artificial Sequence: Synthetic oligonucleotide
uggacgguggaaagccccu

SEQ ID NO: 1500340 - RNA, 19 nt, Artificial Sequence
  Description of Artificial Sequence: Synthetic oligonucleotide
gcccaggauagagagaagg

SEQ ID NO: 1500341 - RNA, 19 nt, Artificial Sequence
  Description of Artificial Sequence: Synthetic oligonucleotide
gguagagaccaaugcggcc

SEQ ID NO: 1500342 - RNA, 19 nt, Artificial Sequence
  Description of Artificial Sequence: Synthetic oligonucleotide
gauagagagaaggugcaau

SEQ ID NO: 1500343 - RNA, 19 nt, Artificial Sequence
  Description of Artificial Sequence: Synthetic oligonucleotide
aggguugagcuuuggccca

SEQ ID NO: 1500344 - RNA, 19 nt, Artificial Sequence
  Description of Artificial Sequence: Synthetic oligonucleotide
agcaccccuccacuugcgg

SEQ ID NO: 1500345 - RNA, 19 nt, Artificial Sequence
  Description of Artificial Sequence: Synthetic oligonucleotide
uucgggcacguucuuggaa

SEQ ID NO: 1500346 - RNA, 19 nt, Artificial Sequence
  Description of Artificial Sequence: Synthetic oligonucleotide
agaccaaugcggccacucu

SEQ ID NO: 1500347 - RNA, 19 nt, Artificial Sequence
  Description of Artificial Sequence: Synthetic oligonucleotide
gucuggaccgugcaacuuc

SEQ ID NO: 1500348 - RNA, 19 nt, Artificial Sequence
  Description of Artificial Sequence: Synthetic oligonucleotide
cccaauggcagccuuccgg

SEQ ID NO: 1500349 - RNA, 19 nt, Artificial Sequence
  Description of Artificial Sequence: Synthetic oligonucleotide
cacgccucccagaacucgc

SEQ ID NO: 1500350 - RNA, 19 nt, Artificial Sequence
  Description of Artificial Sequence: Synthetic oligonucleotide
cacgcucgcugucuggacc

SEQ ID NO: 1500351 - RNA, 19 nt, Artificial Sequence
  Description of Artificial Sequence: Synthetic oligonucleotide
acuggacgguggaaagccc

SEQ ID NO: 1500352 - RNA, 19 nt, Artificial Sequence
  Description of Artificial Sequence: Synthetic oligonucleotide
aggucaagguguugaugca

SEQ ID NO: 1500353 - RNA, 19 nt, Artificial Sequence
  Description of Artificial Sequence: Synthetic oligonucleotide
uuggugcaucgucccaccc

SEQ ID NO: 1500354 - RNA, 19 nt, Artificial Sequence
  Description of Artificial Sequence: Synthetic oligonucleotide
ugcaucgucccacccgcuc

SEQ ID NO: 1500355 - RNA, 19 nt, Artificial Sequence
  Description of Artificial Sequence: Synthetic oligonucleotide
aagcucagcucaucagcuu

SEQ ID NO: 1500356 - RNA, 19 nt, Artificial Sequence
  Description of Artificial Sequence: Synthetic oligonucleotide
cuggccagcauagucauaa

SEQ ID NO: 1500357 - RNA, 19 nt, Artificial Sequence
  Description of Artificial Sequence: Synthetic oligonucleotide
gguguugaugcaaggugag

SEQ ID NO: 1500358 - RNA, 19 nt, Artificial Sequence
  Description of Artificial Sequence: Synthetic oligonucleotide
ggucuucuucaucacuagc

SEQ ID NO: 1500359 - RNA, 19 nt, Artificial Sequence
  Description of Artificial Sequence: Synthetic oligonucleotide
uccaggaaggguugagcuu

SEQ ID NO: 1500360 - RNA, 19 nt, Artificial Sequence
  Description of Artificial Sequence: Synthetic oligonucleotide
ugcucauauuggguuuuca

SEQ ID NO: 1500361 - RNA, 19 nt, Artificial Sequence
  Description of Artificial Sequence: Synthetic oligonucleotide
cacuugcgggcccagucag

SEQ ID NO: 1500362 - RNA, 19 nt, Artificial Sequence
  Description of Artificial Sequence: Synthetic oligonucleotide
ggccuuacggaaagcaucc

SEQ ID NO: 1500363 - RNA, 19 nt, Artificial Sequence
  Description of Artificial Sequence: Synthetic oligonucleotide
uugcgugcugugugguagc

SEQ ID NO: 1500364 - RNA, 19 nt, Artificial Sequence
  Description of Artificial Sequence: Synthetic oligonucleotide
gaagcucagcucaucagcu

SEQ ID NO: 1500365 - RNA, 19 nt, Artificial Sequence
  Description of Artificial Sequence: Synthetic oligonucleotide
auguaacgugggguauagc

SEQ ID NO: 1500366 - RNA, 19 nt, Artificial Sequence
  Description of Artificial Sequence: Synthetic oligonucleotide
ccgacuuucccgaaaacca

SEQ ID NO: 1500367 - RNA, 19 nt, Artificial Sequence
  Description of Artificial Sequence: Synthetic oligonucleotide
ucacuucaugggcccuaag

SEQ ID NO: 1500368 - RNA, 19 nt, Artificial Sequence
  Description of Artificial Sequence: Synthetic oligonucleotide
gaguaaccucaucagggcu

SEQ ID NO: 1500369 - RNA, 19 nt, Artificial Sequence
  Description of Artificial Sequence: Synthetic oligonucleotide
aacacgcugcaccguccgu

SEQ ID NO: 1500370 - RNA, 19 nt, Artificial Sequence
  Description of Artificial Sequence: Synthetic oligonucleotide
gaccaguccucguccugcc

SEQ ID NO: 1500371 - RNA, 19 nt, Artificial Sequence
  Description of Artificial Sequence: Synthetic oligonucleotide
uccggcugauugcucucug

SEQ ID NO: 1500372 - RNA, 19 nt, Artificial Sequence
  Description of Artificial Sequence: Synthetic oligonucleotide
agcccgacuuucccgaaaa

SEQ ID NO: 1500373 - RNA, 19 nt, Artificial Sequence
  Description of Artificial Sequence: Synthetic oligonucleotide
cuguacguucccacgccuc

SEQ ID NO: 1500374 - RNA, 19 nt, Artificial Sequence
  Description of Artificial Sequence: Synthetic oligonucleotide
ugccaggcucugcucauau

SEQ ID NO: 1500375 - RNA, 19 nt, Artificial Sequence
  Description of Artificial Sequence: Synthetic oligonucleotide
guucccacgccucccagaa

SEQ ID NO: 1500376 - RNA, 19 nt, Artificial Sequence
  Description of Artificial Sequence: Synthetic oligonucleotide
accguccgucuguacguuc

SEQ ID NO: 1500377 - RNA, 19 nt, Artificial Sequence
  Description of Artificial Sequence: Synthetic oligonucleotide
cuucccguggcucucccga

SEQ ID NO: 1500378 - RNA, 19 nt, Artificial Sequence
  Description of Artificial Sequence: Synthetic oligonucleotide
ucgcugccaaguccgcaca

SEQ ID NO: 1500379 - RNA, 19 nt, Artificial Sequence
  Description of Artificial Sequence: Synthetic oligonucleotide
agccccucgcugccaaguc

SEQ ID NO: 1500380 - RNA, 19 nt, Artificial Sequence
  Description of Artificial Sequence: Synthetic oligonucleotide
agcuaaccacgguccccac

SEQ ID NO: 1500381 - RNA, 19 nt, Artificial Sequence
  Description of Artificial Sequence: Synthetic oligonucleotide
cucgauucgggcacguucu

SEQ ID NO: 1500382 - RNA, 19 nt, Artificial Sequence
  Description of Artificial Sequence: Synthetic oligonucleotide
ccgaaaaccacccagcacu

SEQ ID NO: 1500383 - RNA, 19 nt, Artificial Sequence
  Description of Artificial Sequence: Synthetic oligonucleotide
gaaggcaugccaggccuuc

SEQ ID NO: 1500384 - RNA, 19 nt, Artificial Sequence
  Description of Artificial Sequence: Synthetic oligonucleotide
acccgcuccugcaauuuuc

SEQ ID NO: 1500385 - RNA, 19 nt, Artificial Sequence
  Description of Artificial Sequence: Synthetic oligonucleotide
gaccgugcaacuucucccu

SEQ ID NO: 1500386 - RNA, 19 nt, Artificial Sequence
  Description of Artificial Sequence: Synthetic oligonucleotide
aagccccucgcugccaagu

SEQ ID NO: 1500387 - RNA, 19 nt, Artificial Sequence
  Description of Artificial Sequence: Synthetic oligonucleotide
cccgacuuucccgaaaacc

SEQ ID NO: 1500388 - RNA, 19 nt, Artificial Sequence
  Description of Artificial Sequence: Synthetic oligonucleotide
gccaaguccgcacacgcuc

SEQ ID NO: 1500389 - RNA, 19 nt, Artificial Sequence
  Description of Artificial Sequence: Synthetic oligonucleotide
uaaccacgguccccacaca

SEQ ID NO: 1500390 - RNA, 19 nt, Artificial Sequence
  Description of Artificial Sequence: Synthetic oligonucleotide
uucacuucaugggcccuaa

SEQ ID NO: 1500391 - RNA, 19 nt, Artificial Sequence
  Description of Artificial Sequence: Synthetic oligonucleotide
ucaugggcccuaagacauc

SEQ ID NO: 1500392 - RNA, 19 nt, Artificial Sequence
  Description of Artificial Sequence: Synthetic oligonucleotide
ccaaguccgcacacgcucg

SEQ ID NO: 1500393 - RNA, 19 nt, Artificial Sequence
  Description of Artificial Sequence: Synthetic oligonucleotide
ccuccugcggaaacagagg

SEQ ID NO: 1500394 - RNA, 19 nt, Artificial Sequence
  Description of Artificial Sequence: Synthetic oligonucleotide
gcugucuggaccgugcaac

SEQ ID NO: 1500395 - RNA, 19 nt, Artificial Sequence
  Description of Artificial Sequence: Synthetic oligonucleotide
accuccaagugcagcucac

SEQ ID NO: 1500396 - RNA, 19 nt, Artificial Sequence
  Description of Artificial Sequence: Synthetic oligonucleotide
cacuagccgcugcaaugcc

SEQ ID NO: 1500397 - RNA, 19 nt, Artificial Sequence
  Description of Artificial Sequence: Synthetic oligonucleotide
auggaacuugucacugcug

SEQ ID NO: 1500398 - RNA, 19 nt, Artificial Sequence
  Description of Artificial Sequence: Synthetic oligonucleotide
ugucacugcuggagagguc

SEQ ID NO: 1500399 - RNA, 19 nt, Artificial Sequence
  Description of Artificial Sequence: Synthetic oligonucleotide
gggguauagcgauuuagcu

SEQ ID NO: 1500400 - RNA, 19 nt, Artificial Sequence
  Description of Artificial Sequence: Synthetic oligonucleotide
aggaaggguugagcuuugg

SEQ ID NO: 1500401 - RNA, 19 nt, Artificial Sequence
  Description of Artificial Sequence: Synthetic oligonucleotide
ccauguccuccauguaacg

SEQ ID NO: 1500402 - RNA, 19 nt, Artificial Sequence
  Description of Artificial Sequence: Synthetic oligonucleotide
cugcucggaagcucagcuc

SEQ ID NO: 1500403 - RNA, 19 nt, Artificial Sequence
  Description of Artificial Sequence: Synthetic oligonucleotide
gcaucgucccacccgcucc

SEQ ID NO: 1500404 - RNA, 19 nt, Artificial Sequence
  Description of Artificial Sequence: Synthetic oligonucleotide
cccgcuccugcaauuuucg

SEQ ID NO: 1500405 - RNA, 19 nt, Artificial Sequence
  Description of Artificial Sequence: Synthetic oligonucleotide
cucauccuugcgugcugug

SEQ ID NO: 1500406 - RNA, 19 nt, Artificial Sequence
  Description of Artificial Sequence: Synthetic oligonucleotide
agguacaaugcuggucaga

SEQ ID NO: 1500407 - RNA, 19 nt, Artificial Sequence
  Description of Artificial Sequence: Synthetic oligonucleotide
guguaucuagggaccacuc

SEQ ID NO: 1500408 - RNA, 19 nt, Artificial Sequence
  Description of Artificial Sequence: Synthetic oligonucleotide
ucccuccugcggaaacaga

SEQ ID NO: 1500409 - RNA, 19 nt, Artificial Sequence
  Description of Artificial Sequence: Synthetic oligonucleotide
gaagccgcuggcgcucagc

SEQ ID NO: 1500410 - RNA, 19 nt, Artificial Sequence
  Description of Artificial Sequence: Synthetic oligonucleotide
ucccguggcucucccgagu

SEQ ID NO: 1500411 - RNA, 19 nt, Artificial Sequence
  Description of Artificial Sequence: Synthetic oligonucleotide
gauuuagcucugccaggcu

SEQ ID NO: 1500412 - RNA, 19 nt, Artificial Sequence
  Description of Artificial Sequence: Synthetic oligonucleotide
ccccucgcugccaaguccg

SEQ ID NO: 1500413 - RNA, 19 nt, Artificial Sequence
  Description of Artificial Sequence: Synthetic oligonucleotide
ccgucuguacguucccacg

SEQ ID NO: 1500414 - RNA, 19 nt, Artificial Sequence
  Description of Artificial Sequence: Synthetic oligonucleotide
cuguguaucuagggaccac

SEQ ID NO: 1500415 - RNA, 19 nt, Artificial Sequence
  Description of Artificial Sequence: Synthetic oligonucleotide
gaugcaaggugagcaacau

SEQ ID NO: 1500416 - RNA, 19 nt, Artificial Sequence
  Description of Artificial Sequence: Synthetic oligonucleotide
aaguccgcacacgcucgcu

SEQ ID NO: 1500417 - RNA, 19 nt, Artificial Sequence
  Description of Artificial Sequence: Synthetic oligonucleotide
caugccaggccuucuccaa

SEQ ID NO: 1500418 - RNA, 19 nt, Artificial Sequence
  Description of Artificial Sequence: Synthetic oligonucleotide
uccgcacacgcucgcuguc

SEQ ID NO: 1500419 - RNA, 19 nt, Artificial Sequence
  Description of Artificial Sequence: Synthetic oligonucleotide
cacgccaccagcgcagguc

SEQ ID NO: 1500420 - RNA, 19 nt, Artificial Sequence
  Description of Artificial Sequence: Synthetic oligonucleotide
cccuucacuucaugggccc

SEQ ID NO: 1500421 - RNA, 19 nt, Artificial Sequence
  Description of Artificial Sequence: Synthetic oligonucleotide
caguccucguccugcccac

SEQ ID NO: 1500422 - RNA, 19 nt, Artificial Sequence
  Description of Artificial Sequence: Synthetic oligonucleotide
guacguucccacgccuccc

SEQ ID NO: 1500423 - RNA, 19 nt, Artificial Sequence
  Description of Artificial Sequence: Synthetic oligonucleotide
gggccuuacggaaagcauc

SEQ ID NO: 1500424 - RNA, 19 nt, Artificial Sequence
  Description of Artificial Sequence: Synthetic oligonucleotide
uccuugcgugcuguguggu

SEQ ID NO: 1500425 - RNA, 19 nt, Artificial Sequence
  Description of Artificial Sequence: Synthetic oligonucleotide
cagaccccuucacuucaug

SEQ ID NO: 1500426 - RNA, 19 nt, Artificial Sequence
  Description of Artificial Sequence: Synthetic oligonucleotide
ccccuucacuucaugggcc

SEQ ID NO: 1500427 - RNA, 19 nt, Artificial Sequence
  Description of Artificial Sequence: Synthetic oligonucleotide
cagcuaaccacggucccca

SEQ ID NO: 1500428 - RNA, 19 nt, Artificial Sequence
  Description of Artificial Sequence: Synthetic oligonucleotide
ggccuucucgauucgggca

SEQ ID NO: 1500429 - RNA, 19 nt, Artificial Sequence
  Description of Artificial Sequence: Synthetic oligonucleotide
agcucuuccccugcucgga

SEQ ID NO: 1500430 - RNA, 19 nt, Artificial Sequence
  Description of Artificial Sequence: Synthetic oligonucleotide
uaaccucaucagggcuccg

SEQ ID NO: 1500431 - RNA, 19 nt, Artificial Sequence
  Description of Artificial Sequence: Synthetic oligonucleotide
agccuuccggggacucucc

SEQ ID NO: 1500432 - RNA, 19 nt, Artificial Sequence
  Description of Artificial Sequence: Synthetic oligonucleotide
cgucuguacguucccacgc

SEQ ID NO: 1500433 - RNA, 19 nt, Artificial Sequence
  Description of Artificial Sequence: Synthetic oligonucleotide
cguucuuggaagcagcuaa

SEQ ID NO: 1500434 - RNA, 19 nt, Artificial Sequence
  Description of Artificial Sequence: Synthetic oligonucleotide
ucgauucgggcacguucuu

SEQ ID NO: 1500435 - RNA, 19 nt, Artificial Sequence
  Description of Artificial Sequence: Synthetic oligonucleotide
ugcgugcugugugguagcu

SEQ ID NO: 1500436 - RNA, 19 nt, Artificial Sequence
  Description of Artificial Sequence: Synthetic oligonucleotide
gugcaacuucucccucacc

SEQ ID NO: 1500437 - RNA, 19 nt, Artificial Sequence
  Description of Artificial Sequence: Synthetic oligonucleotide
ccucguccugcccaccugg

SEQ ID NO: 1500438 - RNA, 19 nt, Artificial Sequence
  Description of Artificial Sequence: Synthetic oligonucleotide
acgugggguauagcgauuu

SEQ ID NO: 1500439 - RNA, 19 nt, Artificial Sequence
  Description of Artificial Sequence: Synthetic oligonucleotide
caggcacccacacauucua

SEQ ID NO: 1500440 - RNA, 19 nt, Artificial Sequence
  Description of Artificial Sequence: Synthetic oligonucleotide
uggcaggguagagaccaau

SEQ ID NO: 1500441 - RNA, 19 nt, Artificial Sequence
  Description of Artificial Sequence: Synthetic oligonucleotide
agggcuccggccacccuuc

SEQ ID NO: 1500442 - RNA, 19 nt, Artificial Sequence
  Description of Artificial Sequence: Synthetic oligonucleotide
ucccacccgcuccugcaau

SEQ ID NO: 1500443 - RNA, 19 nt, Artificial Sequence
  Description of Artificial Sequence: Synthetic oligonucleotide
uucccacgccucccagaac

SEQ ID NO: 1500444 - RNA, 19 nt, Artificial Sequence
  Description of Artificial Sequence: Synthetic oligonucleotide
cgacuuucccgaaaaccac

SEQ ID NO: 1500445 - RNA, 19 nt, Artificial Sequence
  Description of Artificial Sequence: Synthetic oligonucleotide
uccuuccggcugauugcuc

SEQ ID NO: 1500446 - RNA, 19 nt, Artificial Sequence
  Description of Artificial Sequence: Synthetic oligonucleotide
cacugcuggagaggucaag

SEQ ID NO: 1500447 - RNA, 19 nt, Artificial Sequence
  Description of Artificial Sequence: Synthetic oligonucleotide
ccugcccaccuggagaugc

SEQ ID NO: 1500448 - RNA, 19 nt, Artificial Sequence
  Description of Artificial Sequence: Synthetic oligonucleotide
gcccaugugugccacgcca

SEQ ID NO: 1500449 - RNA, 19 nt, Artificial Sequence
  Description of Artificial Sequence: Synthetic oligonucleotide
gccugugcccaucuucaac

SEQ ID NO: 1500450 - RNA, 19 nt, Artificial Sequence
  Description of Artificial Sequence: Synthetic oligonucleotide
agccucucagccgcaguga

SEQ ID NO: 1500451 - RNA, 19 nt, Artificial Sequence
  Description of Artificial Sequence: Synthetic oligonucleotide
gccuccuuggugcaucguc

SEQ ID NO: 1500452 - RNA, 19 nt, Artificial Sequence
  Description of Artificial Sequence: Synthetic oligonucleotide
gcucauauuggguuuucau

SEQ ID NO: 1500453 - RNA, 19 nt, Artificial Sequence
  Description of Artificial Sequence: Synthetic oligonucleotide
cccgaaaaccacccagcac

SEQ ID NO: 1500454 - RNA, 19 nt, Artificial Sequence
  Description of Artificial Sequence: Synthetic oligonucleotide
gcagcuaaccacggucccc

SEQ ID NO: 1500455 - RNA, 19 nt, Artificial Sequence
  Description of Artificial Sequence: Synthetic oligonucleotide
cauguccuccauguaacgu

SEQ ID NO: 1500456 - RNA, 19 nt, Artificial Sequence
  Description of Artificial Sequence: Synthetic oligonucleotide
guacaaugcuggucagagu

SEQ ID NO: 1500457 - RNA, 19 nt, Artificial Sequence
  Description of Artificial Sequence: Synthetic oligonucleotide
cacacgcucgcugucugga

SEQ ID NO: 1500458 - RNA, 19 nt, Artificial Sequence
  Description of Artificial Sequence: Synthetic oligonucleotide
aacgugggguauagcgauu

SEQ ID NO: 1500459 - RNA, 19 nt, Artificial Sequence
  Description of Artificial Sequence: Synthetic oligonucleotide
gugccacgccaccagcgca

SEQ ID NO: 1500460 - RNA, 19 nt, Artificial Sequence
  Description of Artificial Sequence: Synthetic oligonucleotide
gcacacgcucgcugucugg

SEQ ID NO: 1500461 - RNA, 19 nt, Artificial Sequence
  Description of Artificial Sequence: Synthetic oligonucleotide
ccuuggugcaucgucccac

SEQ ID NO: 1500462 - RNA, 19 nt, Artificial Sequence
  Description of Artificial Sequence: Synthetic oligonucleotide
ggucaagguguugaugcaa

SEQ ID NO: 1500463 - RNA, 19 nt, Artificial Sequence
  Description of Artificial Sequence: Synthetic oligonucleotide
ggcucucccgagucugggc

SEQ ID NO: 1500464 - RNA, 19 nt, Artificial Sequence
  Description of Artificial Sequence: Synthetic oligonucleotide
cccaugugugccacgccac

SEQ ID NO: 1500465 - RNA, 19 nt, Artificial Sequence
  Description of Artificial Sequence: Synthetic oligonucleotide
cagccuggcagcucucaaa

SEQ ID NO: 1500466 - RNA, 19 nt, Artificial Sequence
  Description of Artificial Sequence: Synthetic oligonucleotide
cacacagccugugcccauc

SEQ ID NO: 1500467 - RNA, 19 nt, Artificial Sequence
  Description of Artificial Sequence: Synthetic oligonucleotide
caaugcggccacucugcaa

SEQ ID NO: 1500468 - RNA, 19 nt, Artificial Sequence
  Description of Artificial Sequence: Synthetic oligonucleotide
gcaugccaggccuucucca

SEQ ID NO: 1500469 - RNA, 19 nt, Artificial Sequence
  Description of Artificial Sequence: Synthetic oligonucleotide
cuggaccgugcaacuucuc

SEQ ID NO: 1500470 - RNA, 19 nt, Artificial Sequence
  Description of Artificial Sequence: Synthetic oligonucleotide
caugggcccuaagacaucu

SEQ ID NO: 1500471 - RNA, 19 nt, Artificial Sequence
  Description of Artificial Sequence: Synthetic oligonucleotide
gcucugcucauauuggguu

SEQ ID NO: 1500472 - RNA, 19 nt, Artificial Sequence
  Description of Artificial Sequence: Synthetic oligonucleotide
gcaaggugagcaacauauc

SEQ ID NO: 1500473 - RNA, 19 nt, Artificial Sequence
  Description of Artificial Sequence: Synthetic oligonucleotide
caucacuagccgcugcaau

SEQ ID NO: 1500474 - RNA, 19 nt, Artificial Sequence
  Description of Artificial Sequence: Synthetic oligonucleotide
uucucgauucgggcacguu

SEQ ID NO: 1500475 - RNA, 19 nt, Artificial Sequence
  Description of Artificial Sequence: Synthetic oligonucleotide
acgcugcaccguccgucug

SEQ ID NO: 1500476 - RNA, 19 nt, Artificial Sequence
  Description of Artificial Sequence: Synthetic oligonucleotide
ggauagagagaaggugcaa

SEQ ID NO: 1500477 - RNA, 19 nt, Artificial Sequence
  Description of Artificial Sequence: Synthetic oligonucleotide
cuucacuucaugggcccua

SEQ ID NO: 1500478 - RNA, 19 nt, Artificial Sequence
  Description of Artificial Sequence: Synthetic oligonucleotide
cucguccugcccaccugga

SEQ ID NO: 1500479 - RNA, 19 nt, Artificial Sequence
  Description of Artificial Sequence: Synthetic oligonucleotide
gccgcagugaagaaggcau

SEQ ID NO: 1500480 - RNA, 19 nt, Artificial Sequence
  Description of Artificial Sequence: Synthetic oligonucleotide
gauggagcucauggaacuu

SEQ ID NO: 1500481 - RNA, 19 nt, Artificial Sequence
  Description of Artificial Sequence: Synthetic oligonucleotide
cucagcagccuggcagcuc

SEQ ID NO: 1500482 - RNA, 19 nt, Artificial Sequence
  Description of Artificial Sequence: Synthetic oligonucleotide
guccgcacacgcucgcugu

SEQ ID NO: 1500483 - RNA, 19 nt, Artificial Sequence
  Description of Artificial Sequence: Synthetic oligonucleotide
gagaagccgcuggcgcuca

SEQ ID NO: 1500484 - RNA, 19 nt, Artificial Sequence
  Description of Artificial Sequence: Synthetic oligonucleotide
agagaccaaugcggccacu

SEQ ID NO: 1500485 - RNA, 19 nt, Artificial Sequence
  Description of Artificial Sequence: Synthetic oligonucleotide
cuggucagaguaaccucau

SEQ ID NO: 1500486 - RNA, 19 nt, Artificial Sequence
  Description of Artificial Sequence: Synthetic oligonucleotide
uccugcccaccuggagaug

SEQ ID NO: 1500487 - RNA, 19 nt, Artificial Sequence
  Description of Artificial Sequence: Synthetic oligonucleotide
guccgucuguacguuccca

SEQ ID NO: 1500488 - RNA, 19 nt, Artificial Sequence
  Description of Artificial Sequence: Synthetic oligonucleotide
gcucucccgagucugggcu

SEQ ID NO: 1500489 - RNA, 19 nt, Artificial Sequence
  Description of Artificial Sequence: Synthetic oligonucleotide
cacccuucuccuuccggcu

SEQ ID NO: 1500490 - RNA, 19 nt, Artificial Sequence
  Description of Artificial Sequence: Synthetic oligonucleotide
ccacgccucccagaacucg

SEQ ID NO: 1500491 - RNA, 19 nt, Artificial Sequence
  Description of Artificial Sequence: Synthetic oligonucleotide
cacgcugcaccguccgucu

SEQ ID NO: 1500492 - RNA, 19 nt, Artificial Sequence
  Description of Artificial Sequence: Synthetic oligonucleotide
ccuucccguggcucucccg

SEQ ID NO: 1500493 - RNA, 19 nt, Artificial Sequence
  Description of Artificial Sequence: Synthetic oligonucleotide
cugcaccguccgucuguac

SEQ ID NO: 1500494 - RNA, 19 nt, Artificial Sequence
  Description of Artificial Sequence: Synthetic oligonucleotide
agcauccucugcagcccga

SEQ ID NO: 1500495 - RNA, 19 nt, Artificial Sequence
  Description of Artificial Sequence: Synthetic oligonucleotide
gcaccguccgucuguacgu

SEQ ID NO: 1500496 - RNA, 19 nt, Artificial Sequence
  Description of Artificial Sequence: Synthetic oligonucleotide
ccucuuuagccagggcuuc

SEQ ID NO: 1500497 - RNA, 19 nt, Artificial Sequence
  Description of Artificial Sequence: Synthetic oligonucleotide
ugccuccuuggugcaucgu

SEQ ID NO: 1500498 - RNA, 19 nt, Artificial Sequence
  Description of Artificial Sequence: Synthetic oligonucleotide
cgggcacguucuuggaagc

SEQ ID NO: 1500499 - RNA, 19 nt, Artificial Sequence
  Description of Artificial Sequence: Synthetic oligonucleotide
aucgucccacccgcuccug

SEQ ID NO: 1500500 - RNA, 19 nt, Artificial Sequence
  Description of Artificial Sequence: Synthetic oligonucleotide
ggucucgauggagcucaug

SEQ ID NO: 1500501 - RNA, 19 nt, Artificial Sequence
  Description of Artificial Sequence: Synthetic oligonucleotide
ccgugcaacuucucccuca

SEQ ID NO: 1500502 - RNA, 19 nt, Artificial Sequence
  Description of Artificial Sequence: Synthetic oligonucleotide
ggcauaggccuucucgauu

SEQ ID NO: 1500503 - RNA, 19 nt, Artificial Sequence
  Description of Artificial Sequence: Synthetic oligonucleotide
ccacuugcgggcccaguca

SEQ ID NO: 1500504 - RNA, 19 nt, Artificial Sequence
  Description of Artificial Sequence: Synthetic oligonucleotide
caucgucccacccgcuccu

SEQ ID NO: 1500505 - RNA, 19 nt, Artificial Sequence
  Description of Artificial Sequence: Synthetic oligonucleotide
cacaugguucagggcccuc

SEQ ID NO: 1500506 - RNA, 19 nt, Artificial Sequence
  Description of Artificial Sequence: Synthetic oligonucleotide
ccccuauaacccuccccuc

SEQ ID NO: 1500507 - RNA, 19 nt, Artificial Sequence
  Description of Artificial Sequence: Synthetic oligonucleotide
cccguggcucucccgaguc

SEQ ID NO: 1500508 - RNA, 19 nt, Artificial Sequence
  Description of Artificial Sequence: Synthetic oligonucleotide
gcccgacuuucccgaaaac

SEQ ID NO: 1500509 - RNA, 19 nt, Artificial Sequence
  Description of Artificial Sequence: Synthetic oligonucleotide
gcaggucucgauggagcuc

SEQ ID NO: 1500510 - RNA, 19 nt, Artificial Sequence
  Description of Artificial Sequence: Synthetic oligonucleotide
gccaugccgggcccaugug

SEQ ID NO: 1500511 - RNA, 19 nt, Artificial Sequence
  Description of Artificial Sequence: Synthetic oligonucleotide
cgauggagcucauggaacu

SEQ ID NO: 1500512 - RNA, 19 nt, Artificial Sequence
  Description of Artificial Sequence: Synthetic oligonucleotide
cagcccgacuuucccgaaa

SEQ ID NO: 1500513 - RNA, 19 nt, Artificial Sequence
  Description of Artificial Sequence: Synthetic oligonucleotide
ccuccauguaacguggggu

SEQ ID NO: 1500514 - RNA, 19 nt, Artificial Sequence
  Description of Artificial Sequence: Synthetic oligonucleotide
gggcacguucuuggaagca

SEQ ID NO: 1500515 - RNA, 19 nt, Artificial Sequence
  Description of Artificial Sequence: Synthetic oligonucleotide
cuucaacacgcugcaccgu

SEQ ID NO: 1500516 - RNA, 19 nt, Artificial Sequence
  Description of Artificial Sequence: Synthetic oligonucleotide
cguccgucuguacguuccc

SEQ ID NO: 1500517 - RNA, 19 nt, Artificial Sequence
  Description of Artificial Sequence: Synthetic oligonucleotide
ggacgguggaaagccccuc

SEQ ID NO: 1500518 - RNA, 19 nt, Artificial Sequence
  Description of Artificial Sequence: Synthetic oligonucleotide
ccaaugcggccacucugca

SEQ ID NO: 1500519 - RNA, 19 nt, Artificial Sequence
  Description of Artificial Sequence: Synthetic oligonucleotide
gccucuuuagccagggcuu

SEQ ID NO: 1500520 - RNA, 19 nt, Artificial Sequence
  Description of Artificial Sequence: Synthetic oligonucleotide
cgauucgggcacguucuug

SEQ ID NO: 1500521 - RNA, 19 nt, Artificial Sequence
  Description of Artificial Sequence: Synthetic oligonucleotide
ccggggacucuccucaucu

SEQ ID NO: 1500522 - RNA, 19 nt, Artificial Sequence
  Description of Artificial Sequence: Synthetic oligonucleotide
cccacgccucccagaacuc

SEQ ID NO: 1500523 - RNA, 19 nt, Artificial Sequence
  Description of Artificial Sequence: Synthetic oligonucleotide
ccuucucuacagcaccccu

SEQ ID NO: 1500524 - RNA, 19 nt, Artificial Sequence
  Description of Artificial Sequence: Synthetic oligonucleotide
gcucgcugucuggaccgug

SEQ ID NO: 1500525 - RNA, 19 nt, Artificial Sequence
  Description of Artificial Sequence: Synthetic oligonucleotide
ccgcaccuucaccccaaug

SEQ ID NO: 1500526 - RNA, 19 nt, Artificial Sequence
  Description of Artificial Sequence: Synthetic oligonucleotide
cuucucgauucgggcacgu

SEQ ID NO: 1500527 - RNA, 19 nt, Artificial Sequence
  Description of Artificial Sequence: Synthetic oligonucleotide
augggcccuaagacaucuu

SEQ ID NO: 1500528 - RNA, 19 nt, Artificial Sequence
  Description of Artificial Sequence: Synthetic oligonucleotide
gccgggcccaugugugcca

SEQ ID NO: 1500529 - RNA, 19 nt, Artificial Sequence
  Description of Artificial Sequence: Synthetic oligonucleotide
gcgugcugugugguagcuc

SEQ ID NO: 1500530 - RNA, 19 nt, Artificial Sequence
  Description of Artificial Sequence: Synthetic oligonucleotide
ccaugccgggcccaugugu

SEQ ID NO: 1500531 - RNA, 19 nt, Artificial Sequence
  Description of Artificial Sequence: Synthetic oligonucleotide
cguucccacgccucccaga

SEQ ID NO: 1500532 - RNA, 19 nt, Artificial Sequence
  Description of Artificial Sequence: Synthetic oligonucleotide
aggucucgauggagcucau

SEQ ID NO: 1500533 - RNA, 19 nt, Artificial Sequence
  Description of Artificial Sequence: Synthetic oligonucleotide
cacccgcuccugcaauuuu

SEQ ID NO: 1500534 - RNA, 19 nt, Artificial Sequence
  Description of Artificial Sequence: Synthetic oligonucleotide
ccucgcugccaaguccgca

SEQ ID NO: 1500535 - RNA, 19 nt, Artificial Sequence
  Description of Artificial Sequence: Synthetic oligonucleotide
ccucaaccuccuucagccu

SEQ ID NO: 1500536 - RNA, 19 nt, Artificial Sequence
  Description of Artificial Sequence: Synthetic oligonucleotide
ccggcugauugcucucugu

SEQ ID NO: 1500537 - RNA, 19 nt, Artificial Sequence
  Description of Artificial Sequence: Synthetic oligonucleotide
gugcaucgucccacccgcu

SEQ ID NO: 1500538 - RNA, 19 nt, Artificial Sequence
  Description of Artificial Sequence: Synthetic oligonucleotide
cuccacuugcgggcccagu

SEQ ID NO: 1500539 - RNA, 19 nt, Artificial Sequence
  Description of Artificial Sequence: Synthetic oligonucleotide
ccacccagcacuggacggu

SEQ ID NO: 1500540 - RNA, 19 nt, Artificial Sequence
  Description of Artificial Sequence: Synthetic oligonucleotide
cccacacauucuacauaau

SEQ ID NO: 1500541 - RNA, 19 nt, Artificial Sequence
  Description of Artificial Sequence: Synthetic oligonucleotide
caccagcgcaggucuucuu

SEQ ID NO: 1500542 - RNA, 19 nt, Artificial Sequence
  Description of Artificial Sequence: Synthetic oligonucleotide
gugcugugugguagcucuu

SEQ ID NO: 1500543 - RNA, 19 nt, Artificial Sequence
  Description of Artificial Sequence: Synthetic oligonucleotide
cgugggguauagcgauuua

SEQ ID NO: 1500544 - RNA, 19 nt, Artificial Sequence
  Description of Artificial Sequence: Synthetic oligonucleotide
gccaggcucugcucauauu

SEQ ID NO: 1500545 - RNA, 19 nt, Artificial Sequence
  Description of Artificial Sequence: Synthetic oligonucleotide
ccuucacuucaugggcccu

SEQ ID NO: 1500546 - RNA, 19 nt, Artificial Sequence
  Description of Artificial Sequence: Synthetic oligonucleotide
caccguccgucuguacguu

SEQ ID NO: 1500547 - RNA, 19 nt, Artificial Sequence
  Description of Artificial Sequence: Synthetic oligonucleotide
gcccugcugcaggucucga

SEQ ID NO: 1500548 - RNA, 19 nt, Artificial Sequence
  Description of Artificial Sequence: Synthetic oligonucleotide
ccguggcucucccgagucu

SEQ ID NO: 1500549 - RNA, 19 nt, Artificial Sequence
  Description of Artificial Sequence: Synthetic oligonucleotide
cccacccgcuccugcaauu

SEQ ID NO: 1500550 - RNA, 19 nt, Artificial Sequence
  Description of Artificial Sequence: Synthetic oligonucleotide
ccacccgcuccugcaauuu

SEQ ID NO: 1500551 - RNA, 19 nt, Artificial Sequence
  Description of Artificial Sequence: Synthetic oligonucleotide
cgcucgcugucuggaccgu

SEQ ID NO: 1500552 - RNA, 19 nt, Artificial Sequence
  Description of Artificial Sequence: Synthetic oligonucleotide
uggaguugcagucaaaucg

SEQ ID NO: 1500553 - RNA, 19 nt, Artificial Sequence
  Description of Artificial Sequence: Synthetic oligonucleotide
acauaugagaaguuguugc

SEQ ID NO: 1500554 - RNA, 19 nt, Artificial Sequence
  Description of Artificial Sequence: Synthetic oligonucleotide
aaauacgucugccaguagg

SEQ ID NO: 1500555 - RNA, 19 nt, Artificial Sequence
  Description of Artificial Sequence: Synthetic oligonucleotide
aaggggaugauauagugca

SEQ ID NO: 1500556 - RNA, 19 nt, Artificial Sequence
  Description of Artificial Sequence: Synthetic oligonucleotide
ucagaaauacgucugccag

SEQ ID NO: 1500557 - RNA, 19 nt, Artificial Sequence
  Description of Artificial Sequence: Synthetic oligonucleotide
aagcccaucgcguucuucc

SEQ ID NO: 1500558 - RNA, 19 nt, Artificial Sequence
  Description of Artificial Sequence: Synthetic oligonucleotide
uccgaguuggcuuuaagag

SEQ ID NO: 1500559 - RNA, 19 nt, Artificial Sequence
  Description of Artificial Sequence: Synthetic oligonucleotide
augauauagugcaacaggc

SEQ ID NO: 1500560 - RNA, 19 nt, Artificial Sequence
  Description of Artificial Sequence: Synthetic oligonucleotide
aaggugaccucuccuagac

SEQ ID NO: 1500561 - RNA, 19 nt, Artificial Sequence
  Description of Artificial Sequence: Synthetic oligonucleotide
aacgggagaucccagcugg

SEQ ID NO: 1500562 - RNA, 19 nt, Artificial Sequence
  Description of Artificial Sequence: Synthetic oligonucleotide
uguagggcagcaaaugaag

SEQ ID NO: 1500563 - RNA, 19 nt, Artificial Sequence
  Description of Artificial Sequence: Synthetic oligonucleotide
ugugggaugcucaaggcgc

SEQ ID NO: 1500564 - RNA, 19 nt, Artificial Sequence
  Description of Artificial Sequence: Synthetic oligonucleotide
gacauggagauucccaagg

SEQ ID NO: 1500565 - RNA, 19 nt, Artificial Sequence
  Description of Artificial Sequence: Synthetic oligonucleotide
gaaauagcuggccagcagc

SEQ ID NO: 1500566 - RNA, 19 nt, Artificial Sequence
  Description of Artificial Sequence: Synthetic oligonucleotide
gcaaaugaaggccaaaagg

SEQ ID NO: 1500567 - RNA, 19 nt, Artificial Sequence
  Description of Artificial Sequence: Synthetic oligonucleotide
acuccacucaggcuuaacc

SEQ ID NO: 1500568 - RNA, 19 nt, Artificial Sequence
  Description of Artificial Sequence: Synthetic oligonucleotide
aaaugaaggccaaaaggag

SEQ ID NO: 1500569 - RNA, 19 nt, Artificial Sequence
  Description of Artificial Sequence: Synthetic oligonucleotide
ucugguauagcauuuggua

SEQ ID NO: 1500570 - RNA, 19 nt, Artificial Sequence
  Description of Artificial Sequence: Synthetic oligonucleotide
aaauucucggugcuuguca

SEQ ID NO: 1500571 - RNA, 19 nt, Artificial Sequence
  Description of Artificial Sequence: Synthetic oligonucleotide
uucggguccaccaaagggc

SEQ ID NO: 1500572 - RNA, 19 nt, Artificial Sequence
  Description of Artificial Sequence: Synthetic oligonucleotide
aaggcggugagugagagga

SEQ ID NO: 1500573 - RNA, 19 nt, Artificial Sequence
  Description of Artificial Sequence: Synthetic oligonucleotide
caaggugucagagauacag

SEQ ID NO: 1500574 - RNA, 19 nt, Artificial Sequence
  Description of Artificial Sequence: Synthetic oligonucleotide
uaagacaccgauccaagaa

SEQ ID NO: 1500575 - RNA, 19 nt, Artificial Sequence
  Description of Artificial Sequence: Synthetic oligonucleotide
uuugguaccaucgguacug

SEQ ID NO: 1500576 - RNA, 19 nt, Artificial Sequence
  Description of Artificial Sequence: Synthetic oligonucleotide
uggcuuuaagagaacauac

SEQ ID NO: 1500577 - RNA, 19 nt, Artificial Sequence
  Description of Artificial Sequence: Synthetic oligonucleotide
uggaugagucccaaguaag

SEQ ID NO: 1500578 - RNA, 19 nt, Artificial Sequence
  Description of Artificial Sequence: Synthetic oligonucleotide
aacguugugguagguauuc

SEQ ID NO: 1500579 - RNA, 19 nt, Artificial Sequence
  Description of Artificial Sequence: Synthetic oligonucleotide
gacgauggcaaagaugagg

SEQ ID NO: 1500580 - RNA, 19 nt, Artificial Sequence
  Description of Artificial Sequence: Synthetic oligonucleotide
agucaaaucgagaugaacu

SEQ ID NO: 1500581 - RNA, 19 nt, Artificial Sequence
  Description of Artificial Sequence: Synthetic oligonucleotide
agaugaaacggauucggca

SEQ ID NO: 1500582 - RNA, 19 nt, Artificial Sequence
  Description of Artificial Sequence: Synthetic oligonucleotide
gucaaaucgagaugaacug

SEQ ID NO: 1500583 - RNA, 19 nt, Artificial Sequence
  Description of Artificial Sequence: Synthetic oligonucleotide
aaccacuccacucaggcuu

SEQ ID NO: 1500584 - RNA, 19 nt, Artificial Sequence
  Description of Artificial Sequence: Synthetic oligonucleotide
aaagggcccagagucagcg

SEQ ID NO: 1500585 - RNA, 19 nt, Artificial Sequence
  Description of Artificial Sequence: Synthetic oligonucleotide
gaugaaacggauucggcaa

SEQ ID NO: 1500586 - RNA, 19 nt, Artificial Sequence
  Description of Artificial Sequence: Synthetic oligonucleotide
accaccaacauagaaagca

SEQ ID NO: 1500587 - RNA, 19 nt, Artificial Sequence
  Description of Artificial Sequence: Synthetic oligonucleotide
aucgcguucuuccauuggg

SEQ ID NO: 1500588 - RNA, 19 nt, Artificial Sequence
  Description of Artificial Sequence: Synthetic oligonucleotide
ucuuccauugggcacucug

SEQ ID NO: 1500589 - RNA, 19 nt, Artificial Sequence
  Description of Artificial Sequence: Synthetic oligonucleotide
uaugagaaguuguugcaaa

SEQ ID NO: 1500590 - RNA, 19 nt, Artificial Sequence
  Description of Artificial Sequence: Synthetic oligonucleotide
aucaccacauaugagaagu

SEQ ID NO: 1500591 - RNA, 19 nt, Artificial Sequence
  Description of Artificial Sequence: Synthetic oligonucleotide
ggaccaccaacauagaaag

SEQ ID NO: 1500592 - RNA, 19 nt, Artificial Sequence
  Description of Artificial Sequence: Synthetic oligonucleotide
accaacauagaaagcaggg

SEQ ID NO: 1500593 - RNA, 19 nt, Artificial Sequence
  Description of Artificial Sequence: Synthetic oligonucleotide
uucccaaggugucagagau

SEQ ID NO: 1500594 - RNA, 19 nt, Artificial Sequence
  Description of Artificial Sequence: Synthetic oligonucleotide
gaugugagcaacaagaaau

SEQ ID NO: 1500595 - RNA, 19 nt, Artificial Sequence
  Description of Artificial Sequence: Synthetic oligonucleotide
ucuggcuauccaacggagg

SEQ ID NO: 1500596 - RNA, 19 nt, Artificial Sequence
  Description of Artificial Sequence: Synthetic oligonucleotide
gaugacgagggugggaagg

SEQ ID NO: 1500597 - RNA, 19 nt, Artificial Sequence
  Description of Artificial Sequence: Synthetic oligonucleotide
ugagcagcccgugucaagg

SEQ ID NO: 1500598 - RNA, 19 nt, Artificial Sequence
  Description of Artificial Sequence: Synthetic oligonucleotide
ugugagcaacaagaaauag

SEQ ID NO: 1500599 - RNA, 19 nt, Artificial Sequence
  Description of Artificial Sequence: Synthetic oligonucleotide
agagcaacguugugguagg

SEQ ID NO: 1500600 - RNA, 19 nt, Artificial Sequence
  Description of Artificial Sequence: Synthetic oligonucleotide
augaaacggauucggcaac

SEQ ID NO: 1500601 - RNA, 19 nt, Artificial Sequence
  Description of Artificial Sequence: Synthetic oligonucleotide
uuccgaguuggcuuuaaga

SEQ ID NO: 1500602 - RNA, 19 nt, Artificial Sequence
  Description of Artificial Sequence: Synthetic oligonucleotide
caaggggaugauauagugc

SEQ ID NO: 1500603 - RNA, 19 nt, Artificial Sequence
  Description of Artificial Sequence: Synthetic oligonucleotide
aauacgucugccaguagga

SEQ ID NO: 1500604 - RNA, 19 nt, Artificial Sequence
  Description of Artificial Sequence: Synthetic oligonucleotide
gaacuguugugggucaugg

SEQ ID NO: 1500605 - RNA, 19 nt, Artificial Sequence
  Description of Artificial Sequence: Synthetic oligonucleotide
caggauaaagcuuccagca

SEQ ID NO: 1500606 - RNA, 19 nt, Artificial Sequence
  Description of Artificial Sequence: Synthetic oligonucleotide
gaagcucagaaauacgucu

SEQ ID NO: 1500607 - RNA, 19 nt, Artificial Sequence
  Description of Artificial Sequence: Synthetic oligonucleotide
cauuugguaccaucgguac

SEQ ID NO: 1500608 - RNA, 19 nt, Artificial Sequence
  Description of Artificial Sequence: Synthetic oligonucleotide
aacggauucggcaacagua

SEQ ID NO: 1500609 - RNA, 19 nt, Artificial Sequence
  Description of Artificial Sequence: Synthetic oligonucleotide
agaaauagcuggccagcag

SEQ ID NO: 1500610 - RNA, 19 nt, Artificial Sequence
  Description of Artificial Sequence: Synthetic oligonucleotide
auagaaagcagggugugcu

SEQ ID NO: 1500611 - RNA, 19 nt, Artificial Sequence
  Description of Artificial Sequence: Synthetic oligonucleotide
ugcucaaggcgccuccacg

SEQ ID NO: 1500612 - RNA, 19 nt, Artificial Sequence
  Description of Artificial Sequence: Synthetic oligonucleotide
auggaguugcagucaaauc

SEQ ID NO: 1500613 - RNA, 19 nt, Artificial Sequence
  Description of Artificial Sequence: Synthetic oligonucleotide
aggauaaagcuuccagcag

SEQ ID NO: 1500614 - RNA, 19 nt, Artificial Sequence
  Description of Artificial Sequence: Synthetic oligonucleotide
gagaucauagcacuggggu

SEQ ID NO: 1500615 - RNA, 19 nt, Artificial Sequence
  Description of Artificial Sequence: Synthetic oligonucleotide
uccuugguugaugaaauac

SEQ ID NO: 1500616 - RNA, 19 nt, Artificial Sequence
  Description of Artificial Sequence: Synthetic oligonucleotide
auucggcaacaguagagag

SEQ ID NO: 1500617 - RNA, 19 nt, Artificial Sequence
  Description of Artificial Sequence: Synthetic oligonucleotide
uucggcaacaguagagaga

SEQ ID NO: 1500618 - RNA, 19 nt, Artificial Sequence
  Description of Artificial Sequence: Synthetic oligonucleotide
caccaacauagaaagcagg

SEQ ID NO: 1500619 - RNA, 19 nt, Artificial Sequence
  Description of Artificial Sequence: Synthetic oligonucleotide
augagucccaaguaagaca

SEQ ID NO: 1500620 - RNA, 19 nt, Artificial Sequence
  Description of Artificial Sequence: Synthetic oligonucleotide
agacaccgauccaagaagc

SEQ ID NO: 1500621 - RNA, 19 nt, Artificial Sequence
  Description of Artificial Sequence: Synthetic oligonucleotide
acuguagggcagcaaauga

SEQ ID NO: 1500622 - RNA, 19 nt, Artificial Sequence
  Description of Artificial Sequence: Synthetic oligonucleotide
gaugagucccaaguaagac

SEQ ID NO: 1500623 - RNA, 19 nt, Artificial Sequence
  Description of Artificial Sequence: Synthetic oligonucleotide
uugugguagguauucacau

SEQ ID NO: 1500624 - RNA, 19 nt, Artificial Sequence
  Description of Artificial Sequence: Synthetic oligonucleotide
ucccaaguaagacaccgau

SEQ ID NO: 1500625 - RNA, 19 nt, Artificial Sequence
  Description of Artificial Sequence: Synthetic oligonucleotide
guagaaggcggugagugag

SEQ ID NO: 1500626 - RNA, 19 nt, Artificial Sequence
  Description of Artificial Sequence: Synthetic oligonucleotide
aaacggauucggcaacagu

SEQ ID NO: 1500627 - RNA, 19 nt, Artificial Sequence
  Description of Artificial Sequence: Synthetic oligonucleotide
ucaaaucgagaugaacugu

SEQ ID NO: 1500628 - RNA, 19 nt, Artificial Sequence
  Description of Artificial Sequence: Synthetic oligonucleotide
ugucaagggaaacggcaga

SEQ ID NO: 1500629 - RNA, 19 nt, Artificial Sequence
  Description of Artificial Sequence: Synthetic oligonucleotide
uugcagucaaaucgagaug

SEQ ID NO: 1500630 - RNA, 19 nt, Artificial Sequence
  Description of Artificial Sequence: Synthetic oligonucleotide
cuucauacaggacgauggc

SEQ ID NO: 1500631 - RNA, 19 nt, Artificial Sequence
  Description of Artificial Sequence: Synthetic oligonucleotide
cacugagugagaaaaggca

SEQ ID NO: 1500632 - RNA, 19 nt, Artificial Sequence
  Description of Artificial Sequence: Synthetic oligonucleotide
auggagauucccaaggugu

SEQ ID NO: 1500633 - RNA, 19 nt, Artificial Sequence
  Description of Artificial Sequence: Synthetic oligonucleotide
caacggaggggcuuggggc

SEQ ID NO: 1500634 - RNA, 19 nt, Artificial Sequence
  Description of Artificial Sequence: Synthetic oligonucleotide
aaaucgagaugaacuguug

SEQ ID NO: 1500635 - RNA, 19 nt, Artificial Sequence
  Description of Artificial Sequence: Synthetic oligonucleotide
aaaacuccagugacaagga

SEQ ID NO: 1500636 - RNA, 19 nt, Artificial Sequence
  Description of Artificial Sequence: Synthetic oligonucleotide
caaggcgccuccacgagcc

SEQ ID NO: 1500637 - RNA, 19 nt, Artificial Sequence
  Description of Artificial Sequence: Synthetic oligonucleotide
uacgucugccaguaggaca

SEQ ID NO: 1500638 - RNA, 19 nt, Artificial Sequence
  Description of Artificial Sequence: Synthetic oligonucleotide
aacggaggggcuuggggcu

SEQ ID NO: 1500639 - RNA, 19 nt, Artificial Sequence
  Description of Artificial Sequence: Synthetic oligonucleotide
cugugggaugcucaaggcg

SEQ ID NO: 1500640 - RNA, 19 nt, Artificial Sequence
  Description of Artificial Sequence: Synthetic oligonucleotide
gaugucaugggcagcacuc

SEQ ID NO: 1500641 - RNA, 19 nt, Artificial Sequence
  Description of Artificial Sequence: Synthetic oligonucleotide
gacucuggggucucagugc

SEQ ID NO: 1500642 - RNA, 19 nt, Artificial Sequence
  Description of Artificial Sequence: Synthetic oligonucleotide
uugaugacgagggugggaa

SEQ ID NO: 1500643 - RNA, 19 nt, Artificial Sequence
  Description of Artificial Sequence: Synthetic oligonucleotide
agagucagcguguguuccg

SEQ ID NO: 1500644 - RNA, 19 nt, Artificial Sequence
  Description of Artificial Sequence: Synthetic oligonucleotide
ugcuuguacuugaggaugu

SEQ ID NO: 1500645 - RNA, 19 nt, Artificial Sequence
  Description of Artificial Sequence: Synthetic oligonucleotide
ucggguccaccaaagggcc

SEQ ID NO: 1500646 - RNA, 19 nt, Artificial Sequence
  Description of Artificial Sequence: Synthetic oligonucleotide
cucagugccuaugaguggc

SEQ ID NO: 1500647 - RNA, 19 nt, Artificial Sequence
  Description of Artificial Sequence: Synthetic oligonucleotide
aguaagacaccgauccaag

SEQ ID NO: 1500648 - RNA, 19 nt, Artificial Sequence
  Description of Artificial Sequence: Synthetic oligonucleotide
uccauggcaaauucucggu

SEQ ID NO: 1500649 - RNA, 19 nt, Artificial Sequence
  Description of Artificial Sequence: Synthetic oligonucleotide
uccauagcaucgaguucgg

SEQ ID NO: 1500650 - RNA, 19 nt, Artificial Sequence
  Description of Artificial Sequence: Synthetic oligonucleotide
cagaugaaacggauucggc

SEQ ID NO: 1500651 - RNA, 19 nt, Artificial Sequence
  Description of Artificial Sequence: Synthetic oligonucleotide
cucuccuagaccugaugag

SEQ ID NO: 1500652 - RNA, 19 nt, Artificial Sequence
  Description of Artificial Sequence: Synthetic oligonucleotide
guagguauucacauaggca

SEQ ID NO: 1500653 - RNA, 19 nt, Artificial Sequence
  Description of Artificial Sequence: Synthetic oligonucleotide
caggaagcucagaaauacg

SEQ ID NO: 1500654 - RNA, 19 nt, Artificial Sequence
  Description of Artificial Sequence: Synthetic oligonucleotide
aucgaguucggguccacca

SEQ ID NO: 1500655 - RNA, 19 nt, Artificial Sequence
  Description of Artificial Sequence: Synthetic oligonucleotide
gauucggcaacaguagaga

SEQ ID NO: 1500656 - RNA, 19 nt, Artificial Sequence
  Description of Artificial Sequence: Synthetic oligonucleotide
caagguugaggcacugcag

SEQ ID NO: 1500657 - RNA, 19 nt, Artificial Sequence
  Description of Artificial Sequence: Synthetic oligonucleotide
agaaauacgucugccagua

SEQ ID NO: 1500658 - RNA, 19 nt, Artificial Sequence
  Description of Artificial Sequence: Synthetic oligonucleotide
aggcaaccaggauaaagcu

SEQ ID NO: 1500659 - RNA, 19 nt, Artificial Sequence
  Description of Artificial Sequence: Synthetic oligonucleotide
acgucugccaguaggacag

SEQ ID NO: 1500660 - RNA, 19 nt, Artificial Sequence
  Description of Artificial Sequence: Synthetic oligonucleotide
uguugcaaaggcccaggau

SEQ ID NO: 1500661 - RNA, 19 nt, Artificial Sequence
  Description of Artificial Sequence: Synthetic oligonucleotide
cacucuggcuauccaacgg

SEQ ID NO: 1500662 - RNA, 19 nt, Artificial Sequence
  Description of Artificial Sequence: Synthetic oligonucleotide
guaccaucgguacugcuga

SEQ ID NO: 1500663 - RNA, 19 nt, Artificial Sequence
  Description of Artificial Sequence: Synthetic oligonucleotide
ggauaaagcuuccagcaga

SEQ ID NO: 1500664 - RNA, 19 nt, Artificial Sequence
  Description of Artificial Sequence: Synthetic oligonucleotide
ucgcguucuuccauugggc

SEQ ID NO: 1500665 - RNA, 19 nt, Artificial Sequence
  Description of Artificial Sequence: Synthetic oligonucleotide
gagcgggagacaaacacac

SEQ ID NO: 1500666 - RNA, 19 nt, Artificial Sequence
  Description of Artificial Sequence: Synthetic oligonucleotide
uggagauucccaagguguc

SEQ ID NO: 1500667 - RNA, 19 nt, Artificial Sequence
  Description of Artificial Sequence: Synthetic oligonucleotide
auuugguaccaucgguacu

SEQ ID NO: 1500668 - RNA, 19 nt, Artificial Sequence
  Description of Artificial Sequence: Synthetic oligonucleotide
aacccuucauacaggacga

SEQ ID NO: 1500669 - RNA, 19 nt, Artificial Sequence
  Description of Artificial Sequence: Synthetic oligonucleotide
agggauguguuccggaaaa

SEQ ID NO: 1500670 - RNA, 19 nt, Artificial Sequence
  Description of Artificial Sequence: Synthetic oligonucleotide
ccaggauaaagcuuccagc

SEQ ID NO: 1500671 - RNA, 19 nt, Artificial Sequence
  Description of Artificial Sequence: Synthetic oligonucleotide
cucagaaauacgucugcca

SEQ ID NO: 1500672 - RNA, 19 nt, Artificial Sequence
  Description of Artificial Sequence: Synthetic oligonucleotide
uggccaaaaccacuccacu

SEQ ID NO: 1500673 - RNA, 19 nt, Artificial Sequence
  Description of Artificial Sequence: Synthetic oligonucleotide
ucagcguguguuccgaguu

SEQ ID NO: 1500674 - RNA, 19 nt, Artificial Sequence
  Description of Artificial Sequence: Synthetic oligonucleotide
uggaacgggagaucccagc

SEQ ID NO: 1500675 - RNA, 19 nt, Artificial Sequence
  Description of Artificial Sequence: Synthetic oligonucleotide
ucaaggcgccuccacgagc

SEQ ID NO: 1500676 - RNA, 19 nt, Artificial Sequence
  Description of Artificial Sequence: Synthetic oligonucleotide
aguuggcuuuaagagaaca

SEQ ID NO: 1500677 - RNA, 19 nt, Artificial Sequence
  Description of Artificial Sequence: Synthetic oligonucleotide
uccuagaccugaugagaug

SEQ ID NO: 1500678 - RNA, 19 nt, Artificial Sequence
  Description of Artificial Sequence: Synthetic oligonucleotide
ggcaacaguagagagaaga

SEQ ID NO: 1500679 - RNA, 19 nt, Artificial Sequence
  Description of Artificial Sequence: Synthetic oligonucleotide
agugcaacaggcccuugaa

SEQ ID NO: 1500680 - RNA, 19 nt, Artificial Sequence
  Description of Artificial Sequence: Synthetic oligonucleotide
gaacgggagaucccagcug

SEQ ID NO: 1500681 - RNA, 19 nt, Artificial Sequence
  Description of Artificial Sequence: Synthetic oligonucleotide
uuguugcaaaggcccagga

SEQ ID NO: 1500682 - RNA, 19 nt, Artificial Sequence
  Description of Artificial Sequence: Synthetic oligonucleotide
uggcuauccaacggagggg

SEQ ID NO: 1500683 - RNA, 19 nt, Artificial Sequence
  Description of Artificial Sequence: Synthetic oligonucleotide
ucucaagagcaacguugug

SEQ ID NO: 1500684 - RNA, 19 nt, Artificial Sequence
  Description of Artificial Sequence: Synthetic oligonucleotide
cugcuuguacuugaggaug

SEQ ID NO: 1500685 - RNA, 19 nt, Artificial Sequence
  Description of Artificial Sequence: Synthetic oligonucleotide
uuugaugacgaggguggga

SEQ ID NO: 1500686 - RNA, 19 nt, Artificial Sequence
  Description of Artificial Sequence: Synthetic oligonucleotide
caggaacccuucauacagg

SEQ ID NO: 1500687 - RNA, 19 nt, Artificial Sequence
  Description of Artificial Sequence: Synthetic oligonucleotide
uguccaccuuuccuggaac

SEQ ID NO: 1500688 - RNA, 19 nt, Artificial Sequence
  Description of Artificial Sequence: Synthetic oligonucleotide
cuaugaguggcugccgggc

SEQ ID NO: 1500689 - RNA, 19 nt, Artificial Sequence
  Description of Artificial Sequence: Synthetic oligonucleotide
uagaccugaugagaugcug

SEQ ID NO: 1500690 - RNA, 19 nt, Artificial Sequence
  Description of Artificial Sequence: Synthetic oligonucleotide
agaucauagcacuggggua

SEQ ID NO: 1500691 - RNA, 19 nt, Artificial Sequence
  Description of Artificial Sequence: Synthetic oligonucleotide
guugugguagguauucaca

SEQ ID NO: 1500692 - RNA, 19 nt, Artificial Sequence
  Description of Artificial Sequence: Synthetic oligonucleotide
auacgucugccaguaggac

SEQ ID NO: 1500693 - RNA, 19 nt, Artificial Sequence
  Description of Artificial Sequence: Synthetic oligonucleotide
gaaauacgucugccaguag

SEQ ID NO: 1500694 - RNA, 19 nt, Artificial Sequence
  Description of Artificial Sequence: Synthetic oligonucleotide
agcaagguugaggcacugc

SEQ ID NO: 1500695 - RNA, 19 nt, Artificial Sequence
  Description of Artificial Sequence: Synthetic oligonucleotide
cauagcaucgaguucgggu

SEQ ID NO: 1500696 - RNA, 19 nt, Artificial Sequence
  Description of Artificial Sequence: Synthetic oligonucleotide
ggagaucccagcuggaauc

SEQ ID NO: 1500697 - RNA, 19 nt, Artificial Sequence
  Description of Artificial Sequence: Synthetic oligonucleotide
acggauucggcaacaguag

SEQ ID NO: 1500698 - RNA, 19 nt, Artificial Sequence
  Description of Artificial Sequence: Synthetic oligonucleotide
uagaaggcggugagugaga

SEQ ID NO: 1500699 - RNA, 19 nt, Artificial Sequence
  Description of Artificial Sequence: Synthetic oligonucleotide
gacaccgauccaagaagcc

SEQ ID NO: 1500700 - RNA, 19 nt, Artificial Sequence
  Description of Artificial Sequence: Synthetic oligonucleotide
agccaggaguuugaugacg

SEQ ID NO: 1500701 - RNA, 19 nt, Artificial Sequence
  Description of Artificial Sequence: Synthetic oligonucleotide
augcucaaggcgccuccac

SEQ ID NO: 1500702 - RNA, 19 nt, Artificial Sequence
  Description of Artificial Sequence: Synthetic oligonucleotide
gccaaaaccacuccacuca

SEQ ID NO: 1500703 - RNA, 19 nt, Artificial Sequence
  Description of Artificial Sequence: Synthetic oligonucleotide
ccagaugaaacggauucgg

SEQ ID NO: 1500704 - RNA, 19 nt, Artificial Sequence
  Description of Artificial Sequence: Synthetic oligonucleotide
uguguccugagcagcccgu

SEQ ID NO: 1500705 - RNA, 19 nt, Artificial Sequence
  Description of Artificial Sequence: Synthetic oligonucleotide
ugaugacgagggugggaag

SEQ ID NO: 1500706 - RNA, 19 nt, Artificial Sequence
  Description of Artificial Sequence: Synthetic oligonucleotide
aaggcgccuccacgagccc

SEQ ID NO: 1500707 - RNA, 19 nt, Artificial Sequence
  Description of Artificial Sequence: Synthetic oligonucleotide
cugguucccagaugccugc

SEQ ID NO: 1500708 - RNA, 19 nt, Artificial Sequence
  Description of Artificial Sequence: Synthetic oligonucleotide
augcuggccaaaaccacuc

SEQ ID NO: 1500709 - RNA, 19 nt, Artificial Sequence
  Description of Artificial Sequence: Synthetic oligonucleotide
agaaggcggugagugagag

SEQ ID NO: 1500710 - RNA, 19 nt, Artificial Sequence
  Description of Artificial Sequence: Synthetic oligonucleotide
ucgaguucggguccaccaa

SEQ ID NO: 1500711 - RNA, 19 nt, Artificial Sequence
  Description of Artificial Sequence: Synthetic oligonucleotide
gagcagcccgugucaaggg

SEQ ID NO: 1500712 - RNA, 19 nt, Artificial Sequence
  Description of Artificial Sequence: Synthetic oligonucleotide
agcucuccauagcaucgag

SEQ ID NO: 1500713 - RNA, 19 nt, Artificial Sequence
  Description of Artificial Sequence: Synthetic oligonucleotide
ggucaguguguccugagca

SEQ ID NO: 1500714 - RNA, 19 nt, Artificial Sequence
  Description of Artificial Sequence: Synthetic oligonucleotide
ggauucggcaacaguagag

SEQ ID NO: 1500715 - RNA, 19 nt, Artificial Sequence
  Description of Artificial Sequence: Synthetic oligonucleotide
cauaggcagcuccacccag

SEQ ID NO: 1500716 - RNA, 19 nt, Artificial Sequence
  Description of Artificial Sequence: Synthetic oligonucleotide
guaagacaccgauccaaga

SEQ ID NO: 1500717 - RNA, 19 nt, Artificial Sequence
  Description of Artificial Sequence: Synthetic oligonucleotide
ucgguacugcugagaauga

SEQ ID NO: 1500718 - RNA, 19 nt, Artificial Sequence
  Description of Artificial Sequence: Synthetic oligonucleotide
uauagugcaacaggcccuu

SEQ ID NO: 1500719 - RNA, 19 nt, Artificial Sequence
  Description of Artificial Sequence: Synthetic oligonucleotide
cagucaaaucgagaugaac

SEQ ID NO: 1500720 - RNA, 19 nt, Artificial Sequence
  Description of Artificial Sequence: Synthetic oligonucleotide
gcuaggacccagaugaaac

SEQ ID NO: 1500721 - RNA, 19 nt, Artificial Sequence
  Description of Artificial Sequence: Synthetic oligonucleotide
aguagagagaagagcggga

SEQ ID NO: 1500722 - RNA, 19 nt, Artificial Sequence
  Description of Artificial Sequence: Synthetic oligonucleotide
gagaaugacucagggaugu

SEQ ID NO: 1500723 - RNA, 19 nt, Artificial Sequence
  Description of Artificial Sequence: Synthetic oligonucleotide
caucgcguucuuccauugg

SEQ ID NO: 1500724 - RNA, 19 nt, Artificial Sequence
  Description of Artificial Sequence: Synthetic oligonucleotide
ccaaggggaugauauagug

SEQ ID NO: 1500725 - RNA, 19 nt, Artificial Sequence
  Description of Artificial Sequence: Synthetic oligonucleotide
uccagaagcccaucgcguu

SEQ ID NO: 1500726 - RNA, 19 nt, Artificial Sequence
  Description of Artificial Sequence: Synthetic oligonucleotide
ugaccucuccuagaccuga

SEQ ID NO: 1500727 - RNA, 19 nt, Artificial Sequence
  Description of Artificial Sequence: Synthetic oligonucleotide
ggagaucauagcacugggg

SEQ ID NO: 1500728 - RNA, 19 nt, Artificial Sequence
  Description of Artificial Sequence: Synthetic oligonucleotide
uucccagaugccugcuugu

SEQ ID NO: 1500729 - RNA, 19 nt, Artificial Sequence
  Description of Artificial Sequence: Synthetic oligonucleotide
agagcgggagacaaacaca

SEQ ID NO: 1500730 - RNA, 19 nt, Artificial Sequence
  Description of Artificial Sequence: Synthetic oligonucleotide
aaacggcagaggaagucau

SEQ ID NO: 1500731 - RNA, 19 nt, Artificial Sequence
  Description of Artificial Sequence: Synthetic oligonucleotide
gaaugacucagggaugugu

SEQ ID NO: 1500732 - RNA, 19 nt, Artificial Sequence
  Description of Artificial Sequence: Synthetic oligonucleotide
gacccggggacuguagggc

SEQ ID NO: 1500733 - RNA, 19 nt, Artificial Sequence
  Description of Artificial Sequence: Synthetic oligonucleotide
cuuggcuccacauggcucu

SEQ ID NO: 1500734 - RNA, 19 nt, Artificial Sequence
  Description of Artificial Sequence: Synthetic oligonucleotide
acgagggugggaaggaugu

SEQ ID NO: 1500735 - RNA, 19 nt, Artificial Sequence
  Description of Artificial Sequence: Synthetic oligonucleotide
aguacccgaggaccaccag

SEQ ID NO: 1500736 - RNA, 19 nt, Artificial Sequence
  Description of Artificial Sequence: Synthetic oligonucleotide
cucaaggcgccuccacgag

SEQ ID NO: 1500737 - RNA, 19 nt, Artificial Sequence
  Description of Artificial Sequence: Synthetic oligonucleotide
agcgggagacaaacacacc

SEQ ID NO: 1500738 - RNA, 19 nt, Artificial Sequence
  Description of Artificial Sequence: Synthetic oligonucleotide
ggaguugcagucaaaucga

SEQ ID NO: 1500739 - RNA, 19 nt, Artificial Sequence
  Description of Artificial Sequence: Synthetic oligonucleotide
ugaaggccaaaaggagcca

SEQ ID NO: 1500740 - RNA, 19 nt, Artificial Sequence
  Description of Artificial Sequence: Synthetic oligonucleotide
ggcuauccaacggaggggc

SEQ ID NO: 1500741 - RNA, 19 nt, Artificial Sequence
  Description of Artificial Sequence: Synthetic oligonucleotide
ggacccggggacuguaggg

SEQ ID NO: 1500742 - RNA, 19 nt, Artificial Sequence
  Description of Artificial Sequence: Synthetic oligonucleotide
ugggcacucuggcuaucca

SEQ ID NO: 1500743 - RNA, 19 nt, Artificial Sequence
  Description of Artificial Sequence: Synthetic oligonucleotide
agucagcguguguuccgag

SEQ ID NO: 1500744 - RNA, 19 nt, Artificial Sequence
  Description of Artificial Sequence: Synthetic oligonucleotide
caaagggcccagagucagc

SEQ ID NO: 1500745 - RNA, 19 nt, Artificial Sequence
  Description of Artificial Sequence: Synthetic oligonucleotide
cuggaacgggagaucccag

SEQ ID NO: 1500746 - RNA, 19 nt, Artificial Sequence
  Description of Artificial Sequence: Synthetic oligonucleotide
caaaucgagaugaacuguu

SEQ ID NO: 1500747 - RNA, 19 nt, Artificial Sequence
  Description of Artificial Sequence: Synthetic oligonucleotide
caggucaguguguccugag

SEQ ID NO: 1500748 - RNA, 19 nt, Artificial Sequence
  Description of Artificial Sequence: Synthetic oligonucleotide
agauucccaaggugucaga

SEQ ID NO: 1500749 - RNA, 19 nt, Artificial Sequence
  Description of Artificial Sequence: Synthetic oligonucleotide
caaguaagacaccgaucca

SEQ ID NO: 1500750 - RNA, 19 nt, Artificial Sequence
  Description of Artificial Sequence: Synthetic oligonucleotide
uaccaucgguacugcugag

SEQ ID NO: 1500751 - RNA, 19 nt, Artificial Sequence
  Description of Artificial Sequence: Synthetic oligonucleotide
ggccaaaaccacuccacuc

SEQ ID NO: 1500752 - RNA, 19 nt, Artificial Sequence
  Description of Artificial Sequence: Synthetic oligonucleotide
ccuaugaguggcugccggg

SEQ ID NO: 1500753 - RNA, 19 nt, Artificial Sequence
  Description of Artificial Sequence: Synthetic oligonucleotide
cugagcagcccgugucaag

SEQ ID NO: 1500754 - RNA, 19 nt, Artificial Sequence
  Description of Artificial Sequence: Synthetic oligonucleotide
ggaagcucagaaauacguc

SEQ ID NO: 1500755 - RNA, 19 nt, Artificial Sequence
  Description of Artificial Sequence: Synthetic oligonucleotide
aggaacccugacauggaga

SEQ ID NO: 1500756 - RNA, 19 nt, Artificial Sequence
  Description of Artificial Sequence: Synthetic oligonucleotide
caccuuuccuggaacggga

SEQ ID NO: 1500757 - RNA, 19 nt, Artificial Sequence
  Description of Artificial Sequence: Synthetic oligonucleotide
gguauagcauuugguacca

SEQ ID NO: 1500758 - RNA, 19 nt, Artificial Sequence
  Description of Artificial Sequence: Synthetic oligonucleotide
cauacaggacgauggcaaa

SEQ ID NO: 1500759 - RNA, 19 nt, Artificial Sequence
  Description of Artificial Sequence: Synthetic oligonucleotide
ggccaaaaggagccaggag

SEQ ID NO: 1500760 - RNA, 19 nt, Artificial Sequence
  Description of Artificial Sequence: Synthetic oligonucleotide
augacgagggugggaagga

SEQ ID NO: 1500761 - RNA, 19 nt, Artificial Sequence
  Description of Artificial Sequence: Synthetic oligonucleotide
ggcggugagugagaggaag

SEQ ID NO: 1500762 - RNA, 19 nt, Artificial Sequence
  Description of Artificial Sequence: Synthetic oligonucleotide
ccaacggaggggcuugggg

SEQ ID NO: 1500763 - RNA, 19 nt, Artificial Sequence
  Description of Artificial Sequence: Synthetic oligonucleotide
gaagagcgggagacaaaca

SEQ ID NO: 1500764 - RNA, 19 nt, Artificial Sequence
  Description of Artificial Sequence: Synthetic oligonucleotide
caccgauccaagaagcccu

SEQ ID NO: 1500765 - RNA, 19 nt, Artificial Sequence
  Description of Artificial Sequence: Synthetic oligonucleotide
agauacaggcagccuccau

SEQ ID NO: 1500766 - RNA, 19 nt, Artificial Sequence
  Description of Artificial Sequence: Synthetic oligonucleotide
augucaugggcagcacuca

SEQ ID NO: 1500767 - RNA, 19 nt, Artificial Sequence
  Description of Artificial Sequence: Synthetic oligonucleotide
ggaugcucaaggcgccucc

SEQ ID NO: 1500768 - RNA, 19 nt, Artificial Sequence
  Description of Artificial Sequence: Synthetic oligonucleotide
agaaugacucagggaugug

SEQ ID NO: 1500769 - RNA, 19 nt, Artificial Sequence
  Description of Artificial Sequence: Synthetic oligonucleotide
ggaacccugacauggagau

SEQ ID NO: 1500770 - RNA, 19 nt, Artificial Sequence
  Description of Artificial Sequence: Synthetic oligonucleotide
ggcaaagaugagguagaug

SEQ ID NO: 1500771 - RNA, 19 nt, Artificial Sequence
  Description of Artificial Sequence: Synthetic oligonucleotide
agcccgugucaagggaaac

SEQ ID NO: 1500772 - RNA, 19 nt, Artificial Sequence
  Description of Artificial Sequence: Synthetic oligonucleotide
aggcuuaaccacacugagu

SEQ ID NO: 1500773 - RNA, 19 nt, Artificial Sequence
  Description of Artificial Sequence: Synthetic oligonucleotide
ggcacucuggcuauccaac

SEQ ID NO: 1500774 - RNA, 19 nt, Artificial Sequence
  Description of Artificial Sequence: Synthetic oligonucleotide
acagcaagguugaggcacu

SEQ ID NO: 1500775 - RNA, 19 nt, Artificial Sequence
  Description of Artificial Sequence: Synthetic oligonucleotide
cagaaauacgucugccagu

SEQ ID NO: 1500776 - RNA, 19 nt, Artificial Sequence
  Description of Artificial Sequence: Synthetic oligonucleotide
gucucaagagcaacguugu

SEQ ID NO: 1500777 - RNA, 19 nt, Artificial Sequence
  Description of Artificial Sequence: Synthetic oligonucleotide
cccgcagagcucuccauag

SEQ ID NO: 1500778 - RNA, 19 nt, Artificial Sequence
  Description of Artificial Sequence: Synthetic oligonucleotide
gucauggguguugggcuug

SEQ ID NO: 1500779 - RNA, 19 nt, Artificial Sequence
  Description of Artificial Sequence: Synthetic oligonucleotide
cguugugguagguauucac

SEQ ID NO: 1500780 - RNA, 19 nt, Artificial Sequence
  Description of Artificial Sequence: Synthetic oligonucleotide
guauucacauaggcagcuc

SEQ ID NO: 1500781 - RNA, 19 nt, Artificial Sequence
  Description of Artificial Sequence: Synthetic oligonucleotide
ucccaaggugucagagaua

SEQ ID NO: 1500782 - RNA, 19 nt, Artificial Sequence
  Description of Artificial Sequence: Synthetic oligonucleotide
gcucaaggcgccuccacga

SEQ ID NO: 1500783 - RNA, 19 nt, Artificial Sequence
  Description of Artificial Sequence: Synthetic oligonucleotide
ccucuccuagaccugauga

SEQ ID NO: 1500784 - RNA, 19 nt, Artificial Sequence
  Description of Artificial Sequence: Synthetic oligonucleotide
gcguucuuccauugggcac

SEQ ID NO: 1500785 - RNA, 19 nt, Artificial Sequence
  Description of Artificial Sequence: Synthetic oligonucleotide
gcccgugucaagggaaacg

SEQ ID NO: 1500786 - RNA, 19 nt, Artificial Sequence
  Description of Artificial Sequence: Synthetic oligonucleotide
cccaaguaagacaccgauc

SEQ ID NO: 1500787 - RNA, 19 nt, Artificial Sequence
  Description of Artificial Sequence: Synthetic oligonucleotide
ggcuuggggcuccgggucg

SEQ ID NO: 1500788 - RNA, 19 nt, Artificial Sequence
  Description of Artificial Sequence: Synthetic oligonucleotide
gcggugagugagaggaagg

SEQ ID NO: 1500789 - RNA, 19 nt, Artificial Sequence
  Description of Artificial Sequence: Synthetic oligonucleotide
gggucucagugccuaugag

SEQ ID NO: 1500790 - RNA, 19 nt, Artificial Sequence
  Description of Artificial Sequence: Synthetic oligonucleotide
guuggcuuuaagagaacau

SEQ ID NO: 1500791 - RNA, 19 nt, Artificial Sequence
  Description of Artificial Sequence: Synthetic oligonucleotide
uguuccgaguuggcuuuaa

SEQ ID NO: 1500792 - RNA, 19 nt, Artificial Sequence
  Description of Artificial Sequence: Synthetic oligonucleotide
ccgaguuggcuuuaagaga

SEQ ID NO: 1500793 - RNA, 19 nt, Artificial Sequence
  Description of Artificial Sequence: Synthetic oligonucleotide
cuccuagaccugaugagau

SEQ ID NO: 1500794 - RNA, 19 nt, Artificial Sequence
  Description of Artificial Sequence: Synthetic oligonucleotide
caguacccgaggaccacca

SEQ ID NO: 1500795 - RNA, 19 nt, Artificial Sequence
  Description of Artificial Sequence: Synthetic oligonucleotide
gucugguauagcauuuggu

SEQ ID NO: 1500796 - RNA, 19 nt, Artificial Sequence
  Description of Artificial Sequence: Synthetic oligonucleotide
agaucccagcuggaaucug

SEQ ID NO: 1500797 - RNA, 19 nt, Artificial Sequence
  Description of Artificial Sequence: Synthetic oligonucleotide
ggagauucccaagguguca

SEQ ID NO: 1500798 - RNA, 19 nt, Artificial Sequence
  Description of Artificial Sequence: Synthetic oligonucleotide
acguugugguagguauuca

SEQ ID NO: 1500799 - RNA, 19 nt, Artificial Sequence
  Description of Artificial Sequence: Synthetic oligonucleotide
aggaccaccaggagaucau

SEQ ID NO: 1500800 - RNA, 19 nt, Artificial Sequence
  Description of Artificial Sequence: Synthetic oligonucleotide
gucagcguguguuccgagu

SEQ ID NO: 1500801 - RNA, 19 nt, Artificial Sequence
  Description of Artificial Sequence: Synthetic oligonucleotide
ccaggaguuugaugacgag

SEQ ID NO: 1500802 - RNA, 19 nt, Artificial Sequence
  Description of Artificial Sequence: Synthetic oligonucleotide
gggugugcugaggggaaag

SEQ ID NO: 1500803 - RNA, 19 nt, Artificial Sequence
  Description of Artificial Sequence: Synthetic oligonucleotide
acaaggacccggggacugu

SEQ ID NO: 1500804 - RNA, 19 nt, Artificial Sequence
  Description of Artificial Sequence: Synthetic oligonucleotide
caaacacaccagucuggua

SEQ ID NO: 1500805 - RNA, 19 nt, Artificial Sequence
  Description of Artificial Sequence: Synthetic oligonucleotide
gucccaaguaagacaccga

SEQ ID NO: 1500806 - RNA, 19 nt, Artificial Sequence
  Description of Artificial Sequence: Synthetic oligonucleotide
auagugcaacaggcccuug

SEQ ID NO: 1500807 - RNA, 19 nt, Artificial Sequence
  Description of Artificial Sequence: Synthetic oligonucleotide
gucugccaguaggacagca

SEQ ID NO: 1500808 - RNA, 19 nt, Artificial Sequence
  Description of Artificial Sequence: Synthetic oligonucleotide
gccaguaggacagcaaggu

SEQ ID NO: 1500809 - RNA, 19 nt, Artificial Sequence
  Description of Artificial Sequence: Synthetic oligonucleotide
cagcccgugucaagggaaa

SEQ ID NO: 1500810 - RNA, 19 nt, Artificial Sequence
  Description of Artificial Sequence: Synthetic oligonucleotide
cauugggcacucuggcuau

SEQ ID NO: 1500811 - RNA, 19 nt, Artificial Sequence
  Description of Artificial Sequence: Synthetic oligonucleotide
ccaguacccgaggaccacc

SEQ ID NO: 1500812 - RNA, 19 nt, Artificial Sequence
  Description of Artificial Sequence: Synthetic oligonucleotide
cccgaggaccaccaggaga

SEQ ID NO: 1500813 - RNA, 19 nt, Artificial Sequence
  Description of Artificial Sequence: Synthetic oligonucleotide
ggaguuugaugacgagggu

SEQ ID NO: 1500814 - RNA, 19 nt, Artificial Sequence
  Description of Artificial Sequence: Synthetic oligonucleotide
ggcuaggacccagaugaaa

SEQ ID NO: 1500815 - RNA, 19 nt, Artificial Sequence
  Description of Artificial Sequence: Synthetic oligonucleotide
accacuccacucaggcuua

SEQ ID NO: 1500816 - RNA, 19 nt, Artificial Sequence
  Description of Artificial Sequence: Synthetic oligonucleotide
gcuuggggcuccgggucgg

SEQ ID NO: 1500817 - RNA, 19 nt, Artificial Sequence
  Description of Artificial Sequence: Synthetic oligonucleotide
cuuugacucuggggucuca

SEQ ID NO: 1500818 - RNA, 19 nt, Artificial Sequence
  Description of Artificial Sequence: Synthetic oligonucleotide
gacccagaugaaacggauu

SEQ ID NO: 1500819 - RNA, 19 nt, Artificial Sequence
  Description of Artificial Sequence: Synthetic oligonucleotide
ccgcagagcucuccauagc

SEQ ID NO: 1500820 - RNA, 19 nt, Artificial Sequence
  Description of Artificial Sequence: Synthetic oligonucleotide
cccggggacuguagggcag

SEQ ID NO: 1500821 - RNA, 19 nt, Artificial Sequence
  Description of Artificial Sequence: Synthetic oligonucleotide
ccauagcaucgaguucggg

SEQ ID NO: 1500822 - RNA, 19 nt, Artificial Sequence
  Description of Artificial Sequence: Synthetic oligonucleotide
cgcguucuuccauugggca

SEQ ID NO: 1500823 - RNA, 19 nt, Artificial Sequence
  Description of Artificial Sequence: Synthetic oligonucleotide
cuauccaacggaggggcuu

SEQ ID NO: 1500824 - RNA, 19 nt, Artificial Sequence
  Description of Artificial Sequence: Synthetic oligonucleotide
ccuuuccuggaacgggaga

SEQ ID NO: 1500825 - RNA, 19 nt, Artificial Sequence
  Description of Artificial Sequence: Synthetic oligonucleotide
ggcuuugacucuggggucu

SEQ ID NO: 1500826 - RNA, 19 nt, Artificial Sequence
  Description of Artificial Sequence: Synthetic oligonucleotide
acgggagaucccagcugga

SEQ ID NO: 1500827 - RNA, 19 nt, Artificial Sequence
  Description of Artificial Sequence: Synthetic oligonucleotide
gcaccaaggggaugauaua

SEQ ID NO: 1500828 - RNA, 19 nt, Artificial Sequence
  Description of Artificial Sequence: Synthetic oligonucleotide
cccugacauggagauuccc

SEQ ID NO: 1500829 - RNA, 19 nt, Artificial Sequence
  Description of Artificial Sequence: Synthetic oligonucleotide
gguccaccaaagggcccag

SEQ ID NO: 1500830 - RNA, 19 nt, Artificial Sequence
  Description of Artificial Sequence: Synthetic oligonucleotide
gcaggucaguguguccuga

SEQ ID NO: 1500831 - RNA, 19 nt, Artificial Sequence
  Description of Artificial Sequence: Synthetic oligonucleotide
ggucauggguguugggcuu

SEQ ID NO: 1500832 - RNA, 19 nt, Artificial Sequence
  Description of Artificial Sequence: Synthetic oligonucleotide
ggcaaccaggauaaagcuu

SEQ ID NO: 1500833 - RNA, 19 nt, Artificial Sequence
  Description of Artificial Sequence: Synthetic oligonucleotide
cggauucggcaacaguaga

SEQ ID NO: 1500834 - RNA, 19 nt, Artificial Sequence
  Description of Artificial Sequence: Synthetic oligonucleotide
gcccgcagagcucuccaua

SEQ ID NO: 1500835 - RNA, 19 nt, Artificial Sequence
  Description of Artificial Sequence: Synthetic oligonucleotide
cccaguacccgaggaccac

SEQ ID NO: 1500836 - RNA, 19 nt, Artificial Sequence
  Description of Artificial Sequence: Synthetic oligonucleotide
acgagcccgcagagcucuc

SEQ ID NO: 1500837 - RNA, 19 nt, Artificial Sequence
  Description of Artificial Sequence: Synthetic oligonucleotide
cgguacugcugagaaugac

SEQ ID NO: 1500838 - RNA, 19 nt, Artificial Sequence
  Description of Artificial Sequence: Synthetic oligonucleotide
gaacccugacauggagauu

SEQ ID NO: 1500839 - RNA, 19 nt, Artificial Sequence
  Description of Artificial Sequence: Synthetic oligonucleotide
ggaccaccaggagaucaua

SEQ ID NO: 1500840 - RNA, 19 nt, Artificial Sequence
  Description of Artificial Sequence: Synthetic oligonucleotide
gcucuccauagcaucgagu

SEQ ID NO: 1500841 - RNA, 19 nt, Artificial Sequence
  Description of Artificial Sequence: Synthetic oligonucleotide
cggugcuugucacuggucu

SEQ ID NO: 1500842 - RNA, 19 nt, Artificial Sequence
  Description of Artificial Sequence: Synthetic oligonucleotide
aggcggugagugagaggaa

SEQ ID NO: 1500843 - RNA, 19 nt, Artificial Sequence
  Description of Artificial Sequence: Synthetic oligonucleotide
gcagggcuaggacccagau

SEQ ID NO: 1500844 - RNA, 19 nt, Artificial Sequence
  Description of Artificial Sequence: Synthetic oligonucleotide
cgaguucggguccaccaaa

SEQ ID NO: 1500845 - RNA, 19 nt, Artificial Sequence
  Description of Artificial Sequence: Synthetic oligonucleotide
gaccucuccuagaccugau

SEQ ID NO: 1500846 - RNA, 19 nt, Artificial Sequence
  Description of Artificial Sequence: Synthetic oligonucleotide
gcaucgaguucggguccac

SEQ ID NO: 1500847 - RNA, 19 nt, Artificial Sequence
  Description of Artificial Sequence: Synthetic oligonucleotide
cguguguuccgaguuggcu

SEQ ID NO: 1500848 - RNA, 19 nt, Artificial Sequence
  Description of Artificial Sequence: Synthetic oligonucleotide
gcuauccaacggaggggcu

SEQ ID NO: 1500849 - RNA, 19 nt, Artificial Sequence
  Description of Artificial Sequence: Synthetic oligonucleotide
gcccaucgcguucuuccau

SEQ ID NO: 1500850 - RNA, 19 nt, Artificial Sequence
  Description of Artificial Sequence: Synthetic oligonucleotide
cccaucgcguucuuccauu

SEQ ID NO: 1500851 - RNA, 19 nt, Artificial Sequence
  Description of Artificial Sequence: Synthetic oligonucleotide
ccgggucggucuccuccuc

SEQ ID NO: 1500852 - RNA, 19 nt, Artificial Sequence
  Description of Artificial Sequence: Synthetic oligonucleotide
cuuggggcuccgggucggu

SEQ ID NO: 1500853 - RNA, 19 nt, Artificial Sequence
  Description of Artificial Sequence: Synthetic oligonucleotide
ccacuccacucaggcuuaa

SEQ ID NO: 1500854 - RNA, 19 nt, Artificial Sequence
  Description of Artificial Sequence: Synthetic oligonucleotide
aaccuauagauauauaagc

SEQ ID NO: 1500855 - RNA, 19 nt, Artificial Sequence
  Description of Artificial Sequence: Synthetic oligonucleotide
auuaguggaucuuucaugc

SEQ ID NO: 1500856 - RNA, 19 nt, Artificial Sequence
  Description of Artificial Sequence: Synthetic oligonucleotide
aaagucucuacauuugcac

SEQ ID NO: 1500857 - RNA, 19 nt, Artificial Sequence
  Description of Artificial Sequence: Synthetic oligonucleotide
uguaauacauauaacauua

SEQ ID NO: 1500858 - RNA, 19 nt, Artificial Sequence
  Description of Artificial Sequence: Synthetic oligonucleotide
acuaauguaauacauauaa

SEQ ID NO: 1500859 - RNA, 19 nt, Artificial Sequence
  Description of Artificial Sequence: Synthetic oligonucleotide
auagcuucaaucuaucuuc

SEQ ID NO: 1500860 - RNA, 19 nt, Artificial Sequence
  Description of Artificial Sequence: Synthetic oligonucleotide
agauauauaagcaaauugg

SEQ ID NO: 1500861 - RNA, 19 nt, Artificial Sequence
  Description of Artificial Sequence: Synthetic oligonucleotide
aaauacuaagguuaacaag

SEQ ID NO: 1500862 - RNA, 19 nt, Artificial Sequence
  Description of Artificial Sequence: Synthetic oligonucleotide
gaacuaauacauuagauga

SEQ ID NO: 1500863 - RNA, 19 nt, Artificial Sequence
  Description of Artificial Sequence: Synthetic oligonucleotide
agagauaaaauacuaaggu

SEQ ID NO: 1500864 - RNA, 19 nt, Artificial Sequence
  Description of Artificial Sequence: Synthetic oligonucleotide
uagauauauaagcaaauug

SEQ ID NO: 1500865 - RNA, 19 nt, Artificial Sequence
  Description of Artificial Sequence: Synthetic oligonucleotide
uacauauaacauuaacucg

SEQ ID NO: 1500866 - RNA, 19 nt, Artificial Sequence
  Description of Artificial Sequence: Synthetic oligonucleotide
uaagcaguuaauauuaccu

SEQ ID NO: 1500867 - RNA, 19 nt, Artificial Sequence
  Description of Artificial Sequence: Synthetic oligonucleotide
ucaacaauuacaguucagg

SEQ ID NO: 1500868 - RNA, 19 nt, Artificial Sequence
  Description of Artificial Sequence: Synthetic oligonucleotide
caaacuauuaacugguccc

SEQ ID NO: 1500869 - RNA, 19 nt, Artificial Sequence
  Description of Artificial Sequence: Synthetic oligonucleotide
ugauuuuccgauuuuagcu

SEQ ID NO: 1500870 - RNA, 19 nt, Artificial Sequence
  Description of Artificial Sequence: Synthetic oligonucleotide
auaaagucucuacauuugc

SEQ ID NO: 1500871 - RNA, 19 nt, Artificial Sequence
  Description of Artificial Sequence: Synthetic oligonucleotide
aauauuaccuagaucugac

SEQ ID NO: 1500872 - RNA, 19 nt, Artificial Sequence
  Description of Artificial Sequence: Synthetic oligonucleotide
uauacuaauauacucucaa

SEQ ID NO: 1500873 - RNA, 19 nt, Artificial Sequence
  Description of Artificial Sequence: Synthetic oligonucleotide
ugugucaacaauuacaguu

SEQ ID NO: 1500874 - RNA, 19 nt, Artificial Sequence
  Description of Artificial Sequence: Synthetic oligonucleotide
aaauucugcaaacaaagua

SEQ ID NO: 1500875 - RNA, 19 nt, Artificial Sequence
  Description of Artificial Sequence: Synthetic oligonucleotide
ucuuguauaguucacuagu

SEQ ID NO: 1500876 - RNA, 19 nt, Artificial Sequence
  Description of Artificial Sequence: Synthetic oligonucleotide
uuuaucaaauggaagcuac

SEQ ID NO: 1500877 - RNA, 19 nt, Artificial Sequence
  Description of Artificial Sequence: Synthetic oligonucleotide
uguuaagcaguuaauauua

SEQ ID NO: 1500878 - RNA, 19 nt, Artificial Sequence
  Description of Artificial Sequence: Synthetic oligonucleotide
aauacauuagaugauccca

SEQ ID NO: 1500879 - RNA, 19 nt, Artificial Sequence
  Description of Artificial Sequence: Synthetic oligonucleotide
gauauauaagcaaauuggc

SEQ ID NO: 1500880 - RNA, 19 nt, Artificial Sequence
  Description of Artificial Sequence: Synthetic oligonucleotide
uaucacauauacaaaacuc

SEQ ID NO: 1500881 - RNA, 19 nt, Artificial Sequence
  Description of Artificial Sequence: Synthetic oligonucleotide
aagucgagucuuuucuucc

SEQ ID NO: 1500882 - RNA, 19 nt, Artificial Sequence
  Description of Artificial Sequence: Synthetic oligonucleotide
uuaaagagaaaccacugau

SEQ ID NO: 1500883 - RNA, 19 nt, Artificial Sequence
  Description of Artificial Sequence: Synthetic oligonucleotide
ugauuaauaagucgagucu

SEQ ID NO: 1500884 - RNA, 19 nt, Artificial Sequence
  Description of Artificial Sequence: Synthetic oligonucleotide
aaaccuauagauauauaag

SEQ ID NO: 1500885 - RNA, 19 nt, Artificial Sequence
  Description of Artificial Sequence: Synthetic oligonucleotide
agaccaaacuauuaacugg

SEQ ID NO: 1500886 - RNA, 19 nt, Artificial Sequence
  Description of Artificial Sequence: Synthetic oligonucleotide
aaaucuugagaccaaacua

SEQ ID NO: 1500887 - RNA, 19 nt, Artificial Sequence
  Description of Artificial Sequence: Synthetic oligonucleotide
uaucuuauuacuaaauauu

SEQ ID NO: 1500888 - RNA, 19 nt, Artificial Sequence
  Description of Artificial Sequence: Synthetic oligonucleotide
uauuuuguguaaacgggag

SEQ ID NO: 1500889 - RNA, 19 nt, Artificial Sequence
  Description of Artificial Sequence: Synthetic oligonucleotide
uauaaagucucuacauuug

SEQ ID NO: 1500890 - RNA, 19 nt, Artificial Sequence
  Description of Artificial Sequence: Synthetic oligonucleotide
acaauuacaguucagguua

SEQ ID NO: 1500891 - RNA, 19 nt, Artificial Sequence
  Description of Artificial Sequence: Synthetic oligonucleotide
uccuauacuaauauacucu

SEQ ID NO: 1500892 - RNA, 19 nt, Artificial Sequence
  Description of Artificial Sequence: Synthetic oligonucleotide
uuuuauagcuucaaucuau

SEQ ID NO: 1500893 - RNA, 19 nt, Artificial Sequence
  Description of Artificial Sequence: Synthetic oligonucleotide
ucauauccaagcuuuaaga

SEQ ID NO: 1500894 - RNA, 19 nt, Artificial Sequence
  Description of Artificial Sequence: Synthetic oligonucleotide
uauacucucaauuaauuuu

SEQ ID NO: 1500895 - RNA, 19 nt, Artificial Sequence
  Description of Artificial Sequence: Synthetic oligonucleotide
uguuaaaagaaauggcuaa

SEQ ID NO: 1500896 - RNA, 19 nt, Artificial Sequence
  Description of Artificial Sequence: Synthetic oligonucleotide
acugauccuaucuuauuac

SEQ ID NO: 1500897 - RNA, 19 nt, Artificial Sequence
  Description of Artificial Sequence: Synthetic oligonucleotide
auuagaugaucccacaagu

SEQ ID NO: 1500898 - RNA, 19 nt, Artificial Sequence
  Description of Artificial Sequence: Synthetic oligonucleotide
ucauaaauaucugucauuc

SEQ ID NO: 1500899 - RNA, 19 nt, Artificial Sequence
  Description of Artificial Sequence: Synthetic oligonucleotide
uguugaaguuccaacaccu

SEQ ID NO: 1500900 - RNA, 19 nt, Artificial Sequence
  Description of Artificial Sequence: Synthetic oligonucleotide
ugagaccaaacuauuaacu

SEQ ID NO: 1500901 - RNA, 19 nt, Artificial Sequence
  Description of Artificial Sequence: Synthetic oligonucleotide
uguaucaguuguuugaaaa

SEQ ID NO: 1500902 - RNA, 19 nt, Artificial Sequence
  Description of Artificial Sequence: Synthetic oligonucleotide
uuaauauuauuuuggguau

SEQ ID NO: 1500903 - RNA, 19 nt, Artificial Sequence
  Description of Artificial Sequence: Synthetic oligonucleotide
uuauaaagucucuacauuu

SEQ ID NO: 1500904 - RNA, 19 nt, Artificial Sequence
  Description of Artificial Sequence: Synthetic oligonucleotide
auaacauuaacucggggau

SEQ ID NO: 1500905 - RNA, 19 nt, Artificial Sequence
  Description of Artificial Sequence: Synthetic oligonucleotide
aguuaauauuaccuagauc

SEQ ID NO: 1500906 - RNA, 19 nt, Artificial Sequence
  Description of Artificial Sequence: Synthetic oligonucleotide
uuaagcaguuaauauuacc

SEQ ID NO: 1500907 - RNA, 19 nt, Artificial Sequence
  Description of Artificial Sequence: Synthetic oligonucleotide
uauaguucacuaguuaggc

SEQ ID NO: 1500908 - RNA, 19 nt, Artificial Sequence
  Description of Artificial Sequence: Synthetic oligonucleotide
uugauuuuccgauuuuagc

SEQ ID NO: 1500909 - RNA, 19 nt, Artificial Sequence
  Description of Artificial Sequence: Synthetic oligonucleotide
aaauuggcaaaacauucau

SEQ ID NO: 1500910 - RNA, 19 nt, Artificial Sequence
  Description of Artificial Sequence: Synthetic oligonucleotide
uaguucacuaguuaggcgu

SEQ ID NO: 1500911 - RNA, 19 nt, Artificial Sequence
  Description of Artificial Sequence: Synthetic oligonucleotide
uccgauuuuagcuucagau

SEQ ID NO: 1500912 - RNA, 19 nt, Artificial Sequence
  Description of Artificial Sequence: Synthetic oligonucleotide
uacuaauauacucucaauu

SEQ ID NO: 1500913 - RNA, 19 nt, Artificial Sequence
  Description of Artificial Sequence: Synthetic oligonucleotide
cugauuaauaagucgaguc

SEQ ID NO: 1500914 - RNA, 19 nt, Artificial Sequence
  Description of Artificial Sequence: Synthetic oligonucleotide
uuaggcguaugauaaaaga

SEQ ID NO: 1500915 - RNA, 19 nt, Artificial Sequence
  Description of Artificial Sequence: Synthetic oligonucleotide
ugguuauucucuuguauag

SEQ ID NO: 1500916 - RNA, 19 nt, Artificial Sequence
  Description of Artificial Sequence: Synthetic oligonucleotide
gacagugcuaaaccuauag

SEQ ID NO: 1500917 - RNA, 19 nt, Artificial Sequence
  Description of Artificial Sequence: Synthetic oligonucleotide
uauuaccuagaucugacau

SEQ ID NO: 1500918 - RNA, 19 nt, Artificial Sequence
  Description of Artificial Sequence: Synthetic oligonucleotide
ucauucuaauuauaaaguc

SEQ ID NO: 1500919 - RNA, 19 nt, Artificial Sequence
  Description of Artificial Sequence: Synthetic oligonucleotide
auacuguaacuuuuggauc

SEQ ID NO: 1500920 - RNA, 19 nt, Artificial Sequence
  Description of Artificial Sequence: Synthetic oligonucleotide
uucuauauauuguccaaga

SEQ ID NO: 1500921 - RNA, 19 nt, Artificial Sequence
  Description of Artificial Sequence: Synthetic oligonucleotide
aucauauccaagcuuuaag

SEQ ID NO: 1500922 - RNA, 19 nt, Artificial Sequence
  Description of Artificial Sequence: Synthetic oligonucleotide
uuauuuuggguaucaauuc

SEQ ID NO: 1500923 - RNA, 19 nt, Artificial Sequence
  Description of Artificial Sequence: Synthetic oligonucleotide
agauaaaauacuaagguua

SEQ ID NO: 1500924 - RNA, 19 nt, Artificial Sequence
  Description of Artificial Sequence: Synthetic oligonucleotide
uaggugacaacuacugaag

SEQ ID NO: 1500925 - RNA, 19 nt, Artificial Sequence
  Description of Artificial Sequence: Synthetic oligonucleotide
ucuuaauauuauuuugggu

SEQ ID NO: 1500926 - RNA, 19 nt, Artificial Sequence
  Description of Artificial Sequence: Synthetic oligonucleotide
guuacugucagggaggcag

SEQ ID NO: 1500927 - RNA, 19 nt, Artificial Sequence
  Description of Artificial Sequence: Synthetic oligonucleotide
acaccugauuaauaagucg

SEQ ID NO: 1500928 - RNA, 19 nt, Artificial Sequence
  Description of Artificial Sequence: Synthetic oligonucleotide
uaagaaaguaucuuauuuu

SEQ ID NO: 1500929 - RNA, 19 nt, Artificial Sequence
  Description of Artificial Sequence: Synthetic oligonucleotide
aaggaagcaaaggauacug

SEQ ID NO: 1500930 - RNA, 19 nt, Artificial Sequence
  Description of Artificial Sequence: Synthetic oligonucleotide
aauggcuaaaauucugcaa

SEQ ID NO: 1500931 - RNA, 19 nt, Artificial Sequence
  Description of Artificial Sequence: Synthetic oligonucleotide
uuaacugcaucuacucuug

SEQ ID NO: 1500932 - RNA, 19 nt, Artificial Sequence
  Description of Artificial Sequence: Synthetic oligonucleotide
gaugcacacucuuugauga

SEQ ID NO: 1500933 - RNA, 19 nt, Artificial Sequence
  Description of Artificial Sequence: Synthetic oligonucleotide
uggguacaaaucuugagac

SEQ ID NO: 1500934 - RNA, 19 nt, Artificial Sequence
  Description of Artificial Sequence: Synthetic oligonucleotide
ggcuauuuuguguaaacgg

SEQ ID NO: 1500935 - RNA, 19 nt, Artificial Sequence
  Description of Artificial Sequence: Synthetic oligonucleotide
caaccuaagagccaucagc

SEQ ID NO: 1500936 - RNA, 19 nt, Artificial Sequence
  Description of Artificial Sequence: Synthetic oligonucleotide
uaggcguaugauaaaagac

SEQ ID NO: 1500937 - RNA, 19 nt, Artificial Sequence
  Description of Artificial Sequence: Synthetic oligonucleotide
gaaguuacugucagggagg

SEQ ID NO: 1500938 - RNA, 19 nt, Artificial Sequence
  Description of Artificial Sequence: Synthetic oligonucleotide
aacaccugauuaauaaguc

SEQ ID NO: 1500939 - RNA, 19 nt, Artificial Sequence
  Description of Artificial Sequence: Synthetic oligonucleotide
uauuauuuuggguaucaau

SEQ ID NO: 1500940 - RNA, 19 nt, Artificial Sequence
  Description of Artificial Sequence: Synthetic oligonucleotide
cuaagguuaacaaguauca

SEQ ID NO: 1500941 - RNA, 19 nt, Artificial Sequence
  Description of Artificial Sequence: Synthetic oligonucleotide
ucucacauacaugugacca

SEQ ID NO: 1500942 - RNA, 19 nt, Artificial Sequence
  Description of Artificial Sequence: Synthetic oligonucleotide
uuuggaucauauccaagcu

SEQ ID NO: 1500943 - RNA, 19 nt, Artificial Sequence
  Description of Artificial Sequence: Synthetic oligonucleotide
aaaugggcuauuuugugua

SEQ ID NO: 1500944 - RNA, 19 nt, Artificial Sequence
  Description of Artificial Sequence: Synthetic oligonucleotide
aucaucuuggggaacagac

SEQ ID NO: 1500945 - RNA, 19 nt, Artificial Sequence
  Description of Artificial Sequence: Synthetic oligonucleotide
auuuuccgauuuuagcuuc

SEQ ID NO: 1500946 - RNA, 19 nt, Artificial Sequence
  Description of Artificial Sequence: Synthetic oligonucleotide
uaguggaucuuucaugcug

SEQ ID NO: 1500947 - RNA, 19 nt, Artificial Sequence
  Description of Artificial Sequence: Synthetic oligonucleotide
uaaagucucuacauuugca

SEQ ID NO: 1500948 - RNA, 19 nt, Artificial Sequence
  Description of Artificial Sequence: Synthetic oligonucleotide
cauuagaugaucccacaag

SEQ ID NO: 1500949 - RNA, 19 nt, Artificial Sequence
  Description of Artificial Sequence: Synthetic oligonucleotide
uucaugauuccuauacuaa

SEQ ID NO: 1500950 - RNA, 19 nt, Artificial Sequence
  Description of Artificial Sequence: Synthetic oligonucleotide
uguguguugaaguuccaac

SEQ ID NO: 1500951 - RNA, 19 nt, Artificial Sequence
  Description of Artificial Sequence: Synthetic oligonucleotide
ucuauauauuguccaagaa

SEQ ID NO: 1500952 - RNA, 19 nt, Artificial Sequence
  Description of Artificial Sequence: Synthetic oligonucleotide
auuuugguuaugugucaac

SEQ ID NO: 1500953 - RNA, 19 nt, Artificial Sequence
  Description of Artificial Sequence: Synthetic oligonucleotide
uaauauuaccuagaucuga

SEQ ID NO: 1500954 - RNA, 19 nt, Artificial Sequence
  Description of Artificial Sequence: Synthetic oligonucleotide
auaguucacuaguuaggcg

SEQ ID NO: 1500955 - RNA, 19 nt, Artificial Sequence
  Description of Artificial Sequence: Synthetic oligonucleotide
aacaaaguaguuguguuua

SEQ ID NO: 1500956 - RNA, 19 nt, Artificial Sequence
  Description of Artificial Sequence: Synthetic oligonucleotide
uuuugguuaugugucaaca

SEQ ID NO: 1500957 - RNA, 19 nt, Artificial Sequence
  Description of Artificial Sequence: Synthetic oligonucleotide
uuuauagcuucaaucuauc

SEQ ID NO: 1500958 - RNA, 19 nt, Artificial Sequence
  Description of Artificial Sequence: Synthetic oligonucleotide
uuccuauacuaauauacuc

SEQ ID NO: 1500959 - RNA, 19 nt, Artificial Sequence
  Description of Artificial Sequence: Synthetic oligonucleotide
auacaugugaccagcacuc

SEQ ID NO: 1500960 - RNA, 19 nt, Artificial Sequence
  Description of Artificial Sequence: Synthetic oligonucleotide
gguaucaauucuuuuauca

SEQ ID NO: 1500961 - RNA, 19 nt, Artificial Sequence
  Description of Artificial Sequence: Synthetic oligonucleotide
uugguuaugugucaacaau

SEQ ID NO: 1500962 - RNA, 19 nt, Artificial Sequence
  Description of Artificial Sequence: Synthetic oligonucleotide
uauucaugauuccuauacu

SEQ ID NO: 1500963 - RNA, 19 nt, Artificial Sequence
  Description of Artificial Sequence: Synthetic oligonucleotide
caccaaaugggcuauuuug

SEQ ID NO: 1500964 - RNA, 19 nt, Artificial Sequence
  Description of Artificial Sequence: Synthetic oligonucleotide
uuggguaucaauucuuuua

SEQ ID NO: 1500965 - RNA, 19 nt, Artificial Sequence
  Description of Artificial Sequence: Synthetic oligonucleotide
cacucuuugaugaaugguc

SEQ ID NO: 1500966 - RNA, 19 nt, Artificial Sequence
  Description of Artificial Sequence: Synthetic oligonucleotide
uuaccuagaucugacauuc

SEQ ID NO: 1500967 - RNA, 19 nt, Artificial Sequence
  Description of Artificial Sequence: Synthetic oligonucleotide
auacauuagaugaucccac

SEQ ID NO: 1500968 - RNA, 19 nt, Artificial Sequence
  Description of Artificial Sequence: Synthetic oligonucleotide
cuaguuaggcguaugauaa

SEQ ID NO: 1500969 - RNA, 19 nt, Artificial Sequence
  Description of Artificial Sequence: Synthetic oligonucleotide
ucugguaggugacaacuac

SEQ ID NO: 1500970 - RNA, 19 nt, Artificial Sequence
  Description of Artificial Sequence: Synthetic oligonucleotide
auauaagcaaauuggcaaa

SEQ ID NO: 1500971 - RNA, 19 nt, Artificial Sequence
  Description of Artificial Sequence: Synthetic oligonucleotide
accuagaucugacauucuc

SEQ ID NO: 1500972 - RNA, 19 nt, Artificial Sequence
  Description of Artificial Sequence: Synthetic oligonucleotide
uuggggaacagacuuucug

SEQ ID NO: 1500973 - RNA, 19 nt, Artificial Sequence
  Description of Artificial Sequence: Synthetic oligonucleotide
gauccuaucuuauuacuaa

SEQ ID NO: 1500974 - RNA, 19 nt, Artificial Sequence
  Description of Artificial Sequence: Synthetic oligonucleotide
ugucaacaauuacaguuca

SEQ ID NO: 1500975 - RNA, 19 nt, Artificial Sequence
  Description of Artificial Sequence: Synthetic oligonucleotide
uugagaccaaacuauuaac

SEQ ID NO: 1500976 - RNA, 19 nt, Artificial Sequence
  Description of Artificial Sequence: Synthetic oligonucleotide
ugaaguuccaacaccugau

SEQ ID NO: 1500977 - RNA, 19 nt, Artificial Sequence
  Description of Artificial Sequence: Synthetic oligonucleotide
uggguaucaauucuuuuau

SEQ ID NO: 1500978 - RNA, 19 nt, Artificial Sequence
  Description of Artificial Sequence: Synthetic oligonucleotide
uuauuuugguuauguguca

SEQ ID NO: 1500979 - RNA, 19 nt, Artificial Sequence
  Description of Artificial Sequence: Synthetic oligonucleotide
cuuggaugcacacucuuug

SEQ ID NO: 1500980 - RNA, 19 nt, Artificial Sequence
  Description of Artificial Sequence: Synthetic oligonucleotide
aaccuaagagccaucagcu

SEQ ID NO: 1500981 - RNA, 19 nt, Artificial Sequence
  Description of Artificial Sequence: Synthetic oligonucleotide
uucaacaccaaaugggcua

SEQ ID NO: 1500982 - RNA, 19 nt, Artificial Sequence
  Description of Artificial Sequence: Synthetic oligonucleotide
auucaugauuccuauacua

SEQ ID NO: 1500983 - RNA, 19 nt, Artificial Sequence
  Description of Artificial Sequence: Synthetic oligonucleotide
auaaacuaauguaauacau

SEQ ID NO: 1500984 - RNA, 19 nt, Artificial Sequence
  Description of Artificial Sequence: Synthetic oligonucleotide
aauggcaagccuuggcuaa

SEQ ID NO: 1500985 - RNA, 19 nt, Artificial Sequence
  Description of Artificial Sequence: Synthetic oligonucleotide
guuuacagaaauucuggga

SEQ ID NO: 1500986 - RNA, 19 nt, Artificial Sequence
  Description of Artificial Sequence: Synthetic oligonucleotide
acaaaguaguuguguuuac

SEQ ID NO: 1500987 - RNA, 19 nt, Artificial Sequence
  Description of Artificial Sequence: Synthetic oligonucleotide
auacucucaauuaauuuug

SEQ ID NO: 1500988 - RNA, 19 nt, Artificial Sequence
  Description of Artificial Sequence: Synthetic oligonucleotide
aaacuauuaacuggucccu

SEQ ID NO: 1500989 - RNA, 19 nt, Artificial Sequence
  Description of Artificial Sequence: Synthetic oligonucleotide
auaagcaaauuggcaaaac

SEQ ID NO: 1500990 - RNA, 19 nt, Artificial Sequence
  Description of Artificial Sequence: Synthetic oligonucleotide
acuaguuaggcguaugaua

SEQ ID NO: 1500991 - RNA, 19 nt, Artificial Sequence
  Description of Artificial Sequence: Synthetic oligonucleotide
gcuauuuuguguaaacggg

SEQ ID NO: 1500992 - RNA, 19 nt, Artificial Sequence
  Description of Artificial Sequence: Synthetic oligonucleotide
uaauaagucgagucuuuuc

SEQ ID NO: 1500993 - RNA, 19 nt, Artificial Sequence
  Description of Artificial Sequence: Synthetic oligonucleotide
acuauuaacuggucccucu

SEQ ID NO: 1500994 - RNA, 19 nt, Artificial Sequence
  Description of Artificial Sequence: Synthetic oligonucleotide
ugauccuaucuuauuacua

SEQ ID NO: 1500995 - RNA, 19 nt, Artificial Sequence
  Description of Artificial Sequence: Synthetic oligonucleotide
uccuaucuuauuacuaaau

SEQ ID NO: 1500996 - RNA, 19 nt, Artificial Sequence
  Description of Artificial Sequence: Synthetic oligonucleotide
ggaucuuucaugcuguaac

SEQ ID NO: 1500997 - RNA, 19 nt, Artificial Sequence
  Description of Artificial Sequence: Synthetic oligonucleotide
ucuacucuugcagaaagau

SEQ ID NO: 1500998 - RNA, 19 nt, Artificial Sequence
  Description of Artificial Sequence: Synthetic oligonucleotide
uuguauaguucacuaguua

SEQ ID NO: 1500999 - RNA, 19 nt, Artificial Sequence
  Description of Artificial Sequence: Synthetic oligonucleotide
guaggugacaacuacugaa

SEQ ID NO: 1501000 - RNA, 19 nt, Artificial Sequence
  Description of Artificial Sequence: Synthetic oligonucleotide
ucacauacaugugaccagc

SEQ ID NO: 1501001 - RNA, 19 nt, Artificial Sequence
  Description of Artificial Sequence: Synthetic oligonucleotide
aacucggggauguuuccug

SEQ ID NO: 1501002 - RNA, 19 nt, Artificial Sequence
  Description of Artificial Sequence: Synthetic oligonucleotide
ugacaacuacugaaguuac

SEQ ID NO: 1501003 - RNA, 19 nt, Artificial Sequence
  Description of Artificial Sequence: Synthetic oligonucleotide
ugaugguggacaagguaca

SEQ ID NO: 1501004 - RNA, 19 nt, Artificial Sequence
  Description of Artificial Sequence: Synthetic oligonucleotide
cuauuuuguguaaacggga

SEQ ID NO: 1501005 - RNA, 19 nt, Artificial Sequence
  Description of Artificial Sequence: Synthetic oligonucleotide
ugguuaugugucaacaauu

SEQ ID NO: 1501006 - RNA, 19 nt, Artificial Sequence
  Description of Artificial Sequence: Synthetic oligonucleotide
uucauaaauaucugucauu

SEQ ID NO: 1501007 - RNA, 19 nt, Artificial Sequence
  Description of Artificial Sequence: Synthetic oligonucleotide
uacauuagaugaucccaca

SEQ ID NO: 1501008 - RNA, 19 nt, Artificial Sequence
  Description of Artificial Sequence: Synthetic oligonucleotide
cuacugaaguuacugucag

SEQ ID NO: 1501009 - RNA, 19 nt, Artificial Sequence
  Description of Artificial Sequence: Synthetic oligonucleotide
auuuuguguaaacgggagu

SEQ ID NO: 1501010 - RNA, 19 nt, Artificial Sequence
  Description of Artificial Sequence: Synthetic oligonucleotide
auuacaaauggcaagccuu

SEQ ID NO: 1501011 - RNA, 19 nt, Artificial Sequence
  Description of Artificial Sequence: Synthetic oligonucleotide
ugcaaacaaaguaguugug

SEQ ID NO: 1501012 - RNA, 19 nt, Artificial Sequence
  Description of Artificial Sequence: Synthetic oligonucleotide
caccugauuaauaagucga

SEQ ID NO: 1501013 - RNA, 19 nt, Artificial Sequence
  Description of Artificial Sequence: Synthetic oligonucleotide
agguuaacaaguaucacau

SEQ ID NO: 1501014 - RNA, 19 nt, Artificial Sequence
  Description of Artificial Sequence: Synthetic oligonucleotide
cuugagaccaaacuauuaa

SEQ ID NO: 1501015 - RNA, 19 nt, Artificial Sequence
  Description of Artificial Sequence: Synthetic oligonucleotide
caaauuggcaaaacauuca

SEQ ID NO: 1501016 - RNA, 19 nt, Artificial Sequence
  Description of Artificial Sequence: Synthetic oligonucleotide
uuuuggguaucaauucuuu

SEQ ID NO: 1501017 - RNA, 19 nt, Artificial Sequence
  Description of Artificial Sequence: Synthetic oligonucleotide
uuacagaaauucugggaaa

SEQ ID NO: 1501018 - RNA, 19 nt, Artificial Sequence
  Description of Artificial Sequence: Synthetic oligonucleotide
aaaccacugauccuaucuu

SEQ ID NO: 1501019 - RNA, 19 nt, Artificial Sequence
  Description of Artificial Sequence: Synthetic oligonucleotide
ucuugagaccaaacuauua

SEQ ID NO: 1501020 - RNA, 19 nt, Artificial Sequence
  Description of Artificial Sequence: Synthetic oligonucleotide
aucaaauggaagcuacaaa

SEQ ID NO: 1501021 - RNA, 19 nt, Artificial Sequence
  Description of Artificial Sequence: Synthetic oligonucleotide
cucacauacaugugaccag

SEQ ID NO: 1501022 - RNA, 19 nt, Artificial Sequence
  Description of Artificial Sequence: Synthetic oligonucleotide
aggcguaugauaaaagaca

SEQ ID NO: 1501023 - RNA, 19 nt, Artificial Sequence
  Description of Artificial Sequence: Synthetic oligonucleotide
guguugaaguuccaacacc

SEQ ID NO: 1501024 - RNA, 19 nt, Artificial Sequence
  Description of Artificial Sequence: Synthetic oligonucleotide
uuaacucggggauguuucc

SEQ ID NO: 1501025 - RNA, 19 nt, Artificial Sequence
  Description of Artificial Sequence: Synthetic oligonucleotide
cuggguacaaaucuugaga

SEQ ID NO: 1501026 - RNA, 19 nt, Artificial Sequence
  Description of Artificial Sequence: Synthetic oligonucleotide
auuccuauacuaauauacu

SEQ ID NO: 1501027 - RNA, 19 nt, Artificial Sequence
  Description of Artificial Sequence: Synthetic oligonucleotide
auagauauauaagcaaauu

SEQ ID NO: 1501028 - RNA, 19 nt, Artificial Sequence
  Description of Artificial Sequence: Synthetic oligonucleotide
aacuaauacauuagaugau

SEQ ID NO: 1501029 - RNA, 19 nt, Artificial Sequence
  Description of Artificial Sequence: Synthetic oligonucleotide
uacugaaguuacugucagg

SEQ ID NO: 1501030 - RNA, 19 nt, Artificial Sequence
  Description of Artificial Sequence: Synthetic oligonucleotide
uacuaagguuaacaaguau

SEQ ID NO: 1501031 - RNA, 19 nt, Artificial Sequence
  Description of Artificial Sequence: Synthetic oligonucleotide
auacuaauauacucucaau

SEQ ID NO: 1501032 - RNA, 19 nt, Artificial Sequence
  Description of Artificial Sequence: Synthetic oligonucleotide
cuuucaugcuguaacaucu

SEQ ID NO: 1501033 - RNA, 19 nt, Artificial Sequence
  Description of Artificial Sequence: Synthetic oligonucleotide
aagacagugcuaaaccuau

SEQ ID NO: 1501034 - RNA, 19 nt, Artificial Sequence
  Description of Artificial Sequence: Synthetic oligonucleotide
auuaccuagaucugacauu

SEQ ID NO: 1501035 - RNA, 19 nt, Artificial Sequence
  Description of Artificial Sequence: Synthetic oligonucleotide
guguguugaaguuccaaca

SEQ ID NO: 1501036 - RNA, 19 nt, Artificial Sequence
  Description of Artificial Sequence: Synthetic oligonucleotide
uggcuaagaaaguaucuua

SEQ ID NO: 1501037 - RNA, 19 nt, Artificial Sequence
  Description of Artificial Sequence: Synthetic oligonucleotide
ugggcuauuuuguguaaac

SEQ ID NO: 1501038 - RNA, 19 nt, Artificial Sequence
  Description of Artificial Sequence: Synthetic oligonucleotide
acagugcuaaaccuauaga

SEQ ID NO: 1501039 - RNA, 19 nt, Artificial Sequence
  Description of Artificial Sequence: Synthetic oligonucleotide
uauaagcaaauuggcaaaa

SEQ ID NO: 1501040 - RNA, 19 nt, Artificial Sequence
  Description of Artificial Sequence: Synthetic oligonucleotide
uuuuccgauuuuagcuuca

SEQ ID NO: 1501041 - RNA, 19 nt, Artificial Sequence
  Description of Artificial Sequence: Synthetic oligonucleotide
uggcuaaaauucugcaaac

SEQ ID NO: 1501042 - RNA, 19 nt, Artificial Sequence
  Description of Artificial Sequence: Synthetic oligonucleotide
auuaacuggucccucuuuu

SEQ ID NO: 1501043 - RNA, 19 nt, Artificial Sequence
  Description of Artificial Sequence: Synthetic oligonucleotide
acuacugaaguuacuguca

SEQ ID NO: 1501044 - RNA, 19 nt, Artificial Sequence
  Description of Artificial Sequence: Synthetic oligonucleotide
aaccacugauccuaucuua

SEQ ID NO: 1501045 - RNA, 19 nt, Artificial Sequence
  Description of Artificial Sequence: Synthetic oligonucleotide
acauuagaugaucccacaa

SEQ ID NO: 1501046 - RNA, 19 nt, Artificial Sequence
  Description of Artificial Sequence: Synthetic oligonucleotide
ggcguaugauaaaagacag

SEQ ID NO: 1501047 - RNA, 19 nt, Artificial Sequence
  Description of Artificial Sequence: Synthetic oligonucleotide
ccaaacuauuaacuggucc

SEQ ID NO: 1501048 - RNA, 19 nt, Artificial Sequence
  Description of Artificial Sequence: Synthetic oligonucleotide
uccuggguacaaaucuuga

SEQ ID NO: 1501049 - RNA, 19 nt, Artificial Sequence
  Description of Artificial Sequence: Synthetic oligonucleotide
gcuaaaauucugcaaacaa

SEQ ID NO: 1501050 - RNA, 19 nt, Artificial Sequence
  Description of Artificial Sequence: Synthetic oligonucleotide
guuaggcguaugauaaaag

SEQ ID NO: 1501051 - RNA, 19 nt, Artificial Sequence
  Description of Artificial Sequence: Synthetic oligonucleotide
agacaugagguuuucuaua

SEQ ID NO: 1501052 - RNA, 19 nt, Artificial Sequence
  Description of Artificial Sequence: Synthetic oligonucleotide
uauuguccaagaacuugau

SEQ ID NO: 1501053 - RNA, 19 nt, Artificial Sequence
  Description of Artificial Sequence: Synthetic oligonucleotide
ggaagcuacaaaccaaaca

SEQ ID NO: 1501054 - RNA, 19 nt, Artificial Sequence
  Description of Artificial Sequence: Synthetic oligonucleotide
uggaagcuacaaaccaaac

SEQ ID NO: 1501055 - RNA, 19 nt, Artificial Sequence
  Description of Artificial Sequence: Synthetic oligonucleotide
cuacucuugcagaaagauc

SEQ ID NO: 1501056 - RNA, 19 nt, Artificial Sequence
  Description of Artificial Sequence: Synthetic oligonucleotide
gugcuaaaccuauagauau

SEQ ID NO: 1501057 - RNA, 19 nt, Artificial Sequence
  Description of Artificial Sequence: Synthetic oligonucleotide
aguuaggcguaugauaaaa

SEQ ID NO: 1501058 - RNA, 19 nt, Artificial Sequence
  Description of Artificial Sequence: Synthetic oligonucleotide
uauuaacuggucccucuuu

SEQ ID NO: 1501059 - RNA, 19 nt, Artificial Sequence
  Description of Artificial Sequence: Synthetic oligonucleotide
cuaagaaaguaucuuauuu

SEQ ID NO: 1501060 - RNA, 19 nt, Artificial Sequence
  Description of Artificial Sequence: Synthetic oligonucleotide
gugucaacaauuacaguuc

SEQ ID NO: 1501061 - RNA, 19 nt, Artificial Sequence
  Description of Artificial Sequence: Synthetic oligonucleotide
ucagguuacucugguaggu

SEQ ID NO: 1501062 - RNA, 19 nt, Artificial Sequence
  Description of Artificial Sequence: Synthetic oligonucleotide
gugacaacuacugaaguua

SEQ ID NO: 1501063 - RNA, 19 nt, Artificial Sequence
  Description of Artificial Sequence: Synthetic oligonucleotide
uuuggguaucaauucuuuu

SEQ ID NO: 1501064 - RNA, 19 nt, Artificial Sequence
  Description of Artificial Sequence: Synthetic oligonucleotide
agugcuaaaccuauagaua

SEQ ID NO: 1501065 - RNA, 19 nt, Artificial Sequence
  Description of Artificial Sequence: Synthetic oligonucleotide
uuaguggaucuuucaugcu

SEQ ID NO: 1501066 - RNA, 19 nt, Artificial Sequence
  Description of Artificial Sequence: Synthetic oligonucleotide
acaacaugguuauucucuu

SEQ ID NO: 1501067 - RNA, 19 nt, Artificial Sequence
  Description of Artificial Sequence: Synthetic oligonucleotide
cuaagagccaucagcugca

SEQ ID NO: 1501068 - RNA, 19 nt, Artificial Sequence
  Description of Artificial Sequence: Synthetic oligonucleotide
cuccuggguacaaaucuug

SEQ ID NO: 1501069 - RNA, 19 nt, Artificial Sequence
  Description of Artificial Sequence: Synthetic oligonucleotide
aggugacaacuacugaagu

SEQ ID NO: 1501070 - RNA, 19 nt, Artificial Sequence
  Description of Artificial Sequence: Synthetic oligonucleotide
ucuuggaugcacacucuuu

SEQ ID NO: 1501071 - RNA, 19 nt, Artificial Sequence
  Description of Artificial Sequence: Synthetic oligonucleotide
uuaauaagucgagucuuuu

SEQ ID NO: 1501072 - RNA, 19 nt, Artificial Sequence
  Description of Artificial Sequence: Synthetic oligonucleotide
ugcuaaaccuauagauaua

SEQ ID NO: 1501073 - RNA, 19 nt, Artificial Sequence
  Description of Artificial Sequence: Synthetic oligonucleotide
gaugaucccacaagucaac

SEQ ID NO: 1501074 - RNA, 19 nt, Artificial Sequence
  Description of Artificial Sequence: Synthetic oligonucleotide
ggaugcacacucuuugaug

SEQ ID NO: 1501075 - RNA, 19 nt, Artificial Sequence
  Description of Artificial Sequence: Synthetic oligonucleotide
aguggaucuuucaugcugu

SEQ ID NO: 1501076 - RNA, 19 nt, Artificial Sequence
  Description of Artificial Sequence: Synthetic oligonucleotide
uuccuguuaagcaguuaau

SEQ ID NO: 1501077 - RNA, 19 nt, Artificial Sequence
  Description of Artificial Sequence: Synthetic oligonucleotide
gauuaauaagucgagucuu

SEQ ID NO: 1501078 - RNA, 19 nt, Artificial Sequence
  Description of Artificial Sequence: Synthetic oligonucleotide
accugauuaauaagucgag

SEQ ID NO: 1501079 - RNA, 19 nt, Artificial Sequence
  Description of Artificial Sequence: Synthetic oligonucleotide
uuuccgauuuuagcuucag

SEQ ID NO: 1501080 - RNA, 19 nt, Artificial Sequence
  Description of Artificial Sequence: Synthetic oligonucleotide
caauuacaguucagguuac

SEQ ID NO: 1501081 - RNA, 19 nt, Artificial Sequence
  Description of Artificial Sequence: Synthetic oligonucleotide
agucgagucuuuucuucca

SEQ ID NO: 1501082 - RNA, 19 nt, Artificial Sequence
  Description of Artificial Sequence: Synthetic oligonucleotide
caagucaacacagcccaac

SEQ ID NO: 1501083 - RNA, 19 nt, Artificial Sequence
  Description of Artificial Sequence: Synthetic oligonucleotide
gaccaaacuauuaacuggu

SEQ ID NO: 1501084 - RNA, 19 nt, Artificial Sequence
  Description of Artificial Sequence: Synthetic oligonucleotide
aacuaauguaauacauaua

SEQ ID NO: 1501085 - RNA, 19 nt, Artificial Sequence
  Description of Artificial Sequence: Synthetic oligonucleotide
agcuacaaaccaaacaauu

SEQ ID NO: 1501086 - RNA, 19 nt, Artificial Sequence
  Description of Artificial Sequence: Synthetic oligonucleotide
uaacugcaucuacucuugc

SEQ ID NO: 1501087 - RNA, 19 nt, Artificial Sequence
  Description of Artificial Sequence: Synthetic oligonucleotide
cuuaacugcaucuacucuu

SEQ ID NO: 1501088 - RNA, 19 nt, Artificial Sequence
  Description of Artificial Sequence: Synthetic oligonucleotide
cccacaagucaacacagcc

SEQ ID NO: 1501089 - RNA, 19 nt, Artificial Sequence
  Description of Artificial Sequence: Synthetic oligonucleotide
aggagaggcacaugauggu

SEQ ID NO: 1501090 - RNA, 19 nt, Artificial Sequence
  Description of Artificial Sequence: Synthetic oligonucleotide
guuaagcaguuaauauuac

SEQ ID NO: 1501091 - RNA, 19 nt, Artificial Sequence
  Description of Artificial Sequence: Synthetic oligonucleotide
agaugaucccacaagucaa

SEQ ID NO: 1501092 - RNA, 19 nt, Artificial Sequence
  Description of Artificial Sequence: Synthetic oligonucleotide
uucacuaguuaggcguaug

SEQ ID NO: 1501093 - RNA, 19 nt, Artificial Sequence
  Description of Artificial Sequence: Synthetic oligonucleotide
uuacucugguaggugacaa

SEQ ID NO: 1501094 - RNA, 19 nt, Artificial Sequence
  Description of Artificial Sequence: Synthetic oligonucleotide
auuaauaagucgagucuuu

SEQ ID NO: 1501095 - RNA, 19 nt, Artificial Sequence
  Description of Artificial Sequence: Synthetic oligonucleotide
gggcuauuuuguguaaacg

SEQ ID NO: 1501096 - RNA, 19 nt, Artificial Sequence
  Description of Artificial Sequence: Synthetic oligonucleotide
caucagcugcauuagugga

SEQ ID NO: 1501097 - RNA, 19 nt, Artificial Sequence
  Description of Artificial Sequence: Synthetic oligonucleotide
ggguacaaaucuugagacc

SEQ ID NO: 1501098 - RNA, 19 nt, Artificial Sequence
  Description of Artificial Sequence: Synthetic oligonucleotide
cugcauuaguggaucuuuc

SEQ ID NO: 1501099 - RNA, 19 nt, Artificial Sequence
  Description of Artificial Sequence: Synthetic oligonucleotide
guugaaguuccaacaccug

SEQ ID NO: 1501100 - RNA, 19 nt, Artificial Sequence
  Description of Artificial Sequence: Synthetic oligonucleotide
ucggggauguuuccuguua

SEQ ID NO: 1501101 - RNA, 19 nt, Artificial Sequence
  Description of Artificial Sequence: Synthetic oligonucleotide
ggaagcaaaggauacugua

SEQ ID NO: 1501102 - RNA, 19 nt, Artificial Sequence
  Description of Artificial Sequence: Synthetic oligonucleotide
accaaacuauuaacugguc

SEQ ID NO: 1501103 - RNA, 19 nt, Artificial Sequence
  Description of Artificial Sequence: Synthetic oligonucleotide
ugcacacucuuugaugaau

SEQ ID NO: 1501104 - RNA, 19 nt, Artificial Sequence
  Description of Artificial Sequence: Synthetic oligonucleotide
gagccaucagcugcauuag

SEQ ID NO: 1501105 - RNA, 19 nt, Artificial Sequence
  Description of Artificial Sequence: Synthetic oligonucleotide
guaacaucuuaauauuauu

SEQ ID NO: 1501106 - RNA, 19 nt, Artificial Sequence
  Description of Artificial Sequence: Synthetic oligonucleotide
cagaacuaauacauuagau

SEQ ID NO: 1501107 - RNA, 19 nt, Artificial Sequence
  Description of Artificial Sequence: Synthetic oligonucleotide
uaguuaggcguaugauaaa

SEQ ID NO: 1501108 - RNA, 19 nt, Artificial Sequence
  Description of Artificial Sequence: Synthetic oligonucleotide
cuguuaagcaguuaauauu

SEQ ID NO: 1501109 - RNA, 19 nt, Artificial Sequence
  Description of Artificial Sequence: Synthetic oligonucleotide
ccaaaugggcuauuuugug

SEQ ID NO: 1501110 - RNA, 19 nt, Artificial Sequence
  Description of Artificial Sequence: Synthetic oligonucleotide
uggucacuuuucacaacau

SEQ ID NO: 1501111 - RNA, 19 nt, Artificial Sequence
  Description of Artificial Sequence: Synthetic oligonucleotide
caugcuguaacaucuuaau

SEQ ID NO: 1501112 - RNA, 19 nt, Artificial Sequence
  Description of Artificial Sequence: Synthetic oligonucleotide
ccuggguacaaaucuugag

SEQ ID NO: 1501113 - RNA, 19 nt, Artificial Sequence
  Description of Artificial Sequence: Synthetic oligonucleotide
uaacucggggauguuuccu

SEQ ID NO: 1501114 - RNA, 19 nt, Artificial Sequence
  Description of Artificial Sequence: Synthetic oligonucleotide
ccuuggcuaagaaaguauc

SEQ ID NO: 1501115 - RNA, 19 nt, Artificial Sequence
  Description of Artificial Sequence: Synthetic oligonucleotide
auauauuguccaagaacuu

SEQ ID NO: 1501116 - RNA, 19 nt, Artificial Sequence
  Description of Artificial Sequence: Synthetic oligonucleotide
cuagaucugacauucucuu

SEQ ID NO: 1501117 - RNA, 19 nt, Artificial Sequence
  Description of Artificial Sequence: Synthetic oligonucleotide
ggacaagguacagaagcug

SEQ ID NO: 1501118 - RNA, 19 nt, Artificial Sequence
  Description of Artificial Sequence: Synthetic oligonucleotide
auacuaagguuaacaagua

SEQ ID NO: 1501119 - RNA, 19 nt, Artificial Sequence
  Description of Artificial Sequence: Synthetic oligonucleotide
cugcaucuacucuugcaga

SEQ ID NO: 1501120 - RNA, 19 nt, Artificial Sequence
  Description of Artificial Sequence: Synthetic oligonucleotide
agcuucucaaugugacaau

SEQ ID NO: 1501121 - RNA, 19 nt, Artificial Sequence
  Description of Artificial Sequence: Synthetic oligonucleotide
gcaguuaauauuaccuaga

SEQ ID NO: 1501122 - RNA, 19 nt, Artificial Sequence
  Description of Artificial Sequence: Synthetic oligonucleotide
acaugagguuuucuauaua

SEQ ID NO: 1501123 - RNA, 19 nt, Artificial Sequence
  Description of Artificial Sequence: Synthetic oligonucleotide
aguucagguuacucuggua

SEQ ID NO: 1501124 - RNA, 19 nt, Artificial Sequence
  Description of Artificial Sequence: Synthetic oligonucleotide
uaccuagaucugacauucu

SEQ ID NO: 1501125 - RNA, 19 nt, Artificial Sequence
  Description of Artificial Sequence: Synthetic oligonucleotide
uacaugugaccagcacucu

SEQ ID NO: 1501126 - RNA, 19 nt, Artificial Sequence
  Description of Artificial Sequence: Synthetic oligonucleotide
guuacucugguaggugaca

SEQ ID NO: 1501127 - RNA, 19 nt, Artificial Sequence
  Description of Artificial Sequence: Synthetic oligonucleotide
aggaagcaaaggauacugu

SEQ ID NO: 1501128 - RNA, 19 nt, Artificial Sequence
  Description of Artificial Sequence: Synthetic oligonucleotide
aaagggagaugaacccuuu

SEQ ID NO: 1501129 - RNA, 19 nt, Artificial Sequence
  Description of Artificial Sequence: Synthetic oligonucleotide
cagguuacucugguaggug

SEQ ID NO: 1501130 - RNA, 19 nt, Artificial Sequence
  Description of Artificial Sequence: Synthetic oligonucleotide
gcagauggaggagaggcac

SEQ ID NO: 1501131 - RNA, 19 nt, Artificial Sequence
  Description of Artificial Sequence: Synthetic oligonucleotide
cugauccuaucuuauuacu

SEQ ID NO: 1501132 - RNA, 19 nt, Artificial Sequence
  Description of Artificial Sequence: Synthetic oligonucleotide
ggagaugaacccuuuacuu

SEQ ID NO: 1501133 - RNA, 19 nt, Artificial Sequence
  Description of Artificial Sequence: Synthetic oligonucleotide
ggagaggcacaugauggug

SEQ ID NO: 1501134 - RNA, 19 nt, Artificial Sequence
  Description of Artificial Sequence: Synthetic oligonucleotide
agcccaaccuaagagccau

SEQ ID NO: 1501135 - RNA, 19 nt, Artificial Sequence
  Description of Artificial Sequence: Synthetic oligonucleotide
aucuacucuugcagaaaga

SEQ ID NO: 1501136 - RNA, 19 nt, Artificial Sequence
  Description of Artificial Sequence: Synthetic oligonucleotide
aucuugagaccaaacuauu

SEQ ID NO: 1501137 - RNA, 19 nt, Artificial Sequence
  Description of Artificial Sequence: Synthetic oligonucleotide
cagacaugagguuuucuau

SEQ ID NO: 1501138 - RNA, 19 nt, Artificial Sequence
  Description of Artificial Sequence: Synthetic oligonucleotide
gcuguaacaucuuaauauu

SEQ ID NO: 1501139 - RNA, 19 nt, Artificial Sequence
  Description of Artificial Sequence: Synthetic oligonucleotide
gggagaugaacccuuuacu

SEQ ID NO: 1501140 - RNA, 19 nt, Artificial Sequence
  Description of Artificial Sequence: Synthetic oligonucleotide
augcacacucuuugaugaa

SEQ ID NO: 1501141 - RNA, 19 nt, Artificial Sequence
  Description of Artificial Sequence: Synthetic oligonucleotide
aguucacuaguuaggcgua

SEQ ID NO: 1501142 - RNA, 19 nt, Artificial Sequence
  Description of Artificial Sequence: Synthetic oligonucleotide
gugcauucaguacaugguu

SEQ ID NO: 1501143 - RNA, 19 nt, Artificial Sequence
  Description of Artificial Sequence: Synthetic oligonucleotide
cugguaggugacaacuacu

SEQ ID NO: 1501144 - RNA, 19 nt, Artificial Sequence
  Description of Artificial Sequence: Synthetic oligonucleotide
gguggacaagguacagaag

SEQ ID NO: 1501145 - RNA, 19 nt, Artificial Sequence
  Description of Artificial Sequence: Synthetic oligonucleotide
ggugacaacuacugaaguu

SEQ ID NO: 1501146 - RNA, 19 nt, Artificial Sequence
  Description of Artificial Sequence: Synthetic oligonucleotide
ggcacaugaugguggacaa

SEQ ID NO: 1501147 - RNA, 19 nt, Artificial Sequence
  Description of Artificial Sequence: Synthetic oligonucleotide
ccuagaucugacauucucu

SEQ ID NO: 1501148 - RNA, 19 nt, Artificial Sequence
  Description of Artificial Sequence: Synthetic oligonucleotide
uaagagccaucagcugcau

SEQ ID NO: 1501149 - RNA, 19 nt, Artificial Sequence
  Description of Artificial Sequence: Synthetic oligonucleotide
ggcuaagaaaguaucuuau

SEQ ID NO: 1501150 - RNA, 19 nt, Artificial Sequence
  Description of Artificial Sequence: Synthetic oligonucleotide
gguuaacaaguaucacaua

SEQ ID NO: 1501151 - RNA, 19 nt, Artificial Sequence
  Description of Artificial Sequence: Synthetic oligonucleotide
gguuauucucuuguauagu

SEQ ID NO: 1501152 - RNA, 19 nt, Artificial Sequence
  Description of Artificial Sequence: Synthetic oligonucleotide
cuauuaacuggucccucuu

SEQ ID NO: 1501153 - RNA, 19 nt, Artificial Sequence
  Description of Artificial Sequence: Synthetic oligonucleotide
cagcccaaccuaagagcca

SEQ ID NO: 1501154 - RNA, 19 nt, Artificial Sequence
  Description of Artificial Sequence: Synthetic oligonucleotide
guggaucuuucaugcugua

SEQ ID NO: 1501155 - RNA, 19 nt, Artificial Sequence
  Description of Artificial Sequence: Synthetic oligonucleotide
acaagucaacacagcccaa

SEQ ID NO: 1501156 - RNA, 19 nt, Artificial Sequence
  Description of Artificial Sequence: Synthetic oligonucleotide
acauuaacucggggauguu

SEQ ID NO: 1501157 - RNA, 19 nt, Artificial Sequence
  Description of Artificial Sequence: Synthetic oligonucleotide
agacagugcuaaaccuaua

SEQ ID NO: 1501158 - RNA, 19 nt, Artificial Sequence
  Description of Artificial Sequence: Synthetic oligonucleotide
cccaaccuaagagccauca

SEQ ID NO: 1501159 - RNA, 19 nt, Artificial Sequence
  Description of Artificial Sequence: Synthetic oligonucleotide
ggcaagccuuggcuaagaa

SEQ ID NO: 1501160 - RNA, 19 nt, Artificial Sequence
  Description of Artificial Sequence: Synthetic oligonucleotide
ccugauuaauaagucgagu

SEQ ID NO: 1501161 - RNA, 19 nt, Artificial Sequence
  Description of Artificial Sequence: Synthetic oligonucleotide
guucacuaguuaggcguau

SEQ ID NO: 1501162 - RNA, 19 nt, Artificial Sequence
  Description of Artificial Sequence: Synthetic oligonucleotide
gcguaugauaaaagacagu

SEQ ID NO: 1501163 - RNA, 19 nt, Artificial Sequence
  Description of Artificial Sequence: Synthetic oligonucleotide
gccuuggcuaagaaaguau

SEQ ID NO: 1501164 - RNA, 19 nt, Artificial Sequence
  Description of Artificial Sequence: Synthetic oligonucleotide
cagcugcauuaguggaucu

SEQ ID NO: 1501165 - RNA, 19 nt, Artificial Sequence
  Description of Artificial Sequence: Synthetic oligonucleotide
gcucuuggaugcacacucu

SEQ ID NO: 1501166 - RNA, 19 nt, Artificial Sequence
  Description of Artificial Sequence: Synthetic oligonucleotide
auuuauuagggccugggcc

SEQ ID NO: 1501167 - RNA, 19 nt, Artificial Sequence
  Description of Artificial Sequence: Synthetic oligonucleotide
auagaaguagagcuggucc

SEQ ID NO: 1501168 - RNA, 19 nt, Artificial Sequence
  Description of Artificial Sequence: Synthetic oligonucleotide
ucugagacuauuuauuagg

SEQ ID NO: 1501169 - RNA, 19 nt, Artificial Sequence
  Description of Artificial Sequence: Synthetic oligonucleotide
aagaaugaggguuugggag

SEQ ID NO: 1501170 - RNA, 19 nt, Artificial Sequence
  Description of Artificial Sequence: Synthetic oligonucleotide
aguaauaugaguccaccac

SEQ ID NO: 1501171 - RNA, 19 nt, Artificial Sequence
  Description of Artificial Sequence: Synthetic oligonucleotide
gagacuauuuauuagggcc

SEQ ID NO: 1501172 - RNA, 19 nt, Artificial Sequence
  Description of Artificial Sequence: Synthetic oligonucleotide
aagaagaccagcacaaggc

SEQ ID NO: 1501173 - RNA, 19 nt, Artificial Sequence
  Description of Artificial Sequence: Synthetic oligonucleotide
aagaggaugagauuaccug

SEQ ID NO: 1501174 - RNA, 19 nt, Artificial Sequence
  Description of Artificial Sequence: Synthetic oligonucleotide
uuagguagaggguaagagg

SEQ ID NO: 1501175 - RNA, 19 nt, Artificial Sequence
  Description of Artificial Sequence: Synthetic oligonucleotide
agacuugccucacauaccc

SEQ ID NO: 1501176 - RNA, 19 nt, Artificial Sequence
  Description of Artificial Sequence: Synthetic oligonucleotide
ugucacuccagauagaagu

SEQ ID NO: 1501177 - RNA, 19 nt, Artificial Sequence
  Description of Artificial Sequence: Synthetic oligonucleotide
uuuuggaugaugcagcgaa

SEQ ID NO: 1501178 - RNA, 19 nt, Artificial Sequence
  Description of Artificial Sequence: Synthetic oligonucleotide
uguacuagggacuaggcua

SEQ ID NO: 1501179 - RNA, 19 nt, Artificial Sequence
  Description of Artificial Sequence: Synthetic oligonucleotide
aguguugccuagcauaggg

SEQ ID NO: 1501180 - RNA, 19 nt, Artificial Sequence
  Description of Artificial Sequence: Synthetic oligonucleotide
uuuauuagggccugggccu

SEQ ID NO: 1501181 - RNA, 19 nt, Artificial Sequence
  Description of Artificial Sequence: Synthetic oligonucleotide
ucaacugaggagcaggcug

SEQ ID NO: 1501182 - RNA, 19 nt, Artificial Sequence
  Description of Artificial Sequence: Synthetic oligonucleotide
gaggggagagccuucaugg

SEQ ID NO: 1501183 - RNA, 19 nt, Artificial Sequence
  Description of Artificial Sequence: Synthetic oligonucleotide
auugcuuuagggucccacc

SEQ ID NO: 1501184 - RNA, 19 nt, Artificial Sequence
  Description of Artificial Sequence: Synthetic oligonucleotide
gaagacugaggcuuggaag

SEQ ID NO: 1501185 - RNA, 19 nt, Artificial Sequence
  Description of Artificial Sequence: Synthetic oligonucleotide
cuugauuccuccauucugc

SEQ ID NO: 1501186 - RNA, 19 nt, Artificial Sequence
  Description of Artificial Sequence: Synthetic oligonucleotide
ucuugcaucaagagggcag

SEQ ID NO: 1501187 - RNA, 19 nt, Artificial Sequence
  Description of Artificial Sequence: Synthetic oligonucleotide
aggcuaucauccuugauuc

SEQ ID NO: 1501188 - RNA, 19 nt, Artificial Sequence
  Description of Artificial Sequence: Synthetic oligonucleotide
ugugaugauggaaggggcg

SEQ ID NO: 1501189 - RNA, 19 nt, Artificial Sequence
  Description of Artificial Sequence: Synthetic oligonucleotide
uaauaugaguccaccacug

SEQ ID NO: 1501190 - RNA, 19 nt, Artificial Sequence
  Description of Artificial Sequence: Synthetic oligonucleotide
ugguaauccaucagcacag

SEQ ID NO: 1501191 - RNA, 19 nt, Artificial Sequence
  Description of Artificial Sequence: Synthetic oligonucleotide
uaugaguccaccacugccc

SEQ ID NO: 1501192 - RNA, 19 nt, Artificial Sequence
  Description of Artificial Sequence: Synthetic oligonucleotide
aauccucucuaccgugucc

SEQ ID NO: 1501193 - RNA, 19 nt, Artificial Sequence
  Description of Artificial Sequence: Synthetic oligonucleotide
uccauuugccucuugacga

SEQ ID NO: 1501194 - RNA, 19 nt, Artificial Sequence
  Description of Artificial Sequence: Synthetic oligonucleotide
aguugauaggcuuggguag

SEQ ID NO: 1501195 - RNA, 19 nt, Artificial Sequence
  Description of Artificial Sequence: Synthetic oligonucleotide
ucaguguugccuagcauag

SEQ ID NO: 1501196 - RNA, 19 nt, Artificial Sequence
  Description of Artificial Sequence: Synthetic oligonucleotide
gagguguccaguuuguuug

SEQ ID NO: 1501197 - RNA, 19 nt, Artificial Sequence
  Description of Artificial Sequence: Synthetic oligonucleotide
ggguaguuuagguagaggg

SEQ ID NO: 1501198 - RNA, 19 nt, Artificial Sequence
  Description of Artificial Sequence: Synthetic oligonucleotide
uggauuaucaguguugccu

SEQ ID NO: 1501199 - RNA, 19 nt, Artificial Sequence
  Description of Artificial Sequence: Synthetic oligonucleotide
gaaggggaaguauucagug

SEQ ID NO: 1501200 - RNA, 19 nt, Artificial Sequence
  Description of Artificial Sequence: Synthetic oligonucleotide
cugagacuauuuauuaggg

SEQ ID NO: 1501201 - RNA, 19 nt, Artificial Sequence
  Description of Artificial Sequence: Synthetic oligonucleotide
agaucaugaagccuacaag

SEQ ID NO: 1501202 - RNA, 19 nt, Artificial Sequence
  Description of Artificial Sequence: Synthetic oligonucleotide
acaguaauaugaguccacc

SEQ ID NO: 1501203 - RNA, 19 nt, Artificial Sequence
  Description of Artificial Sequence: Synthetic oligonucleotide
uaggcuaucauccuugauu

SEQ ID NO: 1501204 - RNA, 19 nt, Artificial Sequence
  Description of Artificial Sequence: Synthetic oligonucleotide
uauuuauuagggccugggc

SEQ ID NO: 1501205 - RNA, 19 nt, Artificial Sequence
  Description of Artificial Sequence: Synthetic oligonucleotide
aaguguacuagggacuagg

SEQ ID NO: 1501206 - RNA, 19 nt, Artificial Sequence
  Description of Artificial Sequence: Synthetic oligonucleotide
agagacuccugagagaagg

SEQ ID NO: 1501207 - RNA, 19 nt, Artificial Sequence
  Description of Artificial Sequence: Synthetic oligonucleotide
agcucuggggaguugauag

SEQ ID NO: 1501208 - RNA, 19 nt, Artificial Sequence
  Description of Artificial Sequence: Synthetic oligonucleotide
aucaugaagccuacaaggc

SEQ ID NO: 1501209 - RNA, 19 nt, Artificial Sequence
  Description of Artificial Sequence: Synthetic oligonucleotide
aagccuacaaggcccauga

SEQ ID NO: 1501210 - RNA, 19 nt, Artificial Sequence
  Description of Artificial Sequence: Synthetic oligonucleotide
ugagacuauuuauuagggc

SEQ ID NO: 1501211 - RNA, 19 nt, Artificial Sequence
  Description of Artificial Sequence: Synthetic oligonucleotide
cuagcgguaaccuuucuuc

SEQ ID NO: 1501212 - RNA, 19 nt, Artificial Sequence
  Description of Artificial Sequence: Synthetic oligonucleotide
aacaauccucucuaccgug

SEQ ID NO: 1501213 - RNA, 19 nt, Artificial Sequence
  Description of Artificial Sequence: Synthetic oligonucleotide
agagccaagaugcacugug

SEQ ID NO: 1501214 - RNA, 19 nt, Artificial Sequence
  Description of Artificial Sequence: Synthetic oligonucleotide
agauuaccuggucucgagc

SEQ ID NO: 1501215 - RNA, 19 nt, Artificial Sequence
  Description of Artificial Sequence: Synthetic oligonucleotide
ugcuauugcuuuagggucc

SEQ ID NO: 1501216 - RNA, 19 nt, Artificial Sequence
  Description of Artificial Sequence: Synthetic oligonucleotide
cauuuuggaugaugcagcg

SEQ ID NO: 1501217 - RNA, 19 nt, Artificial Sequence
  Description of Artificial Sequence: Synthetic oligonucleotide
guccauuugccucuugacg

SEQ ID NO: 1501218 - RNA, 19 nt, Artificial Sequence
  Description of Artificial Sequence: Synthetic oligonucleotide
uguugccuagcauagggac

SEQ ID NO: 1501219 - RNA, 19 nt, Artificial Sequence
  Description of Artificial Sequence: Synthetic oligonucleotide
cagauagaaguagagcugg

SEQ ID NO: 1501220 - RNA, 19 nt, Artificial Sequence
  Description of Artificial Sequence: Synthetic oligonucleotide
uaccguguccucauucacg

SEQ ID NO: 1501221 - RNA, 19 nt, Artificial Sequence
  Description of Artificial Sequence: Synthetic oligonucleotide
gcuuggguaguuuagguag

SEQ ID NO: 1501222 - RNA, 19 nt, Artificial Sequence
  Description of Artificial Sequence: Synthetic oligonucleotide
auuaucaguguugccuagc

SEQ ID NO: 1501223 - RNA, 19 nt, Artificial Sequence
  Description of Artificial Sequence: Synthetic oligonucleotide
gccucuugcaucaagaggg

SEQ ID NO: 1501224 - RNA, 19 nt, Artificial Sequence
  Description of Artificial Sequence: Synthetic oligonucleotide
uuuagugggcugcagcggu

SEQ ID NO: 1501225 - RNA, 19 nt, Artificial Sequence
  Description of Artificial Sequence: Synthetic oligonucleotide
uuuggucugagacuauuua

SEQ ID NO: 1501226 - RNA, 19 nt, Artificial Sequence
  Description of Artificial Sequence: Synthetic oligonucleotide
agaaugaggguuugggagu

SEQ ID NO: 1501227 - RNA, 19 nt, Artificial Sequence
  Description of Artificial Sequence: Synthetic oligonucleotide
aaugccugcugguaaucca

SEQ ID NO: 1501228 - RNA, 19 nt, Artificial Sequence
  Description of Artificial Sequence: Synthetic oligonucleotide
uagaugugcggcuagcggu

SEQ ID NO: 1501229 - RNA, 19 nt, Artificial Sequence
  Description of Artificial Sequence: Synthetic oligonucleotide
auccuugauuccuccauuc

SEQ ID NO: 1501230 - RNA, 19 nt, Artificial Sequence
  Description of Artificial Sequence: Synthetic oligonucleotide
uugccuagcauagggacag

SEQ ID NO: 1501231 - RNA, 19 nt, Artificial Sequence
  Description of Artificial Sequence: Synthetic oligonucleotide
ggagacuugccucacauac

SEQ ID NO: 1501232 - RNA, 19 nt, Artificial Sequence
  Description of Artificial Sequence: Synthetic oligonucleotide
cuagaugugcggcuagcgg

SEQ ID NO: 1501233 - RNA, 19 nt, Artificial Sequence
  Description of Artificial Sequence: Synthetic oligonucleotide
ucuaccguguccucauuca

SEQ ID NO: 1501234 - RNA, 19 nt, Artificial Sequence
  Description of Artificial Sequence: Synthetic oligonucleotide
gaaaagaaugaggguuugg

SEQ ID NO: 1501235 - RNA, 19 nt, Artificial Sequence
  Description of Artificial Sequence: Synthetic oligonucleotide
gaugcagcgaacaauccuc

SEQ ID NO: 1501236 - RNA, 19 nt, Artificial Sequence
  Description of Artificial Sequence: Synthetic oligonucleotide
uccucuagugcccaagguc

SEQ ID NO: 1501237 - RNA, 19 nt, Artificial Sequence
  Description of Artificial Sequence: Synthetic oligonucleotide
acguggcagaucaugaagc

SEQ ID NO: 1501238 - RNA, 19 nt, Artificial Sequence
  Description of Artificial Sequence: Synthetic oligonucleotide
gaguugauaggcuugggua

SEQ ID NO: 1501239 - RNA, 19 nt, Artificial Sequence
  Description of Artificial Sequence: Synthetic oligonucleotide
gagauuaccuggucucgag

SEQ ID NO: 1501240 - RNA, 19 nt, Artificial Sequence
  Description of Artificial Sequence: Synthetic oligonucleotide
gauuaucaguguugccuag

SEQ ID NO: 1501241 - RNA, 19 nt, Artificial Sequence
  Description of Artificial Sequence: Synthetic oligonucleotide
agaagaccagcacaaggca

SEQ ID NO: 1501242 - RNA, 19 nt, Artificial Sequence
  Description of Artificial Sequence: Synthetic oligonucleotide
aaggugcuauugcuuuagg

SEQ ID NO: 1501243 - RNA, 19 nt, Artificial Sequence
  Description of Artificial Sequence: Synthetic oligonucleotide
auuaccuggucucgagcuc

SEQ ID NO: 1501244 - RNA, 19 nt, Artificial Sequence
  Description of Artificial Sequence: Synthetic oligonucleotide
acuguccccuagcaucucc

SEQ ID NO: 1501245 - RNA, 19 nt, Artificial Sequence
  Description of Artificial Sequence: Synthetic oligonucleotide
cugguaauccaucagcaca

SEQ ID NO: 1501246 - RNA, 19 nt, Artificial Sequence
  Description of Artificial Sequence: Synthetic oligonucleotide
aguguacuagggacuaggc

SEQ ID NO: 1501247 - RNA, 19 nt, Artificial Sequence
  Description of Artificial Sequence: Synthetic oligonucleotide
aggucaguucugcagaggu

SEQ ID NO: 1501248 - RNA, 19 nt, Artificial Sequence
  Description of Artificial Sequence: Synthetic oligonucleotide
uugccucaaguguacuagg

SEQ ID NO: 1501249 - RNA, 19 nt, Artificial Sequence
  Description of Artificial Sequence: Synthetic oligonucleotide
cuguccuaggcuugcagag

SEQ ID NO: 1501250 - RNA, 19 nt, Artificial Sequence
  Description of Artificial Sequence: Synthetic oligonucleotide
gggacaguaauaugagucc

SEQ ID NO: 1501251 - RNA, 19 nt, Artificial Sequence
  Description of Artificial Sequence: Synthetic oligonucleotide
cgaacaauccucucuaccg

SEQ ID NO: 1501252 - RNA, 19 nt, Artificial Sequence
  Description of Artificial Sequence: Synthetic oligonucleotide
uccucauucacgucaucgu

SEQ ID NO: 1501253 - RNA, 19 nt, Artificial Sequence
  Description of Artificial Sequence: Synthetic oligonucleotide
caucaagagggcagggagc

SEQ ID NO: 1501254 - RNA, 19 nt, Artificial Sequence
  Description of Artificial Sequence: Synthetic oligonucleotide
aguauucagugggagcagg

SEQ ID NO: 1501255 - RNA, 19 nt, Artificial Sequence
  Description of Artificial Sequence: Synthetic oligonucleotide
agcauagggacaguaauau

SEQ ID NO: 1501256 - RNA, 19 nt, Artificial Sequence
  Description of Artificial Sequence: Synthetic oligonucleotide
ucacuccagauagaaguag

SEQ ID NO: 1501257 - RNA, 19 nt, Artificial Sequence
  Description of Artificial Sequence: Synthetic oligonucleotide
gacuaggcuaucauccuug

SEQ ID NO: 1501258 - RNA, 19 nt, Artificial Sequence
  Description of Artificial Sequence: Synthetic oligonucleotide
agggaaggaaaagaaugag

SEQ ID NO: 1501259 - RNA, 19 nt, Artificial Sequence
  Description of Artificial Sequence: Synthetic oligonucleotide
uuuguuuggcuguccauuu

SEQ ID NO: 1501260 - RNA, 19 nt, Artificial Sequence
  Description of Artificial Sequence: Synthetic oligonucleotide
auguacagcccauguuggg

SEQ ID NO: 1501261 - RNA, 19 nt, Artificial Sequence
  Description of Artificial Sequence: Synthetic oligonucleotide
gccuacaaggcccaugagg

SEQ ID NO: 1501262 - RNA, 19 nt, Artificial Sequence
  Description of Artificial Sequence: Synthetic oligonucleotide
ggagcgagccucucaaugg

SEQ ID NO: 1501263 - RNA, 19 nt, Artificial Sequence
  Description of Artificial Sequence: Synthetic oligonucleotide
aggggagagccuucauggc

SEQ ID NO: 1501264 - RNA, 19 nt, Artificial Sequence
  Description of Artificial Sequence: Synthetic oligonucleotide
accguguccucauucacgu

SEQ ID NO: 1501265 - RNA, 19 nt, Artificial Sequence
  Description of Artificial Sequence: Synthetic oligonucleotide
gauuaccuggucucgagcu

SEQ ID NO: 1501266 - RNA, 19 nt, Artificial Sequence
  Description of Artificial Sequence: Synthetic oligonucleotide
augagauuaccuggucucg

SEQ ID NO: 1501267 - RNA, 19 nt, Artificial Sequence
  Description of Artificial Sequence: Synthetic oligonucleotide
agacuauuuauuagggccu

SEQ ID NO: 1501268 - RNA, 19 nt, Artificial Sequence
  Description of Artificial Sequence: Synthetic oligonucleotide
guagagacuccugagagaa

SEQ ID NO: 1501269 - RNA, 19 nt, Artificial Sequence
  Description of Artificial Sequence: Synthetic oligonucleotide
aaguauucagugggagcag

SEQ ID NO: 1501270 - RNA, 19 nt, Artificial Sequence
  Description of Artificial Sequence: Synthetic oligonucleotide
guaauccaucagcacagug

SEQ ID NO: 1501271 - RNA, 19 nt, Artificial Sequence
  Description of Artificial Sequence: Synthetic oligonucleotide
agcgaacaauccucucuac

SEQ ID NO: 1501272 - RNA, 19 nt, Artificial Sequence
  Description of Artificial Sequence: Synthetic oligonucleotide
gcaucaagagggcagggag

SEQ ID NO: 1501273 - RNA, 19 nt, Artificial Sequence
  Description of Artificial Sequence: Synthetic oligonucleotide
guccuaggcuugcagagcc

SEQ ID NO: 1501274 - RNA, 19 nt, Artificial Sequence
  Description of Artificial Sequence: Synthetic oligonucleotide
ugagguguccaguuuguuu

SEQ ID NO: 1501275 - RNA, 19 nt, Artificial Sequence
  Description of Artificial Sequence: Synthetic oligonucleotide
guaauaugaguccaccacu

SEQ ID NO: 1501276 - RNA, 19 nt, Artificial Sequence
  Description of Artificial Sequence: Synthetic oligonucleotide
aaggucaguucugcagagg

SEQ ID NO: 1501277 - RNA, 19 nt, Artificial Sequence
  Description of Artificial Sequence: Synthetic oligonucleotide
cuaucauccuugauuccuc

SEQ ID NO: 1501278 - RNA, 19 nt, Artificial Sequence
  Description of Artificial Sequence: Synthetic oligonucleotide
cauaccugcugaccugagg

SEQ ID NO: 1501279 - RNA, 19 nt, Artificial Sequence
  Description of Artificial Sequence: Synthetic oligonucleotide
ugcuuuagggucccaccac

SEQ ID NO: 1501280 - RNA, 19 nt, Artificial Sequence
  Description of Artificial Sequence: Synthetic oligonucleotide
aaguagagcuggucccuca

SEQ ID NO: 1501281 - RNA, 19 nt, Artificial Sequence
  Description of Artificial Sequence: Synthetic oligonucleotide
ugcauguggagcgagguuu

SEQ ID NO: 1501282 - RNA, 19 nt, Artificial Sequence
  Description of Artificial Sequence: Synthetic oligonucleotide
gacuauuuauuagggccug

SEQ ID NO: 1501283 - RNA, 19 nt, Artificial Sequence
  Description of Artificial Sequence: Synthetic oligonucleotide
uacagcccauguuggggcg

SEQ ID NO: 1501284 - RNA, 19 nt, Artificial Sequence
  Description of Artificial Sequence: Synthetic oligonucleotide
uauugcuuuagggucccac

SEQ ID NO: 1501285 - RNA, 19 nt, Artificial Sequence
  Description of Artificial Sequence: Synthetic oligonucleotide
agccuaaggugcuauugcu

SEQ ID NO: 1501286 - RNA, 19 nt, Artificial Sequence
  Description of Artificial Sequence: Synthetic oligonucleotide
ucaaguguacuagggacua

SEQ ID NO: 1501287 - RNA, 19 nt, Artificial Sequence
  Description of Artificial Sequence: Synthetic oligonucleotide
uuugggaguugggaggcgc

SEQ ID NO: 1501288 - RNA, 19 nt, Artificial Sequence
  Description of Artificial Sequence: Synthetic oligonucleotide
gguggauuaucaguguugc

SEQ ID NO: 1501289 - RNA, 19 nt, Artificial Sequence
  Description of Artificial Sequence: Synthetic oligonucleotide
ucuggggaguugauaggcu

SEQ ID NO: 1501290 - RNA, 19 nt, Artificial Sequence
  Description of Artificial Sequence: Synthetic oligonucleotide
augaugcagcgaacaaucc

SEQ ID NO: 1501291 - RNA, 19 nt, Artificial Sequence
  Description of Artificial Sequence: Synthetic oligonucleotide
uugccucuugacgaggcag

SEQ ID NO: 1501292 - RNA, 19 nt, Artificial Sequence
  Description of Artificial Sequence: Synthetic oligonucleotide
uuaccuggucucgagcuca

SEQ ID NO: 1501293 - RNA, 19 nt, Artificial Sequence
  Description of Artificial Sequence: Synthetic oligonucleotide
ugcacugugugaugaugga

SEQ ID NO: 1501294 - RNA, 19 nt, Artificial Sequence
  Description of Artificial Sequence: Synthetic oligonucleotide
ucuggugguagagacuccu

SEQ ID NO: 1501295 - RNA, 19 nt, Artificial Sequence
  Description of Artificial Sequence: Synthetic oligonucleotide
acuauuuauuagggccugg

SEQ ID NO: 1501296 - RNA, 19 nt, Artificial Sequence
  Description of Artificial Sequence: Synthetic oligonucleotide
uggguaguuuagguagagg

SEQ ID NO: 1501297 - RNA, 19 nt, Artificial Sequence
  Description of Artificial Sequence: Synthetic oligonucleotide
uccuucacuguccccuagc

SEQ ID NO: 1501298 - RNA, 19 nt, Artificial Sequence
  Description of Artificial Sequence: Synthetic oligonucleotide
uccauacccuggcaaugcc

SEQ ID NO: 1501299 - RNA, 19 nt, Artificial Sequence
  Description of Artificial Sequence: Synthetic oligonucleotide
guaagaggaugagauuacc

SEQ ID NO: 1501300 - RNA, 19 nt, Artificial Sequence
  Description of Artificial Sequence: Synthetic oligonucleotide
guaguuuagguagagggua

SEQ ID NO: 1501301 - RNA, 19 nt, Artificial Sequence
  Description of Artificial Sequence: Synthetic oligonucleotide
caaggucaguucugcagag

SEQ ID NO: 1501302 - RNA, 19 nt, Artificial Sequence
  Description of Artificial Sequence: Synthetic oligonucleotide
ggugcuauugcuuuagggu

SEQ ID NO: 1501303 - RNA, 19 nt, Artificial Sequence
  Description of Artificial Sequence: Synthetic oligonucleotide
gagcgagccucucaauggc

SEQ ID NO: 1501304 - RNA, 19 nt, Artificial Sequence
  Description of Artificial Sequence: Synthetic oligonucleotide
ugugcggcuagcgguaacc

SEQ ID NO: 1501305 - RNA, 19 nt, Artificial Sequence
  Description of Artificial Sequence: Synthetic oligonucleotide
guuuagugggcugcagcgg

SEQ ID NO: 1501306 - RNA, 19 nt, Artificial Sequence
  Description of Artificial Sequence: Synthetic oligonucleotide
gauaggcuuggguaguuua

SEQ ID NO: 1501307 - RNA, 19 nt, Artificial Sequence
  Description of Artificial Sequence: Synthetic oligonucleotide
ugagauuaccuggucucga

SEQ ID NO: 1501308 - RNA, 19 nt, Artificial Sequence
  Description of Artificial Sequence: Synthetic oligonucleotide
ucugcacugaguggguggc

SEQ ID NO: 1501309 - RNA, 19 nt, Artificial Sequence
  Description of Artificial Sequence: Synthetic oligonucleotide
uuugccucuugacgaggca

SEQ ID NO: 1501310 - RNA, 19 nt, Artificial Sequence
  Description of Artificial Sequence: Synthetic oligonucleotide
gccuccuggguuuaguggg

SEQ ID NO: 1501311 - RNA, 19 nt, Artificial Sequence
  Description of Artificial Sequence: Synthetic oligonucleotide
uagcgguaaccuuucuucu

SEQ ID NO: 1501312 - RNA, 19 nt, Artificial Sequence
  Description of Artificial Sequence: Synthetic oligonucleotide
uagggacuaggcuaucauc

SEQ ID NO: 1501313 - RNA, 19 nt, Artificial Sequence
  Description of Artificial Sequence: Synthetic oligonucleotide
auaggcuuggguaguuuag

SEQ ID NO: 1501314 - RNA, 19 nt, Artificial Sequence
  Description of Artificial Sequence: Synthetic oligonucleotide
gcuuuagggucccaccacg

SEQ ID NO: 1501315 - RNA, 19 nt, Artificial Sequence
  Description of Artificial Sequence: Synthetic oligonucleotide
cagaucaugaagccuacaa

SEQ ID NO: 1501316 - RNA, 19 nt, Artificial Sequence
  Description of Artificial Sequence: Synthetic oligonucleotide
agaaggggaaguauucagu

SEQ ID NO: 1501317 - RNA, 19 nt, Artificial Sequence
  Description of Artificial Sequence: Synthetic oligonucleotide
gagacuugccucacauacc

SEQ ID NO: 1501318 - RNA, 19 nt, Artificial Sequence
  Description of Artificial Sequence: Synthetic oligonucleotide
ucacgucaucgucuucaag

SEQ ID NO: 1501319 - RNA, 19 nt, Artificial Sequence
  Description of Artificial Sequence: Synthetic oligonucleotide
ucugagccccuagaugugc

SEQ ID NO: 1501320 - RNA, 19 nt, Artificial Sequence
  Description of Artificial Sequence: Synthetic oligonucleotide
agggagacuugccucacau

SEQ ID NO: 1501321 - RNA, 19 nt, Artificial Sequence
  Description of Artificial Sequence: Synthetic oligonucleotide
cauggcuguccauacccug

SEQ ID NO: 1501322 - RNA, 19 nt, Artificial Sequence
  Description of Artificial Sequence: Synthetic oligonucleotide
uuagugggcugcagcggug

SEQ ID NO: 1501323 - RNA, 19 nt, Artificial Sequence
  Description of Artificial Sequence: Synthetic oligonucleotide
ugcccagugaagcccuggc

SEQ ID NO: 1501324 - RNA, 19 nt, Artificial Sequence
  Description of Artificial Sequence: Synthetic oligonucleotide
augaguccaccacugccca

SEQ ID NO: 1501325 - RNA, 19 nt, Artificial Sequence
  Description of Artificial Sequence: Synthetic oligonucleotide
uagagacuccugagagaag

SEQ ID NO: 1501326 - RNA, 19 nt, Artificial Sequence
  Description of Artificial Sequence: Synthetic oligonucleotide
gugguuccgacaugaggcc

SEQ ID NO: 1501327 - RNA, 19 nt, Artificial Sequence
  Description of Artificial Sequence: Synthetic oligonucleotide
caagaugcacugugugaug

SEQ ID NO: 1501328 - RNA, 19 nt, Artificial Sequence
  Description of Artificial Sequence: Synthetic oligonucleotide
ugcaucaagagggcaggga

SEQ ID NO: 1501329 - RNA, 19 nt, Artificial Sequence
  Description of Artificial Sequence: Synthetic oligonucleotide
ggccucuuccucuagugcc

SEQ ID NO: 1501330 - RNA, 19 nt, Artificial Sequence
  Description of Artificial Sequence: Synthetic oligonucleotide
cugagccccuagaugugcg

SEQ ID NO: 1501331 - RNA, 19 nt, Artificial Sequence
  Description of Artificial Sequence: Synthetic oligonucleotide
agguggauuaucaguguug

SEQ ID NO: 1501332 - RNA, 19 nt, Artificial Sequence
  Description of Artificial Sequence: Synthetic oligonucleotide
acuaggcuaucauccuuga

SEQ ID NO: 1501333 - RNA, 19 nt, Artificial Sequence
  Description of Artificial Sequence: Synthetic oligonucleotide
gaacaauccucucuaccgu

SEQ ID NO: 1501334 - RNA, 19 nt, Artificial Sequence
  Description of Artificial Sequence: Synthetic oligonucleotide
uguccuaggcuugcagagc

SEQ ID NO: 1501335 - RNA, 19 nt, Artificial Sequence
  Description of Artificial Sequence: Synthetic oligonucleotide
gaagccuacaaggcccaug

SEQ ID NO: 1501336 - RNA, 19 nt, Artificial Sequence
  Description of Artificial Sequence: Synthetic oligonucleotide
gcaaccuguuggcagguag

SEQ ID NO: 1501337 - RNA, 19 nt, Artificial Sequence
  Description of Artificial Sequence: Synthetic oligonucleotide
gagcacguggcagaucaug

SEQ ID NO: 1501338 - RNA, 19 nt, Artificial Sequence
  Description of Artificial Sequence: Synthetic oligonucleotide
gguaaccuuucuucuugag

SEQ ID NO: 1501339 - RNA, 19 nt, Artificial Sequence
  Description of Artificial Sequence: Synthetic oligonucleotide
cucuagugcccaaggucag

SEQ ID NO: 1501340 - RNA, 19 nt, Artificial Sequence
  Description of Artificial Sequence: Synthetic oligonucleotide
agaggguaagaggaugaga

SEQ ID NO: 1501341 - RNA, 19 nt, Artificial Sequence
  Description of Artificial Sequence: Synthetic oligonucleotide
gguagaggguaagaggaug

SEQ ID NO: 1501342 - RNA, 19 nt, Artificial Sequence
  Description of Artificial Sequence: Synthetic oligonucleotide
caaugccugcugguaaucc

SEQ ID NO: 1501343 - RNA, 19 nt, Artificial Sequence
  Description of Artificial Sequence: Synthetic oligonucleotide
auguggagcgagguuuggg

SEQ ID NO: 1501344 - RNA, 19 nt, Artificial Sequence
  Description of Artificial Sequence: Synthetic oligonucleotide
cauuugccucuugacgagg

SEQ ID NO: 1501345 - RNA, 19 nt, Artificial Sequence
  Description of Artificial Sequence: Synthetic oligonucleotide
uugcaucaagagggcaggg

SEQ ID NO: 1501346 - RNA, 19 nt, Artificial Sequence
  Description of Artificial Sequence: Synthetic oligonucleotide
guggauuaucaguguugcc

SEQ ID NO: 1501347 - RNA, 19 nt, Artificial Sequence
  Description of Artificial Sequence: Synthetic oligonucleotide
ugcccaaggucaguucugc

SEQ ID NO: 1501348 - RNA, 19 nt, Artificial Sequence
  Description of Artificial Sequence: Synthetic oligonucleotide
uugggaguugggaggcgcu

SEQ ID NO: 1501349 - RNA, 19 nt, Artificial Sequence
  Description of Artificial Sequence: Synthetic oligonucleotide
cuaccguguccucauucac

SEQ ID NO: 1501350 - RNA, 19 nt, Artificial Sequence
  Description of Artificial Sequence: Synthetic oligonucleotide
gcgaacaauccucucuacc

SEQ ID NO: 1501351 - RNA, 19 nt, Artificial Sequence
  Description of Artificial Sequence: Synthetic oligonucleotide
agagcauguacagcccaug

SEQ ID NO: 1501352 - RNA, 19 nt, Artificial Sequence
  Description of Artificial Sequence: Synthetic oligonucleotide
augauggaaggggcguccg

SEQ ID NO: 1501353 - RNA, 19 nt, Artificial Sequence
  Description of Artificial Sequence: Synthetic oligonucleotide
ggggcguccguccugcagg

SEQ ID NO: 1501354 - RNA, 19 nt, Artificial Sequence
  Description of Artificial Sequence: Synthetic oligonucleotide
uucacgucaucgucuucaa

SEQ ID NO: 1501355 - RNA, 19 nt, Artificial Sequence
  Description of Artificial Sequence: Synthetic oligonucleotide
gaaggggcguccguccugc

SEQ ID NO: 1501356 - RNA, 19 nt, Artificial Sequence
  Description of Artificial Sequence: Synthetic oligonucleotide
gacgaggcagcccugggcu

SEQ ID NO: 1501357 - RNA, 19 nt, Artificial Sequence
  Description of Artificial Sequence: Synthetic oligonucleotide
ugauggaaggggcguccgu

SEQ ID NO: 1501358 - RNA, 19 nt, Artificial Sequence
  Description of Artificial Sequence: Synthetic oligonucleotide
cuuggguaguuuagguaga

SEQ ID NO: 1501359 - RNA, 19 nt, Artificial Sequence
  Description of Artificial Sequence: Synthetic oligonucleotide
cucuaccguguccucauuc

SEQ ID NO: 1501360 - RNA, 19 nt, Artificial Sequence
  Description of Artificial Sequence: Synthetic oligonucleotide
gcgguaaccuuucuucuug

SEQ ID NO: 1501361 - RNA, 19 nt, Artificial Sequence
  Description of Artificial Sequence: Synthetic oligonucleotide
guccauacccuggcaaugc

SEQ ID NO: 1501362 - RNA, 19 nt, Artificial Sequence
  Description of Artificial Sequence: Synthetic oligonucleotide
cuagcauagggacaguaau

SEQ ID NO: 1501363 - RNA, 19 nt, Artificial Sequence
  Description of Artificial Sequence: Synthetic oligonucleotide
ggaggggagagccuucaug

SEQ ID NO: 1501364 - RNA, 19 nt, Artificial Sequence
  Description of Artificial Sequence: Synthetic oligonucleotide
gagggagcgagccucucaa

SEQ ID NO: 1501365 - RNA, 19 nt, Artificial Sequence
  Description of Artificial Sequence: Synthetic oligonucleotide
gggagcgagccucucaaug

SEQ ID NO: 1501366 - RNA, 19 nt, Artificial Sequence
  Description of Artificial Sequence: Synthetic oligonucleotide
uggaaggggcguccguccu

SEQ ID NO: 1501367 - RNA, 19 nt, Artificial Sequence
  Description of Artificial Sequence: Synthetic oligonucleotide
agcgguaaccuuucuucuu

SEQ ID NO: 1501368 - RNA, 19 nt, Artificial Sequence
  Description of Artificial Sequence: Synthetic oligonucleotide
ggauuaucaguguugccua

SEQ ID NO: 1501369 - RNA, 19 nt, Artificial Sequence
  Description of Artificial Sequence: Synthetic oligonucleotide
ggagccuaaggugcuauug

SEQ ID NO: 1501370 - RNA, 19 nt, Artificial Sequence
  Description of Artificial Sequence: Synthetic oligonucleotide
ucuugacgaggcagcccug

SEQ ID NO: 1501371 - RNA, 19 nt, Artificial Sequence
  Description of Artificial Sequence: Synthetic oligonucleotide
auguuggggcggcuccagg

SEQ ID NO: 1501372 - RNA, 19 nt, Artificial Sequence
  Description of Artificial Sequence: Synthetic oligonucleotide
ccucuagugcccaagguca

SEQ ID NO: 1501373 - RNA, 19 nt, Artificial Sequence
  Description of Artificial Sequence: Synthetic oligonucleotide
gguggcucgagggagcgag

SEQ ID NO: 1501374 - RNA, 19 nt, Artificial Sequence
  Description of Artificial Sequence: Synthetic oligonucleotide
ugguuccgacaugaggccc

SEQ ID NO: 1501375 - RNA, 19 nt, Artificial Sequence
  Description of Artificial Sequence: Synthetic oligonucleotide
ccaggcaaccuguuggcag

SEQ ID NO: 1501376 - RNA, 19 nt, Artificial Sequence
  Description of Artificial Sequence: Synthetic oligonucleotide
gcucugagccccuagaugu

SEQ ID NO: 1501377 - RNA, 19 nt, Artificial Sequence
  Description of Artificial Sequence: Synthetic oligonucleotide
aggguaagaggaugagauu

SEQ ID NO: 1501378 - RNA, 19 nt, Artificial Sequence
  Description of Artificial Sequence: Synthetic oligonucleotide
cuugcagagccaagaugca

SEQ ID NO: 1501379 - RNA, 19 nt, Artificial Sequence
  Description of Artificial Sequence: Synthetic oligonucleotide
augucacuccagauagaag

SEQ ID NO: 1501380 - RNA, 19 nt, Artificial Sequence
  Description of Artificial Sequence: Synthetic oligonucleotide
guugccuagcauagggaca

SEQ ID NO: 1501381 - RNA, 19 nt, Artificial Sequence
  Description of Artificial Sequence: Synthetic oligonucleotide
augugcggcuagcgguaac

SEQ ID NO: 1501382 - RNA, 19 nt, Artificial Sequence
  Description of Artificial Sequence: Synthetic oligonucleotide
ggggaguugauaggcuugg

SEQ ID NO: 1501383 - RNA, 19 nt, Artificial Sequence
  Description of Artificial Sequence: Synthetic oligonucleotide
gguuugggaguugggaggc

SEQ ID NO: 1501384 - RNA, 19 nt, Artificial Sequence
  Description of Artificial Sequence: Synthetic oligonucleotide
aggaguugccucaagugua

SEQ ID NO: 1501385 - RNA, 19 nt, Artificial Sequence
  Description of Artificial Sequence: Synthetic oligonucleotide
agaugcacugugugaugau

SEQ ID NO: 1501386 - RNA, 19 nt, Artificial Sequence
  Description of Artificial Sequence: Synthetic oligonucleotide
caauccucucuaccguguc

SEQ ID NO: 1501387 - RNA, 19 nt, Artificial Sequence
  Description of Artificial Sequence: Synthetic oligonucleotide
ggcuugcagagccaagaug

SEQ ID NO: 1501388 - RNA, 19 nt, Artificial Sequence
  Description of Artificial Sequence: Synthetic oligonucleotide
uccuaggcuugcagagcca

SEQ ID NO: 1501389 - RNA, 19 nt, Artificial Sequence
  Description of Artificial Sequence: Synthetic oligonucleotide
acaauccucucuaccgugu

SEQ ID NO: 1501390 - RNA, 19 nt, Artificial Sequence
  Description of Artificial Sequence: Synthetic oligonucleotide
uuauuagggccugggccuc

SEQ ID NO: 1501391 - RNA, 19 nt, Artificial Sequence
  Description of Artificial Sequence: Synthetic oligonucleotide
ggucccaccacgggcaggg

SEQ ID NO: 1501392 - RNA, 19 nt, Artificial Sequence
  Description of Artificial Sequence: Synthetic oligonucleotide
caguguugcuuccucuuca

SEQ ID NO: 1501393 - RNA, 19 nt, Artificial Sequence
  Description of Artificial Sequence: Synthetic oligonucleotide
cucugagccccuagaugug

SEQ ID NO: 1501394 - RNA, 19 nt, Artificial Sequence
  Description of Artificial Sequence: Synthetic oligonucleotide
gguagagacuccugagaga

SEQ ID NO: 1501395 - RNA, 19 nt, Artificial Sequence
  Description of Artificial Sequence: Synthetic oligonucleotide
cucuugacgaggcagcccu

SEQ ID NO: 1501396 - RNA, 19 nt, Artificial Sequence
  Description of Artificial Sequence: Synthetic oligonucleotide
uggguuuagugggcugcag

SEQ ID NO: 1501397 - RNA, 19 nt, Artificial Sequence
  Description of Artificial Sequence: Synthetic oligonucleotide
gggaccaugucacuccaga

SEQ ID NO: 1501398 - RNA, 19 nt, Artificial Sequence
  Description of Artificial Sequence: Synthetic oligonucleotide
ugcacugaguggguggcua

SEQ ID NO: 1501399 - RNA, 19 nt, Artificial Sequence
  Description of Artificial Sequence: Synthetic oligonucleotide
agccccuagaugugcggcu

SEQ ID NO: 1501400 - RNA, 19 nt, Artificial Sequence
  Description of Artificial Sequence: Synthetic oligonucleotide
gcauagggacaguaauaug

SEQ ID NO: 1501401 - RNA, 19 nt, Artificial Sequence
  Description of Artificial Sequence: Synthetic oligonucleotide
ugcagcgaacaauccucuc

SEQ ID NO: 1501402 - RNA, 19 nt, Artificial Sequence
  Description of Artificial Sequence: Synthetic oligonucleotide
guguacuagggacuaggcu

SEQ ID NO: 1501403 - RNA, 19 nt, Artificial Sequence
  Description of Artificial Sequence: Synthetic oligonucleotide
gucucgagcucagggagac

SEQ ID NO: 1501404 - RNA, 19 nt, Artificial Sequence
  Description of Artificial Sequence: Synthetic oligonucleotide
gagcauguacagcccaugu

SEQ ID NO: 1501405 - RNA, 19 nt, Artificial Sequence
  Description of Artificial Sequence: Synthetic oligonucleotide
caggaguugccucaagugu

SEQ ID NO: 1501406 - RNA, 19 nt, Artificial Sequence
  Description of Artificial Sequence: Synthetic oligonucleotide
aggggcguccguccugcag

SEQ ID NO: 1501407 - RNA, 19 nt, Artificial Sequence
  Description of Artificial Sequence: Synthetic oligonucleotide
gcgagguuugggaaggcag

SEQ ID NO: 1501408 - RNA, 19 nt, Artificial Sequence
  Description of Artificial Sequence: Synthetic oligonucleotide
ccucaacugaggagcaggc

SEQ ID NO: 1501409 - RNA, 19 nt, Artificial Sequence
  Description of Artificial Sequence: Synthetic oligonucleotide
ccuucauggcuguccauac

SEQ ID NO: 1501410 - RNA, 19 nt, Artificial Sequence
  Description of Artificial Sequence: Synthetic oligonucleotide
agccuacaaggcccaugag

SEQ ID NO: 1501411 - RNA, 19 nt, Artificial Sequence
  Description of Artificial Sequence: Synthetic oligonucleotide
uuagggccugggccucuug

SEQ ID NO: 1501412 - RNA, 19 nt, Artificial Sequence
  Description of Artificial Sequence: Synthetic oligonucleotide
acagcccauguuggggcgg

SEQ ID NO: 1501413 - RNA, 19 nt, Artificial Sequence
  Description of Artificial Sequence: Synthetic oligonucleotide
guuugggaguugggaggcg

SEQ ID NO: 1501414 - RNA, 19 nt, Artificial Sequence
  Description of Artificial Sequence: Synthetic oligonucleotide
gacuugccucacauacccc

SEQ ID NO: 1501415 - RNA, 19 nt, Artificial Sequence
  Description of Artificial Sequence: Synthetic oligonucleotide
ccuagaugugcggcuagcg

SEQ ID NO: 1501416 - RNA, 19 nt, Artificial Sequence
  Description of Artificial Sequence: Synthetic oligonucleotide
cagcgaacaauccucucua

SEQ ID NO: 1501417 - RNA, 19 nt, Artificial Sequence
  Description of Artificial Sequence: Synthetic oligonucleotide
caguguugccuagcauagg

SEQ ID NO: 1501418 - RNA, 19 nt, Artificial Sequence
  Description of Artificial Sequence: Synthetic oligonucleotide
cccucaacugaggagcagg

SEQ ID NO: 1501419 - RNA, 19 nt, Artificial Sequence
  Description of Artificial Sequence: Synthetic oligonucleotide
uucaagcucuggggaguug

SEQ ID NO: 1501420 - RNA, 19 nt, Artificial Sequence
  Description of Artificial Sequence: Synthetic oligonucleotide
ucccucaacugaggagcag

SEQ ID NO: 1501421 - RNA, 19 nt, Artificial Sequence
  Description of Artificial Sequence: Synthetic oligonucleotide
guggguggcuacagccugg

SEQ ID NO: 1501422 - RNA, 19 nt, Artificial Sequence
  Description of Artificial Sequence: Synthetic oligonucleotide
ccaaggucaguucugcaga

SEQ ID NO: 1501423 - RNA, 19 nt, Artificial Sequence
  Description of Artificial Sequence: Synthetic oligonucleotide
ggcuaucauccuugauucc

SEQ ID NO: 1501424 - RNA, 19 nt, Artificial Sequence
  Description of Artificial Sequence: Synthetic oligonucleotide
ggccaugucuucauaccug

SEQ ID NO: 1501425 - RNA, 19 nt, Artificial Sequence
  Description of Artificial Sequence: Synthetic oligonucleotide
agcgagguuugggaaggca

SEQ ID NO: 1501426 - RNA, 19 nt, Artificial Sequence
  Description of Artificial Sequence: Synthetic oligonucleotide
ggaguugccucaaguguac

SEQ ID NO: 1501427 - RNA, 19 nt, Artificial Sequence
  Description of Artificial Sequence: Synthetic oligonucleotide
gcuaucauccuugauuccu

SEQ ID NO: 1501428 - RNA, 19 nt, Artificial Sequence
  Description of Artificial Sequence: Synthetic oligonucleotide
cuccuucacuguccccuag

SEQ ID NO: 1501429 - RNA, 19 nt, Artificial Sequence
  Description of Artificial Sequence: Synthetic oligonucleotide
caggcugugguuccgacau

SEQ ID NO: 1501430 - RNA, 19 nt, Artificial Sequence
  Description of Artificial Sequence: Synthetic oligonucleotide
ccucuugcaucaagagggc

SEQ ID NO: 1501431 - RNA, 19 nt, Artificial Sequence
  Description of Artificial Sequence: Synthetic oligonucleotide
gguaguuuagguagagggu

SEQ ID NO: 1501432 - RNA, 19 nt, Artificial Sequence
  Description of Artificial Sequence: Synthetic oligonucleotide
ugcggcuagcgguaaccuu

SEQ ID NO: 1501433 - RNA, 19 nt, Artificial Sequence
  Description of Artificial Sequence: Synthetic oligonucleotide
guugauaggcuuggguagu

SEQ ID NO: 1501434 - RNA, 19 nt, Artificial Sequence
  Description of Artificial Sequence: Synthetic oligonucleotide
uguccccuagcaucuccuu

SEQ ID NO: 1501435 - RNA, 19 nt, Artificial Sequence
  Description of Artificial Sequence: Synthetic oligonucleotide
gcagcgaacaauccucucu

SEQ ID NO: 1501436 - RNA, 19 nt, Artificial Sequence
  Description of Artificial Sequence: Synthetic oligonucleotide
cagccugggaggaguggug

SEQ ID NO: 1501437 - RNA, 19 nt, Artificial Sequence
  Description of Artificial Sequence: Synthetic oligonucleotide
ggagugguggcucgaggga

SEQ ID NO: 1501438 - RNA, 19 nt, Artificial Sequence
  Description of Artificial Sequence: Synthetic oligonucleotide
uggcuacagccugggagga

SEQ ID NO: 1501439 - RNA, 19 nt, Artificial Sequence
  Description of Artificial Sequence: Synthetic oligonucleotide
augccugcugguaauccau

SEQ ID NO: 1501440 - RNA, 19 nt, Artificial Sequence
  Description of Artificial Sequence: Synthetic oligonucleotide
gucacuccagauagaagua

SEQ ID NO: 1501441 - RNA, 19 nt, Artificial Sequence
  Description of Artificial Sequence: Synthetic oligonucleotide
uauuagggccugggccucu

SEQ ID NO: 1501442 - RNA, 19 nt, Artificial Sequence
  Description of Artificial Sequence: Synthetic oligonucleotide
gugaugauggaaggggcgu

SEQ ID NO: 1501443 - RNA, 19 nt, Artificial Sequence
  Description of Artificial Sequence: Synthetic oligonucleotide
ccgacaugaggcccugggg

SEQ ID NO: 1501444 - RNA, 19 nt, Artificial Sequence
  Description of Artificial Sequence: Synthetic oligonucleotide
agaugugcggcuagcggua

SEQ ID NO: 1501445 - RNA, 19 nt, Artificial Sequence
  Description of Artificial Sequence: Synthetic oligonucleotide
guguugccuagcauaggga

SEQ ID NO: 1501446 - RNA, 19 nt, Artificial Sequence
  Description of Artificial Sequence: Synthetic oligonucleotide
cuacaaggcccaugaggaa

SEQ ID NO: 1501447 - RNA, 19 nt, Artificial Sequence
  Description of Artificial Sequence: Synthetic oligonucleotide
gcguccguccugcaggcug

SEQ ID NO: 1501448 - RNA, 19 nt, Artificial Sequence
  Description of Artificial Sequence: Synthetic oligonucleotide
uccucucuaccguguccuc

SEQ ID NO: 1501449 - RNA, 19 nt, Artificial Sequence
  Description of Artificial Sequence: Synthetic oligonucleotide
cauucacgucaucgucuuc

SEQ ID NO: 1501450 - RNA, 19 nt, Artificial Sequence
  Description of Artificial Sequence: Synthetic oligonucleotide
gugcccaaggucaguucug

SEQ ID NO: 1501451 - RNA, 19 nt, Artificial Sequence
  Description of Artificial Sequence: Synthetic oligonucleotide
cccauguuggggcggcucc

SEQ ID NO: 1501452 - RNA, 19 nt, Artificial Sequence
  Description of Artificial Sequence: Synthetic oligonucleotide
ccuagcauagggacaguaa

SEQ ID NO: 1501453 - RNA, 19 nt, Artificial Sequence
  Description of Artificial Sequence: Synthetic oligonucleotide
uuccgacaugaggcccugg

SEQ ID NO: 1501454 - RNA, 19 nt, Artificial Sequence
  Description of Artificial Sequence: Synthetic oligonucleotide
ucucuaccguguccucauu

SEQ ID NO: 1501455 - RNA, 19 nt, Artificial Sequence
  Description of Artificial Sequence: Synthetic oligonucleotide
ggcuuggguaguuuaggua

SEQ ID NO: 1501456 - RNA, 19 nt, Artificial Sequence
  Description of Artificial Sequence: Synthetic oligonucleotide
gcgagccucucaauggcag

SEQ ID NO: 1501457 - RNA, 19 nt, Artificial Sequence
  Description of Artificial Sequence: Synthetic oligonucleotide
ggggaacaguguugcuucc

SEQ ID NO: 1501458 - RNA, 19 nt, Artificial Sequence
  Description of Artificial Sequence: Synthetic oligonucleotide
guacuagggacuaggcuau

SEQ ID NO: 1501459 - RNA, 19 nt, Artificial Sequence
  Description of Artificial Sequence: Synthetic oligonucleotide
cugggaccaugucacucca

SEQ ID NO: 1501460 - RNA, 19 nt, Artificial Sequence
  Description of Artificial Sequence: Synthetic oligonucleotide
agcgagccucucaauggca

SEQ ID NO: 1501461 - RNA, 19 nt, Artificial Sequence
  Description of Artificial Sequence: Synthetic oligonucleotide
ccuguccuaggcuugcaga

SEQ ID NO: 1501462 - RNA, 19 nt, Artificial Sequence
  Description of Artificial Sequence: Synthetic oligonucleotide
gcccagugaagcccuggcc

SEQ ID NO: 1501463 - RNA, 19 nt, Artificial Sequence
  Description of Artificial Sequence: Synthetic oligonucleotide
gggaguugauaggcuuggg

SEQ ID NO: 1501464 - RNA, 19 nt, Artificial Sequence
  Description of Artificial Sequence: Synthetic oligonucleotide
ccuccuggguuuagugggc

SEQ ID NO: 1501465 - RNA, 19 nt, Artificial Sequence
  Description of Artificial Sequence: Synthetic oligonucleotide
gcauguggagcgagguuug

SEQ ID NO: 1501466 - RNA, 19 nt, Artificial Sequence
  Description of Artificial Sequence: Synthetic oligonucleotide
gaguggguggcuacagccu

SEQ ID NO: 1501467 - RNA, 19 nt, Artificial Sequence
  Description of Artificial Sequence: Synthetic oligonucleotide
guuccgacaugaggcccug

SEQ ID NO: 1501468 - RNA, 19 nt, Artificial Sequence
  Description of Artificial Sequence: Synthetic oligonucleotide
gguagggaaggaaaagaau

SEQ ID NO: 1501469 - RNA, 19 nt, Artificial Sequence
  Description of Artificial Sequence: Synthetic oligonucleotide
cagugaagcccuggccaug

SEQ ID NO: 1501470 - RNA, 19 nt, Artificial Sequence
  Description of Artificial Sequence: Synthetic oligonucleotide
cauuggcuucauuuuggau

SEQ ID NO: 1501471 - RNA, 19 nt, Artificial Sequence
  Description of Artificial Sequence: Synthetic oligonucleotide
agggagcgagccucucaau

SEQ ID NO: 1501472 - RNA, 19 nt, Artificial Sequence
  Description of Artificial Sequence: Synthetic oligonucleotide
cagcccauguuggggcggc

SEQ ID NO: 1501473 - RNA, 19 nt, Artificial Sequence
  Description of Artificial Sequence: Synthetic oligonucleotide
aaggggcguccguccugca

SEQ ID NO: 1501474 - RNA, 19 nt, Artificial Sequence
  Description of Artificial Sequence: Synthetic oligonucleotide
cucucuaccguguccucau

SEQ ID NO: 1501475 - RNA, 19 nt, Artificial Sequence
  Description of Artificial Sequence: Synthetic oligonucleotide
gagcgagguuugggaaggc

SEQ ID NO: 1501476 - RNA, 19 nt, Artificial Sequence
  Description of Artificial Sequence: Synthetic oligonucleotide
ugaagccuacaaggcccau

SEQ ID NO: 1501477 - RNA, 19 nt, Artificial Sequence
  Description of Artificial Sequence: Synthetic oligonucleotide
gcucgagggagcgagccuc

SEQ ID NO: 1501478 - RNA, 19 nt, Artificial Sequence
  Description of Artificial Sequence: Synthetic oligonucleotide
cuggguuuagugggcugca

SEQ ID NO: 1501479 - RNA, 19 nt, Artificial Sequence
  Description of Artificial Sequence: Synthetic oligonucleotide
gcgccuccuggguuuagug

SEQ ID NO: 1501480 - RNA, 19 nt, Artificial Sequence
  Description of Artificial Sequence: Synthetic oligonucleotide
gggacuaggcuaucauccu

SEQ ID NO: 1501481 - RNA, 19 nt, Artificial Sequence
  Description of Artificial Sequence: Synthetic oligonucleotide
cccuggcaaugccugcugg

SEQ ID NO: 1501482 - RNA, 19 nt, Artificial Sequence
  Description of Artificial Sequence: Synthetic oligonucleotide
aggcaaccuguuggcaggu

SEQ ID NO: 1501483 - RNA, 19 nt, Artificial Sequence
  Description of Artificial Sequence: Synthetic oligonucleotide
cugagagaaggggaaguau

SEQ ID NO: 1501484 - RNA, 19 nt, Artificial Sequence
  Description of Artificial Sequence: Synthetic oligonucleotide
uggucccagcugccacacu

SEQ ID NO: 1501485 - RNA, 19 nt, Artificial Sequence
  Description of Artificial Sequence: Synthetic oligonucleotide
gcugugguuccgacaugag

SEQ ID NO: 1501486 - RNA, 19 nt, Artificial Sequence
  Description of Artificial Sequence: Synthetic oligonucleotide
cguccguccugcaggcugg

SEQ ID NO: 1501487 - RNA, 19 nt, Artificial Sequence
  Description of Artificial Sequence: Synthetic oligonucleotide
gaguugggaggcgcuccuc

SEQ ID NO: 1501488 - RNA, 19 nt, Artificial Sequence
  Description of Artificial Sequence: Synthetic oligonucleotide
acgaggcagcccugggcuu

SEQ ID NO: 1501489 - RNA, 19 nt, Artificial Sequence
  Description of Artificial Sequence: Synthetic oligonucleotide
gggcguccguccugcaggc

SEQ ID NO: 1501490 - RNA, 19 nt, Artificial Sequence
  Description of Artificial Sequence: Synthetic oligonucleotide
ccaagaugcacugugugau

SEQ ID NO: 1501491 - RNA, 19 nt, Artificial Sequence
  Description of Artificial Sequence: Synthetic oligonucleotide
ccucuugacgaggcagccc

SEQ ID NO: 1501492 - RNA, 19 nt, Artificial Sequence
  Description of Artificial Sequence: Synthetic oligonucleotide
gccuucauggcuguccaua

SEQ ID NO: 1501493 - RNA, 19 nt, Artificial Sequence
  Description of Artificial Sequence: Synthetic oligonucleotide
ugccuagcauagggacagu

SEQ ID NO: 1501494 - RNA, 19 nt, Artificial Sequence
  Description of Artificial Sequence: Synthetic oligonucleotide
ggcuguccaguggagggga

SEQ ID NO: 1501495 - RNA, 19 nt, Artificial Sequence
  Description of Artificial Sequence: Synthetic oligonucleotide
cugcacugucccuucuccu

SEQ ID NO: 1501496 - RNA, 19 nt, Artificial Sequence
  Description of Artificial Sequence: Synthetic oligonucleotide
gggaggcgcuccuccugag

SEQ ID NO: 1501497 - RNA, 19 nt, Artificial Sequence
  Description of Artificial Sequence: Synthetic oligonucleotide
auuagggccugggccucuu

SEQ ID NO: 1501498 - RNA, 19 nt, Artificial Sequence
  Description of Artificial Sequence: Synthetic oligonucleotide
guggcucgagggagcgagc

SEQ ID NO: 1501499 - RNA, 19 nt, Artificial Sequence
  Description of Artificial Sequence: Synthetic oligonucleotide
cccuagaugugcggcuagc

SEQ ID NO: 1501500 - RNA, 19 nt, Artificial Sequence
  Description of Artificial Sequence: Synthetic oligonucleotide
gcuagcgguaaccuuucuu

SEQ ID NO: 1501501 - RNA, 19 nt, Artificial Sequence
  Description of Artificial Sequence: Synthetic oligonucleotide
cuaggcuaucauccuugau

SEQ ID NO: 1501502 - RNA, 19 nt, Artificial Sequence
  Description of Artificial Sequence: Synthetic oligonucleotide
ggucucgagcucagggaga

SEQ ID NO: 1501503 - RNA, 19 nt, Artificial Sequence
  Description of Artificial Sequence: Synthetic oligonucleotide
gguuccgacaugaggcccu

SEQ ID NO: 1501504 - RNA, 19 nt, Artificial Sequence
  Description of Artificial Sequence: Synthetic oligonucleotide
ggacuaggcuaucauccuu

SEQ ID NO: 1501505 - RNA, 19 nt, Artificial Sequence
  Description of Artificial Sequence: Synthetic oligonucleotide
ggaguugggaggcgcuccu

SEQ ID NO: 1501506 - RNA, 19 nt, Artificial Sequence
  Description of Artificial Sequence: Synthetic oligonucleotide
gcagaucaugaagccuaca

SEQ ID NO: 1501507 - RNA, 19 nt, Artificial Sequence
  Description of Artificial Sequence: Synthetic oligonucleotide
cucgagggagcgagccucu

SEQ ID NO: 1501508 - RNA, 19 nt, Artificial Sequence
  Description of Artificial Sequence: Synthetic oligonucleotide
gcccaaggucaguucugca

SEQ ID NO: 1501509 - RNA, 19 nt, Artificial Sequence
  Description of Artificial Sequence: Synthetic oligonucleotide
gguaauccaucagcacagu

SEQ ID NO: 1501510 - RNA, 19 nt, Artificial Sequence
  Description of Artificial Sequence: Synthetic oligonucleotide
ccuaggcuugcagagccaa

SEQ ID NO: 1501511 - RNA, 19 nt, Artificial Sequence
  Description of Artificial Sequence: Synthetic oligonucleotide
ccaugucacuccagauaga

SEQ ID NO: 1501512 - RNA, 19 nt, Artificial Sequence
  Description of Artificial Sequence: Synthetic oligonucleotide
ccugagagaaggggaagua

SEQ ID NO: 1501513 - RNA, 19 nt, Artificial Sequence
  Description of Artificial Sequence: Synthetic oligonucleotide
gcggcuagcgguaaccuuu

SEQ ID NO: 1501514 - RNA, 19 nt, Artificial Sequence
  Description of Artificial Sequence: Synthetic oligonucleotide
ccauacccuggcaaugccu

SEQ ID NO: 1501515 - RNA, 19 nt, Artificial Sequence
  Description of Artificial Sequence: Synthetic oligonucleotide
gccuagcauagggacagua

SEQ ID NO: 1501516 - RNA, 19 nt, Artificial Sequence
  Description of Artificial Sequence: Synthetic oligonucleotide
ccucucuaccguguccuca

SEQ ID NO: 1501517 - RNA, 19 nt, Artificial Sequence
  Description of Artificial Sequence: Synthetic oligonucleotide
gggaacaguguugcuuccu

SEQ ID NO: 1501518 - RNA, 19 nt, Artificial Sequence
  Description of Artificial Sequence: Synthetic oligonucleotide
caaggcccaugaggaagaa

SEQ ID NO: 1501519 - RNA, 19 nt, Artificial Sequence
  Description of Artificial Sequence: Synthetic oligonucleotide
gugcggcuagcgguaaccu

SEQ ID NO: 1501520 - RNA, 19 nt, Artificial Sequence
  Description of Artificial Sequence: Synthetic oligonucleotide
ggagagcugcacugucccu

SEQ ID NO: 1501521 - RNA, 19 nt, Artificial Sequence
  Description of Artificial Sequence: Synthetic oligonucleotide
gggcgagcgcgggccaggg

SEQ ID NO: 1501522 - RNA, 19 nt, Artificial Sequence
  Description of Artificial Sequence: Synthetic oligonucleotide
cugcauguggagcgagguu

SEQ ID NO: 1501523 - RNA, 19 nt, Artificial Sequence
  Description of Artificial Sequence: Synthetic oligonucleotide
cuucaagcucuggggaguu

SEQ ID NO: 1501524 - RNA, 19 nt, Artificial Sequence
  Description of Artificial Sequence: Synthetic oligonucleotide
gggcagucaucaggcucug

SEQ ID NO: 1501525 - RNA, 19 nt, Artificial Sequence
  Description of Artificial Sequence: Synthetic oligonucleotide
cagggcgccuccuggguuu

SEQ ID NO: 1501526 - RNA, 19 nt, Artificial Sequence
  Description of Artificial Sequence: Synthetic oligonucleotide
cggcuagcgguaaccuuuc

SEQ ID NO: 1501527 - RNA, 19 nt, Artificial Sequence
  Description of Artificial Sequence: Synthetic oligonucleotide
gucccaccacgggcagggc

SEQ ID NO: 1501528 - RNA, 19 nt, Artificial Sequence
  Description of Artificial Sequence: Synthetic oligonucleotide
gccuaaggugcuauugcuu

SEQ ID NO: 1501529 - RNA, 19 nt, Artificial Sequence
  Description of Artificial Sequence: Synthetic oligonucleotide
ggcucgagggagcgagccu

SEQ ID NO: 1501530 - RNA, 19 nt, Artificial Sequence
  Description of Artificial Sequence: Synthetic oligonucleotide
ggguggcuacagccuggga

SEQ ID NO: 1501531 - RNA, 19 nt, Artificial Sequence
  Description of Artificial Sequence: Synthetic oligonucleotide
cagggagccuaaggugcua

SEQ ID NO: 1501532 - RNA, 19 nt, Artificial Sequence
  Description of Artificial Sequence: Synthetic oligonucleotide
cgagggagcgagccucuca

SEQ ID NO: 1501533 - RNA, 19 nt, Artificial Sequence
  Description of Artificial Sequence: Synthetic oligonucleotide
guccguccugcaggcugga

SEQ ID NO: 1501534 - RNA, 19 nt, Artificial Sequence
  Description of Artificial Sequence: Synthetic oligonucleotide
cugagguguccaguuuguu

SEQ ID NO: 1501535 - RNA, 19 nt, Artificial Sequence
  Description of Artificial Sequence: Synthetic oligonucleotide
ccauguuggggcggcucca

SEQ ID NO: 1501536 - RNA, 19 nt, Artificial Sequence
  Description of Artificial Sequence: Synthetic oligonucleotide
gccccuagaugugcggcua

SEQ ID NO: 1501537 - RNA, 19 nt, Artificial Sequence
  Description of Artificial Sequence: Synthetic oligonucleotide
ggcuagcgguaaccuuucu

SEQ ID NO: 1501538 - RNA, 19 nt, Artificial Sequence
  Description of Artificial Sequence: Synthetic oligonucleotide
gccagggcgccuccugggu

SEQ ID NO: 1501539 - RNA, 19 nt, Artificial Sequence
  Description of Artificial Sequence: Synthetic oligonucleotide
ggcaaccuguuggcaggua

SEQ ID NO: 1501540 - RNA, 19 nt, Artificial Sequence
  Description of Artificial Sequence: Synthetic oligonucleotide
ggcgccuccuggguuuagu

SEQ ID NO: 1501541 - RNA, 19 nt, Artificial Sequence
  Description of Artificial Sequence: Synthetic oligonucleotide
gggcgccuccuggguuuag

SEQ ID NO: 1501542 - RNA, 19 nt, Artificial Sequence
  Description of Artificial Sequence: Synthetic oligonucleotide
ccagggcgccuccuggguu

SEQ ID NO: 1501543 - RNA, 19 nt, Artificial Sequence
  Description of Artificial Sequence: Synthetic oligonucleotide
ggcguccguccugcaggcu

SEQ ID NO: 1501544 - RNA, 19 nt, Artificial Sequence
  Description of Artificial Sequence: Synthetic oligonucleotide
gcgggccagggcgccuccu

SEQ ID NO: 1501545 - RNA, 19 nt, Artificial Sequence
  Description of Artificial Sequence: Synthetic oligonucleotide
  modified_base (2)..(2): a, c, u, g, unknown or other
  modified_base (4)..(4): a, c, u, g, unknown or other
ananauauauacuaugugc

SEQ ID NO: 1501546 - RNA, 19 nt, Artificial Sequence
  Description of Artificial Sequence: Synthetic oligonucleotide
  modified_base (5)..(5): a, c, u, g, unknown or other
  modified_base (9)..(9): a, c, u, g, unknown or other
  modified_base (11)..(11): a, c, u, g, unknown or other
uauanauananauauauac

SEQ ID NO: 1501547 - RNA, 19 nt, Artificial Sequence
  Description of Artificial Sequence: Synthetic oligonucleotide
  modified_base (7)..(7): a, c, u, g, unknown or other
  modified_base (11)..(11): a, c, u, g, unknown or other
  modified_base (13)..(13): a, c, u, g, unknown or other
uauauanauananauauau

SEQ ID NO: 1501548 - RNA, 19 nt, Artificial Sequence
  Description of Artificial Sequence: Synthetic oligonucleotide
  modified_base (2)..(2): a, c, u, g, unknown or other
anauauauacuaugugccc

SEQ ID NO: 1501549 - RNA, 19 nt, Artificial Sequence
  Description of Artificial Sequence: Synthetic oligonucleotide
  modified_base (9)..(9): a, c, u, g, unknown or other
  modified_base (13)..(13): a, c, u, g, unknown or other
  modified_base (15)..(15): a, c, u, g, unknown or other
uauauauanauananauau

SEQ ID NO: 1501550 - RNA, 19 nt, Artificial Sequence
  Description of Artificial Sequence: Synthetic oligonucleotide
  modified_base (3)..(3): a, c, u, g, unknown or other
  modified_base (7)..(7): a, c, u, g, unknown or other
  modified_base (9)..(9): a, c, u, g, unknown or other
uanauananauauauacua

SEQ ID NO: 1501551 - RNA, 19 nt, Artificial Sequence
  Description of Artificial Sequence: Synthetic oligonucleotide
  modified_base (19)..(19): a, c, u, g, unknown or other
aauuccuagauauauauan

SEQ ID NO: 1501552 - RNA, 19 nt, Artificial Sequence
  Description of Artificial Sequence: Synthetic oligonucleotide
  modified_base (3)..(3): a, c, u, g, unknown or other
  modified_base (5)..(5): a, c, u, g, unknown or other
uananauauauacuaugug

SEQ ID NO: 1501553 - RNA, 19 nt, Artificial Sequence
  Description of Artificial Sequence: Synthetic oligonucleotide
aacuuuauaaccagcaccg

SEQ ID NO: 1501554 - RNA, 19 nt, Artificial Sequence
  Description of Artificial Sequence: Synthetic oligonucleotide
uuuccuaaggucagaaugg

SEQ ID NO: 1501555 - RNA, 19 nt, Artificial Sequence
  Description of Artificial Sequence: Synthetic oligonucleotide
ucaaaauaaagacaauacu

SEQ ID NO: 1501556 - RNA, 19 nt, Artificial Sequence
  Description of Artificial Sequence: Synthetic oligonucleotide
aaauaaagacaauacuuga

SEQ ID NO: 1501557 - RNA, 19 nt, Artificial Sequence
  Description of Artificial Sequence: Synthetic oligonucleotide
agugggucaauccagacag

SEQ ID NO: 1501558 - RNA, 19 nt, Artificial Sequence
  Description of Artificial Sequence: Synthetic oligonucleotide
agaaacaauuccuagauau

SEQ ID NO: 1501559 - RNA, 19 nt, Artificial Sequence
  Description of Artificial Sequence: Synthetic oligonucleotide
auuuccuaaggucagaaug

SEQ ID NO: 1501560 - RNA, 19 nt, Artificial Sequence
  Description of Artificial Sequence: Synthetic oligonucleotide
aauaacuccuagcacaggu

SEQ ID NO: 1501561 - RNA, 19 nt, Artificial Sequence
  Description of Artificial Sequence: Synthetic oligonucleotide
ugucauaagagcaaucugu

SEQ ID NO: 1501562 - RNA, 19 nt, Artificial Sequence
  Description of Artificial Sequence: Synthetic oligonucleotide
  modified_base (4)..(4): a, c, u, g, unknown or other
  modified_base (8)..(8): a, c, u, g, unknown or other
  modified_base (10)..(10): a, c, u, g, unknown or other
auanauananauauauacu

SEQ ID NO: 1501563 - RNA, 19 nt, Artificial Sequence
  Description of Artificial Sequence: Synthetic oligonucleotide
cuuaggagcagcuauuucc

SEQ ID NO: 1501564 - RNA, 19 nt, Artificial Sequence
  Description of Artificial Sequence: Synthetic oligonucleotide
auuugaaccaccaucuacc

SEQ ID NO: 1501565 - RNA, 19 nt, Artificial Sequence
  Description of Artificial Sequence: Synthetic oligonucleotide
uuuauaaccagcaccgcca

SEQ ID NO: 1501566 - RNA, 19 nt, Artificial Sequence
  Description of Artificial Sequence: Synthetic oligonucleotide
cuuacgauuccauacaaug

SEQ ID NO: 1501567 - RNA, 19 nt, Artificial Sequence
  Description of Artificial Sequence: Synthetic oligonucleotide
ugaaaauagucucaaaaua

SEQ ID NO: 1501568 - RNA, 19 nt, Artificial Sequence
  Description of Artificial Sequence: Synthetic oligonucleotide
uuugauguacgucacguga

SEQ ID NO: 1501569 - RNA, 19 nt, Artificial Sequence
  Description of Artificial Sequence: Synthetic oligonucleotide
ucuaccauugcccaagcug

SEQ ID NO: 1501570 - RNA, 19 nt, Artificial Sequence
  Description of Artificial Sequence: Synthetic oligonucleotide
cauaagagcaaucuguuug

SEQ ID NO: 1501571 - RNA, 19 nt, Artificial Sequence
  Description of Artificial Sequence: Synthetic oligonucleotide
ugcuaaaacuuuauaacca

SEQ ID NO: 1501572 - RNA, 19 nt, Artificial Sequence
  Description of Artificial Sequence: Synthetic oligonucleotide
ucaggaaugcuuauggaug

SEQ ID NO: 1501573 - RNA, 19 nt, Artificial Sequence
  Description of Artificial Sequence: Synthetic oligonucleotide
ugauuuugcauccuaguac

SEQ ID NO: 1501574 - RNA, 19 nt, Artificial Sequence
  Description of Artificial Sequence: Synthetic oligonucleotide
uuugaaacuuccaacaguu

SEQ ID NO: 1501575 - RNA, 19 nt, Artificial Sequence
  Description of Artificial Sequence: Synthetic oligonucleotide
ugaauaacuccuagcacag

SEQ ID NO: 1501576 - RNA, 19 nt, Artificial Sequence
  Description of Artificial Sequence: Synthetic oligonucleotide
uggucaggaaugcuuaugg

SEQ ID NO: 1501577 - RNA, 19 nt, Artificial Sequence
  Description of Artificial Sequence: Synthetic oligonucleotide
accguaugaaaauagucuc

SEQ ID NO: 1501578 - RNA, 19 nt, Artificial Sequence
  Description of Artificial Sequence: Synthetic oligonucleotide
  modified_base (4)..(4): a, c, u, g, unknown or other
  modified_base (6)..(6): a, c, u, g, unknown or other
auananauauauacuaugu

SEQ ID NO: 1501579 - RNA, 19 nt, Artificial Sequence
  Description of Artificial Sequence: Synthetic oligonucleotide
aauggcuuaugaauaacuc

SEQ ID NO: 1501580 - RNA, 19 nt, Artificial Sequence
  Description of Artificial Sequence: Synthetic oligonucleotide
cucaguauuuaucugcacg

SEQ ID NO: 1501581 - RNA, 19 nt, Artificial Sequence
  Description of Artificial Sequence: Synthetic oligonucleotide
uacgauuccauacaaugac

SEQ ID NO: 1501582 - RNA, 19 nt, Artificial Sequence
  Description of Artificial Sequence: Synthetic oligonucleotide
uggcuuaugaauaacuccu

SEQ ID NO: 1501583 - RNA, 19 nt, Artificial Sequence
  Description of Artificial Sequence: Synthetic oligonucleotide
agguaaaacaucuugcggu

SEQ ID NO: 1501584 - RNA, 19 nt, Artificial Sequence
  Description of Artificial Sequence: Synthetic oligonucleotide
cuuaugaauaacuccuagc

SEQ ID NO: 1501585 - RNA, 19 nt, Artificial Sequence
  Description of Artificial Sequence: Synthetic oligonucleotide
uauacuaugugcccuugug

SEQ ID NO: 1501586 - RNA, 19 nt, Artificial Sequence
  Description of Artificial Sequence: Synthetic oligonucleotide
aauccgggaguuuucugac

SEQ ID NO: 1501587 - RNA, 19 nt, Artificial Sequence
  Description of Artificial Sequence: Synthetic oligonucleotide
aaccuaauuucccugauuu

SEQ ID NO: 1501588 - RNA, 19 nt, Artificial Sequence
  Description of Artificial Sequence: Synthetic oligonucleotide
ucacauuugaaccaccauc

SEQ ID NO: 1501589 - RNA, 19 nt, Artificial Sequence
  Description of Artificial Sequence: Synthetic oligonucleotide
uuaaccaugcauagucucc

SEQ ID NO: 1501590 - RNA, 19 nt, Artificial Sequence
  Description of Artificial Sequence: Synthetic oligonucleotide
gauuuugcauccuaguaca

SEQ ID NO: 1501591 - RNA, 19 nt, Artificial Sequence
  Description of Artificial Sequence: Synthetic oligonucleotide
aaauccgggaguuuucuga

SEQ ID NO: 1501592 - RNA, 19 nt, Artificial Sequence
  Description of Artificial Sequence: Synthetic oligonucleotide
aggccgaagaggcugaagc

SEQ ID NO: 1501593 - RNA, 19 nt, Artificial Sequence
  Description of Artificial Sequence: Synthetic oligonucleotide
  modified_base (2)..(2): a, c, u, g, unknown or other
  modified_base (6)..(6): a, c, u, g, unknown or other
  modified_base (8)..(8): a, c, u, g, unknown or other
anauananauauauacuau

SEQ ID NO: 1501594 - RNA, 19 nt, Artificial Sequence
  Description of Artificial Sequence: Synthetic oligonucleotide
guauuuaucugcacggugg

SEQ ID NO: 1501595 - RNA, 19 nt, Artificial Sequence
  Description of Artificial Sequence: Synthetic oligonucleotide
acaauuccuagauauauau

SEQ ID NO: 1501596 - RNA, 19 nt, Artificial Sequence
  Description of Artificial Sequence: Synthetic oligonucleotide
gaggacauugcucucgcgg

SEQ ID NO: 1501597 - RNA, 19 nt, Artificial Sequence
  Description of Artificial Sequence: Synthetic oligonucleotide
uagucucaaaauaaagaca

SEQ ID NO: 1501598 - RNA, 19 nt, Artificial Sequence
  Description of Artificial Sequence: Synthetic oligonucleotide
aaccguaugaaaauagucu

SEQ ID NO: 1501599 - RNA, 19 nt, Artificial Sequence
  Description of Artificial Sequence: Synthetic oligonucleotide
cuuuauaaccagcaccgcc

SEQ ID NO: 1501600 - RNA, 19 nt, Artificial Sequence
  Description of Artificial Sequence: Synthetic oligonucleotide
uuacgauuccauacaauga

SEQ ID NO: 1501601 - RNA, 19 nt, Artificial Sequence
  Description of Artificial Sequence: Synthetic oligonucleotide
cugacuuuucuaaauccgg

SEQ ID NO: 1501602 - RNA, 19 nt, Artificial Sequence
  Description of Artificial Sequence: Synthetic oligonucleotide
  modified_base (16)..(16): a, c, u, g, unknown or other
uccuagauauauauanaua

SEQ ID NO: 1501603 - RNA, 19 nt, Artificial Sequence
  Description of Artificial Sequence: Synthetic oligonucleotide
  modified_base (12)..(12): a, c, u, g, unknown or other
  modified_base (16)..(16): a, c, u, g, unknown or other
  modified_base (18)..(18): a, c, u, g, unknown or other
agauauauauanauanana

SEQ ID NO: 1501604 - RNA, 19 nt, Artificial Sequence
  Description of Artificial Sequence: Synthetic oligonucleotide
acaucuugcgguuggacag

SEQ ID NO: 1501605 - RNA, 19 nt, Artificial Sequence
  Description of Artificial Sequence: Synthetic oligonucleotide
aucagaaccaguguaacug

SEQ ID NO: 1501606 - RNA, 19 nt, Artificial Sequence
  Description of Artificial Sequence: Synthetic oligonucleotide
caaacaauucaccucuggc

SEQ ID NO: 1501607 - RNA, 19 nt, Artificial Sequence
  Description of Artificial Sequence: Synthetic oligonucleotide
  modified_base (14)..(14): a, c, u, g, unknown or other
  modified_base (18)..(18): a, c, u, g, unknown or other
cuagauauauauanauana

SEQ ID NO: 1501608 - RNA, 19 nt, Artificial Sequence
  Description of Artificial Sequence: Synthetic oligonucleotide
ugaaccaccaucuaccauu

SEQ ID NO: 1501609 - RNA, 19 nt, Artificial Sequence
  Description of Artificial Sequence: Synthetic oligonucleotide
  modified_base (17)..(17): a, c, u, g, unknown or other
uuccuagauauauauanau

SEQ ID NO: 1501610 - RNA, 19 nt, Artificial Sequence
  Description of Artificial Sequence: Synthetic oligonucleotide
cuugagaaaugaagcaacc

SEQ ID NO: 1501611 - RNA, 19 nt, Artificial Sequence
  Description of Artificial Sequence: Synthetic oligonucleotide
aaguaagucucgaugcuuc

SEQ ID NO: 1501612 - RNA, 19 nt, Artificial Sequence
  Description of Artificial Sequence: Synthetic oligonucleotide
gacauacuuucgaagaucc

SEQ ID NO: 1501613 - RNA, 19 nt, Artificial Sequence
  Description of Artificial Sequence: Synthetic oligonucleotide
  modified_base (6)..(6): a, c, u, g, unknown or other
  modified_base (10)..(10): a, c, u, g, unknown or other
  modified_base (12)..(12): a, c, u, g, unknown or other
auauanauananauauaua

SEQ ID NO: 1501614 - RNA, 19 nt, Artificial Sequence
  Description of Artificial Sequence: Synthetic oligonucleotide
gagugcuaaaacuuuauaa

SEQ ID NO: 1501615 - RNA, 19 nt, Artificial Sequence
  Description of Artificial Sequence: Synthetic oligonucleotide
uuuaucugcacggugggga

SEQ ID NO: 1501616 - RNA, 19 nt, Artificial Sequence
  Description of Artificial Sequence: Synthetic oligonucleotide
uccugacuuuucuaaaucc

SEQ ID NO: 1501617 - RNA, 19 nt, Artificial Sequence
  Description of Artificial Sequence: Synthetic oligonucleotide
cuugcgguuggacagcacg

SEQ ID NO: 1501618 - RNA, 19 nt, Artificial Sequence
  Description of Artificial Sequence: Synthetic oligonucleotide
auaagagcaaucuguuuga

SEQ ID NO: 1501619 - RNA, 19 nt, Artificial Sequence
  Description of Artificial Sequence: Synthetic oligonucleotide
uguaggaagaacgagcuuu

SEQ ID NO: 1501620 - RNA, 19 nt, Artificial Sequence
  Description of Artificial Sequence: Synthetic oligonucleotide
augagagcgggacacaaug

SEQ ID NO: 1501621 - RNA, 19 nt, Artificial Sequence
  Description of Artificial Sequence: Synthetic oligonucleotide
uaacugaucucuuucccac

SEQ ID NO: 1501622 - RNA, 19 nt, Artificial Sequence
  Description of Artificial Sequence: Synthetic oligonucleotide
ucaauccagacagugacac

SEQ ID NO: 1501623 - RNA, 19 nt, Artificial Sequence
  Description of Artificial Sequence: Synthetic oligonucleotide
gaucuuacgauuccauaca

SEQ ID NO: 1501624 - RNA, 19 nt, Artificial Sequence
  Description of Artificial Sequence: Synthetic oligonucleotide
cagguaaaacaucuugcgg

SEQ ID NO: 1501625 - RNA, 19 nt, Artificial Sequence
  Description of Artificial Sequence: Synthetic oligonucleotide
acacaaugaucuuuggggu

SEQ ID NO: 1501626 - RNA, 19 nt, Artificial Sequence
  Description of Artificial Sequence: Synthetic oligonucleotide
cacgugaauauauagaucu

SEQ ID NO: 1501627 - RNA, 19 nt, Artificial Sequence
  Description of Artificial Sequence: Synthetic oligonucleotide
ccaagggccuuuaagaugg

SEQ ID NO: 1501628 - RNA, 19 nt, Artificial Sequence
  Description of Artificial Sequence: Synthetic oligonucleotide
ugcagguaccuccuuagga

SEQ ID NO: 1501629 - RNA, 19 nt, Artificial Sequence
  Description of Artificial Sequence: Synthetic oligonucleotide
gacaaccguaugaaaauag

SEQ ID NO: 1501630 - RNA, 19 nt, Artificial Sequence
  Description of Artificial Sequence: Synthetic oligonucleotide
gaagauccuccguauauuc

SEQ ID NO: 1501631 - RNA, 19 nt, Artificial Sequence
  Description of Artificial Sequence: Synthetic oligonucleotide
cuuaaccaugcauagucuc

SEQ ID NO: 1501632 - RNA, 19 nt, Artificial Sequence
  Description of Artificial Sequence: Synthetic oligonucleotide
ugaauauauagaucugcuu

SEQ ID NO: 1501633 - RNA, 19 nt, Artificial Sequence
  Description of Artificial Sequence: Synthetic oligonucleotide
uuugaaccaccaucuacca

SEQ ID NO: 1501634 - RNA, 19 nt, Artificial Sequence
  Description of Artificial Sequence: Synthetic oligonucleotide
uuuugauguacgucacgug

SEQ ID NO: 1501635 - RNA, 19 nt, Artificial Sequence
  Description of Artificial Sequence: Synthetic oligonucleotide
aaccaguguaacugaucuc

SEQ ID NO: 1501636 - RNA, 19 nt, Artificial Sequence
  Description of Artificial Sequence: Synthetic oligonucleotide
uacuaugugcccuugugua

SEQ ID NO: 1501637 - RNA, 19 nt, Artificial Sequence
  Description of Artificial Sequence: Synthetic oligonucleotide
ggaucuuacgauuccauac

SEQ ID NO: 1501638 - RNA, 19 nt, Artificial Sequence
  Description of Artificial Sequence: Synthetic oligonucleotide
uccguauauuccuggguag

SEQ ID NO: 1501639 - RNA, 19 nt, Artificial Sequence
  Description of Artificial Sequence: Synthetic oligonucleotide
uguguaugacaaccguaug

SEQ ID NO: 1501640 - RNA, 19 nt, Artificial Sequence
  Description of Artificial Sequence: Synthetic oligonucleotide
ucagggaucuuacgauucc

SEQ ID NO: 1501641 - RNA, 19 nt, Artificial Sequence
  Description of Artificial Sequence: Synthetic oligonucleotide
acgucacgugaauauauag

SEQ ID NO: 1501642 - RNA, 19 nt, Artificial Sequence
  Description of Artificial Sequence: Synthetic oligonucleotide
cuugucgucggcacccucg

SEQ ID NO: 1501643 - RNA, 19 nt, Artificial Sequence
  Description of Artificial Sequence: Synthetic oligonucleotide
ucgaagauccuccguauau

SEQ ID NO: 1501644 - RNA, 19 nt, Artificial Sequence
  Description of Artificial Sequence: Synthetic oligonucleotide
acauugcucucgcggaccc

SEQ ID NO: 1501645 - RNA, 19 nt, Artificial Sequence
  Description of Artificial Sequence: Synthetic oligonucleotide
ugguagugacauacuuucg

SEQ ID NO: 1501646 - RNA, 19 nt, Artificial Sequence
  Description of Artificial Sequence: Synthetic oligonucleotide
gaaccaguguaacugaucu

SEQ ID NO: 1501647 - RNA, 19 nt, Artificial Sequence
  Description of Artificial Sequence: Synthetic oligonucleotide
  modified_base (8)..(8): a, c, u, g, unknown or other
  modified_base (12)..(12): a, c, u, g, unknown or other
  modified_base (14)..(14): a, c, u, g, unknown or other
auauauanauananauaua

SEQ ID NO: 1501648 - RNA, 19 nt, Artificial Sequence
  Description of Artificial Sequence: Synthetic oligonucleotide
augucauaagagcaaucug

SEQ ID NO: 1501649 - RNA, 19 nt, Artificial Sequence
  Description of Artificial Sequence: Synthetic oligonucleotide
agaauggcuuaugaauaac

SEQ ID NO: 1501650 - RNA, 19 nt, Artificial Sequence
  Description of Artificial Sequence: Synthetic oligonucleotide
uacuuucgaagauccuccg

SEQ ID NO: 1501651 - RNA, 19 nt, Artificial Sequence
  Description of Artificial Sequence: Synthetic oligonucleotide
auuuccuucaggauguccu

SEQ ID NO: 1501652 - RNA, 19 nt, Artificial Sequence
  Description of Artificial Sequence: Synthetic oligonucleotide
acgauuccauacaaugacc

SEQ ID NO: 1501653 - RNA, 19 nt, Artificial Sequence
  Description of Artificial Sequence: Synthetic oligonucleotide
auacuaugugcccuugugu

SEQ ID NO: 1501654 - RNA, 19 nt, Artificial Sequence
  Description of Artificial Sequence: Synthetic oligonucleotide
uggccuuaaccaugcauag

SEQ ID NO: 1501655 - RNA, 19 nt, Artificial Sequence
  Description of Artificial Sequence: Synthetic oligonucleotide
aauauuuccuaaggucaga

SEQ ID NO: 1501656 - RNA, 19 nt, Artificial Sequence
  Description of Artificial Sequence: Synthetic oligonucleotide
uugaugcuagcaaggaguc

SEQ ID NO: 1501657 - RNA, 19 nt, Artificial Sequence
  Description of Artificial Sequence: Synthetic oligonucleotide
  modified_base (15)..(15): a, c, u, g, unknown or other
  modified_base (19)..(19): a, c, u, g, unknown or other
ccuagauauauauanauan

SEQ ID NO: 1501658 - RNA, 19 nt, Artificial Sequence
  Description of Artificial Sequence: Synthetic oligonucleotide
auugcucucgcggacccgc

SEQ ID NO: 1501659 - RNA, 19 nt, Artificial Sequence
  Description of Artificial Sequence: Synthetic oligonucleotide
ggaagaacgagcuuucaca

SEQ ID NO: 1501660 - RNA, 19 nt, Artificial Sequence
  Description of Artificial Sequence: Synthetic oligonucleotide
aacgagcuuucacauuuga

SEQ ID NO: 1501661 - RNA, 19 nt, Artificial Sequence
  Description of Artificial Sequence: Synthetic oligonucleotide
ucuaaauccgggaguuuuc

SEQ ID NO: 1501662 - RNA, 19 nt, Artificial Sequence
  Description of Artificial Sequence: Synthetic oligonucleotide
agaguugcacccugugguc

SEQ ID NO: 1501663 - RNA, 19 nt, Artificial Sequence
  Description of Artificial Sequence: Synthetic oligonucleotide
ggucaauccagacagugac

SEQ ID NO: 1501664 - RNA, 19 nt, Artificial Sequence
  Description of Artificial Sequence: Synthetic oligonucleotide
auguacgucacgugaauau

SEQ ID NO: 1501665 - RNA, 19 nt, Artificial Sequence
  Description of Artificial Sequence: Synthetic oligonucleotide
ucacgugaauauauagauc

SEQ ID NO: 1501666 - RNA, 19 nt, Artificial Sequence
  Description of Artificial Sequence: Synthetic oligonucleotide
uugcccaagcuguauauuc

SEQ ID NO: 1501667 - RNA, 19 nt, Artificial Sequence
  Description of Artificial Sequence: Synthetic oligonucleotide
ucucgaugcuucauaaaua

SEQ ID NO: 1501668 - RNA, 19 nt, Artificial Sequence
  Description of Artificial Sequence: Synthetic oligonucleotide
uaacuccuagcacagguuu

SEQ ID NO: 1501669 - RNA, 19 nt, Artificial Sequence
  Description of Artificial Sequence: Synthetic oligonucleotide
uccuccguauauuccuggg

SEQ ID NO: 1501670 - RNA, 19 nt, Artificial Sequence
  Description of Artificial Sequence: Synthetic oligonucleotide
uccuaaggucagaauggcc

SEQ ID NO: 1501671 - RNA, 19 nt, Artificial Sequence
  Description of Artificial Sequence: Synthetic oligonucleotide
ucucguggaggacauugcu

SEQ ID NO: 1501672 - RNA, 19 nt, Artificial Sequence
  Description of Artificial Sequence: Synthetic oligonucleotide
aguacagggaaaaguaagu

SEQ ID NO: 1501673 - RNA, 19 nt, Artificial Sequence
  Description of Artificial Sequence: Synthetic oligonucleotide
auauauacuaugugcccuu

SEQ ID NO: 1501674 - RNA, 19 nt, Artificial Sequence
  Description of Artificial Sequence: Synthetic oligonucleotide
uucacauuugaaccaccau

SEQ ID NO: 1501675 - RNA, 19 nt, Artificial Sequence
  Description of Artificial Sequence: Synthetic oligonucleotide
cucauuguaggaagaacga

SEQ ID NO: 1501676 - RNA, 19 nt, Artificial Sequence
  Description of Artificial Sequence: Synthetic oligonucleotide
ucuuacgauuccauacaau

SEQ ID NO: 1501677 - RNA, 19 nt, Artificial Sequence
  Description of Artificial Sequence: Synthetic oligonucleotide
ugagagcgggacacaauga

SEQ ID NO: 1501678 - RNA, 19 nt, Artificial Sequence
  Description of Artificial Sequence: Synthetic oligonucleotide
aacugaucucuuucccacu

SEQ ID NO: 1501679 - RNA, 19 nt, Artificial Sequence
  Description of Artificial Sequence: Synthetic oligonucleotide
ugacauacuuucgaagauc

SEQ ID NO: 1501680 - RNA, 19 nt, Artificial Sequence
  Description of Artificial Sequence: Synthetic oligonucleotide
gcuuaugaauaacuccuag

SEQ ID NO: 1501681 - RNA, 19 nt, Artificial Sequence
  Description of Artificial Sequence: Synthetic oligonucleotide
gucacgugaauauauagau

SEQ ID NO: 1501682 - RNA, 19 nt, Artificial Sequence
  Description of Artificial Sequence: Synthetic oligonucleotide
uugaccaucccugcaugag

SEQ ID NO: 1501683 - RNA, 19 nt, Artificial Sequence
  Description of Artificial Sequence: Synthetic oligonucleotide
aggacauugcucucgcgga

SEQ ID NO: 1501684 - RNA, 19 nt, Artificial Sequence
  Description of Artificial Sequence: Synthetic oligonucleotide
uucuaaauccgggaguuuu

SEQ ID NO: 1501685 - RNA, 19 nt, Artificial Sequence
  Description of Artificial Sequence: Synthetic oligonucleotide
caccaugguagugacauac

SEQ ID NO: 1501686 - RNA, 19 nt, Artificial Sequence
  Description of Artificial Sequence: Synthetic oligonucleotide
ucuugacuuguaucaggca

SEQ ID NO: 1501687 - RNA, 19 nt, Artificial Sequence
  Description of Artificial Sequence: Synthetic oligonucleotide
uucucguggaggacauugc

SEQ ID NO: 1501688 - RNA, 19 nt, Artificial Sequence
  Description of Artificial Sequence: Synthetic oligonucleotide
ugauguacgucacgugaau

SEQ ID NO: 1501689 - RNA, 19 nt, Artificial Sequence
  Description of Artificial Sequence: Synthetic oligonucleotide
auccgggaguuuucugacc

SEQ ID NO: 1501690 - RNA, 19 nt, Artificial Sequence
  Description of Artificial Sequence: Synthetic oligonucleotide
aguuaagaaacaauuccua

SEQ ID NO: 1501691 - RNA, 19 nt, Artificial Sequence
  Description of Artificial Sequence: Synthetic oligonucleotide
gccuuaaccaugcauaguc

SEQ ID NO: 1501692 - RNA, 19 nt, Artificial Sequence
  Description of Artificial Sequence: Synthetic oligonucleotide
uauauacuaugugcccuug

SEQ ID NO: 1501693 - RNA, 19 nt, Artificial Sequence
  Description of Artificial Sequence: Synthetic oligonucleotide
uccucagggaucuuacgau

SEQ ID NO: 1501694 - RNA, 19 nt, Artificial Sequence
  Description of Artificial Sequence: Synthetic oligonucleotide
uuccuaaggucagaauggc

SEQ ID NO: 1501695 - RNA, 19 nt, Artificial Sequence
  Description of Artificial Sequence: Synthetic oligonucleotide
uuauggauguccugacuuu

SEQ ID NO: 1501696 - RNA, 19 nt, Artificial Sequence
  Description of Artificial Sequence: Synthetic oligonucleotide
cucagggaucuuacgauuc

SEQ ID NO: 1501697 - RNA, 19 nt, Artificial Sequence
  Description of Artificial Sequence: Synthetic oligonucleotide
agaaccaguguaacugauc

SEQ ID NO: 1501698 - RNA, 19 nt, Artificial Sequence
  Description of Artificial Sequence: Synthetic oligonucleotide
aagagugcuaaaacuuuau

SEQ ID NO: 1501699 - RNA, 19 nt, Artificial Sequence
  Description of Artificial Sequence: Synthetic oligonucleotide
ccuaauuucccugauuuug

SEQ ID NO: 1501700 - RNA, 19 nt, Artificial Sequence
  Description of Artificial Sequence: Synthetic oligonucleotide
acauccaagagugcuaaaa

SEQ ID NO: 1501701 - RNA, 19 nt, Artificial Sequence
  Description of Artificial Sequence: Synthetic oligonucleotide
gaauaacuccuagcacagg

SEQ ID NO: 1501702 - RNA, 19 nt, Artificial Sequence
  Description of Artificial Sequence: Synthetic oligonucleotide
auauacuaugugcccuugu

SEQ ID NO: 1501703 - RNA, 19 nt, Artificial Sequence
  Description of Artificial Sequence: Synthetic oligonucleotide
cagagaauggcuuaugaau

SEQ ID NO: 1501704 - RNA, 19 nt, Artificial Sequence
  Description of Artificial Sequence: Synthetic oligonucleotide
aagaacacggccaccccga

SEQ ID NO: 1501705 - RNA, 19 nt, Artificial Sequence
  Description of Artificial Sequence: Synthetic oligonucleotide
uucugaccagagcuuggug

SEQ ID NO: 1501706 - RNA, 19 nt, Artificial Sequence
  Description of Artificial Sequence: Synthetic oligonucleotide
gaagaacgagcuuucacau

SEQ ID NO: 1501707 - RNA, 19 nt, Artificial Sequence
  Description of Artificial Sequence: Synthetic oligonucleotide
uccuagcacagguuugcca

SEQ ID NO: 1501708 - RNA, 19 nt, Artificial Sequence
  Description of Artificial Sequence: Synthetic oligonucleotide
aucuuacgauuccauacaa

SEQ ID NO: 1501709 - RNA, 19 nt, Artificial Sequence
  Description of Artificial Sequence: Synthetic oligonucleotide
uacgucacgugaauauaua

SEQ ID NO: 1501710 - RNA, 19 nt, Artificial Sequence
  Description of Artificial Sequence: Synthetic oligonucleotide
cuaugugcccuuguguaug

SEQ ID NO: 1501711 - RNA, 19 nt, Artificial Sequence
  Description of Artificial Sequence: Synthetic oligonucleotide
aagaacgagcuuucacauu

SEQ ID NO: 1501712 - RNA, 19 nt, Artificial Sequence
  Description of Artificial Sequence: Synthetic oligonucleotide
uugcgguuggacagcacgu

SEQ ID NO: 1501713 - RNA, 19 nt, Artificial Sequence
  Description of Artificial Sequence: Synthetic oligonucleotide
acaaccguaugaaaauagu

SEQ ID NO: 1501714 - RNA, 19 nt, Artificial Sequence
  Description of Artificial Sequence: Synthetic oligonucleotide
uuaucugcacgguggggaa

SEQ ID NO: 1501715 - RNA, 19 nt, Artificial Sequence
  Description of Artificial Sequence: Synthetic oligonucleotide
agcacgucgccgcugguca

SEQ ID NO: 1501716 - RNA, 19 nt, Artificial Sequence
  Description of Artificial Sequence: Synthetic oligonucleotide
agcuacacacaccauggua

SEQ ID NO: 1501717 - RNA, 19 nt, Artificial Sequence
  Description of Artificial Sequence: Synthetic oligonucleotide
acuaugugcccuuguguau

SEQ ID NO: 1501718 - RNA, 19 nt, Artificial Sequence
  Description of Artificial Sequence: Synthetic oligonucleotide
acaauucaccucuggcaga

SEQ ID NO: 1501719 - RNA, 19 nt, Artificial Sequence
  Description of Artificial Sequence: Synthetic oligonucleotide
uugcauccuaguacaggga

SEQ ID NO: 1501720 - RNA, 19 nt, Artificial Sequence
  Description of Artificial Sequence: Synthetic oligonucleotide
auauuuccuaaggucagaa

SEQ ID NO: 1501721 - RNA, 19 nt, Artificial Sequence
  Description of Artificial Sequence: Synthetic oligonucleotide
uaugugcccuuguguauga

SEQ ID NO: 1501722 - RNA, 19 nt, Artificial Sequence
  Description of Artificial Sequence: Synthetic oligonucleotide
ucgucggcacccucgcgcg

SEQ ID NO: 1501723 - RNA, 19 nt, Artificial Sequence
  Description of Artificial Sequence: Synthetic oligonucleotide
aacuccuagcacagguuug

SEQ ID NO: 1501724 - RNA, 19 nt, Artificial Sequence
  Description of Artificial Sequence: Synthetic oligonucleotide
  modified_base (18)..(18): a, c, u, g, unknown or other
auuccuagauauauauana

SEQ ID NO: 1501725 - RNA, 19 nt, Artificial Sequence
  Description of Artificial Sequence: Synthetic oligonucleotide
uugucgucggcacccucgc

SEQ ID NO: 1501726 - RNA, 19 nt, Artificial Sequence
  Description of Artificial Sequence: Synthetic oligonucleotide
agagcgggacacaaugauc

SEQ ID NO: 1501727 - RNA, 19 nt, Artificial Sequence
  Description of Artificial Sequence: Synthetic oligonucleotide
gacauugcucucgcggacc

SEQ ID NO: 1501728 - RNA, 19 nt, Artificial Sequence
  Description of Artificial Sequence: Synthetic oligonucleotide
gaaccaccaucuaccauug

SEQ ID NO: 1501729 - RNA, 19 nt, Artificial Sequence
  Description of Artificial Sequence: Synthetic oligonucleotide
uguacgucacgugaauaua

SEQ ID NO: 1501730 - RNA, 19 nt, Artificial Sequence
  Description of Artificial Sequence: Synthetic oligonucleotide
uucgaagauccuccguaua

SEQ ID NO: 1501731 - RNA, 19 nt, Artificial Sequence
  Description of Artificial Sequence: Synthetic oligonucleotide
cugauuuugcauccuagua

SEQ ID NO: 1501732 - RNA, 19 nt, Artificial Sequence
  Description of Artificial Sequence: Synthetic oligonucleotide
caagugggucaauccagac

SEQ ID NO: 1501733 - RNA, 19 nt, Artificial Sequence
  Description of Artificial Sequence: Synthetic oligonucleotide
ggaaugcuuauggaugucc

SEQ ID NO: 1501734 - RNA, 19 nt, Artificial Sequence
  Description of Artificial Sequence: Synthetic oligonucleotide
gucucgaugcuucauaaau

SEQ ID NO: 1501735 - RNA, 19 nt, Artificial Sequence
  Description of Artificial Sequence: Synthetic oligonucleotide
uccaacaguucagccaaac

SEQ ID NO: 1501736 - RNA, 19 nt, Artificial Sequence
  Description of Artificial Sequence: Synthetic oligonucleotide
auauuccuggguagcauca

SEQ ID NO: 1501737 - RNA, 19 nt, Artificial Sequence
  Description of Artificial Sequence: Synthetic oligonucleotide
uaagagcaaucuguuugac

SEQ ID NO: 1501738 - RNA, 19 nt, Artificial Sequence
  Description of Artificial Sequence: Synthetic oligonucleotide
uugaaccaccaucuaccau

SEQ ID NO: 1501739 - RNA, 19 nt, Artificial Sequence
  Description of Artificial Sequence: Synthetic oligonucleotide
acccucgcgcgucuucccc

SEQ ID NO: 1501740 - RNA, 19 nt, Artificial Sequence
  Description of Artificial Sequence: Synthetic oligonucleotide
ucgcggacccgccucaccu

SEQ ID NO: 1501741 - RNA, 19 nt, Artificial Sequence
  Description of Artificial Sequence: Synthetic oligonucleotide
ugacaaccguaugaaaaua

SEQ ID NO: 1501742 - RNA, 19 nt, Artificial Sequence
  Description of Artificial Sequence: Synthetic oligonucleotide
acggcgagcaucucccgca

SEQ ID NO: 1501743 - RNA, 19 nt, Artificial Sequence
  Description of Artificial Sequence: Synthetic oligonucleotide
ucgcgcgucuuccccuugg

SEQ ID NO: 1501744 - RNA, 19 nt, Artificial Sequence
  Description of Artificial Sequence: Synthetic oligonucleotide
cuuccgacugggccgcccg

SEQ ID NO: 1501745 - RNA, 19 nt, Artificial Sequence
  Description of Artificial Sequence: Synthetic oligonucleotide
caagagugcuaaaacuuua

SEQ ID NO: 1501746 - RNA, 19 nt, Artificial Sequence
  Description of Artificial Sequence: Synthetic oligonucleotide
ccuaguacagggaaaagua

SEQ ID NO: 1501747 - RNA, 19 nt, Artificial Sequence
  Description of Artificial Sequence: Synthetic oligonucleotide
ugacuuguaucaggcacau

SEQ ID NO: 1501748 - RNA, 19 nt, Artificial Sequence
  Description of Artificial Sequence: Synthetic oligonucleotide
cauccuaguacagggaaaa

SEQ ID NO: 1501749 - RNA, 19 nt, Artificial Sequence
  Description of Artificial Sequence: Synthetic oligonucleotide
ucgccacccaggccgaaga

SEQ ID NO: 1501750 - RNA, 19 nt, Artificial Sequence
  Description of Artificial Sequence: Synthetic oligonucleotide
cuccguauauuccugggua

SEQ ID NO: 1501751 - RNA, 19 nt, Artificial Sequence
  Description of Artificial Sequence: Synthetic oligonucleotide
accuaauuucccugauuuu

SEQ ID NO: 1501752 - RNA, 19 nt, Artificial Sequence
  Description of Artificial Sequence: Synthetic oligonucleotide
ucccugauuuugcauccua

SEQ ID NO: 1501753 - RNA, 19 nt, Artificial Sequence
  Description of Artificial Sequence: Synthetic oligonucleotide
aagggccuuuaagauggca

SEQ ID NO: 1501754 - RNA, 19 nt, Artificial Sequence
  Description of Artificial Sequence: Synthetic oligonucleotide
caucuaccauugcccaagc

SEQ ID NO: 1501755 - RNA, 19 nt, Artificial Sequence
  Description of Artificial Sequence: Synthetic oligonucleotide
agggccuuuaagauggcau

SEQ ID NO: 1501756 - RNA, 19 nt, Artificial Sequence
  Description of Artificial Sequence: Synthetic oligonucleotide
acgugaauauauagaucug

SEQ ID NO: 1501757 - RNA, 19 nt, Artificial Sequence
  Description of Artificial Sequence: Synthetic oligonucleotide
agucucgaugcuucauaaa

SEQ ID NO: 1501758 - RNA, 19 nt, Artificial Sequence
  Description of Artificial Sequence: Synthetic oligonucleotide
guaugacaaccguaugaaa

SEQ ID NO: 1501759 - RNA, 19 nt, Artificial Sequence
  Description of Artificial Sequence: Synthetic oligonucleotide
caauuccuagauauauaua

SEQ ID NO: 1501760 - RNA, 19 nt, Artificial Sequence
  Description of Artificial Sequence: Synthetic oligonucleotide
uaggaagaacgagcuuuca

SEQ ID NO: 1501761 - RNA, 19 nt, Artificial Sequence
  Description of Artificial Sequence: Synthetic oligonucleotide
gcccuuguguaugacaacc

SEQ ID NO: 1501762 - RNA, 19 nt, Artificial Sequence
  Description of Artificial Sequence: Synthetic oligonucleotide
gaacgagcuuucacauuug

SEQ ID NO: 1501763 - RNA, 19 nt, Artificial Sequence
  Description of Artificial Sequence: Synthetic oligonucleotide
ccuaaggucagaauggccu

SEQ ID NO: 1501764 - RNA, 19 nt, Artificial Sequence
  Description of Artificial Sequence: Synthetic oligonucleotide
aucuaccauugcccaagcu

SEQ ID NO: 1501765 - RNA, 19 nt, Artificial Sequence
  Description of Artificial Sequence: Synthetic oligonucleotide
caccaucuaccauugccca

SEQ ID NO: 1501766 - RNA, 19 nt, Artificial Sequence
  Description of Artificial Sequence: Synthetic oligonucleotide
gccgcuggucaucuugucg

SEQ ID NO: 1501767 - RNA, 19 nt, Artificial Sequence
  Description of Artificial Sequence: Synthetic oligonucleotide
auccuaguacagggaaaag

SEQ ID NO: 1501768 - RNA, 19 nt, Artificial Sequence
  Description of Artificial Sequence: Synthetic oligonucleotide
ccaugcauagucuccacca

SEQ ID NO: 1501769 - RNA, 19 nt, Artificial Sequence
  Description of Artificial Sequence: Synthetic oligonucleotide
uuccgacugggccgcccgg

SEQ ID NO: 1501770 - RNA, 19 nt, Artificial Sequence
  Description of Artificial Sequence: Synthetic oligonucleotide
gagagcgggacacaaugau

SEQ ID NO: 1501771 - RNA, 19 nt, Artificial Sequence
  Description of Artificial Sequence: Synthetic oligonucleotide
cacaccaugguagugacau

SEQ ID NO: 1501772 - RNA, 19 nt, Artificial Sequence
  Description of Artificial Sequence: Synthetic oligonucleotide
gauguacgucacgugaaua

SEQ ID NO: 1501773 - RNA, 19 nt, Artificial Sequence
  Description of Artificial Sequence: Synthetic oligonucleotide
caucuugcgguuggacagc

SEQ ID NO: 1501774 - RNA, 19 nt, Artificial Sequence
  Description of Artificial Sequence: Synthetic oligonucleotide
uaaggucagaauggccuua

SEQ ID NO: 1501775 - RNA, 19 nt, Artificial Sequence
  Description of Artificial Sequence: Synthetic oligonucleotide
uauuccuggguagcaucaa

SEQ ID NO: 1501776 - RNA, 19 nt, Artificial Sequence
  Description of Artificial Sequence: Synthetic oligonucleotide
accaucuaccauugcccaa

SEQ ID NO: 1501777 - RNA, 19 nt, Artificial Sequence
  Description of Artificial Sequence: Synthetic oligonucleotide
gguggucuugagcagguaa

SEQ ID NO: 1501778 - RNA, 19 nt, Artificial Sequence
  Description of Artificial Sequence: Synthetic oligonucleotide
gaucucuuucccacucaga

SEQ ID NO: 1501779 - RNA, 19 nt, Artificial Sequence
  Description of Artificial Sequence: Synthetic oligonucleotide
gaggcugaagcggccggcc

SEQ ID NO: 1501780 - RNA, 19 nt, Artificial Sequence
  Description of Artificial Sequence: Synthetic oligonucleotide
cccugauuuugcauccuag

SEQ ID NO: 1501781 - RNA, 19 nt, Artificial Sequence
  Description of Artificial Sequence: Synthetic oligonucleotide
caugguagugacauacuuu

SEQ ID NO: 1501782 - RNA, 19 nt, Artificial Sequence
  Description of Artificial Sequence: Synthetic oligonucleotide
cacggcgagcaucucccgc

SEQ ID NO: 1501783 - RNA, 19 nt, Artificial Sequence
  Description of Artificial Sequence: Synthetic oligonucleotide
gugacauacuuucgaagau

SEQ ID NO: 1501784 - RNA, 19 nt, Artificial Sequence
  Description of Artificial Sequence: Synthetic oligonucleotide
uugggccgccucaggcccg

SEQ ID NO: 1501785 - RNA, 19 nt, Artificial Sequence
  Description of Artificial Sequence: Synthetic oligonucleotide
cacucagaguggucauaug

SEQ ID NO: 1501786 - RNA, 19 nt, Artificial Sequence
  Description of Artificial Sequence: Synthetic oligonucleotide
uggacuucucguggaggac

SEQ ID NO: 1501787 - RNA, 19 nt, Artificial Sequence
  Description of Artificial Sequence: Synthetic oligonucleotide
gcgaccggcgcuugggccg

SEQ ID NO: 1501788 - RNA, 19 nt, Artificial Sequence
  Description of Artificial Sequence: Synthetic oligonucleotide
uuucuaaauccgggaguuu

SEQ ID NO: 1501789 - RNA, 19 nt, Artificial Sequence
  Description of Artificial Sequence: Synthetic oligonucleotide
gcaaucuguuugaccaucc

SEQ ID NO: 1501790 - RNA, 19 nt, Artificial Sequence
  Description of Artificial Sequence: Synthetic oligonucleotide
aauucaccucuggcagagu

SEQ ID NO: 1501791 - RNA, 19 nt, Artificial Sequence
  Description of Artificial Sequence: Synthetic oligonucleotide
gucaauccagacagugaca

SEQ ID NO: 1501792 - RNA, 19 nt, Artificial Sequence
  Description of Artificial Sequence: Synthetic oligonucleotide
cuguuugaccaucccugca

SEQ ID NO: 1501793 - RNA, 19 nt, Artificial Sequence
  Description of Artificial Sequence: Synthetic oligonucleotide
caucagaaccaguguaacu

SEQ ID NO: 1501794 - RNA, 19 nt, Artificial Sequence
  Description of Artificial Sequence: Synthetic oligonucleotide
gguaaaacaucuugcgguu

SEQ ID NO: 1501795 - RNA, 19 nt, Artificial Sequence
  Description of Artificial Sequence: Synthetic oligonucleotide
agggaucuuacgauuccau

SEQ ID NO: 1501796 - RNA, 19 nt, Artificial Sequence
  Description of Artificial Sequence: Synthetic oligonucleotide
uugcucucgcggacccgcc

SEQ ID NO: 1501797 - RNA, 19 nt, Artificial Sequence
  Description of Artificial Sequence: Synthetic oligonucleotide
cugaucucuuucccacuca

SEQ ID NO: 1501798 - RNA, 19 nt, Artificial Sequence
  Description of Artificial Sequence: Synthetic oligonucleotide
guaccuccuuaggagcagc

SEQ ID NO: 1501799 - RNA, 19 nt, Artificial Sequence
  Description of Artificial Sequence: Synthetic oligonucleotide
accgccacggcgagcaucu

SEQ ID NO: 1501800 - RNA, 19 nt, Artificial Sequence
  Description of Artificial Sequence: Synthetic oligonucleotide
gucauaagagcaaucuguu

SEQ ID NO: 1501801 - RNA, 19 nt, Artificial Sequence
  Description of Artificial Sequence: Synthetic oligonucleotide
acgagcuuucacauuugaa

SEQ ID NO: 1501802 - RNA, 19 nt, Artificial Sequence
  Description of Artificial Sequence: Synthetic oligonucleotide
ccguaugaaaauagucuca

SEQ ID NO: 1501803 - RNA, 19 nt, Artificial Sequence
  Description of Artificial Sequence: Synthetic oligonucleotide
ggacauugcucucgcggac

SEQ ID NO: 1501804 - RNA, 19 nt, Artificial Sequence
  Description of Artificial Sequence: Synthetic oligonucleotide
cuaaauccgggaguuuucu

SEQ ID NO: 1501805 - RNA, 19 nt, Artificial Sequence
  Description of Artificial Sequence: Synthetic oligonucleotide
gguaccuccuuaggagcag

SEQ ID NO: 1501806 - RNA, 19 nt, Artificial Sequence
  Description of Artificial Sequence: Synthetic oligonucleotide
caagggccuuuaagauggc

SEQ ID NO: 1501807 - RNA, 19 nt, Artificial Sequence
  Description of Artificial Sequence: Synthetic oligonucleotide
aucuugcgguuggacagca

SEQ ID NO: 1501808 - RNA, 19 nt, Artificial Sequence
  Description of Artificial Sequence: Synthetic oligonucleotide
cgucacgugaauauauaga

SEQ ID NO: 1501809 - RNA, 19 nt, Artificial Sequence
  Description of Artificial Sequence: Synthetic oligonucleotide
cauugcucucgcggacccg

SEQ ID NO: 1501810 - RNA, 19 nt, Artificial Sequence
  Description of Artificial Sequence: Synthetic oligonucleotide
uccgacugggccgcccggc

SEQ ID NO: 1501811 - RNA, 19 nt, Artificial Sequence
  Description of Artificial Sequence: Synthetic oligonucleotide
ccguauauuccuggguagc

SEQ ID NO: 1501812 - RNA, 19 nt, Artificial Sequence
  Description of Artificial Sequence: Synthetic oligonucleotide
aggcugaagcggccggcca

SEQ ID NO: 1501813 - RNA, 19 nt, Artificial Sequence
  Description of Artificial Sequence: Synthetic oligonucleotide
gggaucuuacgauuccaua

SEQ ID NO: 1501814 - RNA, 19 nt, Artificial Sequence
  Description of Artificial Sequence: Synthetic oligonucleotide
guacgucacgugaauauau

SEQ ID NO: 1501815 - RNA, 19 nt, Artificial Sequence
  Description of Artificial Sequence: Synthetic oligonucleotide
cugaccagagcuuggugau

SEQ ID NO: 1501816 - RNA, 19 nt, Artificial Sequence
  Description of Artificial Sequence: Synthetic oligonucleotide
ccgccagcugggaugauug

SEQ ID NO: 1501817 - RNA, 19 nt, Artificial Sequence
  Description of Artificial Sequence: Synthetic oligonucleotide
cauugcccaagcuguauau

SEQ ID NO: 1501818 - RNA, 19 nt, Artificial Sequence
  Description of Artificial Sequence: Synthetic oligonucleotide
cuaaggucagaauggccuu

SEQ ID NO: 1501819 - RNA, 19 nt, Artificial Sequence
  Description of Artificial Sequence: Synthetic oligonucleotide
cagggaucuuacgauucca

SEQ ID NO: 1501820 - RNA, 19 nt, Artificial Sequence
  Description of Artificial Sequence: Synthetic oligonucleotide
cucgcggacccgccucacc

SEQ ID NO: 1501821 - RNA, 19 nt, Artificial Sequence
  Description of Artificial Sequence: Synthetic oligonucleotide
guauauuccuggguagcau

SEQ ID NO: 1501822 - RNA, 19 nt, Artificial Sequence
  Description of Artificial Sequence: Synthetic oligonucleotide
gagcaaucuguuugaccau

SEQ ID NO: 1501823 - RNA, 19 nt, Artificial Sequence
  Description of Artificial Sequence: Synthetic oligonucleotide
ucggcacccucgcgcgucu

SEQ ID NO: 1501824 - RNA, 19 nt, Artificial Sequence
  Description of Artificial Sequence: Synthetic oligonucleotide
cacccucgcgcgucuuccc

SEQ ID NO: 1501825 - RNA, 19 nt, Artificial Sequence
  Description of Artificial Sequence: Synthetic oligonucleotide
cuauuuccuucaggauguc

SEQ ID NO: 1501826 - RNA, 19 nt, Artificial Sequence
  Description of Artificial Sequence: Synthetic oligonucleotide
acaccaugguagugacaua

SEQ ID NO: 1501827 - RNA, 19 nt, Artificial Sequence
  Description of Artificial Sequence: Synthetic oligonucleotide
gggaaaaguaagucucgau

SEQ ID NO: 1501828 - RNA, 19 nt, Artificial Sequence
  Description of Artificial Sequence: Synthetic oligonucleotide
cggccggccaagaagccgg

SEQ ID NO: 1501829 - RNA, 19 nt, Artificial Sequence
  Description of Artificial Sequence: Synthetic oligonucleotide
ccugauuuugcauccuagu

SEQ ID NO: 1501830 - RNA, 19 nt, Artificial Sequence
  Description of Artificial Sequence: Synthetic oligonucleotide
auggcgcgcgaccggcgcu

SEQ ID NO: 1501831 - RNA, 19 nt, Artificial Sequence
  Description of Artificial Sequence: Synthetic oligonucleotide
gcugaagcggccggccaag

SEQ ID NO: 1501832 - RNA, 19 nt, Artificial Sequence
  Description of Artificial Sequence: Synthetic oligonucleotide
caguauuuaucugcacggu

SEQ ID NO: 1501833 - RNA, 19 nt, Artificial Sequence
  Description of Artificial Sequence: Synthetic oligonucleotide
ggcauugccagcacauaua

SEQ ID NO: 1501834 - RNA, 19 nt, Artificial Sequence
  Description of Artificial Sequence: Synthetic oligonucleotide
cgauuccauacaaugaccu

SEQ ID NO: 1501835 - RNA, 19 nt, Artificial Sequence
  Description of Artificial Sequence: Synthetic oligonucleotide
ucccugcaugagagcggga

SEQ ID NO: 1501836 - RNA, 19 nt, Artificial Sequence
  Description of Artificial Sequence: Synthetic oligonucleotide
gcggacccgccucaccucc

SEQ ID NO: 1501837 - RNA, 19 nt, Artificial Sequence
  Description of Artificial Sequence: Synthetic oligonucleotide
acgucgccgcuggucaucu

SEQ ID NO: 1501838 - RNA, 19 nt, Artificial Sequence
  Description of Artificial Sequence: Synthetic oligonucleotide
guaagucucgaugcuucau

SEQ ID NO: 1501839 - RNA, 19 nt, Artificial Sequence
  Description of Artificial Sequence: Synthetic oligonucleotide
gcuuauggauguccugacu

SEQ ID NO: 1501840 - RNA, 19 nt, Artificial Sequence
  Description of Artificial Sequence: Synthetic oligonucleotide
caugagagcgggacacaau

SEQ ID NO: 1501841 - RNA, 19 nt, Artificial Sequence
  Description of Artificial Sequence: Synthetic oligonucleotide
acacaccaugguagugaca

SEQ ID NO: 1501842 - RNA, 19 nt, Artificial Sequence
  Description of Artificial Sequence: Synthetic oligonucleotide
ggcuuaugaauaacuccua

SEQ ID NO: 1501843 - RNA, 19 nt, Artificial Sequence
  Description of Artificial Sequence: Synthetic oligonucleotide
accgccagcugggaugauu

SEQ ID NO: 1501844 - RNA, 19 nt, Artificial Sequence
  Description of Artificial Sequence: Synthetic oligonucleotide
gaccuccuugucagaugca

SEQ ID NO: 1501845 - RNA, 19 nt, Artificial Sequence
  Description of Artificial Sequence: Synthetic oligonucleotide
cuccuuaggagcagcuauu

SEQ ID NO: 1501846 - RNA, 19 nt, Artificial Sequence
  Description of Artificial Sequence: Synthetic oligonucleotide
gcggccggccaagaagccg

SEQ ID NO: 1501847 - RNA, 19 nt, Artificial Sequence
  Description of Artificial Sequence: Synthetic oligonucleotide
gucggcacccucgcgcguc

SEQ ID NO: 1501848 - RNA, 19 nt, Artificial Sequence
  Description of Artificial Sequence: Synthetic oligonucleotide
gccaaacaauucaccucug

SEQ ID NO: 1501849 - RNA, 19 nt, Artificial Sequence
  Description of Artificial Sequence: Synthetic oligonucleotide
ggcacauccaagagugcua

SEQ ID NO: 1501850 - RNA, 19 nt, Artificial Sequence
  Description of Artificial Sequence: Synthetic oligonucleotide
cacgucgccgcuggucauc

SEQ ID NO: 1501851 - RNA, 19 nt, Artificial Sequence
  Description of Artificial Sequence: Synthetic oligonucleotide
ccuuguguaugacaaccgu

SEQ ID NO: 1501852 - RNA, 19 nt, Artificial Sequence
  Description of Artificial Sequence: Synthetic oligonucleotide
ccuuaaccaugcauagucu

SEQ ID NO: 1501853 - RNA, 19 nt, Artificial Sequence
  Description of Artificial Sequence: Synthetic oligonucleotide
cucucgcggacccgccuca

SEQ ID NO: 1501854 - RNA, 19 nt, Artificial Sequence
  Description of Artificial Sequence: Synthetic oligonucleotide
gcauccuaguacagggaaa

SEQ ID NO: 1501855 - RNA, 19 nt, Artificial Sequence
  Description of Artificial Sequence: Synthetic oligonucleotide
cguauauuccuggguagca

SEQ ID NO: 1501856 - RNA, 19 nt, Artificial Sequence
  Description of Artificial Sequence: Synthetic oligonucleotide
ccggaguagaggugguaga

SEQ ID NO: 1501857 - RNA, 19 nt, Artificial Sequence
  Description of Artificial Sequence: Synthetic oligonucleotide
caaugccaucagaaccagu

SEQ ID NO: 1501858 - RNA, 19 nt, Artificial Sequence
  Description of Artificial Sequence: Synthetic oligonucleotide
cucgcgcgucuuccccuug

SEQ ID NO: 1501859 - RNA, 19 nt, Artificial Sequence
  Description of Artificial Sequence: Synthetic oligonucleotide
ccgcuggucaucuugucgu

SEQ ID NO: 1501860 - RNA, 19 nt, Artificial Sequence
  Description of Artificial Sequence: Synthetic oligonucleotide
cccgucgccuuccgacugg

SEQ ID NO: 1501861 - RNA, 19 nt, Artificial Sequence
  Description of Artificial Sequence: Synthetic oligonucleotide
gcacccuguggucaggaau

SEQ ID NO: 1501862 - RNA, 19 nt, Artificial Sequence
  Description of Artificial Sequence: Synthetic oligonucleotide
gcgcgucuuccccuuggac

SEQ ID NO: 1501863 - RNA, 19 nt, Artificial Sequence
  Description of Artificial Sequence: Synthetic oligonucleotide
ccccgagcggggacaggcg

SEQ ID NO: 1501864 - RNA, 19 nt, Artificial Sequence
  Description of Artificial Sequence: Synthetic oligonucleotide
ccauugcccaagcuguaua

SEQ ID NO: 1501865 - RNA, 19 nt, Artificial Sequence
  Description of Artificial Sequence: Synthetic oligonucleotide
ggcacccucgcgcgucuuc

SEQ ID NO: 1501866 - RNA, 19 nt, Artificial Sequence
  Description of Artificial Sequence: Synthetic oligonucleotide
ccgacugggccgcccggcc

SEQ ID NO: 1501867 - RNA, 19 nt, Artificial Sequence
  Description of Artificial Sequence: Synthetic oligonucleotide
cgcgaccggcgcuugggcc

SEQ ID NO: 1501868 - RNA, 19 nt, Artificial Sequence
  Description of Artificial Sequence: Synthetic oligonucleotide
acuucucguggaggacauu

SEQ ID NO: 1501869 - RNA, 19 nt, Artificial Sequence
  Description of Artificial Sequence: Synthetic oligonucleotide
ggacagcacgucgccgcug

SEQ ID NO: 1501870 - RNA, 19 nt, Artificial Sequence
  Description of Artificial Sequence: Synthetic oligonucleotide
agguggucuugagcaggua

SEQ ID NO: 1501871 - RNA, 19 nt, Artificial Sequence
  Description of Artificial Sequence: Synthetic oligonucleotide
cugaagcggccggccaaga

SEQ ID NO: 1501872 - RNA, 19 nt, Artificial Sequence
  Description of Artificial Sequence: Synthetic oligonucleotide
gcgcgaccggcgcuugggc

SEQ ID NO: 1501873 - RNA, 19 nt, Artificial Sequence
  Description of Artificial Sequence: Synthetic oligonucleotide
gcggggacaggcggaugcc

SEQ ID NO: 1501874 - RNA, 19 nt, Artificial Sequence
  Description of Artificial Sequence: Synthetic oligonucleotide
ccuccguauauuccugggu

SEQ ID NO: 1501875 - RNA, 19 nt, Artificial Sequence
  Description of Artificial Sequence: Synthetic oligonucleotide
ccucaggcccgccgcugag

SEQ ID NO: 1501876 - RNA, 19 nt, Artificial Sequence
  Description of Artificial Sequence: Synthetic oligonucleotide
ccccgucgccuuccgacug

SEQ ID NO: 1501877 - RNA, 19 nt, Artificial Sequence
  Description of Artificial Sequence: Synthetic oligonucleotide
ccccaagggccuuuaagau

SEQ ID NO: 1501878 - RNA, 19 nt, Artificial Sequence
  Description of Artificial Sequence: Synthetic oligonucleotide
ggccuuaaccaugcauagu

SEQ ID NO: 1501879 - RNA, 19 nt, Artificial Sequence
  Description of Artificial Sequence: Synthetic oligonucleotide
ccuuccgacugggccgccc

SEQ ID NO: 1501880 - RNA, 19 nt, Artificial Sequence
  Description of Artificial Sequence: Synthetic oligonucleotide
ccgucgccuuccgacuggg

SEQ ID NO: 1501881 - RNA, 19 nt, Artificial Sequence
  Description of Artificial Sequence: Synthetic oligonucleotide
ccucagggaucuuacgauu

SEQ ID NO: 1501882 - RNA, 19 nt, Artificial Sequence
  Description of Artificial Sequence: Synthetic oligonucleotide
gccaccccgagcggggaca

SEQ ID NO: 1501883 - RNA, 19 nt, Artificial Sequence
  Description of Artificial Sequence: Synthetic oligonucleotide
gggacaggcggaugcccau

SEQ ID NO: 1501884 - RNA, 19 nt, Artificial Sequence
  Description of Artificial Sequence: Synthetic oligonucleotide
gcgcgcgaccggcgcuugg

SEQ ID NO: 1501885 - RNA, 19 nt, Artificial Sequence
  Description of Artificial Sequence: Synthetic oligonucleotide
ccaccccgagcggggacag

SEQ ID NO: 1501886 - RNA, 19 nt, Artificial Sequence
  Description of Artificial Sequence: Synthetic oligonucleotide
cgucgccuuccgacugggc

SEQ ID NO: 1501887 - RNA, 19 nt, Artificial Sequence
  Description of Artificial Sequence: Synthetic oligonucleotide
cucaggcccgccgcugagu

SEQ ID NO: 1501888 - RNA, 19 nt, Artificial Sequence
  Description of Artificial Sequence: Synthetic oligonucleotide
cgcggacccgccucaccuc

SEQ ID NO: 1501889 - RNA, 19 nt, Artificial Sequence
  Description of Artificial Sequence: Synthetic oligonucleotide
ggcgcgcgaccggcgcuug

SEQ ID NO: 1501890 - RNA, 19 nt, Artificial Sequence
  Description of Artificial Sequence: Synthetic oligonucleotide
cgaccggcgcuugggccgc

SEQ ID NO: 1501891 - RNA, 19 nt, Artificial Sequence
  Description of Artificial Sequence: Synthetic oligonucleotide
ggccggccaagaagccgga

SEQ ID NO: 1501892 - RNA, 19 nt, Artificial Sequence
  Description of Artificial Sequence: Synthetic oligonucleotide
cgccagcugggaugauuga

SEQ ID NO: 1501893 - RNA, 19 nt, Artificial Sequence
  Description of Artificial Sequence: Synthetic oligonucleotide
cgcgcgucuuccccuugga

SEQ ID NO: 1501894 - RNA, 19 nt, Artificial Sequence
  Description of Artificial Sequence: Synthetic oligonucleotide
cccucgcgcgucuuccccu

SEQ ID NO: 1501895 - RNA, 19 nt, Artificial Sequence
  Description of Artificial Sequence: Synthetic oligonucleotide
gcacgucgccgcuggucau

SEQ ID NO: 1501896 - RNA, 19 nt, Artificial Sequence
  Description of Artificial Sequence: Synthetic oligonucleotide
gccuuccgacugggccgcc

SEQ ID NO: 1501897 - RNA, 19 nt, Artificial Sequence
  Description of Artificial Sequence: Synthetic oligonucleotide
cggccaccccgagcgggga

SEQ ID NO: 1501898 - RNA, 19 nt, Artificial Sequence
  Description of Artificial Sequence: Synthetic oligonucleotide
cgucggcacccucgcgcgu

SEQ ID NO: 1501899 - RNA, 19 nt, Artificial Sequence
  Description of Artificial Sequence: Synthetic oligonucleotide
caccgccagcugggaugau

SEQ ID NO: 1501900 - RNA, 19 nt, Artificial Sequence
  Description of Artificial Sequence: Synthetic oligonucleotide
cggcacccucgcgcgucuu

SEQ ID NO: 1501901 - RNA, 19 nt, Artificial Sequence
  Description of Artificial Sequence: Synthetic oligonucleotide
  modified_base (1)..(1): a, c, u, g, unknown or other
  modified_base (5)..(5): a, c, u, g, unknown or other
  modified_base (7)..(7): a, c, u, g, unknown or other
nauananauauauacuaug

SEQ ID NO: 1501902 - RNA, 19 nt, Artificial Sequence
  Description of Artificial Sequence: Synthetic oligonucleotide
  modified_base (1)..(1): a, c, u, g, unknown or other
  modified_base (3)..(3): a, c, u, g, unknown or other
nanauauauacuaugugcc

SEQ ID NO: 1501903 - RNA, 19 nt, Artificial Sequence
  Description of Artificial Sequence: Synthetic oligonucleotide
  modified_base (1)..(1): a, c, u, g, unknown or other
nauauauacuaugugcccu

SEQ ID NO: 1501904 - RNA, 19 nt, Artificial Sequence
  Description of Artificial Sequence: Synthetic oligonucleotide
uguauugucaugauagggg

SEQ ID NO: 1501905 - RNA, 19 nt, Artificial Sequence
  Description of Artificial Sequence: Synthetic oligonucleotide
auggaaaggaacuugacuc

SEQ ID NO: 1501906 - RNA, 19 nt, Artificial Sequence
  Description of Artificial Sequence: Synthetic oligonucleotide
uaacauaugccucugcuag

SEQ ID NO: 1501907 - RNA, 19 nt, Artificial Sequence
  Description of Artificial Sequence: Synthetic oligonucleotide
aaaagcaccagaucacccg

SEQ ID NO: 1501908 - RNA, 19 nt, Artificial Sequence
  Description of Artificial Sequence: Synthetic oligonucleotide
ucucucaggaucaugauug

SEQ ID NO: 1501909 - RNA, 19 nt, Artificial Sequence
  Description of Artificial Sequence: Synthetic oligonucleotide
acugcuaaaugccaccucc

SEQ ID NO: 1501910 - RNA, 19 nt, Artificial Sequence
  Description of Artificial Sequence: Synthetic oligonucleotide
aacgucucaaucugaacac

SEQ ID NO: 1501911 - RNA, 19 nt, Artificial Sequence
  Description of Artificial Sequence: Synthetic oligonucleotide
cucaguauauuccaaagcc

SEQ ID NO: 1501912 - RNA, 19 nt, Artificial Sequence
  Description of Artificial Sequence: Synthetic oligonucleotide
cuuucuuuggggcacaugg

SEQ ID NO: 1501913 - RNA, 19 nt, Artificial Sequence
  Description of Artificial Sequence: Synthetic oligonucleotide
uccgcuuucaccaaguucu

SEQ ID NO: 1501914 - RNA, 19 nt, Artificial Sequence
  Description of Artificial Sequence: Synthetic oligonucleotide
auugccuuggcuucguggc

SEQ ID NO: 1501915 - RNA, 19 nt, Artificial Sequence
  Description of Artificial Sequence: Synthetic oligonucleotide
aaugccaccuccugguugg

SEQ ID NO: 1501916 - RNA, 19 nt, Artificial Sequence
  Description of Artificial Sequence: Synthetic oligonucleotide
ugcgauccauucaagaacg

SEQ ID NO: 1501917 - RNA, 19 nt, Artificial Sequence
  Description of Artificial Sequence: Synthetic oligonucleotide
agaugcggaagauucaugg

SEQ ID NO: 1501918 - RNA, 19 nt, Artificial Sequence
  Description of Artificial Sequence: Synthetic oligonucleotide
ucgaguaggauuuugcucu

SEQ ID NO: 1501919 - RNA, 19 nt, Artificial Sequence
  Description of Artificial Sequence: Synthetic oligonucleotide
uguuuguacucacagcugc

SEQ ID NO: 1501920 - RNA, 19 nt, Artificial Sequence
  Description of Artificial Sequence: Synthetic oligonucleotide
aaugugagucgccauagca

SEQ ID NO: 1501921 - RNA, 19 nt, Artificial Sequence
  Description of Artificial Sequence: Synthetic oligonucleotide
uugauaguagggcaaagcu

SEQ ID NO: 1501922 - RNA, 19 nt, Artificial Sequence
  Description of Artificial Sequence: Synthetic oligonucleotide
ugcagugacugcuaaaugc

SEQ ID NO: 1501923 - RNA, 19 nt, Artificial Sequence
  Description of Artificial Sequence: Synthetic oligonucleotide
uguaugcuggagcaaacag

SEQ ID NO: 1501924 - RNA, 19 nt, Artificial Sequence
  Description of Artificial Sequence: Synthetic oligonucleotide
aggacgaugagaugugccc

SEQ ID NO: 1501925 - RNA, 19 nt, Artificial Sequence
  Description of Artificial Sequence: Synthetic oligonucleotide
cuggagguagccuugagcc

SEQ ID NO: 1501926 - RNA, 19 nt, Artificial Sequence
  Description of Artificial Sequence: Synthetic oligonucleotide
agauucauggugaugcugc

SEQ ID NO: 1501927 - RNA, 19 nt, Artificial Sequence
  Description of Artificial Sequence: Synthetic oligonucleotide
uaaagugugcggaaucugc

SEQ ID NO: 1501928 - RNA, 19 nt, Artificial Sequence
  Description of Artificial Sequence: Synthetic oligonucleotide
ugguauguggugcacaaug

SEQ ID NO: 1501929 - RNA, 19 nt, Artificial Sequence
  Description of Artificial Sequence: Synthetic oligonucleotide
aucacgguggucuugcuuc

SEQ ID NO: 1501930 - RNA, 19 nt, Artificial Sequence
  Description of Artificial Sequence: Synthetic oligonucleotide
ugaucugcagaaaauugca

SEQ ID NO: 1501931 - RNA, 19 nt, Artificial Sequence
  Description of Artificial Sequence: Synthetic oligonucleotide
auucuugucaaugccacac

SEQ ID NO: 1501932 - RNA, 19 nt, Artificial Sequence
  Description of Artificial Sequence: Synthetic oligonucleotide
gaacgucucaaucugaaca

SEQ ID NO: 1501933 - RNA, 19 nt, Artificial Sequence
  Description of Artificial Sequence: Synthetic oligonucleotide
cuuuugaucuuuucugacc

SEQ ID NO: 1501934 - RNA, 19 nt, Artificial Sequence
  Description of Artificial Sequence: Synthetic oligonucleotide
aaugcuccuacuuuggcuu

SEQ ID NO: 1501935 - RNA, 19 nt, Artificial Sequence
  Description of Artificial Sequence: Synthetic oligonucleotide
uuaguacugguacacacuc

SEQ ID NO: 1501936 - RNA, 19 nt, Artificial Sequence
  Description of Artificial Sequence: Synthetic oligonucleotide
ugaaaauacugcucggcca

SEQ ID NO: 1501937 - RNA, 19 nt, Artificial Sequence
  Description of Artificial Sequence: Synthetic oligonucleotide
auaauguucccacauugca

SEQ ID NO: 1501938 - RNA, 19 nt, Artificial Sequence
  Description of Artificial Sequence: Synthetic oligonucleotide
aauggaguuggccaggauu

SEQ ID NO: 1501939 - RNA, 19 nt, Artificial Sequence
  Description of Artificial Sequence: Synthetic oligonucleotide
ucuuuaguuuggcaugugc

SEQ ID NO: 1501940 - RNA, 19 nt, Artificial Sequence
  Description of Artificial Sequence: Synthetic oligonucleotide
ugguacacacucaagacuc

SEQ ID NO: 1501941 - RNA, 19 nt, Artificial Sequence
  Description of Artificial Sequence: Synthetic oligonucleotide
gauacaguugugcaaagaa

SEQ ID NO: 1501942 - RNA, 19 nt, Artificial Sequence
  Description of Artificial Sequence: Synthetic oligonucleotide
ugauagggguucucaaugg

SEQ ID NO: 1501943 - RNA, 19 nt, Artificial Sequence
  Description of Artificial Sequence: Synthetic oligonucleotide
ucugcuaguuuccaaugug

SEQ ID NO: 1501944 - RNA, 19 nt, Artificial Sequence
  Description of Artificial Sequence: Synthetic oligonucleotide
ucucagagcuuucuuuggg

SEQ ID NO: 1501945 - RNA, 19 nt, Artificial Sequence
  Description of Artificial Sequence: Synthetic oligonucleotide
uuggcuuucagagauugcc

SEQ ID NO: 1501946 - RNA, 19 nt, Artificial Sequence
  Description of Artificial Sequence: Synthetic oligonucleotide
ggaagauucauggugaugc

SEQ ID NO: 1501947 - RNA, 19 nt, Artificial Sequence
  Description of Artificial Sequence: Synthetic oligonucleotide
uuuaguuuggcaugugcuc

SEQ ID NO: 1501948 - RNA, 19 nt, Artificial Sequence
  Description of Artificial Sequence: Synthetic oligonucleotide
guagccuugagccagauua

SEQ ID NO: 1501949 - RNA, 19 nt, Artificial Sequence
  Description of Artificial Sequence: Synthetic oligonucleotide
uugagccagauuaacauau

SEQ ID NO: 1501950 - RNA, 19 nt, Artificial Sequence
  Description of Artificial Sequence: Synthetic oligonucleotide
augauagggguucucaaug

SEQ ID NO: 1501951 - RNA, 19 nt, Artificial Sequence
  Description of Artificial Sequence: Synthetic oligonucleotide
uuugauaguagggcaaagc

SEQ ID NO: 1501952 - RNA, 19 nt, Artificial Sequence
  Description of Artificial Sequence: Synthetic oligonucleotide
auaugccucugcuaguuuc

SEQ ID NO: 1501953 - RNA, 19 nt, Artificial Sequence
  Description of Artificial Sequence: Synthetic oligonucleotide
cauccuaaaagcaaugcca

SEQ ID NO: 1501954 - RNA, 19 nt, Artificial Sequence
  Description of Artificial Sequence: Synthetic oligonucleotide
uucuuuugaucuuuucuga

SEQ ID NO: 1501955 - RNA, 19 nt, Artificial Sequence
  Description of Artificial Sequence: Synthetic oligonucleotide
ugaagucaccgaaugcucc

SEQ ID NO: 1501956 - RNA, 19 nt, Artificial Sequence
  Description of Artificial Sequence: Synthetic oligonucleotide
agccagauuaacauaugcc

SEQ ID NO: 1501957 - RNA, 19 nt, Artificial Sequence
  Description of Artificial Sequence: Synthetic oligonucleotide
aagccuuuugauaguaggg

SEQ ID NO: 1501958 - RNA, 19 nt, Artificial Sequence
  Description of Artificial Sequence: Synthetic oligonucleotide
gauugccuuggcuucgugg

SEQ ID NO: 1501959 - RNA, 19 nt, Artificial Sequence
  Description of Artificial Sequence: Synthetic oligonucleotide
agaacagcuugauccgagc

SEQ ID NO: 1501960 - RNA, 19 nt, Artificial Sequence
  Description of Artificial Sequence: Synthetic oligonucleotide
ugcggaagauucaugguga

SEQ ID NO: 1501961 - RNA, 19 nt, Artificial Sequence
  Description of Artificial Sequence: Synthetic oligonucleotide
uccgguaugucucugccac

SEQ ID NO: 1501962 - RNA, 19 nt, Artificial Sequence
  Description of Artificial Sequence: Synthetic oligonucleotide
agcauccuaaaagcaaugc

SEQ ID NO: 1501963 - RNA, 19 nt, Artificial Sequence
  Description of Artificial Sequence: Synthetic oligonucleotide
ucagcauccuaaaagcaau

SEQ ID NO: 1501964 - RNA, 19 nt, Artificial Sequence
  Description of Artificial Sequence: Synthetic oligonucleotide
uuuuacucaggacgaugag

SEQ ID NO: 1501965 - RNA, 19 nt, Artificial Sequence
  Description of Artificial Sequence: Synthetic oligonucleotide
aguaggauuuugcucucuc

SEQ ID NO: 1501966 - RNA, 19 nt, Artificial Sequence
  Description of Artificial Sequence: Synthetic oligonucleotide
acucaagacuccuuucauc

SEQ ID NO: 1501967 - RNA, 19 nt, Artificial Sequence
  Description of Artificial Sequence: Synthetic oligonucleotide
aguugugcaaagaacagcu

SEQ ID NO: 1501968 - RNA, 19 nt, Artificial Sequence
  Description of Artificial Sequence: Synthetic oligonucleotide
guugagaugcggaagauuc

SEQ ID NO: 1501969 - RNA, 19 nt, Artificial Sequence
  Description of Artificial Sequence: Synthetic oligonucleotide
ugacagcccuuucagcugg

SEQ ID NO: 1501970 - RNA, 19 nt, Artificial Sequence
  Description of Artificial Sequence: Synthetic oligonucleotide
aauacugcucggccauauc

SEQ ID NO: 1501971 - RNA, 19 nt, Artificial Sequence
  Description of Artificial Sequence: Synthetic oligonucleotide
cuugcuucccagaagcaac

SEQ ID NO: 1501972 - RNA, 19 nt, Artificial Sequence
  Description of Artificial Sequence: Synthetic oligonucleotide
augcggaagauucauggug

SEQ ID NO: 1501973 - RNA, 19 nt, Artificial Sequence
  Description of Artificial Sequence: Synthetic oligonucleotide
gagccagauuaacauaugc

SEQ ID NO: 1501974 - RNA, 19 nt, Artificial Sequence
  Description of Artificial Sequence: Synthetic oligonucleotide
aguacugguacacacucaa

SEQ ID NO: 1501975 - RNA, 19 nt, Artificial Sequence
  Description of Artificial Sequence: Synthetic oligonucleotide
cucaggaucaugauugcuc

SEQ ID NO: 1501976 - RNA, 19 nt, Artificial Sequence
  Description of Artificial Sequence: Synthetic oligonucleotide
auacaguugugcaaagaac

SEQ ID NO: 1501977 - RNA, 19 nt, Artificial Sequence
  Description of Artificial Sequence: Synthetic oligonucleotide
acaguugagaugcggaaga

SEQ ID NO: 1501978 - RNA, 19 nt, Artificial Sequence
  Description of Artificial Sequence: Synthetic oligonucleotide
uguccugcgauccauucaa

SEQ ID NO: 1501979 - RNA, 19 nt, Artificial Sequence
  Description of Artificial Sequence: Synthetic oligonucleotide
agcccuuucagcuggaggu

SEQ ID NO: 1501980 - RNA, 19 nt, Artificial Sequence
  Description of Artificial Sequence: Synthetic oligonucleotide
uguccagugaucugcagaa

SEQ ID NO: 1501981 - RNA, 19 nt, Artificial Sequence
  Description of Artificial Sequence: Synthetic oligonucleotide
acagguggaguuucucucg

SEQ ID NO: 1501982 - RNA, 19 nt, Artificial Sequence
  Description of Artificial Sequence: Synthetic oligonucleotide
uuuacucaggacgaugaga

SEQ ID NO: 1501983 - RNA, 19 nt, Artificial Sequence
  Description of Artificial Sequence: Synthetic oligonucleotide
agaacgucucaaucugaac

SEQ ID NO: 1501984 - RNA, 19 nt, Artificial Sequence
  Description of Artificial Sequence: Synthetic oligonucleotide
uaguuuccaaugugagucg

SEQ ID NO: 1501985 - RNA, 19 nt, Artificial Sequence
  Description of Artificial Sequence: Synthetic oligonucleotide
gagagguuuguucagcauc

SEQ ID NO: 1501986 - RNA, 19 nt, Artificial Sequence
  Description of Artificial Sequence: Synthetic oligonucleotide
uuuggcaugugcuccgaug

SEQ ID NO: 1501987 - RNA, 19 nt, Artificial Sequence
  Description of Artificial Sequence: Synthetic oligonucleotide
auacugcucggccauauca

SEQ ID NO: 1501988 - RNA, 19 nt, Artificial Sequence
  Description of Artificial Sequence: Synthetic oligonucleotide
uaugucucugccaccucag

SEQ ID NO: 1501989 - RNA, 19 nt, Artificial Sequence
  Description of Artificial Sequence: Synthetic oligonucleotide
ugauaguagggcaaagcuu

SEQ ID NO: 1501990 - RNA, 19 nt, Artificial Sequence
  Description of Artificial Sequence: Synthetic oligonucleotide
uuaacauaugccucugcua

SEQ ID NO: 1501991 - RNA, 19 nt, Artificial Sequence
  Description of Artificial Sequence: Synthetic oligonucleotide
gaacacuugaagauaucug

SEQ ID NO: 1501992 - RNA, 19 nt, Artificial Sequence
  Description of Artificial Sequence: Synthetic oligonucleotide
aauucuugucaaugccaca

SEQ ID NO: 1501993 - RNA, 19 nt, Artificial Sequence
  Description of Artificial Sequence: Synthetic oligonucleotide
uuucuuacccauuccuccu

SEQ ID NO: 1501994 - RNA, 19 nt, Artificial Sequence
  Description of Artificial Sequence: Synthetic oligonucleotide
aagagaucuauggaacacu

SEQ ID NO: 1501995 - RNA, 19 nt, Artificial Sequence
  Description of Artificial Sequence: Synthetic oligonucleotide
ugcucgaguaggauuuugc

SEQ ID NO: 1501996 - RNA, 19 nt, Artificial Sequence
  Description of Artificial Sequence: Synthetic oligonucleotide
accgaaugcuccuacuuug

SEQ ID NO: 1501997 - RNA, 19 nt, Artificial Sequence
  Description of Artificial Sequence: Synthetic oligonucleotide
acucaggacgaugagaugu

SEQ ID NO: 1501998 - RNA, 19 nt, Artificial Sequence
  Description of Artificial Sequence: Synthetic oligonucleotide
uccugaaaauacugcucgg

SEQ ID NO: 1501999 - RNA, 19 nt, Artificial Sequence
  Description of Artificial Sequence: Synthetic oligonucleotide
ugaagauaucuguauuguc

SEQ ID NO: 1502000 - RNA, 19 nt, Artificial Sequence
  Description of Artificial Sequence: Synthetic oligonucleotide
uagggcaaagcuucuuuug

SEQ ID NO: 1502001 - RNA, 19 nt, Artificial Sequence
  Description of Artificial Sequence: Synthetic oligonucleotide
acugcucggccauaucacg

SEQ ID NO: 1502002 - RNA, 19 nt, Artificial Sequence
  Description of Artificial Sequence: Synthetic oligonucleotide
agcaucguggaaucccagg

SEQ ID NO: 1502003 - RNA, 19 nt, Artificial Sequence
  Description of Artificial Sequence: Synthetic oligonucleotide
ucugaccuugauacaguug

SEQ ID NO: 1502004 - RNA, 19 nt, Artificial Sequence
  Description of Artificial Sequence: Synthetic oligonucleotide
gauuaacauaugccucugc

SEQ ID NO: 1502005 - RNA, 19 nt, Artificial Sequence
  Description of Artificial Sequence: Synthetic oligonucleotide
aguuuccaaugugagucgc

SEQ ID NO: 1502006 - RNA, 19 nt, Artificial Sequence
  Description of Artificial Sequence: Synthetic oligonucleotide
acccauuccuccuuuauaa

SEQ ID NO: 1502007 - RNA, 19 nt, Artificial Sequence
  Description of Artificial Sequence: Synthetic oligonucleotide
uuuguucagcauccuaaaa

SEQ ID NO: 1502008 - RNA, 19 nt, Artificial Sequence
  Description of Artificial Sequence: Synthetic oligonucleotide
uccuucacaugagucaugc

SEQ ID NO: 1502009 - RNA, 19 nt, Artificial Sequence
  Description of Artificial Sequence: Synthetic oligonucleotide
aagauucauggugaugcug

SEQ ID NO: 1502010 - RNA, 19 nt, Artificial Sequence
  Description of Artificial Sequence: Synthetic oligonucleotide
agugacugcuaaaugccac

SEQ ID NO: 1502011 - RNA, 19 nt, Artificial Sequence
  Description of Artificial Sequence: Synthetic oligonucleotide
uuuccaaugugagucgcca

SEQ ID NO: 1502012 - RNA, 19 nt, Artificial Sequence
  Description of Artificial Sequence: Synthetic oligonucleotide
uccuaaaagcaaugccaag

SEQ ID NO: 1502013 - RNA, 19 nt, Artificial Sequence
  Description of Artificial Sequence: Synthetic oligonucleotide
aacauaugccucugcuagu

SEQ ID NO: 1502014 - RNA, 19 nt, Artificial Sequence
  Description of Artificial Sequence: Synthetic oligonucleotide
ucaugauugcucuuucuuu

SEQ ID NO: 1502015 - RNA, 19 nt, Artificial Sequence
  Description of Artificial Sequence: Synthetic oligonucleotide
ggucuugcuucccagaagc

SEQ ID NO: 1502016 - RNA, 19 nt, Artificial Sequence
  Description of Artificial Sequence: Synthetic oligonucleotide
agaaaauugcaaaauucau

SEQ ID NO: 1502017 - RNA, 19 nt, Artificial Sequence
  Description of Artificial Sequence: Synthetic oligonucleotide
cugcgauccauucaagaac

SEQ ID NO: 1502018 - RNA, 19 nt, Artificial Sequence
  Description of Artificial Sequence: Synthetic oligonucleotide
aacagcuugauccgagcuu

SEQ ID NO: 1502019 - RNA, 19 nt, Artificial Sequence
  Description of Artificial Sequence: Synthetic oligonucleotide
aucaugauugcucuuucuu

SEQ ID NO: 1502020 - RNA, 19 nt, Artificial Sequence
  Description of Artificial Sequence: Synthetic oligonucleotide
aagaacagcuugauccgag

SEQ ID NO: 1502021 - RNA, 19 nt, Artificial Sequence
  Description of Artificial Sequence: Synthetic oligonucleotide
gauccgguaugucucugcc

SEQ ID NO: 1502022 - RNA, 19 nt, Artificial Sequence
  Description of Artificial Sequence: Synthetic oligonucleotide
uguacucacagcugcucga

SEQ ID NO: 1502023 - RNA, 19 nt, Artificial Sequence
  Description of Artificial Sequence: Synthetic oligonucleotide
uuuugauaguagggcaaag

SEQ ID NO: 1502024 - RNA, 19 nt, Artificial Sequence
  Description of Artificial Sequence: Synthetic oligonucleotide
cauagcaaauucuugucaa

SEQ ID NO: 1502025 - RNA, 19 nt, Artificial Sequence
  Description of Artificial Sequence: Synthetic oligonucleotide
gauccauucaagaacgucu

SEQ ID NO: 1502026 - RNA, 19 nt, Artificial Sequence
  Description of Artificial Sequence: Synthetic oligonucleotide
caauaaagugugcggaauc

SEQ ID NO: 1502027 - RNA, 19 nt, Artificial Sequence
  Description of Artificial Sequence: Synthetic oligonucleotide
ucuuuccgcuuucaccaag

SEQ ID NO: 1502028 - RNA, 19 nt, Artificial Sequence
  Description of Artificial Sequence: Synthetic oligonucleotide
uccgaugugguuucccugu

SEQ ID NO: 1502029 - RNA, 19 nt, Artificial Sequence
  Description of Artificial Sequence: Synthetic oligonucleotide
uauggaacacuugaagaua

SEQ ID NO: 1502030 - RNA, 19 nt, Artificial Sequence
  Description of Artificial Sequence: Synthetic oligonucleotide
aaugccacacagcgcacaa

SEQ ID NO: 1502031 - RNA, 19 nt, Artificial Sequence
  Description of Artificial Sequence: Synthetic oligonucleotide
acagcuugauccgagcuug

SEQ ID NO: 1502032 - RNA, 19 nt, Artificial Sequence
  Description of Artificial Sequence: Synthetic oligonucleotide
ugucaaugccacacagcgc

SEQ ID NO: 1502033 - RNA, 19 nt, Artificial Sequence
  Description of Artificial Sequence: Synthetic oligonucleotide
cuucguggcagccucggag

SEQ ID NO: 1502034 - RNA, 19 nt, Artificial Sequence
  Description of Artificial Sequence: Synthetic oligonucleotide
ugcggaaucugcagccucc

SEQ ID NO: 1502035 - RNA, 19 nt, Artificial Sequence
  Description of Artificial Sequence: Synthetic oligonucleotide
uugcuuguagugacagccc

SEQ ID NO: 1502036 - RNA, 19 nt, Artificial Sequence
  Description of Artificial Sequence: Synthetic oligonucleotide
agggcaaagcuucuuuuga

SEQ ID NO: 1502037 - RNA, 19 nt, Artificial Sequence
  Description of Artificial Sequence: Synthetic oligonucleotide
acagcgcacaagcuccugg

SEQ ID NO: 1502038 - RNA, 19 nt, Artificial Sequence
  Description of Artificial Sequence: Synthetic oligonucleotide
aaagugugcggaaucugca

SEQ ID NO: 1502039 - RNA, 19 nt, Artificial Sequence
  Description of Artificial Sequence: Synthetic oligonucleotide
uucuugucaaugccacaca

SEQ ID NO: 1502040 - RNA, 19 nt, Artificial Sequence
  Description of Artificial Sequence: Synthetic oligonucleotide
agucaccgaaugcuccuac

SEQ ID NO: 1502041 - RNA, 19 nt, Artificial Sequence
  Description of Artificial Sequence: Synthetic oligonucleotide
ucgccauagcaaauucuug

SEQ ID NO: 1502042 - RNA, 19 nt, Artificial Sequence
  Description of Artificial Sequence: Synthetic oligonucleotide
gugacugcuaaaugccacc

SEQ ID NO: 1502043 - RNA, 19 nt, Artificial Sequence
  Description of Artificial Sequence: Synthetic oligonucleotide
ucaugauagggguucucaa

SEQ ID NO: 1502044 - RNA, 19 nt, Artificial Sequence
  Description of Artificial Sequence: Synthetic oligonucleotide
uggucuugcuucccagaag

SEQ ID NO: 1502045 - RNA, 19 nt, Artificial Sequence
  Description of Artificial Sequence: Synthetic oligonucleotide
uccucuuguccugcgaucc

SEQ ID NO: 1502046 - RNA, 19 nt, Artificial Sequence
  Description of Artificial Sequence: Synthetic oligonucleotide
gcaucguggaaucccaggg

SEQ ID NO: 1502047 - RNA, 19 nt, Artificial Sequence
  Description of Artificial Sequence: Synthetic oligonucleotide
guugcuuugcuuguaguga

SEQ ID NO: 1502048 - RNA, 19 nt, Artificial Sequence
  Description of Artificial Sequence: Synthetic oligonucleotide
agggcuuuccccaggguac

SEQ ID NO: 1502049 - RNA, 19 nt, Artificial Sequence
  Description of Artificial Sequence: Synthetic oligonucleotide
uccugcgauccauucaaga

SEQ ID NO: 1502050 - RNA, 19 nt, Artificial Sequence
  Description of Artificial Sequence: Synthetic oligonucleotide
aagaacgucucaaucugaa

SEQ ID NO: 1502051 - RNA, 19 nt, Artificial Sequence
  Description of Artificial Sequence: Synthetic oligonucleotide
gaaaauacugcucggccau

SEQ ID NO: 1502052 - RNA, 19 nt, Artificial Sequence
  Description of Artificial Sequence: Synthetic oligonucleotide
gcauccuaaaagcaaugcc

SEQ ID NO: 1502053 - RNA, 19 nt, Artificial Sequence
  Description of Artificial Sequence: Synthetic oligonucleotide
caggacgaugagaugugcc

SEQ ID NO: 1502054 - RNA, 19 nt, Artificial Sequence
  Description of Artificial Sequence: Synthetic oligonucleotide
cagagauugccuuggcuuc

SEQ ID NO: 1502055 - RNA, 19 nt, Artificial Sequence
  Description of Artificial Sequence: Synthetic oligonucleotide
gagagagguuuguucagca

SEQ ID NO: 1502056 - RNA, 19 nt, Artificial Sequence
  Description of Artificial Sequence: Synthetic oligonucleotide
ugagaugcggaagauucau

SEQ ID NO: 1502057 - RNA, 19 nt, Artificial Sequence
  Description of Artificial Sequence: Synthetic oligonucleotide
aguagggcaaagcuucuuu

SEQ ID NO: 1502058 - RNA, 19 nt, Artificial Sequence
  Description of Artificial Sequence: Synthetic oligonucleotide
cugcucggccauaucacgg

SEQ ID NO: 1502059 - RNA, 19 nt, Artificial Sequence
  Description of Artificial Sequence: Synthetic oligonucleotide
uuacccauuccuccuuuau

SEQ ID NO: 1502060 - RNA, 19 nt, Artificial Sequence
  Description of Artificial Sequence: Synthetic oligonucleotide
cagagacucucucaggauc

SEQ ID NO: 1502061 - RNA, 19 nt, Artificial Sequence
  Description of Artificial Sequence: Synthetic oligonucleotide
caucguggaaucccagggc

SEQ ID NO: 1502062 - RNA, 19 nt, Artificial Sequence
  Description of Artificial Sequence: Synthetic oligonucleotide
uuccgcuuucaccaaguuc

SEQ ID NO: 1502063 - RNA, 19 nt, Artificial Sequence
  Description of Artificial Sequence: Synthetic oligonucleotide
cuuuaguuuggcaugugcu

SEQ ID NO: 1502064 - RNA, 19 nt, Artificial Sequence
  Description of Artificial Sequence: Synthetic oligonucleotide
ucucugaggcuucuuuaaa

SEQ ID NO: 1502065 - RNA, 19 nt, Artificial Sequence
  Description of Artificial Sequence: Synthetic oligonucleotide
ugauacaguugugcaaaga

SEQ ID NO: 1502066 - RNA, 19 nt, Artificial Sequence
  Description of Artificial Sequence: Synthetic oligonucleotide
uucguggcagccucggagu

SEQ ID NO: 1502067 - RNA, 19 nt, Artificial Sequence
  Description of Artificial Sequence: Synthetic oligonucleotide
guauugucaugauaggggu

SEQ ID NO: 1502068 - RNA, 19 nt, Artificial Sequence
  Description of Artificial Sequence: Synthetic oligonucleotide
aaagcaaugccaagucuuu

SEQ ID NO: 1502069 - RNA, 19 nt, Artificial Sequence
  Description of Artificial Sequence: Synthetic oligonucleotide
uuuuggacagugugucuau

SEQ ID NO: 1502070 - RNA, 19 nt, Artificial Sequence
  Description of Artificial Sequence: Synthetic oligonucleotide
auaucuguauugucaugau

SEQ ID NO: 1502071 - RNA, 19 nt, Artificial Sequence
  Description of Artificial Sequence: Synthetic oligonucleotide
cucggccauaucacggugg

SEQ ID NO: 1502072 - RNA, 19 nt, Artificial Sequence
  Description of Artificial Sequence: Synthetic oligonucleotide
gugugcggaaucugcagcc

SEQ ID NO: 1502073 - RNA, 19 nt, Artificial Sequence
  Description of Artificial Sequence: Synthetic oligonucleotide
cauuccuccuuuauaaugu

SEQ ID NO: 1502074 - RNA, 19 nt, Artificial Sequence
  Description of Artificial Sequence: Synthetic oligonucleotide
uaguacugguacacacuca

SEQ ID NO: 1502075 - RNA, 19 nt, Artificial Sequence
  Description of Artificial Sequence: Synthetic oligonucleotide
agcaccagaucacccgaag

SEQ ID NO: 1502076 - RNA, 19 nt, Artificial Sequence
  Description of Artificial Sequence: Synthetic oligonucleotide
gcguccacaguugagaugc

SEQ ID NO: 1502077 - RNA, 19 nt, Artificial Sequence
  Description of Artificial Sequence: Synthetic oligonucleotide
aaauacugcucggccauau

SEQ ID NO: 1502078 - RNA, 19 nt, Artificial Sequence
  Description of Artificial Sequence: Synthetic oligonucleotide
cuaaaugccaccuccuggu

SEQ ID NO: 1502079 - RNA, 19 nt, Artificial Sequence
  Description of Artificial Sequence: Synthetic oligonucleotide
ugugcuccgaugugguuuc

SEQ ID NO: 1502080 - RNA, 19 nt, Artificial Sequence
  Description of Artificial Sequence: Synthetic oligonucleotide
ucggccauaucacgguggu

SEQ ID NO: 1502081 - RNA, 19 nt, Artificial Sequence
  Description of Artificial Sequence: Synthetic oligonucleotide
uauugucaugauagggguu

SEQ ID NO: 1502082 - RNA, 19 nt, Artificial Sequence
  Description of Artificial Sequence: Synthetic oligonucleotide
ucccuuaguacugguacac

SEQ ID NO: 1502083 - RNA, 19 nt, Artificial Sequence
  Description of Artificial Sequence: Synthetic oligonucleotide
ugccagcucccuuaguacu

SEQ ID NO: 1502084 - RNA, 19 nt, Artificial Sequence
  Description of Artificial Sequence: Synthetic oligonucleotide
ugcuguaugcuggagcaaa

SEQ ID NO: 1502085 - RNA, 19 nt, Artificial Sequence
  Description of Artificial Sequence: Synthetic oligonucleotide
acacacucaagacuccuuu

SEQ ID NO: 1502086 - RNA, 19 nt, Artificial Sequence
  Description of Artificial Sequence: Synthetic oligonucleotide
agauuaacauaugccucug

SEQ ID NO: 1502087 - RNA, 19 nt, Artificial Sequence
  Description of Artificial Sequence: Synthetic oligonucleotide
uugauccgagcuuggauuu

SEQ ID NO: 1502088 - RNA, 19 nt, Artificial Sequence
  Description of Artificial Sequence: Synthetic oligonucleotide
cuauggaacacuugaagau

SEQ ID NO: 1502089 - RNA, 19 nt, Artificial Sequence
  Description of Artificial Sequence: Synthetic oligonucleotide
cacaguugagaugcggaag

SEQ ID NO: 1502090 - RNA, 19 nt, Artificial Sequence
  Description of Artificial Sequence: Synthetic oligonucleotide
cucaggacgaugagaugug

SEQ ID NO: 1502091 - RNA, 19 nt, Artificial Sequence
  Description of Artificial Sequence: Synthetic oligonucleotide
cagauuaacauaugccucu

SEQ ID NO: 1502092 - RNA, 19 nt, Artificial Sequence
  Description of Artificial Sequence: Synthetic oligonucleotide
uacccauuccuccuuuaua

SEQ ID NO: 1502093 - RNA, 19 nt, Artificial Sequence
  Description of Artificial Sequence: Synthetic oligonucleotide
guaugucucugccaccuca

SEQ ID NO: 1502094 - RNA, 19 nt, Artificial Sequence
  Description of Artificial Sequence: Synthetic oligonucleotide
uccuuucaucuuuggugag

SEQ ID NO: 1502095 - RNA, 19 nt, Artificial Sequence
  Description of Artificial Sequence: Synthetic oligonucleotide
guuuguucagcauccuaaa

SEQ ID NO: 1502096 - RNA, 19 nt, Artificial Sequence
  Description of Artificial Sequence: Synthetic oligonucleotide
ccagauuaacauaugccuc

SEQ ID NO: 1502097 - RNA, 19 nt, Artificial Sequence
  Description of Artificial Sequence: Synthetic oligonucleotide
accaaguucucugaggcuu

SEQ ID NO: 1502098 - RNA, 19 nt, Artificial Sequence
  Description of Artificial Sequence: Synthetic oligonucleotide
cuuguccugcgauccauuc

SEQ ID NO: 1502099 - RNA, 19 nt, Artificial Sequence
  Description of Artificial Sequence: Synthetic oligonucleotide
auccuaaaagcaaugccaa

SEQ ID NO: 1502100 - RNA, 19 nt, Artificial Sequence
  Description of Artificial Sequence: Synthetic oligonucleotide
ccuuaguacugguacacac

SEQ ID NO: 1502101 - RNA, 19 nt, Artificial Sequence
  Description of Artificial Sequence: Synthetic oligonucleotide
agagacucucucaggauca

SEQ ID NO: 1502102 - RNA, 19 nt, Artificial Sequence
  Description of Artificial Sequence: Synthetic oligonucleotide
cugcuaguuuccaauguga

SEQ ID NO: 1502103 - RNA, 19 nt, Artificial Sequence
  Description of Artificial Sequence: Synthetic oligonucleotide
gcucccuuaguacugguac

SEQ ID NO: 1502104 - RNA, 19 nt, Artificial Sequence
  Description of Artificial Sequence: Synthetic oligonucleotide
gagaucuauggaacacuug

SEQ ID NO: 1502105 - RNA, 19 nt, Artificial Sequence
  Description of Artificial Sequence: Synthetic oligonucleotide
aucuuuggugagcucagua

SEQ ID NO: 1502106 - RNA, 19 nt, Artificial Sequence
  Description of Artificial Sequence: Synthetic oligonucleotide
ggccuguuuguacucacag

SEQ ID NO: 1502107 - RNA, 19 nt, Artificial Sequence
  Description of Artificial Sequence: Synthetic oligonucleotide
gugacagcccuuucagcug

SEQ ID NO: 1502108 - RNA, 19 nt, Artificial Sequence
  Description of Artificial Sequence: Synthetic oligonucleotide
ggagguagccuugagccag

SEQ ID NO: 1502109 - RNA, 19 nt, Artificial Sequence
  Description of Artificial Sequence: Synthetic oligonucleotide
uucccugguauguggugca

SEQ ID NO: 1502110 - RNA, 19 nt, Artificial Sequence
  Description of Artificial Sequence: Synthetic oligonucleotide
uggagguagccuugagcca

SEQ ID NO: 1502111 - RNA, 19 nt, Artificial Sequence
  Description of Artificial Sequence: Synthetic oligonucleotide
cuuuggugagcucaguaua

SEQ ID NO: 1502112 - RNA, 19 nt, Artificial Sequence
  Description of Artificial Sequence: Synthetic oligonucleotide
gaaaggaacuugacucuuc

SEQ ID NO: 1502113 - RNA, 19 nt, Artificial Sequence
  Description of Artificial Sequence: Synthetic oligonucleotide
ccagaucacccgaagggcg

SEQ ID NO: 1502114 - RNA, 19 nt, Artificial Sequence
  Description of Artificial Sequence: Synthetic oligonucleotide
auguugcuuugcuuguagu

SEQ ID NO: 1502115 - RNA, 19 nt, Artificial Sequence
  Description of Artificial Sequence: Synthetic oligonucleotide
uucugaccuugauacaguu

SEQ ID NO: 1502116 - RNA, 19 nt, Artificial Sequence
  Description of Artificial Sequence: Synthetic oligonucleotide
auggaacacuugaagauau

SEQ ID NO: 1502117 - RNA, 19 nt, Artificial Sequence
  Description of Artificial Sequence: Synthetic oligonucleotide
agcuuggauuucuuaccca

SEQ ID NO: 1502118 - RNA, 19 nt, Artificial Sequence
  Description of Artificial Sequence: Synthetic oligonucleotide
agcagcccgggcaauaaag

SEQ ID NO: 1502119 - RNA, 19 nt, Artificial Sequence
  Description of Artificial Sequence: Synthetic oligonucleotide
ugagucgccauagcaaauu

SEQ ID NO: 1502120 - RNA, 19 nt, Artificial Sequence
  Description of Artificial Sequence: Synthetic oligonucleotide
gagucgccauagcaaauuc

SEQ ID NO: 1502121 - RNA, 19 nt, Artificial Sequence
  Description of Artificial Sequence: Synthetic oligonucleotide
agagagguuuguucagcau

SEQ ID NO: 1502122 - RNA, 19 nt, Artificial Sequence
  Description of Artificial Sequence: Synthetic oligonucleotide
ucaggacgaugagaugugc

SEQ ID NO: 1502123 - RNA, 19 nt, Artificial Sequence
  Description of Artificial Sequence: Synthetic oligonucleotide
cagcauccuaaaagcaaug

SEQ ID NO: 1502124 - RNA, 19 nt, Artificial Sequence
  Description of Artificial Sequence: Synthetic oligonucleotide
caaugugagucgccauagc

SEQ ID NO: 1502125 - RNA, 19 nt, Artificial Sequence
  Description of Artificial Sequence: Synthetic oligonucleotide
auggaguuggccaggauuu

SEQ ID NO: 1502126 - RNA, 19 nt, Artificial Sequence
  Description of Artificial Sequence: Synthetic oligonucleotide
uacacacucaagacuccuu

SEQ ID NO: 1502127 - RNA, 19 nt, Artificial Sequence
  Description of Artificial Sequence: Synthetic oligonucleotide
gucaugauagggguucuca

SEQ ID NO: 1502128 - RNA, 19 nt, Artificial Sequence
  Description of Artificial Sequence: Synthetic oligonucleotide
cuuaguacugguacacacu

SEQ ID NO: 1502129 - RNA, 19 nt, Artificial Sequence
  Description of Artificial Sequence: Synthetic oligonucleotide
ggcaaagcuucuuuugauc

SEQ ID NO: 1502130 - RNA, 19 nt, Artificial Sequence
  Description of Artificial Sequence: Synthetic oligonucleotide
ucuuacccauuccuccuuu

SEQ ID NO: 1502131 - RNA, 19 nt, Artificial Sequence
  Description of Artificial Sequence: Synthetic oligonucleotide
gaagucaccgaaugcuccu

SEQ ID NO: 1502132 - RNA, 19 nt, Artificial Sequence
  Description of Artificial Sequence: Synthetic oligonucleotide
uuugaucuuuucugaccuu

SEQ ID NO: 1502133 - RNA, 19 nt, Artificial Sequence
  Description of Artificial Sequence: Synthetic oligonucleotide
gaugcggaagauucauggu

SEQ ID NO: 1502134 - RNA, 19 nt, Artificial Sequence
  Description of Artificial Sequence: Synthetic oligonucleotide
augugagucgccauagcaa

SEQ ID NO: 1502135 - RNA, 19 nt, Artificial Sequence
  Description of Artificial Sequence: Synthetic oligonucleotide
ccugaaaauacugcucggc

SEQ ID NO: 1502136 - RNA, 19 nt, Artificial Sequence
  Description of Artificial Sequence: Synthetic oligonucleotide
agagaucuauggaacacuu

SEQ ID NO: 1502137 - RNA, 19 nt, Artificial Sequence
  Description of Artificial Sequence: Synthetic oligonucleotide
aguauauuccaaagccuuu

SEQ ID NO: 1502138 - RNA, 19 nt, Artificial Sequence
  Description of Artificial Sequence: Synthetic oligonucleotide
gcuggagguagccuugagc

SEQ ID NO: 1502139 - RNA, 19 nt, Artificial Sequence
  Description of Artificial Sequence: Synthetic oligonucleotide
gcuuugcuuguagugacag

SEQ ID NO: 1502140 - RNA, 19 nt, Artificial Sequence
  Description of Artificial Sequence: Synthetic oligonucleotide
agggcguccacaguugaga

SEQ ID NO: 1502141 - RNA, 19 nt, Artificial Sequence
  Description of Artificial Sequence: Synthetic oligonucleotide
gagaugcggaagauucaug

SEQ ID NO: 1502142 - RNA, 19 nt, Artificial Sequence
  Description of Artificial Sequence: Synthetic oligonucleotide
gacugcuaaaugccaccuc

SEQ ID NO: 1502143 - RNA, 19 nt, Artificial Sequence
  Description of Artificial Sequence: Synthetic oligonucleotide
guccacaguugagaugcgg

SEQ ID NO: 1502144 - RNA, 19 nt, Artificial Sequence
  Description of Artificial Sequence: Synthetic oligonucleotide
cuugauccgagcuuggauu

SEQ ID NO: 1502145 - RNA, 19 nt, Artificial Sequence
  Description of Artificial Sequence: Synthetic oligonucleotide
cugcagugacugcuaaaug

SEQ ID NO: 1502146 - RNA, 19 nt, Artificial Sequence
  Description of Artificial Sequence: Synthetic oligonucleotide
caguauauuccaaagccuu

SEQ ID NO: 1502147 - RNA, 19 nt, Artificial Sequence
  Description of Artificial Sequence: Synthetic oligonucleotide
gaagggcguccacaguuga

SEQ ID NO: 1502148 - RNA, 19 nt, Artificial Sequence
  Description of Artificial Sequence: Synthetic oligonucleotide
cuccgaugugguuucccug

SEQ ID NO: 1502149 - RNA, 19 nt, Artificial Sequence
  Description of Artificial Sequence: Synthetic oligonucleotide
caagaacgucucaaucuga

SEQ ID NO: 1502150 - RNA, 19 nt, Artificial Sequence
  Description of Artificial Sequence: Synthetic oligonucleotide
agcccgggcaauaaagugu

SEQ ID NO: 1502151 - RNA, 19 nt, Artificial Sequence
  Description of Artificial Sequence: Synthetic oligonucleotide
auguggugcacaaugccau

SEQ ID NO: 1502152 - RNA, 19 nt, Artificial Sequence
  Description of Artificial Sequence: Synthetic oligonucleotide
uggagcaaacagccuuaaa

SEQ ID NO: 1502153 - RNA, 19 nt, Artificial Sequence
  Description of Artificial Sequence: Synthetic oligonucleotide
aagggcguccacaguugag

SEQ ID NO: 1502154 - RNA, 19 nt, Artificial Sequence
  Description of Artificial Sequence: Synthetic oligonucleotide
ggauuucuuacccauuccu

SEQ ID NO: 1502155 - RNA, 19 nt, Artificial Sequence
  Description of Artificial Sequence: Synthetic oligonucleotide
caugauugcucuuucuuuu

SEQ ID NO: 1502156 - RNA, 19 nt, Artificial Sequence
  Description of Artificial Sequence: Synthetic oligonucleotide
cucucucuucacacaggug

SEQ ID NO: 1502157 - RNA, 19 nt, Artificial Sequence
  Description of Artificial Sequence: Synthetic oligonucleotide
augugcuccgaugugguuu

SEQ ID NO: 1502158 - RNA, 19 nt, Artificial Sequence
  Description of Artificial Sequence: Synthetic oligonucleotide
cauugugcuuggccuuccc

SEQ ID NO: 1502159 - RNA, 19 nt, Artificial Sequence
  Description of Artificial Sequence: Synthetic oligonucleotide
cugcccaggauccgguaug

SEQ ID NO: 1502160 - RNA, 19 nt, Artificial Sequence
  Description of Artificial Sequence: Synthetic oligonucleotide
ugugcggaaucugcagccu

SEQ ID NO: 1502161 - RNA, 19 nt, Artificial Sequence
  Description of Artificial Sequence: Synthetic oligonucleotide
agcugcucgaguaggauuu

SEQ ID NO: 1502162 - RNA, 19 nt, Artificial Sequence
  Description of Artificial Sequence: Synthetic oligonucleotide
uuccaaugugagucgccau

SEQ ID NO: 1502163 - RNA, 19 nt, Artificial Sequence
  Description of Artificial Sequence: Synthetic oligonucleotide
gauggccuguuuguacuca

SEQ ID NO: 1502164 - RNA, 19 nt, Artificial Sequence
  Description of Artificial Sequence: Synthetic oligonucleotide
guacugguacacacucaag

SEQ ID NO: 1502165 - RNA, 19 nt, Artificial Sequence
  Description of Artificial Sequence: Synthetic oligonucleotide
gggcugaagucaccgaaug

SEQ ID NO: 1502166 - RNA, 19 nt, Artificial Sequence
  Description of Artificial Sequence: Synthetic oligonucleotide
ggcugaagucaccgaaugc

SEQ ID NO: 1502167 - RNA, 19 nt, Artificial Sequence
  Description of Artificial Sequence: Synthetic oligonucleotide
agaucacccgaagggcguc

SEQ ID NO: 1502168 - RNA, 19 nt, Artificial Sequence
  Description of Artificial Sequence: Synthetic oligonucleotide
uuguagugacagcccuuuc

SEQ ID NO: 1502169 - RNA, 19 nt, Artificial Sequence
  Description of Artificial Sequence: Synthetic oligonucleotide
ccgaaugcuccuacuuugg

SEQ ID NO: 1502170 - RNA, 19 nt, Artificial Sequence
  Description of Artificial Sequence: Synthetic oligonucleotide
uggcuucguggcagccucg

SEQ ID NO: 1502171 - RNA, 19 nt, Artificial Sequence
  Description of Artificial Sequence: Synthetic oligonucleotide
cagugacugcuaaaugcca

SEQ ID NO: 1502172 - RNA, 19 nt, Artificial Sequence
  Description of Artificial Sequence: Synthetic oligonucleotide
guaggauuuugcucucucu

SEQ ID NO: 1502173 - RNA, 19 nt, Artificial Sequence
  Description of Artificial Sequence: Synthetic oligonucleotide
ggagagagguuuguucagc

SEQ ID NO: 1502174 - RNA, 19 nt, Artificial Sequence
  Description of Artificial Sequence: Synthetic oligonucleotide
ggcaauaaagugugcggaa

SEQ ID NO: 1502175 - RNA, 19 nt, Artificial Sequence
  Description of Artificial Sequence: Synthetic oligonucleotide
gauucauggugaugcugcu

SEQ ID NO: 1502176 - RNA, 19 nt, Artificial Sequence
  Description of Artificial Sequence: Synthetic oligonucleotide
cucccuuaguacugguaca

SEQ ID NO: 1502177 - RNA, 19 nt, Artificial Sequence
  Description of Artificial Sequence: Synthetic oligonucleotide
ggacgaugagaugugcccc

SEQ ID NO: 1502178 - RNA, 19 nt, Artificial Sequence
  Description of Artificial Sequence: Synthetic oligonucleotide
cugaacacacuucuuuagu

SEQ ID NO: 1502179 - RNA, 19 nt, Artificial Sequence
  Description of Artificial Sequence: Synthetic oligonucleotide
ccgggcaauaaagugugcg

SEQ ID NO: 1502180 - RNA, 19 nt, Artificial Sequence
  Description of Artificial Sequence: Synthetic oligonucleotide
ggaucaugauugcucuuuc

SEQ ID NO: 1502181 - RNA, 19 nt, Artificial Sequence
  Description of Artificial Sequence: Synthetic oligonucleotide
ccaaugugagucgccauag

SEQ ID NO: 1502182 - RNA, 19 nt, Artificial Sequence
  Description of Artificial Sequence: Synthetic oligonucleotide
cagcuugauccgagcuugg

SEQ ID NO: 1502183 - RNA, 19 nt, Artificial Sequence
  Description of Artificial Sequence: Synthetic oligonucleotide
caugauagggguucucaau

SEQ ID NO: 1502184 - RNA, 19 nt, Artificial Sequence
  Description of Artificial Sequence: Synthetic oligonucleotide
ugcuccgaugugguuuccc

SEQ ID NO: 1502185 - RNA, 19 nt, Artificial Sequence
  Description of Artificial Sequence: Synthetic oligonucleotide
ggccauaucacgguggucu

SEQ ID NO: 1502186 - RNA, 19 nt, Artificial Sequence
  Description of Artificial Sequence: Synthetic oligonucleotide
acgucucaaucugaacaca

SEQ ID NO: 1502187 - RNA, 19 nt, Artificial Sequence
  Description of Artificial Sequence: Synthetic oligonucleotide
gaucacccgaagggcgucc

SEQ ID NO: 1502188 - RNA, 19 nt, Artificial Sequence
  Description of Artificial Sequence: Synthetic oligonucleotide
gggcaauaaagugugcgga

SEQ ID NO: 1502189 - RNA, 19 nt, Artificial Sequence
  Description of Artificial Sequence: Synthetic oligonucleotide
cagcaucguggaaucccag

SEQ ID NO: 1502190 - RNA, 19 nt, Artificial Sequence
  Description of Artificial Sequence: Synthetic oligonucleotide
auaucacgguggucuugcu

SEQ ID NO: 1502191 - RNA, 19 nt, Artificial Sequence
  Description of Artificial Sequence: Synthetic oligonucleotide
uccugguuggagagagguu

SEQ ID NO: 1502192 - RNA, 19 nt, Artificial Sequence
  Description of Artificial Sequence: Synthetic oligonucleotide
gccaagucuuucucagagc

SEQ ID NO: 1502193 - RNA, 19 nt, Artificial Sequence
  Description of Artificial Sequence: Synthetic oligonucleotide
cgucucaaucugaacacac

SEQ ID NO: 1502194 - RNA, 19 nt, Artificial Sequence
  Description of Artificial Sequence: Synthetic oligonucleotide
agacucucucaggaucaug

SEQ ID NO: 1502195 - RNA, 19 nt, Artificial Sequence
  Description of Artificial Sequence: Synthetic oligonucleotide
agcgcacaagcuccuggau

SEQ ID NO: 1502196 - RNA, 19 nt, Artificial Sequence
  Description of Artificial Sequence: Synthetic oligonucleotide
ccugcgauccauucaagaa

SEQ ID NO: 1502197 - RNA, 19 nt, Artificial Sequence
  Description of Artificial Sequence: Synthetic oligonucleotide
gguacacacucaagacucc

SEQ ID NO: 1502198 - RNA, 19 nt, Artificial Sequence
  Description of Artificial Sequence: Synthetic oligonucleotide
cucugaggcuucuuuaaau

SEQ ID NO: 1502199 - RNA, 19 nt, Artificial Sequence
  Description of Artificial Sequence: Synthetic oligonucleotide
ccucugcuaguuuccaaug

SEQ ID NO: 1502200 - RNA, 19 nt, Artificial Sequence
  Description of Artificial Sequence: Synthetic oligonucleotide
cuuuccgcuuucaccaagu

SEQ ID NO: 1502201 - RNA, 19 nt, Artificial Sequence
  Description of Artificial Sequence: Synthetic oligonucleotide
cccgugagaaaugacugac

SEQ ID NO: 1502202 - RNA, 19 nt, Artificial Sequence
  Description of Artificial Sequence: Synthetic oligonucleotide
ugcccaggauccgguaugu

SEQ ID NO: 1502203 - RNA, 19 nt, Artificial Sequence
  Description of Artificial Sequence: Synthetic oligonucleotide
cagcgcacaagcuccugga

SEQ ID NO: 1502204 - RNA, 19 nt, Artificial Sequence
  Description of Artificial Sequence: Synthetic oligonucleotide
gcuaguuuccaaugugagu

SEQ ID NO: 1502205 - RNA, 19 nt, Artificial Sequence
  Description of Artificial Sequence: Synthetic oligonucleotide
ccuaaaagcaaugccaagu

SEQ ID NO: 1502206 - RNA, 19 nt, Artificial Sequence
  Description of Artificial Sequence: Synthetic oligonucleotide
ucacccgaagggcguccac

SEQ ID NO: 1502207 - RNA, 19 nt, Artificial Sequence
  Description of Artificial Sequence: Synthetic oligonucleotide
gugcggaaucugcagccuc

SEQ ID NO: 1502208 - RNA, 19 nt, Artificial Sequence
  Description of Artificial Sequence: Synthetic oligonucleotide
gggguucucaauggaguug

SEQ ID NO: 1502209 - RNA, 19 nt, Artificial Sequence
  Description of Artificial Sequence: Synthetic oligonucleotide
gucgccauagcaaauucuu

SEQ ID NO: 1502210 - RNA, 19 nt, Artificial Sequence
  Description of Artificial Sequence: Synthetic oligonucleotide
aguuuggcaugugcuccga

SEQ ID NO: 1502211 - RNA, 19 nt, Artificial Sequence
  Description of Artificial Sequence: Synthetic oligonucleotide
ccuuuauaauguucccaca

SEQ ID NO: 1502212 - RNA, 19 nt, Artificial Sequence
  Description of Artificial Sequence: Synthetic oligonucleotide
ccuugauacaguugugcaa

SEQ ID NO: 1502213 - RNA, 19 nt, Artificial Sequence
  Description of Artificial Sequence: Synthetic oligonucleotide
uaguagggcaaagcuucuu

SEQ ID NO: 1502214 - RNA, 19 nt, Artificial Sequence
  Description of Artificial Sequence: Synthetic oligonucleotide
cuugaauggaaaggaacuu

SEQ ID NO: 1502215 - RNA, 19 nt, Artificial Sequence
  Description of Artificial Sequence: Synthetic oligonucleotide
guagggcaaagcuucuuuu

SEQ ID NO: 1502216 - RNA, 19 nt, Artificial Sequence
  Description of Artificial Sequence: Synthetic oligonucleotide
gcccgggcaauaaagugug

SEQ ID NO: 1502217 - RNA, 19 nt, Artificial Sequence
  Description of Artificial Sequence: Synthetic oligonucleotide
ucguggcagccucggaguu

SEQ ID NO: 1502218 - RNA, 19 nt, Artificial Sequence
  Description of Artificial Sequence: Synthetic oligonucleotide
ggcguccacaguugagaug

SEQ ID NO: 1502219 - RNA, 19 nt, Artificial Sequence
  Description of Artificial Sequence: Synthetic oligonucleotide
cugcucgaguaggauuuug

SEQ ID NO: 1502220 - RNA, 19 nt, Artificial Sequence
  Description of Artificial Sequence: Synthetic oligonucleotide
cucugccaccucagggcug

SEQ ID NO: 1502221 - RNA, 19 nt, Artificial Sequence
  Description of Artificial Sequence: Synthetic oligonucleotide
cuuacccauuccuccuuua

SEQ ID NO: 1502222 - RNA, 19 nt, Artificial Sequence
  Description of Artificial Sequence: Synthetic oligonucleotide
ccaaguucucugaggcuuc

SEQ ID NO: 1502223 - RNA, 19 nt, Artificial Sequence
  Description of Artificial Sequence: Synthetic oligonucleotide
ggaaucccagggcuugcuc

SEQ ID NO: 1502224 - RNA, 19 nt, Artificial Sequence
  Description of Artificial Sequence: Synthetic oligonucleotide
caaugccacacagcgcaca

SEQ ID NO: 1502225 - RNA, 19 nt, Artificial Sequence
  Description of Artificial Sequence: Synthetic oligonucleotide
gcucgaguaggauuuugcu

SEQ ID NO: 1502226 - RNA, 19 nt, Artificial Sequence
  Description of Artificial Sequence: Synthetic oligonucleotide
augccucugcuaguuucca

SEQ ID NO: 1502227 - RNA, 19 nt, Artificial Sequence
  Description of Artificial Sequence: Synthetic oligonucleotide
cgaaugcuccuacuuuggc

SEQ ID NO: 1502228 - RNA, 19 nt, Artificial Sequence
  Description of Artificial Sequence: Synthetic oligonucleotide
ggcuucguggcagccucgg

SEQ ID NO: 1502229 - RNA, 19 nt, Artificial Sequence
  Description of Artificial Sequence: Synthetic oligonucleotide
cagaucacccgaagggcgu

SEQ ID NO: 1502230 - RNA, 19 nt, Artificial Sequence
  Description of Artificial Sequence: Synthetic oligonucleotide
gccuugagccagauuaaca

SEQ ID NO: 1502231 - RNA, 19 nt, Artificial Sequence
  Description of Artificial Sequence: Synthetic oligonucleotide
gucaccgaaugcuccuacu

SEQ ID NO: 1502232 - RNA, 19 nt, Artificial Sequence
  Description of Artificial Sequence: Synthetic oligonucleotide
guccugcgauccauucaag

SEQ ID NO: 1502233 - RNA, 19 nt, Artificial Sequence
  Description of Artificial Sequence: Synthetic oligonucleotide
ccauucaagaacgucucaa

SEQ ID NO: 1502234 - RNA, 19 nt, Artificial Sequence
  Description of Artificial Sequence: Synthetic oligonucleotide
gucuuuccgcuuucaccaa

SEQ ID NO: 1502235 - RNA, 19 nt, Artificial Sequence
  Description of Artificial Sequence: Synthetic oligonucleotide
gaagggacagcagggcuuu

SEQ ID NO: 1502236 - RNA, 19 nt, Artificial Sequence
  Description of Artificial Sequence: Synthetic oligonucleotide
gcuguaugcuggagcaaac

SEQ ID NO: 1502237 - RNA, 19 nt, Artificial Sequence
  Description of Artificial Sequence: Synthetic oligonucleotide
aucacccgaagggcgucca

SEQ ID NO: 1502238 - RNA, 19 nt, Artificial Sequence
  Description of Artificial Sequence: Synthetic oligonucleotide
gcucggccauaucacggug

SEQ ID NO: 1502239 - RNA, 19 nt, Artificial Sequence
  Description of Artificial Sequence: Synthetic oligonucleotide
ccuucccugguauguggug

SEQ ID NO: 1502240 - RNA, 19 nt, Artificial Sequence
  Description of Artificial Sequence: Synthetic oligonucleotide
ccacauugcagcaucuccu

SEQ ID NO: 1502241 - RNA, 19 nt, Artificial Sequence
  Description of Artificial Sequence: Synthetic oligonucleotide
cagugaucugcagaaaauu

SEQ ID NO: 1502242 - RNA, 19 nt, Artificial Sequence
  Description of Artificial Sequence: Synthetic oligonucleotide
gguaugucucugccaccuc

SEQ ID NO: 1502243 - RNA, 19 nt, Artificial Sequence
  Description of Artificial Sequence: Synthetic oligonucleotide
gcagcaucguggaauccca

SEQ ID NO: 1502244 - RNA, 19 nt, Artificial Sequence
  Description of Artificial Sequence: Synthetic oligonucleotide
gagguagccuugagccaga

SEQ ID NO: 1502245 - RNA, 19 nt, Artificial Sequence
  Description of Artificial Sequence: Synthetic oligonucleotide
ccacaguugagaugcggaa

SEQ ID NO: 1502246 - RNA, 19 nt, Artificial Sequence
  Description of Artificial Sequence: Synthetic oligonucleotide
cacccgaagggcguccaca

SEQ ID NO: 1502247 - RNA, 19 nt, Artificial Sequence
  Description of Artificial Sequence: Synthetic oligonucleotide
cgaagggcguccacaguug

SEQ ID NO: 1502248 - RNA, 19 nt, Artificial Sequence
  Description of Artificial Sequence: Synthetic oligonucleotide
gcuugauccgagcuuggau

SEQ ID NO: 1502249 - RNA, 19 nt, Artificial Sequence
  Description of Artificial Sequence: Synthetic oligonucleotide
agcucccuuaguacuggua

SEQ ID NO: 1502250 - RNA, 19 nt, Artificial Sequence
  Description of Artificial Sequence: Synthetic oligonucleotide
cgauccauucaagaacguc

SEQ ID NO: 1502251 - RNA, 19 nt, Artificial Sequence
  Description of Artificial Sequence: Synthetic oligonucleotide
gcuuucuuuggggcacaug

SEQ ID NO: 1502252 - RNA, 19 nt, Artificial Sequence
  Description of Artificial Sequence: Synthetic oligonucleotide
gggcaaagcuucuuuugau

SEQ ID NO: 1502253 - RNA, 19 nt, Artificial Sequence
  Description of Artificial Sequence: Synthetic oligonucleotide
ccgugagaaaugacugaca

SEQ ID NO: 1502254 - RNA, 19 nt, Artificial Sequence
  Description of Artificial Sequence: Synthetic oligonucleotide
caccgaaugcuccuacuuu

SEQ ID NO: 1502255 - RNA, 19 nt, Artificial Sequence
  Description of Artificial Sequence: Synthetic oligonucleotide
cauggugaugcugcuguau

SEQ ID NO: 1502256 - RNA, 19 nt, Artificial Sequence
  Description of Artificial Sequence: Synthetic oligonucleotide
gagauugccuuggcuucgu

SEQ ID NO: 1502257 - RNA, 19 nt, Artificial Sequence
  Description of Artificial Sequence: Synthetic oligonucleotide
gguccucuuguccugcgau

SEQ ID NO: 1502258 - RNA, 19 nt, Artificial Sequence
  Description of Artificial Sequence: Synthetic oligonucleotide
gcuccgaugugguuucccu

SEQ ID NO: 1502259 - RNA, 19 nt, Artificial Sequence
  Description of Artificial Sequence: Synthetic oligonucleotide
ccauaucacgguggucuug

SEQ ID NO: 1502260 - RNA, 19 nt, Artificial Sequence
  Description of Artificial Sequence: Synthetic oligonucleotide
ccgaugugguuucccugug

SEQ ID NO: 1502261 - RNA, 19 nt, Artificial Sequence
  Description of Artificial Sequence: Synthetic oligonucleotide
ggaaaggaacuugacucuu

SEQ ID NO: 1502262 - RNA, 19 nt, Artificial Sequence
  Description of Artificial Sequence: Synthetic oligonucleotide
guugugcaaagaacagcuu

SEQ ID NO: 1502263 - RNA, 19 nt, Artificial Sequence
  Description of Artificial Sequence: Synthetic oligonucleotide
gacagcccuuucagcugga

SEQ ID NO: 1502264 - RNA, 19 nt, Artificial Sequence
  Description of Artificial Sequence: Synthetic oligonucleotide
ggcuuuccccaggguacag

SEQ ID NO: 1502265 - RNA, 19 nt, Artificial Sequence
  Description of Artificial Sequence: Synthetic oligonucleotide
ccccgugagaaaugacuga

SEQ ID NO: 1502266 - RNA, 19 nt, Artificial Sequence
  Description of Artificial Sequence: Synthetic oligonucleotide
guuuggcaugugcuccgau

SEQ ID NO: 1502267 - RNA, 19 nt, Artificial Sequence
  Description of Artificial Sequence: Synthetic oligonucleotide
guggcagccucggaguuuu

SEQ ID NO: 1502268 - RNA, 19 nt, Artificial Sequence
  Description of Artificial Sequence: Synthetic oligonucleotide
cccgggcaauaaagugugc

SEQ ID NO: 1502269 - RNA, 19 nt, Artificial Sequence
  Description of Artificial Sequence: Synthetic oligonucleotide
cggaagauucauggugaug

SEQ ID NO: 1502270 - RNA, 19 nt, Artificial Sequence
  Description of Artificial Sequence: Synthetic oligonucleotide
gcuuuccccaggguacaga

SEQ ID NO: 1502271 - RNA, 19 nt, Artificial Sequence
  Description of Artificial Sequence: Synthetic oligonucleotide
caaguucucugaggcuucu

SEQ ID NO: 1502272 - RNA, 19 nt, Artificial Sequence
  Description of Artificial Sequence: Synthetic oligonucleotide
cucuuguccugcgauccau

SEQ ID NO: 1502273 - RNA, 19 nt, Artificial Sequence
  Description of Artificial Sequence: Synthetic oligonucleotide
cagcagcccgggcaauaaa

SEQ ID NO: 1502274 - RNA, 19 nt, Artificial Sequence
  Description of Artificial Sequence: Synthetic oligonucleotide
cugcuguaugcuggagcaa

SEQ ID NO: 1502275 - RNA, 19 nt, Artificial Sequence
  Description of Artificial Sequence: Synthetic oligonucleotide
cguccacaguugagaugcg

SEQ ID NO: 1502276 - RNA, 19 nt, Artificial Sequence
  Description of Artificial Sequence: Synthetic oligonucleotide
gcuccuacuuuggcuucca

SEQ ID NO: 1502277 - RNA, 19 nt, Artificial Sequence
  Description of Artificial Sequence: Synthetic oligonucleotide
gggcguccacaguugagau

SEQ ID NO: 1502278 - RNA, 19 nt, Artificial Sequence
  Description of Artificial Sequence: Synthetic oligonucleotide
cagcaucuccuuggaaagu

SEQ ID NO: 1502279 - RNA, 19 nt, Artificial Sequence
  Description of Artificial Sequence: Synthetic oligonucleotide
caguugagaugcggaagau

SEQ ID NO: 1502280 - RNA, 19 nt, Artificial Sequence
  Description of Artificial Sequence: Synthetic oligonucleotide
caauggaguuggccaggau

SEQ ID NO: 1502281 - RNA, 19 nt, Artificial Sequence
  Description of Artificial Sequence: Synthetic oligonucleotide
cccuuaguacugguacaca

SEQ ID NO: 1502282 - RNA, 19 nt, Artificial Sequence
  Description of Artificial Sequence: Synthetic oligonucleotide
gcggaagauucauggugau

SEQ ID NO: 1502283 - RNA, 19 nt, Artificial Sequence
  Description of Artificial Sequence: Synthetic oligonucleotide
cagcucccuuaguacuggu

SEQ ID NO: 1502284 - RNA, 19 nt, Artificial Sequence
  Description of Artificial Sequence: Synthetic oligonucleotide
cugguauguggugcacaau

SEQ ID NO: 1502285 - RNA, 19 nt, Artificial Sequence
  Description of Artificial Sequence: Synthetic oligonucleotide
gccauaucacgguggucuu

SEQ ID NO: 1502286 - RNA, 19 nt, Artificial Sequence
  Description of Artificial Sequence: Synthetic oligonucleotide
cccauuccuccuuuauaau

SEQ ID NO: 1502287 - RNA, 19 nt, Artificial Sequence
  Description of Artificial Sequence: Synthetic oligonucleotide
gguagccuugagccagauu

SEQ ID NO: 1502288 - RNA, 19 nt, Artificial Sequence
  Description of Artificial Sequence: Synthetic oligonucleotide
gcuuguagugacagcccuu

SEQ ID NO: 1502289 - RNA, 19 nt, Artificial Sequence
  Description of Artificial Sequence: Synthetic oligonucleotide
ccuucacaugagucaugcu

SEQ ID NO: 1502290 - RNA, 19 nt, Artificial Sequence
  Description of Artificial Sequence: Synthetic oligonucleotide
cgguaugucucugccaccu

SEQ ID NO: 1502291 - RNA, 19 nt, Artificial Sequence
  Description of Artificial Sequence: Synthetic oligonucleotide
gcggaaucugcagccuccu

SEQ ID NO: 1502292 - RNA, 19 nt, Artificial Sequence
  Description of Artificial Sequence: Synthetic oligonucleotide
ggggaucagucagccacau

SEQ ID NO: 1502293 - RNA, 19 nt, Artificial Sequence
  Description of Artificial Sequence: Synthetic oligonucleotide
gcgauccauucaagaacgu

SEQ ID NO: 1502294 - RNA, 19 nt, Artificial Sequence
  Description of Artificial Sequence: Synthetic oligonucleotide
gggaucagucagccacauu

SEQ ID NO: 1502295 - RNA, 19 nt, Artificial Sequence
  Description of Artificial Sequence: Synthetic oligonucleotide
gcugcucgaguaggauuuu

SEQ ID NO: 1502296 - RNA, 19 nt, Artificial Sequence
  Description of Artificial Sequence: Synthetic oligonucleotide
cccugcccaggauccggua

SEQ ID NO: 1502297 - RNA, 19 nt, Artificial Sequence
  Description of Artificial Sequence: Synthetic oligonucleotide
aacauaagguacuugacac

SEQ ID NO: 1502298 - RNA, 19 nt, Artificial Sequence
  Description of Artificial Sequence: Synthetic oligonucleotide
uuuauuaagaugcacccgg

SEQ ID NO: 1502299 - RNA, 19 nt, Artificial Sequence
  Description of Artificial Sequence: Synthetic oligonucleotide
uguuguauaacuuuugugu

SEQ ID NO: 1502300 - RNA, 19 nt, Artificial Sequence
  Description of Artificial Sequence: Synthetic oligonucleotide
uauaccucaaaccaaucag

SEQ ID NO: 1502301 - RNA, 19 nt, Artificial Sequence
  Description of Artificial Sequence: Synthetic oligonucleotide
auaacugucaaucuuguca

SEQ ID NO: 1502302 - RNA, 19 nt, Artificial Sequence
  Description of Artificial Sequence: Synthetic oligonucleotide
cauggaaugugaaucaugg

SEQ ID NO: 1502303 - RNA, 19 nt, Artificial Sequence
  Description of Artificial Sequence: Synthetic oligonucleotide
acacgcuuuauuaagaugc

SEQ ID NO: 1502304 - RNA, 19 nt, Artificial Sequence
  Description of Artificial Sequence: Synthetic oligonucleotide
uggaaugugaaucauggga

SEQ ID NO: 1502305 - RNA, 19 nt, Artificial Sequence
  Description of Artificial Sequence: Synthetic oligonucleotide
uucacugucucauaacagg

SEQ ID NO: 1502306 - RNA, 19 nt, Artificial Sequence
  Description of Artificial Sequence: Synthetic oligonucleotide
guugaaggcgaacauaagg

SEQ ID NO: 1502307 - RNA, 19 nt, Artificial Sequence
  Description of Artificial Sequence: Synthetic oligonucleotide
ugugaauacuggaagauau

SEQ ID NO: 1502308 - RNA, 19 nt, Artificial Sequence
  Description of Artificial Sequence: Synthetic oligonucleotide
acggaaaucagucuggaug

SEQ ID NO: 1502309 - RNA, 19 nt, Artificial Sequence
  Description of Artificial Sequence: Synthetic oligonucleotide
aaaacugucaaaguucccu

SEQ ID NO: 1502310 - RNA, 19 nt, Artificial Sequence
  Description of Artificial Sequence: Synthetic oligonucleotide
guacuugacacccuggagg

SEQ ID NO: 1502311 - RNA, 19 nt, Artificial Sequence
  Description of Artificial Sequence: Synthetic oligonucleotide
uugaaggcgaacauaaggu

SEQ ID NO: 1502312 - RNA, 19 nt, Artificial Sequence
  Description of Artificial Sequence: Synthetic oligonucleotide
gaagccgauggccauaacg

SEQ ID NO: 1502313 - RNA, 19 nt, Artificial Sequence
  Description of Artificial Sequence: Synthetic oligonucleotide
uaaguguccgccuuuacca

SEQ ID NO: 1502314 - RNA, 19 nt, Artificial Sequence
  Description of Artificial Sequence: Synthetic oligonucleotide
uguaccaccacggagggag

SEQ ID NO: 1502315 - RNA, 19 nt, Artificial Sequence
  Description of Artificial Sequence: Synthetic oligonucleotide
acugucucauaacagggcg

SEQ ID NO: 1502316 - RNA, 19 nt, Artificial Sequence
  Description of Artificial Sequence: Synthetic oligonucleotide
uggcagccgacaaagaugg

SEQ ID NO: 1502317 - RNA, 19 nt, Artificial Sequence
  Description of Artificial Sequence: Synthetic oligonucleotide
uuuaccaccuggcaguaca

SEQ ID NO: 1502318 - RNA, 19 nt, Artificial Sequence
  Description of Artificial Sequence: Synthetic oligonucleotide
acauaagguacuugacacc

SEQ ID NO: 1502319 - RNA, 19 nt, Artificial Sequence
  Description of Artificial Sequence: Synthetic oligonucleotide
aagcagacacgagaaacgc

SEQ ID NO: 1502320 - RNA, 19 nt, Artificial Sequence
  Description of Artificial Sequence: Synthetic oligonucleotide
uuauuaagaugcacccggg

SEQ ID NO: 1502321 - RNA, 19 nt, Artificial Sequence
  Description of Artificial Sequence: Synthetic oligonucleotide
uaacugucaaucuugucac

SEQ ID NO: 1502322 - RNA, 19 nt, Artificial Sequence
  Description of Artificial Sequence: Synthetic oligonucleotide
gaccacgacaccaucaugg

SEQ ID NO: 1502323 - RNA, 19 nt, Artificial Sequence
  Description of Artificial Sequence: Synthetic oligonucleotide
cauaagguacuugacaccc

SEQ ID NO: 1502324 - RNA, 19 nt, Artificial Sequence
  Description of Artificial Sequence: Synthetic oligonucleotide
acgaugaguagauuggcag

SEQ ID NO: 1502325 - RNA, 19 nt, Artificial Sequence
  Description of Artificial Sequence: Synthetic oligonucleotide
uauaaucuggugacugcag

SEQ ID NO: 1502326 - RNA, 19 nt, Artificial Sequence
  Description of Artificial Sequence: Synthetic oligonucleotide
uuguuguauaacuuuugug

SEQ ID NO: 1502327 - RNA, 19 nt, Artificial Sequence
  Description of Artificial Sequence: Synthetic oligonucleotide
gaacauaagguacuugaca

SEQ ID NO: 1502328 - RNA, 19 nt, Artificial Sequence
  Description of Artificial Sequence: Synthetic oligonucleotide
agcaacggaaaucagucug

SEQ ID NO: 1502329 - RNA, 19 nt, Artificial Sequence
  Description of Artificial Sequence: Synthetic oligonucleotide
agaaacgcgaaccgccggc

SEQ ID NO: 1502330 - RNA, 19 nt, Artificial Sequence
  Description of Artificial Sequence: Synthetic oligonucleotide
gaaugugaaucaugggacc

SEQ ID NO: 1502331 - RNA, 19 nt, Artificial Sequence
  Description of Artificial Sequence: Synthetic oligonucleotide
caaagaugcccacagcuag

SEQ ID NO: 1502332 - RNA, 19 nt, Artificial Sequence
  Description of Artificial Sequence: Synthetic oligonucleotide
gacacgagaaacgcgaacc

SEQ ID NO: 1502333 - RNA, 19 nt, Artificial Sequence
  Description of Artificial Sequence: Synthetic oligonucleotide
uccagcuagucacaggggc

SEQ ID NO: 1502334 - RNA, 19 nt, Artificial Sequence
  Description of Artificial Sequence: Synthetic oligonucleotide
ucaagcagacacgagaaac

SEQ ID NO: 1502335 - RNA, 19 nt, Artificial Sequence
  Description of Artificial Sequence: Synthetic oligonucleotide
uuggcagccgacaaagaug

SEQ ID NO: 1502336 - RNA, 19 nt, Artificial Sequence
  Description of Artificial Sequence: Synthetic oligonucleotide
ugaauacuggaagauauau

SEQ ID NO: 1502337 - RNA, 19 nt, Artificial Sequence
  Description of Artificial Sequence: Synthetic oligonucleotide
gauguaccaccacggaggg

SEQ ID NO: 1502338 - RNA, 19 nt, Artificial Sequence
  Description of Artificial Sequence: Synthetic oligonucleotide
gagaccuaugcgcaguaag

SEQ ID NO: 1502339 - RNA, 19 nt, Artificial Sequence
  Description of Artificial Sequence: Synthetic oligonucleotide
uauuaagaugcacccggga

SEQ ID NO: 1502340 - RNA, 19 nt, Artificial Sequence
  Description of Artificial Sequence: Synthetic oligonucleotide
aaugugaaucaugggaccu

SEQ ID NO: 1502341 - RNA, 19 nt, Artificial Sequence
  Description of Artificial Sequence: Synthetic oligonucleotide
ugugaaucaugggaccugg

SEQ ID NO: 1502342 - RNA, 19 nt, Artificial Sequence
  Description of Artificial Sequence: Synthetic oligonucleotide
ugaaucaugggaccugguc

SEQ ID NO: 1502343 - RNA, 19 nt, Artificial Sequence
  Description of Artificial Sequence: Synthetic oligonucleotide
acgagaaacgcgaaccgcc

SEQ ID NO: 1502344 - RNA, 19 nt, Artificial Sequence
  Description of Artificial Sequence: Synthetic oligonucleotide
guaaguguccgccuuuacc

SEQ ID NO: 1502345 - RNA, 19 nt, Artificial Sequence
  Description of Artificial Sequence: Synthetic oligonucleotide
uaacgaaggugccagugac

SEQ ID NO: 1502346 - RNA, 19 nt, Artificial Sequence
  Description of Artificial Sequence: Synthetic oligonucleotide
acacccuggaggcagccgc

SEQ ID NO: 1502347 - RNA, 19 nt, Artificial Sequence
  Description of Artificial Sequence: Synthetic oligonucleotide
aguguccgccuuuaccacc

SEQ ID NO: 1502348 - RNA, 19 nt, Artificial Sequence
  Description of Artificial Sequence: Synthetic oligonucleotide
agcgccgggauguaccacc

SEQ ID NO: 1502349 - RNA, 19 nt, Artificial Sequence
  Description of Artificial Sequence: Synthetic oligonucleotide
ggauguaccaccacggagg

SEQ ID NO: 1502350 - RNA, 19 nt, Artificial Sequence
  Description of Artificial Sequence: Synthetic oligonucleotide
acacgagaaacgcgaaccg

SEQ ID NO: 1502351 - RNA, 19 nt, Artificial Sequence
  Description of Artificial Sequence: Synthetic oligonucleotide
gagucaggcacacgagugg

SEQ ID NO: 1502352 - RNA, 19 nt, Artificial Sequence
  Description of Artificial Sequence: Synthetic oligonucleotide
aguggcguuguauaccuca

SEQ ID NO: 1502353 - RNA, 19 nt, Artificial Sequence
  Description of Artificial Sequence: Synthetic oligonucleotide
aagccgauggccauaacga

SEQ ID NO: 1502354 - RNA, 19 nt, Artificial Sequence
  Description of Artificial Sequence: Synthetic oligonucleotide
aucaguauaauuggagacu

SEQ ID NO: 1502355 - RNA, 19 nt, Artificial Sequence
  Description of Artificial Sequence: Synthetic oligonucleotide
gaaggcgaacauaagguac

SEQ ID NO: 1502356 - RNA, 19 nt, Artificial Sequence
  Description of Artificial Sequence: Synthetic oligonucleotide
uugguuggcaccaacccua

SEQ ID NO: 1502357 - RNA, 19 nt, Artificial Sequence
  Description of Artificial Sequence: Synthetic oligonucleotide
guauaccucaaaccaauca

SEQ ID NO: 1502358 - RNA, 19 nt, Artificial Sequence
  Description of Artificial Sequence: Synthetic oligonucleotide
ugcuugguuggcaccaacc

SEQ ID NO: 1502359 - RNA, 19 nt, Artificial Sequence
  Description of Artificial Sequence: Synthetic oligonucleotide
ucucauaacagggcgauuu

SEQ ID NO: 1502360 - RNA, 19 nt, Artificial Sequence
  Description of Artificial Sequence: Synthetic oligonucleotide
ugaguagauuggcagccga

SEQ ID NO: 1502361 - RNA, 19 nt, Artificial Sequence
  Description of Artificial Sequence: Synthetic oligonucleotide
gaaucaugggaccuggucu

SEQ ID NO: 1502362 - RNA, 19 nt, Artificial Sequence
  Description of Artificial Sequence: Synthetic oligonucleotide
agucaggcacacgaguggc

SEQ ID NO: 1502363 - RNA, 19 nt, Artificial Sequence
  Description of Artificial Sequence: Synthetic oligonucleotide
ucauaacagggcgauuucc

SEQ ID NO: 1502364 - RNA, 19 nt, Artificial Sequence
  Description of Artificial Sequence: Synthetic oligonucleotide
cauucagcagagcaccaag

SEQ ID NO: 1502365 - RNA, 19 nt, Artificial Sequence
  Description of Artificial Sequence: Synthetic oligonucleotide
gacaggguggcaaaguuuc

SEQ ID NO: 1502366 - RNA, 19 nt, Artificial Sequence
  Description of Artificial Sequence: Synthetic oligonucleotide
ccaaucaguauaauuggag

SEQ ID NO: 1502367 - RNA, 19 nt, Artificial Sequence
  Description of Artificial Sequence: Synthetic oligonucleotide
uuagguacagggguggauc

SEQ ID NO: 1502368 - RNA, 19 nt, Artificial Sequence
  Description of Artificial Sequence: Synthetic oligonucleotide
aggccuuagguacaggggu

SEQ ID NO: 1502369 - RNA, 19 nt, Artificial Sequence
  Description of Artificial Sequence: Synthetic oligonucleotide
gucauggcgaaggugaggc

SEQ ID NO: 1502370 - RNA, 19 nt, Artificial Sequence
  Description of Artificial Sequence: Synthetic oligonucleotide
aaggcgaacauaagguacu

SEQ ID NO: 1502371 - RNA, 19 nt, Artificial Sequence
  Description of Artificial Sequence: Synthetic oligonucleotide
ugcgcaguaaguguccgcc

SEQ ID NO: 1502372 - RNA, 19 nt, Artificial Sequence
  Description of Artificial Sequence: Synthetic oligonucleotide
ugaaggcgaacauaaggua

SEQ ID NO: 1502373 - RNA, 19 nt, Artificial Sequence
  Description of Artificial Sequence: Synthetic oligonucleotide
gaugcaggcccuucuucag

SEQ ID NO: 1502374 - RNA, 19 nt, Artificial Sequence
  Description of Artificial Sequence: Synthetic oligonucleotide
gugccauacagaugcaggc

SEQ ID NO: 1502375 - RNA, 19 nt, Artificial Sequence
  Description of Artificial Sequence: Synthetic oligonucleotide
cuugcugggcauaacuguc

SEQ ID NO: 1502376 - RNA, 19 nt, Artificial Sequence
  Description of Artificial Sequence: Synthetic oligonucleotide
aaguuucccuguguggcag

SEQ ID NO: 1502377 - RNA, 19 nt, Artificial Sequence
  Description of Artificial Sequence: Synthetic oligonucleotide
caacccuauaaucugguga

SEQ ID NO: 1502378 - RNA, 19 nt, Artificial Sequence
  Description of Artificial Sequence: Synthetic oligonucleotide
cuaugcgcaguaagugucc

SEQ ID NO: 1502379 - RNA, 19 nt, Artificial Sequence
  Description of Artificial Sequence: Synthetic oligonucleotide
cauaacagggcgauuucca

SEQ ID NO: 1502380 - RNA, 19 nt, Artificial Sequence
  Description of Artificial Sequence: Synthetic oligonucleotide
uguauaccucaaaccaauc

SEQ ID NO: 1502381 - RNA, 19 nt, Artificial Sequence
  Description of Artificial Sequence: Synthetic oligonucleotide
accuaugcgcaguaagugu

SEQ ID NO: 1502382 - RNA, 19 nt, Artificial Sequence
  Description of Artificial Sequence: Synthetic oligonucleotide
gagaaacgcgaaccgccgg

SEQ ID NO: 1502383 - RNA, 19 nt, Artificial Sequence
  Description of Artificial Sequence: Synthetic oligonucleotide
acgagcagagaucaccgca

SEQ ID NO: 1502384 - RNA, 19 nt, Artificial Sequence
  Description of Artificial Sequence: Synthetic oligonucleotide
aacgaaggugccagugacg

SEQ ID NO: 1502385 - RNA, 19 nt, Artificial Sequence
  Description of Artificial Sequence: Synthetic oligonucleotide
caucauggaaugugaauca

SEQ ID NO: 1502386 - RNA, 19 nt, Artificial Sequence
  Description of Artificial Sequence: Synthetic oligonucleotide
ugggcauaacugucaaucu

SEQ ID NO: 1502387 - RNA, 19 nt, Artificial Sequence
  Description of Artificial Sequence: Synthetic oligonucleotide
ucacacgcuuuauuaagau

SEQ ID NO: 1502388 - RNA, 19 nt, Artificial Sequence
  Description of Artificial Sequence: Synthetic oligonucleotide
cauaacgaaggugccagug

SEQ ID NO: 1502389 - RNA, 19 nt, Artificial Sequence
  Description of Artificial Sequence: Synthetic oligonucleotide
ugggcacgagcagagauca

SEQ ID NO: 1502390 - RNA, 19 nt, Artificial Sequence
  Description of Artificial Sequence: Synthetic oligonucleotide
gcgaacauaagguacuuga

SEQ ID NO: 1502391 - RNA, 19 nt, Artificial Sequence
  Description of Artificial Sequence: Synthetic oligonucleotide
cugucaaaguucccugggc

SEQ ID NO: 1502392 - RNA, 19 nt, Artificial Sequence
  Description of Artificial Sequence: Synthetic oligonucleotide
gcccuuucggccuugcucg

SEQ ID NO: 1502393 - RNA, 19 nt, Artificial Sequence
  Description of Artificial Sequence: Synthetic oligonucleotide
aguacauggucauggcgaa

SEQ ID NO: 1502394 - RNA, 19 nt, Artificial Sequence
  Description of Artificial Sequence: Synthetic oligonucleotide
aguagauuggcagccgaca

SEQ ID NO: 1502395 - RNA, 19 nt, Artificial Sequence
  Description of Artificial Sequence: Synthetic oligonucleotide
gauggccauaacgaaggug

SEQ ID NO: 1502396 - RNA, 19 nt, Artificial Sequence
  Description of Artificial Sequence: Synthetic oligonucleotide
cacacgcuuuauuaagaug

SEQ ID NO: 1502397 - RNA, 19 nt, Artificial Sequence
  Description of Artificial Sequence: Synthetic oligonucleotide
uucggccuugcucggacgc

SEQ ID NO: 1502398 - RNA, 19 nt, Artificial Sequence
  Description of Artificial Sequence: Synthetic oligonucleotide
ccgauggccauaacgaagg

SEQ ID NO: 1502399 - RNA, 19 nt, Artificial Sequence
  Description of Artificial Sequence: Synthetic oligonucleotide
ggcauaacugucaaucuug

SEQ ID NO: 1502400 - RNA, 19 nt, Artificial Sequence
  Description of Artificial Sequence: Synthetic oligonucleotide
ugcucacacgcuuuauuaa

SEQ ID NO: 1502401 - RNA, 19 nt, Artificial Sequence
  Description of Artificial Sequence: Synthetic oligonucleotide
ugccauacagaugcaggcc

SEQ ID NO: 1502402 - RNA, 19 nt, Artificial Sequence
  Description of Artificial Sequence: Synthetic oligonucleotide
agcagguugaaggcgaaca

SEQ ID NO: 1502403 - RNA, 19 nt, Artificial Sequence
  Description of Artificial Sequence: Synthetic oligonucleotide
auugcccugugugccauac

SEQ ID NO: 1502404 - RNA, 19 nt, Artificial Sequence
  Description of Artificial Sequence: Synthetic oligonucleotide
gugcguguaacccacagcu

SEQ ID NO: 1502405 - RNA, 19 nt, Artificial Sequence
  Description of Artificial Sequence: Synthetic oligonucleotide
gaaacgcgaaccgccggcg

SEQ ID NO: 1502406 - RNA, 19 nt, Artificial Sequence
  Description of Artificial Sequence: Synthetic oligonucleotide
acgcuuuauuaagaugcac

SEQ ID NO: 1502407 - RNA, 19 nt, Artificial Sequence
  Description of Artificial Sequence: Synthetic oligonucleotide
ugucucauaacagggcgau

SEQ ID NO: 1502408 - RNA, 19 nt, Artificial Sequence
  Description of Artificial Sequence: Synthetic oligonucleotide
gcucacacgcuuuauuaag

SEQ ID NO: 1502409 - RNA, 19 nt, Artificial Sequence
  Description of Artificial Sequence: Synthetic oligonucleotide
uaccaggugcguguaaccc

SEQ ID NO: 1502410 - RNA, 19 nt, Artificial Sequence
  Description of Artificial Sequence: Synthetic oligonucleotide
acgaaggugccagugacga

SEQ ID NO: 1502411 - RNA, 19 nt, Artificial Sequence
  Description of Artificial Sequence: Synthetic oligonucleotide
ugggccuuuagcccugggu

SEQ ID NO: 1502412 - RNA, 19 nt, Artificial Sequence
  Description of Artificial Sequence: Synthetic oligonucleotide
ugcguguaacccacagcug

SEQ ID NO: 1502413 - RNA, 19 nt, Artificial Sequence
  Description of Artificial Sequence: Synthetic oligonucleotide
uccugcaugggaagugggu

SEQ ID NO: 1502414 - RNA, 19 nt, Artificial Sequence
  Description of Artificial Sequence: Synthetic oligonucleotide
gcguuguauaccucaaacc

SEQ ID NO: 1502415 - RNA, 19 nt, Artificial Sequence
  Description of Artificial Sequence: Synthetic oligonucleotide
ggaugucuccccaugggcg

SEQ ID NO: 1502416 - RNA, 19 nt, Artificial Sequence
  Description of Artificial Sequence: Synthetic oligonucleotide
cuauaaucuggugacugca

SEQ ID NO: 1502417 - RNA, 19 nt, Artificial Sequence
  Description of Artificial Sequence: Synthetic oligonucleotide
aggguggcaaaguuucccu

SEQ ID NO: 1502418 - RNA, 19 nt, Artificial Sequence
  Description of Artificial Sequence: Synthetic oligonucleotide
ugagagaccuaugcgcagu

SEQ ID NO: 1502419 - RNA, 19 nt, Artificial Sequence
  Description of Artificial Sequence: Synthetic oligonucleotide
uugcucggacgccguagcg

SEQ ID NO: 1502420 - RNA, 19 nt, Artificial Sequence
  Description of Artificial Sequence: Synthetic oligonucleotide
caugggaccuggucuggcc

SEQ ID NO: 1502421 - RNA, 19 nt, Artificial Sequence
  Description of Artificial Sequence: Synthetic oligonucleotide
cauaacugucaaucuuguc

SEQ ID NO: 1502422 - RNA, 19 nt, Artificial Sequence
  Description of Artificial Sequence: Synthetic oligonucleotide
gggauguaccaccacggag

SEQ ID NO: 1502423 - RNA, 19 nt, Artificial Sequence
  Description of Artificial Sequence: Synthetic oligonucleotide
cuugcucggacgccguagc

SEQ ID NO: 1502424 - RNA, 19 nt, Artificial Sequence
  Description of Artificial Sequence: Synthetic oligonucleotide
uuucggccuugcucggacg

SEQ ID NO: 1502425 - RNA, 19 nt, Artificial Sequence
  Description of Artificial Sequence: Synthetic oligonucleotide
cucacacgcuuuauuaaga

SEQ ID NO: 1502426 - RNA, 19 nt, Artificial Sequence
  Description of Artificial Sequence: Synthetic oligonucleotide
uggccauaacgaaggugcc

SEQ ID NO: 1502427 - RNA, 19 nt, Artificial Sequence
  Description of Artificial Sequence: Synthetic oligonucleotide
uccgcggagcagcugucag

SEQ ID NO: 1502428 - RNA, 19 nt, Artificial Sequence
  Description of Artificial Sequence: Synthetic oligonucleotide
augcuugguuggcaccaac

SEQ ID NO: 1502429 - RNA, 19 nt, Artificial Sequence
  Description of Artificial Sequence: Synthetic oligonucleotide
agaugcacccgggaccacg

SEQ ID NO: 1502430 - RNA, 19 nt, Artificial Sequence
  Description of Artificial Sequence: Synthetic oligonucleotide
accaggugcguguaaccca

SEQ ID NO: 1502431 - RNA, 19 nt, Artificial Sequence
  Description of Artificial Sequence: Synthetic oligonucleotide
guaccaggugcguguaacc

SEQ ID NO: 1502432 - RNA, 19 nt, Artificial Sequence
  Description of Artificial Sequence: Synthetic oligonucleotide
cacgaguggcguuguauac

SEQ ID NO: 1502433 - RNA, 19 nt, Artificial Sequence
  Description of Artificial Sequence: Synthetic oligonucleotide
agaccuaugcgcaguaagu

SEQ ID NO: 1502434 - RNA, 19 nt, Artificial Sequence
  Description of Artificial Sequence: Synthetic oligonucleotide
uggcaccaacccuauaauc

SEQ ID NO: 1502435 - RNA, 19 nt, Artificial Sequence
  Description of Artificial Sequence: Synthetic oligonucleotide
acacgaguggcguuguaua

SEQ ID NO: 1502436 - RNA, 19 nt, Artificial Sequence
  Description of Artificial Sequence: Synthetic oligonucleotide
cugagagaccuaugcgcag

SEQ ID NO: 1502437 - RNA, 19 nt, Artificial Sequence
  Description of Artificial Sequence: Synthetic oligonucleotide
cucauaacagggcgauuuc

SEQ ID NO: 1502438 - RNA, 19 nt, Artificial Sequence
  Description of Artificial Sequence: Synthetic oligonucleotide
cguuguauaccucaaacca

SEQ ID NO: 1502439 - RNA, 19 nt, Artificial Sequence
  Description of Artificial Sequence: Synthetic oligonucleotide
gccauaacgaaggugccag

SEQ ID NO: 1502440 - RNA, 19 nt, Artificial Sequence
  Description of Artificial Sequence: Synthetic oligonucleotide
gaugaugcuccaggcguug

SEQ ID NO: 1502441 - RNA, 19 nt, Artificial Sequence
  Description of Artificial Sequence: Synthetic oligonucleotide
guagauuggcagccgacaa

SEQ ID NO: 1502442 - RNA, 19 nt, Artificial Sequence
  Description of Artificial Sequence: Synthetic oligonucleotide
gacgaugaguagauuggca

SEQ ID NO: 1502443 - RNA, 19 nt, Artificial Sequence
  Description of Artificial Sequence: Synthetic oligonucleotide
ugcugggcauaacugucaa

SEQ ID NO: 1502444 - RNA, 19 nt, Artificial Sequence
  Description of Artificial Sequence: Synthetic oligonucleotide
agcagagaucaccgcagcu

SEQ ID NO: 1502445 - RNA, 19 nt, Artificial Sequence
  Description of Artificial Sequence: Synthetic oligonucleotide
caggguggcaaaguuuccc

SEQ ID NO: 1502446 - RNA, 19 nt, Artificial Sequence
  Description of Artificial Sequence: Synthetic oligonucleotide
cacgacaccaucauggaau

SEQ ID NO: 1502447 - RNA, 19 nt, Artificial Sequence
  Description of Artificial Sequence: Synthetic oligonucleotide
cacgcaggcucuaggaguc

SEQ ID NO: 1502448 - RNA, 19 nt, Artificial Sequence
  Description of Artificial Sequence: Synthetic oligonucleotide
cacgagaaacgcgaaccgc

SEQ ID NO: 1502449 - RNA, 19 nt, Artificial Sequence
  Description of Artificial Sequence: Synthetic oligonucleotide
gcaacggaaaucagucugg

SEQ ID NO: 1502450 - RNA, 19 nt, Artificial Sequence
  Description of Artificial Sequence: Synthetic oligonucleotide
gucagucaagcagacacga

SEQ ID NO: 1502451 - RNA, 19 nt, Artificial Sequence
  Description of Artificial Sequence: Synthetic oligonucleotide
cuuucggccuugcucggac

SEQ ID NO: 1502452 - RNA, 19 nt, Artificial Sequence
  Description of Artificial Sequence: Synthetic oligonucleotide
accaaucaguauaauugga

SEQ ID NO: 1502453 - RNA, 19 nt, Artificial Sequence
  Description of Artificial Sequence: Synthetic oligonucleotide
gccgggauguaccaccacg

SEQ ID NO: 1502454 - RNA, 19 nt, Artificial Sequence
  Description of Artificial Sequence: Synthetic oligonucleotide
cagggcgauuuccaccagg

SEQ ID NO: 1502455 - RNA, 19 nt, Artificial Sequence
  Description of Artificial Sequence: Synthetic oligonucleotide
ugccagugacgaugaguag

SEQ ID NO: 1502456 - RNA, 19 nt, Artificial Sequence
  Description of Artificial Sequence: Synthetic oligonucleotide
ugugugccauacagaugca

SEQ ID NO: 1502457 - RNA, 19 nt, Artificial Sequence
  Description of Artificial Sequence: Synthetic oligonucleotide
agccgacaaagauggaaau

SEQ ID NO: 1502458 - RNA, 19 nt, Artificial Sequence
  Description of Artificial Sequence: Synthetic oligonucleotide
ucaaaguucccugggccuu

SEQ ID NO: 1502459 - RNA, 19 nt, Artificial Sequence
  Description of Artificial Sequence: Synthetic oligonucleotide
gaguagauuggcagccgac

SEQ ID NO: 1502460 - RNA, 19 nt, Artificial Sequence
  Description of Artificial Sequence: Synthetic oligonucleotide
ccuaugcgcaguaaguguc

SEQ ID NO: 1502461 - RNA, 19 nt, Artificial Sequence
  Description of Artificial Sequence: Synthetic oligonucleotide
cagccgacaaagauggaaa

SEQ ID NO: 1502462 - RNA, 19 nt, Artificial Sequence
  Description of Artificial Sequence: Synthetic oligonucleotide
uuaccaccuggcaguacau

SEQ ID NO: 1502463 - RNA, 19 nt, Artificial Sequence
  Description of Artificial Sequence: Synthetic oligonucleotide
uugacacccuggaggcagc

SEQ ID NO: 1502464 - RNA, 19 nt, Artificial Sequence
  Description of Artificial Sequence: Synthetic oligonucleotide
cacgcuuuauuaagaugca

SEQ ID NO: 1502465 - RNA, 19 nt, Artificial Sequence
  Description of Artificial Sequence: Synthetic oligonucleotide
cacgagcagagaucaccgc

SEQ ID NO: 1502466 - RNA, 19 nt, Artificial Sequence
  Description of Artificial Sequence: Synthetic oligonucleotide
gcugcaggcacgcaggcuc

SEQ ID NO: 1502467 - RNA, 19 nt, Artificial Sequence
  Description of Artificial Sequence: Synthetic oligonucleotide
gcacgagcagagaucaccg

SEQ ID NO: 1502468 - RNA, 19 nt, Artificial Sequence
  Description of Artificial Sequence: Synthetic oligonucleotide
ucggacgccguagcgccgg

SEQ ID NO: 1502469 - RNA, 19 nt, Artificial Sequence
  Description of Artificial Sequence: Synthetic oligonucleotide
gugugccauacagaugcag

SEQ ID NO: 1502470 - RNA, 19 nt, Artificial Sequence
  Description of Artificial Sequence: Synthetic oligonucleotide
ccgggauguaccaccacgg

SEQ ID NO: 1502471 - RNA, 19 nt, Artificial Sequence
  Description of Artificial Sequence: Synthetic oligonucleotide
caccuggcaguacaugguc

SEQ ID NO: 1502472 - RNA, 19 nt, Artificial Sequence
  Description of Artificial Sequence: Synthetic oligonucleotide
gguuggggacccuauccug

SEQ ID NO: 1502473 - RNA, 19 nt, Artificial Sequence
  Description of Artificial Sequence: Synthetic oligonucleotide
caugggcggguccuuuggc

SEQ ID NO: 1502474 - RNA, 19 nt, Artificial Sequence
  Description of Artificial Sequence: Synthetic oligonucleotide
ggcggagcggcccuuucgg

SEQ ID NO: 1502475 - RNA, 19 nt, Artificial Sequence
  Description of Artificial Sequence: Synthetic oligonucleotide
cagcuagucacaggggcug

SEQ ID NO: 1502476 - RNA, 19 nt, Artificial Sequence
  Description of Artificial Sequence: Synthetic oligonucleotide
ggccuuuagcccugggugc

SEQ ID NO: 1502477 - RNA, 19 nt, Artificial Sequence
  Description of Artificial Sequence: Synthetic oligonucleotide
cugucucauaacagggcga

SEQ ID NO: 1502478 - RNA, 19 nt, Artificial Sequence
  Description of Artificial Sequence: Synthetic oligonucleotide
ggugcguguaacccacagc

SEQ ID NO: 1502479 - RNA, 19 nt, Artificial Sequence
  Description of Artificial Sequence: Synthetic oligonucleotide
agccgauggccauaacgaa

SEQ ID NO: 1502480 - RNA, 19 nt, Artificial Sequence
  Description of Artificial Sequence: Synthetic oligonucleotide
uuuagcccugggugccaug

SEQ ID NO: 1502481 - RNA, 19 nt, Artificial Sequence
  Description of Artificial Sequence: Synthetic oligonucleotide
gacacccuggaggcagccg

SEQ ID NO: 1502482 - RNA, 19 nt, Artificial Sequence
  Description of Artificial Sequence: Synthetic oligonucleotide
gguaccaggugcguguaac

SEQ ID NO: 1502483 - RNA, 19 nt, Artificial Sequence
  Description of Artificial Sequence: Synthetic oligonucleotide
ggcacgcaggcucuaggag

SEQ ID NO: 1502484 - RNA, 19 nt, Artificial Sequence
  Description of Artificial Sequence: Synthetic oligonucleotide
ggugaggcccacauugccc

SEQ ID NO: 1502485 - RNA, 19 nt, Artificial Sequence
  Description of Artificial Sequence: Synthetic oligonucleotide
gucaggcacacgaguggcg

SEQ ID NO: 1502486 - RNA, 19 nt, Artificial Sequence
  Description of Artificial Sequence: Synthetic oligonucleotide
gcucggacgccguagcgcc

SEQ ID NO: 1502487 - RNA, 19 nt, Artificial Sequence
  Description of Artificial Sequence: Synthetic oligonucleotide
ggcaccaacccuauaaucu

SEQ ID NO: 1502488 - RNA, 19 nt, Artificial Sequence
  Description of Artificial Sequence: Synthetic oligonucleotide
aggcacacgaguggcguug

SEQ ID NO: 1502489 - RNA, 19 nt, Artificial Sequence
  Description of Artificial Sequence: Synthetic oligonucleotide
cugccuccaaccuggcauc

SEQ ID NO: 1502490 - RNA, 19 nt, Artificial Sequence
  Description of Artificial Sequence: Synthetic oligonucleotide
auaagguacuugacacccu

SEQ ID NO: 1502491 - RNA, 19 nt, Artificial Sequence
  Description of Artificial Sequence: Synthetic oligonucleotide
uggggacccuauccugugu

SEQ ID NO: 1502492 - RNA, 19 nt, Artificial Sequence
  Description of Artificial Sequence: Synthetic oligonucleotide
aggaccaucgugggccuug

SEQ ID NO: 1502493 - RNA, 19 nt, Artificial Sequence
  Description of Artificial Sequence: Synthetic oligonucleotide
ggugaggcccagaaucugc

SEQ ID NO: 1502494 - RNA, 19 nt, Artificial Sequence
  Description of Artificial Sequence: Synthetic oligonucleotide
ugguuggcaccaacccuau

SEQ ID NO: 1502495 - RNA, 19 nt, Artificial Sequence
  Description of Artificial Sequence: Synthetic oligonucleotide
gccgauggccauaacgaag

SEQ ID NO: 1502496 - RNA, 19 nt, Artificial Sequence
  Description of Artificial Sequence: Synthetic oligonucleotide
cccuauaaucuggugacug

SEQ ID NO: 1502497 - RNA, 19 nt, Artificial Sequence
  Description of Artificial Sequence: Synthetic oligonucleotide
ugagcagacugggccugcc

SEQ ID NO: 1502498 - RNA, 19 nt, Artificial Sequence
  Description of Artificial Sequence: Synthetic oligonucleotide
aagaugcacccgggaccac

SEQ ID NO: 1502499 - RNA, 19 nt, Artificial Sequence
  Description of Artificial Sequence: Synthetic oligonucleotide
guagcgccgggauguacca

SEQ ID NO: 1502500 - RNA, 19 nt, Artificial Sequence
  Description of Artificial Sequence: Synthetic oligonucleotide
cgagaaacgcgaaccgccg

SEQ ID NO: 1502501 - RNA, 19 nt, Artificial Sequence
  Description of Artificial Sequence: Synthetic oligonucleotide
cuugguuggcaccaacccu

SEQ ID NO: 1502502 - RNA, 19 nt, Artificial Sequence
  Description of Artificial Sequence: Synthetic oligonucleotide
gaugcacccgggaccacga

SEQ ID NO: 1502503 - RNA, 19 nt, Artificial Sequence
  Description of Artificial Sequence: Synthetic oligonucleotide
ggggacccuauccugugug

SEQ ID NO: 1502504 - RNA, 19 nt, Artificial Sequence
  Description of Artificial Sequence: Synthetic oligonucleotide
gguugaaggcgaacauaag

SEQ ID NO: 1502505 - RNA, 19 nt, Artificial Sequence
  Description of Artificial Sequence: Synthetic oligonucleotide
gccuuagguacaggggugg

SEQ ID NO: 1502506 - RNA, 19 nt, Artificial Sequence
  Description of Artificial Sequence: Synthetic oligonucleotide
cuggaggcagccgcgcgcc

SEQ ID NO: 1502507 - RNA, 19 nt, Artificial Sequence
  Description of Artificial Sequence: Synthetic oligonucleotide
ccaggugcguguaacccac

SEQ ID NO: 1502508 - RNA, 19 nt, Artificial Sequence
  Description of Artificial Sequence: Synthetic oligonucleotide
ggcccuuucggccuugcuc

SEQ ID NO: 1502509 - RNA, 19 nt, Artificial Sequence
  Description of Artificial Sequence: Synthetic oligonucleotide
gccagugacgaugaguaga

SEQ ID NO: 1502510 - RNA, 19 nt, Artificial Sequence
  Description of Artificial Sequence: Synthetic oligonucleotide
gccgacaaagauggaaaug

SEQ ID NO: 1502511 - RNA, 19 nt, Artificial Sequence
  Description of Artificial Sequence: Synthetic oligonucleotide
augcacccgggaccacgac

SEQ ID NO: 1502512 - RNA, 19 nt, Artificial Sequence
  Description of Artificial Sequence: Synthetic oligonucleotide
gucaagcagacacgagaaa

SEQ ID NO: 1502513 - RNA, 19 nt, Artificial Sequence
  Description of Artificial Sequence: Synthetic oligonucleotide
gaaccgccggcggagcggc

SEQ ID NO: 1502514 - RNA, 19 nt, Artificial Sequence
  Description of Artificial Sequence: Synthetic oligonucleotide
cuagucacaggggcugcuc

SEQ ID NO: 1502515 - RNA, 19 nt, Artificial Sequence
  Description of Artificial Sequence: Synthetic oligonucleotide
ggaauaccagcagcagcag

SEQ ID NO: 1502516 - RNA, 19 nt, Artificial Sequence
  Description of Artificial Sequence: Synthetic oligonucleotide
cuggcauccaugcaggguu

SEQ ID NO: 1502517 - RNA, 19 nt, Artificial Sequence
  Description of Artificial Sequence: Synthetic oligonucleotide
gagagaccuaugcgcagua

SEQ ID NO: 1502518 - RNA, 19 nt, Artificial Sequence
  Description of Artificial Sequence: Synthetic oligonucleotide
cguagcgccgggauguacc

SEQ ID NO: 1502519 - RNA, 19 nt, Artificial Sequence
  Description of Artificial Sequence: Synthetic oligonucleotide
acagggcgauuuccaccag

SEQ ID NO: 1502520 - RNA, 19 nt, Artificial Sequence
  Description of Artificial Sequence: Synthetic oligonucleotide
ugacacccuggaggcagcc

SEQ ID NO: 1502521 - RNA, 19 nt, Artificial Sequence
  Description of Artificial Sequence: Synthetic oligonucleotide
gauuggcagccgacaaaga

SEQ ID NO: 1502522 - RNA, 19 nt, Artificial Sequence
  Description of Artificial Sequence: Synthetic oligonucleotide
agccaaccagaugccaaca

SEQ ID NO: 1502523 - RNA, 19 nt, Artificial Sequence
  Description of Artificial Sequence: Synthetic oligonucleotide
gcguguaacccacagcugu

SEQ ID NO: 1502524 - RNA, 19 nt, Artificial Sequence
  Description of Artificial Sequence: Synthetic oligonucleotide
agcagaggccuuagguaca

SEQ ID NO: 1502525 - RNA, 19 nt, Artificial Sequence
  Description of Artificial Sequence: Synthetic oligonucleotide
agcaggagucaggcacacg

SEQ ID NO: 1502526 - RNA, 19 nt, Artificial Sequence
  Description of Artificial Sequence: Synthetic oligonucleotide
auggcgaaggugaggccca

SEQ ID NO: 1502527 - RNA, 19 nt, Artificial Sequence
  Description of Artificial Sequence: Synthetic oligonucleotide
ucggccuugcucggacgcc

SEQ ID NO: 1502528 - RNA, 19 nt, Artificial Sequence
  Description of Artificial Sequence: Synthetic oligonucleotide
cucggacgccguagcgccg

SEQ ID NO: 1502529 - RNA, 19 nt, Artificial Sequence
  Description of Artificial Sequence: Synthetic oligonucleotide
gaccaucgugggccuugag

SEQ ID NO: 1502530 - RNA, 19 nt, Artificial Sequence
  Description of Artificial Sequence: Synthetic oligonucleotide
ccaacccuauaaucuggug

SEQ ID NO: 1502531 - RNA, 19 nt, Artificial Sequence
  Description of Artificial Sequence: Synthetic oligonucleotide
gacccuauccugugugaau

SEQ ID NO: 1502532 - RNA, 19 nt, Artificial Sequence
  Description of Artificial Sequence: Synthetic oligonucleotide
acgaagccgauggccauaa

SEQ ID NO: 1502533 - RNA, 19 nt, Artificial Sequence
  Description of Artificial Sequence: Synthetic oligonucleotide
acccaagcagaggccuuag

SEQ ID NO: 1502534 - RNA, 19 nt, Artificial Sequence
  Description of Artificial Sequence: Synthetic oligonucleotide
ucccuguguggcagccaac

SEQ ID NO: 1502535 - RNA, 19 nt, Artificial Sequence
  Description of Artificial Sequence: Synthetic oligonucleotide
guaccaccacggagggagg

SEQ ID NO: 1502536 - RNA, 19 nt, Artificial Sequence
  Description of Artificial Sequence: Synthetic oligonucleotide
gcagccgacaaagauggaa

SEQ ID NO: 1502537 - RNA, 19 nt, Artificial Sequence
  Description of Artificial Sequence: Synthetic oligonucleotide
ggaccacgacaccaucaug

SEQ ID NO: 1502538 - RNA, 19 nt, Artificial Sequence
  Description of Artificial Sequence: Synthetic oligonucleotide
guuggggacccuauccugu

SEQ ID NO: 1502539 - RNA, 19 nt, Artificial Sequence
  Description of Artificial Sequence: Synthetic oligonucleotide
ccaugggcggguccuuugg

SEQ ID NO: 1502540 - RNA, 19 nt, Artificial Sequence
  Description of Artificial Sequence: Synthetic oligonucleotide
ggcgaacauaagguacuug

SEQ ID NO: 1502541 - RNA, 19 nt, Artificial Sequence
  Description of Artificial Sequence: Synthetic oligonucleotide
cagacacgagaaacgcgaa

SEQ ID NO: 1502542 - RNA, 19 nt, Artificial Sequence
  Description of Artificial Sequence: Synthetic oligonucleotide
gcacccgggaccacgacac

SEQ ID NO: 1502543 - RNA, 19 nt, Artificial Sequence
  Description of Artificial Sequence: Synthetic oligonucleotide
agagaccuaugcgcaguaa

SEQ ID NO: 1502544 - RNA, 19 nt, Artificial Sequence
  Description of Artificial Sequence: Synthetic oligonucleotide
cgccuuuaccaccuggcag

SEQ ID NO: 1502545 - RNA, 19 nt, Artificial Sequence
  Description of Artificial Sequence: Synthetic oligonucleotide
ggccuuagguacaggggug

SEQ ID NO: 1502546 - RNA, 19 nt, Artificial Sequence
  Description of Artificial Sequence: Synthetic oligonucleotide
ggguccuuuggcagagaag

SEQ ID NO: 1502547 - RNA, 19 nt, Artificial Sequence
  Description of Artificial Sequence: Synthetic oligonucleotide
cagguugaaggcgaacaua

SEQ ID NO: 1502548 - RNA, 19 nt, Artificial Sequence
  Description of Artificial Sequence: Synthetic oligonucleotide
cccuauccugugugaauac

SEQ ID NO: 1502549 - RNA, 19 nt, Artificial Sequence
  Description of Artificial Sequence: Synthetic oligonucleotide
gacgccguagcgccgggau

SEQ ID NO: 1502550 - RNA, 19 nt, Artificial Sequence
  Description of Artificial Sequence: Synthetic oligonucleotide
aggcgaacauaagguacuu

SEQ ID NO: 1502551 - RNA, 19 nt, Artificial Sequence
  Description of Artificial Sequence: Synthetic oligonucleotide
cugggccuuuagcccuggg

SEQ ID NO: 1502552 - RNA, 19 nt, Artificial Sequence
  Description of Artificial Sequence: Synthetic oligonucleotide
gcacgcaggcucuaggagu

SEQ ID NO: 1502553 - RNA, 19 nt, Artificial Sequence
  Description of Artificial Sequence: Synthetic oligonucleotide
gggacccuauccuguguga

SEQ ID NO: 1502554 - RNA, 19 nt, Artificial Sequence
  Description of Artificial Sequence: Synthetic oligonucleotide
ugccaacacccaggacacc

SEQ ID NO: 1502555 - RNA, 19 nt, Artificial Sequence
  Description of Artificial Sequence: Synthetic oligonucleotide
guggcguuguauaccucaa

SEQ ID NO: 1502556 - RNA, 19 nt, Artificial Sequence
  Description of Artificial Sequence: Synthetic oligonucleotide
ggccauaacgaaggugcca

SEQ ID NO: 1502557 - RNA, 19 nt, Artificial Sequence
  Description of Artificial Sequence: Synthetic oligonucleotide
cagcaacggaaaucagucu

SEQ ID NO: 1502558 - RNA, 19 nt, Artificial Sequence
  Description of Artificial Sequence: Synthetic oligonucleotide
ccuugcucggacgccguag

SEQ ID NO: 1502559 - RNA, 19 nt, Artificial Sequence
  Description of Artificial Sequence: Synthetic oligonucleotide
gcgaaccgccggcggagcg

SEQ ID NO: 1502560 - RNA, 19 nt, Artificial Sequence
  Description of Artificial Sequence: Synthetic oligonucleotide
gggcauaacugucaaucuu

SEQ ID NO: 1502561 - RNA, 19 nt, Artificial Sequence
  Description of Artificial Sequence: Synthetic oligonucleotide
ggagccaggccuucacugu

SEQ ID NO: 1502562 - RNA, 19 nt, Artificial Sequence
  Description of Artificial Sequence: Synthetic oligonucleotide
cggagcggcccuuucggcc

SEQ ID NO: 1502563 - RNA, 19 nt, Artificial Sequence
  Description of Artificial Sequence: Synthetic oligonucleotide
ggguuggggacccuauccu

SEQ ID NO: 1502564 - RNA, 19 nt, Artificial Sequence
  Description of Artificial Sequence: Synthetic oligonucleotide
cacccgggaccacgacacc

SEQ ID NO: 1502565 - RNA, 19 nt, Artificial Sequence
  Description of Artificial Sequence: Synthetic oligonucleotide
agccgcgcgccaugcugca

SEQ ID NO: 1502566 - RNA, 19 nt, Artificial Sequence
  Description of Artificial Sequence: Synthetic oligonucleotide
aaccgccggcggagcggcc

SEQ ID NO: 1502567 - RNA, 19 nt, Artificial Sequence
  Description of Artificial Sequence: Synthetic oligonucleotide
uagcgccgggauguaccac

SEQ ID NO: 1502568 - RNA, 19 nt, Artificial Sequence
  Description of Artificial Sequence: Synthetic oligonucleotide
auguaccaccacggaggga

SEQ ID NO: 1502569 - RNA, 19 nt, Artificial Sequence
  Description of Artificial Sequence: Synthetic oligonucleotide
gaguggcguuguauaccuc

SEQ ID NO: 1502570 - RNA, 19 nt, Artificial Sequence
  Description of Artificial Sequence: Synthetic oligonucleotide
ccaugcugcagcgcuucag

SEQ ID NO: 1502571 - RNA, 19 nt, Artificial Sequence
  Description of Artificial Sequence: Synthetic oligonucleotide
ggagcggcccuuucggccu

SEQ ID NO: 1502572 - RNA, 19 nt, Artificial Sequence
  Description of Artificial Sequence: Synthetic oligonucleotide
cuuagguacagggguggau

SEQ ID NO: 1502573 - RNA, 19 nt, Artificial Sequence
  Description of Artificial Sequence: Synthetic oligonucleotide
ggacccuauccugugugaa

SEQ ID NO: 1502574 - RNA, 19 nt, Artificial Sequence
  Description of Artificial Sequence: Synthetic oligonucleotide
cacacgaguggcguuguau

SEQ ID NO: 1502575 - RNA, 19 nt, Artificial Sequence
  Description of Artificial Sequence: Synthetic oligonucleotide
cagcgccgugcacagucca

SEQ ID NO: 1502576 - RNA, 19 nt, Artificial Sequence
  Description of Artificial Sequence: Synthetic oligonucleotide
gcaggcacgcaggcucuag

SEQ ID NO: 1502577 - RNA, 19 nt, Artificial Sequence
  Description of Artificial Sequence: Synthetic oligonucleotide
cccaugggcggguccuuug

SEQ ID NO: 1502578 - RNA, 19 nt, Artificial Sequence
  Description of Artificial Sequence: Synthetic oligonucleotide
cgcuucagcucugcgcgcg

SEQ ID NO: 1502579 - RNA, 19 nt, Artificial Sequence
  Description of Artificial Sequence: Synthetic oligonucleotide
caggugcguguaacccaca

SEQ ID NO: 1502580 - RNA, 19 nt, Artificial Sequence
  Description of Artificial Sequence: Synthetic oligonucleotide
agcgccgugcacaguccaa

SEQ ID NO: 1502581 - RNA, 19 nt, Artificial Sequence
  Description of Artificial Sequence: Synthetic oligonucleotide
ccagcuagucacaggggcu

SEQ ID NO: 1502582 - RNA, 19 nt, Artificial Sequence
  Description of Artificial Sequence: Synthetic oligonucleotide
ugcaggcacgcaggcucua

SEQ ID NO: 1502583 - RNA, 19 nt, Artificial Sequence
  Description of Artificial Sequence: Synthetic oligonucleotide
gguguggaugucuccccau

SEQ ID NO: 1502584 - RNA, 19 nt, Artificial Sequence
  Description of Artificial Sequence: Synthetic oligonucleotide
cugggccugccuccaaccu

SEQ ID NO: 1502585 - RNA, 19 nt, Artificial Sequence
  Description of Artificial Sequence: Synthetic oligonucleotide
cacgaagccgauggccaua

SEQ ID NO: 1502586 - RNA, 19 nt, Artificial Sequence
  Description of Artificial Sequence: Synthetic oligonucleotide
cgaguggcguuguauaccu

SEQ ID NO: 1502587 - RNA, 19 nt, Artificial Sequence
  Description of Artificial Sequence: Synthetic oligonucleotide
gugaaucaugggaccuggu

SEQ ID NO: 1502588 - RNA, 19 nt, Artificial Sequence
  Description of Artificial Sequence: Synthetic oligonucleotide
gagucccgggugggcacga

SEQ ID NO: 1502589 - RNA, 19 nt, Artificial Sequence
  Description of Artificial Sequence: Synthetic oligonucleotide
cuccgcggagcagcuguca

SEQ ID NO: 1502590 - RNA, 19 nt, Artificial Sequence
  Description of Artificial Sequence: Synthetic oligonucleotide
cgaaccgccggcggagcgg

SEQ ID NO: 1502591 - RNA, 19 nt, Artificial Sequence
  Description of Artificial Sequence: Synthetic oligonucleotide
gcguuggugaggcccacau

SEQ ID NO: 1502592 - RNA, 19 nt, Artificial Sequence
  Description of Artificial Sequence: Synthetic oligonucleotide
cgcgcgccaugcugcagcg

SEQ ID NO: 1502593 - RNA, 19 nt, Artificial Sequence
  Description of Artificial Sequence: Synthetic oligonucleotide
gcaguaaguguccgccuuu

SEQ ID NO: 1502594 - RNA, 19 nt, Artificial Sequence
  Description of Artificial Sequence: Synthetic oligonucleotide
ccacgacaccaucauggaa

SEQ ID NO: 1502595 - RNA, 19 nt, Artificial Sequence
  Description of Artificial Sequence: Synthetic oligonucleotide
cggccuugcucggacgccg

SEQ ID NO: 1502596 - RNA, 19 nt, Artificial Sequence
  Description of Artificial Sequence: Synthetic oligonucleotide
cggcggagcggcccuuucg

SEQ ID NO: 1502597 - RNA, 19 nt, Artificial Sequence
  Description of Artificial Sequence: Synthetic oligonucleotide
agcggcccuuucggccuug

SEQ ID NO: 1502598 - RNA, 19 nt, Artificial Sequence
  Description of Artificial Sequence: Synthetic oligonucleotide
ccuuagguacaggggugga

SEQ ID NO: 1502599 - RNA, 19 nt, Artificial Sequence
  Description of Artificial Sequence: Synthetic oligonucleotide
cuuuagcccugggugccau

SEQ ID NO: 1502600 - RNA, 19 nt, Artificial Sequence
  Description of Artificial Sequence: Synthetic oligonucleotide
gcggagcagcugucaguca

SEQ ID NO: 1502601 - RNA, 19 nt, Artificial Sequence
  Description of Artificial Sequence: Synthetic oligonucleotide
caaaguucccugggccuuu

SEQ ID NO: 1502602 - RNA, 19 nt, Artificial Sequence
  Description of Artificial Sequence: Synthetic oligonucleotide
cgggauguaccaccacgga

SEQ ID NO: 1502603 - RNA, 19 nt, Artificial Sequence
  Description of Artificial Sequence: Synthetic oligonucleotide
ccgggaccacgacaccauc

SEQ ID NO: 1502604 - RNA, 19 nt, Artificial Sequence
  Description of Artificial Sequence: Synthetic oligonucleotide
ggaugaugcuccaggcguu

SEQ ID NO: 1502605 - RNA, 19 nt, Artificial Sequence
  Description of Artificial Sequence: Synthetic oligonucleotide
gcgcaguaaguguccgccu

SEQ ID NO: 1502606 - RNA, 19 nt, Artificial Sequence
  Description of Artificial Sequence: Synthetic oligonucleotide
guguggcagccaaccagau

SEQ ID NO: 1502607 - RNA, 19 nt, Artificial Sequence
  Description of Artificial Sequence: Synthetic oligonucleotide
ggcguuggugaggcccaca

SEQ ID NO: 1502608 - RNA, 19 nt, Artificial Sequence
  Description of Artificial Sequence: Synthetic oligonucleotide
ccgggugggcacgagcaga

SEQ ID NO: 1502609 - RNA, 19 nt, Artificial Sequence
  Description of Artificial Sequence: Synthetic oligonucleotide
gucucauaacagggcgauu

SEQ ID NO: 1502610 - RNA, 19 nt, Artificial Sequence
  Description of Artificial Sequence: Synthetic oligonucleotide
caggcacacgaguggcguu

SEQ ID NO: 1502611 - RNA, 19 nt, Artificial Sequence
  Description of Artificial Sequence: Synthetic oligonucleotide
ccauaacgaaggugccagu

SEQ ID NO: 1502612 - RNA, 19 nt, Artificial Sequence
  Description of Artificial Sequence: Synthetic oligonucleotide
gcgccgggauguaccacca

SEQ ID NO: 1502613 - RNA, 19 nt, Artificial Sequence
  Description of Artificial Sequence: Synthetic oligonucleotide
cgcgccaugcugcagcgcu

SEQ ID NO: 1502614 - RNA, 19 nt, Artificial Sequence
  Description of Artificial Sequence: Synthetic oligonucleotide
ccguagcgccgggauguac

SEQ ID NO: 1502615 - RNA, 19 nt, Artificial Sequence
  Description of Artificial Sequence: Synthetic oligonucleotide
ccuuucggccuugcucgga

SEQ ID NO: 1502616 - RNA, 19 nt, Artificial Sequence
  Description of Artificial Sequence: Synthetic oligonucleotide
ggcacacgaguggcguugu

SEQ ID NO: 1502617 - RNA, 19 nt, Artificial Sequence
  Description of Artificial Sequence: Synthetic oligonucleotide
ggcagccgacaaagaugga

SEQ ID NO: 1502618 - RNA, 19 nt, Artificial Sequence
  Description of Artificial Sequence: Synthetic oligonucleotide
ggccugccuccaaccuggc

SEQ ID NO: 1502619 - RNA, 19 nt, Artificial Sequence
  Description of Artificial Sequence: Synthetic oligonucleotide
gcacacgaguggcguugua

SEQ ID NO: 1502620 - RNA, 19 nt, Artificial Sequence
  Description of Artificial Sequence: Synthetic oligonucleotide
gagcggcccuuucggccuu

SEQ ID NO: 1502621 - RNA, 19 nt, Artificial Sequence
  Description of Artificial Sequence: Synthetic oligonucleotide
ggacgccguagcgccggga

SEQ ID NO: 1502622 - RNA, 19 nt, Artificial Sequence
  Description of Artificial Sequence: Synthetic oligonucleotide
gccuugcucggacgccgua

SEQ ID NO: 1502623 - RNA, 19 nt, Artificial Sequence
  Description of Artificial Sequence: Synthetic oligonucleotide
cccgggaccacgacaccau

SEQ ID NO: 1502624 - RNA, 19 nt, Artificial Sequence
  Description of Artificial Sequence: Synthetic oligonucleotide
ccaggaccaucgugggccu

SEQ ID NO: 1502625 - RNA, 19 nt, Artificial Sequence
  Description of Artificial Sequence: Synthetic oligonucleotide
cgcuccgcggagcagcugu

SEQ ID NO: 1502626 - RNA, 19 nt, Artificial Sequence
  Description of Artificial Sequence: Synthetic oligonucleotide
gcggcccuuucggccuugc

SEQ ID NO: 1502627 - RNA, 19 nt, Artificial Sequence
  Description of Artificial Sequence: Synthetic oligonucleotide
cgcaguaaguguccgccuu

SEQ ID NO: 1502628 - RNA, 19 nt, Artificial Sequence
  Description of Artificial Sequence: Synthetic oligonucleotide
ccggcggagcggcccuuuc

SEQ ID NO: 1502629 - RNA, 19 nt, Artificial Sequence
  Description of Artificial Sequence: Synthetic oligonucleotide
gcgcgccaugcugcagcgc

SEQ ID NO: 1502630 - RNA, 19 nt, Artificial Sequence
  Description of Artificial Sequence: Synthetic oligonucleotide
cgccgggauguaccaccac

SEQ ID NO: 1502631 - RNA, 19 nt, Artificial Sequence
  Description of Artificial Sequence: Synthetic oligonucleotide
ggccuugcucggacgccgu

SEQ ID NO: 1502632 - RNA, 19 nt, Artificial Sequence
  Description of Artificial Sequence: Synthetic oligonucleotide
cgauggccauaacgaaggu

SEQ ID NO: 1502633 - RNA, 19 nt, Artificial Sequence
  Description of Artificial Sequence: Synthetic oligonucleotide
gccguagcgccgggaugua

SEQ ID NO: 1502634 - RNA, 19 nt, Artificial Sequence
  Description of Artificial Sequence: Synthetic oligonucleotide
ccgcuccgcggagcagcug

SEQ ID NO: 1502635 - RNA, 19 nt, Artificial Sequence
  Description of Artificial Sequence: Synthetic oligonucleotide
caggaccaucgugggccuu

SEQ ID NO: 1502636 - RNA, 19 nt, Artificial Sequence
  Description of Artificial Sequence: Synthetic oligonucleotide
gcgccaugcugcagcgcuu

SEQ ID NO: 1502637 - RNA, 19 nt, Artificial Sequence
  Description of Artificial Sequence: Synthetic oligonucleotide
gccggcggagcggcccuuu

SEQ ID NO: 1502638 - RNA, 19 nt, Artificial Sequence
  Description of Artificial Sequence: Synthetic oligonucleotide
ccccaugggcggguccuuu

SEQ ID NO: 1502639 - RNA, 19 nt, Artificial Sequence
  Description of Artificial Sequence: Synthetic oligonucleotide
cuugagaccuuuuacaccg

SEQ ID NO: 1502640 - RNA, 19 nt, Artificial Sequence
  Description of Artificial Sequence: Synthetic oligonucleotide
aagagaagcuuucagagga

SEQ ID NO: 1502641 - RNA, 19 nt, Artificial Sequence
  Description of Artificial Sequence: Synthetic oligonucleotide
gaugguacacauucuggcg

SEQ ID NO: 1502642 - RNA, 19 nt, Artificial Sequence
  Description of Artificial Sequence: Synthetic oligonucleotide
cucuuugcauauuucaacc

SEQ ID NO: 1502643 - RNA, 19 nt, Artificial Sequence
  Description of Artificial Sequence: Synthetic oligonucleotide
uuguguguaacccuacuac

SEQ ID NO: 1502644 - RNA, 19 nt, Artificial Sequence
  Description of Artificial Sequence: Synthetic oligonucleotide
uuugcuucccuuuagcuua

SEQ ID NO: 1502645 - RNA, 19 nt, Artificial Sequence
  Description of Artificial Sequence: Synthetic oligonucleotide
agaccuuuuacaccgccac

SEQ ID NO: 1502646 - RNA, 19 nt, Artificial Sequence
  Description of Artificial Sequence: Synthetic oligonucleotide
cuuugcauauuucaacccc

SEQ ID NO: 1502647 - RNA, 19 nt, Artificial Sequence
  Description of Artificial Sequence: Synthetic oligonucleotide
augguacacauucuggcgg

SEQ ID NO: 1502648 - RNA, 19 nt, Artificial Sequence
  Description of Artificial Sequence: Synthetic oligonucleotide
uuggauagggguuucccag

SEQ ID NO: 1502649 - RNA, 19 nt, Artificial Sequence
  Description of Artificial Sequence: Synthetic oligonucleotide
uguguguaacccuacuacc

SEQ ID NO: 1502650 - RNA, 19 nt, Artificial Sequence
  Description of Artificial Sequence: Synthetic oligonucleotide
ucucuuugcauauuucaac

SEQ ID NO: 1502651 - RNA, 19 nt, Artificial Sequence
  Description of Artificial Sequence: Synthetic oligonucleotide
ucuuugcauauuucaaccc

SEQ ID NO: 1502652 - RNA, 19 nt, Artificial Sequence
  Description of Artificial Sequence: Synthetic oligonucleotide
uuuuacaccgccacuuggu

SEQ ID NO: 1502653 - RNA, 19 nt, Artificial Sequence
  Description of Artificial Sequence: Synthetic oligonucleotide
ugcgaagagaagcuuucag

SEQ ID NO: 1502654 - RNA, 19 nt, Artificial Sequence
  Description of Artificial Sequence: Synthetic oligonucleotide
uguguaacccuacuacccu

SEQ ID NO: 1502655 - RNA, 19 nt, Artificial Sequence
  Description of Artificial Sequence: Synthetic oligonucleotide
aagcuuucagaggaaguuc

SEQ ID NO: 1502656 - RNA, 19 nt, Artificial Sequence
  Description of Artificial Sequence: Synthetic oligonucleotide
acucucuuugcauauuuca

SEQ ID NO: 1502657 - RNA, 19 nt, Artificial Sequence
  Description of Artificial Sequence: Synthetic oligonucleotide
uuggcuugagaccuuuuac

SEQ ID NO: 1502658 - RNA, 19 nt, Artificial Sequence
  Description of Artificial Sequence: Synthetic oligonucleotide
uacaccgccacuugguccc

SEQ ID NO: 1502659 - RNA, 19 nt, Artificial Sequence
  Description of Artificial Sequence: Synthetic oligonucleotide
uguaacccuacuacccuug

SEQ ID NO: 1502660 - RNA, 19 nt, Artificial Sequence
  Description of Artificial Sequence: Synthetic oligonucleotide
agcagaaacucucuuugca

SEQ ID NO: 1502661 - RNA, 19 nt, Artificial Sequence
  Description of Artificial Sequence: Synthetic oligonucleotide
uggcuugagaccuuuuaca

SEQ ID NO: 1502662 - RNA, 19 nt, Artificial Sequence
  Description of Artificial Sequence: Synthetic oligonucleotide
uuuguguguaacccuacua

SEQ ID NO: 1502663 - RNA, 19 nt, Artificial Sequence
  Description of Artificial Sequence: Synthetic oligonucleotide
cuuuuacaccgccacuugg

SEQ ID NO: 1502664 - RNA, 19 nt, Artificial Sequence
  Description of Artificial Sequence: Synthetic oligonucleotide
aguuugcuucccuuuagcu

SEQ ID NO: 1502665 - RNA, 19 nt, Artificial Sequence
  Description of Artificial Sequence: Synthetic oligonucleotide
auuggauagggguuuccca

SEQ ID NO: 1502666 - RNA, 19 nt, Artificial Sequence
  Description of Artificial Sequence: Synthetic oligonucleotide
ugagaccuuuuacaccgcc

SEQ ID NO: 1502667 - RNA, 19 nt, Artificial Sequence
  Description of Artificial Sequence: Synthetic oligonucleotide
agaaacucucuuugcauau

SEQ ID NO: 1502668 - RNA, 19 nt, Artificial Sequence
  Description of Artificial Sequence: Synthetic oligonucleotide
ggaugguacacauucuggc

SEQ ID NO: 1502669 - RNA, 19 nt, Artificial Sequence
  Description of Artificial Sequence: Synthetic oligonucleotide
uuacaccgccacuuggucc

SEQ ID NO: 1502670 - RNA, 19 nt, Artificial Sequence
  Description of Artificial Sequence: Synthetic oligonucleotide
uuuacaccgccacuugguc

SEQ ID NO: 1502671 - RNA, 19 nt, Artificial Sequence
  Description of Artificial Sequence: Synthetic oligonucleotide
gaguuugcuucccuuuagc

SEQ ID NO: 1502672 - RNA, 19 nt, Artificial Sequence
  Description of Artificial Sequence: Synthetic oligonucleotide
gagaagcuuucagaggaag

SEQ ID NO: 1502673 - RNA, 19 nt, Artificial Sequence
  Description of Artificial Sequence: Synthetic oligonucleotide
guguguaacccuacuaccc

SEQ ID NO: 1502674 - RNA, 19 nt, Artificial Sequence
  Description of Artificial Sequence: Synthetic oligonucleotide
uggauagggguuucccagc

SEQ ID NO: 1502675 - RNA, 19 nt, Artificial Sequence
  Description of Artificial Sequence: Synthetic oligonucleotide
auuggcuugagaccuuuua

SEQ ID NO: 1502676 - RNA, 19 nt, Artificial Sequence
  Description of Artificial Sequence: Synthetic oligonucleotide
guaacccuacuacccuugg

SEQ ID NO: 1502677 - RNA, 19 nt, Artificial Sequence
  Description of Artificial Sequence: Synthetic oligonucleotide
gauagggguuucccagcag

SEQ ID NO: 1502678 - RNA, 19 nt, Artificial Sequence
  Description of Artificial Sequence: Synthetic oligonucleotide
uggaguuugcuucccuuua

SEQ ID NO: 1502679 - RNA, 19 nt, Artificial Sequence
  Description of Artificial Sequence: Synthetic oligonucleotide
uucccagcagaaacucucu

SEQ ID NO: 1502680 - RNA, 19 nt, Artificial Sequence
  Description of Artificial Sequence: Synthetic oligonucleotide
gggguuucccagcagaaac

SEQ ID NO: 1502681 - RNA, 19 nt, Artificial Sequence
  Description of Artificial Sequence: Synthetic oligonucleotide
cagcagaaacucucuuugc

SEQ ID NO: 1502682 - RNA, 19 nt, Artificial Sequence
  Description of Artificial Sequence: Synthetic oligonucleotide
agcuuucagaggaaguucu

SEQ ID NO: 1502683 - RNA, 19 nt, Artificial Sequence
  Description of Artificial Sequence: Synthetic oligonucleotide
cucucuuugcauauuucaa

SEQ ID NO: 1502684 - RNA, 19 nt, Artificial Sequence
  Description of Artificial Sequence: Synthetic oligonucleotide
gcuugagaccuuuuacacc

SEQ ID NO: 1502685 - RNA, 19 nt, Artificial Sequence
  Description of Artificial Sequence: Synthetic oligonucleotide
ggggaugguacacauucug

SEQ ID NO: 1502686 - RNA, 19 nt, Artificial Sequence
  Description of Artificial Sequence: Synthetic oligonucleotide
ggaguuugcuucccuuuag

SEQ ID NO: 1502687 - RNA, 19 nt, Artificial Sequence
  Description of Artificial Sequence: Synthetic oligonucleotide
uugagaccuuuuacaccgc

SEQ ID NO: 1502688 - RNA, 19 nt, Artificial Sequence
  Description of Artificial Sequence: Synthetic oligonucleotide
agaagcuuucagaggaagu

SEQ ID NO: 1502689 - RNA, 19 nt, Artificial Sequence
  Description of Artificial Sequence: Synthetic oligonucleotide
accuuuuacaccgccacuu

SEQ ID NO: 1502690 - RNA, 19 nt, Artificial Sequence
  Description of Artificial Sequence: Synthetic oligonucleotide
gcgaagagaagcuuucaga

SEQ ID NO: 1502691 - RNA, 19 nt, Artificial Sequence
  Description of Artificial Sequence: Synthetic oligonucleotide
gaagcuuucagaggaaguu

SEQ ID NO: 1502692 - RNA, 19 nt, Artificial Sequence
  Description of Artificial Sequence: Synthetic oligonucleotide
ccggggaugguacacauuc

SEQ ID NO: 1502693 - RNA, 19 nt, Artificial Sequence
  Description of Artificial Sequence: Synthetic oligonucleotide
uugcugccggggaugguac

SEQ ID NO: 1502694 - RNA, 19 nt, Artificial Sequence
  Description of Artificial Sequence: Synthetic oligonucleotide
gagaccuuuuacaccgcca

SEQ ID NO: 1502695 - RNA, 19 nt, Artificial Sequence
  Description of Artificial Sequence: Synthetic oligonucleotide
auugcugccggggauggua

SEQ ID NO: 1502696 - RNA, 19 nt, Artificial Sequence
  Description of Artificial Sequence: Synthetic oligonucleotide
uugcuucccuuuagcuuac

SEQ ID NO: 1502697 - RNA, 19 nt, Artificial Sequence
  Description of Artificial Sequence: Synthetic oligonucleotide
ucccagcagaaacucucuu

SEQ ID NO: 1502698 - RNA, 19 nt, Artificial Sequence
  Description of Artificial Sequence: Synthetic oligonucleotide
gguuucccagcagaaacuc

SEQ ID NO: 1502699 - RNA, 19 nt, Artificial Sequence
  Description of Artificial Sequence: Synthetic oligonucleotide
ggauagggguuucccagca

SEQ ID NO: 1502700 - RNA, 19 nt, Artificial Sequence
  Description of Artificial Sequence: Synthetic oligonucleotide
ugccggggaugguacacau

SEQ ID NO: 1502701 - RNA, 19 nt, Artificial Sequence
  Description of Artificial Sequence: Synthetic oligonucleotide
accgccacuuggucccuug

SEQ ID NO: 1502702 - RNA, 19 nt, Artificial Sequence
  Description of Artificial Sequence: Synthetic oligonucleotide
ccuuuuacaccgccacuug

SEQ ID NO: 1502703 - RNA, 19 nt, Artificial Sequence
  Description of Artificial Sequence: Synthetic oligonucleotide
gaccuuuuacaccgccacu

SEQ ID NO: 1502704 - RNA, 19 nt, Artificial Sequence
  Description of Artificial Sequence: Synthetic oligonucleotide
ugcugccggggaugguaca

SEQ ID NO: 1502705 - RNA, 19 nt, Artificial Sequence
  Description of Artificial Sequence: Synthetic oligonucleotide
gcagaaacucucuuugcau

SEQ ID NO: 1502706 - RNA, 19 nt, Artificial Sequence
  Description of Artificial Sequence: Synthetic oligonucleotide
agggguuucccagcagaaa

SEQ ID NO: 1502707 - RNA, 19 nt, Artificial Sequence
  Description of Artificial Sequence: Synthetic oligonucleotide
gaaacucucuuugcauauu

SEQ ID NO: 1502708 - RNA, 19 nt, Artificial Sequence
  Description of Artificial Sequence: Synthetic oligonucleotide
ugcuucccuuuagcuuacc

SEQ ID NO: 1502709 - RNA, 19 nt, Artificial Sequence
  Description of Artificial Sequence: Synthetic oligonucleotide
cuggaguuugcuucccuuu

SEQ ID NO: 1502710 - RNA, 19 nt, Artificial Sequence
  Description of Artificial Sequence: Synthetic oligonucleotide
guuucccagcagaaacucu

SEQ ID NO: 1502711 - RNA, 19 nt, Artificial Sequence
  Description of Artificial Sequence: Synthetic oligonucleotide
guguaacccuacuacccuu

SEQ ID NO: 1502712 - RNA, 19 nt, Artificial Sequence
  Description of Artificial Sequence: Synthetic oligonucleotide
gcugccggggaugguacac

SEQ ID NO: 1502713 - RNA, 19 nt, Artificial Sequence
  Description of Artificial Sequence: Synthetic oligonucleotide
ggguuucccagcagaaacu

SEQ ID NO: 1502714 - RNA, 19 nt, Artificial Sequence
  Description of Artificial Sequence: Synthetic oligonucleotide
cugccggggaugguacaca

SEQ ID NO: 1502715 - RNA, 19 nt, Artificial Sequence
  Description of Artificial Sequence: Synthetic oligonucleotide
gcuuucagaggaaguucua

SEQ ID NO: 1502716 - RNA, 19 nt, Artificial Sequence
  Description of Artificial Sequence: Synthetic oligonucleotide
ggccuggaguuugcuuccc

SEQ ID NO: 1502717 - RNA, 19 nt, Artificial Sequence
  Description of Artificial Sequence: Synthetic oligonucleotide
acaccgccacuuggucccu

SEQ ID NO: 1502718 - RNA, 19 nt, Artificial Sequence
  Description of Artificial Sequence: Synthetic oligonucleotide
gccuggaguuugcuucccu

SEQ ID NO: 1502719 - RNA, 19 nt, Artificial Sequence
  Description of Artificial Sequence: Synthetic oligonucleotide
cggggaugguacacauucu

SEQ ID NO: 1502720 - RNA, 19 nt, Artificial Sequence
  Description of Artificial Sequence: Synthetic oligonucleotide
ccgccacuuggucccuugu

SEQ ID NO: 1502721 - RNA, 19 nt, Artificial Sequence
  Description of Artificial Sequence: Synthetic oligonucleotide
gccggggaugguacacauu

SEQ ID NO: 1502722 - RNA, 19 nt, Artificial Sequence
  Description of Artificial Sequence: Synthetic oligonucleotide
caccgccacuuggucccuu

SEQ ID NO: 1502723 - RNA, 19 nt, Artificial Sequence
  Description of Artificial Sequence: Synthetic oligonucleotide
uaugaaaagguuuaggugg

SEQ ID NO: 1502724 - RNA, 19 nt, Artificial Sequence
  Description of Artificial Sequence: Synthetic oligonucleotide
ugcaauuugauuuaaaugc

SEQ ID NO: 1502725 - RNA, 19 nt, Artificial Sequence
  Description of Artificial Sequence: Synthetic oligonucleotide
aaccugauauuucagauac

SEQ ID NO: 1502726 - RNA, 19 nt, Artificial Sequence
  Description of Artificial Sequence: Synthetic oligonucleotide
agauacaaaucauugaggc

SEQ ID NO: 1502727 - RNA, 19 nt, Artificial Sequence
  Description of Artificial Sequence: Synthetic oligonucleotide
uuaaaagccucgaagaagg

SEQ ID NO: 1502728 - RNA, 19 nt, Artificial Sequence
  Description of Artificial Sequence: Synthetic oligonucleotide
aaaguuuugagucauuaug

SEQ ID NO: 1502729 - RNA, 19 nt, Artificial Sequence
  Description of Artificial Sequence: Synthetic oligonucleotide
aaucaugguaguuaagaac

SEQ ID NO: 1502730 - RNA, 19 nt, Artificial Sequence
  Description of Artificial Sequence: Synthetic oligonucleotide
aauguuacguaucaaagga

SEQ ID NO: 1502731 - RNA, 19 nt, Artificial Sequence
  Description of Artificial Sequence: Synthetic oligonucleotide
aaauguuacguaucaaagg

SEQ ID NO: 1502732 - RNA, 19 nt, Artificial Sequence
  Description of Artificial Sequence: Synthetic oligonucleotide
aaggccaugugacaaaccc

SEQ ID NO: 1502733 - RNA, 19 nt, Artificial Sequence
  Description of Artificial Sequence: Synthetic oligonucleotide
aaaaguuugacaugcggag

SEQ ID NO: 1502734 - RNA, 19 nt, Artificial Sequence
  Description of Artificial Sequence: Synthetic oligonucleotide
gaagguacagaucauagcc

SEQ ID NO: 1502735 - RNA, 19 nt, Artificial Sequence
  Description of Artificial Sequence: Synthetic oligonucleotide
aaguacaucaccaggaucg

SEQ ID NO: 1502736 - RNA, 19 nt, Artificial Sequence
  Description of Artificial Sequence: Synthetic oligonucleotide
aacacugggacguuaaaag

SEQ ID NO: 1502737 - RNA, 19 nt, Artificial Sequence
  Description of Artificial Sequence: Synthetic oligonucleotide
uauuuauaauuccaggccc

SEQ ID NO: 1502738 - RNA, 19 nt, Artificial Sequence
  Description of Artificial Sequence: Synthetic oligonucleotide
ucgaagaagguacagauca

SEQ ID NO: 1502739 - RNA, 19 nt, Artificial Sequence
  Description of Artificial Sequence: Synthetic oligonucleotide
ugucaaaauaaucucaaac

SEQ ID NO: 1502740 - RNA, 19 nt, Artificial Sequence
  Description of Artificial Sequence: Synthetic oligonucleotide
uuacaauggcucaaaaccg

SEQ ID NO: 1502741 - RNA, 19 nt, Artificial Sequence
  Description of Artificial Sequence: Synthetic oligonucleotide
ugagucauuaugauagagg

SEQ ID NO: 1502742 - RNA, 19 nt, Artificial Sequence
  Description of Artificial Sequence: Synthetic oligonucleotide
auacaaaucauugaggcuc

SEQ ID NO: 1502743 - RNA, 19 nt, Artificial Sequence
  Description of Artificial Sequence: Synthetic oligonucleotide
uaaacucuaaucauguaga

SEQ ID NO: 1502744 - RNA, 19 nt, Artificial Sequence
  Description of Artificial Sequence: Synthetic oligonucleotide
gagucauuaugauagaggc

SEQ ID NO: 1502745 - RNA, 19 nt, Artificial Sequence
  Description of Artificial Sequence: Synthetic oligonucleotide
agagcuaugugacagucac

SEQ ID NO: 1502746 - RNA, 19 nt, Artificial Sequence
  Description of Artificial Sequence: Synthetic oligonucleotide
guaaacucuaaucauguag

SEQ ID NO: 1502747 - RNA, 19 nt, Artificial Sequence
  Description of Artificial Sequence: Synthetic oligonucleotide
ugauaaaucuguccaagcc

SEQ ID NO: 1502748 - RNA, 19 nt, Artificial Sequence
  Description of Artificial Sequence: Synthetic oligonucleotide
acaagaaugccuuucguag

SEQ ID NO: 1502749 - RNA, 19 nt, Artificial Sequence
  Description of Artificial Sequence: Synthetic oligonucleotide
acucuaaucauguagacaa

SEQ ID NO: 1502750 - RNA, 19 nt, Artificial Sequence
  Description of Artificial Sequence: Synthetic oligonucleotide
aaaagcaugaugaaguaca

SEQ ID NO: 1502751 - RNA, 19 nt, Artificial Sequence
  Description of Artificial Sequence: Synthetic oligonucleotide
aaauucaacuuccucauaa

SEQ ID NO: 1502752 - RNA, 19 nt, Artificial Sequence
  Description of Artificial Sequence: Synthetic oligonucleotide
aauuugaauucuggaagcc

SEQ ID NO: 1502753 - RNA, 19 nt, Artificial Sequence
  Description of Artificial Sequence: Synthetic oligonucleotide
aaaucauugaggcuccucu

SEQ ID NO: 1502754 - RNA, 19 nt, Artificial Sequence
  Description of Artificial Sequence: Synthetic oligonucleotide
agcuaugugacagucaccc

SEQ ID NO: 1502755 - RNA, 19 nt, Artificial Sequence
  Description of Artificial Sequence: Synthetic oligonucleotide
acaaguuuaaauuaaucaa

SEQ ID NO: 1502756 - RNA, 19 nt, Artificial Sequence
  Description of Artificial Sequence: Synthetic oligonucleotide
acuagcaaaugucuugccc

SEQ ID NO: 1502757 - RNA, 19 nt, Artificial Sequence
  Description of Artificial Sequence: Synthetic oligonucleotide
ucugagucuuccaucaagg

SEQ ID NO: 1502758 - RNA, 19 nt, Artificial Sequence
  Description of Artificial Sequence: Synthetic oligonucleotide
aaacucuaaucauguagac

SEQ ID NO: 1502759 - RNA, 19 nt, Artificial Sequence
  Description of Artificial Sequence: Synthetic oligonucleotide
uguuuaauaaaguuggauu

SEQ ID NO: 1502760 - RNA, 19 nt, Artificial Sequence
  Description of Artificial Sequence: Synthetic oligonucleotide
aaguuugacaugcggagag

SEQ ID NO: 1502761 - RNA, 19 nt, Artificial Sequence
  Description of Artificial Sequence: Synthetic oligonucleotide
gacguuaaaagccucgaag

SEQ ID NO: 1502762 - RNA, 19 nt, Artificial Sequence
  Description of Artificial Sequence: Synthetic oligonucleotide
gaagccuucgaaugaaggg

SEQ ID NO: 1502763 - RNA, 19 nt, Artificial Sequence
  Description of Artificial Sequence: Synthetic oligonucleotide
uguaccaacccuguaauag

SEQ ID NO: 1502764 - RNA, 19 nt, Artificial Sequence
  Description of Artificial Sequence: Synthetic oligonucleotide
aauuugauuuaaaugccag

SEQ ID NO: 1502765 - RNA, 19 nt, Artificial Sequence
  Description of Artificial Sequence: Synthetic oligonucleotide
gaauacgugugacagauuc

SEQ ID NO: 1502766 - RNA, 19 nt, Artificial Sequence
  Description of Artificial Sequence: Synthetic oligonucleotide
uaauagguaaacucuaauc

SEQ ID NO: 1502767 - RNA, 19 nt, Artificial Sequence
  Description of Artificial Sequence: Synthetic oligonucleotide
aaugaagggccgaaacucc

SEQ ID NO: 1502768 - RNA, 19 nt, Artificial Sequence
  Description of Artificial Sequence: Synthetic oligonucleotide
agguuuaggugguaaauuc

SEQ ID NO: 1502769 - RNA, 19 nt, Artificial Sequence
  Description of Artificial Sequence: Synthetic oligonucleotide
uagguaaacucuaaucaug

SEQ ID NO: 1502770 - RNA, 19 nt, Artificial Sequence
  Description of Artificial Sequence: Synthetic oligonucleotide
acgugugacagauucaguc

SEQ ID NO: 1502771 - RNA, 19 nt, Artificial Sequence
  Description of Artificial Sequence: Synthetic oligonucleotide
augagaacaaguuuaaauu

SEQ ID NO: 1502772 - RNA, 19 nt, Artificial Sequence
  Description of Artificial Sequence: Synthetic oligonucleotide
uguuacguaucaaaggaaa

SEQ ID NO: 1502773 - RNA, 19 nt, Artificial Sequence
  Description of Artificial Sequence: Synthetic oligonucleotide
ucuucuagugagaugagau

SEQ ID NO: 1502774 - RNA, 19 nt, Artificial Sequence
  Description of Artificial Sequence: Synthetic oligonucleotide
accaggaucggccagaaca

SEQ ID NO: 1502775 - RNA, 19 nt, Artificial Sequence
  Description of Artificial Sequence: Synthetic oligonucleotide
cauugugauacagaaaagc

SEQ ID NO: 1502776 - RNA, 19 nt, Artificial Sequence
  Description of Artificial Sequence: Synthetic oligonucleotide
aauguaccaacccuguaau

SEQ ID NO: 1502777 - RNA, 19 nt, Artificial Sequence
  Description of Artificial Sequence: Synthetic oligonucleotide
caugccaaaauuugaauuc

SEQ ID NO: 1502778 - RNA, 19 nt, Artificial Sequence
  Description of Artificial Sequence: Synthetic oligonucleotide
cuaacuagcaaaugucuug

SEQ ID NO: 1502779 - RNA, 19 nt, Artificial Sequence
  Description of Artificial Sequence: Synthetic oligonucleotide
uucuaacuagcaaaugucu

SEQ ID NO: 1502780 - RNA, 19 nt, Artificial Sequence
  Description of Artificial Sequence: Synthetic oligonucleotide
aacuagcaaaugucuugcc

SEQ ID NO: 1502781 - RNA, 19 nt, Artificial Sequence
  Description of Artificial Sequence: Synthetic oligonucleotide
aacccuguaauagguaaac

SEQ ID NO: 1502782 - RNA, 19 nt, Artificial Sequence
  Description of Artificial Sequence: Synthetic oligonucleotide
gugugaaugguauguaccg

SEQ ID NO: 1502783 - RNA, 19 nt, Artificial Sequence
  Description of Artificial Sequence: Synthetic oligonucleotide
gucauuaugauagaggcca

SEQ ID NO: 1502784 - RNA, 19 nt, Artificial Sequence
  Description of Artificial Sequence: Synthetic oligonucleotide
aaaaggccaugugacaaac

SEQ ID NO: 1502785 - RNA, 19 nt, Artificial Sequence
  Description of Artificial Sequence: Synthetic oligonucleotide
ucacuuaguaaaauguuua

SEQ ID NO: 1502786 - RNA, 19 nt, Artificial Sequence
  Description of Artificial Sequence: Synthetic oligonucleotide
aagaaugccuuucguagcu

SEQ ID NO: 1502787 - RNA, 19 nt, Artificial Sequence
  Description of Artificial Sequence: Synthetic oligonucleotide
uuugauuuaaaugccaguu

SEQ ID NO: 1502788 - RNA, 19 nt, Artificial Sequence
  Description of Artificial Sequence: Synthetic oligonucleotide
uugcaugagaacaaguuua

SEQ ID NO: 1502789 - RNA, 19 nt, Artificial Sequence
  Description of Artificial Sequence: Synthetic oligonucleotide
uacguaucaaaggaaagug

SEQ ID NO: 1502790 - RNA, 19 nt, Artificial Sequence
  Description of Artificial Sequence: Synthetic oligonucleotide
ucaacuacuuuaugugaag

SEQ ID NO: 1502791 - RNA, 19 nt, Artificial Sequence
  Description of Artificial Sequence: Synthetic oligonucleotide
aaagcaaucaugguaguua

SEQ ID NO: 1502792 - RNA, 19 nt, Artificial Sequence
  Description of Artificial Sequence: Synthetic oligonucleotide
acguuaaaagccucgaaga

SEQ ID NO: 1502793 - RNA, 19 nt, Artificial Sequence
  Description of Artificial Sequence: Synthetic oligonucleotide
aguuggauuuaaaagucac

SEQ ID NO: 1502794 - RNA, 19 nt, Artificial Sequence
  Description of Artificial Sequence: Synthetic oligonucleotide
cuucuaacuagcaaauguc

SEQ ID NO: 1502795 - RNA, 19 nt, Artificial Sequence
  Description of Artificial Sequence: Synthetic oligonucleotide
acagaucauagccacaaga

SEQ ID NO: 1502796 - RNA, 19 nt, Artificial Sequence
  Description of Artificial Sequence: Synthetic oligonucleotide
agugucacgacccaccgga

SEQ ID NO: 1502797 - RNA, 19 nt, Artificial Sequence
  Description of Artificial Sequence: Synthetic oligonucleotide
uaugguucacuguaauucu

SEQ ID NO: 1502798 - RNA, 19 nt, Artificial Sequence
  Description of Artificial Sequence: Synthetic oligonucleotide
aaaagguuuaggugguaaa

SEQ ID NO: 1502799 - RNA, 19 nt, Artificial Sequence
  Description of Artificial Sequence: Synthetic oligonucleotide
cacuuugggagaaaggaac

SEQ ID NO: 1502800 - RNA, 19 nt, Artificial Sequence
  Description of Artificial Sequence: Synthetic oligonucleotide
agauucagaaacuggcaug

SEQ ID NO: 1502801 - RNA, 19 nt, Artificial Sequence
  Description of Artificial Sequence: Synthetic oligonucleotide
uuacguaucaaaggaaagu

SEQ ID NO: 1502802 - RNA, 19 nt, Artificial Sequence
  Description of Artificial Sequence: Synthetic oligonucleotide
augguaguuaagaacaaag

SEQ ID NO: 1502803 - RNA, 19 nt, Artificial Sequence
  Description of Artificial Sequence: Synthetic oligonucleotide
auagguaaacucuaaucau

SEQ ID NO: 1502804 - RNA, 19 nt, Artificial Sequence
  Description of Artificial Sequence: Synthetic oligonucleotide
uucuagugagaugagauuc

SEQ ID NO: 1502805 - RNA, 19 nt, Artificial Sequence
  Description of Artificial Sequence: Synthetic oligonucleotide
uauaauuccaggcccucaa

SEQ ID NO: 1502806 - RNA, 19 nt, Artificial Sequence
  Description of Artificial Sequence: Synthetic oligonucleotide
acagaaaagcaugaugaag

SEQ ID NO: 1502807 - RNA, 19 nt, Artificial Sequence
  Description of Artificial Sequence: Synthetic oligonucleotide
aagccuaugguucacugua

SEQ ID NO: 1502808 - RNA, 19 nt, Artificial Sequence
  Description of Artificial Sequence: Synthetic oligonucleotide
uauguaccgguauuuaauc

SEQ ID NO: 1502809 - RNA, 19 nt, Artificial Sequence
  Description of Artificial Sequence: Synthetic oligonucleotide
uacaaaucauugaggcucc

SEQ ID NO: 1502810 - RNA, 19 nt, Artificial Sequence
  Description of Artificial Sequence: Synthetic oligonucleotide
gaaacuggcaugagaaccc

SEQ ID NO: 1502811 - RNA, 19 nt, Artificial Sequence
  Description of Artificial Sequence: Synthetic oligonucleotide
agaaccugauauuucagau

SEQ ID NO: 1502812 - RNA, 19 nt, Artificial Sequence
  Description of Artificial Sequence: Synthetic oligonucleotide
uccccauagaaaguaaaag

SEQ ID NO: 1502813 - RNA, 19 nt, Artificial Sequence
  Description of Artificial Sequence: Synthetic oligonucleotide
guaccaacccuguaauagg

SEQ ID NO: 1502814 - RNA, 19 nt, Artificial Sequence
  Description of Artificial Sequence: Synthetic oligonucleotide
uguaccgguauuuaaucau

SEQ ID NO: 1502815 - RNA, 19 nt, Artificial Sequence
  Description of Artificial Sequence: Synthetic oligonucleotide
ucgaaugaagggccgaaac

SEQ ID NO: 1502816 - RNA, 19 nt, Artificial Sequence
  Description of Artificial Sequence: Synthetic oligonucleotide
ucuaacuagcaaaugucuu

SEQ ID NO: 1502817 - RNA, 19 nt, Artificial Sequence
  Description of Artificial Sequence: Synthetic oligonucleotide
auacgugugacagauucag

SEQ ID NO: 1502818 - RNA, 19 nt, Artificial Sequence
  Description of Artificial Sequence: Synthetic oligonucleotide
guuuaggugguaaauuccc

SEQ ID NO: 1502819 - RNA, 19 nt, Artificial Sequence
  Description of Artificial Sequence: Synthetic oligonucleotide
aucauguagacaaaacuca

SEQ ID NO: 1502820 - RNA, 19 nt, Artificial Sequence
  Description of Artificial Sequence: Synthetic oligonucleotide
aguaaaaggccaugugaca

SEQ ID NO: 1502821 - RNA, 19 nt, Artificial Sequence
  Description of Artificial Sequence: Synthetic oligonucleotide
agucauuaugauagaggcc

SEQ ID NO: 1502822 - RNA, 19 nt, Artificial Sequence
  Description of Artificial Sequence: Synthetic oligonucleotide
auaaucucaaacaauuaaa

SEQ ID NO: 1502823 - RNA, 19 nt, Artificial Sequence
  Description of Artificial Sequence: Synthetic oligonucleotide
aaagguuuaggugguaaau

SEQ ID NO: 1502824 - RNA, 19 nt, Artificial Sequence
  Description of Artificial Sequence: Synthetic oligonucleotide
guaaauucccaaggcauag

SEQ ID NO: 1502825 - RNA, 19 nt, Artificial Sequence
  Description of Artificial Sequence: Synthetic oligonucleotide
aacucuaaucauguagaca

SEQ ID NO: 1502826 - RNA, 19 nt, Artificial Sequence
  Description of Artificial Sequence: Synthetic oligonucleotide
gauucagaaacuggcauga

SEQ ID NO: 1502827 - RNA, 19 nt, Artificial Sequence
  Description of Artificial Sequence: Synthetic oligonucleotide
caagaaugccuuucguagc

SEQ ID NO: 1502828 - RNA, 19 nt, Artificial Sequence
  Description of Artificial Sequence: Synthetic oligonucleotide
ccccauagaaaguaaaagg

SEQ ID NO: 1502829 - RNA, 19 nt, Artificial Sequence
  Description of Artificial Sequence: Synthetic oligonucleotide
uuccuuagaaguuguugca

SEQ ID NO: 1502830 - RNA, 19 nt, Artificial Sequence
  Description of Artificial Sequence: Synthetic oligonucleotide
uucaguccagcuucuaacu

SEQ ID NO: 1502831 - RNA, 19 nt, Artificial Sequence
  Description of Artificial Sequence: Synthetic oligonucleotide
uguguaugggguagacuug

SEQ ID NO: 1502832 - RNA, 19 nt, Artificial Sequence
  Description of Artificial Sequence: Synthetic oligonucleotide
auaaaucuguccaagccgu

SEQ ID NO: 1502833 - RNA, 19 nt, Artificial Sequence
  Description of Artificial Sequence: Synthetic oligonucleotide
agaaaguaaaaggccaugu

SEQ ID NO: 1502834 - RNA, 19 nt, Artificial Sequence
  Description of Artificial Sequence: Synthetic oligonucleotide
aaggcauaggucacaaugu

SEQ ID NO: 1502835 - RNA, 19 nt, Artificial Sequence
  Description of Artificial Sequence: Synthetic oligonucleotide
aguuuugagucauuaugau

SEQ ID NO: 1502836 - RNA, 19 nt, Artificial Sequence
  Description of Artificial Sequence: Synthetic oligonucleotide
ugcaugagaacaaguuuaa

SEQ ID NO: 1502837 - RNA, 19 nt, Artificial Sequence
  Description of Artificial Sequence: Synthetic oligonucleotide
uucuugaauacgugugaca

SEQ ID NO: 1502838 - RNA, 19 nt, Artificial Sequence
  Description of Artificial Sequence: Synthetic oligonucleotide
aaaguuugacaugcggaga

SEQ ID NO: 1502839 - RNA, 19 nt, Artificial Sequence
  Description of Artificial Sequence: Synthetic oligonucleotide
acuacuuuaugugaagaaa

SEQ ID NO: 1502840 - RNA, 19 nt, Artificial Sequence
  Description of Artificial Sequence: Synthetic oligonucleotide
ugguucacuguaauucugu

SEQ ID NO: 1502841 - RNA, 19 nt, Artificial Sequence
  Description of Artificial Sequence: Synthetic oligonucleotide
uacagaaaagcaugaugaa

SEQ ID NO: 1502842 - RNA, 19 nt, Artificial Sequence
  Description of Artificial Sequence: Synthetic oligonucleotide
ucuggcuaguucugguucc

SEQ ID NO: 1502843 - RNA, 19 nt, Artificial Sequence
  Description of Artificial Sequence: Synthetic oligonucleotide
uuuucacacauaggaagca

SEQ ID NO: 1502844 - RNA, 19 nt, Artificial Sequence
  Description of Artificial Sequence: Synthetic oligonucleotide
uuccccauagaaaguaaaa

SEQ ID NO: 1502845 - RNA, 19 nt, Artificial Sequence
  Description of Artificial Sequence: Synthetic oligonucleotide
aaaggccaugugacaaacc

SEQ ID NO: 1502846 - RNA, 19 nt, Artificial Sequence
  Description of Artificial Sequence: Synthetic oligonucleotide
auugaggcuccucuuaaaa

SEQ ID NO: 1502847 - RNA, 19 nt, Artificial Sequence
  Description of Artificial Sequence: Synthetic oligonucleotide
augaugaaguacaucacca

SEQ ID NO: 1502848 - RNA, 19 nt, Artificial Sequence
  Description of Artificial Sequence: Synthetic oligonucleotide
aaccccaaaccuggugugc

SEQ ID NO: 1502849 - RNA, 19 nt, Artificial Sequence
  Description of Artificial Sequence: Synthetic oligonucleotide
aaccccacagagcuaugug

SEQ ID NO: 1502850 - RNA, 19 nt, Artificial Sequence
  Description of Artificial Sequence: Synthetic oligonucleotide
caguccagcuucuaacuag

SEQ ID NO: 1502851 - RNA, 19 nt, Artificial Sequence
  Description of Artificial Sequence: Synthetic oligonucleotide
uuugagucauuaugauaga

SEQ ID NO: 1502852 - RNA, 19 nt, Artificial Sequence
  Description of Artificial Sequence: Synthetic oligonucleotide
uaccaacccuguaauaggu

SEQ ID NO: 1502853 - RNA, 19 nt, Artificial Sequence
  Description of Artificial Sequence: Synthetic oligonucleotide
uaguucugguuccuuagaa

SEQ ID NO: 1502854 - RNA, 19 nt, Artificial Sequence
  Description of Artificial Sequence: Synthetic oligonucleotide
caauuugauuuaaaugcca

SEQ ID NO: 1502855 - RNA, 19 nt, Artificial Sequence
  Description of Artificial Sequence: Synthetic oligonucleotide
ucauugaggcuccucuuaa

SEQ ID NO: 1502856 - RNA, 19 nt, Artificial Sequence
  Description of Artificial Sequence: Synthetic oligonucleotide
gagaacaaguuuaaauuaa

SEQ ID NO: 1502857 - RNA, 19 nt, Artificial Sequence
  Description of Artificial Sequence: Synthetic oligonucleotide
uaccgguauuuaaucaugu

SEQ ID NO: 1502858 - RNA, 19 nt, Artificial Sequence
  Description of Artificial Sequence: Synthetic oligonucleotide
gucacgacccaccggacag

SEQ ID NO: 1502859 - RNA, 19 nt, Artificial Sequence
  Description of Artificial Sequence: Synthetic oligonucleotide
ccgguauuuaaucaugugc

SEQ ID NO: 1502860 - RNA, 19 nt, Artificial Sequence
  Description of Artificial Sequence: Synthetic oligonucleotide
accguucuugaauacgugu

SEQ ID NO: 1502861 - RNA, 19 nt, Artificial Sequence
  Description of Artificial Sequence: Synthetic oligonucleotide
ucaaaguguuacauucuuu

SEQ ID NO: 1502862 - RNA, 19 nt, Artificial Sequence
  Description of Artificial Sequence: Synthetic oligonucleotide
caugagaacaaguuuaaau

SEQ ID NO: 1502863 - RNA, 19 nt, Artificial Sequence
  Description of Artificial Sequence: Synthetic oligonucleotide
uuccaucaaggaagggucc

SEQ ID NO: 1502864 - RNA, 19 nt, Artificial Sequence
  Description of Artificial Sequence: Synthetic oligonucleotide
aagguacagaucauagcca

SEQ ID NO: 1502865 - RNA, 19 nt, Artificial Sequence
  Description of Artificial Sequence: Synthetic oligonucleotide
uugaauucuggaagccuuc

SEQ ID NO: 1502866 - RNA, 19 nt, Artificial Sequence
  Description of Artificial Sequence: Synthetic oligonucleotide
ucuuuccgugugugaaugg

SEQ ID NO: 1502867 - RNA, 19 nt, Artificial Sequence
  Description of Artificial Sequence: Synthetic oligonucleotide
uguccaagccgugugaaaa

SEQ ID NO: 1502868 - RNA, 19 nt, Artificial Sequence
  Description of Artificial Sequence: Synthetic oligonucleotide
agaaaagcaugaugaagua

SEQ ID NO: 1502869 - RNA, 19 nt, Artificial Sequence
  Description of Artificial Sequence: Synthetic oligonucleotide
auuuauaauuccaggcccu

SEQ ID NO: 1502870 - RNA, 19 nt, Artificial Sequence
  Description of Artificial Sequence: Synthetic oligonucleotide
augauagaggccaacuuga

SEQ ID NO: 1502871 - RNA, 19 nt, Artificial Sequence
  Description of Artificial Sequence: Synthetic oligonucleotide
gcauaggucacaauguacc

SEQ ID NO: 1502872 - RNA, 19 nt, Artificial Sequence
  Description of Artificial Sequence: Synthetic oligonucleotide
auguaccgguauuuaauca

SEQ ID NO: 1502873 - RNA, 19 nt, Artificial Sequence
  Description of Artificial Sequence: Synthetic oligonucleotide
aagguuuaggugguaaauu

SEQ ID NO: 1502874 - RNA, 19 nt, Artificial Sequence
  Description of Artificial Sequence: Synthetic oligonucleotide
gguagacuuguccagccag

SEQ ID NO: 1502875 - RNA, 19 nt, Artificial Sequence
  Description of Artificial Sequence: Synthetic oligonucleotide
acaaaccccaaaccuggug

SEQ ID NO: 1502876 - RNA, 19 nt, Artificial Sequence
  Description of Artificial Sequence: Synthetic oligonucleotide
aauacgugugacagauuca

SEQ ID NO: 1502877 - RNA, 19 nt, Artificial Sequence
  Description of Artificial Sequence: Synthetic oligonucleotide
guuguugcaugagaacaag

SEQ ID NO: 1502878 - RNA, 19 nt, Artificial Sequence
  Description of Artificial Sequence: Synthetic oligonucleotide
ugaaugguauguaccggua

SEQ ID NO: 1502879 - RNA, 19 nt, Artificial Sequence
  Description of Artificial Sequence: Synthetic oligonucleotide
uggucgggaaggcagggcu

SEQ ID NO: 1502880 - RNA, 19 nt, Artificial Sequence
  Description of Artificial Sequence: Synthetic oligonucleotide
uuauaauuccaggcccuca

SEQ ID NO: 1502881 - RNA, 19 nt, Artificial Sequence
  Description of Artificial Sequence: Synthetic oligonucleotide
ugacaugcggagagguucu

SEQ ID NO: 1502882 - RNA, 19 nt, Artificial Sequence
  Description of Artificial Sequence: Synthetic oligonucleotide
caauguaccaacccuguaa

SEQ ID NO: 1502883 - RNA, 19 nt, Artificial Sequence
  Description of Artificial Sequence: Synthetic oligonucleotide
accgguauuuaaucaugug

SEQ ID NO: 1502884 - RNA, 19 nt, Artificial Sequence
  Description of Artificial Sequence: Synthetic oligonucleotide
ugccuuucguagcugcaug

SEQ ID NO: 1502885 - RNA, 19 nt, Artificial Sequence
  Description of Artificial Sequence: Synthetic oligonucleotide
uuuauaauuccaggcccuc

SEQ ID NO: 1502886 - RNA, 19 nt, Artificial Sequence
  Description of Artificial Sequence: Synthetic oligonucleotide
cucagcguggucgggaagg

SEQ ID NO: 1502887 - RNA, 19 nt, Artificial Sequence
  Description of Artificial Sequence: Synthetic oligonucleotide
ugucacgacccaccggaca

SEQ ID NO: 1502888 - RNA, 19 nt, Artificial Sequence
  Description of Artificial Sequence: Synthetic oligonucleotide
aguacaucaccaggaucgg

SEQ ID NO: 1502889 - RNA, 19 nt, Artificial Sequence
  Description of Artificial Sequence: Synthetic oligonucleotide
cauggacagagucuccaac

SEQ ID NO: 1502890 - RNA, 19 nt, Artificial Sequence
  Description of Artificial Sequence: Synthetic oligonucleotide
uaaaagccucgaagaaggu

SEQ ID NO: 1502891 - RNA, 19 nt, Artificial Sequence
  Description of Artificial Sequence: Synthetic oligonucleotide
gaaccugauauuucagaua

SEQ ID NO: 1502892 - RNA, 19 nt, Artificial Sequence
  Description of Artificial Sequence: Synthetic oligonucleotide
acauaggaagcaggcuggc

SEQ ID NO: 1502893 - RNA, 19 nt, Artificial Sequence
  Description of Artificial Sequence: Synthetic oligonucleotide
auagaaaguaaaaggccau

SEQ ID NO: 1502894 - RNA, 19 nt, Artificial Sequence
  Description of Artificial Sequence: Synthetic oligonucleotide
ggucacaauguaccaaccc

SEQ ID NO: 1502895 - RNA, 19 nt, Artificial Sequence
  Description of Artificial Sequence: Synthetic oligonucleotide
accccacagagcuauguga

SEQ ID NO: 1502896 - RNA, 19 nt, Artificial Sequence
  Description of Artificial Sequence: Synthetic oligonucleotide
aggccaugugacaaacccc

SEQ ID NO: 1502897 - RNA, 19 nt, Artificial Sequence
  Description of Artificial Sequence: Synthetic oligonucleotide
gccacaagaaugccuuucg

SEQ ID NO: 1502898 - RNA, 19 nt, Artificial Sequence
  Description of Artificial Sequence: Synthetic oligonucleotide
gacugauaaaucuguccaa

SEQ ID NO: 1502899 - RNA, 19 nt, Artificial Sequence
  Description of Artificial Sequence: Synthetic oligonucleotide
uuuccgugugugaauggua

SEQ ID NO: 1502900 - RNA, 19 nt, Artificial Sequence
  Description of Artificial Sequence: Synthetic oligonucleotide
auuguuacaauggcucaaa

SEQ ID NO: 1502901 - RNA, 19 nt, Artificial Sequence
  Description of Artificial Sequence: Synthetic oligonucleotide
caauggcucaaaaccguuc

SEQ ID NO: 1502902 - RNA, 19 nt, Artificial Sequence
  Description of Artificial Sequence: Synthetic oligonucleotide
gguuuaggugguaaauucc

SEQ ID NO: 1502903 - RNA, 19 nt, Artificial Sequence
  Description of Artificial Sequence: Synthetic oligonucleotide
cccuguaauagguaaacuc

SEQ ID NO: 1502904 - RNA, 19 nt, Artificial Sequence
  Description of Artificial Sequence: Synthetic oligonucleotide
ucacccucaaaguguuaca

SEQ ID NO: 1502905 - RNA, 19 nt, Artificial Sequence
  Description of Artificial Sequence: Synthetic oligonucleotide
cucgaagaagguacagauc

SEQ ID NO: 1502906 - RNA, 19 nt, Artificial Sequence
  Description of Artificial Sequence: Synthetic oligonucleotide
aggucacaauguaccaacc

SEQ ID NO: 1502907 - RNA, 19 nt, Artificial Sequence
  Description of Artificial Sequence: Synthetic oligonucleotide
guucuugaauacgugugac

SEQ ID NO: 1502908 - RNA, 19 nt, Artificial Sequence
  Description of Artificial Sequence: Synthetic oligonucleotide
gucacccucaaaguguuac

SEQ ID NO: 1502909 - RNA, 19 nt, Artificial Sequence
  Description of Artificial Sequence: Synthetic oligonucleotide
guaccgguauuuaaucaug

SEQ ID NO: 1502910 - RNA, 19 nt, Artificial Sequence
  Description of Artificial Sequence: Synthetic oligonucleotide
ccucauucuguuugguugg

SEQ ID NO: 1502911 - RNA, 19 nt, Artificial Sequence
  Description of Artificial Sequence: Synthetic oligonucleotide
uccaucaaggaagggucca

SEQ ID NO: 1502912 - RNA, 19 nt, Artificial Sequence
  Description of Artificial Sequence: Synthetic oligonucleotide
guacagaucauagccacaa

SEQ ID NO: 1502913 - RNA, 19 nt, Artificial Sequence
  Description of Artificial Sequence: Synthetic oligonucleotide
gauuuaaaugccaguuucu

SEQ ID NO: 1502914 - RNA, 19 nt, Artificial Sequence
  Description of Artificial Sequence: Synthetic oligonucleotide
agggacacuuuguuuaaua

SEQ ID NO: 1502915 - RNA, 19 nt, Artificial Sequence
  Description of Artificial Sequence: Synthetic oligonucleotide
ugaagggccgaaacuccuc

SEQ ID NO: 1502916 - RNA, 19 nt, Artificial Sequence
  Description of Artificial Sequence: Synthetic oligonucleotide
cucuggcuaguucugguuc

SEQ ID NO: 1502917 - RNA, 19 nt, Artificial Sequence
  Description of Artificial Sequence: Synthetic oligonucleotide
uagacuuguccagccagga

SEQ ID NO: 1502918 - RNA, 19 nt, Artificial Sequence
  Description of Artificial Sequence: Synthetic oligonucleotide
aaugccuuucguagcugca

SEQ ID NO: 1502919 - RNA, 19 nt, Artificial Sequence
  Description of Artificial Sequence: Synthetic oligonucleotide
agcguggucgggaaggcag

SEQ ID NO: 1502920 - RNA, 19 nt, Artificial Sequence
  Description of Artificial Sequence: Synthetic oligonucleotide
cauuaugauagaggccaac

SEQ ID NO: 1502921 - RNA, 19 nt, Artificial Sequence
  Description of Artificial Sequence: Synthetic oligonucleotide
gaacacugggacguuaaaa

SEQ ID NO: 1502922 - RNA, 19 nt, Artificial Sequence
  Description of Artificial Sequence: Synthetic oligonucleotide
uccgugugugaaugguaug

SEQ ID NO: 1502923 - RNA, 19 nt, Artificial Sequence
  Description of Artificial Sequence: Synthetic oligonucleotide
caggaguggccucagcgug

SEQ ID NO: 1502924 - RNA, 19 nt, Artificial Sequence
  Description of Artificial Sequence: Synthetic oligonucleotide
uacgugugacagauucagu

SEQ ID NO: 1502925 - RNA, 19 nt, Artificial Sequence
  Description of Artificial Sequence: Synthetic oligonucleotide
cacaagaaugccuuucgua

SEQ ID NO: 1502926 - RNA, 19 nt, Artificial Sequence
  Description of Artificial Sequence: Synthetic oligonucleotide
acguaucaaaggaaagugu

SEQ ID NO: 1502927 - RNA, 19 nt, Artificial Sequence
  Description of Artificial Sequence: Synthetic oligonucleotide
aaccguucuugaauacgug

SEQ ID NO: 1502928 - RNA, 19 nt, Artificial Sequence
  Description of Artificial Sequence: Synthetic oligonucleotide
cugcaugccaaaauuugaa

SEQ ID NO: 1502929 - RNA, 19 nt, Artificial Sequence
  Description of Artificial Sequence: Synthetic oligonucleotide
uugguaaugaagggccauc

SEQ ID NO: 1502930 - RNA, 19 nt, Artificial Sequence
  Description of Artificial Sequence: Synthetic oligonucleotide
cuguacaccacugagggcu

SEQ ID NO: 1502931 - RNA, 19 nt, Artificial Sequence
  Description of Artificial Sequence: Synthetic oligonucleotide
cucaaaaccguucuugaau

SEQ ID NO: 1502932 - RNA, 19 nt, Artificial Sequence
  Description of Artificial Sequence: Synthetic oligonucleotide
agcuguguaugggguagac

SEQ ID NO: 1502933 - RNA, 19 nt, Artificial Sequence
  Description of Artificial Sequence: Synthetic oligonucleotide
guaauagguaaacucuaau

SEQ ID NO: 1502934 - RNA, 19 nt, Artificial Sequence
  Description of Artificial Sequence: Synthetic oligonucleotide
accggacagcuguguaugg

SEQ ID NO: 1502935 - RNA, 19 nt, Artificial Sequence
  Description of Artificial Sequence: Synthetic oligonucleotide
cgugugacagauucagucc

SEQ ID NO: 1502936 - RNA, 19 nt, Artificial Sequence
  Description of Artificial Sequence: Synthetic oligonucleotide
ccagcuucuaacuagcaaa

SEQ ID NO: 1502937 - RNA, 19 nt, Artificial Sequence
  Description of Artificial Sequence: Synthetic oligonucleotide
ucuguccaagccgugugaa

SEQ ID NO: 1502938 - RNA, 19 nt, Artificial Sequence
  Description of Artificial Sequence: Synthetic oligonucleotide
gacagauucaguccagcuu

SEQ ID NO: 1502939 - RNA, 19 nt, Artificial Sequence
  Description of Artificial Sequence: Synthetic oligonucleotide
gguauguaccgguauuuaa

SEQ ID NO: 1502940 - RNA, 19 nt, Artificial Sequence
  Description of Artificial Sequence: Synthetic oligonucleotide
uucguagcugcaugccaaa

SEQ ID NO: 1502941 - RNA, 19 nt, Artificial Sequence
  Description of Artificial Sequence: Synthetic oligonucleotide
agcuucuaacuagcaaaug

SEQ ID NO: 1502942 - RNA, 19 nt, Artificial Sequence
  Description of Artificial Sequence: Synthetic oligonucleotide
ccguucuugaauacgugug

SEQ ID NO: 1502943 - RNA, 19 nt, Artificial Sequence
  Description of Artificial Sequence: Synthetic oligonucleotide
acaauguaccaacccugua

SEQ ID NO: 1502944 - RNA, 19 nt, Artificial Sequence
  Description of Artificial Sequence: Synthetic oligonucleotide
ugguauguaccgguauuua

SEQ ID NO: 1502945 - RNA, 19 nt, Artificial Sequence
  Description of Artificial Sequence: Synthetic oligonucleotide
gaaugguauguaccgguau

SEQ ID NO: 1502946 - RNA, 19 nt, Artificial Sequence
  Description of Artificial Sequence: Synthetic oligonucleotide
uucgaaugaagggccgaaa

SEQ ID NO: 1502947 - RNA, 19 nt, Artificial Sequence
  Description of Artificial Sequence: Synthetic oligonucleotide
augguauguaccgguauuu

SEQ ID NO: 1502948 - RNA, 19 nt, Artificial Sequence
  Description of Artificial Sequence: Synthetic oligonucleotide
agacauucuguaacucgca

SEQ ID NO: 1502949 - RNA, 19 nt, Artificial Sequence
  Description of Artificial Sequence: Synthetic oligonucleotide
guauguaccgguauuuaau

SEQ ID NO: 1502950 - RNA, 19 nt, Artificial Sequence
  Description of Artificial Sequence: Synthetic oligonucleotide
auguuacguaucaaaggaa

SEQ ID NO: 1502951 - RNA, 19 nt, Artificial Sequence
  Description of Artificial Sequence: Synthetic oligonucleotide
acgcuaugaaaagguuuag

SEQ ID NO: 1502952 - RNA, 19 nt, Artificial Sequence
  Description of Artificial Sequence: Synthetic oligonucleotide
gguucacuguaauucuguc

SEQ ID NO: 1502953 - RNA, 19 nt, Artificial Sequence
  Description of Artificial Sequence: Synthetic oligonucleotide
caccggacagcuguguaug

SEQ ID NO: 1502954 - RNA, 19 nt, Artificial Sequence
  Description of Artificial Sequence: Synthetic oligonucleotide
ggccaugugacaaacccca

SEQ ID NO: 1502955 - RNA, 19 nt, Artificial Sequence
  Description of Artificial Sequence: Synthetic oligonucleotide
gcauuguuacaauggcuca

SEQ ID NO: 1502956 - RNA, 19 nt, Artificial Sequence
  Description of Artificial Sequence: Synthetic oligonucleotide
uguacaccacugagggcuu

SEQ ID NO: 1502957 - RNA, 19 nt, Artificial Sequence
  Description of Artificial Sequence: Synthetic oligonucleotide
guuggauuuaaaagucacu

SEQ ID NO: 1502958 - RNA, 19 nt, Artificial Sequence
  Description of Artificial Sequence: Synthetic oligonucleotide
ugaauacgugugacagauu

SEQ ID NO: 1502959 - RNA, 19 nt, Artificial Sequence
  Description of Artificial Sequence: Synthetic oligonucleotide
gcccucaaaagcaaucaug

SEQ ID NO: 1502960 - RNA, 19 nt, Artificial Sequence
  Description of Artificial Sequence: Synthetic oligonucleotide
ccaggaucggccagaacac

SEQ ID NO: 1502961 - RNA, 19 nt, Artificial Sequence
  Description of Artificial Sequence: Synthetic oligonucleotide
cagugucacgacccaccgg

SEQ ID NO: 1502962 - RNA, 19 nt, Artificial Sequence
  Description of Artificial Sequence: Synthetic oligonucleotide
cauuguuacaauggcucaa

SEQ ID NO: 1502963 - RNA, 19 nt, Artificial Sequence
  Description of Artificial Sequence: Synthetic oligonucleotide
cagaacacugggacguuaa

SEQ ID NO: 1502964 - RNA, 19 nt, Artificial Sequence
  Description of Artificial Sequence: Synthetic oligonucleotide
gccaggacugauaaaucug

SEQ ID NO: 1502965 - RNA, 19 nt, Artificial Sequence
  Description of Artificial Sequence: Synthetic oligonucleotide
ggcauaggucacaauguac

SEQ ID NO: 1502966 - RNA, 19 nt, Artificial Sequence
  Description of Artificial Sequence: Synthetic oligonucleotide
gagcuaugugacagucacc

SEQ ID NO: 1502967 - RNA, 19 nt, Artificial Sequence
  Description of Artificial Sequence: Synthetic oligonucleotide
aagggacacuuuguuuaau

SEQ ID NO: 1502968 - RNA, 19 nt, Artificial Sequence
  Description of Artificial Sequence: Synthetic oligonucleotide
cacaauguaccaacccugu

SEQ ID NO: 1502969 - RNA, 19 nt, Artificial Sequence
  Description of Artificial Sequence: Synthetic oligonucleotide
cugggacguuaaaagccuc

SEQ ID NO: 1502970 - RNA, 19 nt, Artificial Sequence
  Description of Artificial Sequence: Synthetic oligonucleotide
ccccacagagcuaugugac

SEQ ID NO: 1502971 - RNA, 19 nt, Artificial Sequence
  Description of Artificial Sequence: Synthetic oligonucleotide
gggccgaaacuccucauuc

SEQ ID NO: 1502972 - RNA, 19 nt, Artificial Sequence
  Description of Artificial Sequence: Synthetic oligonucleotide
acguccuccuucccuuugu

SEQ ID NO: 1502973 - RNA, 19 nt, Artificial Sequence
  Description of Artificial Sequence: Synthetic oligonucleotide
gccuuucguagcugcaugc

SEQ ID NO: 1502974 - RNA, 19 nt, Artificial Sequence
  Description of Artificial Sequence: Synthetic oligonucleotide
caacccuguaauagguaaa

SEQ ID NO: 1502975 - RNA, 19 nt, Artificial Sequence
  Description of Artificial Sequence: Synthetic oligonucleotide
agggccgaaacuccucauu

SEQ ID NO: 1502976 - RNA, 19 nt, Artificial Sequence
  Description of Artificial Sequence: Synthetic oligonucleotide
cagagcuaugugacaguca

SEQ ID NO: 1502977 - RNA, 19 nt, Artificial Sequence
  Description of Artificial Sequence: Synthetic oligonucleotide
cucuaaucauguagacaaa

SEQ ID NO: 1502978 - RNA, 19 nt, Artificial Sequence
  Description of Artificial Sequence: Synthetic oligonucleotide
gguaaauucccaaggcaua

SEQ ID NO: 1502979 - RNA, 19 nt, Artificial Sequence
  Description of Artificial Sequence: Synthetic oligonucleotide
accccaaaccuggugugcu

SEQ ID NO: 1502980 - RNA, 19 nt, Artificial Sequence
  Description of Artificial Sequence: Synthetic oligonucleotide
acaauggcucaaaaccguu

SEQ ID NO: 1502981 - RNA, 19 nt, Artificial Sequence
  Description of Artificial Sequence: Synthetic oligonucleotide
cgguauuuaaucaugugcu

SEQ ID NO: 1502982 - RNA, 19 nt, Artificial Sequence
  Description of Artificial Sequence: Synthetic oligonucleotide
ugguuccuuagaaguuguu

SEQ ID NO: 1502983 - RNA, 19 nt, Artificial Sequence
  Description of Artificial Sequence: Synthetic oligonucleotide
ccaacccuguaauagguaa

SEQ ID NO: 1502984 - RNA, 19 nt, Artificial Sequence
  Description of Artificial Sequence: Synthetic oligonucleotide
ucacgacccaccggacagc

SEQ ID NO: 1502985 - RNA, 19 nt, Artificial Sequence
  Description of Artificial Sequence: Synthetic oligonucleotide
augccuuucguagcugcau

SEQ ID NO: 1502986 - RNA, 19 nt, Artificial Sequence
  Description of Artificial Sequence: Synthetic oligonucleotide
gguaaacucuaaucaugua

SEQ ID NO: 1502987 - RNA, 19 nt, Artificial Sequence
  Description of Artificial Sequence: Synthetic oligonucleotide
gucuuccaucaaggaaggg

SEQ ID NO: 1502988 - RNA, 19 nt, Artificial Sequence
  Description of Artificial Sequence: Synthetic oligonucleotide
cuucuagugagaugagauu

SEQ ID NO: 1502989 - RNA, 19 nt, Artificial Sequence
  Description of Artificial Sequence: Synthetic oligonucleotide
ucguagcugcaugccaaaa

SEQ ID NO: 1502990 - RNA, 19 nt, Artificial Sequence
  Description of Artificial Sequence: Synthetic oligonucleotide
ucccucccgcucucucggg

SEQ ID NO: 1502991 - RNA, 19 nt, Artificial Sequence
  Description of Artificial Sequence: Synthetic oligonucleotide
gguauuuaaucaugugcuu

SEQ ID NO: 1502992 - RNA, 19 nt, Artificial Sequence
  Description of Artificial Sequence: Synthetic oligonucleotide
guguaugggguagacuugu

SEQ ID NO: 1502993 - RNA, 19 nt, Artificial Sequence
  Description of Artificial Sequence: Synthetic oligonucleotide
cauaggaagcaggcuggca

SEQ ID NO: 1502994 - RNA, 19 nt, Artificial Sequence
  Description of Artificial Sequence: Synthetic oligonucleotide
cacguccuccuucccuuug

SEQ ID NO: 1502995 - RNA, 19 nt, Artificial Sequence
  Description of Artificial Sequence: Synthetic oligonucleotide
cuucgaaugaagggccgaa

SEQ ID NO: 1502996 - RNA, 19 nt, Artificial Sequence
  Description of Artificial Sequence: Synthetic oligonucleotide
cagcuucuaacuagcaaau

SEQ ID NO: 1502997 - RNA, 19 nt, Artificial Sequence
  Description of Artificial Sequence: Synthetic oligonucleotide
cuuuccgugugugaauggu

SEQ ID NO: 1502998 - RNA, 19 nt, Artificial Sequence
  Description of Artificial Sequence: Synthetic oligonucleotide
caugcggagagguucuuuu

SEQ ID NO: 1502999 - RNA, 19 nt, Artificial Sequence
  Description of Artificial Sequence: Synthetic oligonucleotide
ggacguuaaaagccucgaa

SEQ ID NO: 1503000 - RNA, 19 nt, Artificial Sequence
  Description of Artificial Sequence: Synthetic oligonucleotide
gaaccccacagagcuaugu

SEQ ID NO: 1503001 - RNA, 19 nt, Artificial Sequence
  Description of Artificial Sequence: Synthetic oligonucleotide
uagccacaagaaugccuuu

SEQ ID NO: 1503002 - RNA, 19 nt, Artificial Sequence
  Description of Artificial Sequence: Synthetic oligonucleotide
gccuucgaaugaagggccg

SEQ ID NO: 1503003 - RNA, 19 nt, Artificial Sequence
  Description of Artificial Sequence: Synthetic oligonucleotide
guggucgggaaggcagggc

SEQ ID NO: 1503004 - RNA, 19 nt, Artificial Sequence
  Description of Artificial Sequence: Synthetic oligonucleotide
cuguccaagccgugugaaa

SEQ ID NO: 1503005 - RNA, 19 nt, Artificial Sequence
  Description of Artificial Sequence: Synthetic oligonucleotide
accaacccuguaauaggua

SEQ ID NO: 1503006 - RNA, 19 nt, Artificial Sequence
  Description of Artificial Sequence: Synthetic oligonucleotide
ggguagacuuguccagcca

SEQ ID NO: 1503007 - RNA, 19 nt, Artificial Sequence
  Description of Artificial Sequence: Synthetic oligonucleotide
agccuaugguucacuguaa

SEQ ID NO: 1503008 - RNA, 19 nt, Artificial Sequence
  Description of Artificial Sequence: Synthetic oligonucleotide
ccggacagcuguguauggg

SEQ ID NO: 1503009 - RNA, 19 nt, Artificial Sequence
  Description of Artificial Sequence: Synthetic oligonucleotide
ggccagaacacugggacgu

SEQ ID NO: 1503010 - RNA, 19 nt, Artificial Sequence
  Description of Artificial Sequence: Synthetic oligonucleotide
gacccaccggacagcugug

SEQ ID NO: 1503011 - RNA, 19 nt, Artificial Sequence
  Description of Artificial Sequence: Synthetic oligonucleotide
ggacagagucuccaacacu

SEQ ID NO: 1503012 - RNA, 19 nt, Artificial Sequence
  Description of Artificial Sequence: Synthetic oligonucleotide
aggguccacuuugggagaa

SEQ ID NO: 1503013 - RNA, 19 nt, Artificial Sequence
  Description of Artificial Sequence: Synthetic oligonucleotide
gccucgaagaagguacaga

SEQ ID NO: 1503014 - RNA, 19 nt, Artificial Sequence
  Description of Artificial Sequence: Synthetic oligonucleotide
ucccgcucucucgggcugc

SEQ ID NO: 1503015 - RNA, 19 nt, Artificial Sequence
  Description of Artificial Sequence: Synthetic oligonucleotide
ccaaaccuggugugcucug

SEQ ID NO: 1503016 - RNA, 19 nt, Artificial Sequence
  Description of Artificial Sequence: Synthetic oligonucleotide
ccaugugacaaaccccaaa

SEQ ID NO: 1503017 - RNA, 19 nt, Artificial Sequence
  Description of Artificial Sequence: Synthetic oligonucleotide
gcguggucgggaaggcagg

SEQ ID NO: 1503018 - RNA, 19 nt, Artificial Sequence
  Description of Artificial Sequence: Synthetic oligonucleotide
cggccagaacacugggacg

SEQ ID NO: 1503019 - RNA, 19 nt, Artificial Sequence
  Description of Artificial Sequence: Synthetic oligonucleotide
gugucacgacccaccggac

SEQ ID NO: 1503020 - RNA, 19 nt, Artificial Sequence
  Description of Artificial Sequence: Synthetic oligonucleotide
gccuaugguucacuguaau

SEQ ID NO: 1503021 - RNA, 19 nt, Artificial Sequence
  Description of Artificial Sequence: Synthetic oligonucleotide
ggaacgcuaugaaaagguu

SEQ ID NO: 1503022 - RNA, 19 nt, Artificial Sequence
  Description of Artificial Sequence: Synthetic oligonucleotide
cgcucucucgggcugccac

SEQ ID NO: 1503023 - RNA, 19 nt, Artificial Sequence
  Description of Artificial Sequence: Synthetic oligonucleotide
ccuaugguucacuguaauu

SEQ ID NO: 1503024 - RNA, 19 nt, Artificial Sequence
  Description of Artificial Sequence: Synthetic oligonucleotide
ccuucgaaugaagggccga

SEQ ID NO: 1503025 - RNA, 19 nt, Artificial Sequence
  Description of Artificial Sequence: Synthetic oligonucleotide
ccucauaaucaacuacuuu

SEQ ID NO: 1503026 - RNA, 19 nt, Artificial Sequence
  Description of Artificial Sequence: Synthetic oligonucleotide
ccccuucagacauucugua

SEQ ID NO: 1503027 - RNA, 19 nt, Artificial Sequence
  Description of Artificial Sequence: Synthetic oligonucleotide
acgacccaccggacagcug

SEQ ID NO: 1503028 - RNA, 19 nt, Artificial Sequence
  Description of Artificial Sequence: Synthetic oligonucleotide
gaguggccucagcgugguc

SEQ ID NO: 1503029 - RNA, 19 nt, Artificial Sequence
  Description of Artificial Sequence: Synthetic oligonucleotide
gcuguguaugggguagacu

SEQ ID NO: 1503030 - RNA, 19 nt, Artificial Sequence
  Description of Artificial Sequence: Synthetic oligonucleotide
cagcguggucgggaaggca

SEQ ID NO: 1503031 - RNA, 19 nt, Artificial Sequence
  Description of Artificial Sequence: Synthetic oligonucleotide
cgacccaccggacagcugu

SEQ ID NO: 1503032 - RNA, 19 nt, Artificial Sequence
  Description of Artificial Sequence: Synthetic oligonucleotide
gcccacguccuccuucccu

SEQ ID NO: 1503033 - RNA, 19 nt, Artificial Sequence
  Description of Artificial Sequence: Synthetic oligonucleotide
ggaguggccucagcguggu

SEQ ID NO: 1503034 - RNA, 19 nt, Artificial Sequence
  Description of Artificial Sequence: Synthetic oligonucleotide
gccaugugacaaaccccaa

SEQ ID NO: 1503035 - RNA, 19 nt, Artificial Sequence
  Description of Artificial Sequence: Synthetic oligonucleotide
ccaccggacagcuguguau

SEQ ID NO: 1503036 - RNA, 19 nt, Artificial Sequence
  Description of Artificial Sequence: Synthetic oligonucleotide
cgugugugaaugguaugua

SEQ ID NO: 1503037 - RNA, 19 nt, Artificial Sequence
  Description of Artificial Sequence: Synthetic oligonucleotide
gccagaacacugggacguu

SEQ ID NO: 1503038 - RNA, 19 nt, Artificial Sequence
  Description of Artificial Sequence: Synthetic oligonucleotide
ccgcucucucgggcugcca

SEQ ID NO: 1503039 - RNA, 19 nt, Artificial Sequence
  Description of Artificial Sequence: Synthetic oligonucleotide
uaaaauaacauucugggcu

SEQ ID NO: 1503040 - RNA, 19 nt, Artificial Sequence
  Description of Artificial Sequence: Synthetic oligonucleotide
aaauucaacccacacauug

SEQ ID NO: 1503041 - RNA, 19 nt, Artificial Sequence
  Description of Artificial Sequence: Synthetic oligonucleotide
aacgcuguuaagcaaacgg

SEQ ID NO: 1503042 - RNA, 19 nt, Artificial Sequence
  Description of Artificial Sequence: Synthetic oligonucleotide
aacuagaccacuucauccc

SEQ ID NO: 1503043 - RNA, 19 nt, Artificial Sequence
  Description of Artificial Sequence: Synthetic oligonucleotide
uuuucauauaaacaggaca

SEQ ID NO: 1503044 - RNA, 19 nt, Artificial Sequence
  Description of Artificial Sequence: Synthetic oligonucleotide
uguucaaagaauaaauugu

SEQ ID NO: 1503045 - RNA, 19 nt, Artificial Sequence
  Description of Artificial Sequence: Synthetic oligonucleotide
aucgauuugauuuugauaa

SEQ ID NO: 1503046 - RNA, 19 nt, Artificial Sequence
  Description of Artificial Sequence: Synthetic oligonucleotide
uaaaccucaucacugaugc

SEQ ID NO: 1503047 - RNA, 19 nt, Artificial Sequence
  Description of Artificial Sequence: Synthetic oligonucleotide
uuuauagucauaaggcuca

SEQ ID NO: 1503048 - RNA, 19 nt, Artificial Sequence
  Description of Artificial Sequence: Synthetic oligonucleotide
gauaucaauccaaagagcc

SEQ ID NO: 1503049 - RNA, 19 nt, Artificial Sequence
  Description of Artificial Sequence: Synthetic oligonucleotide
uuguccaagauucacaaca

SEQ ID NO: 1503050 - RNA, 19 nt, Artificial Sequence
  Description of Artificial Sequence: Synthetic oligonucleotide
uggaguauuuaauauaaug

SEQ ID NO: 1503051 - RNA, 19 nt, Artificial Sequence
  Description of Artificial Sequence: Synthetic oligonucleotide
aaacggaccauccugucuc

SEQ ID NO: 1503052 - RNA, 19 nt, Artificial Sequence
  Description of Artificial Sequence: Synthetic oligonucleotide
auuuggaucgauuugauuu

SEQ ID NO: 1503053 - RNA, 19 nt, Artificial Sequence
  Description of Artificial Sequence: Synthetic oligonucleotide
aaugguguugaagagagcu

SEQ ID NO: 1503054 - RNA, 19 nt, Artificial Sequence
  Description of Artificial Sequence: Synthetic oligonucleotide
uuaucagguguuuaggacc

SEQ ID NO: 1503055 - RNA, 19 nt, Artificial Sequence
  Description of Artificial Sequence: Synthetic oligonucleotide
uguggaguauuuaauauaa

SEQ ID NO: 1503056 - RNA, 19 nt, Artificial Sequence
  Description of Artificial Sequence: Synthetic oligonucleotide
gugauuuagacucugaguc

SEQ ID NO: 1503057 - RNA, 19 nt, Artificial Sequence
  Description of Artificial Sequence: Synthetic oligonucleotide
aauaauuucuucauuugga

SEQ ID NO: 1503058 - RNA, 19 nt, Artificial Sequence
  Description of Artificial Sequence: Synthetic oligonucleotide
uccagucagaacuagacca

SEQ ID NO: 1503059 - RNA, 19 nt, Artificial Sequence
  Description of Artificial Sequence: Synthetic oligonucleotide
augcgcuugauaucaaucc

SEQ ID NO: 1503060 - RNA, 19 nt, Artificial Sequence
  Description of Artificial Sequence: Synthetic oligonucleotide
uucguaaaccucaucacug

SEQ ID NO: 1503061 - RNA, 19 nt, Artificial Sequence
  Description of Artificial Sequence: Synthetic oligonucleotide
uuuuauaugcuugugucca

SEQ ID NO: 1503062 - RNA, 19 nt, Artificial Sequence
  Description of Artificial Sequence: Synthetic oligonucleotide
uuuugaauuucaaagccau

SEQ ID NO: 1503063 - RNA, 19 nt, Artificial Sequence
  Description of Artificial Sequence: Synthetic oligonucleotide
cuugauaucaauccaaaga

SEQ ID NO: 1503064 - RNA, 19 nt, Artificial Sequence
  Description of Artificial Sequence: Synthetic oligonucleotide
uaguuuuggaacuaaauuu

SEQ ID NO: 1503065 - RNA, 19 nt, Artificial Sequence
  Description of Artificial Sequence: Synthetic oligonucleotide
gaacuagaccacuucaucc

SEQ ID NO: 1503066 - RNA, 19 nt, Artificial Sequence
  Description of Artificial Sequence: Synthetic oligonucleotide
auuuauagucauaaggcuc

SEQ ID NO: 1503067 - RNA, 19 nt, Artificial Sequence
  Description of Artificial Sequence: Synthetic oligonucleotide
aguucuugaggguugaaug

SEQ ID NO: 1503068 - RNA, 19 nt, Artificial Sequence
  Description of Artificial Sequence: Synthetic oligonucleotide
aguaaauucaacccacaca

SEQ ID NO: 1503069 - RNA, 19 nt, Artificial Sequence
  Description of Artificial Sequence: Synthetic oligonucleotide
ucaguuuggagguugcgag

SEQ ID NO: 1503070 - RNA, 19 nt, Artificial Sequence
  Description of Artificial Sequence: Synthetic oligonucleotide
uggaacuaaauuuacuuuc

SEQ ID NO: 1503071 - RNA, 19 nt, Artificial Sequence
  Description of Artificial Sequence: Synthetic oligonucleotide
ggaaugauggguuucaggc

SEQ ID NO: 1503072 - RNA, 19 nt, Artificial Sequence
  Description of Artificial Sequence: Synthetic oligonucleotide
agacaagccauucguaaac

SEQ ID NO: 1503073 - RNA, 19 nt, Artificial Sequence
  Description of Artificial Sequence: Synthetic oligonucleotide
uuuuaucagguguuuagga

SEQ ID NO: 1503074 - RNA, 19 nt, Artificial Sequence
  Description of Artificial Sequence: Synthetic oligonucleotide
uguuuaggaccaaugcucc

SEQ ID NO: 1503075 - RNA, 19 nt, Artificial Sequence
  Description of Artificial Sequence: Synthetic oligonucleotide
uggguuuagaucucagggg

SEQ ID NO: 1503076 - RNA, 19 nt, Artificial Sequence
  Description of Artificial Sequence: Synthetic oligonucleotide
agaacuagaccacuucauc

SEQ ID NO: 1503077 - RNA, 19 nt, Artificial Sequence
  Description of Artificial Sequence: Synthetic oligonucleotide
agugauggaugaccaaagc

SEQ ID NO: 1503078 - RNA, 19 nt, Artificial Sequence
  Description of Artificial Sequence: Synthetic oligonucleotide
uuaagcaaacggaccaucc

SEQ ID NO: 1503079 - RNA, 19 nt, Artificial Sequence
  Description of Artificial Sequence: Synthetic oligonucleotide
uuuaucagguguuuaggac

SEQ ID NO: 1503080 - RNA, 19 nt, Artificial Sequence
  Description of Artificial Sequence: Synthetic oligonucleotide
uaucaauccaaagagccug

SEQ ID NO: 1503081 - RNA, 19 nt, Artificial Sequence
  Description of Artificial Sequence: Synthetic oligonucleotide
aacaugcucgcucuccggg

SEQ ID NO: 1503082 - RNA, 19 nt, Artificial Sequence
  Description of Artificial Sequence: Synthetic oligonucleotide
ugugauuuagacucugagu

SEQ ID NO: 1503083 - RNA, 19 nt, Artificial Sequence
  Description of Artificial Sequence: Synthetic oligonucleotide
cuuccuauuguuauuguuc

SEQ ID NO: 1503084 - RNA, 19 nt, Artificial Sequence
  Description of Artificial Sequence: Synthetic oligonucleotide
gaggcgauauaucuggaag

SEQ ID NO: 1503085 - RNA, 19 nt, Artificial Sequence
  Description of Artificial Sequence: Synthetic oligonucleotide
acugauucagguuaucagu

SEQ ID NO: 1503086 - RNA, 19 nt, Artificial Sequence
  Description of Artificial Sequence: Synthetic oligonucleotide
aagcaaacggaccauccug

SEQ ID NO: 1503087 - RNA, 19 nt, Artificial Sequence
  Description of Artificial Sequence: Synthetic oligonucleotide
cucaggggaauaaacacag

SEQ ID NO: 1503088 - RNA, 19 nt, Artificial Sequence
  Description of Artificial Sequence: Synthetic oligonucleotide
uucauuuggaucgauuuga

SEQ ID NO: 1503089 - RNA, 19 nt, Artificial Sequence
  Description of Artificial Sequence: Synthetic oligonucleotide
uucacaaauuuauagucau

SEQ ID NO: 1503090 - RNA, 19 nt, Artificial Sequence
  Description of Artificial Sequence: Synthetic oligonucleotide
ugccuaugggguuaugugg

SEQ ID NO: 1503091 - RNA, 19 nt, Artificial Sequence
  Description of Artificial Sequence: Synthetic oligonucleotide
uguccagucagaacuagac

SEQ ID NO: 1503092 - RNA, 19 nt, Artificial Sequence
  Description of Artificial Sequence: Synthetic oligonucleotide
aguguagacaagccauucg

SEQ ID NO: 1503093 - RNA, 19 nt, Artificial Sequence
  Description of Artificial Sequence: Synthetic oligonucleotide
aguauuuaauauaauggcu

SEQ ID NO: 1503094 - RNA, 19 nt, Artificial Sequence
  Description of Artificial Sequence: Synthetic oligonucleotide
ucuaauuccuucgccagag

SEQ ID NO: 1503095 - RNA, 19 nt, Artificial Sequence
  Description of Artificial Sequence: Synthetic oligonucleotide
agcgaugaugaaguaaccc

SEQ ID NO: 1503096 - RNA, 19 nt, Artificial Sequence
  Description of Artificial Sequence: Synthetic oligonucleotide
uuauguggaguauuuaaua

SEQ ID NO: 1503097 - RNA, 19 nt, Artificial Sequence
  Description of Artificial Sequence: Synthetic oligonucleotide
ucaacccacacauugcugu

SEQ ID NO: 1503098 - RNA, 19 nt, Artificial Sequence
  Description of Artificial Sequence: Synthetic oligonucleotide
guauacaccuugccuaugg

SEQ ID NO: 1503099 - RNA, 19 nt, Artificial Sequence
  Description of Artificial Sequence: Synthetic oligonucleotide
aggcgauauaucuggaagg

SEQ ID NO: 1503100 - RNA, 19 nt, Artificial Sequence
  Description of Artificial Sequence: Synthetic oligonucleotide
ugaccaaagccccuggugu

SEQ ID NO: 1503101 - RNA, 19 nt, Artificial Sequence
  Description of Artificial Sequence: Synthetic oligonucleotide
uucgaaugcaccccuggcc

SEQ ID NO: 1503102 - RNA, 19 nt, Artificial Sequence
  Description of Artificial Sequence: Synthetic oligonucleotide
uuccuauuguuauuguucu

SEQ ID NO: 1503103 - RNA, 19 nt, Artificial Sequence
  Description of Artificial Sequence: Synthetic oligonucleotide
ucaucgcucuucaugucgg

SEQ ID NO: 1503104 - RNA, 19 nt, Artificial Sequence
  Description of Artificial Sequence: Synthetic oligonucleotide
ucucaggggaauaaacaca

SEQ ID NO: 1503105 - RNA, 19 nt, Artificial Sequence
  Description of Artificial Sequence: Synthetic oligonucleotide
uauuguuauuguucucucc

SEQ ID NO: 1503106 - RNA, 19 nt, Artificial Sequence
  Description of Artificial Sequence: Synthetic oligonucleotide
auucguaaaccucaucacu

SEQ ID NO: 1503107 - RNA, 19 nt, Artificial Sequence
  Description of Artificial Sequence: Synthetic oligonucleotide
uuaguaaauucaacccaca

SEQ ID NO: 1503108 - RNA, 19 nt, Artificial Sequence
  Description of Artificial Sequence: Synthetic oligonucleotide
cuugaaugguguugaagag

SEQ ID NO: 1503109 - RNA, 19 nt, Artificial Sequence
  Description of Artificial Sequence: Synthetic oligonucleotide
acuucgggcugcuccaugc

SEQ ID NO: 1503110 - RNA, 19 nt, Artificial Sequence
  Description of Artificial Sequence: Synthetic oligonucleotide
guugcacaaguguaaaaug

SEQ ID NO: 1503111 - RNA, 19 nt, Artificial Sequence
  Description of Artificial Sequence: Synthetic oligonucleotide
aaagucuugccagcgcuuc

SEQ ID NO: 1503112 - RNA, 19 nt, Artificial Sequence
  Description of Artificial Sequence: Synthetic oligonucleotide
ucacaagugauggaugacc

SEQ ID NO: 1503113 - RNA, 19 nt, Artificial Sequence
  Description of Artificial Sequence: Synthetic oligonucleotide
guuuuaucagguguuuagg

SEQ ID NO: 1503114 - RNA, 19 nt, Artificial Sequence
  Description of Artificial Sequence: Synthetic oligonucleotide
uguuauuguucucucccac

SEQ ID NO: 1503115 - RNA, 19 nt, Artificial Sequence
  Description of Artificial Sequence: Synthetic oligonucleotide
aauaaacacaggcguugcu

SEQ ID NO: 1503116 - RNA, 19 nt, Artificial Sequence
  Description of Artificial Sequence: Synthetic oligonucleotide
aaacacaggcguugcuccg

SEQ ID NO: 1503117 - RNA, 19 nt, Artificial Sequence
  Description of Artificial Sequence: Synthetic oligonucleotide
aaacaugcucgcucuccgg

SEQ ID NO: 1503118 - RNA, 19 nt, Artificial Sequence
  Description of Artificial Sequence: Synthetic oligonucleotide
agauucacaacagaagggu

SEQ ID NO: 1503119 - RNA, 19 nt, Artificial Sequence
  Description of Artificial Sequence: Synthetic oligonucleotide
gauuuagacucugagucac

SEQ ID NO: 1503120 - RNA, 19 nt, Artificial Sequence
  Description of Artificial Sequence: Synthetic oligonucleotide
ucgaaugcaccccuggccu

SEQ ID NO: 1503121 - RNA, 19 nt, Artificial Sequence
  Description of Artificial Sequence: Synthetic oligonucleotide
uguugaacggucuguaaau

SEQ ID NO: 1503122 - RNA, 19 nt, Artificial Sequence
  Description of Artificial Sequence: Synthetic oligonucleotide
ucgccagagaauuaaaaua

SEQ ID NO: 1503123 - RNA, 19 nt, Artificial Sequence
  Description of Artificial Sequence: Synthetic oligonucleotide
uucgccagagaauuaaaau

SEQ ID NO: 1503124 - RNA, 19 nt, Artificial Sequence
  Description of Artificial Sequence: Synthetic oligonucleotide
gauggaugaccaaagcccc

SEQ ID NO: 1503125 - RNA, 19 nt, Artificial Sequence
  Description of Artificial Sequence: Synthetic oligonucleotide
gagaggucagcaucuaaug

SEQ ID NO: 1503126 - RNA, 19 nt, Artificial Sequence
  Description of Artificial Sequence: Synthetic oligonucleotide
uguagagucuccucuggac

SEQ ID NO: 1503127 - RNA, 19 nt, Artificial Sequence
  Description of Artificial Sequence: Synthetic oligonucleotide
aggggaauaaacacaggcg

SEQ ID NO: 1503128 - RNA, 19 nt, Artificial Sequence
  Description of Artificial Sequence: Synthetic oligonucleotide
uuaucagucaaugcagccu

SEQ ID NO: 1503129 - RNA, 19 nt, Artificial Sequence
  Description of Artificial Sequence: Synthetic oligonucleotide
cucaucgcucuucaugucg

SEQ ID NO: 1503130 - RNA, 19 nt, Artificial Sequence
  Description of Artificial Sequence: Synthetic oligonucleotide
aacccacacauugcugucc

SEQ ID NO: 1503131 - RNA, 19 nt, Artificial Sequence
  Description of Artificial Sequence: Synthetic oligonucleotide
cauucguaaaccucaucac

SEQ ID NO: 1503132 - RNA, 19 nt, Artificial Sequence
  Description of Artificial Sequence: Synthetic oligonucleotide
uugccuaugggguuaugug

SEQ ID NO: 1503133 - RNA, 19 nt, Artificial Sequence
  Description of Artificial Sequence: Synthetic oligonucleotide
uaucagucaaugcagccuu

SEQ ID NO: 1503134 - RNA, 19 nt, Artificial Sequence
  Description of Artificial Sequence: Synthetic oligonucleotide
gagagcuccauauccgccc

SEQ ID NO: 1503135 - RNA, 19 nt, Artificial Sequence
  Description of Artificial Sequence: Synthetic oligonucleotide
aaccgcaccaacuucucaa

SEQ ID NO: 1503136 - RNA, 19 nt, Artificial Sequence
  Description of Artificial Sequence: Synthetic oligonucleotide
agaucucaggggaauaaac

SEQ ID NO: 1503137 - RNA, 19 nt, Artificial Sequence
  Description of Artificial Sequence: Synthetic oligonucleotide
cugugauuuagacucugag

SEQ ID NO: 1503138 - RNA, 19 nt, Artificial Sequence
  Description of Artificial Sequence: Synthetic oligonucleotide
ugcgcuugauaucaaucca

SEQ ID NO: 1503139 - RNA, 19 nt, Artificial Sequence
  Description of Artificial Sequence: Synthetic oligonucleotide
ugauucagguuaucaguca

SEQ ID NO: 1503140 - RNA, 19 nt, Artificial Sequence
  Description of Artificial Sequence: Synthetic oligonucleotide
aguugcacaaguguaaaau

SEQ ID NO: 1503141 - RNA, 19 nt, Artificial Sequence
  Description of Artificial Sequence: Synthetic oligonucleotide
uuuggaucgauuugauuuu

SEQ ID NO: 1503142 - RNA, 19 nt, Artificial Sequence
  Description of Artificial Sequence: Synthetic oligonucleotide
acugaaagucuugccagcg

SEQ ID NO: 1503143 - RNA, 19 nt, Artificial Sequence
  Description of Artificial Sequence: Synthetic oligonucleotide
gagguugcgagguggcgcg

SEQ ID NO: 1503144 - RNA, 19 nt, Artificial Sequence
  Description of Artificial Sequence: Synthetic oligonucleotide
uaacauucugggcuaucca

SEQ ID NO: 1503145 - RNA, 19 nt, Artificial Sequence
  Description of Artificial Sequence: Synthetic oligonucleotide
cucaccaugggcucguaac

SEQ ID NO: 1503146 - RNA, 19 nt, Artificial Sequence
  Description of Artificial Sequence: Synthetic oligonucleotide
aauguccagucagaacuag

SEQ ID NO: 1503147 - RNA, 19 nt, Artificial Sequence
  Description of Artificial Sequence: Synthetic oligonucleotide
ucauaaggcucaucgcucu

SEQ ID NO: 1503148 - RNA, 19 nt, Artificial Sequence
  Description of Artificial Sequence: Synthetic oligonucleotide
uucaugucggagaggucag

SEQ ID NO: 1503149 - RNA, 19 nt, Artificial Sequence
  Description of Artificial Sequence: Synthetic oligonucleotide
uggcuuuaguuuuggaacu

SEQ ID NO: 1503150 - RNA, 19 nt, Artificial Sequence
  Description of Artificial Sequence: Synthetic oligonucleotide
cacaaauuuauagucauaa

SEQ ID NO: 1503151 - RNA, 19 nt, Artificial Sequence
  Description of Artificial Sequence: Synthetic oligonucleotide
guguuuaggaccaaugcuc

SEQ ID NO: 1503152 - RNA, 19 nt, Artificial Sequence
  Description of Artificial Sequence: Synthetic oligonucleotide
augaccaaagccccuggug

SEQ ID NO: 1503153 - RNA, 19 nt, Artificial Sequence
  Description of Artificial Sequence: Synthetic oligonucleotide
gaucgauuugauuuugaua

SEQ ID NO: 1503154 - RNA, 19 nt, Artificial Sequence
  Description of Artificial Sequence: Synthetic oligonucleotide
cugccuguaaaggaguugc

SEQ ID NO: 1503155 - RNA, 19 nt, Artificial Sequence
  Description of Artificial Sequence: Synthetic oligonucleotide
gaaugcugaaacagggaug

SEQ ID NO: 1503156 - RNA, 19 nt, Artificial Sequence
  Description of Artificial Sequence: Synthetic oligonucleotide
gcgaugaugaaguaacccc

SEQ ID NO: 1503157 - RNA, 19 nt, Artificial Sequence
  Description of Artificial Sequence: Synthetic oligonucleotide
cuugaugcaaaggucagca

SEQ ID NO: 1503158 - RNA, 19 nt, Artificial Sequence
  Description of Artificial Sequence: Synthetic oligonucleotide
gaagacacgucagcgauga

SEQ ID NO: 1503159 - RNA, 19 nt, Artificial Sequence
  Description of Artificial Sequence: Synthetic oligonucleotide
gaugcacacggugucauac

SEQ ID NO: 1503160 - RNA, 19 nt, Artificial Sequence
  Description of Artificial Sequence: Synthetic oligonucleotide
caugcgcuugauaucaauc

SEQ ID NO: 1503161 - RNA, 19 nt, Artificial Sequence
  Description of Artificial Sequence: Synthetic oligonucleotide
caucaguggguuuagaucu

SEQ ID NO: 1503162 - RNA, 19 nt, Artificial Sequence
  Description of Artificial Sequence: Synthetic oligonucleotide
aauguuuuaucagguguuu

SEQ ID NO: 1503163 - RNA, 19 nt, Artificial Sequence
  Description of Artificial Sequence: Synthetic oligonucleotide
uguagacaagccauucgua

SEQ ID NO: 1503164 - RNA, 19 nt, Artificial Sequence
  Description of Artificial Sequence: Synthetic oligonucleotide
guagacaagccauucguaa

SEQ ID NO: 1503165 - RNA, 19 nt, Artificial Sequence
  Description of Artificial Sequence: Synthetic oligonucleotide
uccacuucacaaauuuaua

SEQ ID NO: 1503166 - RNA, 19 nt, Artificial Sequence
  Description of Artificial Sequence: Synthetic oligonucleotide
ucucugguauacaccuugc

SEQ ID NO: 1503167 - RNA, 19 nt, Artificial Sequence
  Description of Artificial Sequence: Synthetic oligonucleotide
uccuugaaugguguugaag

SEQ ID NO: 1503168 - RNA, 19 nt, Artificial Sequence
  Description of Artificial Sequence: Synthetic oligonucleotide
gauucagguuaucagucaa

SEQ ID NO: 1503169 - RNA, 19 nt, Artificial Sequence
  Description of Artificial Sequence: Synthetic oligonucleotide
aggcucaucgcucuucaug

SEQ ID NO: 1503170 - RNA, 19 nt, Artificial Sequence
  Description of Artificial Sequence: Synthetic oligonucleotide
aacacaggcguugcuccgg

SEQ ID NO: 1503171 - RNA, 19 nt, Artificial Sequence
  Description of Artificial Sequence: Synthetic oligonucleotide
caagcuuccagccggucac

SEQ ID NO: 1503172 - RNA, 19 nt, Artificial Sequence
  Description of Artificial Sequence: Synthetic oligonucleotide
ucacauagguuggaggcga

SEQ ID NO: 1503173 - RNA, 19 nt, Artificial Sequence
  Description of Artificial Sequence: Synthetic oligonucleotide
ugaagacacgucagcgaug

SEQ ID NO: 1503174 - RNA, 19 nt, Artificial Sequence
  Description of Artificial Sequence: Synthetic oligonucleotide
ucgucauccacuucacaaa

SEQ ID NO: 1503175 - RNA, 19 nt, Artificial Sequence
  Description of Artificial Sequence: Synthetic oligonucleotide
caugggcucguaacagucg

SEQ ID NO: 1503176 - RNA, 19 nt, Artificial Sequence
  Description of Artificial Sequence: Synthetic oligonucleotide
ggaauaaacacaggcguug

SEQ ID NO: 1503177 - RNA, 19 nt, Artificial Sequence
  Description of Artificial Sequence: Synthetic oligonucleotide
guaaaccucaucacugaug

SEQ ID NO: 1503178 - RNA, 19 nt, Artificial Sequence
  Description of Artificial Sequence: Synthetic oligonucleotide
uagguuggaggcgauauau

SEQ ID NO: 1503179 - RNA, 19 nt, Artificial Sequence
  Description of Artificial Sequence: Synthetic oligonucleotide
guuauuguucucucccaca

SEQ ID NO: 1503180 - RNA, 19 nt, Artificial Sequence
  Description of Artificial Sequence: Synthetic oligonucleotide
caauccaaagagccugggc

SEQ ID NO: 1503181 - RNA, 19 nt, Artificial Sequence
  Description of Artificial Sequence: Synthetic oligonucleotide
gauggguuucaggccaacg

SEQ ID NO: 1503182 - RNA, 19 nt, Artificial Sequence
  Description of Artificial Sequence: Synthetic oligonucleotide
ucauuuggaucgauuugau

SEQ ID NO: 1503183 - RNA, 19 nt, Artificial Sequence
  Description of Artificial Sequence: Synthetic oligonucleotide
aaacaggacagagcuuuca

SEQ ID NO: 1503184 - RNA, 19 nt, Artificial Sequence
  Description of Artificial Sequence: Synthetic oligonucleotide
ucgcucuucaugucggaga

SEQ ID NO: 1503185 - RNA, 19 nt, Artificial Sequence
  Description of Artificial Sequence: Synthetic oligonucleotide
ugggcuauccaugcgcuug

SEQ ID NO: 1503186 - RNA, 19 nt, Artificial Sequence
  Description of Artificial Sequence: Synthetic oligonucleotide
auccaugcgcuugauauca

SEQ ID NO: 1503187 - RNA, 19 nt, Artificial Sequence
  Description of Artificial Sequence: Synthetic oligonucleotide
ugagucacagaaugcugaa

SEQ ID NO: 1503188 - RNA, 19 nt, Artificial Sequence
  Description of Artificial Sequence: Synthetic oligonucleotide
ccuugaaugguguugaaga

SEQ ID NO: 1503189 - RNA, 19 nt, Artificial Sequence
  Description of Artificial Sequence: Synthetic oligonucleotide
uggcagaaguggagaaucc

SEQ ID NO: 1503190 - RNA, 19 nt, Artificial Sequence
  Description of Artificial Sequence: Synthetic oligonucleotide
auaaggcucaucgcucuuc

SEQ ID NO: 1503191 - RNA, 19 nt, Artificial Sequence
  Description of Artificial Sequence: Synthetic oligonucleotide
auccacuucacaaauuuau

SEQ ID NO: 1503192 - RNA, 19 nt, Artificial Sequence
  Description of Artificial Sequence: Synthetic oligonucleotide
ggguugaauguccagucag

SEQ ID NO: 1503193 - RNA, 19 nt, Artificial Sequence
  Description of Artificial Sequence: Synthetic oligonucleotide
aggccaacgcuguuaagca

SEQ ID NO: 1503194 - RNA, 19 nt, Artificial Sequence
  Description of Artificial Sequence: Synthetic oligonucleotide
acuagaccacuucauccca

SEQ ID NO: 1503195 - RNA, 19 nt, Artificial Sequence
  Description of Artificial Sequence: Synthetic oligonucleotide
uggaucgauuugauuuuga

SEQ ID NO: 1503196 - RNA, 19 nt, Artificial Sequence
  Description of Artificial Sequence: Synthetic oligonucleotide
ugcaaaggucagcaaugac

SEQ ID NO: 1503197 - RNA, 19 nt, Artificial Sequence
  Description of Artificial Sequence: Synthetic oligonucleotide
agcagaaccgcaccaacuu

SEQ ID NO: 1503198 - RNA, 19 nt, Artificial Sequence
  Description of Artificial Sequence: Synthetic oligonucleotide
acgucagcgaugaugaagu

SEQ ID NO: 1503199 - RNA, 19 nt, Artificial Sequence
  Description of Artificial Sequence: Synthetic oligonucleotide
auaucaauccaaagagccu

SEQ ID NO: 1503200 - RNA, 19 nt, Artificial Sequence
  Description of Artificial Sequence: Synthetic oligonucleotide
gguguacugauucagguua

SEQ ID NO: 1503201 - RNA, 19 nt, Artificial Sequence
  Description of Artificial Sequence: Synthetic oligonucleotide
cacaagugauggaugacca

SEQ ID NO: 1503202 - RNA, 19 nt, Artificial Sequence
  Description of Artificial Sequence: Synthetic oligonucleotide
caggacagagcuuucacaa

SEQ ID NO: 1503203 - RNA, 19 nt, Artificial Sequence
  Description of Artificial Sequence: Synthetic oligonucleotide
acacaggcguugcuccggc

SEQ ID NO: 1503204 - RNA, 19 nt, Artificial Sequence
  Description of Artificial Sequence: Synthetic oligonucleotide
uuguucucucccacauacc

SEQ ID NO: 1503205 - RNA, 19 nt, Artificial Sequence
  Description of Artificial Sequence: Synthetic oligonucleotide
uucaauucguuuggcauuu

SEQ ID NO: 1503206 - RNA, 19 nt, Artificial Sequence
  Description of Artificial Sequence: Synthetic oligonucleotide
cacgucagcgaugaugaag

SEQ ID NO: 1503207 - RNA, 19 nt, Artificial Sequence
  Description of Artificial Sequence: Synthetic oligonucleotide
cugaaagucuugccagcgc

SEQ ID NO: 1503208 - RNA, 19 nt, Artificial Sequence
  Description of Artificial Sequence: Synthetic oligonucleotide
gguucgaaugcaccccugg

SEQ ID NO: 1503209 - RNA, 19 nt, Artificial Sequence
  Description of Artificial Sequence: Synthetic oligonucleotide
guucgaaugcaccccuggc

SEQ ID NO: 1503210 - RNA, 19 nt, Artificial Sequence
  Description of Artificial Sequence: Synthetic oligonucleotide
ggguuuagaucucagggga

SEQ ID NO: 1503211 - RNA, 19 nt, Artificial Sequence
  Description of Artificial Sequence: Synthetic oligonucleotide
cacacggugucauacuuga

SEQ ID NO: 1503212 - RNA, 19 nt, Artificial Sequence
  Description of Artificial Sequence: Synthetic oligonucleotide
uggaugaccaaagccccug

SEQ ID NO: 1503213 - RNA, 19 nt, Artificial Sequence
  Description of Artificial Sequence: Synthetic oligonucleotide
guugaacggucuguaaaug

SEQ ID NO: 1503214 - RNA, 19 nt, Artificial Sequence
  Description of Artificial Sequence: Synthetic oligonucleotide
ucgauuugauuuugauaaa

SEQ ID NO: 1503215 - RNA, 19 nt, Artificial Sequence
  Description of Artificial Sequence: Synthetic oligonucleotide
augggcucguaacagucgu

SEQ ID NO: 1503216 - RNA, 19 nt, Artificial Sequence
  Description of Artificial Sequence: Synthetic oligonucleotide
gcuugauaucaauccaaag

SEQ ID NO: 1503217 - RNA, 19 nt, Artificial Sequence
  Description of Artificial Sequence: Synthetic oligonucleotide
uaggaccaaugcuccagcc

SEQ ID NO: 1503218 - RNA, 19 nt, Artificial Sequence
  Description of Artificial Sequence: Synthetic oligonucleotide
ugcagccuuugauaauucu

SEQ ID NO: 1503219 - RNA, 19 nt, Artificial Sequence
  Description of Artificial Sequence: Synthetic oligonucleotide
ccauucguaaaccucauca

SEQ ID NO: 1503220 - RNA, 19 nt, Artificial Sequence
  Description of Artificial Sequence: Synthetic oligonucleotide
uuggaucgauuugauuuug

SEQ ID NO: 1503221 - RNA, 19 nt, Artificial Sequence
  Description of Artificial Sequence: Synthetic oligonucleotide
ccaacuuaguaaauucaac

SEQ ID NO: 1503222 - RNA, 19 nt, Artificial Sequence
  Description of Artificial Sequence: Synthetic oligonucleotide
ugaaacagggauggcugac

SEQ ID NO: 1503223 - RNA, 19 nt, Artificial Sequence
  Description of Artificial Sequence: Synthetic oligonucleotide
cacuucacaaauuuauagu

SEQ ID NO: 1503224 - RNA, 19 nt, Artificial Sequence
  Description of Artificial Sequence: Synthetic oligonucleotide
aagcagaaccgcaccaacu

SEQ ID NO: 1503225 - RNA, 19 nt, Artificial Sequence
  Description of Artificial Sequence: Synthetic oligonucleotide
aggguguucaaagaauaaa

SEQ ID NO: 1503226 - RNA, 19 nt, Artificial Sequence
  Description of Artificial Sequence: Synthetic oligonucleotide
uauccgcccacugucacaa

SEQ ID NO: 1503227 - RNA, 19 nt, Artificial Sequence
  Description of Artificial Sequence: Synthetic oligonucleotide
ugcacacggugucauacuu

SEQ ID NO: 1503228 - RNA, 19 nt, Artificial Sequence
  Description of Artificial Sequence: Synthetic oligonucleotide
aggguugaauguccaguca

SEQ ID NO: 1503229 - RNA, 19 nt, Artificial Sequence
  Description of Artificial Sequence: Synthetic oligonucleotide
ggcgauauaucuggaaggc

SEQ ID NO: 1503230 - RNA, 19 nt, Artificial Sequence
  Description of Artificial Sequence: Synthetic oligonucleotide
uuuagaucucaggggaaua

SEQ ID NO: 1503231 - RNA, 19 nt, Artificial Sequence
  Description of Artificial Sequence: Synthetic oligonucleotide
caaaggucagcaaugacuu

SEQ ID NO: 1503232 - RNA, 19 nt, Artificial Sequence
  Description of Artificial Sequence: Synthetic oligonucleotide
uccuucgccagagaauuaa

SEQ ID NO: 1503233 - RNA, 19 nt, Artificial Sequence
  Description of Artificial Sequence: Synthetic oligonucleotide
gaauccaaggguguucaaa

SEQ ID NO: 1503234 - RNA, 19 nt, Artificial Sequence
  Description of Artificial Sequence: Synthetic oligonucleotide
aaggguguucaaagaauaa

SEQ ID NO: 1503235 - RNA, 19 nt, Artificial Sequence
  Description of Artificial Sequence: Synthetic oligonucleotide
guguagacaagccauucgu

SEQ ID NO: 1503236 - RNA, 19 nt, Artificial Sequence
  Description of Artificial Sequence: Synthetic oligonucleotide
gcugaaacagggauggcug

SEQ ID NO: 1503237 - RNA, 19 nt, Artificial Sequence
  Description of Artificial Sequence: Synthetic oligonucleotide
uguuaagcaaacggaccau

SEQ ID NO: 1503238 - RNA, 19 nt, Artificial Sequence
  Description of Artificial Sequence: Synthetic oligonucleotide
agaccacuucaucccauca

SEQ ID NO: 1503239 - RNA, 19 nt, Artificial Sequence
  Description of Artificial Sequence: Synthetic oligonucleotide
uucacaagugauggaugac

SEQ ID NO: 1503240 - RNA, 19 nt, Artificial Sequence
  Description of Artificial Sequence: Synthetic oligonucleotide
ggggaauaaacacaggcgu

SEQ ID NO: 1503241 - RNA, 19 nt, Artificial Sequence
  Description of Artificial Sequence: Synthetic oligonucleotide
aacggaccauccugucucu

SEQ ID NO: 1503242 - RNA, 19 nt, Artificial Sequence
  Description of Artificial Sequence: Synthetic oligonucleotide
cauauccgcccacugucac

SEQ ID NO: 1503243 - RNA, 19 nt, Artificial Sequence
  Description of Artificial Sequence: Synthetic oligonucleotide
uagaccacuucaucccauc

SEQ ID NO: 1503244 - RNA, 19 nt, Artificial Sequence
  Description of Artificial Sequence: Synthetic oligonucleotide
gaaacagggauggcugaca

SEQ ID NO: 1503245 - RNA, 19 nt, Artificial Sequence
  Description of Artificial Sequence: Synthetic oligonucleotide
guuaagcaaacggaccauc

SEQ ID NO: 1503246 - RNA, 19 nt, Artificial Sequence
  Description of Artificial Sequence: Synthetic oligonucleotide
gucauaaggcucaucgcuc

SEQ ID NO: 1503247 - RNA, 19 nt, Artificial Sequence
  Description of Artificial Sequence: Synthetic oligonucleotide
aacggucuguaaauguuuu

SEQ ID NO: 1503248 - RNA, 19 nt, Artificial Sequence
  Description of Artificial Sequence: Synthetic oligonucleotide
gguuaucagucaaugcagc

SEQ ID NO: 1503249 - RNA, 19 nt, Artificial Sequence
  Description of Artificial Sequence: Synthetic oligonucleotide
cuugaggguugaaugucca

SEQ ID NO: 1503250 - RNA, 19 nt, Artificial Sequence
  Description of Artificial Sequence: Synthetic oligonucleotide
cagcgaugaugaaguaacc

SEQ ID NO: 1503251 - RNA, 19 nt, Artificial Sequence
  Description of Artificial Sequence: Synthetic oligonucleotide
acaagugauggaugaccaa

SEQ ID NO: 1503252 - RNA, 19 nt, Artificial Sequence
  Description of Artificial Sequence: Synthetic oligonucleotide
acgcuguuaagcaaacgga

SEQ ID NO: 1503253 - RNA, 19 nt, Artificial Sequence
  Description of Artificial Sequence: Synthetic oligonucleotide
agcaaacggaccauccugu

SEQ ID NO: 1503254 - RNA, 19 nt, Artificial Sequence
  Description of Artificial Sequence: Synthetic oligonucleotide
guugaauguccagucagaa

SEQ ID NO: 1503255 - RNA, 19 nt, Artificial Sequence
  Description of Artificial Sequence: Synthetic oligonucleotide
gguguuuaggaccaaugcu

SEQ ID NO: 1503256 - RNA, 19 nt, Artificial Sequence
  Description of Artificial Sequence: Synthetic oligonucleotide
uugaugcaaaggucagcaa

SEQ ID NO: 1503257 - RNA, 19 nt, Artificial Sequence
  Description of Artificial Sequence: Synthetic oligonucleotide
aaagccccugguguacuga

SEQ ID NO: 1503258 - RNA, 19 nt, Artificial Sequence
  Description of Artificial Sequence: Synthetic oligonucleotide
auauccgcccacugucaca

SEQ ID NO: 1503259 - RNA, 19 nt, Artificial Sequence
  Description of Artificial Sequence: Synthetic oligonucleotide
cuucgccagagaauuaaaa

SEQ ID NO: 1503260 - RNA, 19 nt, Artificial Sequence
  Description of Artificial Sequence: Synthetic oligonucleotide
ccugguguacugauucagg

SEQ ID NO: 1503261 - RNA, 19 nt, Artificial Sequence
  Description of Artificial Sequence: Synthetic oligonucleotide
uccgcccacugucacaaua

SEQ ID NO: 1503262 - RNA, 19 nt, Artificial Sequence
  Description of Artificial Sequence: Synthetic oligonucleotide
agcuuucacaagugaugga

SEQ ID NO: 1503263 - RNA, 19 nt, Artificial Sequence
  Description of Artificial Sequence: Synthetic oligonucleotide
agaaccgcaccaacuucuc

SEQ ID NO: 1503264 - RNA, 19 nt, Artificial Sequence
  Description of Artificial Sequence: Synthetic oligonucleotide
ucucccgggucaaccaguc

SEQ ID NO: 1503265 - RNA, 19 nt, Artificial Sequence
  Description of Artificial Sequence: Synthetic oligonucleotide
aggaguugcacaaguguaa

SEQ ID NO: 1503266 - RNA, 19 nt, Artificial Sequence
  Description of Artificial Sequence: Synthetic oligonucleotide
guugcgagguggcgcgggg

SEQ ID NO: 1503267 - RNA, 19 nt, Artificial Sequence
  Description of Artificial Sequence: Synthetic oligonucleotide
caguggguuuagaucucag

SEQ ID NO: 1503268 - RNA, 19 nt, Artificial Sequence
  Description of Artificial Sequence: Synthetic oligonucleotide
cucaguuuggagguugcga

SEQ ID NO: 1503269 - RNA, 19 nt, Artificial Sequence
  Description of Artificial Sequence: Synthetic oligonucleotide
gcucguaacagucguaaaa

SEQ ID NO: 1503270 - RNA, 19 nt, Artificial Sequence
  Description of Artificial Sequence: Synthetic oligonucleotide
ugcagccaacuuaguaaau

SEQ ID NO: 1503271 - RNA, 19 nt, Artificial Sequence
  Description of Artificial Sequence: Synthetic oligonucleotide
aucaguggguuuagaucuc

SEQ ID NO: 1503272 - RNA, 19 nt, Artificial Sequence
  Description of Artificial Sequence: Synthetic oligonucleotide
augcucgcucuccggguuc

SEQ ID NO: 1503273 - RNA, 19 nt, Artificial Sequence
  Description of Artificial Sequence: Synthetic oligonucleotide
gcaaaggucagcaaugacu

SEQ ID NO: 1503274 - RNA, 19 nt, Artificial Sequence
  Description of Artificial Sequence: Synthetic oligonucleotide
caguguagacaagccauuc

SEQ ID NO: 1503275 - RNA, 19 nt, Artificial Sequence
  Description of Artificial Sequence: Synthetic oligonucleotide
caacgcuguuaagcaaacg

SEQ ID NO: 1503276 - RNA, 19 nt, Artificial Sequence
  Description of Artificial Sequence: Synthetic oligonucleotide
cuucgggcugcuccaugcc

SEQ ID NO: 1503277 - RNA, 19 nt, Artificial Sequence
  Description of Artificial Sequence: Synthetic oligonucleotide
ugcucgcucuccggguucg

SEQ ID NO: 1503278 - RNA, 19 nt, Artificial Sequence
  Description of Artificial Sequence: Synthetic oligonucleotide
ucuugccagcgcuuccuau

SEQ ID NO: 1503279 - RNA, 19 nt, Artificial Sequence
  Description of Artificial Sequence: Synthetic oligonucleotide
ucacaacagaagggucugc

SEQ ID NO: 1503280 - RNA, 19 nt, Artificial Sequence
  Description of Artificial Sequence: Synthetic oligonucleotide
ggugucauacuugaugcaa

SEQ ID NO: 1503281 - RNA, 19 nt, Artificial Sequence
  Description of Artificial Sequence: Synthetic oligonucleotide
uuauagucauaaggcucau

SEQ ID NO: 1503282 - RNA, 19 nt, Artificial Sequence
  Description of Artificial Sequence: Synthetic oligonucleotide
gaaccgcaccaacuucuca

SEQ ID NO: 1503283 - RNA, 19 nt, Artificial Sequence
  Description of Artificial Sequence: Synthetic oligonucleotide
cgcuguuaagcaaacggac

SEQ ID NO: 1503284 - RNA, 19 nt, Artificial Sequence
  Description of Artificial Sequence: Synthetic oligonucleotide
agccggucacacugaaagu

SEQ ID NO: 1503285 - RNA, 19 nt, Artificial Sequence
  Description of Artificial Sequence: Synthetic oligonucleotide
gcaucuaaugaagacacgu

SEQ ID NO: 1503286 - RNA, 19 nt, Artificial Sequence
  Description of Artificial Sequence: Synthetic oligonucleotide
aaugcaccccuggccucag

SEQ ID NO: 1503287 - RNA, 19 nt, Artificial Sequence
  Description of Artificial Sequence: Synthetic oligonucleotide
aaggcucaucgcucuucau

SEQ ID NO: 1503288 - RNA, 19 nt, Artificial Sequence
  Description of Artificial Sequence: Synthetic oligonucleotide
gucagcgaugaugaaguaa

SEQ ID NO: 1503289 - RNA, 19 nt, Artificial Sequence
  Description of Artificial Sequence: Synthetic oligonucleotide
cagaaccgcaccaacuucu

SEQ ID NO: 1503290 - RNA, 19 nt, Artificial Sequence
  Description of Artificial Sequence: Synthetic oligonucleotide
ucaugucggagaggucagc

SEQ ID NO: 1503291 - RNA, 19 nt, Artificial Sequence
  Description of Artificial Sequence: Synthetic oligonucleotide
gaauguccagucagaacua

SEQ ID NO: 1503292 - RNA, 19 nt, Artificial Sequence
  Description of Artificial Sequence: Synthetic oligonucleotide
acggucuguaaauguuuua

SEQ ID NO: 1503293 - RNA, 19 nt, Artificial Sequence
  Description of Artificial Sequence: Synthetic oligonucleotide
ucgcucuccggguucgaau

SEQ ID NO: 1503294 - RNA, 19 nt, Artificial Sequence
  Description of Artificial Sequence: Synthetic oligonucleotide
uccaugcgcuugauaucaa

SEQ ID NO: 1503295 - RNA, 19 nt, Artificial Sequence
  Description of Artificial Sequence: Synthetic oligonucleotide
ugaugcacacggugucaua

SEQ ID NO: 1503296 - RNA, 19 nt, Artificial Sequence
  Description of Artificial Sequence: Synthetic oligonucleotide
cagagcuuucacaagugau

SEQ ID NO: 1503297 - RNA, 19 nt, Artificial Sequence
  Description of Artificial Sequence: Synthetic oligonucleotide
agaauccaaggguguucaa

SEQ ID NO: 1503298 - RNA, 19 nt, Artificial Sequence
  Description of Artificial Sequence: Synthetic oligonucleotide
ggguuucaggccaacgcug

SEQ ID NO: 1503299 - RNA, 19 nt, Artificial Sequence
  Description of Artificial Sequence: Synthetic oligonucleotide
ggagaauccaaggguguuc

SEQ ID NO: 1503300 - RNA, 19 nt, Artificial Sequence
  Description of Artificial Sequence: Synthetic oligonucleotide
guuuagaucucaggggaau

SEQ ID NO: 1503301 - RNA, 19 nt, Artificial Sequence
  Description of Artificial Sequence: Synthetic oligonucleotide
gguugaauguccagucaga

SEQ ID NO: 1503302 - RNA, 19 nt, Artificial Sequence
  Description of Artificial Sequence: Synthetic oligonucleotide
gccggucacacugaaaguc

SEQ ID NO: 1503303 - RNA, 19 nt, Artificial Sequence
  Description of Artificial Sequence: Synthetic oligonucleotide
gcgauauaucuggaaggcc

SEQ ID NO: 1503304 - RNA, 19 nt, Artificial Sequence
  Description of Artificial Sequence: Synthetic oligonucleotide
cauagguuggaggcgauau

SEQ ID NO: 1503305 - RNA, 19 nt, Artificial Sequence
  Description of Artificial Sequence: Synthetic oligonucleotide
uuccuucgccagagaauua

SEQ ID NO: 1503306 - RNA, 19 nt, Artificial Sequence
  Description of Artificial Sequence: Synthetic oligonucleotide
ugggcucguaacagucgua

SEQ ID NO: 1503307 - RNA, 19 nt, Artificial Sequence
  Description of Artificial Sequence: Synthetic oligonucleotide
cuugccuaugggguuaugu

SEQ ID NO: 1503308 - RNA, 19 nt, Artificial Sequence
  Description of Artificial Sequence: Synthetic oligonucleotide
ccaacgcuguuaagcaaac

SEQ ID NO: 1503309 - RNA, 19 nt, Artificial Sequence
  Description of Artificial Sequence: Synthetic oligonucleotide
ggaggcgauauaucuggaa

SEQ ID NO: 1503310 - RNA, 19 nt, Artificial Sequence
  Description of Artificial Sequence: Synthetic oligonucleotide
agcuucgcucugcugccaa

SEQ ID NO: 1503311 - RNA, 19 nt, Artificial Sequence
  Description of Artificial Sequence: Synthetic oligonucleotide
caaacggaccauccugucu

SEQ ID NO: 1503312 - RNA, 19 nt, Artificial Sequence
  Description of Artificial Sequence: Synthetic oligonucleotide
gaacggucuguaaauguuu

SEQ ID NO: 1503313 - RNA, 19 nt, Artificial Sequence
  Description of Artificial Sequence: Synthetic oligonucleotide
ggaucgauuugauuuugau

SEQ ID NO: 1503314 - RNA, 19 nt, Artificial Sequence
  Description of Artificial Sequence: Synthetic oligonucleotide
gcagaaccgcaccaacuuc

SEQ ID NO: 1503315 - RNA, 19 nt, Artificial Sequence
  Description of Artificial Sequence: Synthetic oligonucleotide
gcagaaguggagaauccaa

SEQ ID NO: 1503316 - RNA, 19 nt, Artificial Sequence
  Description of Artificial Sequence: Synthetic oligonucleotide
ggaguugcacaaguguaaa

SEQ ID NO: 1503317 - RNA, 19 nt, Artificial Sequence
  Description of Artificial Sequence: Synthetic oligonucleotide
agacucugagucacagaau

SEQ ID NO: 1503318 - RNA, 19 nt, Artificial Sequence
  Description of Artificial Sequence: Synthetic oligonucleotide
cacaggcguugcuccggcc

SEQ ID NO: 1503319 - RNA, 19 nt, Artificial Sequence
  Description of Artificial Sequence: Synthetic oligonucleotide
cucccgggucaaccagucc

SEQ ID NO: 1503320 - RNA, 19 nt, Artificial Sequence
  Description of Artificial Sequence: Synthetic oligonucleotide
gguauacaccuugccuaug

SEQ ID NO: 1503321 - RNA, 19 nt, Artificial Sequence
  Description of Artificial Sequence: Synthetic oligonucleotide
gagcuccauauccgcccac

SEQ ID NO: 1503322 - RNA, 19 nt, Artificial Sequence
  Description of Artificial Sequence: Synthetic oligonucleotide
gucggagaggucagcaucu

SEQ ID NO: 1503323 - RNA, 19 nt, Artificial Sequence
  Description of Artificial Sequence: Synthetic oligonucleotide
gccaacgcuguuaagcaaa

SEQ ID NO: 1503324 - RNA, 19 nt, Artificial Sequence
  Description of Artificial Sequence: Synthetic oligonucleotide
gcaaacggaccauccuguc

SEQ ID NO: 1503325 - RNA, 19 nt, Artificial Sequence
  Description of Artificial Sequence: Synthetic oligonucleotide
cuugccagcgcuuccuauu

SEQ ID NO: 1503326 - RNA, 19 nt, Artificial Sequence
  Description of Artificial Sequence: Synthetic oligonucleotide
ggagaggucagcaucuaau

SEQ ID NO: 1503327 - RNA, 19 nt, Artificial Sequence
  Description of Artificial Sequence: Synthetic oligonucleotide
agcauccagugugcugucu

SEQ ID NO: 1503328 - RNA, 19 nt, Artificial Sequence
  Description of Artificial Sequence: Synthetic oligonucleotide
cauuuggaucgauuugauu

SEQ ID NO: 1503329 - RNA, 19 nt, Artificial Sequence
  Description of Artificial Sequence: Synthetic oligonucleotide
agcuccucucugguauaca

SEQ ID NO: 1503330 - RNA, 19 nt, Artificial Sequence
  Description of Artificial Sequence: Synthetic oligonucleotide
gcacacggugucauacuug

SEQ ID NO: 1503331 - RNA, 19 nt, Artificial Sequence
  Description of Artificial Sequence: Synthetic oligonucleotide
cucucccacauaccaggaa

SEQ ID NO: 1503332 - RNA, 19 nt, Artificial Sequence
  Description of Artificial Sequence: Synthetic oligonucleotide
gguuuagaucucaggggaa

SEQ ID NO: 1503333 - RNA, 19 nt, Artificial Sequence
  Description of Artificial Sequence: Synthetic oligonucleotide
agccauucguaaaccucau

SEQ ID NO: 1503334 - RNA, 19 nt, Artificial Sequence
  Description of Artificial Sequence: Synthetic oligonucleotide
gggcucguaacagucguaa

SEQ ID NO: 1503335 - RNA, 19 nt, Artificial Sequence
  Description of Artificial Sequence: Synthetic oligonucleotide
ucggagaggucagcaucua

SEQ ID NO: 1503336 - RNA, 19 nt, Artificial Sequence
  Description of Artificial Sequence: Synthetic oligonucleotide
acacgucagcgaugaugaa

SEQ ID NO: 1503337 - RNA, 19 nt, Artificial Sequence
  Description of Artificial Sequence: Synthetic oligonucleotide
cgcucuccggguucgaaug

SEQ ID NO: 1503338 - RNA, 19 nt, Artificial Sequence
  Description of Artificial Sequence: Synthetic oligonucleotide
cuagaccacuucaucccau

SEQ ID NO: 1503339 - RNA, 19 nt, Artificial Sequence
  Description of Artificial Sequence: Synthetic oligonucleotide
ccucaguuuggagguugcg

SEQ ID NO: 1503340 - RNA, 19 nt, Artificial Sequence
  Description of Artificial Sequence: Synthetic oligonucleotide
gcgcuugauaucaauccaa

SEQ ID NO: 1503341 - RNA, 19 nt, Artificial Sequence
  Description of Artificial Sequence: Synthetic oligonucleotide
agguugcgagguggcgcgg

SEQ ID NO: 1503342 - RNA, 19 nt, Artificial Sequence
  Description of Artificial Sequence: Synthetic oligonucleotide
gccauucguaaaccucauc

SEQ ID NO: 1503343 - RNA, 19 nt, Artificial Sequence
  Description of Artificial Sequence: Synthetic oligonucleotide
agucuccucuggaccaaaa

SEQ ID NO: 1503344 - RNA, 19 nt, Artificial Sequence
  Description of Artificial Sequence: Synthetic oligonucleotide
ccauauccgcccacuguca

SEQ ID NO: 1503345 - RNA, 19 nt, Artificial Sequence
  Description of Artificial Sequence: Synthetic oligonucleotide
guggaguauuuaauauaau

SEQ ID NO: 1503346 - RNA, 19 nt, Artificial Sequence
  Description of Artificial Sequence: Synthetic oligonucleotide
gguuucaggccaacgcugu

SEQ ID NO: 1503347 - RNA, 19 nt, Artificial Sequence
  Description of Artificial Sequence: Synthetic oligonucleotide
ggcucguaacagucguaaa

SEQ ID NO: 1503348 - RNA, 19 nt, Artificial Sequence
  Description of Artificial Sequence: Synthetic oligonucleotide
gccucaguuuggagguugc

SEQ ID NO: 1503349 - RNA, 19 nt, Artificial Sequence
  Description of Artificial Sequence: Synthetic oligonucleotide
ggucaaccaguccuugaau

SEQ ID NO: 1503350 - RNA, 19 nt, Artificial Sequence
  Description of Artificial Sequence: Synthetic oligonucleotide
ggccaacgcuguuaagcaa

SEQ ID NO: 1503351 - RNA, 19 nt, Artificial Sequence
  Description of Artificial Sequence: Synthetic oligonucleotide
cgcuugauaucaauccaaa

SEQ ID NO: 1503352 - RNA, 19 nt, Artificial Sequence
  Description of Artificial Sequence: Synthetic oligonucleotide
gcuauccaugcgcuugaua

SEQ ID NO: 1503353 - RNA, 19 nt, Artificial Sequence
  Description of Artificial Sequence: Synthetic oligonucleotide
agccaagcuuccagccggu

SEQ ID NO: 1503354 - RNA, 19 nt, Artificial Sequence
  Description of Artificial Sequence: Synthetic oligonucleotide
gggaauaaacacaggcguu

SEQ ID NO: 1503355 - RNA, 19 nt, Artificial Sequence
  Description of Artificial Sequence: Synthetic oligonucleotide
gcagccuuugauaauucuu

SEQ ID NO: 1503356 - RNA, 19 nt, Artificial Sequence
  Description of Artificial Sequence: Synthetic oligonucleotide
guguacugauucagguuau

SEQ ID NO: 1503357 - RNA, 19 nt, Artificial Sequence
  Description of Artificial Sequence: Synthetic oligonucleotide
accuugccuaugggguuau

SEQ ID NO: 1503358 - RNA, 19 nt, Artificial Sequence
  Description of Artificial Sequence: Synthetic oligonucleotide
ggguuauguggaguauuua

SEQ ID NO: 1503359 - RNA, 19 nt, Artificial Sequence
  Description of Artificial Sequence: Synthetic oligonucleotide
acacggugucauacuugau

SEQ ID NO: 1503360 - RNA, 19 nt, Artificial Sequence
  Description of Artificial Sequence: Synthetic oligonucleotide
ggguucgaaugcaccccug

SEQ ID NO: 1503361 - RNA, 19 nt, Artificial Sequence
  Description of Artificial Sequence: Synthetic oligonucleotide
ccgcccacugucacaauaa

SEQ ID NO: 1503362 - RNA, 19 nt, Artificial Sequence
  Description of Artificial Sequence: Synthetic oligonucleotide
ggcguugcuccggccauuc

SEQ ID NO: 1503363 - RNA, 19 nt, Artificial Sequence
  Description of Artificial Sequence: Synthetic oligonucleotide
gggguuauguggaguauuu

SEQ ID NO: 1503364 - RNA, 19 nt, Artificial Sequence
  Description of Artificial Sequence: Synthetic oligonucleotide
augcaccccuggccucagu

SEQ ID NO: 1503365 - RNA, 19 nt, Artificial Sequence
  Description of Artificial Sequence: Synthetic oligonucleotide
caugcucgcucuccggguu

SEQ ID NO: 1503366 - RNA, 19 nt, Artificial Sequence
  Description of Artificial Sequence: Synthetic oligonucleotide
cauaaggcucaucgcucuu

SEQ ID NO: 1503367 - RNA, 19 nt, Artificial Sequence
  Description of Artificial Sequence: Synthetic oligonucleotide
acggaccauccugucucuu

SEQ ID NO: 1503368 - RNA, 19 nt, Artificial Sequence
  Description of Artificial Sequence: Synthetic oligonucleotide
cacauagguuggaggcgau

SEQ ID NO: 1503369 - RNA, 19 nt, Artificial Sequence
  Description of Artificial Sequence: Synthetic oligonucleotide
cucgcucuccggguucgaa

SEQ ID NO: 1503370 - RNA, 19 nt, Artificial Sequence
  Description of Artificial Sequence: Synthetic oligonucleotide
gggauggcugacaguuucu

SEQ ID NO: 1503371 - RNA, 19 nt, Artificial Sequence
  Description of Artificial Sequence: Synthetic oligonucleotide
ccaguguagacaagccauu

SEQ ID NO: 1503372 - RNA, 19 nt, Artificial Sequence
  Description of Artificial Sequence: Synthetic oligonucleotide
aggcguugcuccggccauu

SEQ ID NO: 1503373 - RNA, 19 nt, Artificial Sequence
  Description of Artificial Sequence: Synthetic oligonucleotide
ccaugcgcuugauaucaau

SEQ ID NO: 1503374 - RNA, 19 nt, Artificial Sequence
  Description of Artificial Sequence: Synthetic oligonucleotide
cguaaaccucaucacugau

SEQ ID NO: 1503375 - RNA, 19 nt, Artificial Sequence
  Description of Artificial Sequence: Synthetic oligonucleotide
gccaagcuuccagccgguc

SEQ ID NO: 1503376 - RNA, 19 nt, Artificial Sequence
  Description of Artificial Sequence: Synthetic oligonucleotide
ccuugccuaugggguuaug

SEQ ID NO: 1503377 - RNA, 19 nt, Artificial Sequence
  Description of Artificial Sequence: Synthetic oligonucleotide
ccaaagccccugguguacu

SEQ ID NO: 1503378 - RNA, 19 nt, Artificial Sequence
  Description of Artificial Sequence: Synthetic oligonucleotide
cgcuuccuauuguuauugu

SEQ ID NO: 1503379 - RNA, 19 nt, Artificial Sequence
  Description of Artificial Sequence: Synthetic oligonucleotide
cggguucgaaugcaccccu

SEQ ID NO: 1503380 - RNA, 19 nt, Artificial Sequence
  Description of Artificial Sequence: Synthetic oligonucleotide
gcguugcuccggccauucu

SEQ ID NO: 1503381 - RNA, 19 nt, Artificial Sequence
  Description of Artificial Sequence: Synthetic oligonucleotide
cggaccauccugucucuuu

SEQ ID NO: 1503382 - RNA, 19 nt, Artificial Sequence
  Description of Artificial Sequence: Synthetic oligonucleotide
cgcccacugucacaauaau

SEQ ID NO: 1503383 - RNA, 19 nt, Artificial Sequence
  Description of Artificial Sequence: Synthetic oligonucleotide
aaaguuuccaaucaacacc

SEQ ID NO: 1503384 - RNA, 19 nt, Artificial Sequence
  Description of Artificial Sequence: Synthetic oligonucleotide
aagaauauggcacacuggc

SEQ ID NO: 1503385 - RNA, 19 nt, Artificial Sequence
  Description of Artificial Sequence: Synthetic oligonucleotide
acaaauaccuuauacauag

SEQ ID NO: 1503386 - RNA, 19 nt, Artificial Sequence
  Description of Artificial Sequence: Synthetic oligonucleotide
ucaagauguaaacauaggg

SEQ ID NO: 1503387 - RNA, 19 nt, Artificial Sequence
  Description of Artificial Sequence: Synthetic oligonucleotide
uucaagaguuaucagaugg

SEQ ID NO: 1503388 - RNA, 19 nt, Artificial Sequence
  Description of Artificial Sequence: Synthetic oligonucleotide
aaaacagacggguaccacc

SEQ ID NO: 1503389 - RNA, 19 nt, Artificial Sequence
  Description of Artificial Sequence: Synthetic oligonucleotide
gaagcuagcaaauuaagug

SEQ ID NO: 1503390 - RNA, 19 nt, Artificial Sequence
  Description of Artificial Sequence: Synthetic oligonucleotide
auuacuaugcuuaaguuac

SEQ ID NO: 1503391 - RNA, 19 nt, Artificial Sequence
  Description of Artificial Sequence: Synthetic oligonucleotide
uguagcuuaagauugagaa

SEQ ID NO: 1503392 - RNA, 19 nt, Artificial Sequence
  Description of Artificial Sequence: Synthetic oligonucleotide
uuuuagaaguaacacagga

SEQ ID NO: 1503393 - RNA, 19 nt, Artificial Sequence
  Description of Artificial Sequence: Synthetic oligonucleotide
uuaagauugagaagaaaca

SEQ ID NO: 1503394 - RNA, 19 nt, Artificial Sequence
  Description of Artificial Sequence: Synthetic oligonucleotide
uguggguauaaacaguagg

SEQ ID NO: 1503395 - RNA, 19 nt, Artificial Sequence
  Description of Artificial Sequence: Synthetic oligonucleotide
aucuuagauucucacaacc

SEQ ID NO: 1503396 - RNA, 19 nt, Artificial Sequence
  Description of Artificial Sequence: Synthetic oligonucleotide
uuauacauagucgauguag

SEQ ID NO: 1503397 - RNA, 19 nt, Artificial Sequence
  Description of Artificial Sequence: Synthetic oligonucleotide
uuuccaaucaacaccaagu

SEQ ID NO: 1503398 - RNA, 19 nt, Artificial Sequence
  Description of Artificial Sequence: Synthetic oligonucleotide
cuaaaugcaaugcuguggg

SEQ ID NO: 1503399 - RNA, 19 nt, Artificial Sequence
  Description of Artificial Sequence: Synthetic oligonucleotide
ucgauguagcuuaagauug

SEQ ID NO: 1503400 - RNA, 19 nt, Artificial Sequence
  Description of Artificial Sequence: Synthetic oligonucleotide
auuuucuccccucacauag

SEQ ID NO: 1503401 - RNA, 19 nt, Artificial Sequence
  Description of Artificial Sequence: Synthetic oligonucleotide
uuuugcagcucacaucucg

SEQ ID NO: 1503402 - RNA, 19 nt, Artificial Sequence
  Description of Artificial Sequence: Synthetic oligonucleotide
uuccuuauaacgcuggcug

SEQ ID NO: 1503403 - RNA, 19 nt, Artificial Sequence
  Description of Artificial Sequence: Synthetic oligonucleotide
aagaaaacagacggguacc

SEQ ID NO: 1503404 - RNA, 19 nt, Artificial Sequence
  Description of Artificial Sequence: Synthetic oligonucleotide
aagcuagcaaauuaaguga

SEQ ID NO: 1503405 - RNA, 19 nt, Artificial Sequence
  Description of Artificial Sequence: Synthetic oligonucleotide
agauuaauaguuuaugcaa

SEQ ID NO: 1503406 - RNA, 19 nt, Artificial Sequence
  Description of Artificial Sequence: Synthetic oligonucleotide
ugggucaagacugacaagg

SEQ ID NO: 1503407 - RNA, 19 nt, Artificial Sequence
  Description of Artificial Sequence: Synthetic oligonucleotide
uagcuuaagauugagaaga

SEQ ID NO: 1503408 - RNA, 19 nt, Artificial Sequence
  Description of Artificial Sequence: Synthetic oligonucleotide
aaaauuaacggcaucugca

SEQ ID NO: 1503409 - RNA, 19 nt, Artificial Sequence
  Description of Artificial Sequence: Synthetic oligonucleotide
agaaagaaagguuccaucu

SEQ ID NO: 1503410 - RNA, 19 nt, Artificial Sequence
  Description of Artificial Sequence: Synthetic oligonucleotide
uguuggaugggaaauacaa

SEQ ID NO: 1503411 - RNA, 19 nt, Artificial Sequence
  Description of Artificial Sequence: Synthetic oligonucleotide
aaagguuccaucuuagauu

SEQ ID NO: 1503412 - RNA, 19 nt, Artificial Sequence
  Description of Artificial Sequence: Synthetic oligonucleotide
ucuucaagaguuaucagau

SEQ ID NO: 1503413 - RNA, 19 nt, Artificial Sequence
  Description of Artificial Sequence: Synthetic oligonucleotide
acaagaauauggcacacug

SEQ ID NO: 1503414 - RNA, 19 nt, Artificial Sequence
  Description of Artificial Sequence: Synthetic oligonucleotide
aaugcucuaccaguggcgc

SEQ ID NO: 1503415 - RNA, 19 nt, Artificial Sequence
  Description of Artificial Sequence: Synthetic oligonucleotide
uuuagaaguaacacaggac

SEQ ID NO: 1503416 - RNA, 19 nt, Artificial Sequence
  Description of Artificial Sequence: Synthetic oligonucleotide
auaccuuauacauagucga

SEQ ID NO: 1503417 - RNA, 19 nt, Artificial Sequence
  Description of Artificial Sequence: Synthetic oligonucleotide
aacacugagccuccagcgc

SEQ ID NO: 1503418 - RNA, 19 nt, Artificial Sequence
  Description of Artificial Sequence: Synthetic oligonucleotide
gauuaauaguuuaugcaag

SEQ ID NO: 1503419 - RNA, 19 nt, Artificial Sequence
  Description of Artificial Sequence: Synthetic oligonucleotide
agaguuaucagaugguaca

SEQ ID NO: 1503420 - RNA, 19 nt, Artificial Sequence
  Description of Artificial Sequence: Synthetic oligonucleotide
auaguuuaugcaaggauac

SEQ ID NO: 1503421 - RNA, 19 nt, Artificial Sequence
  Description of Artificial Sequence: Synthetic oligonucleotide
acggguaccaccgauaugg

SEQ ID NO: 1503422 - RNA, 19 nt, Artificial Sequence
  Description of Artificial Sequence: Synthetic oligonucleotide
aguguauguaaguagauuu

SEQ ID NO: 1503423 - RNA, 19 nt, Artificial Sequence
  Description of Artificial Sequence: Synthetic oligonucleotide
ucaagacugacaaggaaga

SEQ ID NO: 1503424 - RNA, 19 nt, Artificial Sequence
  Description of Artificial Sequence: Synthetic oligonucleotide
cacaucucgaaccaugugg

SEQ ID NO: 1503425 - RNA, 19 nt, Artificial Sequence
  Description of Artificial Sequence: Synthetic oligonucleotide
ugacauucugcucaucugc

SEQ ID NO: 1503426 - RNA, 19 nt, Artificial Sequence
  Description of Artificial Sequence: Synthetic oligonucleotide
uuagauucucacaaccucu

SEQ ID NO: 1503427 - RNA, 19 nt, Artificial Sequence
  Description of Artificial Sequence: Synthetic oligonucleotide
agcaaauuaagugaaauaa

SEQ ID NO: 1503428 - RNA, 19 nt, Artificial Sequence
  Description of Artificial Sequence: Synthetic oligonucleotide
aguaacuagggauggugac

SEQ ID NO: 1503429 - RNA, 19 nt, Artificial Sequence
  Description of Artificial Sequence: Synthetic oligonucleotide
uaagauugagaagaaacac

SEQ ID NO: 1503430 - RNA, 19 nt, Artificial Sequence
  Description of Artificial Sequence: Synthetic oligonucleotide
aaauuaacggcaucugcau

SEQ ID NO: 1503431 - RNA, 19 nt, Artificial Sequence
  Description of Artificial Sequence: Synthetic oligonucleotide
aagaguuaucagaugguac

SEQ ID NO: 1503432 - RNA, 19 nt, Artificial Sequence
  Description of Artificial Sequence: Synthetic oligonucleotide
agugagcaugacccgaucc

SEQ ID NO: 1503433 - RNA, 19 nt, Artificial Sequence
  Description of Artificial Sequence: Synthetic oligonucleotide
uaacacugagccuccagcg

SEQ ID NO: 1503434 - RNA, 19 nt, Artificial Sequence
  Description of Artificial Sequence: Synthetic oligonucleotide
aaagaaagguuccaucuua

SEQ ID NO: 1503435 - RNA, 19 nt, Artificial Sequence
  Description of Artificial Sequence: Synthetic oligonucleotide
ugaagcuagcaaauuaagu

SEQ ID NO: 1503436 - RNA, 19 nt, Artificial Sequence
  Description of Artificial Sequence: Synthetic oligonucleotide
aauauggcacacuggccag

SEQ ID NO: 1503437 - RNA, 19 nt, Artificial Sequence
  Description of Artificial Sequence: Synthetic oligonucleotide
ugcaaguuaacuaccuugu

SEQ ID NO: 1503438 - RNA, 19 nt, Artificial Sequence
  Description of Artificial Sequence: Synthetic oligonucleotide
accgauauggucaaggaag

SEQ ID NO: 1503439 - RNA, 19 nt, Artificial Sequence
  Description of Artificial Sequence: Synthetic oligonucleotide
ucuuagauucucacaaccu

SEQ ID NO: 1503440 - RNA, 19 nt, Artificial Sequence
  Description of Artificial Sequence: Synthetic oligonucleotide
caagauguaaacauaggga

SEQ ID NO: 1503441 - RNA, 19 nt, Artificial Sequence
  Description of Artificial Sequence: Synthetic oligonucleotide
aaacagacggguaccaccg

SEQ ID NO: 1503442 - RNA, 19 nt, Artificial Sequence
  Description of Artificial Sequence: Synthetic oligonucleotide
ugacaguguauguaaguag

SEQ ID NO: 1503443 - RNA, 19 nt, Artificial Sequence
  Description of Artificial Sequence: Synthetic oligonucleotide
acuuaucaaaccucugcuc

SEQ ID NO: 1503444 - RNA, 19 nt, Artificial Sequence
  Description of Artificial Sequence: Synthetic oligonucleotide
auauucucucuacaaacug

SEQ ID NO: 1503445 - RNA, 19 nt, Artificial Sequence
  Description of Artificial Sequence: Synthetic oligonucleotide
aagugaaauaacuggguuu

SEQ ID NO: 1503446 - RNA, 19 nt, Artificial Sequence
  Description of Artificial Sequence: Synthetic oligonucleotide
augcucuagacauauucuc

SEQ ID NO: 1503447 - RNA, 19 nt, Artificial Sequence
  Description of Artificial Sequence: Synthetic oligonucleotide
uauugcaaguuaacuaccu

SEQ ID NO: 1503448 - RNA, 19 nt, Artificial Sequence
  Description of Artificial Sequence: Synthetic oligonucleotide
auagauccaucccaguuug

SEQ ID NO: 1503449 - RNA, 19 nt, Artificial Sequence
  Description of Artificial Sequence: Synthetic oligonucleotide
acuaagaaaaucacuuauc

SEQ ID NO: 1503450 - RNA, 19 nt, Artificial Sequence
  Description of Artificial Sequence: Synthetic oligonucleotide
auuaacggcaucugcauaa

SEQ ID NO: 1503451 - RNA, 19 nt, Artificial Sequence
  Description of Artificial Sequence: Synthetic oligonucleotide
uaaguuacaugggaaagac

SEQ ID NO: 1503452 - RNA, 19 nt, Artificial Sequence
  Description of Artificial Sequence: Synthetic oligonucleotide
ucuugaagcuagcaaauua

SEQ ID NO: 1503453 - RNA, 19 nt, Artificial Sequence
  Description of Artificial Sequence: Synthetic oligonucleotide
ugcaaggauacauacugac

SEQ ID NO: 1503454 - RNA, 19 nt, Artificial Sequence
  Description of Artificial Sequence: Synthetic oligonucleotide
acagauucggaucucuucu

SEQ ID NO: 1503455 - RNA, 19 nt, Artificial Sequence
  Description of Artificial Sequence: Synthetic oligonucleotide
uuaaguuacaugggaaaga

SEQ ID NO: 1503456 - RNA, 19 nt, Artificial Sequence
  Description of Artificial Sequence: Synthetic oligonucleotide
aaucacuuaucaaaccucu

SEQ ID NO: 1503457 - RNA, 19 nt, Artificial Sequence
  Description of Artificial Sequence: Synthetic oligonucleotide
ugcauaauauucucucuac

SEQ ID NO: 1503458 - RNA, 19 nt, Artificial Sequence
  Description of Artificial Sequence: Synthetic oligonucleotide
uugagaagaaacacuuuaa

SEQ ID NO: 1503459 - RNA, 19 nt, Artificial Sequence
  Description of Artificial Sequence: Synthetic oligonucleotide
guagcuuaagauugagaag

SEQ ID NO: 1503460 - RNA, 19 nt, Artificial Sequence
  Description of Artificial Sequence: Synthetic oligonucleotide
uauguaaguagauuuuguu

SEQ ID NO: 1503461 - RNA, 19 nt, Artificial Sequence
  Description of Artificial Sequence: Synthetic oligonucleotide
ugcagauuaauaguuuaug

SEQ ID NO: 1503462 - RNA, 19 nt, Artificial Sequence
  Description of Artificial Sequence: Synthetic oligonucleotide
uauuuauauuacuaugcuu

SEQ ID NO: 1503463 - RNA, 19 nt, Artificial Sequence
  Description of Artificial Sequence: Synthetic oligonucleotide
cuuagauucucacaaccuc

SEQ ID NO: 1503464 - RNA, 19 nt, Artificial Sequence
  Description of Artificial Sequence: Synthetic oligonucleotide
agacugacaaggaagaaug

SEQ ID NO: 1503465 - RNA, 19 nt, Artificial Sequence
  Description of Artificial Sequence: Synthetic oligonucleotide
ugaugcuaaggugacagug

SEQ ID NO: 1503466 - RNA, 19 nt, Artificial Sequence
  Description of Artificial Sequence: Synthetic oligonucleotide
caguucaugaauccgacuc

SEQ ID NO: 1503467 - RNA, 19 nt, Artificial Sequence
  Description of Artificial Sequence: Synthetic oligonucleotide
ucuagacauauucuccacu

SEQ ID NO: 1503468 - RNA, 19 nt, Artificial Sequence
  Description of Artificial Sequence: Synthetic oligonucleotide
caagaauauggcacacugg

SEQ ID NO: 1503469 - RNA, 19 nt, Artificial Sequence
  Description of Artificial Sequence: Synthetic oligonucleotide
uuaugcaaggauacauacu

SEQ ID NO: 1503470 - RNA, 19 nt, Artificial Sequence
  Description of Artificial Sequence: Synthetic oligonucleotide
aagaaaugcucuaccagug

SEQ ID NO: 1503471 - RNA, 19 nt, Artificial Sequence
  Description of Artificial Sequence: Synthetic oligonucleotide
acagaacagaugcagauua

SEQ ID NO: 1503472 - RNA, 19 nt, Artificial Sequence
  Description of Artificial Sequence: Synthetic oligonucleotide
aggaucgugucacaguuug

SEQ ID NO: 1503473 - RNA, 19 nt, Artificial Sequence
  Description of Artificial Sequence: Synthetic oligonucleotide
ucaguagcaaacucauaga

SEQ ID NO: 1503474 - RNA, 19 nt, Artificial Sequence
  Description of Artificial Sequence: Synthetic oligonucleotide
gauucugcccauuuugaga

SEQ ID NO: 1503475 - RNA, 19 nt, Artificial Sequence
  Description of Artificial Sequence: Synthetic oligonucleotide
uucacuguauugcaaguua

SEQ ID NO: 1503476 - RNA, 19 nt, Artificial Sequence
  Description of Artificial Sequence: Synthetic oligonucleotide
acauagucgauguagcuua

SEQ ID NO: 1503477 - RNA, 19 nt, Artificial Sequence
  Description of Artificial Sequence: Synthetic oligonucleotide
aacuacuaagaaaaucacu

SEQ ID NO: 1503478 - RNA, 19 nt, Artificial Sequence
  Description of Artificial Sequence: Synthetic oligonucleotide
ucuuuucacucuaggggcc

SEQ ID NO: 1503479 - RNA, 19 nt, Artificial Sequence
  Description of Artificial Sequence: Synthetic oligonucleotide
uagugcucguuccagaauc

SEQ ID NO: 1503480 - RNA, 19 nt, Artificial Sequence
  Description of Artificial Sequence: Synthetic oligonucleotide
ugagcgguuggucaggauc

SEQ ID NO: 1503481 - RNA, 19 nt, Artificial Sequence
  Description of Artificial Sequence: Synthetic oligonucleotide
uucggaucucuucuugaag

SEQ ID NO: 1503482 - RNA, 19 nt, Artificial Sequence
  Description of Artificial Sequence: Synthetic oligonucleotide
acauagccuacaauguagc

SEQ ID NO: 1503483 - RNA, 19 nt, Artificial Sequence
  Description of Artificial Sequence: Synthetic oligonucleotide
aagacugacaaggaagaau

SEQ ID NO: 1503484 - RNA, 19 nt, Artificial Sequence
  Description of Artificial Sequence: Synthetic oligonucleotide
aaccucugcucuuuuaaaa

SEQ ID NO: 1503485 - RNA, 19 nt, Artificial Sequence
  Description of Artificial Sequence: Synthetic oligonucleotide
aagaaagguuccaucuuag

SEQ ID NO: 1503486 - RNA, 19 nt, Artificial Sequence
  Description of Artificial Sequence: Synthetic oligonucleotide
aaaccugcgcgcuggggag

SEQ ID NO: 1503487 - RNA, 19 nt, Artificial Sequence
  Description of Artificial Sequence: Synthetic oligonucleotide
uggugacaaguaacuaggg

SEQ ID NO: 1503488 - RNA, 19 nt, Artificial Sequence
  Description of Artificial Sequence: Synthetic oligonucleotide
agucgauguagcuuaagau

SEQ ID NO: 1503489 - RNA, 19 nt, Artificial Sequence
  Description of Artificial Sequence: Synthetic oligonucleotide
aguacauggugacaaguaa

SEQ ID NO: 1503490 - RNA, 19 nt, Artificial Sequence
  Description of Artificial Sequence: Synthetic oligonucleotide
aaacauccaacuaucacuu

SEQ ID NO: 1503491 - RNA, 19 nt, Artificial Sequence
  Description of Artificial Sequence: Synthetic oligonucleotide
agaauauggcacacuggcc

SEQ ID NO: 1503492 - RNA, 19 nt, Artificial Sequence
  Description of Artificial Sequence: Synthetic oligonucleotide
auagccuacaauguagcug

SEQ ID NO: 1503493 - RNA, 19 nt, Artificial Sequence
  Description of Artificial Sequence: Synthetic oligonucleotide
uguuccgcaguucaugaau

SEQ ID NO: 1503494 - RNA, 19 nt, Artificial Sequence
  Description of Artificial Sequence: Synthetic oligonucleotide
gaugcagauuaauaguuua

SEQ ID NO: 1503495 - RNA, 19 nt, Artificial Sequence
  Description of Artificial Sequence: Synthetic oligonucleotide
ucucgaaccauguggcggc

SEQ ID NO: 1503496 - RNA, 19 nt, Artificial Sequence
  Description of Artificial Sequence: Synthetic oligonucleotide
auauuacuaugcuuaaguu

SEQ ID NO: 1503497 - RNA, 19 nt, Artificial Sequence
  Description of Artificial Sequence: Synthetic oligonucleotide
cucugcucuuuuaaaagac

SEQ ID NO: 1503498 - RNA, 19 nt, Artificial Sequence
  Description of Artificial Sequence: Synthetic oligonucleotide
aaaugcaaugcugugggua

SEQ ID NO: 1503499 - RNA, 19 nt, Artificial Sequence
  Description of Artificial Sequence: Synthetic oligonucleotide
uccaacuaucacuuuauuu

SEQ ID NO: 1503500 - RNA, 19 nt, Artificial Sequence
  Description of Artificial Sequence: Synthetic oligonucleotide
ucgaacuagugcucguucc

SEQ ID NO: 1503501 - RNA, 19 nt, Artificial Sequence
  Description of Artificial Sequence: Synthetic oligonucleotide
agugaaauaacuggguuua

SEQ ID NO: 1503502 - RNA, 19 nt, Artificial Sequence
  Description of Artificial Sequence: Synthetic oligonucleotide
augcuuaaguuacauggga

SEQ ID NO: 1503503 - RNA, 19 nt, Artificial Sequence
  Description of Artificial Sequence: Synthetic oligonucleotide
ccucacauagccuacaaug

SEQ ID NO: 1503504 - RNA, 19 nt, Artificial Sequence
  Description of Artificial Sequence: Synthetic oligonucleotide
uuugcagcucacaucucga

SEQ ID NO: 1503505 - RNA, 19 nt, Artificial Sequence
  Description of Artificial Sequence: Synthetic oligonucleotide
gacaguguauguaaguaga

SEQ ID NO: 1503506 - RNA, 19 nt, Artificial Sequence
  Description of Artificial Sequence: Synthetic oligonucleotide
acacuuuaacuacuaagaa

SEQ ID NO: 1503507 - RNA, 19 nt, Artificial Sequence
  Description of Artificial Sequence: Synthetic oligonucleotide
aucgugucacaguuugcac

SEQ ID NO: 1503508 - RNA, 19 nt, Artificial Sequence
  Description of Artificial Sequence: Synthetic oligonucleotide
cacgcuaacacugagccuc

SEQ ID NO: 1503509 - RNA, 19 nt, Artificial Sequence
  Description of Artificial Sequence: Synthetic oligonucleotide
agaugguacaugcuccuca

SEQ ID NO: 1503510 - RNA, 19 nt, Artificial Sequence
  Description of Artificial Sequence: Synthetic oligonucleotide
uagcaaauuaagugaaaua

SEQ ID NO: 1503511 - RNA, 19 nt, Artificial Sequence
  Description of Artificial Sequence: Synthetic oligonucleotide
ucacuguauugcaaguuaa

SEQ ID NO: 1503512 - RNA, 19 nt, Artificial Sequence
  Description of Artificial Sequence: Synthetic oligonucleotide
agacauauucuccacucaa

SEQ ID NO: 1503513 - RNA, 19 nt, Artificial Sequence
  Description of Artificial Sequence: Synthetic oligonucleotide
uuuacacaaauaccuuaua

SEQ ID NO: 1503514 - RNA, 19 nt, Artificial Sequence
  Description of Artificial Sequence: Synthetic oligonucleotide
gagcgguuggucaggaucg

SEQ ID NO: 1503515 - RNA, 19 nt, Artificial Sequence
  Description of Artificial Sequence: Synthetic oligonucleotide
caaugcuguggguauaaac

SEQ ID NO: 1503516 - RNA, 19 nt, Artificial Sequence
  Description of Artificial Sequence: Synthetic oligonucleotide
cacggccuuccuuauaacg

SEQ ID NO: 1503517 - RNA, 19 nt, Artificial Sequence
  Description of Artificial Sequence: Synthetic oligonucleotide
auacauagucgauguagcu

SEQ ID NO: 1503518 - RNA, 19 nt, Artificial Sequence
  Description of Artificial Sequence: Synthetic oligonucleotide
uucacucucucgaacuagu

SEQ ID NO: 1503519 - RNA, 19 nt, Artificial Sequence
  Description of Artificial Sequence: Synthetic oligonucleotide
agcucuucgcuccucagcu

SEQ ID NO: 1503520 - RNA, 19 nt, Artificial Sequence
  Description of Artificial Sequence: Synthetic oligonucleotide
aauuaacggcaucugcaua

SEQ ID NO: 1503521 - RNA, 19 nt, Artificial Sequence
  Description of Artificial Sequence: Synthetic oligonucleotide
ucucucgaacuagugcucg

SEQ ID NO: 1503522 - RNA, 19 nt, Artificial Sequence
  Description of Artificial Sequence: Synthetic oligonucleotide
caaguaacuagggauggug

SEQ ID NO: 1503523 - RNA, 19 nt, Artificial Sequence
  Description of Artificial Sequence: Synthetic oligonucleotide
ugaaauaacuggguuuaaa

SEQ ID NO: 1503524 - RNA, 19 nt, Artificial Sequence
  Description of Artificial Sequence: Synthetic oligonucleotide
ucuaggggccccaauuuuc

SEQ ID NO: 1503525 - RNA, 19 nt, Artificial Sequence
  Description of Artificial Sequence: Synthetic oligonucleotide
guaaguagauuuuguuuuc

SEQ ID NO: 1503526 - RNA, 19 nt, Artificial Sequence
  Description of Artificial Sequence: Synthetic oligonucleotide
acuagggauggugacaucu

SEQ ID NO: 1503527 - RNA, 19 nt, Artificial Sequence
  Description of Artificial Sequence: Synthetic oligonucleotide
aacuagugcucguuccaga

SEQ ID NO: 1503528 - RNA, 19 nt, Artificial Sequence
  Description of Artificial Sequence: Synthetic oligonucleotide
aaguaacuagggaugguga

SEQ ID NO: 1503529 - RNA, 19 nt, Artificial Sequence
  Description of Artificial Sequence: Synthetic oligonucleotide
agauucggaucucuucuug

SEQ ID NO: 1503530 - RNA, 19 nt, Artificial Sequence
  Description of Artificial Sequence: Synthetic oligonucleotide
uuccaucuuagauucucac

SEQ ID NO: 1503531 - RNA, 19 nt, Artificial Sequence
  Description of Artificial Sequence: Synthetic oligonucleotide
accaccgauauggucaagg

SEQ ID NO: 1503532 - RNA, 19 nt, Artificial Sequence
  Description of Artificial Sequence: Synthetic oligonucleotide
accuuauacauagucgaug

SEQ ID NO: 1503533 - RNA, 19 nt, Artificial Sequence
  Description of Artificial Sequence: Synthetic oligonucleotide
gaucgugucacaguuugca

SEQ ID NO: 1503534 - RNA, 19 nt, Artificial Sequence
  Description of Artificial Sequence: Synthetic oligonucleotide
aacaagaauauggcacacu

SEQ ID NO: 1503535 - RNA, 19 nt, Artificial Sequence
  Description of Artificial Sequence: Synthetic oligonucleotide
aauuuucuccccucacaua

SEQ ID NO: 1503536 - RNA, 19 nt, Artificial Sequence
  Description of Artificial Sequence: Synthetic oligonucleotide
aacaguaggcuuccauuua

SEQ ID NO: 1503537 - RNA, 19 nt, Artificial Sequence
  Description of Artificial Sequence: Synthetic oligonucleotide
uccgacucugaugcuaagg

SEQ ID NO: 1503538 - RNA, 19 nt, Artificial Sequence
  Description of Artificial Sequence: Synthetic oligonucleotide
ccaacuaucacuuuauuua

SEQ ID NO: 1503539 - RNA, 19 nt, Artificial Sequence
  Description of Artificial Sequence: Synthetic oligonucleotide
aauggguucuggugcuaca

SEQ ID NO: 1503540 - RNA, 19 nt, Artificial Sequence
  Description of Artificial Sequence: Synthetic oligonucleotide
uuuucuccccucacauagc

SEQ ID NO: 1503541 - RNA, 19 nt, Artificial Sequence
  Description of Artificial Sequence: Synthetic oligonucleotide
cuuaucaaaccucugcucu

SEQ ID NO: 1503542 - RNA, 19 nt, Artificial Sequence
  Description of Artificial Sequence: Synthetic oligonucleotide
gguaccaccgauaugguca

SEQ ID NO: 1503543 - RNA, 19 nt, Artificial Sequence
  Description of Artificial Sequence: Synthetic oligonucleotide
cuguauugcaaguuaacua

SEQ ID NO: 1503544 - RNA, 19 nt, Artificial Sequence
  Description of Artificial Sequence: Synthetic oligonucleotide
gccacgcuaacacugagcc

SEQ ID NO: 1503545 - RNA, 19 nt, Artificial Sequence
  Description of Artificial Sequence: Synthetic oligonucleotide
acaaccucuuguuccgcag

SEQ ID NO: 1503546 - RNA, 19 nt, Artificial Sequence
  Description of Artificial Sequence: Synthetic oligonucleotide
uucugccucaagauguaaa

SEQ ID NO: 1503547 - RNA, 19 nt, Artificial Sequence
  Description of Artificial Sequence: Synthetic oligonucleotide
agaaagguuccaucuuaga

SEQ ID NO: 1503548 - RNA, 19 nt, Artificial Sequence
  Description of Artificial Sequence: Synthetic oligonucleotide
ggucaaggaagauucugcc

SEQ ID NO: 1503549 - RNA, 19 nt, Artificial Sequence
  Description of Artificial Sequence: Synthetic oligonucleotide
ucacaucucgaaccaugug

SEQ ID NO: 1503550 - RNA, 19 nt, Artificial Sequence
  Description of Artificial Sequence: Synthetic oligonucleotide
guucugagcgguuggucag

SEQ ID NO: 1503551 - RNA, 19 nt, Artificial Sequence
  Description of Artificial Sequence: Synthetic oligonucleotide
uauaacgcuggcugucuuc

SEQ ID NO: 1503552 - RNA, 19 nt, Artificial Sequence
  Description of Artificial Sequence: Synthetic oligonucleotide
gacugacaaggaagaaugg

SEQ ID NO: 1503553 - RNA, 19 nt, Artificial Sequence
  Description of Artificial Sequence: Synthetic oligonucleotide
aauguagcugcagacucuu

SEQ ID NO: 1503554 - RNA, 19 nt, Artificial Sequence
  Description of Artificial Sequence: Synthetic oligonucleotide
cuucaagaguuaucagaug

SEQ ID NO: 1503555 - RNA, 19 nt, Artificial Sequence
  Description of Artificial Sequence: Synthetic oligonucleotide
ucugcccauuuugagagcu

SEQ ID NO: 1503556 - RNA, 19 nt, Artificial Sequence
  Description of Artificial Sequence: Synthetic oligonucleotide
guauugcaaguuaacuacc

SEQ ID NO: 1503557 - RNA, 19 nt, Artificial Sequence
  Description of Artificial Sequence: Synthetic oligonucleotide
uuccgcaguucaugaaucc

SEQ ID NO: 1503558 - RNA, 19 nt, Artificial Sequence
  Description of Artificial Sequence: Synthetic oligonucleotide
uagauucucacaaccucuu

SEQ ID NO: 1503559 - RNA, 19 nt, Artificial Sequence
  Description of Artificial Sequence: Synthetic oligonucleotide
uacauagucgauguagcuu

SEQ ID NO: 1503560 - RNA, 19 nt, Artificial Sequence
  Description of Artificial Sequence: Synthetic oligonucleotide
caaguuaacuaccuuguua

SEQ ID NO: 1503561 - RNA, 19 nt, Artificial Sequence
  Description of Artificial Sequence: Synthetic oligonucleotide
gcuaaggugacaguguaug

SEQ ID NO: 1503562 - RNA, 19 nt, Artificial Sequence
  Description of Artificial Sequence: Synthetic oligonucleotide
gaacuagugcucguuccag

SEQ ID NO: 1503563 - RNA, 19 nt, Artificial Sequence
  Description of Artificial Sequence: Synthetic oligonucleotide
uaccuuauacauagucgau

SEQ ID NO: 1503564 - RNA, 19 nt, Artificial Sequence
  Description of Artificial Sequence: Synthetic oligonucleotide
uccuuauaacgcuggcugu

SEQ ID NO: 1503565 - RNA, 19 nt, Artificial Sequence
  Description of Artificial Sequence: Synthetic oligonucleotide
ugagcaugacccgauccug

SEQ ID NO: 1503566 - RNA, 19 nt, Artificial Sequence
  Description of Artificial Sequence: Synthetic oligonucleotide
aagccacgcuaacacugag

SEQ ID NO: 1503567 - RNA, 19 nt, Artificial Sequence
  Description of Artificial Sequence: Synthetic oligonucleotide
cucuagacauauucuccac

SEQ ID NO: 1503568 - RNA, 19 nt, Artificial Sequence
  Description of Artificial Sequence: Synthetic oligonucleotide
ucuucgcuccucagcuggg

SEQ ID NO: 1503569 - RNA, 19 nt, Artificial Sequence
  Description of Artificial Sequence: Synthetic oligonucleotide
aguuaucagaugguacaug

SEQ ID NO: 1503570 - RNA, 19 nt, Artificial Sequence
  Description of Artificial Sequence: Synthetic oligonucleotide
auugcaaguuaacuaccuu

SEQ ID NO: 1503571 - RNA, 19 nt, Artificial Sequence
  Description of Artificial Sequence: Synthetic oligonucleotide
cucguuccagaaucacacg

SEQ ID NO: 1503572 - RNA, 19 nt, Artificial Sequence
  Description of Artificial Sequence: Synthetic oligonucleotide
uacuaugcuuaaguuacau

SEQ ID NO: 1503573 - RNA, 19 nt, Artificial Sequence
  Description of Artificial Sequence: Synthetic oligonucleotide
gaugguacaugcuccucaa

SEQ ID NO: 1503574 - RNA, 19 nt, Artificial Sequence
  Description of Artificial Sequence: Synthetic oligonucleotide
aaccgaguggagaugaguu

SEQ ID NO: 1503575 - RNA, 19 nt, Artificial Sequence
  Description of Artificial Sequence: Synthetic oligonucleotide
guuacaugggaaagacagc

SEQ ID NO: 1503576 - RNA, 19 nt, Artificial Sequence
  Description of Artificial Sequence: Synthetic oligonucleotide
cuuguuccgcaguucauga

SEQ ID NO: 1503577 - RNA, 19 nt, Artificial Sequence
  Description of Artificial Sequence: Synthetic oligonucleotide
cuguggguauaaacaguag

SEQ ID NO: 1503578 - RNA, 19 nt, Artificial Sequence
  Description of Artificial Sequence: Synthetic oligonucleotide
gauccugaacuucacugua

SEQ ID NO: 1503579 - RNA, 19 nt, Artificial Sequence
  Description of Artificial Sequence: Synthetic oligonucleotide
agaaaacagacggguacca

SEQ ID NO: 1503580 - RNA, 19 nt, Artificial Sequence
  Description of Artificial Sequence: Synthetic oligonucleotide
aaccucuuguuccgcaguu

SEQ ID NO: 1503581 - RNA, 19 nt, Artificial Sequence
  Description of Artificial Sequence: Synthetic oligonucleotide
ucucuucuugaagcuagca

SEQ ID NO: 1503582 - RNA, 19 nt, Artificial Sequence
  Description of Artificial Sequence: Synthetic oligonucleotide
uaaaugcaaugcugugggu

SEQ ID NO: 1503583 - RNA, 19 nt, Artificial Sequence
  Description of Artificial Sequence: Synthetic oligonucleotide
agacggguaccaccgauau

SEQ ID NO: 1503584 - RNA, 19 nt, Artificial Sequence
  Description of Artificial Sequence: Synthetic oligonucleotide
gaaaacagacggguaccac

SEQ ID NO: 1503585 - RNA, 19 nt, Artificial Sequence
  Description of Artificial Sequence: Synthetic oligonucleotide
gucgauguagcuuaagauu

SEQ ID NO: 1503586 - RNA, 19 nt, Artificial Sequence
  Description of Artificial Sequence: Synthetic oligonucleotide
caguucugccccauuucag

SEQ ID NO: 1503587 - RNA, 19 nt, Artificial Sequence
  Description of Artificial Sequence: Synthetic oligonucleotide
cuuuucacucuaggggccc

SEQ ID NO: 1503588 - RNA, 19 nt, Artificial Sequence
  Description of Artificial Sequence: Synthetic oligonucleotide
guaacuagggauggugaca

SEQ ID NO: 1503589 - RNA, 19 nt, Artificial Sequence
  Description of Artificial Sequence: Synthetic oligonucleotide
ggugacaaguaacuaggga

SEQ ID NO: 1503590 - RNA, 19 nt, Artificial Sequence
  Description of Artificial Sequence: Synthetic oligonucleotide
aggaagauucugcccauuu

SEQ ID NO: 1503591 - RNA, 19 nt, Artificial Sequence
  Description of Artificial Sequence: Synthetic oligonucleotide
ugugaaccgaguggagaug

SEQ ID NO: 1503592 - RNA, 19 nt, Artificial Sequence
  Description of Artificial Sequence: Synthetic oligonucleotide
aaguaacacaggaccaaaa

SEQ ID NO: 1503593 - RNA, 19 nt, Artificial Sequence
  Description of Artificial Sequence: Synthetic oligonucleotide
gcuuaaguuacaugggaaa

SEQ ID NO: 1503594 - RNA, 19 nt, Artificial Sequence
  Description of Artificial Sequence: Synthetic oligonucleotide
augcuaaggugacagugua

SEQ ID NO: 1503595 - RNA, 19 nt, Artificial Sequence
  Description of Artificial Sequence: Synthetic oligonucleotide
uggguucuggugcuacagu

SEQ ID NO: 1503596 - RNA, 19 nt, Artificial Sequence
  Description of Artificial Sequence: Synthetic oligonucleotide
agccacgcuaacacugagc

SEQ ID NO: 1503597 - RNA, 19 nt, Artificial Sequence
  Description of Artificial Sequence: Synthetic oligonucleotide
gauauggucaaggaagauu

SEQ ID NO: 1503598 - RNA, 19 nt, Artificial Sequence
  Description of Artificial Sequence: Synthetic oligonucleotide
ucaaaccucugcucuuuua

SEQ ID NO: 1503599 - RNA, 19 nt, Artificial Sequence
  Description of Artificial Sequence: Synthetic oligonucleotide
agcuagcaaauuaagugaa

SEQ ID NO: 1503600 - RNA, 19 nt, Artificial Sequence
  Description of Artificial Sequence: Synthetic oligonucleotide
cucacauagccuacaaugu

SEQ ID NO: 1503601 - RNA, 19 nt, Artificial Sequence
  Description of Artificial Sequence: Synthetic oligonucleotide
cucgaacuagugcucguuc

SEQ ID NO: 1503602 - RNA, 19 nt, Artificial Sequence
  Description of Artificial Sequence: Synthetic oligonucleotide
gcucguuccagaaucacac

SEQ ID NO: 1503603 - RNA, 19 nt, Artificial Sequence
  Description of Artificial Sequence: Synthetic oligonucleotide
acacggccuuccuuauaac

SEQ ID NO: 1503604 - RNA, 19 nt, Artificial Sequence
  Description of Artificial Sequence: Synthetic oligonucleotide
cugcauaauauucucucua

SEQ ID NO: 1503605 - RNA, 19 nt, Artificial Sequence
  Description of Artificial Sequence: Synthetic oligonucleotide
caugcucuagacauauucu

SEQ ID NO: 1503606 - RNA, 19 nt, Artificial Sequence
  Description of Artificial Sequence: Synthetic oligonucleotide
gaauggguucuggugcuac

SEQ ID NO: 1503607 - RNA, 19 nt, Artificial Sequence
  Description of Artificial Sequence: Synthetic oligonucleotide
aacuaucacuuuauuuaua

SEQ ID NO: 1503608 - RNA, 19 nt, Artificial Sequence
  Description of Artificial Sequence: Synthetic oligonucleotide
gcucuagacauauucucca

SEQ ID NO: 1503609 - RNA, 19 nt, Artificial Sequence
  Description of Artificial Sequence: Synthetic oligonucleotide
acucuaggggccccaauuu

SEQ ID NO: 1503610 - RNA, 19 nt, Artificial Sequence
  Description of Artificial Sequence: Synthetic oligonucleotide
aacauccaacuaucacuuu

SEQ ID NO: 1503611 - RNA, 19 nt, Artificial Sequence
  Description of Artificial Sequence: Synthetic oligonucleotide
ugcaaugcuguggguauaa

SEQ ID NO: 1503612 - RNA, 19 nt, Artificial Sequence
  Description of Artificial Sequence: Synthetic oligonucleotide
aacagacggguaccaccga

SEQ ID NO: 1503613 - RNA, 19 nt, Artificial Sequence
  Description of Artificial Sequence: Synthetic oligonucleotide
uaucaaaccucugcucuuu

SEQ ID NO: 1503614 - RNA, 19 nt, Artificial Sequence
  Description of Artificial Sequence: Synthetic oligonucleotide
uucugccccauuucagaaa

SEQ ID NO: 1503615 - RNA, 19 nt, Artificial Sequence
  Description of Artificial Sequence: Synthetic oligonucleotide
ccaacaagaauauggcaca

SEQ ID NO: 1503616 - RNA, 19 nt, Artificial Sequence
  Description of Artificial Sequence: Synthetic oligonucleotide
caacaagaauauggcacac

SEQ ID NO: 1503617 - RNA, 19 nt, Artificial Sequence
  Description of Artificial Sequence: Synthetic oligonucleotide
auagucgauguagcuuaag

SEQ ID NO: 1503618 - RNA, 19 nt, Artificial Sequence
  Description of Artificial Sequence: Synthetic oligonucleotide
gcauaauauucucucuaca

SEQ ID NO: 1503619 - RNA, 19 nt, Artificial Sequence
  Description of Artificial Sequence: Synthetic oligonucleotide
gggagaucggcgcugccag

SEQ ID NO: 1503620 - RNA, 19 nt, Artificial Sequence
  Description of Artificial Sequence: Synthetic oligonucleotide
uuuucacucuaggggcccc

SEQ ID NO: 1503621 - RNA, 19 nt, Artificial Sequence
  Description of Artificial Sequence: Synthetic oligonucleotide
uaccaguggcgccugugaa

SEQ ID NO: 1503622 - RNA, 19 nt, Artificial Sequence
  Description of Artificial Sequence: Synthetic oligonucleotide
acagacggguaccaccgau

SEQ ID NO: 1503623 - RNA, 19 nt, Artificial Sequence
  Description of Artificial Sequence: Synthetic oligonucleotide
cugcgcgcuggggagaucg

SEQ ID NO: 1503624 - RNA, 19 nt, Artificial Sequence
  Description of Artificial Sequence: Synthetic oligonucleotide
cacuuaucaaaccucugcu

SEQ ID NO: 1503625 - RNA, 19 nt, Artificial Sequence
  Description of Artificial Sequence: Synthetic oligonucleotide
cucucucgaacuagugcuc

SEQ ID NO: 1503626 - RNA, 19 nt, Artificial Sequence
  Description of Artificial Sequence: Synthetic oligonucleotide
gaucggcgcugccagcagc

SEQ ID NO: 1503627 - RNA, 19 nt, Artificial Sequence
  Description of Artificial Sequence: Synthetic oligonucleotide
gacccgauccugaacuuca

SEQ ID NO: 1503628 - RNA, 19 nt, Artificial Sequence
  Description of Artificial Sequence: Synthetic oligonucleotide
uucuccccucacauagccu

SEQ ID NO: 1503629 - RNA, 19 nt, Artificial Sequence
  Description of Artificial Sequence: Synthetic oligonucleotide
ccacucaaaauguacacaa

SEQ ID NO: 1503630 - RNA, 19 nt, Artificial Sequence
  Description of Artificial Sequence: Synthetic oligonucleotide
uucuugaagcuagcaaauu

SEQ ID NO: 1503631 - RNA, 19 nt, Artificial Sequence
  Description of Artificial Sequence: Synthetic oligonucleotide
guauguaaguagauuuugu

SEQ ID NO: 1503632 - RNA, 19 nt, Artificial Sequence
  Description of Artificial Sequence: Synthetic oligonucleotide
ugcuacaguuccucuccaa

SEQ ID NO: 1503633 - RNA, 19 nt, Artificial Sequence
  Description of Artificial Sequence: Synthetic oligonucleotide
uuaacggcaucugcauaau

SEQ ID NO: 1503634 - RNA, 19 nt, Artificial Sequence
  Description of Artificial Sequence: Synthetic oligonucleotide
acaaguaacuagggauggu

SEQ ID NO: 1503635 - RNA, 19 nt, Artificial Sequence
  Description of Artificial Sequence: Synthetic oligonucleotide
agaugcagauuaauaguuu

SEQ ID NO: 1503636 - RNA, 19 nt, Artificial Sequence
  Description of Artificial Sequence: Synthetic oligonucleotide
gcgccugugaaccgagugg

SEQ ID NO: 1503637 - RNA, 19 nt, Artificial Sequence
  Description of Artificial Sequence: Synthetic oligonucleotide
uaacgcuggcugucuucag

SEQ ID NO: 1503638 - RNA, 19 nt, Artificial Sequence
  Description of Artificial Sequence: Synthetic oligonucleotide
auguagcuuaagauugaga

SEQ ID NO: 1503639 - RNA, 19 nt, Artificial Sequence
  Description of Artificial Sequence: Synthetic oligonucleotide
ugaauccgacucugaugcu

SEQ ID NO: 1503640 - RNA, 19 nt, Artificial Sequence
  Description of Artificial Sequence: Synthetic oligonucleotide
uuguuccgcaguucaugaa

SEQ ID NO: 1503641 - RNA, 19 nt, Artificial Sequence
  Description of Artificial Sequence: Synthetic oligonucleotide
uaacggcaucugcauaaua

SEQ ID NO: 1503642 - RNA, 19 nt, Artificial Sequence
  Description of Artificial Sequence: Synthetic oligonucleotide
guuccgcaguucaugaauc

SEQ ID NO: 1503643 - RNA, 19 nt, Artificial Sequence
  Description of Artificial Sequence: Synthetic oligonucleotide
gagaucggcgcugccagca

SEQ ID NO: 1503644 - RNA, 19 nt, Artificial Sequence
  Description of Artificial Sequence: Synthetic oligonucleotide
acaguguauguaaguagau

SEQ ID NO: 1503645 - RNA, 19 nt, Artificial Sequence
  Description of Artificial Sequence: Synthetic oligonucleotide
caagccacgcuaacacuga

SEQ ID NO: 1503646 - RNA, 19 nt, Artificial Sequence
  Description of Artificial Sequence: Synthetic oligonucleotide
gugggucaagacugacaag

SEQ ID NO: 1503647 - RNA, 19 nt, Artificial Sequence
  Description of Artificial Sequence: Synthetic oligonucleotide
acgcuaacacugagccucc

SEQ ID NO: 1503648 - RNA, 19 nt, Artificial Sequence
  Description of Artificial Sequence: Synthetic oligonucleotide
gcugggucgaagccccucg

SEQ ID NO: 1503649 - RNA, 19 nt, Artificial Sequence
  Description of Artificial Sequence: Synthetic oligonucleotide
agaucggcgcugccagcag

SEQ ID NO: 1503650 - RNA, 19 nt, Artificial Sequence
  Description of Artificial Sequence: Synthetic oligonucleotide
gacggguaccaccgauaug

SEQ ID NO: 1503651 - RNA, 19 nt, Artificial Sequence
  Description of Artificial Sequence: Synthetic oligonucleotide
gggucgaagccccucggcc

SEQ ID NO: 1503652 - RNA, 19 nt, Artificial Sequence
  Description of Artificial Sequence: Synthetic oligonucleotide
gugagcaugacccgauccu

SEQ ID NO: 1503653 - RNA, 19 nt, Artificial Sequence
  Description of Artificial Sequence: Synthetic oligonucleotide
ggaugggaaauacaaaauu

SEQ ID NO: 1503654 - RNA, 19 nt, Artificial Sequence
  Description of Artificial Sequence: Synthetic oligonucleotide
acaugcuccucaaagccuu

SEQ ID NO: 1503655 - RNA, 19 nt, Artificial Sequence
  Description of Artificial Sequence: Synthetic oligonucleotide
acgcuggcugucuucagua

SEQ ID NO: 1503656 - RNA, 19 nt, Artificial Sequence
  Description of Artificial Sequence: Synthetic oligonucleotide
ugcuguuggaugggaaaua

SEQ ID NO: 1503657 - RNA, 19 nt, Artificial Sequence
  Description of Artificial Sequence: Synthetic oligonucleotide
guacacaaacacuucuuuu

SEQ ID NO: 1503658 - RNA, 19 nt, Artificial Sequence
  Description of Artificial Sequence: Synthetic oligonucleotide
ccuuauacauagucgaugu

SEQ ID NO: 1503659 - RNA, 19 nt, Artificial Sequence
  Description of Artificial Sequence: Synthetic oligonucleotide
ucacaaccucuuguuccgc

SEQ ID NO: 1503660 - RNA, 19 nt, Artificial Sequence
  Description of Artificial Sequence: Synthetic oligonucleotide
cugggucgaagccccucgg

SEQ ID NO: 1503661 - RNA, 19 nt, Artificial Sequence
  Description of Artificial Sequence: Synthetic oligonucleotide
ucucgaacuagugcucguu

SEQ ID NO: 1503662 - RNA, 19 nt, Artificial Sequence
  Description of Artificial Sequence: Synthetic oligonucleotide
cauccaacuaucacuuuau

SEQ ID NO: 1503663 - RNA, 19 nt, Artificial Sequence
  Description of Artificial Sequence: Synthetic oligonucleotide
uuucacucuaggggcccca

SEQ ID NO: 1503664 - RNA, 19 nt, Artificial Sequence
  Description of Artificial Sequence: Synthetic oligonucleotide
augcaaggauacauacuga

SEQ ID NO: 1503665 - RNA, 19 nt, Artificial Sequence
  Description of Artificial Sequence: Synthetic oligonucleotide
ccaguggcgccugugaacc

SEQ ID NO: 1503666 - RNA, 19 nt, Artificial Sequence
  Description of Artificial Sequence: Synthetic oligonucleotide
ccaaguacauggugacaag

SEQ ID NO: 1503667 - RNA, 19 nt, Artificial Sequence
  Description of Artificial Sequence: Synthetic oligonucleotide
ggucaagacugacaaggaa

SEQ ID NO: 1503668 - RNA, 19 nt, Artificial Sequence
  Description of Artificial Sequence: Synthetic oligonucleotide
ugcgcgcuggggagaucgg

SEQ ID NO: 1503669 - RNA, 19 nt, Artificial Sequence
  Description of Artificial Sequence: Synthetic oligonucleotide
agugcucguuccagaauca

SEQ ID NO: 1503670 - RNA, 19 nt, Artificial Sequence
  Description of Artificial Sequence: Synthetic oligonucleotide
cuuauacauagucgaugua

SEQ ID NO: 1503671 - RNA, 19 nt, Artificial Sequence
  Description of Artificial Sequence: Synthetic oligonucleotide
gaguggagaugaguucuga

SEQ ID NO: 1503672 - RNA, 19 nt, Artificial Sequence
  Description of Artificial Sequence: Synthetic oligonucleotide
ggucaggaucgugucacag

SEQ ID NO: 1503673 - RNA, 19 nt, Artificial Sequence
  Description of Artificial Sequence: Synthetic oligonucleotide
cacaaccucuuguuccgca

SEQ ID NO: 1503674 - RNA, 19 nt, Artificial Sequence
  Description of Artificial Sequence: Synthetic oligonucleotide
ggcgccugugaaccgagug

SEQ ID NO: 1503675 - RNA, 19 nt, Artificial Sequence
  Description of Artificial Sequence: Synthetic oligonucleotide
acugagccuccagcgcugg

SEQ ID NO: 1503676 - RNA, 19 nt, Artificial Sequence
  Description of Artificial Sequence: Synthetic oligonucleotide
guaccaccgauauggucaa

SEQ ID NO: 1503677 - RNA, 19 nt, Artificial Sequence
  Description of Artificial Sequence: Synthetic oligonucleotide
gcaaggauacauacugaca

SEQ ID NO: 1503678 - RNA, 19 nt, Artificial Sequence
  Description of Artificial Sequence: Synthetic oligonucleotide
cuaaggugacaguguaugu

SEQ ID NO: 1503679 - RNA, 19 nt, Artificial Sequence
  Description of Artificial Sequence: Synthetic oligonucleotide
caccgauauggucaaggaa

SEQ ID NO: 1503680 - RNA, 19 nt, Artificial Sequence
  Description of Artificial Sequence: Synthetic oligonucleotide
cagcucacaucucgaacca

SEQ ID NO: 1503681 - RNA, 19 nt, Artificial Sequence
  Description of Artificial Sequence: Synthetic oligonucleotide
ucacucuaggggccccaau

SEQ ID NO: 1503682 - RNA, 19 nt, Artificial Sequence
  Description of Artificial Sequence: Synthetic oligonucleotide
cauagccuacaauguagcu

SEQ ID NO: 1503683 - RNA, 19 nt, Artificial Sequence
  Description of Artificial Sequence: Synthetic oligonucleotide
cugugaaccgaguggagau

SEQ ID NO: 1503684 - RNA, 19 nt, Artificial Sequence
  Description of Artificial Sequence: Synthetic oligonucleotide
gaguuaucagaugguacau

SEQ ID NO: 1503685 - RNA, 19 nt, Artificial Sequence
  Description of Artificial Sequence: Synthetic oligonucleotide
ucacacggccuuccuuaua

SEQ ID NO: 1503686 - RNA, 19 nt, Artificial Sequence
  Description of Artificial Sequence: Synthetic oligonucleotide
cuaggggccccaauuuucu

SEQ ID NO: 1503687 - RNA, 19 nt, Artificial Sequence
  Description of Artificial Sequence: Synthetic oligonucleotide
ccuuccuuauaacgcuggc

SEQ ID NO: 1503688 - RNA, 19 nt, Artificial Sequence
  Description of Artificial Sequence: Synthetic oligonucleotide
gaaccgaguggagaugagu

SEQ ID NO: 1503689 - RNA, 19 nt, Artificial Sequence
  Description of Artificial Sequence: Synthetic oligonucleotide
gcggccagugagcaugacc

SEQ ID NO: 1503690 - RNA, 19 nt, Artificial Sequence
  Description of Artificial Sequence: Synthetic oligonucleotide
uccccucacauagccuaca

SEQ ID NO: 1503691 - RNA, 19 nt, Artificial Sequence
  Description of Artificial Sequence: Synthetic oligonucleotide
ccuuauaacgcuggcuguc

SEQ ID NO: 1503692 - RNA, 19 nt, Artificial Sequence
  Description of Artificial Sequence: Synthetic oligonucleotide
cuuauaacgcuggcugucu

SEQ ID NO: 1503693 - RNA, 19 nt, Artificial Sequence
  Description of Artificial Sequence: Synthetic oligonucleotide
auguagcugcagacucuuc

SEQ ID NO: 1503694 - RNA, 19 nt, Artificial Sequence
  Description of Artificial Sequence: Synthetic oligonucleotide
ccgauauggucaaggaaga

SEQ ID NO: 1503695 - RNA, 19 nt, Artificial Sequence
  Description of Artificial Sequence: Synthetic oligonucleotide
uucacucuaggggccccaa

SEQ ID NO: 1503696 - RNA, 19 nt, Artificial Sequence
  Description of Artificial Sequence: Synthetic oligonucleotide
ucgaaccauguggcggcca

SEQ ID NO: 1503697 - RNA, 19 nt, Artificial Sequence
  Description of Artificial Sequence: Synthetic oligonucleotide
cagugagcaugacccgauc

SEQ ID NO: 1503698 - RNA, 19 nt, Artificial Sequence
  Description of Artificial Sequence: Synthetic oligonucleotide
aucggcgcugccagcagcu

SEQ ID NO: 1503699 - RNA, 19 nt, Artificial Sequence
  Description of Artificial Sequence: Synthetic oligonucleotide
auucuccacucaaaaugua

SEQ ID NO: 1503700 - RNA, 19 nt, Artificial Sequence
  Description of Artificial Sequence: Synthetic oligonucleotide
cgcaguucaugaauccgac

SEQ ID NO: 1503701 - RNA, 19 nt, Artificial Sequence
  Description of Artificial Sequence: Synthetic oligonucleotide
gugcuacaguuccucucca

SEQ ID NO: 1503702 - RNA, 19 nt, Artificial Sequence
  Description of Artificial Sequence: Synthetic oligonucleotide
cagacggguaccaccgaua

SEQ ID NO: 1503703 - RNA, 19 nt, Artificial Sequence
  Description of Artificial Sequence: Synthetic oligonucleotide
ggguaccaccgauaugguc

SEQ ID NO: 1503704 - RNA, 19 nt, Artificial Sequence
  Description of Artificial Sequence: Synthetic oligonucleotide
gugaaauaacuggguuuaa

SEQ ID NO: 1503705 - RNA, 19 nt, Artificial Sequence
  Description of Artificial Sequence: Synthetic oligonucleotide
ccgcaguucaugaauccga

SEQ ID NO: 1503706 - RNA, 19 nt, Artificial Sequence
  Description of Artificial Sequence: Synthetic oligonucleotide
gcaugacccgauccugaac

SEQ ID NO: 1503707 - RNA, 19 nt, Artificial Sequence
  Description of Artificial Sequence: Synthetic oligonucleotide
ggaucgugucacaguuugc

SEQ ID NO: 1503708 - RNA, 19 nt, Artificial Sequence
  Description of Artificial Sequence: Synthetic oligonucleotide
ccaccgauauggucaagga

SEQ ID NO: 1503709 - RNA, 19 nt, Artificial Sequence
  Description of Artificial Sequence: Synthetic oligonucleotide
gcuagcaaauuaagugaaa

SEQ ID NO: 1503710 - RNA, 19 nt, Artificial Sequence
  Description of Artificial Sequence: Synthetic oligonucleotide
gggucaagacugacaagga

SEQ ID NO: 1503711 - RNA, 19 nt, Artificial Sequence
  Description of Artificial Sequence: Synthetic oligonucleotide
uggcgccugugaaccgagu

SEQ ID NO: 1503712 - RNA, 19 nt, Artificial Sequence
  Description of Artificial Sequence: Synthetic oligonucleotide
ggagaucggcgcugccagc

SEQ ID NO: 1503713 - RNA, 19 nt, Artificial Sequence
  Description of Artificial Sequence: Synthetic oligonucleotide
gcgcuggggagaucggcgc

SEQ ID NO: 1503714 - RNA, 19 nt, Artificial Sequence
  Description of Artificial Sequence: Synthetic oligonucleotide
cacucuaggggccccaauu

SEQ ID NO: 1503715 - RNA, 19 nt, Artificial Sequence
  Description of Artificial Sequence: Synthetic oligonucleotide
ggucgaagccccucggccu

SEQ ID NO: 1503716 - RNA, 19 nt, Artificial Sequence
  Description of Artificial Sequence: Synthetic oligonucleotide
ccugugaaccgaguggaga

SEQ ID NO: 1503717 - RNA, 19 nt, Artificial Sequence
  Description of Artificial Sequence: Synthetic oligonucleotide
uaccaccgauauggucaag

SEQ ID NO: 1503718 - RNA, 19 nt, Artificial Sequence
  Description of Artificial Sequence: Synthetic oligonucleotide
agcucacaucucgaaccau

SEQ ID NO: 1503719 - RNA, 19 nt, Artificial Sequence
  Description of Artificial Sequence: Synthetic oligonucleotide
caaccucuuguuccgcagu

SEQ ID NO: 1503720 - RNA, 19 nt, Artificial Sequence
  Description of Artificial Sequence: Synthetic oligonucleotide
cucugaugcuaaggugaca

SEQ ID NO: 1503721 - RNA, 19 nt, Artificial Sequence
  Description of Artificial Sequence: Synthetic oligonucleotide
agaugaguucugagcgguu

SEQ ID NO: 1503722 - RNA, 19 nt, Artificial Sequence
  Description of Artificial Sequence: Synthetic oligonucleotide
ggggagaucggcgcugcca

SEQ ID NO: 1503723 - RNA, 19 nt, Artificial Sequence
  Description of Artificial Sequence: Synthetic oligonucleotide
cuagugcucguuccagaau

SEQ ID NO: 1503724 - RNA, 19 nt, Artificial Sequence
  Description of Artificial Sequence: Synthetic oligonucleotide
ccgacucugaugcuaaggu

SEQ ID NO: 1503725 - RNA, 19 nt, Artificial Sequence
  Description of Artificial Sequence: Synthetic oligonucleotide
gccagugagcaugacccga

SEQ ID NO: 1503726 - RNA, 19 nt, Artificial Sequence
  Description of Artificial Sequence: Synthetic oligonucleotide
cgaacuagugcucguucca

SEQ ID NO: 1503727 - RNA, 19 nt, Artificial Sequence
  Description of Artificial Sequence: Synthetic oligonucleotide
cgaguggagaugaguucug

SEQ ID NO: 1503728 - RNA, 19 nt, Artificial Sequence
  Description of Artificial Sequence: Synthetic oligonucleotide
cuggugcuacaguuccucu

SEQ ID NO: 1503729 - RNA, 19 nt, Artificial Sequence
  Description of Artificial Sequence: Synthetic oligonucleotide
cagauucggaucucuucuu

SEQ ID NO: 1503730 - RNA, 19 nt, Artificial Sequence
  Description of Artificial Sequence: Synthetic oligonucleotide
cucucgaacuagugcucgu

SEQ ID NO: 1503731 - RNA, 19 nt, Artificial Sequence
  Description of Artificial Sequence: Synthetic oligonucleotide
agguuccaucuuagauucu

SEQ ID NO: 1503732 - RNA, 19 nt, Artificial Sequence
  Description of Artificial Sequence: Synthetic oligonucleotide
cucuaggggccccaauuuu

SEQ ID NO: 1503733 - RNA, 19 nt, Artificial Sequence
  Description of Artificial Sequence: Synthetic oligonucleotide
agccuacaauguagcugca

SEQ ID NO: 1503734 - RNA, 19 nt, Artificial Sequence
  Description of Artificial Sequence: Synthetic oligonucleotide
gcaaguuaacuaccuuguu

SEQ ID NO: 1503735 - RNA, 19 nt, Artificial Sequence
  Description of Artificial Sequence: Synthetic oligonucleotide
ggcacagauucggaucucu

SEQ ID NO: 1503736 - RNA, 19 nt, Artificial Sequence
  Description of Artificial Sequence: Synthetic oligonucleotide
accugcgcgcuggggagau

SEQ ID NO: 1503737 - RNA, 19 nt, Artificial Sequence
  Description of Artificial Sequence: Synthetic oligonucleotide
ccgaguggagaugaguucu

SEQ ID NO: 1503738 - RNA, 19 nt, Artificial Sequence
  Description of Artificial Sequence: Synthetic oligonucleotide
caggaucgugucacaguuu

SEQ ID NO: 1503739 - RNA, 19 nt, Artificial Sequence
  Description of Artificial Sequence: Synthetic oligonucleotide
cuucgcuccucagcugggu

SEQ ID NO: 1503740 - RNA, 19 nt, Artificial Sequence
  Description of Artificial Sequence: Synthetic oligonucleotide
gcccauuuugagagcuaaa

SEQ ID NO: 1503741 - RNA, 19 nt, Artificial Sequence
  Description of Artificial Sequence: Synthetic oligonucleotide
ccagugagcaugacccgau

SEQ ID NO: 1503742 - RNA, 19 nt, Artificial Sequence
  Description of Artificial Sequence: Synthetic oligonucleotide
ccccucacauagccuacaa

SEQ ID NO: 1503743 - RNA, 19 nt, Artificial Sequence
  Description of Artificial Sequence: Synthetic oligonucleotide
ccacgcuaacacugagccu

SEQ ID NO: 1503744 - RNA, 19 nt, Artificial Sequence
  Description of Artificial Sequence: Synthetic oligonucleotide
ggccagcacaagccacgcu

SEQ ID NO: 1503745 - RNA, 19 nt, Artificial Sequence
  Description of Artificial Sequence: Synthetic oligonucleotide
cucuaccaguggcgccugu

SEQ ID NO: 1503746 - RNA, 19 nt, Artificial Sequence
  Description of Artificial Sequence: Synthetic oligonucleotide
cccucacauagccuacaau

SEQ ID NO: 1503747 - RNA, 19 nt, Artificial Sequence
  Description of Artificial Sequence: Synthetic oligonucleotide
cgcugggcacagauucgga

SEQ ID NO: 1503748 - RNA, 19 nt, Artificial Sequence
  Description of Artificial Sequence: Synthetic oligonucleotide
ccccucggccuccaagucu

SEQ ID NO: 1503749 - RNA, 19 nt, Artificial Sequence
  Description of Artificial Sequence: Synthetic oligonucleotide
cgcuaacacugagccucca

SEQ ID NO: 1503750 - RNA, 19 nt, Artificial Sequence
  Description of Artificial Sequence: Synthetic oligonucleotide
ccugcgcgcuggggagauc

SEQ ID NO: 1503751 - RNA, 19 nt, Artificial Sequence
  Description of Artificial Sequence: Synthetic oligonucleotide
cgcuggggagaucggcgcu

SEQ ID NO: 1503752 - RNA, 19 nt, Artificial Sequence
  Description of Artificial Sequence: Synthetic oligonucleotide
aauauucuugucgagaucc

SEQ ID NO: 1503753 - RNA, 19 nt, Artificial Sequence
  Description of Artificial Sequence: Synthetic oligonucleotide
aaaauaucuuguuugcuac

SEQ ID NO: 1503754 - RNA, 19 nt, Artificial Sequence
  Description of Artificial Sequence: Synthetic oligonucleotide
agaaaucaugcauugaagg

SEQ ID NO: 1503755 - RNA, 19 nt, Artificial Sequence
  Description of Artificial Sequence: Synthetic oligonucleotide
aauaucuuguuugcuaccc

SEQ ID NO: 1503756 - RNA, 19 nt, Artificial Sequence
  Description of Artificial Sequence: Synthetic oligonucleotide
uuuacaaauuccaagugac

SEQ ID NO: 1503757 - RNA, 19 nt, Artificial Sequence
  Description of Artificial Sequence: Synthetic oligonucleotide
gauggacaaauucagacag

SEQ ID NO: 1503758 - RNA, 19 nt, Artificial Sequence
  Description of Artificial Sequence: Synthetic oligonucleotide
uguagggcgaguaagucgg

SEQ ID NO: 1503759 - RNA, 19 nt, Artificial Sequence
  Description of Artificial Sequence: Synthetic oligonucleotide
aagguugaucacaagaagc

SEQ ID NO: 1503760 - RNA, 19 nt, Artificial Sequence
  Description of Artificial Sequence: Synthetic oligonucleotide
aaacuaauauucuugucga

SEQ ID NO: 1503761 - RNA, 19 nt, Artificial Sequence
  Description of Artificial Sequence: Synthetic oligonucleotide
uauaauuccgucuugcaaa

SEQ ID NO: 1503762 - RNA, 19 nt, Artificial Sequence
  Description of Artificial Sequence: Synthetic oligonucleotide
acaagaagcacgcccaggc

SEQ ID NO: 1503763 - RNA, 19 nt, Artificial Sequence
  Description of Artificial Sequence: Synthetic oligonucleotide
aauucugggauaaccaagg

SEQ ID NO: 1503764 - RNA, 19 nt, Artificial Sequence
  Description of Artificial Sequence: Synthetic oligonucleotide
uugaccugaauacuugagg

SEQ ID NO: 1503765 - RNA, 19 nt, Artificial Sequence
  Description of Artificial Sequence: Synthetic oligonucleotide
uucauauagaguccgcaag

SEQ ID NO: 1503766 - RNA, 19 nt, Artificial Sequence
  Description of Artificial Sequence: Synthetic oligonucleotide
uuuucauagcaaguggucg

SEQ ID NO: 1503767 - RNA, 19 nt, Artificial Sequence
  Description of Artificial Sequence: Synthetic oligonucleotide
auuucuacgccauaaggug

SEQ ID NO: 1503768 - RNA, 19 nt, Artificial Sequence
  Description of Artificial Sequence: Synthetic oligonucleotide
uccaagugaccucagauca

SEQ ID NO: 1503769 - RNA, 19 nt, Artificial Sequence
  Description of Artificial Sequence: Synthetic oligonucleotide
aauuauuguguacauggaa

SEQ ID NO: 1503770 - RNA, 19 nt, Artificial Sequence
  Description of Artificial Sequence: Synthetic oligonucleotide
aauguuaugucugcauuuc

SEQ ID NO: 1503771 - RNA, 19 nt, Artificial Sequence
  Description of Artificial Sequence: Synthetic oligonucleotide
ugacaguuagcacaggaca

SEQ ID NO: 1503772 - RNA, 19 nt, Artificial Sequence
  Description of Artificial Sequence: Synthetic oligonucleotide
cauggaguuucauauagag

SEQ ID NO: 1503773 - RNA, 19 nt, Artificial Sequence
  Description of Artificial Sequence: Synthetic oligonucleotide
uugaucacaagaagcacgc

SEQ ID NO: 1503774 - RNA, 19 nt, Artificial Sequence
  Description of Artificial Sequence: Synthetic oligonucleotide
auuauuguguacauggaag

SEQ ID NO: 1503775 - RNA, 19 nt, Artificial Sequence
  Description of Artificial Sequence: Synthetic oligonucleotide
uuucuacgccauaaggugg

SEQ ID NO: 1503776 - RNA, 19 nt, Artificial Sequence
  Description of Artificial Sequence: Synthetic oligonucleotide
uauguuuuagguuucguuu

SEQ ID NO: 1503777 - RNA, 19 nt, Artificial Sequence
  Description of Artificial Sequence: Synthetic oligonucleotide
uuauuguguacauggaaga

SEQ ID NO: 1503778 - RNA, 19 nt, Artificial Sequence
  Description of Artificial Sequence: Synthetic oligonucleotide
ugggaaauacaucucuugc

SEQ ID NO: 1503779 - RNA, 19 nt, Artificial Sequence
  Description of Artificial Sequence: Synthetic oligonucleotide
uauguagaggccaucuuga

SEQ ID NO: 1503780 - RNA, 19 nt, Artificial Sequence
  Description of Artificial Sequence: Synthetic oligonucleotide
gauugauggacaaauucag

SEQ ID NO: 1503781 - RNA, 19 nt, Artificial Sequence
  Description of Artificial Sequence: Synthetic oligonucleotide
auaauuccgucuugcaaac

SEQ ID NO: 1503782 - RNA, 19 nt, Artificial Sequence
  Description of Artificial Sequence: Synthetic oligonucleotide
caaaugguuuuaaugcucc

SEQ ID NO: 1503783 - RNA, 19 nt, Artificial Sequence
  Description of Artificial Sequence: Synthetic oligonucleotide
uuauaauuccgucuugcaa

SEQ ID NO: 1503784 - RNA, 19 nt, Artificial Sequence
  Description of Artificial Sequence: Synthetic oligonucleotide
caucuguccauuauaauuc

SEQ ID NO: 1503785 - RNA, 19 nt, Artificial Sequence
  Description of Artificial Sequence: Synthetic oligonucleotide
gaaaucaugcauugaagga

SEQ ID NO: 1503786 - RNA, 19 nt, Artificial Sequence
  Description of Artificial Sequence: Synthetic oligonucleotide
ugcuguuaaaucuuaugca

SEQ ID NO: 1503787 - RNA, 19 nt, Artificial Sequence
  Description of Artificial Sequence: Synthetic oligonucleotide
uggauugauggacaaauuc

SEQ ID NO: 1503788 - RNA, 19 nt, Artificial Sequence
  Description of Artificial Sequence: Synthetic oligonucleotide
ucuugggaaauacaucucu

SEQ ID NO: 1503789 - RNA, 19 nt, Artificial Sequence
  Description of Artificial Sequence: Synthetic oligonucleotide
uguuaaaucuuaugcaaau

SEQ ID NO: 1503790 - RNA, 19 nt, Artificial Sequence
  Description of Artificial Sequence: Synthetic oligonucleotide
cugacaccuauguagaggc

SEQ ID NO: 1503791 - RNA, 19 nt, Artificial Sequence
  Description of Artificial Sequence: Synthetic oligonucleotide
aaaucaugcauugaaggaa

SEQ ID NO: 1503792 - RNA, 19 nt, Artificial Sequence
  Description of Artificial Sequence: Synthetic oligonucleotide
guugaucacaagaagcacg

SEQ ID NO: 1503793 - RNA, 19 nt, Artificial Sequence
  Description of Artificial Sequence: Synthetic oligonucleotide
guuacugcuauuaccagag

SEQ ID NO: 1503794 - RNA, 19 nt, Artificial Sequence
  Description of Artificial Sequence: Synthetic oligonucleotide
aacuaauauucuugucgag

SEQ ID NO: 1503795 - RNA, 19 nt, Artificial Sequence
  Description of Artificial Sequence: Synthetic oligonucleotide
agguuggagucauaggaac

SEQ ID NO: 1503796 - RNA, 19 nt, Artificial Sequence
  Description of Artificial Sequence: Synthetic oligonucleotide
uaaugaacgcugaguaaag

SEQ ID NO: 1503797 - RNA, 19 nt, Artificial Sequence
  Description of Artificial Sequence: Synthetic oligonucleotide
uuucgaaggguccggcugg

SEQ ID NO: 1503798 - RNA, 19 nt, Artificial Sequence
  Description of Artificial Sequence: Synthetic oligonucleotide
ugugacuucggcaggagaa

SEQ ID NO: 1503799 - RNA, 19 nt, Artificial Sequence
  Description of Artificial Sequence: Synthetic oligonucleotide
cauaggaacagaguuacug

SEQ ID NO: 1503800 - RNA, 19 nt, Artificial Sequence
  Description of Artificial Sequence: Synthetic oligonucleotide
caagccgccgugaugaagg

SEQ ID NO: 1503801 - RNA, 19 nt, Artificial Sequence
  Description of Artificial Sequence: Synthetic oligonucleotide
uauagaguccgcaagcauu

SEQ ID NO: 1503802 - RNA, 19 nt, Artificial Sequence
  Description of Artificial Sequence: Synthetic oligonucleotide
agaauccugccguacagag

SEQ ID NO: 1503803 - RNA, 19 nt, Artificial Sequence
  Description of Artificial Sequence: Synthetic oligonucleotide
ugcauugaaggaauguuau

SEQ ID NO: 1503804 - RNA, 19 nt, Artificial Sequence
  Description of Artificial Sequence: Synthetic oligonucleotide
cugucgguugcguugaagg

SEQ ID NO: 1503805 - RNA, 19 nt, Artificial Sequence
  Description of Artificial Sequence: Synthetic oligonucleotide
agaguuacugcuauuacca

SEQ ID NO: 1503806 - RNA, 19 nt, Artificial Sequence
  Description of Artificial Sequence: Synthetic oligonucleotide
cauagcaaguggucgaggc

SEQ ID NO: 1503807 - RNA, 19 nt, Artificial Sequence
  Description of Artificial Sequence: Synthetic oligonucleotide
uacccuguuuacaaauucc

SEQ ID NO: 1503808 - RNA, 19 nt, Artificial Sequence
  Description of Artificial Sequence: Synthetic oligonucleotide
cuauguagaggccaucuug

SEQ ID NO: 1503809 - RNA, 19 nt, Artificial Sequence
  Description of Artificial Sequence: Synthetic oligonucleotide
auguagggcgaguaagucg

SEQ ID NO: 1503810 - RNA, 19 nt, Artificial Sequence
  Description of Artificial Sequence: Synthetic oligonucleotide
ugcugcaacgcaaauugca

SEQ ID NO: 1503811 - RNA, 19 nt, Artificial Sequence
  Description of Artificial Sequence: Synthetic oligonucleotide
auaaugaacgcugaguaaa

SEQ ID NO: 1503812 - RNA, 19 nt, Artificial Sequence
  Description of Artificial Sequence: Synthetic oligonucleotide
agacagguggcaugagacc

SEQ ID NO: 1503813 - RNA, 19 nt, Artificial Sequence
  Description of Artificial Sequence: Synthetic oligonucleotide
uaagcugugcagcaccggc

SEQ ID NO: 1503814 - RNA, 19 nt, Artificial Sequence
  Description of Artificial Sequence: Synthetic oligonucleotide
acuauaaugaacgcugagu

SEQ ID NO: 1503815 - RNA, 19 nt, Artificial Sequence
  Description of Artificial Sequence: Synthetic oligonucleotide
cauuauaauuccgucuugc

SEQ ID NO: 1503816 - RNA, 19 nt, Artificial Sequence
  Description of Artificial Sequence: Synthetic oligonucleotide
uugucgagaucccaggacu

SEQ ID NO: 1503817 - RNA, 19 nt, Artificial Sequence
  Description of Artificial Sequence: Synthetic oligonucleotide
uuucauauagaguccgcaa

SEQ ID NO: 1503818 - RNA, 19 nt, Artificial Sequence
  Description of Artificial Sequence: Synthetic oligonucleotide
cagaaaucaugcauugaag

SEQ ID NO: 1503819 - RNA, 19 nt, Artificial Sequence
  Description of Artificial Sequence: Synthetic oligonucleotide
uucuugucgagaucccagg

SEQ ID NO: 1503820 - RNA, 19 nt, Artificial Sequence
  Description of Artificial Sequence: Synthetic oligonucleotide
uugcuguagagaccgcacg

SEQ ID NO: 1503821 - RNA, 19 nt, Artificial Sequence
  Description of Artificial Sequence: Synthetic oligonucleotide
cucuuuucgcuucagcaag

SEQ ID NO: 1503822 - RNA, 19 nt, Artificial Sequence
  Description of Artificial Sequence: Synthetic oligonucleotide
aguaagucggaugauggug

SEQ ID NO: 1503823 - RNA, 19 nt, Artificial Sequence
  Description of Artificial Sequence: Synthetic oligonucleotide
acacugauugcugcaacgc

SEQ ID NO: 1503824 - RNA, 19 nt, Artificial Sequence
  Description of Artificial Sequence: Synthetic oligonucleotide
gauuuaacacugauugcug

SEQ ID NO: 1503825 - RNA, 19 nt, Artificial Sequence
  Description of Artificial Sequence: Synthetic oligonucleotide
acccucggcauuucuacgc

SEQ ID NO: 1503826 - RNA, 19 nt, Artificial Sequence
  Description of Artificial Sequence: Synthetic oligonucleotide
auaaccaagguugaucaca

SEQ ID NO: 1503827 - RNA, 19 nt, Artificial Sequence
  Description of Artificial Sequence: Synthetic oligonucleotide
uggacaaauucagacaggu

SEQ ID NO: 1503828 - RNA, 19 nt, Artificial Sequence
  Description of Artificial Sequence: Synthetic oligonucleotide
agucggaugauggugauga

SEQ ID NO: 1503829 - RNA, 19 nt, Artificial Sequence
  Description of Artificial Sequence: Synthetic oligonucleotide
caagguugaucacaagaag

SEQ ID NO: 1503830 - RNA, 19 nt, Artificial Sequence
  Description of Artificial Sequence: Synthetic oligonucleotide
aguuacugcuauuaccaga

SEQ ID NO: 1503831 - RNA, 19 nt, Artificial Sequence
  Description of Artificial Sequence: Synthetic oligonucleotide
aguuagcacaggacaaucc

SEQ ID NO: 1503832 - RNA, 19 nt, Artificial Sequence
  Description of Artificial Sequence: Synthetic oligonucleotide
aaggcacgcgcuucugugg

SEQ ID NO: 1503833 - RNA, 19 nt, Artificial Sequence
  Description of Artificial Sequence: Synthetic oligonucleotide
uauuaccagagcaagccuu

SEQ ID NO: 1503834 - RNA, 19 nt, Artificial Sequence
  Description of Artificial Sequence: Synthetic oligonucleotide
ugcuauuaccagagcaagc

SEQ ID NO: 1503835 - RNA, 19 nt, Artificial Sequence
  Description of Artificial Sequence: Synthetic oligonucleotide
uuaugucugcauuucugcu

SEQ ID NO: 1503836 - RNA, 19 nt, Artificial Sequence
  Description of Artificial Sequence: Synthetic oligonucleotide
cuugaccugaauacuugag

SEQ ID NO: 1503837 - RNA, 19 nt, Artificial Sequence
  Description of Artificial Sequence: Synthetic oligonucleotide
aggccguucaucuugcugu

SEQ ID NO: 1503838 - RNA, 19 nt, Artificial Sequence
  Description of Artificial Sequence: Synthetic oligonucleotide
aaauuauuguguacaugga

SEQ ID NO: 1503839 - RNA, 19 nt, Artificial Sequence
  Description of Artificial Sequence: Synthetic oligonucleotide
gucauaggaacagaguuac

SEQ ID NO: 1503840 - RNA, 19 nt, Artificial Sequence
  Description of Artificial Sequence: Synthetic oligonucleotide
uggucgaggcaccccaugg

SEQ ID NO: 1503841 - RNA, 19 nt, Artificial Sequence
  Description of Artificial Sequence: Synthetic oligonucleotide
acgcaaauugcacuuaaaa

SEQ ID NO: 1503842 - RNA, 19 nt, Artificial Sequence
  Description of Artificial Sequence: Synthetic oligonucleotide
cuucuugggaaauacaucu

SEQ ID NO: 1503843 - RNA, 19 nt, Artificial Sequence
  Description of Artificial Sequence: Synthetic oligonucleotide
aaaugguuuuaaugcuccu

SEQ ID NO: 1503844 - RNA, 19 nt, Artificial Sequence
  Description of Artificial Sequence: Synthetic oligonucleotide
gaugguacgucccguucag

SEQ ID NO: 1503845 - RNA, 19 nt, Artificial Sequence
  Description of Artificial Sequence: Synthetic oligonucleotide
guuggagucauaggaacag

SEQ ID NO: 1503846 - RNA, 19 nt, Artificial Sequence
  Description of Artificial Sequence: Synthetic oligonucleotide
ccuguuuacaaauuccaag

SEQ ID NO: 1503847 - RNA, 19 nt, Artificial Sequence
  Description of Artificial Sequence: Synthetic oligonucleotide
guuagcacaggacaaucca

SEQ ID NO: 1503848 - RNA, 19 nt, Artificial Sequence
  Description of Artificial Sequence: Synthetic oligonucleotide
cagagcacaccaagaaucc

SEQ ID NO: 1503849 - RNA, 19 nt, Artificial Sequence
  Description of Artificial Sequence: Synthetic oligonucleotide
ugccuuauuuauguuuuag

SEQ ID NO: 1503850 - RNA, 19 nt, Artificial Sequence
  Description of Artificial Sequence: Synthetic oligonucleotide
accugaauacuugagguca

SEQ ID NO: 1503851 - RNA, 19 nt, Artificial Sequence
  Description of Artificial Sequence: Synthetic oligonucleotide
cacagcggcgucuggaugg

SEQ ID NO: 1503852 - RNA, 19 nt, Artificial Sequence
  Description of Artificial Sequence: Synthetic oligonucleotide
uguaccaaaugguuuuaau

SEQ ID NO: 1503853 - RNA, 19 nt, Artificial Sequence
  Description of Artificial Sequence: Synthetic oligonucleotide
ucgguugcguugaaggaga

SEQ ID NO: 1503854 - RNA, 19 nt, Artificial Sequence
  Description of Artificial Sequence: Synthetic oligonucleotide
auggugaugguacgucccg

SEQ ID NO: 1503855 - RNA, 19 nt, Artificial Sequence
  Description of Artificial Sequence: Synthetic oligonucleotide
uucuacgccauaagguggu

SEQ ID NO: 1503856 - RNA, 19 nt, Artificial Sequence
  Description of Artificial Sequence: Synthetic oligonucleotide
gcuauuaccagagcaagcc

SEQ ID NO: 1503857 - RNA, 19 nt, Artificial Sequence
  Description of Artificial Sequence: Synthetic oligonucleotide
gaggagguuggagucauag

SEQ ID NO: 1503858 - RNA, 19 nt, Artificial Sequence
  Description of Artificial Sequence: Synthetic oligonucleotide
gaacgcugaguaaagucag

SEQ ID NO: 1503859 - RNA, 19 nt, Artificial Sequence
  Description of Artificial Sequence: Synthetic oligonucleotide
ggauaaccaagguugauca

SEQ ID NO: 1503860 - RNA, 19 nt, Artificial Sequence
  Description of Artificial Sequence: Synthetic oligonucleotide
gaaggcacgcgcuucugug

SEQ ID NO: 1503861 - RNA, 19 nt, Artificial Sequence
  Description of Artificial Sequence: Synthetic oligonucleotide
gccuuauuuauguuuuagg

SEQ ID NO: 1503862 - RNA, 19 nt, Artificial Sequence
  Description of Artificial Sequence: Synthetic oligonucleotide
uaauauucuugucgagauc

SEQ ID NO: 1503863 - RNA, 19 nt, Artificial Sequence
  Description of Artificial Sequence: Synthetic oligonucleotide
gcagacaucacugaggcac

SEQ ID NO: 1503864 - RNA, 19 nt, Artificial Sequence
  Description of Artificial Sequence: Synthetic oligonucleotide
ugucgagaucccaggacug

SEQ ID NO: 1503865 - RNA, 19 nt, Artificial Sequence
  Description of Artificial Sequence: Synthetic oligonucleotide
cuucggcaggagaagacag

SEQ ID NO: 1503866 - RNA, 19 nt, Artificial Sequence
  Description of Artificial Sequence: Synthetic oligonucleotide
gaguuacugcuauuaccag

SEQ ID NO: 1503867 - RNA, 19 nt, Artificial Sequence
  Description of Artificial Sequence: Synthetic oligonucleotide
ugcaacgcaaauugcacuu

SEQ ID NO: 1503868 - RNA, 19 nt, Artificial Sequence
  Description of Artificial Sequence: Synthetic oligonucleotide
agguugaucacaagaagca

SEQ ID NO: 1503869 - RNA, 19 nt, Artificial Sequence
  Description of Artificial Sequence: Synthetic oligonucleotide
ucacccucggcauuucuac

SEQ ID NO: 1503870 - RNA, 19 nt, Artificial Sequence
  Description of Artificial Sequence: Synthetic oligonucleotide
auagaguccgcaagcauug

SEQ ID NO: 1503871 - RNA, 19 nt, Artificial Sequence
  Description of Artificial Sequence: Synthetic oligonucleotide
aggagguuggagucauagg

SEQ ID NO: 1503872 - RNA, 19 nt, Artificial Sequence
  Description of Artificial Sequence: Synthetic oligonucleotide
ucacaagaagcacgcccag

SEQ ID NO: 1503873 - RNA, 19 nt, Artificial Sequence
  Description of Artificial Sequence: Synthetic oligonucleotide
aggcacgcgcuucuguggc

SEQ ID NO: 1503874 - RNA, 19 nt, Artificial Sequence
  Description of Artificial Sequence: Synthetic oligonucleotide
uucugggauaaccaagguu

SEQ ID NO: 1503875 - RNA, 19 nt, Artificial Sequence
  Description of Artificial Sequence: Synthetic oligonucleotide
gccacuauaaugaacgcug

SEQ ID NO: 1503876 - RNA, 19 nt, Artificial Sequence
  Description of Artificial Sequence: Synthetic oligonucleotide
auauucuugucgagauccc

SEQ ID NO: 1503877 - RNA, 19 nt, Artificial Sequence
  Description of Artificial Sequence: Synthetic oligonucleotide
uaccagagcaagccuuugc

SEQ ID NO: 1503878 - RNA, 19 nt, Artificial Sequence
  Description of Artificial Sequence: Synthetic oligonucleotide
guagagaccgcacgcguug

SEQ ID NO: 1503879 - RNA, 19 nt, Artificial Sequence
  Description of Artificial Sequence: Synthetic oligonucleotide
uagcaaguggucgaggcac

SEQ ID NO: 1503880 - RNA, 19 nt, Artificial Sequence
  Description of Artificial Sequence: Synthetic oligonucleotide
uaacacugauugcugcaac

SEQ ID NO: 1503881 - RNA, 19 nt, Artificial Sequence
  Description of Artificial Sequence: Synthetic oligonucleotide
cuugucgagaucccaggac

SEQ ID NO: 1503882 - RNA, 19 nt, Artificial Sequence
  Description of Artificial Sequence: Synthetic oligonucleotide
aucaaucagguaugaagaa

SEQ ID NO: 1503883 - RNA, 19 nt, Artificial Sequence
  Description of Artificial Sequence: Synthetic oligonucleotide
agugaccucagaucagcca

SEQ ID NO: 1503884 - RNA, 19 nt, Artificial Sequence
  Description of Artificial Sequence: Synthetic oligonucleotide
aaauucagacagguggcau

SEQ ID NO: 1503885 - RNA, 19 nt, Artificial Sequence
  Description of Artificial Sequence: Synthetic oligonucleotide
aagccgccgugaugaaggc

SEQ ID NO: 1503886 - RNA, 19 nt, Artificial Sequence
  Description of Artificial Sequence: Synthetic oligonucleotide
auccaagccgccgugauga

SEQ ID NO: 1503887 - RNA, 19 nt, Artificial Sequence
  Description of Artificial Sequence: Synthetic oligonucleotide
gauaaccaagguugaucac

SEQ ID NO: 1503888 - RNA, 19 nt, Artificial Sequence
  Description of Artificial Sequence: Synthetic oligonucleotide
ugcguugaaggagaugugu

SEQ ID NO: 1503889 - RNA, 19 nt, Artificial Sequence
  Description of Artificial Sequence: Synthetic oligonucleotide
cacuauaaugaacgcugag

SEQ ID NO: 1503890 - RNA, 19 nt, Artificial Sequence
  Description of Artificial Sequence: Synthetic oligonucleotide
auagcaaguggucgaggca

SEQ ID NO: 1503891 - RNA, 19 nt, Artificial Sequence
  Description of Artificial Sequence: Synthetic oligonucleotide
aggacaauccaagccgccg

SEQ ID NO: 1503892 - RNA, 19 nt, Artificial Sequence
  Description of Artificial Sequence: Synthetic oligonucleotide
uuuccugguuugaaucccu

SEQ ID NO: 1503893 - RNA, 19 nt, Artificial Sequence
  Description of Artificial Sequence: Synthetic oligonucleotide
uauucuugucgagauccca

SEQ ID NO: 1503894 - RNA, 19 nt, Artificial Sequence
  Description of Artificial Sequence: Synthetic oligonucleotide
ugucgguugcguugaagga

SEQ ID NO: 1503895 - RNA, 19 nt, Artificial Sequence
  Description of Artificial Sequence: Synthetic oligonucleotide
aucacaagaagcacgccca

SEQ ID NO: 1503896 - RNA, 19 nt, Artificial Sequence
  Description of Artificial Sequence: Synthetic oligonucleotide
gacaccuauguagaggcca

SEQ ID NO: 1503897 - RNA, 19 nt, Artificial Sequence
  Description of Artificial Sequence: Synthetic oligonucleotide
ugcuacccuguuuacaaau

SEQ ID NO: 1503898 - RNA, 19 nt, Artificial Sequence
  Description of Artificial Sequence: Synthetic oligonucleotide
acgcugaguaaagucaguc

SEQ ID NO: 1503899 - RNA, 19 nt, Artificial Sequence
  Description of Artificial Sequence: Synthetic oligonucleotide
ggauugauggacaaauuca

SEQ ID NO: 1503900 - RNA, 19 nt, Artificial Sequence
  Description of Artificial Sequence: Synthetic oligonucleotide
auauagaguccgcaagcau

SEQ ID NO: 1503901 - RNA, 19 nt, Artificial Sequence
  Description of Artificial Sequence: Synthetic oligonucleotide
gaggggccgacugaggccg

SEQ ID NO: 1503902 - RNA, 19 nt, Artificial Sequence
  Description of Artificial Sequence: Synthetic oligonucleotide
agaagcacgcccaggcugg

SEQ ID NO: 1503903 - RNA, 19 nt, Artificial Sequence
  Description of Artificial Sequence: Synthetic oligonucleotide
gaauacuugaggucacugu

SEQ ID NO: 1503904 - RNA, 19 nt, Artificial Sequence
  Description of Artificial Sequence: Synthetic oligonucleotide
ccagagcacaccaagaauc

SEQ ID NO: 1503905 - RNA, 19 nt, Artificial Sequence
  Description of Artificial Sequence: Synthetic oligonucleotide
uggugcagucaucugaauu

SEQ ID NO: 1503906 - RNA, 19 nt, Artificial Sequence
  Description of Artificial Sequence: Synthetic oligonucleotide
aucagccacuauaaugaac

SEQ ID NO: 1503907 - RNA, 19 nt, Artificial Sequence
  Description of Artificial Sequence: Synthetic oligonucleotide
gaauccugccguacagagg

SEQ ID NO: 1503908 - RNA, 19 nt, Artificial Sequence
  Description of Artificial Sequence: Synthetic oligonucleotide
cugcuauuaccagagcaag

SEQ ID NO: 1503909 - RNA, 19 nt, Artificial Sequence
  Description of Artificial Sequence: Synthetic oligonucleotide
cuaauauucuugucgagau

SEQ ID NO: 1503910 - RNA, 19 nt, Artificial Sequence
  Description of Artificial Sequence: Synthetic oligonucleotide
ucauagcaaguggucgagg

SEQ ID NO: 1503911 - RNA, 19 nt, Artificial Sequence
  Description of Artificial Sequence: Synthetic oligonucleotide
gacaauccaagccgccgug

SEQ ID NO: 1503912 - RNA, 19 nt, Artificial Sequence
  Description of Artificial Sequence: Synthetic oligonucleotide
guuucauauagaguccgca

SEQ ID NO: 1503913 - RNA, 19 nt, Artificial Sequence
  Description of Artificial Sequence: Synthetic oligonucleotide
gucgguugcguugaaggag

SEQ ID NO: 1503914 - RNA, 19 nt, Artificial Sequence
  Description of Artificial Sequence: Synthetic oligonucleotide
ucccgcgcggcucuguaag

SEQ ID NO: 1503915 - RNA, 19 nt, Artificial Sequence
  Description of Artificial Sequence: Synthetic oligonucleotide
ucagaucagccacuauaau

SEQ ID NO: 1503916 - RNA, 19 nt, Artificial Sequence
  Description of Artificial Sequence: Synthetic oligonucleotide
aagaauccugccguacaga

SEQ ID NO: 1503917 - RNA, 19 nt, Artificial Sequence
  Description of Artificial Sequence: Synthetic oligonucleotide
uccgucuugcaaacuaaua

SEQ ID NO: 1503918 - RNA, 19 nt, Artificial Sequence
  Description of Artificial Sequence: Synthetic oligonucleotide
agggcgaguaagucggaug

SEQ ID NO: 1503919 - RNA, 19 nt, Artificial Sequence
  Description of Artificial Sequence: Synthetic oligonucleotide
gcggcucucggacagaucc

SEQ ID NO: 1503920 - RNA, 19 nt, Artificial Sequence
  Description of Artificial Sequence: Synthetic oligonucleotide
gaggccguucaucuugcug

SEQ ID NO: 1503921 - RNA, 19 nt, Artificial Sequence
  Description of Artificial Sequence: Synthetic oligonucleotide
guaagucggaugaugguga

SEQ ID NO: 1503922 - RNA, 19 nt, Artificial Sequence
  Description of Artificial Sequence: Synthetic oligonucleotide
caaucagguaugaagaaau

SEQ ID NO: 1503923 - RNA, 19 nt, Artificial Sequence
  Description of Artificial Sequence: Synthetic oligonucleotide
acagguucacccucggcau

SEQ ID NO: 1503924 - RNA, 19 nt, Artificial Sequence
  Description of Artificial Sequence: Synthetic oligonucleotide
ugaaggcacgcgcuucugu

SEQ ID NO: 1503925 - RNA, 19 nt, Artificial Sequence
  Description of Artificial Sequence: Synthetic oligonucleotide
ugcgcuggggccucguggc

SEQ ID NO: 1503926 - RNA, 19 nt, Artificial Sequence
  Description of Artificial Sequence: Synthetic oligonucleotide
ggugcagucaucugaauua

SEQ ID NO: 1503927 - RNA, 19 nt, Artificial Sequence
  Description of Artificial Sequence: Synthetic oligonucleotide
ugccguacagaggauguga

SEQ ID NO: 1503928 - RNA, 19 nt, Artificial Sequence
  Description of Artificial Sequence: Synthetic oligonucleotide
ucuuguuugcuacccuguu

SEQ ID NO: 1503929 - RNA, 19 nt, Artificial Sequence
  Description of Artificial Sequence: Synthetic oligonucleotide
ugaggggccgacugaggcc

SEQ ID NO: 1503930 - RNA, 19 nt, Artificial Sequence
  Description of Artificial Sequence: Synthetic oligonucleotide
aguccgcaagcauugcaca

SEQ ID NO: 1503931 - RNA, 19 nt, Artificial Sequence
  Description of Artificial Sequence: Synthetic oligonucleotide
cgaguaagucggaugaugg

SEQ ID NO: 1503932 - RNA, 19 nt, Artificial Sequence
  Description of Artificial Sequence: Synthetic oligonucleotide
gaguccgcaagcauugcac

SEQ ID NO: 1503933 - RNA, 19 nt, Artificial Sequence
  Description of Artificial Sequence: Synthetic oligonucleotide
uguagagaccgcacgcguu

SEQ ID NO: 1503934 - RNA, 19 nt, Artificial Sequence
  Description of Artificial Sequence: Synthetic oligonucleotide
cagacaucacugaggcacc

SEQ ID NO: 1503935 - RNA, 19 nt, Artificial Sequence
  Description of Artificial Sequence: Synthetic oligonucleotide
cccauggaguuucauauag

SEQ ID NO: 1503936 - RNA, 19 nt, Artificial Sequence
  Description of Artificial Sequence: Synthetic oligonucleotide
agaguccgcaagcauugca

SEQ ID NO: 1503937 - RNA, 19 nt, Artificial Sequence
  Description of Artificial Sequence: Synthetic oligonucleotide
auucugggauaaccaaggu

SEQ ID NO: 1503938 - RNA, 19 nt, Artificial Sequence
  Description of Artificial Sequence: Synthetic oligonucleotide
ucagaguuggugcccucuc

SEQ ID NO: 1503939 - RNA, 19 nt, Artificial Sequence
  Description of Artificial Sequence: Synthetic oligonucleotide
uguuugcuacccuguuuac

SEQ ID NO: 1503940 - RNA, 19 nt, Artificial Sequence
  Description of Artificial Sequence: Synthetic oligonucleotide
gaccgcacgcguugcacag

SEQ ID NO: 1503941 - RNA, 19 nt, Artificial Sequence
  Description of Artificial Sequence: Synthetic oligonucleotide
accuauguagaggccaucu

SEQ ID NO: 1503942 - RNA, 19 nt, Artificial Sequence
  Description of Artificial Sequence: Synthetic oligonucleotide
uucacccucggcauuucua

SEQ ID NO: 1503943 - RNA, 19 nt, Artificial Sequence
  Description of Artificial Sequence: Synthetic oligonucleotide
uuccgucuugcaaacuaau

SEQ ID NO: 1503944 - RNA, 19 nt, Artificial Sequence
  Description of Artificial Sequence: Synthetic oligonucleotide
agcggcgucuggauggagc

SEQ ID NO: 1503945 - RNA, 19 nt, Artificial Sequence
  Description of Artificial Sequence: Synthetic oligonucleotide
ugguuuuaaugcuccucuc

SEQ ID NO: 1503946 - RNA, 19 nt, Artificial Sequence
  Description of Artificial Sequence: Synthetic oligonucleotide
ggcauuucuacgccauaag

SEQ ID NO: 1503947 - RNA, 19 nt, Artificial Sequence
  Description of Artificial Sequence: Synthetic oligonucleotide
cauauagaguccgcaagca

SEQ ID NO: 1503948 - RNA, 19 nt, Artificial Sequence
  Description of Artificial Sequence: Synthetic oligonucleotide
ucgaggcaccccauggagu

SEQ ID NO: 1503949 - RNA, 19 nt, Artificial Sequence
  Description of Artificial Sequence: Synthetic oligonucleotide
agccacuauaaugaacgcu

SEQ ID NO: 1503950 - RNA, 19 nt, Artificial Sequence
  Description of Artificial Sequence: Synthetic oligonucleotide
acccuguuuacaaauucca

SEQ ID NO: 1503951 - RNA, 19 nt, Artificial Sequence
  Description of Artificial Sequence: Synthetic oligonucleotide
aaucagguaugaagaaauu

SEQ ID NO: 1503952 - RNA, 19 nt, Artificial Sequence
  Description of Artificial Sequence: Synthetic oligonucleotide
gaugugacuucggcaggag

SEQ ID NO: 1503953 - RNA, 19 nt, Artificial Sequence
  Description of Artificial Sequence: Synthetic oligonucleotide
ccaaaugguuuuaaugcuc

SEQ ID NO: 1503954 - RNA, 19 nt, Artificial Sequence
  Description of Artificial Sequence: Synthetic oligonucleotide
ugacuucggcaggagaaga

SEQ ID NO: 1503955 - RNA, 19 nt, Artificial Sequence
  Description of Artificial Sequence: Synthetic oligonucleotide
ugcagcaccggcguuucga

SEQ ID NO: 1503956 - RNA, 19 nt, Artificial Sequence
  Description of Artificial Sequence: Synthetic oligonucleotide
gugcagucaucugaauuag

SEQ ID NO: 1503957 - RNA, 19 nt, Artificial Sequence
  Description of Artificial Sequence: Synthetic oligonucleotide
agucauaggaacagaguua

SEQ ID NO: 1503958 - RNA, 19 nt, Artificial Sequence
  Description of Artificial Sequence: Synthetic oligonucleotide
cuacgccauaagguggugg

SEQ ID NO: 1503959 - RNA, 19 nt, Artificial Sequence
  Description of Artificial Sequence: Synthetic oligonucleotide
gaugaggggccgacugagg

SEQ ID NO: 1503960 - RNA, 19 nt, Artificial Sequence
  Description of Artificial Sequence: Synthetic oligonucleotide
ccuuauuuauguuuuaggu

SEQ ID NO: 1503961 - RNA, 19 nt, Artificial Sequence
  Description of Artificial Sequence: Synthetic oligonucleotide
guacagaggaugugacuuc

SEQ ID NO: 1503962 - RNA, 19 nt, Artificial Sequence
  Description of Artificial Sequence: Synthetic oligonucleotide
agcaaguggucgaggcacc

SEQ ID NO: 1503963 - RNA, 19 nt, Artificial Sequence
  Description of Artificial Sequence: Synthetic oligonucleotide
ugauugcugcaacgcaaau

SEQ ID NO: 1503964 - RNA, 19 nt, Artificial Sequence
  Description of Artificial Sequence: Synthetic oligonucleotide
cuggccucuugucaucuug

SEQ ID NO: 1503965 - RNA, 19 nt, Artificial Sequence
  Description of Artificial Sequence: Synthetic oligonucleotide
cauguagggcgaguaaguc

SEQ ID NO: 1503966 - RNA, 19 nt, Artificial Sequence
  Description of Artificial Sequence: Synthetic oligonucleotide
gugacuucggcaggagaag

SEQ ID NO: 1503967 - RNA, 19 nt, Artificial Sequence
  Description of Artificial Sequence: Synthetic oligonucleotide
cagccacuauaaugaacgc

SEQ ID NO: 1503968 - RNA, 19 nt, Artificial Sequence
  Description of Artificial Sequence: Synthetic oligonucleotide
caggacaauccaagccgcc

SEQ ID NO: 1503969 - RNA, 19 nt, Artificial Sequence
  Description of Artificial Sequence: Synthetic oligonucleotide
agagcaagccuuugccuua

SEQ ID NO: 1503970 - RNA, 19 nt, Artificial Sequence
  Description of Artificial Sequence: Synthetic oligonucleotide
ugaucacaagaagcacgcc

SEQ ID NO: 1503971 - RNA, 19 nt, Artificial Sequence
  Description of Artificial Sequence: Synthetic oligonucleotide
ucgagaucccaggacugca

SEQ ID NO: 1503972 - RNA, 19 nt, Artificial Sequence
  Description of Artificial Sequence: Synthetic oligonucleotide
uaagucggaugauggugau

SEQ ID NO: 1503973 - RNA, 19 nt, Artificial Sequence
  Description of Artificial Sequence: Synthetic oligonucleotide
augcauugaaggaauguua

SEQ ID NO: 1503974 - RNA, 19 nt, Artificial Sequence
  Description of Artificial Sequence: Synthetic oligonucleotide
gcauugaaggaauguuaug

SEQ ID NO: 1503975 - RNA, 19 nt, Artificial Sequence
  Description of Artificial Sequence: Synthetic oligonucleotide
gaucagccacuauaaugaa

SEQ ID NO: 1503976 - RNA, 19 nt, Artificial Sequence
  Description of Artificial Sequence: Synthetic oligonucleotide
gagguuggagucauaggaa

SEQ ID NO: 1503977 - RNA, 19 nt, Artificial Sequence
  Description of Artificial Sequence: Synthetic oligonucleotide
aagucggaugauggugaug

SEQ ID NO: 1503978 - RNA, 19 nt, Artificial Sequence
  Description of Artificial Sequence: Synthetic oligonucleotide
acaucucuugcaaaacaaa

SEQ ID NO: 1503979 - RNA, 19 nt, Artificial Sequence
  Description of Artificial Sequence: Synthetic oligonucleotide
aacgcaaauugcacuuaaa

SEQ ID NO: 1503980 - RNA, 19 nt, Artificial Sequence
  Description of Artificial Sequence: Synthetic oligonucleotide
guaagcugugcagcaccgg

SEQ ID NO: 1503981 - RNA, 19 nt, Artificial Sequence
  Description of Artificial Sequence: Synthetic oligonucleotide
cacccucggcauuucuacg

SEQ ID NO: 1503982 - RNA, 19 nt, Artificial Sequence
  Description of Artificial Sequence: Synthetic oligonucleotide
accggcguuucgaaggguc

SEQ ID NO: 1503983 - RNA, 19 nt, Artificial Sequence
  Description of Artificial Sequence: Synthetic oligonucleotide
uuaccagagcaagccuuug

SEQ ID NO: 1503984 - RNA, 19 nt, Artificial Sequence
  Description of Artificial Sequence: Synthetic oligonucleotide
aucuuguuugcuacccugu

SEQ ID NO: 1503985 - RNA, 19 nt, Artificial Sequence
  Description of Artificial Sequence: Synthetic oligonucleotide
aacgcugaguaaagucagu

SEQ ID NO: 1503986 - RNA, 19 nt, Artificial Sequence
  Description of Artificial Sequence: Synthetic oligonucleotide
cugcgcuggggccucgugg

SEQ ID NO: 1503987 - RNA, 19 nt, Artificial Sequence
  Description of Artificial Sequence: Synthetic oligonucleotide
agaccgcacgcguugcaca

SEQ ID NO: 1503988 - RNA, 19 nt, Artificial Sequence
  Description of Artificial Sequence: Synthetic oligonucleotide
cacacagguucacccucgg

SEQ ID NO: 1503989 - RNA, 19 nt, Artificial Sequence
  Description of Artificial Sequence: Synthetic oligonucleotide
aggcaccccauggaguuuc

SEQ ID NO: 1503990 - RNA, 19 nt, Artificial Sequence
  Description of Artificial Sequence: Synthetic oligonucleotide
cugauugcugcaacgcaaa

SEQ ID NO: 1503991 - RNA, 19 nt, Artificial Sequence
  Description of Artificial Sequence: Synthetic oligonucleotide
guccgcaagcauugcacac

SEQ ID NO: 1503992 - RNA, 19 nt, Artificial Sequence
  Description of Artificial Sequence: Synthetic oligonucleotide
auuagaagaggaggagguu

SEQ ID NO: 1503993 - RNA, 19 nt, Artificial Sequence
  Description of Artificial Sequence: Synthetic oligonucleotide
gggcgaguaagucggauga

SEQ ID NO: 1503994 - RNA, 19 nt, Artificial Sequence
  Description of Artificial Sequence: Synthetic oligonucleotide
gguccggcuggccaggcag

SEQ ID NO: 1503995 - RNA, 19 nt, Artificial Sequence
  Description of Artificial Sequence: Synthetic oligonucleotide
gaguaagucggaugauggu

SEQ ID NO: 1503996 - RNA, 19 nt, Artificial Sequence
  Description of Artificial Sequence: Synthetic oligonucleotide
caggcgucagcggagcccc

SEQ ID NO: 1503997 - RNA, 19 nt, Artificial Sequence
  Description of Artificial Sequence: Synthetic oligonucleotide
gcaucuguccauuauaauu

SEQ ID NO: 1503998 - RNA, 19 nt, Artificial Sequence
  Description of Artificial Sequence: Synthetic oligonucleotide
uugccuuauuuauguuuua

SEQ ID NO: 1503999 - RNA, 19 nt, Artificial Sequence
  Description of Artificial Sequence: Synthetic oligonucleotide
ugcagacaucacugaggca

SEQ ID NO: 1504000 - RNA, 19 nt, Artificial Sequence
  Description of Artificial Sequence: Synthetic oligonucleotide
cacugauugcugcaacgca

SEQ ID NO: 1504001 - RNA, 19 nt, Artificial Sequence
  Description of Artificial Sequence: Synthetic oligonucleotide
agccuuugccuuauuuaug

SEQ ID NO: 1504002 - RNA, 19 nt, Artificial Sequence
  Description of Artificial Sequence: Synthetic oligonucleotide
gucgagaucccaggacugc

SEQ ID NO: 1504003 - RNA, 19 nt, Artificial Sequence
  Description of Artificial Sequence: Synthetic oligonucleotide
gacccucagagcccuccug

SEQ ID NO: 1504004 - RNA, 19 nt, Artificial Sequence
  Description of Artificial Sequence: Synthetic oligonucleotide
ugugcacaucaaucaggua

SEQ ID NO: 1504005 - RNA, 19 nt, Artificial Sequence
  Description of Artificial Sequence: Synthetic oligonucleotide
cucucggacagauccucca

SEQ ID NO: 1504006 - RNA, 19 nt, Artificial Sequence
  Description of Artificial Sequence: Synthetic oligonucleotide
uucagacagguggcaugag

SEQ ID NO: 1504007 - RNA, 19 nt, Artificial Sequence
  Description of Artificial Sequence: Synthetic oligonucleotide
aagcacgcccaggcuggcg

SEQ ID NO: 1504008 - RNA, 19 nt, Artificial Sequence
  Description of Artificial Sequence: Synthetic oligonucleotide
gauguaccaaaugguuuua

SEQ ID NO: 1504009 - RNA, 19 nt, Artificial Sequence
  Description of Artificial Sequence: Synthetic oligonucleotide
caaguggucgaggcacccc

SEQ ID NO: 1504010 - RNA, 19 nt, Artificial Sequence
  Description of Artificial Sequence: Synthetic oligonucleotide
acgcacucgcggcucucgg

SEQ ID NO: 1504011 - RNA, 19 nt, Artificial Sequence
  Description of Artificial Sequence: Synthetic oligonucleotide
cucguggcaccggggagcg

SEQ ID NO: 1504012 - RNA, 19 nt, Artificial Sequence
  Description of Artificial Sequence: Synthetic oligonucleotide
caacgcaaauugcacuuaa

SEQ ID NO: 1504013 - RNA, 19 nt, Artificial Sequence
  Description of Artificial Sequence: Synthetic oligonucleotide
acaauccaagccgccguga

SEQ ID NO: 1504014 - RNA, 19 nt, Artificial Sequence
  Description of Artificial Sequence: Synthetic oligonucleotide
ucuacgccauaagguggug

SEQ ID NO: 1504015 - RNA, 19 nt, Artificial Sequence
  Description of Artificial Sequence: Synthetic oligonucleotide
ggaacagaguuacugcuau

SEQ ID NO: 1504016 - RNA, 19 nt, Artificial Sequence
  Description of Artificial Sequence: Synthetic oligonucleotide
ucggcauuucuacgccaua

SEQ ID NO: 1504017 - RNA, 19 nt, Artificial Sequence
  Description of Artificial Sequence: Synthetic oligonucleotide
uucgaaggguccggcuggc

SEQ ID NO: 1504018 - RNA, 19 nt, Artificial Sequence
  Description of Artificial Sequence: Synthetic oligonucleotide
agacccucagagcccuccu

SEQ ID NO: 1504019 - RNA, 19 nt, Artificial Sequence
  Description of Artificial Sequence: Synthetic oligonucleotide
uggugaugguacgucccgu

SEQ ID NO: 1504020 - RNA, 19 nt, Artificial Sequence
  Description of Artificial Sequence: Synthetic oligonucleotide
cccauguagggcgaguaag

SEQ ID NO: 1504021 - RNA, 19 nt, Artificial Sequence
  Description of Artificial Sequence: Synthetic oligonucleotide
guuucguuuccugguuuga

SEQ ID NO: 1504022 - RNA, 19 nt, Artificial Sequence
  Description of Artificial Sequence: Synthetic oligonucleotide
cuauuaccagagcaagccu

SEQ ID NO: 1504023 - RNA, 19 nt, Artificial Sequence
  Description of Artificial Sequence: Synthetic oligonucleotide
ccgugaugaaggcacgcgc

SEQ ID NO: 1504024 - RNA, 19 nt, Artificial Sequence
  Description of Artificial Sequence: Synthetic oligonucleotide
ccauuauaauuccgucuug

SEQ ID NO: 1504025 - RNA, 19 nt, Artificial Sequence
  Description of Artificial Sequence: Synthetic oligonucleotide
gcggcgucuggauggagcc

SEQ ID NO: 1504026 - RNA, 19 nt, Artificial Sequence
  Description of Artificial Sequence: Synthetic oligonucleotide
acaccuauguagaggccau

SEQ ID NO: 1504027 - RNA, 19 nt, Artificial Sequence
  Description of Artificial Sequence: Synthetic oligonucleotide
cugcaacgcaaauugcacu

SEQ ID NO: 1504028 - RNA, 19 nt, Artificial Sequence
  Description of Artificial Sequence: Synthetic oligonucleotide
agcaagcuucuugggaaau

SEQ ID NO: 1504029 - RNA, 19 nt, Artificial Sequence
  Description of Artificial Sequence: Synthetic oligonucleotide
ggcguuucgaaggguccgg

SEQ ID NO: 1504030 - RNA, 19 nt, Artificial Sequence
  Description of Artificial Sequence: Synthetic oligonucleotide
uagggcgaguaagucggau

SEQ ID NO: 1504031 - RNA, 19 nt, Artificial Sequence
  Description of Artificial Sequence: Synthetic oligonucleotide
ccgcaagcauugcacacag

SEQ ID NO: 1504032 - RNA, 19 nt, Artificial Sequence
  Description of Artificial Sequence: Synthetic oligonucleotide
gucgccacagcggcgucug

SEQ ID NO: 1504033 - RNA, 19 nt, Artificial Sequence
  Description of Artificial Sequence: Synthetic oligonucleotide
gcacucgcggcucucggac

SEQ ID NO: 1504034 - RNA, 19 nt, Artificial Sequence
  Description of Artificial Sequence: Synthetic oligonucleotide
uccggcuggccaggcaggc

SEQ ID NO: 1504035 - RNA, 19 nt, Artificial Sequence
  Description of Artificial Sequence: Synthetic oligonucleotide
gaguaaagucagucagcau

SEQ ID NO: 1504036 - RNA, 19 nt, Artificial Sequence
  Description of Artificial Sequence: Synthetic oligonucleotide
gagcccuccuggccucuug

SEQ ID NO: 1504037 - RNA, 19 nt, Artificial Sequence
  Description of Artificial Sequence: Synthetic oligonucleotide
caagcauugcacacagguu

SEQ ID NO: 1504038 - RNA, 19 nt, Artificial Sequence
  Description of Artificial Sequence: Synthetic oligonucleotide
ucgccacagcggcgucugg

SEQ ID NO: 1504039 - RNA, 19 nt, Artificial Sequence
  Description of Artificial Sequence: Synthetic oligonucleotide
accucagaucagccacuau

SEQ ID NO: 1504040 - RNA, 19 nt, Artificial Sequence
  Description of Artificial Sequence: Synthetic oligonucleotide
cugccguacagaggaugug

SEQ ID NO: 1504041 - RNA, 19 nt, Artificial Sequence
  Description of Artificial Sequence: Synthetic oligonucleotide
ucgaaggguccggcuggcc

SEQ ID NO: 1504042 - RNA, 19 nt, Artificial Sequence
  Description of Artificial Sequence: Synthetic oligonucleotide
gaagcacgcccaggcuggc

SEQ ID NO: 1504043 - RNA, 19 nt, Artificial Sequence
  Description of Artificial Sequence: Synthetic oligonucleotide
ccggcguuucgaagggucc

SEQ ID NO: 1504044 - RNA, 19 nt, Artificial Sequence
  Description of Artificial Sequence: Synthetic oligonucleotide
cgcaguucacgcacucgcg

SEQ ID NO: 1504045 - RNA, 19 nt, Artificial Sequence
  Description of Artificial Sequence: Synthetic oligonucleotide
gguugcguugaaggagaug

SEQ ID NO: 1504046 - RNA, 19 nt, Artificial Sequence
  Description of Artificial Sequence: Synthetic oligonucleotide
ccacuauaaugaacgcuga

SEQ ID NO: 1504047 - RNA, 19 nt, Artificial Sequence
  Description of Artificial Sequence: Synthetic oligonucleotide
cccucggcauuucuacgcc

SEQ ID NO: 1504048 - RNA, 19 nt, Artificial Sequence
  Description of Artificial Sequence: Synthetic oligonucleotide
cuguagagaccgcacgcgu

SEQ ID NO: 1504049 - RNA, 19 nt, Artificial Sequence
  Description of Artificial Sequence: Synthetic oligonucleotide
ggacaauccaagccgccgu

SEQ ID NO: 1504050 - RNA, 19 nt, Artificial Sequence
  Description of Artificial Sequence: Synthetic oligonucleotide
guccggcuggccaggcagg

SEQ ID NO: 1504051 - RNA, 19 nt, Artificial Sequence
  Description of Artificial Sequence: Synthetic oligonucleotide
ccgucuugcaaacuaauau

SEQ ID NO: 1504052 - RNA, 19 nt, Artificial Sequence
  Description of Artificial Sequence: Synthetic oligonucleotide
uccaagccgccgugaugaa

SEQ ID NO: 1504053 - RNA, 19 nt, Artificial Sequence
  Description of Artificial Sequence: Synthetic oligonucleotide
cagccuccgggauguacca

SEQ ID NO: 1504054 - RNA, 19 nt, Artificial Sequence
  Description of Artificial Sequence: Synthetic oligonucleotide
gaccucagaucagccacua

SEQ ID NO: 1504055 - RNA, 19 nt, Artificial Sequence
  Description of Artificial Sequence: Synthetic oligonucleotide
cucggcauuucuacgccau

SEQ ID NO: 1504056 - RNA, 19 nt, Artificial Sequence
  Description of Artificial Sequence: Synthetic oligonucleotide
ccauggaguuucauauaga

SEQ ID NO: 1504057 - RNA, 19 nt, Artificial Sequence
  Description of Artificial Sequence: Synthetic oligonucleotide
gccguacagaggaugugac

SEQ ID NO: 1504058 - RNA, 19 nt, Artificial Sequence
  Description of Artificial Sequence: Synthetic oligonucleotide
gcugucgguugcguugaag

SEQ ID NO: 1504059 - RNA, 19 nt, Artificial Sequence
  Description of Artificial Sequence: Synthetic oligonucleotide
uggggccucguggcaccgg

SEQ ID NO: 1504060 - RNA, 19 nt, Artificial Sequence
  Description of Artificial Sequence: Synthetic oligonucleotide
ucgcggcucucggacagau

SEQ ID NO: 1504061 - RNA, 19 nt, Artificial Sequence
  Description of Artificial Sequence: Synthetic oligonucleotide
gcuggggccucguggcacc

SEQ ID NO: 1504062 - RNA, 19 nt, Artificial Sequence
  Description of Artificial Sequence: Synthetic oligonucleotide
gugcagcaccggcguuucg

SEQ ID NO: 1504063 - RNA, 19 nt, Artificial Sequence
  Description of Artificial Sequence: Synthetic oligonucleotide
cuggauugauggacaaauu

SEQ ID NO: 1504064 - RNA, 19 nt, Artificial Sequence
  Description of Artificial Sequence: Synthetic oligonucleotide
caccuauguagaggccauc

SEQ ID NO: 1504065 - RNA, 19 nt, Artificial Sequence
  Description of Artificial Sequence: Synthetic oligonucleotide
ggcucucggacagauccuc

SEQ ID NO: 1504066 - RNA, 19 nt, Artificial Sequence
  Description of Artificial Sequence: Synthetic oligonucleotide
cgcugaguaaagucaguca

SEQ ID NO: 1504067 - RNA, 19 nt, Artificial Sequence
  Description of Artificial Sequence: Synthetic oligonucleotide
ccgacugaggccguucauc

SEQ ID NO: 1504068 - RNA, 19 nt, Artificial Sequence
  Description of Artificial Sequence: Synthetic oligonucleotide
caccaagaauccugccgua

SEQ ID NO: 1504069 - RNA, 19 nt, Artificial Sequence
  Description of Artificial Sequence: Synthetic oligonucleotide
cugaauacuugaggucacu

SEQ ID NO: 1504070 - RNA, 19 nt, Artificial Sequence
  Description of Artificial Sequence: Synthetic oligonucleotide
gcucucggacagauccucc

SEQ ID NO: 1504071 - RNA, 19 nt, Artificial Sequence
  Description of Artificial Sequence: Synthetic oligonucleotide
cacucgcggcucucggaca

SEQ ID NO: 1504072 - RNA, 19 nt, Artificial Sequence
  Description of Artificial Sequence: Synthetic oligonucleotide
cucagaguuggugcccucu

SEQ ID NO: 1504073 - RNA, 19 nt, Artificial Sequence
  Description of Artificial Sequence: Synthetic oligonucleotide
guucacccucggcauuucu

SEQ ID NO: 1504074 - RNA, 19 nt, Artificial Sequence
  Description of Artificial Sequence: Synthetic oligonucleotide
aguggucgaggcaccccau

SEQ ID NO: 1504075 - RNA, 19 nt, Artificial Sequence
  Description of Artificial Sequence: Synthetic oligonucleotide
cuggggccucguggcaccg

SEQ ID NO: 1504076 - RNA, 19 nt, Artificial Sequence
  Description of Artificial Sequence: Synthetic oligonucleotide
gccagagcacaccaagaau

SEQ ID NO: 1504077 - RNA, 19 nt, Artificial Sequence
  Description of Artificial Sequence: Synthetic oligonucleotide
ggccgacugaggccguuca

SEQ ID NO: 1504078 - RNA, 19 nt, Artificial Sequence
  Description of Artificial Sequence: Synthetic oligonucleotide
ccgggauguaccaaauggu

SEQ ID NO: 1504079 - RNA, 19 nt, Artificial Sequence
  Description of Artificial Sequence: Synthetic oligonucleotide
ggugaugguacgucccguu

SEQ ID NO: 1504080 - RNA, 19 nt, Artificial Sequence
  Description of Artificial Sequence: Synthetic oligonucleotide
ccaagccgccgugaugaag

SEQ ID NO: 1504081 - RNA, 19 nt, Artificial Sequence
  Description of Artificial Sequence: Synthetic oligonucleotide
ggcaggcgucagcggagcc

SEQ ID NO: 1504082 - RNA, 19 nt, Artificial Sequence
  Description of Artificial Sequence: Synthetic oligonucleotide
cccggaggcugucgguugc

SEQ ID NO: 1504083 - RNA, 19 nt, Artificial Sequence
  Description of Artificial Sequence: Synthetic oligonucleotide
gcguuucgaaggguccggc

SEQ ID NO: 1504084 - RNA, 19 nt, Artificial Sequence
  Description of Artificial Sequence: Synthetic oligonucleotide
ccgccgugaugaaggcacg

SEQ ID NO: 1504085 - RNA, 19 nt, Artificial Sequence
  Description of Artificial Sequence: Synthetic oligonucleotide
ccugccguacagaggaugu

SEQ ID NO: 1504086 - RNA, 19 nt, Artificial Sequence
  Description of Artificial Sequence: Synthetic oligonucleotide
ggacugcacucagccuccg

SEQ ID NO: 1504087 - RNA, 19 nt, Artificial Sequence
  Description of Artificial Sequence: Synthetic oligonucleotide
guagggcgaguaagucgga

SEQ ID NO: 1504088 - RNA, 19 nt, Artificial Sequence
  Description of Artificial Sequence: Synthetic oligonucleotide
ucguggcaccggggagcgg

SEQ ID NO: 1504089 - RNA, 19 nt, Artificial Sequence
  Description of Artificial Sequence: Synthetic oligonucleotide
cggcguuucgaaggguccg

SEQ ID NO: 1504090 - RNA, 19 nt, Artificial Sequence
  Description of Artificial Sequence: Synthetic oligonucleotide
gcaacgcaaauugcacuua

SEQ ID NO: 1504091 - RNA, 19 nt, Artificial Sequence
  Description of Artificial Sequence: Synthetic oligonucleotide
cguacagaggaugugacuu

SEQ ID NO: 1504092 - RNA, 19 nt, Artificial Sequence
  Description of Artificial Sequence: Synthetic oligonucleotide
cgaaggguccggcuggcca

SEQ ID NO: 1504093 - RNA, 19 nt, Artificial Sequence
  Description of Artificial Sequence: Synthetic oligonucleotide
ggccguucaucuugcugua

SEQ ID NO: 1504094 - RNA, 19 nt, Artificial Sequence
  Description of Artificial Sequence: Synthetic oligonucleotide
ccucggcauuucuacgcca

SEQ ID NO: 1504095 - RNA, 19 nt, Artificial Sequence
  Description of Artificial Sequence: Synthetic oligonucleotide
ccccggaggcugucgguug

SEQ ID NO: 1504096 - RNA, 19 nt, Artificial Sequence
  Description of Artificial Sequence: Synthetic oligonucleotide
cccgcgcggcucuguaagc

SEQ ID NO: 1504097 - RNA, 19 nt, Artificial Sequence
  Description of Artificial Sequence: Synthetic oligonucleotide
cucccgcgcggcucuguaa

SEQ ID NO: 1504098 - RNA, 19 nt, Artificial Sequence
  Description of Artificial Sequence: Synthetic oligonucleotide
gcuacccuguuuacaaauu

SEQ ID NO: 1504099 - RNA, 19 nt, Artificial Sequence
  Description of Artificial Sequence: Synthetic oligonucleotide
ccagccccggaggcugucg

SEQ ID NO: 1504100 - RNA, 19 nt, Artificial Sequence
  Description of Artificial Sequence: Synthetic oligonucleotide
ccggaggcugucgguugcg

SEQ ID NO: 1504101 - RNA, 19 nt, Artificial Sequence
  Description of Artificial Sequence: Synthetic oligonucleotide
ccguacagaggaugugacu

SEQ ID NO: 1504102 - RNA, 19 nt, Artificial Sequence
  Description of Artificial Sequence: Synthetic oligonucleotide
cggcauuucuacgccauaa

SEQ ID NO: 1504103 - RNA, 19 nt, Artificial Sequence
  Description of Artificial Sequence: Synthetic oligonucleotide
cgccgugaugaaggcacgc

SEQ ID NO: 1504104 - RNA, 19 nt, Artificial Sequence
  Description of Artificial Sequence: Synthetic oligonucleotide
cacgcccaggcuggcggga

SEQ ID NO: 1504105 - RNA, 19 nt, Artificial Sequence
  Description of Artificial Sequence: Synthetic oligonucleotide
ccccauguagggcgaguaa

SEQ ID NO: 1504106 - RNA, 19 nt, Artificial Sequence
  Description of Artificial Sequence: Synthetic oligonucleotide
cagguucacccucggcauu

SEQ ID NO: 1504107 - RNA, 19 nt, Artificial Sequence
  Description of Artificial Sequence: Synthetic oligonucleotide
gggccgacugaggccguuc

SEQ ID NO: 1504108 - RNA, 19 nt, Artificial Sequence
  Description of Artificial Sequence: Synthetic oligonucleotide
cgaggcaccccauggaguu

SEQ ID NO: 1504109 - RNA, 19 nt, Artificial Sequence
  Description of Artificial Sequence: Synthetic oligonucleotide
ggcaccccauggaguuuca

SEQ ID NO: 1504110 - RNA, 19 nt, Artificial Sequence
  Description of Artificial Sequence: Synthetic oligonucleotide
ggcgaguaagucggaugau

SEQ ID NO: 1504111 - RNA, 19 nt, Artificial Sequence
  Description of Artificial Sequence: Synthetic oligonucleotide
ggggcucccgcgcggcucu

SEQ ID NO: 1504112 - RNA, 19 nt, Artificial Sequence
  Description of Artificial Sequence: Synthetic oligonucleotide
cggcgucuggauggagccg

SEQ ID NO: 1504113 - RNA, 19 nt, Artificial Sequence
  Description of Artificial Sequence: Synthetic oligonucleotide
cguuucgaaggguccggcu

SEQ ID NO: 1504114 - RNA, 19 nt, Artificial Sequence
  Description of Artificial Sequence: Synthetic oligonucleotide
gcucccgcgcggcucugua

SEQ ID NO: 1504115 - RNA, 19 nt, Artificial Sequence
  Description of Artificial Sequence: Synthetic oligonucleotide
aggggccgacugaggccgu

SEQ ID NO: 1504116 - RNA, 19 nt, Artificial Sequence
  Description of Artificial Sequence: Synthetic oligonucleotide
ccuccgggauguaccaaau

SEQ ID NO: 1504117 - RNA, 19 nt, Artificial Sequence
  Description of Artificial Sequence: Synthetic oligonucleotide
cgcacucgcggcucucgga

SEQ ID NO: 1504118 - RNA, 19 nt, Artificial Sequence
  Description of Artificial Sequence: Synthetic oligonucleotide
gcuggcgggagcaggccau

SEQ ID NO: 1504119 - RNA, 19 nt, Artificial Sequence
  Description of Artificial Sequence: Synthetic oligonucleotide
gcgucuggauggagccgca

SEQ ID NO: 1504120 - RNA, 19 nt, Artificial Sequence
  Description of Artificial Sequence: Synthetic oligonucleotide
gccgacugaggccguucau

SEQ ID NO: 1504121 - RNA, 19 nt, Artificial Sequence
  Description of Artificial Sequence: Synthetic oligonucleotide
cgcggcucucggacagauc

SEQ ID NO: 1504122 - RNA, 19 nt, Artificial Sequence
  Description of Artificial Sequence: Synthetic oligonucleotide
caccggcguuucgaagggu

SEQ ID NO: 1504123 - RNA, 19 nt, Artificial Sequence
  Description of Artificial Sequence: Synthetic oligonucleotide
ccgcgcggcucuguaagcu

SEQ ID NO: 1504124 - RNA, 19 nt, Artificial Sequence
  Description of Artificial Sequence: Synthetic oligonucleotide
cggcucucggacagauccu

SEQ ID NO: 1504125 - RNA, 19 nt, Artificial Sequence
  Description of Artificial Sequence: Synthetic oligonucleotide
cgguugcguugaaggagau

SEQ ID NO: 1504126 - RNA, 19 nt, Artificial Sequence
  Description of Artificial Sequence: Synthetic oligonucleotide
ggggccgacugaggccguu

SEQ ID NO: 1504127 - RNA, 19 nt, Artificial Sequence
  Description of Artificial Sequence: Synthetic oligonucleotide
uauagaaucagguuuauag

SEQ ID NO: 1504128 - RNA, 19 nt, Artificial Sequence
  Description of Artificial Sequence: Synthetic oligonucleotide
aaucuuaacaaauccaauc

SEQ ID NO: 1504129 - RNA, 19 nt, Artificial Sequence
  Description of Artificial Sequence: Synthetic oligonucleotide
aguauauuuuaacacaugg

SEQ ID NO: 1504130 - RNA, 19 nt, Artificial Sequence
  Description of Artificial Sequence: Synthetic oligonucleotide
aucuuaacaaauccaaucc

SEQ ID NO: 1504131 - RNA, 19 nt, Artificial Sequence
  Description of Artificial Sequence: Synthetic oligonucleotide
aauggcaacauuuuguucu

SEQ ID NO: 1504132 - RNA, 19 nt, Artificial Sequence
  Description of Artificial Sequence: Synthetic oligonucleotide
aauguaguaaguuugcuaa

SEQ ID NO: 1504133 - RNA, 19 nt, Artificial Sequence
  Description of Artificial Sequence: Synthetic oligonucleotide
aaaauaaguagggaauggc

SEQ ID NO: 1504134 - RNA, 19 nt, Artificial Sequence
  Description of Artificial Sequence: Synthetic oligonucleotide
uuaacaaauccaauccacg

SEQ ID NO: 1504135 - RNA, 19 nt, Artificial Sequence
  Description of Artificial Sequence: Synthetic oligonucleotide
uuuacguagauaauguugu

SEQ ID NO: 1504136 - RNA, 19 nt, Artificial Sequence
  Description of Artificial Sequence: Synthetic oligonucleotide
agauguuuguucuacuccc

SEQ ID NO: 1504137 - RNA, 19 nt, Artificial Sequence
  Description of Artificial Sequence: Synthetic oligonucleotide
uuaccaauaguuuuggcug

SEQ ID NO: 1504138 - RNA, 19 nt, Artificial Sequence
  Description of Artificial Sequence: Synthetic oligonucleotide
uuuaccaauaguuuuggcu

SEQ ID NO: 1504139 - RNA, 19 nt, Artificial Sequence
  Description of Artificial Sequence: Synthetic oligonucleotide
uuaauugucuguuuuggug

SEQ ID NO: 1504140 - RNA, 19 nt, Artificial Sequence
  Description of Artificial Sequence: Synthetic oligonucleotide
cuuaagggcgauaaggccg

SEQ ID NO: 1504141 - RNA, 19 nt, Artificial Sequence
  Description of Artificial Sequence: Synthetic oligonucleotide
uccauuauagucuuccuug

SEQ ID NO: 1504142 - RNA, 19 nt, Artificial Sequence
  Description of Artificial Sequence: Synthetic oligonucleotide
uuauaugcaggcaguauag

SEQ ID NO: 1504143 - RNA, 19 nt, Artificial Sequence
  Description of Artificial Sequence: Synthetic oligonucleotide
ugucaaucuuaacaaaucc

SEQ ID NO: 1504144 - RNA, 19 nt, Artificial Sequence
  Description of Artificial Sequence: Synthetic oligonucleotide
uugcuaaucagauuuaagu

SEQ ID NO: 1504145 - RNA, 19 nt, Artificial Sequence
  Description of Artificial Sequence: Synthetic oligonucleotide
gaaucagguuuauagaagc

SEQ ID NO: 1504146 - RNA, 19 nt, Artificial Sequence
  Description of Artificial Sequence: Synthetic oligonucleotide
aauuccaauauagaaucag

SEQ ID NO: 1504147 - RNA, 19 nt, Artificial Sequence
  Description of Artificial Sequence: Synthetic oligonucleotide
uuauagaagcgugacacgg

SEQ ID NO: 1504148 - RNA, 19 nt, Artificial Sequence
  Description of Artificial Sequence: Synthetic oligonucleotide
aacaaauccaauccacgug

SEQ ID NO: 1504149 - RNA, 19 nt, Artificial Sequence
  Description of Artificial Sequence: Synthetic oligonucleotide
aguauagagucuuuuaccu

SEQ ID NO: 1504150 - RNA, 19 nt, Artificial Sequence
  Description of Artificial Sequence: Synthetic oligonucleotide
gauccuuauaugcaggcag

SEQ ID NO: 1504151 - RNA, 19 nt, Artificial Sequence
  Description of Artificial Sequence: Synthetic oligonucleotide
caaacugucaaucuuaaca

SEQ ID NO: 1504152 - RNA, 19 nt, Artificial Sequence
  Description of Artificial Sequence: Synthetic oligonucleotide
uguucuacucccuaagccc

SEQ ID NO: 1504153 - RNA, 19 nt, Artificial Sequence
  Description of Artificial Sequence: Synthetic oligonucleotide
auaaguagggaauggcagg

SEQ ID NO: 1504154 - RNA, 19 nt, Artificial Sequence
  Description of Artificial Sequence: Synthetic oligonucleotide
caucauacaagucuucugc

SEQ ID NO: 1504155 - RNA, 19 nt, Artificial Sequence
  Description of Artificial Sequence: Synthetic oligonucleotide
acuggguugcaacacgucc

SEQ ID NO: 1504156 - RNA, 19 nt, Artificial Sequence
  Description of Artificial Sequence: Synthetic oligonucleotide
cuuaacaaauccaauccac

SEQ ID NO: 1504157 - RNA, 19 nt, Artificial Sequence
  Description of Artificial Sequence: Synthetic oligonucleotide
uucccaaggauguaaaggc

SEQ ID NO: 1504158 - RNA, 19 nt, Artificial Sequence
  Description of Artificial Sequence: Synthetic oligonucleotide
gauaauguugugcuuggug

SEQ ID NO: 1504159 - RNA, 19 nt, Artificial Sequence
  Description of Artificial Sequence: Synthetic oligonucleotide
ucagguuuauagaagcgug

SEQ ID NO: 1504160 - RNA, 19 nt, Artificial Sequence
  Description of Artificial Sequence: Synthetic oligonucleotide
auuuaauguaguaaguuug

SEQ ID NO: 1504161 - RNA, 19 nt, Artificial Sequence
  Description of Artificial Sequence: Synthetic oligonucleotide
uuugcuugauaauugggcu

SEQ ID NO: 1504162 - RNA, 19 nt, Artificial Sequence
  Description of Artificial Sequence: Synthetic oligonucleotide
uuaaguaagggaagugaug

SEQ ID NO: 1504163 - RNA, 19 nt, Artificial Sequence
  Description of Artificial Sequence: Synthetic oligonucleotide
uaacagaaggugcacuggg

SEQ ID NO: 1504164 - RNA, 19 nt, Artificial Sequence
  Description of Artificial Sequence: Synthetic oligonucleotide
uuccaauauagaaucaggu

SEQ ID NO: 1504165 - RNA, 19 nt, Artificial Sequence
  Description of Artificial Sequence: Synthetic oligonucleotide
cuccaguagaaauagcucc

SEQ ID NO: 1504166 - RNA, 19 nt, Artificial Sequence
  Description of Artificial Sequence: Synthetic oligonucleotide
uauuuaauguaguaaguuu

SEQ ID NO: 1504167 - RNA, 19 nt, Artificial Sequence
  Description of Artificial Sequence: Synthetic oligonucleotide
uuguucuacucccuaagcc

SEQ ID NO: 1504168 - RNA, 19 nt, Artificial Sequence
  Description of Artificial Sequence: Synthetic oligonucleotide
acaaauccaauccacguga

SEQ ID NO: 1504169 - RNA, 19 nt, Artificial Sequence
  Description of Artificial Sequence: Synthetic oligonucleotide
agaaugaugccuccaaaug

SEQ ID NO: 1504170 - RNA, 19 nt, Artificial Sequence
  Description of Artificial Sequence: Synthetic oligonucleotide
ugggaguauauuuuaacac

SEQ ID NO: 1504171 - RNA, 19 nt, Artificial Sequence
  Description of Artificial Sequence: Synthetic oligonucleotide
uaugcaggcaguauagagu

SEQ ID NO: 1504172 - RNA, 19 nt, Artificial Sequence
  Description of Artificial Sequence: Synthetic oligonucleotide
auaugcaggcaguauagag

SEQ ID NO: 1504173 - RNA, 19 nt, Artificial Sequence
  Description of Artificial Sequence: Synthetic oligonucleotide
uccaucaggaaaauaagua

SEQ ID NO: 1504174 - RNA, 19 nt, Artificial Sequence
  Description of Artificial Sequence: Synthetic oligonucleotide
aaauaaguagggaauggca

SEQ ID NO: 1504175 - RNA, 19 nt, Artificial Sequence
  Description of Artificial Sequence: Synthetic oligonucleotide
auaaggccgacucuggaag

SEQ ID NO: 1504176 - RNA, 19 nt, Artificial Sequence
  Description of Artificial Sequence: Synthetic oligonucleotide
aaugauccuuauaugcagg

SEQ ID NO: 1504177 - RNA, 19 nt, Artificial Sequence
  Description of Artificial Sequence: Synthetic oligonucleotide
caguauagagucuuuuacc

SEQ ID NO: 1504178 - RNA, 19 nt, Artificial Sequence
  Description of Artificial Sequence: Synthetic oligonucleotide
gaaacgugucuaaagaaug

SEQ ID NO: 1504179 - RNA, 19 nt, Artificial Sequence
  Description of Artificial Sequence: Synthetic oligonucleotide
acguagauaauguugugcu

SEQ ID NO: 1504180 - RNA, 19 nt, Artificial Sequence
  Description of Artificial Sequence: Synthetic oligonucleotide
ucugauuucccauccgccc

SEQ ID NO: 1504181 - RNA, 19 nt, Artificial Sequence
  Description of Artificial Sequence: Synthetic oligonucleotide
uuuguucuacucccuaagc

SEQ ID NO: 1504182 - RNA, 19 nt, Artificial Sequence
  Description of Artificial Sequence: Synthetic oligonucleotide
acaaacguaacagaaggug

SEQ ID NO: 1504183 - RNA, 19 nt, Artificial Sequence
  Description of Artificial Sequence: Synthetic oligonucleotide
agaggguuaccauuccugg

SEQ ID NO: 1504184 - RNA, 19 nt, Artificial Sequence
  Description of Artificial Sequence: Synthetic oligonucleotide
ugcuaaucagauuuaagua

SEQ ID NO: 1504185 - RNA, 19 nt, Artificial Sequence
  Description of Artificial Sequence: Synthetic oligonucleotide
uaaagaaugaugccuccaa

SEQ ID NO: 1504186 - RNA, 19 nt, Artificial Sequence
  Description of Artificial Sequence: Synthetic oligonucleotide
aguugcuuaacaaaggaga

SEQ ID NO: 1504187 - RNA, 19 nt, Artificial Sequence
  Description of Artificial Sequence: Synthetic oligonucleotide
uguugauuucuaacaaaga

SEQ ID NO: 1504188 - RNA, 19 nt, Artificial Sequence
  Description of Artificial Sequence: Synthetic oligonucleotide
caaugauccuuauaugcag

SEQ ID NO: 1504189 - RNA, 19 nt, Artificial Sequence
  Description of Artificial Sequence: Synthetic oligonucleotide
acuuucaguccguacacag

SEQ ID NO: 1504190 - RNA, 19 nt, Artificial Sequence
  Description of Artificial Sequence: Synthetic oligonucleotide
agcuuaagggcgauaaggc

SEQ ID NO: 1504191 - RNA, 19 nt, Artificial Sequence
  Description of Artificial Sequence: Synthetic oligonucleotide
acacuuucaguccguacac

SEQ ID NO: 1504192 - RNA, 19 nt, Artificial Sequence
  Description of Artificial Sequence: Synthetic oligonucleotide
agaaagaugcucaucccac

SEQ ID NO: 1504193 - RNA, 19 nt, Artificial Sequence
  Description of Artificial Sequence: Synthetic oligonucleotide
uuauuuaauguaguaaguu

SEQ ID NO: 1504194 - RNA, 19 nt, Artificial Sequence
  Description of Artificial Sequence: Synthetic oligonucleotide
uuuaacacauggcagucuu

SEQ ID NO: 1504195 - RNA, 19 nt, Artificial Sequence
  Description of Artificial Sequence: Synthetic oligonucleotide
uuugcaaacugucaaucuu

SEQ ID NO: 1504196 - RNA, 19 nt, Artificial Sequence
  Description of Artificial Sequence: Synthetic oligonucleotide
uugaccgugaguagcaggu

SEQ ID NO: 1504197 - RNA, 19 nt, Artificial Sequence
  Description of Artificial Sequence: Synthetic oligonucleotide
auuccaauauagaaucagg

SEQ ID NO: 1504198 - RNA, 19 nt, Artificial Sequence
  Description of Artificial Sequence: Synthetic oligonucleotide
auuuuaacacauggcaguc

SEQ ID NO: 1504199 - RNA, 19 nt, Artificial Sequence
  Description of Artificial Sequence: Synthetic oligonucleotide
uaauguaguaaguuugcua

SEQ ID NO: 1504200 - RNA, 19 nt, Artificial Sequence
  Description of Artificial Sequence: Synthetic oligonucleotide
uacguagauaauguugugc

SEQ ID NO: 1504201 - RNA, 19 nt, Artificial Sequence
  Description of Artificial Sequence: Synthetic oligonucleotide
uccaauauagaaucagguu

SEQ ID NO: 1504202 - RNA, 19 nt, Artificial Sequence
  Description of Artificial Sequence: Synthetic oligonucleotide
aguccguacacaguccugc

SEQ ID NO: 1504203 - RNA, 19 nt, Artificial Sequence
  Description of Artificial Sequence: Synthetic oligonucleotide
gauacagacaaggcggcag

SEQ ID NO: 1504204 - RNA, 19 nt, Artificial Sequence
  Description of Artificial Sequence: Synthetic oligonucleotide
cacauggcagucuuguacc

SEQ ID NO: 1504205 - RNA, 19 nt, Artificial Sequence
  Description of Artificial Sequence: Synthetic oligonucleotide
guuuguucuacucccuaag

SEQ ID NO: 1504206 - RNA, 19 nt, Artificial Sequence
  Description of Artificial Sequence: Synthetic oligonucleotide
agguuuauagaagcgugac

SEQ ID NO: 1504207 - RNA, 19 nt, Artificial Sequence
  Description of Artificial Sequence: Synthetic oligonucleotide
uuaagggcgauaaggccga

SEQ ID NO: 1504208 - RNA, 19 nt, Artificial Sequence
  Description of Artificial Sequence: Synthetic oligonucleotide
cagcuuaagggcgauaagg

SEQ ID NO: 1504209 - RNA, 19 nt, Artificial Sequence
  Description of Artificial Sequence: Synthetic oligonucleotide
ugucacaugaaagauuuua

SEQ ID NO: 1504210 - RNA, 19 nt, Artificial Sequence
  Description of Artificial Sequence: Synthetic oligonucleotide
cgugucuaaagaaugaugc

SEQ ID NO: 1504211 - RNA, 19 nt, Artificial Sequence
  Description of Artificial Sequence: Synthetic oligonucleotide
uaaguagggaauggcaggc

SEQ ID NO: 1504212 - RNA, 19 nt, Artificial Sequence
  Description of Artificial Sequence: Synthetic oligonucleotide
ugcauuuauguccuuugau

SEQ ID NO: 1504213 - RNA, 19 nt, Artificial Sequence
  Description of Artificial Sequence: Synthetic oligonucleotide
uauagaagcgugacacggu

SEQ ID NO: 1504214 - RNA, 19 nt, Artificial Sequence
  Description of Artificial Sequence: Synthetic oligonucleotide
aaguacuacucuugcugug

SEQ ID NO: 1504215 - RNA, 19 nt, Artificial Sequence
  Description of Artificial Sequence: Synthetic oligonucleotide
agaaauagcuccaggucuc

SEQ ID NO: 1504216 - RNA, 19 nt, Artificial Sequence
  Description of Artificial Sequence: Synthetic oligonucleotide
auccaauccacgugacugg

SEQ ID NO: 1504217 - RNA, 19 nt, Artificial Sequence
  Description of Artificial Sequence: Synthetic oligonucleotide
agcgugacacgguuuuccc

SEQ ID NO: 1504218 - RNA, 19 nt, Artificial Sequence
  Description of Artificial Sequence: Synthetic oligonucleotide
uugcaaacugucaaucuua

SEQ ID NO: 1504219 - RNA, 19 nt, Artificial Sequence
  Description of Artificial Sequence: Synthetic oligonucleotide
cauuuuaguuccaggccag

SEQ ID NO: 1504220 - RNA, 19 nt, Artificial Sequence
  Description of Artificial Sequence: Synthetic oligonucleotide
aacugucaaucuuaacaaa

SEQ ID NO: 1504221 - RNA, 19 nt, Artificial Sequence
  Description of Artificial Sequence: Synthetic oligonucleotide
aacuaagcagaggguuacc

SEQ ID NO: 1504222 - RNA, 19 nt, Artificial Sequence
  Description of Artificial Sequence: Synthetic oligonucleotide
uuauguccagguacagagc

SEQ ID NO: 1504223 - RNA, 19 nt, Artificial Sequence
  Description of Artificial Sequence: Synthetic oligonucleotide
ucaugacacccugaaaacc

SEQ ID NO: 1504224 - RNA, 19 nt, Artificial Sequence
  Description of Artificial Sequence: Synthetic oligonucleotide
acgguuuucccacccacag

SEQ ID NO: 1504225 - RNA, 19 nt, Artificial Sequence
  Description of Artificial Sequence: Synthetic oligonucleotide
uuaauguaguaaguuugcu

SEQ ID NO: 1504226 - RNA, 19 nt, Artificial Sequence
  Description of Artificial Sequence: Synthetic oligonucleotide
uugauaauugggcuuuauu

SEQ ID NO: 1504227 - RNA, 19 nt, Artificial Sequence
  Description of Artificial Sequence: Synthetic oligonucleotide
aaacgugucuaaagaauga

SEQ ID NO: 1504228 - RNA, 19 nt, Artificial Sequence
  Description of Artificial Sequence: Synthetic oligonucleotide
ugguuuauuuaauguagua

SEQ ID NO: 1504229 - RNA, 19 nt, Artificial Sequence
  Description of Artificial Sequence: Synthetic oligonucleotide
ucgguaaaauuccaauaua

SEQ ID NO: 1504230 - RNA, 19 nt, Artificial Sequence
  Description of Artificial Sequence: Synthetic oligonucleotide
ugguucauccagugcacag

SEQ ID NO: 1504231 - RNA, 19 nt, Artificial Sequence
  Description of Artificial Sequence: Synthetic oligonucleotide
uuuuauguccagguacaga

SEQ ID NO: 1504232 - RNA, 19 nt, Artificial Sequence
  Description of Artificial Sequence: Synthetic oligonucleotide
agggcacaggaaguuaugc

SEQ ID NO: 1504233 - RNA, 19 nt, Artificial Sequence
  Description of Artificial Sequence: Synthetic oligonucleotide
agagucuuuuaccuuuacu

SEQ ID NO: 1504234 - RNA, 19 nt, Artificial Sequence
  Description of Artificial Sequence: Synthetic oligonucleotide
uuacguagauaauguugug

SEQ ID NO: 1504235 - RNA, 19 nt, Artificial Sequence
  Description of Artificial Sequence: Synthetic oligonucleotide
gggaguauauuuuaacaca

SEQ ID NO: 1504236 - RNA, 19 nt, Artificial Sequence
  Description of Artificial Sequence: Synthetic oligonucleotide
aucagguuuauagaagcgu

SEQ ID NO: 1504237 - RNA, 19 nt, Artificial Sequence
  Description of Artificial Sequence: Synthetic oligonucleotide
gcuaaucagauuuaaguaa

SEQ ID NO: 1504238 - RNA, 19 nt, Artificial Sequence
  Description of Artificial Sequence: Synthetic oligonucleotide
cuuauaugcaggcaguaua

SEQ ID NO: 1504239 - RNA, 19 nt, Artificial Sequence
  Description of Artificial Sequence: Synthetic oligonucleotide
ugcucugauuucccauccg

SEQ ID NO: 1504240 - RNA, 19 nt, Artificial Sequence
  Description of Artificial Sequence: Synthetic oligonucleotide
ucuucguuugaccgugagu

SEQ ID NO: 1504241 - RNA, 19 nt, Artificial Sequence
  Description of Artificial Sequence: Synthetic oligonucleotide
caugaaagauuuuaauugu

SEQ ID NO: 1504242 - RNA, 19 nt, Artificial Sequence
  Description of Artificial Sequence: Synthetic oligonucleotide
uaugccgugccagugacau

SEQ ID NO: 1504243 - RNA, 19 nt, Artificial Sequence
  Description of Artificial Sequence: Synthetic oligonucleotide
acagcauuaucugucacau

SEQ ID NO: 1504244 - RNA, 19 nt, Artificial Sequence
  Description of Artificial Sequence: Synthetic oligonucleotide
ugugcuugguguucacucu

SEQ ID NO: 1504245 - RNA, 19 nt, Artificial Sequence
  Description of Artificial Sequence: Synthetic oligonucleotide
uucguuugaccgugaguag

SEQ ID NO: 1504246 - RNA, 19 nt, Artificial Sequence
  Description of Artificial Sequence: Synthetic oligonucleotide
uaucugucacaugaaagau

SEQ ID NO: 1504247 - RNA, 19 nt, Artificial Sequence
  Description of Artificial Sequence: Synthetic oligonucleotide
gcaguauagagucuuuuac

SEQ ID NO: 1504248 - RNA, 19 nt, Artificial Sequence
  Description of Artificial Sequence: Synthetic oligonucleotide
gauaaggccgacucuggaa

SEQ ID NO: 1504249 - RNA, 19 nt, Artificial Sequence
  Description of Artificial Sequence: Synthetic oligonucleotide
aacgugucuaaagaaugau

SEQ ID NO: 1504250 - RNA, 19 nt, Artificial Sequence
  Description of Artificial Sequence: Synthetic oligonucleotide
uuuuaguuccaggccagac

SEQ ID NO: 1504251 - RNA, 19 nt, Artificial Sequence
  Description of Artificial Sequence: Synthetic oligonucleotide
accuuuaccaauaguuuug

SEQ ID NO: 1504252 - RNA, 19 nt, Artificial Sequence
  Description of Artificial Sequence: Synthetic oligonucleotide
ucguuugaccgugaguagc

SEQ ID NO: 1504253 - RNA, 19 nt, Artificial Sequence
  Description of Artificial Sequence: Synthetic oligonucleotide
uccaacccggcauggagug

SEQ ID NO: 1504254 - RNA, 19 nt, Artificial Sequence
  Description of Artificial Sequence: Synthetic oligonucleotide
aguuaugccgugccaguga

SEQ ID NO: 1504255 - RNA, 19 nt, Artificial Sequence
  Description of Artificial Sequence: Synthetic oligonucleotide
uaccaauaguuuuggcugu

SEQ ID NO: 1504256 - RNA, 19 nt, Artificial Sequence
  Description of Artificial Sequence: Synthetic oligonucleotide
agaagcgugacacgguuuu

SEQ ID NO: 1504257 - RNA, 19 nt, Artificial Sequence
  Description of Artificial Sequence: Synthetic oligonucleotide
uucagcgaguccccggcgc

SEQ ID NO: 1504258 - RNA, 19 nt, Artificial Sequence
  Description of Artificial Sequence: Synthetic oligonucleotide
auguaaaggccacgguuca

SEQ ID NO: 1504259 - RNA, 19 nt, Artificial Sequence
  Description of Artificial Sequence: Synthetic oligonucleotide
uuucagcgaguccccggcg

SEQ ID NO: 1504260 - RNA, 19 nt, Artificial Sequence
  Description of Artificial Sequence: Synthetic oligonucleotide
auagaagcgugacacgguu

SEQ ID NO: 1504261 - RNA, 19 nt, Artificial Sequence
  Description of Artificial Sequence: Synthetic oligonucleotide
uccacguacuguccagggc

SEQ ID NO: 1504262 - RNA, 19 nt, Artificial Sequence
  Description of Artificial Sequence: Synthetic oligonucleotide
aaguuaugccgugccagug

SEQ ID NO: 1504263 - RNA, 19 nt, Artificial Sequence
  Description of Artificial Sequence: Synthetic oligonucleotide
ugaugccuccaaauggcaa

SEQ ID NO: 1504264 - RNA, 19 nt, Artificial Sequence
  Description of Artificial Sequence: Synthetic oligonucleotide
ggcugugacauccacguac

SEQ ID NO: 1504265 - RNA, 19 nt, Artificial Sequence
  Description of Artificial Sequence: Synthetic oligonucleotide
ugacacgguuuucccaccc

SEQ ID NO: 1504266 - RNA, 19 nt, Artificial Sequence
  Description of Artificial Sequence: Synthetic oligonucleotide
augcauuuauguccuuuga

SEQ ID NO: 1504267 - RNA, 19 nt, Artificial Sequence
  Description of Artificial Sequence: Synthetic oligonucleotide
gcauuuuaguuccaggcca

SEQ ID NO: 1504268 - RNA, 19 nt, Artificial Sequence
  Description of Artificial Sequence: Synthetic oligonucleotide
ugauccuuauaugcaggca

SEQ ID NO: 1504269 - RNA, 19 nt, Artificial Sequence
  Description of Artificial Sequence: Synthetic oligonucleotide
guuaugccgugccagugac

SEQ ID NO: 1504270 - RNA, 19 nt, Artificial Sequence
  Description of Artificial Sequence: Synthetic oligonucleotide
gguuuauuuaauguaguaa

SEQ ID NO: 1504271 - RNA, 19 nt, Artificial Sequence
  Description of Artificial Sequence: Synthetic oligonucleotide
uugcuugauaauugggcuu

SEQ ID NO: 1504272 - RNA, 19 nt, Artificial Sequence
  Description of Artificial Sequence: Synthetic oligonucleotide
caaauccaauccacgugac

SEQ ID NO: 1504273 - RNA, 19 nt, Artificial Sequence
  Description of Artificial Sequence: Synthetic oligonucleotide
guacuguccagggcgaaag

SEQ ID NO: 1504274 - RNA, 19 nt, Artificial Sequence
  Description of Artificial Sequence: Synthetic oligonucleotide
acgugacugguuuauuuaa

SEQ ID NO: 1504275 - RNA, 19 nt, Artificial Sequence
  Description of Artificial Sequence: Synthetic oligonucleotide
cagggcgaaagugagcagc

SEQ ID NO: 1504276 - RNA, 19 nt, Artificial Sequence
  Description of Artificial Sequence: Synthetic oligonucleotide
gcuuaagggcgauaaggcc

SEQ ID NO: 1504277 - RNA, 19 nt, Artificial Sequence
  Description of Artificial Sequence: Synthetic oligonucleotide
guaaguuugcuaaucagau

SEQ ID NO: 1504278 - RNA, 19 nt, Artificial Sequence
  Description of Artificial Sequence: Synthetic oligonucleotide
ucgaaggagccccgggaca

SEQ ID NO: 1504279 - RNA, 19 nt, Artificial Sequence
  Description of Artificial Sequence: Synthetic oligonucleotide
caauccaaguucucgguaa

SEQ ID NO: 1504280 - RNA, 19 nt, Artificial Sequence
  Description of Artificial Sequence: Synthetic oligonucleotide
caacuaagcagaggguuac

SEQ ID NO: 1504281 - RNA, 19 nt, Artificial Sequence
  Description of Artificial Sequence: Synthetic oligonucleotide
gacaucagacaaacguaac

SEQ ID NO: 1504282 - RNA, 19 nt, Artificial Sequence
  Description of Artificial Sequence: Synthetic oligonucleotide
ugcaacacguccucaucau

SEQ ID NO: 1504283 - RNA, 19 nt, Artificial Sequence
  Description of Artificial Sequence: Synthetic oligonucleotide
acgcgcucgaaggagcccc

SEQ ID NO: 1504284 - RNA, 19 nt, Artificial Sequence
  Description of Artificial Sequence: Synthetic oligonucleotide
uuucguccuggaccaguug

SEQ ID NO: 1504285 - RNA, 19 nt, Artificial Sequence
  Description of Artificial Sequence: Synthetic oligonucleotide
ucuacucccuaagcccggg

SEQ ID NO: 1504286 - RNA, 19 nt, Artificial Sequence
  Description of Artificial Sequence: Synthetic oligonucleotide
acgugucuaaagaaugaug

SEQ ID NO: 1504287 - RNA, 19 nt, Artificial Sequence
  Description of Artificial Sequence: Synthetic oligonucleotide
cucgguaaaauuccaauau

SEQ ID NO: 1504288 - RNA, 19 nt, Artificial Sequence
  Description of Artificial Sequence: Synthetic oligonucleotide
acgguucaucuuucagggg

SEQ ID NO: 1504289 - RNA, 19 nt, Artificial Sequence
  Description of Artificial Sequence: Synthetic oligonucleotide
acagugagggcugauguuu

SEQ ID NO: 1504290 - RNA, 19 nt, Artificial Sequence
  Description of Artificial Sequence: Synthetic oligonucleotide
cagguuuauagaagcguga

SEQ ID NO: 1504291 - RNA, 19 nt, Artificial Sequence
  Description of Artificial Sequence: Synthetic oligonucleotide
ucagcgaguccccggcgca

SEQ ID NO: 1504292 - RNA, 19 nt, Artificial Sequence
  Description of Artificial Sequence: Synthetic oligonucleotide
gguacagagccauuuacgu

SEQ ID NO: 1504293 - RNA, 19 nt, Artificial Sequence
  Description of Artificial Sequence: Synthetic oligonucleotide
gggaauggcaggcuuuuac

SEQ ID NO: 1504294 - RNA, 19 nt, Artificial Sequence
  Description of Artificial Sequence: Synthetic oligonucleotide
gaaguuaugccgugccagu

SEQ ID NO: 1504295 - RNA, 19 nt, Artificial Sequence
  Description of Artificial Sequence: Synthetic oligonucleotide
gcucugauuucccauccgc

SEQ ID NO: 1504296 - RNA, 19 nt, Artificial Sequence
  Description of Artificial Sequence: Synthetic oligonucleotide
caacccggcauggaguggc

SEQ ID NO: 1504297 - RNA, 19 nt, Artificial Sequence
  Description of Artificial Sequence: Synthetic oligonucleotide
auuuucguccuggaccagu

SEQ ID NO: 1504298 - RNA, 19 nt, Artificial Sequence
  Description of Artificial Sequence: Synthetic oligonucleotide
accugaaguaauguggcua

SEQ ID NO: 1504299 - RNA, 19 nt, Artificial Sequence
  Description of Artificial Sequence: Synthetic oligonucleotide
gucuucguuugaccgugag

SEQ ID NO: 1504300 - RNA, 19 nt, Artificial Sequence
  Description of Artificial Sequence: Synthetic oligonucleotide
cauggaguggccggccacg

SEQ ID NO: 1504301 - RNA, 19 nt, Artificial Sequence
  Description of Artificial Sequence: Synthetic oligonucleotide
ggcgauaaggccgacucug

SEQ ID NO: 1504302 - RNA, 19 nt, Artificial Sequence
  Description of Artificial Sequence: Synthetic oligonucleotide
accacgcgcucgaaggagc

SEQ ID NO: 1504303 - RNA, 19 nt, Artificial Sequence
  Description of Artificial Sequence: Synthetic oligonucleotide
ucccuggcuuaauuacagc

SEQ ID NO: 1504304 - RNA, 19 nt, Artificial Sequence
  Description of Artificial Sequence: Synthetic oligonucleotide
caucccaccaaguacuacu

SEQ ID NO: 1504305 - RNA, 19 nt, Artificial Sequence
  Description of Artificial Sequence: Synthetic oligonucleotide
cauccacguacuguccagg

SEQ ID NO: 1504306 - RNA, 19 nt, Artificial Sequence
  Description of Artificial Sequence: Synthetic oligonucleotide
uuaugccgugccagugaca

SEQ ID NO: 1504307 - RNA, 19 nt, Artificial Sequence
  Description of Artificial Sequence: Synthetic oligonucleotide
acaugcuuuugaccauccu

SEQ ID NO: 1504308 - RNA, 19 nt, Artificial Sequence
  Description of Artificial Sequence: Synthetic oligonucleotide
acaacuaagcagaggguua

SEQ ID NO: 1504309 - RNA, 19 nt, Artificial Sequence
  Description of Artificial Sequence: Synthetic oligonucleotide
uaccuuuacuaagcaauuu

SEQ ID NO: 1504310 - RNA, 19 nt, Artificial Sequence
  Description of Artificial Sequence: Synthetic oligonucleotide
auccuuauaugcaggcagu

SEQ ID NO: 1504311 - RNA, 19 nt, Artificial Sequence
  Description of Artificial Sequence: Synthetic oligonucleotide
caaguacuacucuugcugu

SEQ ID NO: 1504312 - RNA, 19 nt, Artificial Sequence
  Description of Artificial Sequence: Synthetic oligonucleotide
guacagagccauuuacgua

SEQ ID NO: 1504313 - RNA, 19 nt, Artificial Sequence
  Description of Artificial Sequence: Synthetic oligonucleotide
uagaagcgugacacgguuu

SEQ ID NO: 1504314 - RNA, 19 nt, Artificial Sequence
  Description of Artificial Sequence: Synthetic oligonucleotide
cugguuuauuuaauguagu

SEQ ID NO: 1504315 - RNA, 19 nt, Artificial Sequence
  Description of Artificial Sequence: Synthetic oligonucleotide
agacaaggcggcagcauca

SEQ ID NO: 1504316 - RNA, 19 nt, Artificial Sequence
  Description of Artificial Sequence: Synthetic oligonucleotide
accaauaguuuuggcugug

SEQ ID NO: 1504317 - RNA, 19 nt, Artificial Sequence
  Description of Artificial Sequence: Synthetic oligonucleotide
acguaacagaaggugcacu

SEQ ID NO: 1504318 - RNA, 19 nt, Artificial Sequence
  Description of Artificial Sequence: Synthetic oligonucleotide
ucggcucgcgacaccugcc

SEQ ID NO: 1504319 - RNA, 19 nt, Artificial Sequence
  Description of Artificial Sequence: Synthetic oligonucleotide
gacacgguuuucccaccca

SEQ ID NO: 1504320 - RNA, 19 nt, Artificial Sequence
  Description of Artificial Sequence: Synthetic oligonucleotide
aaggccgacucuggaagaa

SEQ ID NO: 1504321 - RNA, 19 nt, Artificial Sequence
  Description of Artificial Sequence: Synthetic oligonucleotide
uauuuucguccuggaccag

SEQ ID NO: 1504322 - RNA, 19 nt, Artificial Sequence
  Description of Artificial Sequence: Synthetic oligonucleotide
cgugacacgguuuucccac

SEQ ID NO: 1504323 - RNA, 19 nt, Artificial Sequence
  Description of Artificial Sequence: Synthetic oligonucleotide
uugaccauccuugguccau

SEQ ID NO: 1504324 - RNA, 19 nt, Artificial Sequence
  Description of Artificial Sequence: Synthetic oligonucleotide
cuacucccuaagcccgggg

SEQ ID NO: 1504325 - RNA, 19 nt, Artificial Sequence
  Description of Artificial Sequence: Synthetic oligonucleotide
aggccgacucuggaagaac

SEQ ID NO: 1504326 - RNA, 19 nt, Artificial Sequence
  Description of Artificial Sequence: Synthetic oligonucleotide
uagggaauggcaggcuuuu

SEQ ID NO: 1504327 - RNA, 19 nt, Artificial Sequence
  Description of Artificial Sequence: Synthetic oligonucleotide
cauuccugguucuaccacu

SEQ ID NO: 1504328 - RNA, 19 nt, Artificial Sequence
  Description of Artificial Sequence: Synthetic oligonucleotide
aagggcgauaaggccgacu

SEQ ID NO: 1504329 - RNA, 19 nt, Artificial Sequence
  Description of Artificial Sequence: Synthetic oligonucleotide
gaguccccggcgcaagcac

SEQ ID NO: 1504330 - RNA, 19 nt, Artificial Sequence
  Description of Artificial Sequence: Synthetic oligonucleotide
gacaaggcggcagcaucac

SEQ ID NO: 1504331 - RNA, 19 nt, Artificial Sequence
  Description of Artificial Sequence: Synthetic oligonucleotide
cucccuaagcccggggcag

SEQ ID NO: 1504332 - RNA, 19 nt, Artificial Sequence
  Description of Artificial Sequence: Synthetic oligonucleotide
ccauuuacguagauaaugu

SEQ ID NO: 1504333 - RNA, 19 nt, Artificial Sequence
  Description of Artificial Sequence: Synthetic oligonucleotide
gcucgcgacaccugccgcg

SEQ ID NO: 1504334 - RNA, 19 nt, Artificial Sequence
  Description of Artificial Sequence: Synthetic oligonucleotide
gaggguuaccauuccuggu

SEQ ID NO: 1504335 - RNA, 19 nt, Artificial Sequence
  Description of Artificial Sequence: Synthetic oligonucleotide
ggcaacaucuccaguagaa

SEQ ID NO: 1504336 - RNA, 19 nt, Artificial Sequence
  Description of Artificial Sequence: Synthetic oligonucleotide
acaaggcggcagcaucaca

SEQ ID NO: 1504337 - RNA, 19 nt, Artificial Sequence
  Description of Artificial Sequence: Synthetic oligonucleotide
gcgaaagugagcagcauaa

SEQ ID NO: 1504338 - RNA, 19 nt, Artificial Sequence
  Description of Artificial Sequence: Synthetic oligonucleotide
guaauguggcuacaugcuu

SEQ ID NO: 1504339 - RNA, 19 nt, Artificial Sequence
  Description of Artificial Sequence: Synthetic oligonucleotide
guauagagucuuuuaccuu

SEQ ID NO: 1504340 - RNA, 19 nt, Artificial Sequence
  Description of Artificial Sequence: Synthetic oligonucleotide
acggcucggcucgcgacac

SEQ ID NO: 1504341 - RNA, 19 nt, Artificial Sequence
  Description of Artificial Sequence: Synthetic oligonucleotide
ccuccaacccggcauggag

SEQ ID NO: 1504342 - RNA, 19 nt, Artificial Sequence
  Description of Artificial Sequence: Synthetic oligonucleotide
ucgcgacaccugccgcgcg

SEQ ID NO: 1504343 - RNA, 19 nt, Artificial Sequence
  Description of Artificial Sequence: Synthetic oligonucleotide
ggaaacgugucuaaagaau

SEQ ID NO: 1504344 - RNA, 19 nt, Artificial Sequence
  Description of Artificial Sequence: Synthetic oligonucleotide
cugugacauccacguacug

SEQ ID NO: 1504345 - RNA, 19 nt, Artificial Sequence
  Description of Artificial Sequence: Synthetic oligonucleotide
cauuuacguagauaauguu

SEQ ID NO: 1504346 - RNA, 19 nt, Artificial Sequence
  Description of Artificial Sequence: Synthetic oligonucleotide
caccuaggccuguggcgcc

SEQ ID NO: 1504347 - RNA, 19 nt, Artificial Sequence
  Description of Artificial Sequence: Synthetic oligonucleotide
ggccgacucuggaagaacc

SEQ ID NO: 1504348 - RNA, 19 nt, Artificial Sequence
  Description of Artificial Sequence: Synthetic oligonucleotide
gaagcgugacacgguuuuc

SEQ ID NO: 1504349 - RNA, 19 nt, Artificial Sequence
  Description of Artificial Sequence: Synthetic oligonucleotide
ggcgaaagugagcagcaua

SEQ ID NO: 1504350 - RNA, 19 nt, Artificial Sequence
  Description of Artificial Sequence: Synthetic oligonucleotide
ugccgcgcgccgcugcaga

SEQ ID NO: 1504351 - RNA, 19 nt, Artificial Sequence
  Description of Artificial Sequence: Synthetic oligonucleotide
ugaccauccuugguccaua

SEQ ID NO: 1504352 - RNA, 19 nt, Artificial Sequence
  Description of Artificial Sequence: Synthetic oligonucleotide
cacaacuaagcagaggguu

SEQ ID NO: 1504353 - RNA, 19 nt, Artificial Sequence
  Description of Artificial Sequence: Synthetic oligonucleotide
acaccugccgcgcgccgcu

SEQ ID NO: 1504354 - RNA, 19 nt, Artificial Sequence
  Description of Artificial Sequence: Synthetic oligonucleotide
gcgauaaggccgacucugg

SEQ ID NO: 1504355 - RNA, 19 nt, Artificial Sequence
  Description of Artificial Sequence: Synthetic oligonucleotide
cccggcgcaagcaccacgc

SEQ ID NO: 1504356 - RNA, 19 nt, Artificial Sequence
  Description of Artificial Sequence: Synthetic oligonucleotide
aggggucccuggcuuaauu

SEQ ID NO: 1504357 - RNA, 19 nt, Artificial Sequence
  Description of Artificial Sequence: Synthetic oligonucleotide
ccauuccugguucuaccac

SEQ ID NO: 1504358 - RNA, 19 nt, Artificial Sequence
  Description of Artificial Sequence: Synthetic oligonucleotide
agccauuuacguagauaau

SEQ ID NO: 1504359 - RNA, 19 nt, Artificial Sequence
  Description of Artificial Sequence: Synthetic oligonucleotide
ucccuaagcccggggcagc

SEQ ID NO: 1504360 - RNA, 19 nt, Artificial Sequence
  Description of Artificial Sequence: Synthetic oligonucleotide
agcgaguccccggcgcaag

SEQ ID NO: 1504361 - RNA, 19 nt, Artificial Sequence
  Description of Artificial Sequence: Synthetic oligonucleotide
acccggcauggaguggccg

SEQ ID NO: 1504362 - RNA, 19 nt, Artificial Sequence
  Description of Artificial Sequence: Synthetic oligonucleotide
gcaauccaaguucucggua

SEQ ID NO: 1504363 - RNA, 19 nt, Artificial Sequence
  Description of Artificial Sequence: Synthetic oligonucleotide
cuccaacccggcauggagu

SEQ ID NO: 1504364 - RNA, 19 nt, Artificial Sequence
  Description of Artificial Sequence: Synthetic oligonucleotide
uccacgugacugguuuauu

SEQ ID NO: 1504365 - RNA, 19 nt, Artificial Sequence
  Description of Artificial Sequence: Synthetic oligonucleotide
ugaccgugaguagcagguu

SEQ ID NO: 1504366 - RNA, 19 nt, Artificial Sequence
  Description of Artificial Sequence: Synthetic oligonucleotide
agaggggucccuggcuuaa

SEQ ID NO: 1504367 - RNA, 19 nt, Artificial Sequence
  Description of Artificial Sequence: Synthetic oligonucleotide
gguugcaacacguccucau

SEQ ID NO: 1504368 - RNA, 19 nt, Artificial Sequence
  Description of Artificial Sequence: Synthetic oligonucleotide
cacuuucaguccguacaca

SEQ ID NO: 1504369 - RNA, 19 nt, Artificial Sequence
  Description of Artificial Sequence: Synthetic oligonucleotide
cccugaaaaccuuuaccaa

SEQ ID NO: 1504370 - RNA, 19 nt, Artificial Sequence
  Description of Artificial Sequence: Synthetic oligonucleotide
ggaguggccggccacggcu

SEQ ID NO: 1504371 - RNA, 19 nt, Artificial Sequence
  Description of Artificial Sequence: Synthetic oligonucleotide
gucuuguaccugaaguaau

SEQ ID NO: 1504372 - RNA, 19 nt, Artificial Sequence
  Description of Artificial Sequence: Synthetic oligonucleotide
cguuugaccgugaguagca

SEQ ID NO: 1504373 - RNA, 19 nt, Artificial Sequence
  Description of Artificial Sequence: Synthetic oligonucleotide
ucccauccgcccaggcauu

SEQ ID NO: 1504374 - RNA, 19 nt, Artificial Sequence
  Description of Artificial Sequence: Synthetic oligonucleotide
ccuugggaguauauuuuaa

SEQ ID NO: 1504375 - RNA, 19 nt, Artificial Sequence
  Description of Artificial Sequence: Synthetic oligonucleotide
cauccgcccaggcauuuua

SEQ ID NO: 1504376 - RNA, 19 nt, Artificial Sequence
  Description of Artificial Sequence: Synthetic oligonucleotide
guucuaccacuguucuggu

SEQ ID NO: 1504377 - RNA, 19 nt, Artificial Sequence
  Description of Artificial Sequence: Synthetic oligonucleotide
cacggcucggcucgcgaca

SEQ ID NO: 1504378 - RNA, 19 nt, Artificial Sequence
  Description of Artificial Sequence: Synthetic oligonucleotide
cacgcgcucgaaggagccc

SEQ ID NO: 1504379 - RNA, 19 nt, Artificial Sequence
  Description of Artificial Sequence: Synthetic oligonucleotide
ccacgcgcucgaaggagcc

SEQ ID NO: 1504380 - RNA, 19 nt, Artificial Sequence
  Description of Artificial Sequence: Synthetic oligonucleotide
guacuacucuugcuguguu

SEQ ID NO: 1504381 - RNA, 19 nt, Artificial Sequence
  Description of Artificial Sequence: Synthetic oligonucleotide
ccuguggcgccacagccca

SEQ ID NO: 1504382 - RNA, 19 nt, Artificial Sequence
  Description of Artificial Sequence: Synthetic oligonucleotide
gcgugacacgguuuuccca

SEQ ID NO: 1504383 - RNA, 19 nt, Artificial Sequence
  Description of Artificial Sequence: Synthetic oligonucleotide
guccguacacaguccugcu

SEQ ID NO: 1504384 - RNA, 19 nt, Artificial Sequence
  Description of Artificial Sequence: Synthetic oligonucleotide
ccuuuaaauccccaucuuu

SEQ ID NO: 1504385 - RNA, 19 nt, Artificial Sequence
  Description of Artificial Sequence: Synthetic oligonucleotide
guagggaauggcaggcuuu

SEQ ID NO: 1504386 - RNA, 19 nt, Artificial Sequence
  Description of Artificial Sequence: Synthetic oligonucleotide
gcaacacguccucaucaua

SEQ ID NO: 1504387 - RNA, 19 nt, Artificial Sequence
  Description of Artificial Sequence: Synthetic oligonucleotide
uaccacuguucugguucau

SEQ ID NO: 1504388 - RNA, 19 nt, Artificial Sequence
  Description of Artificial Sequence: Synthetic oligonucleotide
ccagggcgaaagugagcag

SEQ ID NO: 1504389 - RNA, 19 nt, Artificial Sequence
  Description of Artificial Sequence: Synthetic oligonucleotide
gcccgugccagcagccucc

SEQ ID NO: 1504390 - RNA, 19 nt, Artificial Sequence
  Description of Artificial Sequence: Synthetic oligonucleotide
agggaauggcaggcuuuua

SEQ ID NO: 1504391 - RNA, 19 nt, Artificial Sequence
  Description of Artificial Sequence: Synthetic oligonucleotide
cuacucuugcuguguugau

SEQ ID NO: 1504392 - RNA, 19 nt, Artificial Sequence
  Description of Artificial Sequence: Synthetic oligonucleotide
cggcucgcgacaccugccg

SEQ ID NO: 1504393 - RNA, 19 nt, Artificial Sequence
  Description of Artificial Sequence: Synthetic oligonucleotide
gcgaguccccggcgcaagc

SEQ ID NO: 1504394 - RNA, 19 nt, Artificial Sequence
  Description of Artificial Sequence: Synthetic oligonucleotide
ccacggcucggcucgcgac

SEQ ID NO: 1504395 - RNA, 19 nt, Artificial Sequence
  Description of Artificial Sequence: Synthetic oligonucleotide
ccaacccggcauggagugg

SEQ ID NO: 1504396 - RNA, 19 nt, Artificial Sequence
  Description of Artificial Sequence: Synthetic oligonucleotide
gcgacaccugccgcgcgcc

SEQ ID NO: 1504397 - RNA, 19 nt, Artificial Sequence
  Description of Artificial Sequence: Synthetic oligonucleotide
ccggcgcaagcaccacgcg

SEQ ID NO: 1504398 - RNA, 19 nt, Artificial Sequence
  Description of Artificial Sequence: Synthetic oligonucleotide
caggcaguauagagucuuu

SEQ ID NO: 1504399 - RNA, 19 nt, Artificial Sequence
  Description of Artificial Sequence: Synthetic oligonucleotide
gccgcgcgccgcugcagag

SEQ ID NO: 1504400 - RNA, 19 nt, Artificial Sequence
  Description of Artificial Sequence: Synthetic oligonucleotide
ggguugcaacacguccuca

SEQ ID NO: 1504401 - RNA, 19 nt, Artificial Sequence
  Description of Artificial Sequence: Synthetic oligonucleotide
cgcgacaccugccgcgcgc

SEQ ID NO: 1504402 - RNA, 19 nt, Artificial Sequence
  Description of Artificial Sequence: Synthetic oligonucleotide
cugccgcgcgccgcugcag

SEQ ID NO: 1504403 - RNA, 19 nt, Artificial Sequence
  Description of Artificial Sequence: Synthetic oligonucleotide
gggcgauaaggccgacucu

SEQ ID NO: 1504404 - RNA, 19 nt, Artificial Sequence
  Description of Artificial Sequence: Synthetic oligonucleotide
cgcgcucgaaggagccccg

SEQ ID NO: 1504405 - RNA, 19 nt, Artificial Sequence
  Description of Artificial Sequence: Synthetic oligonucleotide
cccacccacagugagggcu

SEQ ID NO: 1504406 - RNA, 19 nt, Artificial Sequence
  Description of Artificial Sequence: Synthetic oligonucleotide
gcgcaagcaccacgcgcuc

SEQ ID NO: 1504407 - RNA, 19 nt, Artificial Sequence
  Description of Artificial Sequence: Synthetic oligonucleotide
ggcucggcucgcgacaccu

SEQ ID NO: 1504408 - RNA, 19 nt, Artificial Sequence
  Description of Artificial Sequence: Synthetic oligonucleotide
cagagccauuuacguagau

SEQ ID NO: 1504409 - RNA, 19 nt, Artificial Sequence
  Description of Artificial Sequence: Synthetic oligonucleotide
ggucuucguuugaccguga

SEQ ID NO: 1504410 - RNA, 19 nt, Artificial Sequence
  Description of Artificial Sequence: Synthetic oligonucleotide
gugaugcauuuauguccuu

SEQ ID NO: 1504411 - RNA, 19 nt, Artificial Sequence
  Description of Artificial Sequence: Synthetic oligonucleotide
gggcgccagcccgugccag

SEQ ID NO: 1504412 - RNA, 19 nt, Artificial Sequence
  Description of Artificial Sequence: Synthetic oligonucleotide
cgaaagugagcagcauaaa

SEQ ID NO: 1504413 - RNA, 19 nt, Artificial Sequence
  Description of Artificial Sequence: Synthetic oligonucleotide
cagcgaguccccggcgcaa

SEQ ID NO: 1504414 - RNA, 19 nt, Artificial Sequence
  Description of Artificial Sequence: Synthetic oligonucleotide
ccugggcgccagcccgugc

SEQ ID NO: 1504415 - RNA, 19 nt, Artificial Sequence
  Description of Artificial Sequence: Synthetic oligonucleotide
ccuaggccuguggcgccac

SEQ ID NO: 1504416 - RNA, 19 nt, Artificial Sequence
  Description of Artificial Sequence: Synthetic oligonucleotide
cgacaccugccgcgcgccg

SEQ ID NO: 1504417 - RNA, 19 nt, Artificial Sequence
  Description of Artificial Sequence: Synthetic oligonucleotide
gaggggucccuggcuuaau

SEQ ID NO: 1504418 - RNA, 19 nt, Artificial Sequence
  Description of Artificial Sequence: Synthetic oligonucleotide
cguacuguccagggcgaaa

SEQ ID NO: 1504419 - RNA, 19 nt, Artificial Sequence
  Description of Artificial Sequence: Synthetic oligonucleotide
cccuaagcccggggcagca

SEQ ID NO: 1504420 - RNA, 19 nt, Artificial Sequence
  Description of Artificial Sequence: Synthetic oligonucleotide
ggccagacucuggcaacau

SEQ ID NO: 1504421 - RNA, 19 nt, Artificial Sequence
  Description of Artificial Sequence: Synthetic oligonucleotide
cggcucggcucgcgacacc

SEQ ID NO: 1504422 - RNA, 19 nt, Artificial Sequence
  Description of Artificial Sequence: Synthetic oligonucleotide
cgcgcgccgcugcagagcu

SEQ ID NO: 1504423 - RNA, 19 nt, Artificial Sequence
  Description of Artificial Sequence: Synthetic oligonucleotide
gcgccgcugcagagcuuuc

SEQ ID NO: 1504424 - RNA, 19 nt, Artificial Sequence
  Description of Artificial Sequence: Synthetic oligonucleotide
ccgugccagcagccuccaa

SEQ ID NO: 1504425 - RNA, 19 nt, Artificial Sequence
  Description of Artificial Sequence: Synthetic oligonucleotide
ccauccgcccaggcauuuu

SEQ ID NO: 1504426 - RNA, 19 nt, Artificial Sequence
  Description of Artificial Sequence: Synthetic oligonucleotide
cccauccgcccaggcauuu

SEQ ID NO: 1504427 - RNA, 19 nt, Artificial Sequence
  Description of Artificial Sequence: Synthetic oligonucleotide
cggccacggcucggcucgc

SEQ ID NO: 1504428 - RNA, 19 nt, Artificial Sequence
  Description of Artificial Sequence: Synthetic oligonucleotide
uguaaaguaacuagcacac

SEQ ID NO: 1504429 - RNA, 19 nt, Artificial Sequence
  Description of Artificial Sequence: Synthetic oligonucleotide
guuagcagggucuaggugg

SEQ ID NO: 1504430 - RNA, 19 nt, Artificial Sequence
  Description of Artificial Sequence: Synthetic oligonucleotide
aaggcaacgaaguucuuag

SEQ ID NO: 1504431 - RNA, 19 nt, Artificial Sequence
  Description of Artificial Sequence: Synthetic oligonucleotide
aacaggaccacguuagcag

SEQ ID NO: 1504432 - RNA, 19 nt, Artificial Sequence
  Description of Artificial Sequence: Synthetic oligonucleotide
ggcgauaucucacagaugg

SEQ ID NO: 1504433 - RNA, 19 nt, Artificial Sequence
  Description of Artificial Sequence: Synthetic oligonucleotide
agagcaaucugucggaaac

SEQ ID NO: 1504434 - RNA, 19 nt, Artificial Sequence
  Description of Artificial Sequence: Synthetic oligonucleotide
uguagguacaucuccaacc

SEQ ID NO: 1504435 - RNA, 19 nt, Artificial Sequence
  Description of Artificial Sequence: Synthetic oligonucleotide
aucccauucgguuuuagcg

SEQ ID NO: 1504436 - RNA, 19 nt, Artificial Sequence
  Description of Artificial Sequence: Synthetic oligonucleotide
agcccuacuugauacaugc

SEQ ID NO: 1504437 - RNA, 19 nt, Artificial Sequence
  Description of Artificial Sequence: Synthetic oligonucleotide
aagucaugcuccuugaaga

SEQ ID NO: 1504438 - RNA, 19 nt, Artificial Sequence
  Description of Artificial Sequence: Synthetic oligonucleotide
uagugcugagccaacaagg

SEQ ID NO: 1504439 - RNA, 19 nt, Artificial Sequence
  Description of Artificial Sequence: Synthetic oligonucleotide
agaacuugauggucggucc

SEQ ID NO: 1504440 - RNA, 19 nt, Artificial Sequence
  Description of Artificial Sequence: Synthetic oligonucleotide
uccagaguaagacaccaag

SEQ ID NO: 1504441 - RNA, 19 nt, Artificial Sequence
  Description of Artificial Sequence: Synthetic oligonucleotide
aguguaaacucacugguca

SEQ ID NO: 1504442 - RNA, 19 nt, Artificial Sequence
  Description of Artificial Sequence: Synthetic oligonucleotide
uucuuagcaaacuggaaca

SEQ ID NO: 1504443 - RNA, 19 nt, Artificial Sequence
  Description of Artificial Sequence: Synthetic oligonucleotide
aaacucacuggucaugaug

SEQ ID NO: 1504444 - RNA, 19 nt, Artificial Sequence
  Description of Artificial Sequence: Synthetic oligonucleotide
ucgaacaggaccacguuag

SEQ ID NO: 1504445 - RNA, 19 nt, Artificial Sequence
  Description of Artificial Sequence: Synthetic oligonucleotide
uguugaacacgccggaucc

SEQ ID NO: 1504446 - RNA, 19 nt, Artificial Sequence
  Description of Artificial Sequence: Synthetic oligonucleotide
aagggcucaaacucccugg

SEQ ID NO: 1504447 - RNA, 19 nt, Artificial Sequence
  Description of Artificial Sequence: Synthetic oligonucleotide
auccagaaugaauggagac

SEQ ID NO: 1504448 - RNA, 19 nt, Artificial Sequence
  Description of Artificial Sequence: Synthetic oligonucleotide
ucccauucgguuuuagcgg

SEQ ID NO: 1504449 - RNA, 19 nt, Artificial Sequence
  Description of Artificial Sequence: Synthetic oligonucleotide
uuauccaggaagucucggg

SEQ ID NO: 1504450 - RNA, 19 nt, Artificial Sequence
  Description of Artificial Sequence: Synthetic oligonucleotide
uugauacaugcccuugggg

SEQ ID NO: 1504451 - RNA, 19 nt, Artificial Sequence
  Description of Artificial Sequence: Synthetic oligonucleotide
gagacuggaguuuucggcc

SEQ ID NO: 1504452 - RNA, 19 nt, Artificial Sequence
  Description of Artificial Sequence: Synthetic oligonucleotide
ucgggugaagaaaugguug

SEQ ID NO: 1504453 - RNA, 19 nt, Artificial Sequence
  Description of Artificial Sequence: Synthetic oligonucleotide
guuuuagcggcuuuaccag

SEQ ID NO: 1504454 - RNA, 19 nt, Artificial Sequence
  Description of Artificial Sequence: Synthetic oligonucleotide
acccaaagaggucccaacc

SEQ ID NO: 1504455 - RNA, 19 nt, Artificial Sequence
  Description of Artificial Sequence: Synthetic oligonucleotide
aauggggagaauuccuccu

SEQ ID NO: 1504456 - RNA, 19 nt, Artificial Sequence
  Description of Artificial Sequence: Synthetic oligonucleotide
acuugauacaugcccuugg

SEQ ID NO: 1504457 - RNA, 19 nt, Artificial Sequence
  Description of Artificial Sequence: Synthetic oligonucleotide
ucccgagauacuucaaagg

SEQ ID NO: 1504458 - RNA, 19 nt, Artificial Sequence
  Description of Artificial Sequence: Synthetic oligonucleotide
ucggaaaccuuccucuucc

SEQ ID NO: 1504459 - RNA, 19 nt, Artificial Sequence
  Description of Artificial Sequence: Synthetic oligonucleotide
aaucugucggaaaccuucc

SEQ ID NO: 1504460 - RNA, 19 nt, Artificial Sequence
  Description of Artificial Sequence: Synthetic oligonucleotide
guagguacaucuccaaccc

SEQ ID NO: 1504461 - RNA, 19 nt, Artificial Sequence
  Description of Artificial Sequence: Synthetic oligonucleotide
aacucacuggucaugaugu

SEQ ID NO: 1504462 - RNA, 19 nt, Artificial Sequence
  Description of Artificial Sequence: Synthetic oligonucleotide
caacuguugaacacgccgg

SEQ ID NO: 1504463 - RNA, 19 nt, Artificial Sequence
  Description of Artificial Sequence: Synthetic oligonucleotide
aacgaaguucuuagcaaac

SEQ ID NO: 1504464 - RNA, 19 nt, Artificial Sequence
  Description of Artificial Sequence: Synthetic oligonucleotide
accccgacguuucaugucc

SEQ ID NO: 1504465 - RNA, 19 nt, Artificial Sequence
  Description of Artificial Sequence: Synthetic oligonucleotide
cucacagauggcuggaggg

SEQ ID NO: 1504466 - RNA, 19 nt, Artificial Sequence
  Description of Artificial Sequence: Synthetic oligonucleotide
ucuagguggaagaagucau

SEQ ID NO: 1504467 - RNA, 19 nt, Artificial Sequence
  Description of Artificial Sequence: Synthetic oligonucleotide
ucuuggucgcagcggaucg

SEQ ID NO: 1504468 - RNA, 19 nt, Artificial Sequence
  Description of Artificial Sequence: Synthetic oligonucleotide
agccuaugaagacuggguc

SEQ ID NO: 1504469 - RNA, 19 nt, Artificial Sequence
  Description of Artificial Sequence: Synthetic oligonucleotide
caaucugucggaaaccuuc

SEQ ID NO: 1504470 - RNA, 19 nt, Artificial Sequence
  Description of Artificial Sequence: Synthetic oligonucleotide
uggucaugauguaccaggg

SEQ ID NO: 1504471 - RNA, 19 nt, Artificial Sequence
  Description of Artificial Sequence: Synthetic oligonucleotide
auaucagcacccgauagag

SEQ ID NO: 1504472 - RNA, 19 nt, Artificial Sequence
  Description of Artificial Sequence: Synthetic oligonucleotide
uucaauggggagaauuccu

SEQ ID NO: 1504473 - RNA, 19 nt, Artificial Sequence
  Description of Artificial Sequence: Synthetic oligonucleotide
cuugauacaugcccuuggg

SEQ ID NO: 1504474 - RNA, 19 nt, Artificial Sequence
  Description of Artificial Sequence: Synthetic oligonucleotide
aggguaugcuuucuccacc

SEQ ID NO: 1504475 - RNA, 19 nt, Artificial Sequence
  Description of Artificial Sequence: Synthetic oligonucleotide
uccauuugggagcaagcca

SEQ ID NO: 1504476 - RNA, 19 nt, Artificial Sequence
  Description of Artificial Sequence: Synthetic oligonucleotide
ggaguuuucggccuuguag

SEQ ID NO: 1504477 - RNA, 19 nt, Artificial Sequence
  Description of Artificial Sequence: Synthetic oligonucleotide
auaugggaccuucuucacg

SEQ ID NO: 1504478 - RNA, 19 nt, Artificial Sequence
  Description of Artificial Sequence: Synthetic oligonucleotide
gaagccuaugaagacuggg

SEQ ID NO: 1504479 - RNA, 19 nt, Artificial Sequence
  Description of Artificial Sequence: Synthetic oligonucleotide
gauaucucacagauggcug

SEQ ID NO: 1504480 - RNA, 19 nt, Artificial Sequence
  Description of Artificial Sequence: Synthetic oligonucleotide
gguuuuagcggcuuuacca

SEQ ID NO: 1504481 - RNA, 19 nt, Artificial Sequence
  Description of Artificial Sequence: Synthetic oligonucleotide
agggcgauaucucacagau

SEQ ID NO: 1504482 - RNA, 19 nt, Artificial Sequence
  Description of Artificial Sequence: Synthetic oligonucleotide
uuuaccagauuucccuccu

SEQ ID NO: 1504483 - RNA, 19 nt, Artificial Sequence
  Description of Artificial Sequence: Synthetic oligonucleotide
ucaauggggagaauuccuc

SEQ ID NO: 1504484 - RNA, 19 nt, Artificial Sequence
  Description of Artificial Sequence: Synthetic oligonucleotide
uuugggagcaagccagacu

SEQ ID NO: 1504485 - RNA, 19 nt, Artificial Sequence
  Description of Artificial Sequence: Synthetic oligonucleotide
agagcuauaucagcacccg

SEQ ID NO: 1504486 - RNA, 19 nt, Artificial Sequence
  Description of Artificial Sequence: Synthetic oligonucleotide
aacuagcacacucccuucu

SEQ ID NO: 1504487 - RNA, 19 nt, Artificial Sequence
  Description of Artificial Sequence: Synthetic oligonucleotide
uguaaacucacuggucaug

SEQ ID NO: 1504488 - RNA, 19 nt, Artificial Sequence
  Description of Artificial Sequence: Synthetic oligonucleotide
guaggugacgcccaggcga

SEQ ID NO: 1504489 - RNA, 19 nt, Artificial Sequence
  Description of Artificial Sequence: Synthetic oligonucleotide
uaucccauucgguuuuagc

SEQ ID NO: 1504490 - RNA, 19 nt, Artificial Sequence
  Description of Artificial Sequence: Synthetic oligonucleotide
uuguagguacaucuccaac

SEQ ID NO: 1504491 - RNA, 19 nt, Artificial Sequence
  Description of Artificial Sequence: Synthetic oligonucleotide
cucccgagauacuucaaag

SEQ ID NO: 1504492 - RNA, 19 nt, Artificial Sequence
  Description of Artificial Sequence: Synthetic oligonucleotide
uuuagcggcuuuaccagau

SEQ ID NO: 1504493 - RNA, 19 nt, Artificial Sequence
  Description of Artificial Sequence: Synthetic oligonucleotide
uuccaguauggccuugccc

SEQ ID NO: 1504494 - RNA, 19 nt, Artificial Sequence
  Description of Artificial Sequence: Synthetic oligonucleotide
ugucuuuccguuccaguau

SEQ ID NO: 1504495 - RNA, 19 nt, Artificial Sequence
  Description of Artificial Sequence: Synthetic oligonucleotide
aggcgugucucuuggucgc

SEQ ID NO: 1504496 - RNA, 19 nt, Artificial Sequence
  Description of Artificial Sequence: Synthetic oligonucleotide
cuucaauggggagaauucc

SEQ ID NO: 1504497 - RNA, 19 nt, Artificial Sequence
  Description of Artificial Sequence: Synthetic oligonucleotide
ccaacuguugaacacgccg

SEQ ID NO: 1504498 - RNA, 19 nt, Artificial Sequence
  Description of Artificial Sequence: Synthetic oligonucleotide
gauagagccccagggcugg

SEQ ID NO: 1504499 - RNA, 19 nt, Artificial Sequence
  Description of Artificial Sequence: Synthetic oligonucleotide
gaacuugauggucgguccc

SEQ ID NO: 1504500 - RNA, 19 nt, Artificial Sequence
  Description of Artificial Sequence: Synthetic oligonucleotide
caggcgugucucuuggucg

SEQ ID NO: 1504501 - RNA, 19 nt, Artificial Sequence
  Description of Artificial Sequence: Synthetic oligonucleotide
uuuuagcggcuuuaccaga

SEQ ID NO: 1504502 - RNA, 19 nt, Artificial Sequence
  Description of Artificial Sequence: Synthetic oligonucleotide
auggagacuggaguuuucg

SEQ ID NO: 1504503 - RNA, 19 nt, Artificial Sequence
  Description of Artificial Sequence: Synthetic oligonucleotide
ucagggcuaaucucgcugu

SEQ ID NO: 1504504 - RNA, 19 nt, Artificial Sequence
  Description of Artificial Sequence: Synthetic oligonucleotide
aagccuaugaagacugggu

SEQ ID NO: 1504505 - RNA, 19 nt, Artificial Sequence
  Description of Artificial Sequence: Synthetic oligonucleotide
aaaggcaacgaaguucuua

SEQ ID NO: 1504506 - RNA, 19 nt, Artificial Sequence
  Description of Artificial Sequence: Synthetic oligonucleotide
agaggucccaaccuuguaa

SEQ ID NO: 1504507 - RNA, 19 nt, Artificial Sequence
  Description of Artificial Sequence: Synthetic oligonucleotide
ugagccaacaaggcucucc

SEQ ID NO: 1504508 - RNA, 19 nt, Artificial Sequence
  Description of Artificial Sequence: Synthetic oligonucleotide
aggcaacgaaguucuuagc

SEQ ID NO: 1504509 - RNA, 19 nt, Artificial Sequence
  Description of Artificial Sequence: Synthetic oligonucleotide
aagggcgauaucucacaga

SEQ ID NO: 1504510 - RNA, 19 nt, Artificial Sequence
  Description of Artificial Sequence: Synthetic oligonucleotide
uauugcccguguuguagag

SEQ ID NO: 1504511 - RNA, 19 nt, Artificial Sequence
  Description of Artificial Sequence: Synthetic oligonucleotide
uaggugacgcccaggcgag

SEQ ID NO: 1504512 - RNA, 19 nt, Artificial Sequence
  Description of Artificial Sequence: Synthetic oligonucleotide
ggucucagggcuaaucucg

SEQ ID NO: 1504513 - RNA, 19 nt, Artificial Sequence
  Description of Artificial Sequence: Synthetic oligonucleotide
cccgagauacuucaaaggc

SEQ ID NO: 1504514 - RNA, 19 nt, Artificial Sequence
  Description of Artificial Sequence: Synthetic oligonucleotide
ugauggucggucccagugu

SEQ ID NO: 1504515 - RNA, 19 nt, Artificial Sequence
  Description of Artificial Sequence: Synthetic oligonucleotide
gacaccaagggcgauaucu

SEQ ID NO: 1504516 - RNA, 19 nt, Artificial Sequence
  Description of Artificial Sequence: Synthetic oligonucleotide
agcccagcggucucagggc

SEQ ID NO: 1504517 - RNA, 19 nt, Artificial Sequence
  Description of Artificial Sequence: Synthetic oligonucleotide
aacacgccggauccgcucu

SEQ ID NO: 1504518 - RNA, 19 nt, Artificial Sequence
  Description of Artificial Sequence: Synthetic oligonucleotide
uucuucaauggggagaauu

SEQ ID NO: 1504519 - RNA, 19 nt, Artificial Sequence
  Description of Artificial Sequence: Synthetic oligonucleotide
aucuccaaccccucuccag

SEQ ID NO: 1504520 - RNA, 19 nt, Artificial Sequence
  Description of Artificial Sequence: Synthetic oligonucleotide
uuagcacuccuguggcugc

SEQ ID NO: 1504521 - RNA, 19 nt, Artificial Sequence
  Description of Artificial Sequence: Synthetic oligonucleotide
auuugggagcaagccagac

SEQ ID NO: 1504522 - RNA, 19 nt, Artificial Sequence
  Description of Artificial Sequence: Synthetic oligonucleotide
cuccauuugggagcaagcc

SEQ ID NO: 1504523 - RNA, 19 nt, Artificial Sequence
  Description of Artificial Sequence: Synthetic oligonucleotide
cucagggcuaaucucgcug

SEQ ID NO: 1504524 - RNA, 19 nt, Artificial Sequence
  Description of Artificial Sequence: Synthetic oligonucleotide
auauugcccguguuguaga

SEQ ID NO: 1504525 - RNA, 19 nt, Artificial Sequence
  Description of Artificial Sequence: Synthetic oligonucleotide
cccuacuugauacaugccc

SEQ ID NO: 1504526 - RNA, 19 nt, Artificial Sequence
  Description of Artificial Sequence: Synthetic oligonucleotide
ucagcacccgauagagccc

SEQ ID NO: 1504527 - RNA, 19 nt, Artificial Sequence
  Description of Artificial Sequence: Synthetic oligonucleotide
uugaacacgccggauccgc

SEQ ID NO: 1504528 - RNA, 19 nt, Artificial Sequence
  Description of Artificial Sequence: Synthetic oligonucleotide
uagguacaucuccaacccc

SEQ ID NO: 1504529 - RNA, 19 nt, Artificial Sequence
  Description of Artificial Sequence: Synthetic oligonucleotide
acaccaacuggcuccucag

SEQ ID NO: 1504530 - RNA, 19 nt, Artificial Sequence
  Description of Artificial Sequence: Synthetic oligonucleotide
agguagcaugcgcugcucg

SEQ ID NO: 1504531 - RNA, 19 nt, Artificial Sequence
  Description of Artificial Sequence: Synthetic oligonucleotide
uaucagcacccgauagagc

SEQ ID NO: 1504532 - RNA, 19 nt, Artificial Sequence
  Description of Artificial Sequence: Synthetic oligonucleotide
agcggguuagcacuccugu

SEQ ID NO: 1504533 - RNA, 19 nt, Artificial Sequence
  Description of Artificial Sequence: Synthetic oligonucleotide
agcagguagcaugcgcugc

SEQ ID NO: 1504534 - RNA, 19 nt, Artificial Sequence
  Description of Artificial Sequence: Synthetic oligonucleotide
caaacuccacaccccgacg

SEQ ID NO: 1504535 - RNA, 19 nt, Artificial Sequence
  Description of Artificial Sequence: Synthetic oligonucleotide
guaaacucacuggucauga

SEQ ID NO: 1504536 - RNA, 19 nt, Artificial Sequence
  Description of Artificial Sequence: Synthetic oligonucleotide
uuggucgcagcggaucgcg

SEQ ID NO: 1504537 - RNA, 19 nt, Artificial Sequence
  Description of Artificial Sequence: Synthetic oligonucleotide
ggcaacgaaguucuuagca

SEQ ID NO: 1504538 - RNA, 19 nt, Artificial Sequence
  Description of Artificial Sequence: Synthetic oligonucleotide
auacuucaaaggcaacgaa

SEQ ID NO: 1504539 - RNA, 19 nt, Artificial Sequence
  Description of Artificial Sequence: Synthetic oligonucleotide
uacuugauacaugcccuug

SEQ ID NO: 1504540 - RNA, 19 nt, Artificial Sequence
  Description of Artificial Sequence: Synthetic oligonucleotide
gucuuuccguuccaguaug

SEQ ID NO: 1504541 - RNA, 19 nt, Artificial Sequence
  Description of Artificial Sequence: Synthetic oligonucleotide
agucaugcuccuugaagaa

SEQ ID NO: 1504542 - RNA, 19 nt, Artificial Sequence
  Description of Artificial Sequence: Synthetic oligonucleotide
caggguaugcuuucuccac

SEQ ID NO: 1504543 - RNA, 19 nt, Artificial Sequence
  Description of Artificial Sequence: Synthetic oligonucleotide
aggaagugggcuccggccu

SEQ ID NO: 1504544 - RNA, 19 nt, Artificial Sequence
  Description of Artificial Sequence: Synthetic oligonucleotide
uugcagauauugcccgugu

SEQ ID NO: 1504545 - RNA, 19 nt, Artificial Sequence
  Description of Artificial Sequence: Synthetic oligonucleotide
gcuaaucucgcuguauucc

SEQ ID NO: 1504546 - RNA, 19 nt, Artificial Sequence
  Description of Artificial Sequence: Synthetic oligonucleotide
guaacuagcacacucccuu

SEQ ID NO: 1504547 - RNA, 19 nt, Artificial Sequence
  Description of Artificial Sequence: Synthetic oligonucleotide
gaggucccaaccuuguaaa

SEQ ID NO: 1504548 - RNA, 19 nt, Artificial Sequence
  Description of Artificial Sequence: Synthetic oligonucleotide
caguguaaacucacugguc

SEQ ID NO: 1504549 - RNA, 19 nt, Artificial Sequence
  Description of Artificial Sequence: Synthetic oligonucleotide
caagggcucaaacucccug

SEQ ID NO: 1504550 - RNA, 19 nt, Artificial Sequence
  Description of Artificial Sequence: Synthetic oligonucleotide
ugauguaccagggcacggu

SEQ ID NO: 1504551 - RNA, 19 nt, Artificial Sequence
  Description of Artificial Sequence: Synthetic oligonucleotide
caacgaaguucuuagcaaa

SEQ ID NO: 1504552 - RNA, 19 nt, Artificial Sequence
  Description of Artificial Sequence: Synthetic oligonucleotide
ccucuccagaguaagacac

SEQ ID NO: 1504553 - RNA, 19 nt, Artificial Sequence
  Description of Artificial Sequence: Synthetic oligonucleotide
gaagucucgggugaagaaa

SEQ ID NO: 1504554 - RNA, 19 nt, Artificial Sequence
  Description of Artificial Sequence: Synthetic oligonucleotide
gggagaauuccuccucccg

SEQ ID NO: 1504555 - RNA, 19 nt, Artificial Sequence
  Description of Artificial Sequence: Synthetic oligonucleotide
caagggcgauaucucacag

SEQ ID NO: 1504556 - RNA, 19 nt, Artificial Sequence
  Description of Artificial Sequence: Synthetic oligonucleotide
uaacuagcacacucccuuc

SEQ ID NO: 1504557 - RNA, 19 nt, Artificial Sequence
  Description of Artificial Sequence: Synthetic oligonucleotide
gagcaaucugucggaaacc

SEQ ID NO: 1504558 - RNA, 19 nt, Artificial Sequence
  Description of Artificial Sequence: Synthetic oligonucleotide
agggucuuuuggcugggca

SEQ ID NO: 1504559 - RNA, 19 nt, Artificial Sequence
  Description of Artificial Sequence: Synthetic oligonucleotide
uagcggcuuuaccagauuu

SEQ ID NO: 1504560 - RNA, 19 nt, Artificial Sequence
  Description of Artificial Sequence: Synthetic oligonucleotide
agcggcuuuaccagauuuc

SEQ ID NO: 1504561 - RNA, 19 nt, Artificial Sequence
  Description of Artificial Sequence: Synthetic oligonucleotide
uaucucacagauggcugga

SEQ ID NO: 1504562 - RNA, 19 nt, Artificial Sequence
  Description of Artificial Sequence: Synthetic oligonucleotide
ucggucccaguguaaacuc

SEQ ID NO: 1504563 - RNA, 19 nt, Artificial Sequence
  Description of Artificial Sequence: Synthetic oligonucleotide
gucccaaccuuguaaagua

SEQ ID NO: 1504564 - RNA, 19 nt, Artificial Sequence
  Description of Artificial Sequence: Synthetic oligonucleotide
aggucccaaccuuguaaag

SEQ ID NO: 1504565 - RNA, 19 nt, Artificial Sequence
  Description of Artificial Sequence: Synthetic oligonucleotide
ucgguuuuagcggcuuuac

SEQ ID NO: 1504566 - RNA, 19 nt, Artificial Sequence
  Description of Artificial Sequence: Synthetic oligonucleotide
cacaccccgacguuucaug

SEQ ID NO: 1504567 - RNA, 19 nt, Artificial Sequence
  Description of Artificial Sequence: Synthetic oligonucleotide
uuaucccauucgguuuuag

SEQ ID NO: 1504568 - RNA, 19 nt, Artificial Sequence
  Description of Artificial Sequence: Synthetic oligonucleotide
ugaacacgccggauccgcu

SEQ ID NO: 1504569 - RNA, 19 nt, Artificial Sequence
  Description of Artificial Sequence: Synthetic oligonucleotide
cguguuguagagcaagccc

SEQ ID NO: 1504570 - RNA, 19 nt, Artificial Sequence
  Description of Artificial Sequence: Synthetic oligonucleotide
ggagaauuccuccucccga

SEQ ID NO: 1504571 - RNA, 19 nt, Artificial Sequence
  Description of Artificial Sequence: Synthetic oligonucleotide
aguaacuagcacacucccu

SEQ ID NO: 1504572 - RNA, 19 nt, Artificial Sequence
  Description of Artificial Sequence: Synthetic oligonucleotide
guugaacacgccggauccg

SEQ ID NO: 1504573 - RNA, 19 nt, Artificial Sequence
  Description of Artificial Sequence: Synthetic oligonucleotide
cuuguagguacaucuccaa

SEQ ID NO: 1504574 - RNA, 19 nt, Artificial Sequence
  Description of Artificial Sequence: Synthetic oligonucleotide
uaaacucacuggucaugau

SEQ ID NO: 1504575 - RNA, 19 nt, Artificial Sequence
  Description of Artificial Sequence: Synthetic oligonucleotide
ugggguaggugacgcccag

SEQ ID NO: 1504576 - RNA, 19 nt, Artificial Sequence
  Description of Artificial Sequence: Synthetic oligonucleotide
acaccccgacguuucaugu

SEQ ID NO: 1504577 - RNA, 19 nt, Artificial Sequence
  Description of Artificial Sequence: Synthetic oligonucleotide
ugcagauauugcccguguu

SEQ ID NO: 1504578 - RNA, 19 nt, Artificial Sequence
  Description of Artificial Sequence: Synthetic oligonucleotide
agcggucucagggcuaauc

SEQ ID NO: 1504579 - RNA, 19 nt, Artificial Sequence
  Description of Artificial Sequence: Synthetic oligonucleotide
uuaccagauuucccuccuc

SEQ ID NO: 1504580 - RNA, 19 nt, Artificial Sequence
  Description of Artificial Sequence: Synthetic oligonucleotide
gauggucggucccagugua

SEQ ID NO: 1504581 - RNA, 19 nt, Artificial Sequence
  Description of Artificial Sequence: Synthetic oligonucleotide
ccagagcuauaucagcacc

SEQ ID NO: 1504582 - RNA, 19 nt, Artificial Sequence
  Description of Artificial Sequence: Synthetic oligonucleotide
agucugcaccccgaagcac

SEQ ID NO: 1504583 - RNA, 19 nt, Artificial Sequence
  Description of Artificial Sequence: Synthetic oligonucleotide
ggcuuuaccagauuucccu

SEQ ID NO: 1504584 - RNA, 19 nt, Artificial Sequence
  Description of Artificial Sequence: Synthetic oligonucleotide
agcuggaccccauguacau

SEQ ID NO: 1504585 - RNA, 19 nt, Artificial Sequence
  Description of Artificial Sequence: Synthetic oligonucleotide
aacuccacaccccgacguu

SEQ ID NO: 1504586 - RNA, 19 nt, Artificial Sequence
  Description of Artificial Sequence: Synthetic oligonucleotide
gaacacgccggauccgcuc

SEQ ID NO: 1504587 - RNA, 19 nt, Artificial Sequence
  Description of Artificial Sequence: Synthetic oligonucleotide
ggguuagcacuccuguggc

SEQ ID NO: 1504588 - RNA, 19 nt, Artificial Sequence
  Description of Artificial Sequence: Synthetic oligonucleotide
ggcacggugcaaugggucc

SEQ ID NO: 1504589 - RNA, 19 nt, Artificial Sequence
  Description of Artificial Sequence: Synthetic oligonucleotide
uucgguuuuagcggcuuua

SEQ ID NO: 1504590 - RNA, 19 nt, Artificial Sequence
  Description of Artificial Sequence: Synthetic oligonucleotide
gcaacgaaguucuuagcaa

SEQ ID NO: 1504591 - RNA, 19 nt, Artificial Sequence
  Description of Artificial Sequence: Synthetic oligonucleotide
cccguugccaucuggggcc

SEQ ID NO: 1504592 - RNA, 19 nt, Artificial Sequence
  Description of Artificial Sequence: Synthetic oligonucleotide
gguaggugacgcccaggcg

SEQ ID NO: 1504593 - RNA, 19 nt, Artificial Sequence
  Description of Artificial Sequence: Synthetic oligonucleotide
gcaauggguccccagucgc

SEQ ID NO: 1504594 - RNA, 19 nt, Artificial Sequence
  Description of Artificial Sequence: Synthetic oligonucleotide
agaagccuaugaagacugg

SEQ ID NO: 1504595 - RNA, 19 nt, Artificial Sequence
  Description of Artificial Sequence: Synthetic oligonucleotide
uccaaccccucuccagagu

SEQ ID NO: 1504596 - RNA, 19 nt, Artificial Sequence
  Description of Artificial Sequence: Synthetic oligonucleotide
cugucggaaaccuuccucu

SEQ ID NO: 1504597 - RNA, 19 nt, Artificial Sequence
  Description of Artificial Sequence: Synthetic oligonucleotide
cccauucgguuuuagcggc

SEQ ID NO: 1504598 - RNA, 19 nt, Artificial Sequence
  Description of Artificial Sequence: Synthetic oligonucleotide
uuuggcugggcagcccuac

SEQ ID NO: 1504599 - RNA, 19 nt, Artificial Sequence
  Description of Artificial Sequence: Synthetic oligonucleotide
caaccuuguaaaguaacua

SEQ ID NO: 1504600 - RNA, 19 nt, Artificial Sequence
  Description of Artificial Sequence: Synthetic oligonucleotide
cacggccacaugcagcuuc

SEQ ID NO: 1504601 - RNA, 19 nt, Artificial Sequence
  Description of Artificial Sequence: Synthetic oligonucleotide
ucagagcaaucugucggaa

SEQ ID NO: 1504602 - RNA, 19 nt, Artificial Sequence
  Description of Artificial Sequence: Synthetic oligonucleotide
ugucggaaaccuuccucuu

SEQ ID NO: 1504603 - RNA, 19 nt, Artificial Sequence
  Description of Artificial Sequence: Synthetic oligonucleotide
gagugcccugcccaccggc

SEQ ID NO: 1504604 - RNA, 19 nt, Artificial Sequence
  Description of Artificial Sequence: Synthetic oligonucleotide
gagcuauaucagcacccga

SEQ ID NO: 1504605 - RNA, 19 nt, Artificial Sequence
  Description of Artificial Sequence: Synthetic oligonucleotide
gcggcuuuaccagauuucc

SEQ ID NO: 1504606 - RNA, 19 nt, Artificial Sequence
  Description of Artificial Sequence: Synthetic oligonucleotide
aguugguacagggucuuuu

SEQ ID NO: 1504607 - RNA, 19 nt, Artificial Sequence
  Description of Artificial Sequence: Synthetic oligonucleotide
cccaaccuuguaaaguaac

SEQ ID NO: 1504608 - RNA, 19 nt, Artificial Sequence
  Description of Artificial Sequence: Synthetic oligonucleotide
ugacgcccaggcgagugcc

SEQ ID NO: 1504609 - RNA, 19 nt, Artificial Sequence
  Description of Artificial Sequence: Synthetic oligonucleotide
ggaaggguugucccugcug

SEQ ID NO: 1504610 - RNA, 19 nt, Artificial Sequence
  Description of Artificial Sequence: Synthetic oligonucleotide
uggucggucccaguguaaa

SEQ ID NO: 1504611 - RNA, 19 nt, Artificial Sequence
  Description of Artificial Sequence: Synthetic oligonucleotide
gaauuccuccucccgagau

SEQ ID NO: 1504612 - RNA, 19 nt, Artificial Sequence
  Description of Artificial Sequence: Synthetic oligonucleotide
ggcuccggccugcagagcc

SEQ ID NO: 1504613 - RNA, 19 nt, Artificial Sequence
  Description of Artificial Sequence: Synthetic oligonucleotide
cagcacccgauagagcccc

SEQ ID NO: 1504614 - RNA, 19 nt, Artificial Sequence
  Description of Artificial Sequence: Synthetic oligonucleotide
uggaguuuucggccuugua

SEQ ID NO: 1504615 - RNA, 19 nt, Artificial Sequence
  Description of Artificial Sequence: Synthetic oligonucleotide
uuucggccuuguagguaca

SEQ ID NO: 1504616 - RNA, 19 nt, Artificial Sequence
  Description of Artificial Sequence: Synthetic oligonucleotide
accagggcacggugcaaug

SEQ ID NO: 1504617 - RNA, 19 nt, Artificial Sequence
  Description of Artificial Sequence: Synthetic oligonucleotide
cucuuggucgcagcggauc

SEQ ID NO: 1504618 - RNA, 19 nt, Artificial Sequence
  Description of Artificial Sequence: Synthetic oligonucleotide
gcuuuaccagauuucccuc

SEQ ID NO: 1504619 - RNA, 19 nt, Artificial Sequence
  Description of Artificial Sequence: Synthetic oligonucleotide
aggaucugguggucagcca

SEQ ID NO: 1504620 - RNA, 19 nt, Artificial Sequence
  Description of Artificial Sequence: Synthetic oligonucleotide
gggcagcccuacuugauac

SEQ ID NO: 1504621 - RNA, 19 nt, Artificial Sequence
  Description of Artificial Sequence: Synthetic oligonucleotide
cagcccuacuugauacaug

SEQ ID NO: 1504622 - RNA, 19 nt, Artificial Sequence
  Description of Artificial Sequence: Synthetic oligonucleotide
aguauggccuugcccucaa

SEQ ID NO: 1504623 - RNA, 19 nt, Artificial Sequence
  Description of Artificial Sequence: Synthetic oligonucleotide
cgagauacuucaaaggcaa

SEQ ID NO: 1504624 - RNA, 19 nt, Artificial Sequence
  Description of Artificial Sequence: Synthetic oligonucleotide
ggguaugcuuucuccacca

SEQ ID NO: 1504625 - RNA, 19 nt, Artificial Sequence
  Description of Artificial Sequence: Synthetic oligonucleotide
caccuggcacaccacacca

SEQ ID NO: 1504626 - RNA, 19 nt, Artificial Sequence
  Description of Artificial Sequence: Synthetic oligonucleotide
gcaugcgcugcucgaacag

SEQ ID NO: 1504627 - RNA, 19 nt, Artificial Sequence
  Description of Artificial Sequence: Synthetic oligonucleotide
aggguugucccugcuggcu

SEQ ID NO: 1504628 - RNA, 19 nt, Artificial Sequence
  Description of Artificial Sequence: Synthetic oligonucleotide
guacauccaggaagugggc

SEQ ID NO: 1504629 - RNA, 19 nt, Artificial Sequence
  Description of Artificial Sequence: Synthetic oligonucleotide
uggcugggcagcccuacuu

SEQ ID NO: 1504630 - RNA, 19 nt, Artificial Sequence
  Description of Artificial Sequence: Synthetic oligonucleotide
cauguacauccaggaagug

SEQ ID NO: 1504631 - RNA, 19 nt, Artificial Sequence
  Description of Artificial Sequence: Synthetic oligonucleotide
ccgagauacuucaaaggca

SEQ ID NO: 1504632 - RNA, 19 nt, Artificial Sequence
  Description of Artificial Sequence: Synthetic oligonucleotide
ucucuuggucgcagcggau

SEQ ID NO: 1504633 - RNA, 19 nt, Artificial Sequence
  Description of Artificial Sequence: Synthetic oligonucleotide
agacaccaagggcgauauc

SEQ ID NO: 1504634 - RNA, 19 nt, Artificial Sequence
  Description of Artificial Sequence: Synthetic oligonucleotide
ggcaacuuugucuuuccgu

SEQ ID NO: 1504635 - RNA, 19 nt, Artificial Sequence
  Description of Artificial Sequence: Synthetic oligonucleotide
gguagcaugcgcugcucga

SEQ ID NO: 1504636 - RNA, 19 nt, Artificial Sequence
  Description of Artificial Sequence: Synthetic oligonucleotide
cccgauagagccccagggc

SEQ ID NO: 1504637 - RNA, 19 nt, Artificial Sequence
  Description of Artificial Sequence: Synthetic oligonucleotide
gaagugggcuccggccugc

SEQ ID NO: 1504638 - RNA, 19 nt, Artificial Sequence
  Description of Artificial Sequence: Synthetic oligonucleotide
acuguugaacacgccggau

SEQ ID NO: 1504639 - RNA, 19 nt, Artificial Sequence
  Description of Artificial Sequence: Synthetic oligonucleotide
ggagggucuccauuuggga

SEQ ID NO: 1504640 - RNA, 19 nt, Artificial Sequence
  Description of Artificial Sequence: Synthetic oligonucleotide
cuuggucgcagcggaucgc

SEQ ID NO: 1504641 - RNA, 19 nt, Artificial Sequence
  Description of Artificial Sequence: Synthetic oligonucleotide
auucgguuuuagcggcuuu

SEQ ID NO: 1504642 - RNA, 19 nt, Artificial Sequence
  Description of Artificial Sequence: Synthetic oligonucleotide
cagcggguuagcacuccug

SEQ ID NO: 1504643 - RNA, 19 nt, Artificial Sequence
  Description of Artificial Sequence: Synthetic oligonucleotide
ccagauuucccuccucguc

SEQ ID NO: 1504644 - RNA, 19 nt, Artificial Sequence
  Description of Artificial Sequence: Synthetic oligonucleotide
gugacgcccaggcgagugc

SEQ ID NO: 1504645 - RNA, 19 nt, Artificial Sequence
  Description of Artificial Sequence: Synthetic oligonucleotide
gaccacguuagcagggucu

SEQ ID NO: 1504646 - RNA, 19 nt, Artificial Sequence
  Description of Artificial Sequence: Synthetic oligonucleotide
ggucccaguguaaacucac

SEQ ID NO: 1504647 - RNA, 19 nt, Artificial Sequence
  Description of Artificial Sequence: Synthetic oligonucleotide
ggccuugcccucaaaaguc

SEQ ID NO: 1504648 - RNA, 19 nt, Artificial Sequence
  Description of Artificial Sequence: Synthetic oligonucleotide
caccccgacguuucauguc

SEQ ID NO: 1504649 - RNA, 19 nt, Artificial Sequence
  Description of Artificial Sequence: Synthetic oligonucleotide
gcaggcgugucucuugguc

SEQ ID NO: 1504650 - RNA, 19 nt, Artificial Sequence
  Description of Artificial Sequence: Synthetic oligonucleotide
agggcuaaucucgcuguau

SEQ ID NO: 1504651 - RNA, 19 nt, Artificial Sequence
  Description of Artificial Sequence: Synthetic oligonucleotide
cacggugcaaugggucccc

SEQ ID NO: 1504652 - RNA, 19 nt, Artificial Sequence
  Description of Artificial Sequence: Synthetic oligonucleotide
ggaccccauguacauccag

SEQ ID NO: 1504653 - RNA, 19 nt, Artificial Sequence
  Description of Artificial Sequence: Synthetic oligonucleotide
cagagcaaucugucggaaa

SEQ ID NO: 1504654 - RNA, 19 nt, Artificial Sequence
  Description of Artificial Sequence: Synthetic oligonucleotide
gucggucccaguguaaacu

SEQ ID NO: 1504655 - RNA, 19 nt, Artificial Sequence
  Description of Artificial Sequence: Synthetic oligonucleotide
uccucccgagauacuucaa

SEQ ID NO: 1504656 - RNA, 19 nt, Artificial Sequence
  Description of Artificial Sequence: Synthetic oligonucleotide
gauccgcucugccugcagu

SEQ ID NO: 1504657 - RNA, 19 nt, Artificial Sequence
  Description of Artificial Sequence: Synthetic oligonucleotide
ucggccuuguagguacauc

SEQ ID NO: 1504658 - RNA, 19 nt, Artificial Sequence
  Description of Artificial Sequence: Synthetic oligonucleotide
gcccguguuguagagcaag

SEQ ID NO: 1504659 - RNA, 19 nt, Artificial Sequence
  Description of Artificial Sequence: Synthetic oligonucleotide
ccuacuugauacaugcccu

SEQ ID NO: 1504660 - RNA, 19 nt, Artificial Sequence
  Description of Artificial Sequence: Synthetic oligonucleotide
cccuggugaccuuauccag

SEQ ID NO: 1504661 - RNA, 19 nt, Artificial Sequence
  Description of Artificial Sequence: Synthetic oligonucleotide
cccguguuguagagcaagc

SEQ ID NO: 1504662 - RNA, 19 nt, Artificial Sequence
  Description of Artificial Sequence: Synthetic oligonucleotide
accacguuagcagggucua

SEQ ID NO: 1504663 - RNA, 19 nt, Artificial Sequence
  Description of Artificial Sequence: Synthetic oligonucleotide
ccaucuggggccauggcaa

SEQ ID NO: 1504664 - RNA, 19 nt, Artificial Sequence
  Description of Artificial Sequence: Synthetic oligonucleotide
guagcaugcgcugcucgaa

SEQ ID NO: 1504665 - RNA, 19 nt, Artificial Sequence
  Description of Artificial Sequence: Synthetic oligonucleotide
guaaaguaacuagcacacu

SEQ ID NO: 1504666 - RNA, 19 nt, Artificial Sequence
  Description of Artificial Sequence: Synthetic oligonucleotide
agucgcuggccagccaacu

SEQ ID NO: 1504667 - RNA, 19 nt, Artificial Sequence
  Description of Artificial Sequence: Synthetic oligonucleotide
agaaaugguugcagauauu

SEQ ID NO: 1504668 - RNA, 19 nt, Artificial Sequence
  Description of Artificial Sequence: Synthetic oligonucleotide
ggugacgcccaggcgagug

SEQ ID NO: 1504669 - RNA, 19 nt, Artificial Sequence
  Description of Artificial Sequence: Synthetic oligonucleotide
guuuucggccuuguaggua

SEQ ID NO: 1504670 - RNA, 19 nt, Artificial Sequence
  Description of Artificial Sequence: Synthetic oligonucleotide
ucccaccgcaggcgugucu

SEQ ID NO: 1504671 - RNA, 19 nt, Artificial Sequence
  Description of Artificial Sequence: Synthetic oligonucleotide
caucuccaaccccucucca

SEQ ID NO: 1504672 - RNA, 19 nt, Artificial Sequence
  Description of Artificial Sequence: Synthetic oligonucleotide
uucggccuuguagguacau

SEQ ID NO: 1504673 - RNA, 19 nt, Artificial Sequence
  Description of Artificial Sequence: Synthetic oligonucleotide
gcggguuagcacuccugug

SEQ ID NO: 1504674 - RNA, 19 nt, Artificial Sequence
  Description of Artificial Sequence: Synthetic oligonucleotide
ggucccaaccuuguaaagu

SEQ ID NO: 1504675 - RNA, 19 nt, Artificial Sequence
  Description of Artificial Sequence: Synthetic oligonucleotide
gaagcacacagaagccuau

SEQ ID NO: 1504676 - RNA, 19 nt, Artificial Sequence
  Description of Artificial Sequence: Synthetic oligonucleotide
acacgccggauccgcucug

SEQ ID NO: 1504677 - RNA, 19 nt, Artificial Sequence
  Description of Artificial Sequence: Synthetic oligonucleotide
uccggccugcagagcccag

SEQ ID NO: 1504678 - RNA, 19 nt, Artificial Sequence
  Description of Artificial Sequence: Synthetic oligonucleotide
ccaaccuuguaaaguaacu

SEQ ID NO: 1504679 - RNA, 19 nt, Artificial Sequence
  Description of Artificial Sequence: Synthetic oligonucleotide
cgauagagccccagggcug

SEQ ID NO: 1504680 - RNA, 19 nt, Artificial Sequence
  Description of Artificial Sequence: Synthetic oligonucleotide
acggccacaugcagcuuca

SEQ ID NO: 1504681 - RNA, 19 nt, Artificial Sequence
  Description of Artificial Sequence: Synthetic oligonucleotide
gacgcccaggcgagugccc

SEQ ID NO: 1504682 - RNA, 19 nt, Artificial Sequence
  Description of Artificial Sequence: Synthetic oligonucleotide
gcgauaucucacagauggc

SEQ ID NO: 1504683 - RNA, 19 nt, Artificial Sequence
  Description of Artificial Sequence: Synthetic oligonucleotide
ggcagcccuacuugauaca

SEQ ID NO: 1504684 - RNA, 19 nt, Artificial Sequence
  Description of Artificial Sequence: Synthetic oligonucleotide
gcacggugcaauggguccc

SEQ ID NO: 1504685 - RNA, 19 nt, Artificial Sequence
  Description of Artificial Sequence: Synthetic oligonucleotide
cagguagcaugcgcugcuc

SEQ ID NO: 1504686 - RNA, 19 nt, Artificial Sequence
  Description of Artificial Sequence: Synthetic oligonucleotide
gcggucucagggcuaaucu

SEQ ID NO: 1504687 - RNA, 19 nt, Artificial Sequence
  Description of Artificial Sequence: Synthetic oligonucleotide
ggagcccagcggucucagg

SEQ ID NO: 1504688 - RNA, 19 nt, Artificial Sequence
  Description of Artificial Sequence: Synthetic oligonucleotide
ggaccacguuagcaggguc

SEQ ID NO: 1504689 - RNA, 19 nt, Artificial Sequence
  Description of Artificial Sequence: Synthetic oligonucleotide
acgcccaggcgagugcccu

SEQ ID NO: 1504690 - RNA, 19 nt, Artificial Sequence
  Description of Artificial Sequence: Synthetic oligonucleotide
ggccuuguagguacaucuc

SEQ ID NO: 1504691 - RNA, 19 nt, Artificial Sequence
  Description of Artificial Sequence: Synthetic oligonucleotide
ggucagccagggcacagua

SEQ ID NO: 1504692 - RNA, 19 nt, Artificial Sequence
  Description of Artificial Sequence: Synthetic oligonucleotide
ugggagccagcggguuagc

SEQ ID NO: 1504693 - RNA, 19 nt, Artificial Sequence
  Description of Artificial Sequence: Synthetic oligonucleotide
accccucuccagaguaaga

SEQ ID NO: 1504694 - RNA, 19 nt, Artificial Sequence
  Description of Artificial Sequence: Synthetic oligonucleotide
ccaccuuggcaccgcaguc

SEQ ID NO: 1504695 - RNA, 19 nt, Artificial Sequence
  Description of Artificial Sequence: Synthetic oligonucleotide
ccaaccccucuccagagua

SEQ ID NO: 1504696 - RNA, 19 nt, Artificial Sequence
  Description of Artificial Sequence: Synthetic oligonucleotide
ccucccgagauacuucaaa

SEQ ID NO: 1504697 - RNA, 19 nt, Artificial Sequence
  Description of Artificial Sequence: Synthetic oligonucleotide
gggcgauaucucacagaug

SEQ ID NO: 1504698 - RNA, 19 nt, Artificial Sequence
  Description of Artificial Sequence: Synthetic oligonucleotide
cuucccaccgcaggcgugu

SEQ ID NO: 1504699 - RNA, 19 nt, Artificial Sequence
  Description of Artificial Sequence: Synthetic oligonucleotide
auggucggucccaguguaa

SEQ ID NO: 1504700 - RNA, 19 nt, Artificial Sequence
  Description of Artificial Sequence: Synthetic oligonucleotide
gcgugucucuuggucgcag

SEQ ID NO: 1504701 - RNA, 19 nt, Artificial Sequence
  Description of Artificial Sequence: Synthetic oligonucleotide
gucccaguguaaacucacu

SEQ ID NO: 1504702 - RNA, 19 nt, Artificial Sequence
  Description of Artificial Sequence: Synthetic oligonucleotide
cagggcuaaucucgcugua

SEQ ID NO: 1504703 - RNA, 19 nt, Artificial Sequence
  Description of Artificial Sequence: Synthetic oligonucleotide
cccagcgguagugcugagc

SEQ ID NO: 1504704 - RNA, 19 nt, Artificial Sequence
  Description of Artificial Sequence: Synthetic oligonucleotide
cggccuuguagguacaucu

SEQ ID NO: 1504705 - RNA, 19 nt, Artificial Sequence
  Description of Artificial Sequence: Synthetic oligonucleotide
aggcucuccuggaggugga

SEQ ID NO: 1504706 - RNA, 19 nt, Artificial Sequence
  Description of Artificial Sequence: Synthetic oligonucleotide
cccgacguuucauguccuc

SEQ ID NO: 1504707 - RNA, 19 nt, Artificial Sequence
  Description of Artificial Sequence: Synthetic oligonucleotide
uucccaccgcaggcguguc

SEQ ID NO: 1504708 - RNA, 19 nt, Artificial Sequence
  Description of Artificial Sequence: Synthetic oligonucleotide
gcagcccuacuugauacau

SEQ ID NO: 1504709 - RNA, 19 nt, Artificial Sequence
  Description of Artificial Sequence: Synthetic oligonucleotide
guaccagggcacggugcaa

SEQ ID NO: 1504710 - RNA, 19 nt, Artificial Sequence
  Description of Artificial Sequence: Synthetic oligonucleotide
cauucgguuuuagcggcuu

SEQ ID NO: 1504711 - RNA, 19 nt, Artificial Sequence
  Description of Artificial Sequence: Synthetic oligonucleotide
ccacguuagcagggucuag

SEQ ID NO: 1504712 - RNA, 19 nt, Artificial Sequence
  Description of Artificial Sequence: Synthetic oligonucleotide
ccccauguacauccaggaa

SEQ ID NO: 1504713 - RNA, 19 nt, Artificial Sequence
  Description of Artificial Sequence: Synthetic oligonucleotide
cggugcaauggguccccag

SEQ ID NO: 1504714 - RNA, 19 nt, Artificial Sequence
  Description of Artificial Sequence: Synthetic oligonucleotide
aggugacgcccaggcgagu

SEQ ID NO: 1504715 - RNA, 19 nt, Artificial Sequence
  Description of Artificial Sequence: Synthetic oligonucleotide
caaacucccuggugaccuu

SEQ ID NO: 1504716 - RNA, 19 nt, Artificial Sequence
  Description of Artificial Sequence: Synthetic oligonucleotide
ccgaagcacacagaagccu

SEQ ID NO: 1504717 - RNA, 19 nt, Artificial Sequence
  Description of Artificial Sequence: Synthetic oligonucleotide
cccucggagcccagcgguc

SEQ ID NO: 1504718 - RNA, 19 nt, Artificial Sequence
  Description of Artificial Sequence: Synthetic oligonucleotide
ccccagucgcuggccagcc

SEQ ID NO: 1504719 - RNA, 19 nt, Artificial Sequence
  Description of Artificial Sequence: Synthetic oligonucleotide
cggucccaguguaaacuca

SEQ ID NO: 1504720 - RNA, 19 nt, Artificial Sequence
  Description of Artificial Sequence: Synthetic oligonucleotide
cgagugcccugcccaccgg

SEQ ID NO: 1504721 - RNA, 19 nt, Artificial Sequence
  Description of Artificial Sequence: Synthetic oligonucleotide
gcccagcggucucagggcu

SEQ ID NO: 1504722 - RNA, 19 nt, Artificial Sequence
  Description of Artificial Sequence: Synthetic oligonucleotide
ggcgugucucuuggucgca

SEQ ID NO: 1504723 - RNA, 19 nt, Artificial Sequence
  Description of Artificial Sequence: Synthetic oligonucleotide
ccagcggucucagggcuaa

SEQ ID NO: 1504724 - RNA, 19 nt, Artificial Sequence
  Description of Artificial Sequence: Synthetic oligonucleotide
ccauucgguuuuagcggcu

SEQ ID NO: 1504725 - RNA, 19 nt, Artificial Sequence
  Description of Artificial Sequence: Synthetic oligonucleotide
gcaaucugucggaaaccuu

SEQ ID NO: 1504726 - RNA, 19 nt, Artificial Sequence
  Description of Artificial Sequence: Synthetic oligonucleotide
gcaagggcucaaacucccu

SEQ ID NO: 1504727 - RNA, 19 nt, Artificial Sequence
  Description of Artificial Sequence: Synthetic oligonucleotide
ccaccaccuuggcaccgca

SEQ ID NO: 1504728 - RNA, 19 nt, Artificial Sequence
  Description of Artificial Sequence: Synthetic oligonucleotide
cccagcggucucagggcua

SEQ ID NO: 1504729 - RNA, 19 nt, Artificial Sequence
  Description of Artificial Sequence: Synthetic oligonucleotide
ccgcagucugcaccccgaa

SEQ ID NO: 1504730 - RNA, 19 nt, Artificial Sequence
  Description of Artificial Sequence: Synthetic oligonucleotide
cccagucgcuggccagcca

SEQ ID NO: 1504731 - RNA, 19 nt, Artificial Sequence
  Description of Artificial Sequence: Synthetic oligonucleotide
ccccgacguuucauguccu

SEQ ID NO: 1504732 - RNA, 19 nt, Artificial Sequence
  Description of Artificial Sequence: Synthetic oligonucleotide
ccacaccccgacguuucau

SEQ ID NO: 1504733 - RNA, 19 nt, Artificial Sequence
  Description of Artificial Sequence: Synthetic oligonucleotide
cagcggucucagggcuaau

SEQ ID NO: 1504734 - RNA, 19 nt, Artificial Sequence
  Description of Artificial Sequence: Synthetic oligonucleotide
cguugccaucuggggccau

SEQ ID NO: 1504735 - RNA, 19 nt, Artificial Sequence
  Description of Artificial Sequence: Synthetic oligonucleotide
aauuagaggacuuuaauau

SEQ ID NO: 1504736 - RNA, 19 nt, Artificial Sequence
  Description of Artificial Sequence: Synthetic oligonucleotide
ucaaacggaacacaggugg

SEQ ID NO: 1504737 - RNA, 19 nt, Artificial Sequence
  Description of Artificial Sequence: Synthetic oligonucleotide
uccgguuuaaauuagagga

SEQ ID NO: 1504738 - RNA, 19 nt, Artificial Sequence
  Description of Artificial Sequence: Synthetic oligonucleotide
ucugcuagaauccauacuc

SEQ ID NO: 1504739 - RNA, 19 nt, Artificial Sequence
  Description of Artificial Sequence: Synthetic oligonucleotide
uaagcgaacauccugguga

SEQ ID NO: 1504740 - RNA, 19 nt, Artificial Sequence
  Description of Artificial Sequence: Synthetic oligonucleotide
aaauuagaggacuuuaaua

SEQ ID NO: 1504741 - RNA, 19 nt, Artificial Sequence
  Description of Artificial Sequence: Synthetic oligonucleotide
aguuauagaucucauucag

SEQ ID NO: 1504742 - RNA, 19 nt, Artificial Sequence
  Description of Artificial Sequence: Synthetic oligonucleotide
uucugugcuggucaaacgg

SEQ ID NO: 1504743 - RNA, 19 nt, Artificial Sequence
  Description of Artificial Sequence: Synthetic oligonucleotide
aggacuuuaauauucugug

SEQ ID NO: 1504744 - RNA, 19 nt, Artificial Sequence
  Description of Artificial Sequence: Synthetic oligonucleotide
ugggaaauguccaaggagu

SEQ ID NO: 1504745 - RNA, 19 nt, Artificial Sequence
  Description of Artificial Sequence: Synthetic oligonucleotide
gaacucaugauucugggca

SEQ ID NO: 1504746 - RNA, 19 nt, Artificial Sequence
  Description of Artificial Sequence: Synthetic oligonucleotide
auagggguuccacagaguc

SEQ ID NO: 1504747 - RNA, 19 nt, Artificial Sequence
  Description of Artificial Sequence: Synthetic oligonucleotide
aaguaagcgaacauccugg

SEQ ID NO: 1504748 - RNA, 19 nt, Artificial Sequence
  Description of Artificial Sequence: Synthetic oligonucleotide
agcaauucuuaguagaacu

SEQ ID NO: 1504749 - RNA, 19 nt, Artificial Sequence
  Description of Artificial Sequence: Synthetic oligonucleotide
auaagggaggcauagguga

SEQ ID NO: 1504750 - RNA, 19 nt, Artificial Sequence
  Description of Artificial Sequence: Synthetic oligonucleotide
guuucuucggaaguaagcg

SEQ ID NO: 1504751 - RNA, 19 nt, Artificial Sequence
  Description of Artificial Sequence: Synthetic oligonucleotide
uguuucuucggaaguaagc

SEQ ID NO: 1504752 - RNA, 19 nt, Artificial Sequence
  Description of Artificial Sequence: Synthetic oligonucleotide
uccguuucugauauucccg

SEQ ID NO: 1504753 - RNA, 19 nt, Artificial Sequence
  Description of Artificial Sequence: Synthetic oligonucleotide
uguuggaccaccugcaucu

SEQ ID NO: 1504754 - RNA, 19 nt, Artificial Sequence
  Description of Artificial Sequence: Synthetic oligonucleotide
cugauagcuggcauuaagg

SEQ ID NO: 1504755 - RNA, 19 nt, Artificial Sequence
  Description of Artificial Sequence: Synthetic oligonucleotide
caaggagucuuucucaggg

SEQ ID NO: 1504756 - RNA, 19 nt, Artificial Sequence
  Description of Artificial Sequence: Synthetic oligonucleotide
gauagcuggcauuaagggc

SEQ ID NO: 1504757 - RNA, 19 nt, Artificial Sequence
  Description of Artificial Sequence: Synthetic oligonucleotide
uggaguuuccagaauggcc

SEQ ID NO: 1504758 - RNA, 19 nt, Artificial Sequence
  Description of Artificial Sequence: Synthetic oligonucleotide
ucggacgaagcacuuaugc

SEQ ID NO: 1504759 - RNA, 19 nt, Artificial Sequence
  Description of Artificial Sequence: Synthetic oligonucleotide
gaagcacuuaugcaggcug

SEQ ID NO: 1504760 - RNA, 19 nt, Artificial Sequence
  Description of Artificial Sequence: Synthetic oligonucleotide
auaacugaggcccgagauc

SEQ ID NO: 1504761 - RNA, 19 nt, Artificial Sequence
  Description of Artificial Sequence: Synthetic oligonucleotide
aucagcaauucuuaguaga

SEQ ID NO: 1504762 - RNA, 19 nt, Artificial Sequence
  Description of Artificial Sequence: Synthetic oligonucleotide
uaugcaggggucugaagag

SEQ ID NO: 1504763 - RNA, 19 nt, Artificial Sequence
  Description of Artificial Sequence: Synthetic oligonucleotide
auuuugacguccccgaagu

SEQ ID NO: 1504764 - RNA, 19 nt, Artificial Sequence
  Description of Artificial Sequence: Synthetic oligonucleotide
uuuaauauucugugcuggu

SEQ ID NO: 1504765 - RNA, 19 nt, Artificial Sequence
  Description of Artificial Sequence: Synthetic oligonucleotide
ucagcaauucuuaguagaa

SEQ ID NO: 1504766 - RNA, 19 nt, Artificial Sequence
  Description of Artificial Sequence: Synthetic oligonucleotide
gacuuuaauauucugugcu

SEQ ID NO: 1504767 - RNA, 19 nt, Artificial Sequence
  Description of Artificial Sequence: Synthetic oligonucleotide
guugguggugaacaugggg

SEQ ID NO: 1504768 - RNA, 19 nt, Artificial Sequence
  Description of Artificial Sequence: Synthetic oligonucleotide
uuugacguccccgaagugc

SEQ ID NO: 1504769 - RNA, 19 nt, Artificial Sequence
  Description of Artificial Sequence: Synthetic oligonucleotide
uucuucggaaguaagcgaa

SEQ ID NO: 1504770 - RNA, 19 nt, Artificial Sequence
  Description of Artificial Sequence: Synthetic oligonucleotide
uggucaaacggaacacagg

SEQ ID NO: 1504771 - RNA, 19 nt, Artificial Sequence
  Description of Artificial Sequence: Synthetic oligonucleotide
ucguccacgguccacacac

SEQ ID NO: 1504772 - RNA, 19 nt, Artificial Sequence
  Description of Artificial Sequence: Synthetic oligonucleotide
uugacguccccgaagugcc

SEQ ID NO: 1504773 - RNA, 19 nt, Artificial Sequence
  Description of Artificial Sequence: Synthetic oligonucleotide
uauggguccgggccaaggg

SEQ ID NO: 1504774 - RNA, 19 nt, Artificial Sequence
  Description of Artificial Sequence: Synthetic oligonucleotide
guagaacucaugauucugg

SEQ ID NO: 1504775 - RNA, 19 nt, Artificial Sequence
  Description of Artificial Sequence: Synthetic oligonucleotide
uaaggguugguggugaaca

SEQ ID NO: 1504776 - RNA, 19 nt, Artificial Sequence
  Description of Artificial Sequence: Synthetic oligonucleotide
uccugggaaauguccaagg

SEQ ID NO: 1504777 - RNA, 19 nt, Artificial Sequence
  Description of Artificial Sequence: Synthetic oligonucleotide
gacuugguccuaugcaggg

SEQ ID NO: 1504778 - RNA, 19 nt, Artificial Sequence
  Description of Artificial Sequence: Synthetic oligonucleotide
cugauauucccgcucgucc

SEQ ID NO: 1504779 - RNA, 19 nt, Artificial Sequence
  Description of Artificial Sequence: Synthetic oligonucleotide
gauacauggggaaggcggg

SEQ ID NO: 1504780 - RNA, 19 nt, Artificial Sequence
  Description of Artificial Sequence: Synthetic oligonucleotide
gacgaagcacuuaugcagg

SEQ ID NO: 1504781 - RNA, 19 nt, Artificial Sequence
  Description of Artificial Sequence: Synthetic oligonucleotide
uaaccgcucacucuccuug

SEQ ID NO: 1504782 - RNA, 19 nt, Artificial Sequence
  Description of Artificial Sequence: Synthetic oligonucleotide
gagguuguggcgcacagca

SEQ ID NO: 1504783 - RNA, 19 nt, Artificial Sequence
  Description of Artificial Sequence: Synthetic oligonucleotide
uauuccuguccccaggcgu

SEQ ID NO: 1504784 - RNA, 19 nt, Artificial Sequence
  Description of Artificial Sequence: Synthetic oligonucleotide
uugccucucaagagggugg

SEQ ID NO: 1504785 - RNA, 19 nt, Artificial Sequence
  Description of Artificial Sequence: Synthetic oligonucleotide
ugauauucccgcucgucca

SEQ ID NO: 1504786 - RNA, 19 nt, Artificial Sequence
  Description of Artificial Sequence: Synthetic oligonucleotide
uguacucggcauugggccg

SEQ ID NO: 1504787 - RNA, 19 nt, Artificial Sequence
  Description of Artificial Sequence: Synthetic oligonucleotide
ccaguuauagaucucauuc

SEQ ID NO: 1504788 - RNA, 19 nt, Artificial Sequence
  Description of Artificial Sequence: Synthetic oligonucleotide
ggcaccauaacugaggccc

SEQ ID NO: 1504789 - RNA, 19 nt, Artificial Sequence
  Description of Artificial Sequence: Synthetic oligonucleotide
uuucuucggaaguaagcga

SEQ ID NO: 1504790 - RNA, 19 nt, Artificial Sequence
  Description of Artificial Sequence: Synthetic oligonucleotide
ucuuaguagaacucaugau

SEQ ID NO: 1504791 - RNA, 19 nt, Artificial Sequence
  Description of Artificial Sequence: Synthetic oligonucleotide
cugggaaauguccaaggag

SEQ ID NO: 1504792 - RNA, 19 nt, Artificial Sequence
  Description of Artificial Sequence: Synthetic oligonucleotide
gauaagggaggcauaggug

SEQ ID NO: 1504793 - RNA, 19 nt, Artificial Sequence
  Description of Artificial Sequence: Synthetic oligonucleotide
cuggucaaacggaacacag

SEQ ID NO: 1504794 - RNA, 19 nt, Artificial Sequence
  Description of Artificial Sequence: Synthetic oligonucleotide
uagggugggauaaggguug

SEQ ID NO: 1504795 - RNA, 19 nt, Artificial Sequence
  Description of Artificial Sequence: Synthetic oligonucleotide
ggauacauggggaaggcgg

SEQ ID NO: 1504796 - RNA, 19 nt, Artificial Sequence
  Description of Artificial Sequence: Synthetic oligonucleotide
ucauucagagucagcugcc

SEQ ID NO: 1504797 - RNA, 19 nt, Artificial Sequence
  Description of Artificial Sequence: Synthetic oligonucleotide
cagagucuuaacuuuccag

SEQ ID NO: 1504798 - RNA, 19 nt, Artificial Sequence
  Description of Artificial Sequence: Synthetic oligonucleotide
ucugugcuggucaaacgga

SEQ ID NO: 1504799 - RNA, 19 nt, Artificial Sequence
  Description of Artificial Sequence: Synthetic oligonucleotide
uuccggaggucccacagug

SEQ ID NO: 1504800 - RNA, 19 nt, Artificial Sequence
  Description of Artificial Sequence: Synthetic oligonucleotide
cugaaugugccaucauggc

SEQ ID NO: 1504801 - RNA, 19 nt, Artificial Sequence
  Description of Artificial Sequence: Synthetic oligonucleotide
ugacaucagcaauucuuag

SEQ ID NO: 1504802 - RNA, 19 nt, Artificial Sequence
  Description of Artificial Sequence: Synthetic oligonucleotide
uaagggcaccauaacugag

SEQ ID NO: 1504803 - RNA, 19 nt, Artificial Sequence
  Description of Artificial Sequence: Synthetic oligonucleotide
ugaagagggcccuccaugu

SEQ ID NO: 1504804 - RNA, 19 nt, Artificial Sequence
  Description of Artificial Sequence: Synthetic oligonucleotide
aauucuuaguagaacucau

SEQ ID NO: 1504805 - RNA, 19 nt, Artificial Sequence
  Description of Artificial Sequence: Synthetic oligonucleotide
cugacacccagucuguggc

SEQ ID NO: 1504806 - RNA, 19 nt, Artificial Sequence
  Description of Artificial Sequence: Synthetic oligonucleotide
cuuaugcaggcugagguug

SEQ ID NO: 1504807 - RNA, 19 nt, Artificial Sequence
  Description of Artificial Sequence: Synthetic oligonucleotide
ucuccguuucugauauucc

SEQ ID NO: 1504808 - RNA, 19 nt, Artificial Sequence
  Description of Artificial Sequence: Synthetic oligonucleotide
cuaugcaggggucugaaga

SEQ ID NO: 1504809 - RNA, 19 nt, Artificial Sequence
  Description of Artificial Sequence: Synthetic oligonucleotide
gaaccaguuauagaucuca

SEQ ID NO: 1504810 - RNA, 19 nt, Artificial Sequence
  Description of Artificial Sequence: Synthetic oligonucleotide
uuaauauucugugcugguc

SEQ ID NO: 1504811 - RNA, 19 nt, Artificial Sequence
  Description of Artificial Sequence: Synthetic oligonucleotide
uucuucaccagggugggac

SEQ ID NO: 1504812 - RNA, 19 nt, Artificial Sequence
  Description of Artificial Sequence: Synthetic oligonucleotide
uggucuccguuucugauau

SEQ ID NO: 1504813 - RNA, 19 nt, Artificial Sequence
  Description of Artificial Sequence: Synthetic oligonucleotide
aaccgcucacucuccuugg

SEQ ID NO: 1504814 - RNA, 19 nt, Artificial Sequence
  Description of Artificial Sequence: Synthetic oligonucleotide
auauuccuguccccaggcg

SEQ ID NO: 1504815 - RNA, 19 nt, Artificial Sequence
  Description of Artificial Sequence: Synthetic oligonucleotide
cugcuagaauccauacucc

SEQ ID NO: 1504816 - RNA, 19 nt, Artificial Sequence
  Description of Artificial Sequence: Synthetic oligonucleotide
caugauucugggcaagcuc

SEQ ID NO: 1504817 - RNA, 19 nt, Artificial Sequence
  Description of Artificial Sequence: Synthetic oligonucleotide
ggaggcauaggugaagggg

SEQ ID NO: 1504818 - RNA, 19 nt, Artificial Sequence
  Description of Artificial Sequence: Synthetic oligonucleotide
guuucugauauucccgcuc

SEQ ID NO: 1504819 - RNA, 19 nt, Artificial Sequence
  Description of Artificial Sequence: Synthetic oligonucleotide
uggaucuccagcuguugga

SEQ ID NO: 1504820 - RNA, 19 nt, Artificial Sequence
  Description of Artificial Sequence: Synthetic oligonucleotide
caucagcaauucuuaguag

SEQ ID NO: 1504821 - RNA, 19 nt, Artificial Sequence
  Description of Artificial Sequence: Synthetic oligonucleotide
ucggaaguaagcgaacauc

SEQ ID NO: 1504822 - RNA, 19 nt, Artificial Sequence
  Description of Artificial Sequence: Synthetic oligonucleotide
ugugcuggucaaacggaac

SEQ ID NO: 1504823 - RNA, 19 nt, Artificial Sequence
  Description of Artificial Sequence: Synthetic oligonucleotide
gccaucauggccuguaacc

SEQ ID NO: 1504824 - RNA, 19 nt, Artificial Sequence
  Description of Artificial Sequence: Synthetic oligonucleotide
ucuucggaaguaagcgaac

SEQ ID NO: 1504825 - RNA, 19 nt, Artificial Sequence
  Description of Artificial Sequence: Synthetic oligonucleotide
uucggaaguaagcgaacau

SEQ ID NO: 1504826 - RNA, 19 nt, Artificial Sequence
  Description of Artificial Sequence: Synthetic oligonucleotide
caguuauagaucucauuca

SEQ ID NO: 1504827 - RNA, 19 nt, Artificial Sequence
  Description of Artificial Sequence: Synthetic oligonucleotide
uauucccgcucguccacgg

SEQ ID NO: 1504828 - RNA, 19 nt, Artificial Sequence
  Description of Artificial Sequence: Synthetic oligonucleotide
gauauucccgcucguccac

SEQ ID NO: 1504829 - RNA, 19 nt, Artificial Sequence
  Description of Artificial Sequence: Synthetic oligonucleotide
aguaagcgaacauccuggu

SEQ ID NO: 1504830 - RNA, 19 nt, Artificial Sequence
  Description of Artificial Sequence: Synthetic oligonucleotide
auaaggguugguggugaac

SEQ ID NO: 1504831 - RNA, 19 nt, Artificial Sequence
  Description of Artificial Sequence: Synthetic oligonucleotide
uggacugggcaguaggguc

SEQ ID NO: 1504832 - RNA, 19 nt, Artificial Sequence
  Description of Artificial Sequence: Synthetic oligonucleotide
aagcgaacauccuggugaa

SEQ ID NO: 1504833 - RNA, 19 nt, Artificial Sequence
  Description of Artificial Sequence: Synthetic oligonucleotide
acucggacgaagcacuuau

SEQ ID NO: 1504834 - RNA, 19 nt, Artificial Sequence
  Description of Artificial Sequence: Synthetic oligonucleotide
uccggucauccaaagcaug

SEQ ID NO: 1504835 - RNA, 19 nt, Artificial Sequence
  Description of Artificial Sequence: Synthetic oligonucleotide
gacucccugucaucuuugg

SEQ ID NO: 1504836 - RNA, 19 nt, Artificial Sequence
  Description of Artificial Sequence: Synthetic oligonucleotide
caauucuuaguagaacuca

SEQ ID NO: 1504837 - RNA, 19 nt, Artificial Sequence
  Description of Artificial Sequence: Synthetic oligonucleotide
ucuuugguggucuccguuu

SEQ ID NO: 1504838 - RNA, 19 nt, Artificial Sequence
  Description of Artificial Sequence: Synthetic oligonucleotide
uguaaccgcucacucuccu

SEQ ID NO: 1504839 - RNA, 19 nt, Artificial Sequence
  Description of Artificial Sequence: Synthetic oligonucleotide
gacaucagcaauucuuagu

SEQ ID NO: 1504840 - RNA, 19 nt, Artificial Sequence
  Description of Artificial Sequence: Synthetic oligonucleotide
cuaucuggaguuuccagaa

SEQ ID NO: 1504841 - RNA, 19 nt, Artificial Sequence
  Description of Artificial Sequence: Synthetic oligonucleotide
aguagggucguggccugcc

SEQ ID NO: 1504842 - RNA, 19 nt, Artificial Sequence
  Description of Artificial Sequence: Synthetic oligonucleotide
uuuugacguccccgaagug

SEQ ID NO: 1504843 - RNA, 19 nt, Artificial Sequence
  Description of Artificial Sequence: Synthetic oligonucleotide
ugcggucuggacugggcag

SEQ ID NO: 1504844 - RNA, 19 nt, Artificial Sequence
  Description of Artificial Sequence: Synthetic oligonucleotide
agucuguggccuuggguug

SEQ ID NO: 1504845 - RNA, 19 nt, Artificial Sequence
  Description of Artificial Sequence: Synthetic oligonucleotide
auggccuguaaccgcucac

SEQ ID NO: 1504846 - RNA, 19 nt, Artificial Sequence
  Description of Artificial Sequence: Synthetic oligonucleotide
gcuccggucauccaaagca

SEQ ID NO: 1504847 - RNA, 19 nt, Artificial Sequence
  Description of Artificial Sequence: Synthetic oligonucleotide
guaagcgaacauccuggug

SEQ ID NO: 1504848 - RNA, 19 nt, Artificial Sequence
  Description of Artificial Sequence: Synthetic oligonucleotide
uggaccaccugcaucugua

SEQ ID NO: 1504849 - RNA, 19 nt, Artificial Sequence
  Description of Artificial Sequence: Synthetic oligonucleotide
gaguuuccagaauggccug

SEQ ID NO: 1504850 - RNA, 19 nt, Artificial Sequence
  Description of Artificial Sequence: Synthetic oligonucleotide
cuugccucucaagagggug

SEQ ID NO: 1504851 - RNA, 19 nt, Artificial Sequence
  Description of Artificial Sequence: Synthetic oligonucleotide
gucuuaacuuuccagcucu

SEQ ID NO: 1504852 - RNA, 19 nt, Artificial Sequence
  Description of Artificial Sequence: Synthetic oligonucleotide
accgcucacucuccuuggc

SEQ ID NO: 1504853 - RNA, 19 nt, Artificial Sequence
  Description of Artificial Sequence: Synthetic oligonucleotide
uagggguuccacagagucu

SEQ ID NO: 1504854 - RNA, 19 nt, Artificial Sequence
  Description of Artificial Sequence: Synthetic oligonucleotide
guuauagaucucauucaga

SEQ ID NO: 1504855 - RNA, 19 nt, Artificial Sequence
  Description of Artificial Sequence: Synthetic oligonucleotide
gaacauccuggugaaccag

SEQ ID NO: 1504856 - RNA, 19 nt, Artificial Sequence
  Description of Artificial Sequence: Synthetic oligonucleotide
cucucaagaggguggcuug

SEQ ID NO: 1504857 - RNA, 19 nt, Artificial Sequence
  Description of Artificial Sequence: Synthetic oligonucleotide
gugcuggucaaacggaaca

SEQ ID NO: 1504858 - RNA, 19 nt, Artificial Sequence
  Description of Artificial Sequence: Synthetic oligonucleotide
ugucugucagguggcuugg

SEQ ID NO: 1504859 - RNA, 19 nt, Artificial Sequence
  Description of Artificial Sequence: Synthetic oligonucleotide
acuuaugcaggcugagguu

SEQ ID NO: 1504860 - RNA, 19 nt, Artificial Sequence
  Description of Artificial Sequence: Synthetic oligonucleotide
auacucccagcaugauggg

SEQ ID NO: 1504861 - RNA, 19 nt, Artificial Sequence
  Description of Artificial Sequence: Synthetic oligonucleotide
uucagcaugccaggacugc

SEQ ID NO: 1504862 - RNA, 19 nt, Artificial Sequence
  Description of Artificial Sequence: Synthetic oligonucleotide
ggucaaacggaacacaggu

SEQ ID NO: 1504863 - RNA, 19 nt, Artificial Sequence
  Description of Artificial Sequence: Synthetic oligonucleotide
agggucguggccugccccg

SEQ ID NO: 1504864 - RNA, 19 nt, Artificial Sequence
  Description of Artificial Sequence: Synthetic oligonucleotide
agggauauuccugucccca

SEQ ID NO: 1504865 - RNA, 19 nt, Artificial Sequence
  Description of Artificial Sequence: Synthetic oligonucleotide
aaggcggggccccuugccu

SEQ ID NO: 1504866 - RNA, 19 nt, Artificial Sequence
  Description of Artificial Sequence: Synthetic oligonucleotide
ugcuccggucauccaaagc

SEQ ID NO: 1504867 - RNA, 19 nt, Artificial Sequence
  Description of Artificial Sequence: Synthetic oligonucleotide
uggcauuaagggcaccaua

SEQ ID NO: 1504868 - RNA, 19 nt, Artificial Sequence
  Description of Artificial Sequence: Synthetic oligonucleotide
cagcauucuuccagguggc

SEQ ID NO: 1504869 - RNA, 19 nt, Artificial Sequence
  Description of Artificial Sequence: Synthetic oligonucleotide
gcgaacauccuggugaacc

SEQ ID NO: 1504870 - RNA, 19 nt, Artificial Sequence
  Description of Artificial Sequence: Synthetic oligonucleotide
cuuugguggucuccguuuc

SEQ ID NO: 1504871 - RNA, 19 nt, Artificial Sequence
  Description of Artificial Sequence: Synthetic oligonucleotide
auacauggggaaggcgggg

SEQ ID NO: 1504872 - RNA, 19 nt, Artificial Sequence
  Description of Artificial Sequence: Synthetic oligonucleotide
guagagugggguggguggg

SEQ ID NO: 1504873 - RNA, 19 nt, Artificial Sequence
  Description of Artificial Sequence: Synthetic oligonucleotide
ucuucaccagggugggacu

SEQ ID NO: 1504874 - RNA, 19 nt, Artificial Sequence
  Description of Artificial Sequence: Synthetic oligonucleotide
ggugggauaaggguuggug

SEQ ID NO: 1504875 - RNA, 19 nt, Artificial Sequence
  Description of Artificial Sequence: Synthetic oligonucleotide
agggguuccacagagucuu

SEQ ID NO: 1504876 - RNA, 19 nt, Artificial Sequence
  Description of Artificial Sequence: Synthetic oligonucleotide
uggcggauaagggaggcau

SEQ ID NO: 1504877 - RNA, 19 nt, Artificial Sequence
  Description of Artificial Sequence: Synthetic oligonucleotide
gaaggcggggccccuugcc

SEQ ID NO: 1504878 - RNA, 19 nt, Artificial Sequence
  Description of Artificial Sequence: Synthetic oligonucleotide
cagcaauucuuaguagaac

SEQ ID NO: 1504879 - RNA, 19 nt, Artificial Sequence
  Description of Artificial Sequence: Synthetic oligonucleotide
cacuuaugcaggcugaggu

SEQ ID NO: 1504880 - RNA, 19 nt, Artificial Sequence
  Description of Artificial Sequence: Synthetic oligonucleotide
ugacacccagucuguggcc

SEQ ID NO: 1504881 - RNA, 19 nt, Artificial Sequence
  Description of Artificial Sequence: Synthetic oligonucleotide
gugaacaugggguucuccu

SEQ ID NO: 1504882 - RNA, 19 nt, Artificial Sequence
  Description of Artificial Sequence: Synthetic oligonucleotide
ucggcauugggccgugcuc

SEQ ID NO: 1504883 - RNA, 19 nt, Artificial Sequence
  Description of Artificial Sequence: Synthetic oligonucleotide
agcucugaaugugccauca

SEQ ID NO: 1504884 - RNA, 19 nt, Artificial Sequence
  Description of Artificial Sequence: Synthetic oligonucleotide
gaggcccgagaucauguuc

SEQ ID NO: 1504885 - RNA, 19 nt, Artificial Sequence
  Description of Artificial Sequence: Synthetic oligonucleotide
gucaaacggaacacaggug

SEQ ID NO: 1504886 - RNA, 19 nt, Artificial Sequence
  Description of Artificial Sequence: Synthetic oligonucleotide
ccugauagcuggcauuaag

SEQ ID NO: 1504887 - RNA, 19 nt, Artificial Sequence
  Description of Artificial Sequence: Synthetic oligonucleotide
cugagguuguggcgcacag

SEQ ID NO: 1504888 - RNA, 19 nt, Artificial Sequence
  Description of Artificial Sequence: Synthetic oligonucleotide
cugucagguggcuugggga

SEQ ID NO: 1504889 - RNA, 19 nt, Artificial Sequence
  Description of Artificial Sequence: Synthetic oligonucleotide
ccauagggguuccacagag

SEQ ID NO: 1504890 - RNA, 19 nt, Artificial Sequence
  Description of Artificial Sequence: Synthetic oligonucleotide
cagggauauuccugucccc

SEQ ID NO: 1504891 - RNA, 19 nt, Artificial Sequence
  Description of Artificial Sequence: Synthetic oligonucleotide
cuguaaccgcucacucucc

SEQ ID NO: 1504892 - RNA, 19 nt, Artificial Sequence
  Description of Artificial Sequence: Synthetic oligonucleotide
ggacuugguccuaugcagg

SEQ ID NO: 1504893 - RNA, 19 nt, Artificial Sequence
  Description of Artificial Sequence: Synthetic oligonucleotide
cuguuggaccaccugcauc

SEQ ID NO: 1504894 - RNA, 19 nt, Artificial Sequence
  Description of Artificial Sequence: Synthetic oligonucleotide
ggaguuuccagaauggccu

SEQ ID NO: 1504895 - RNA, 19 nt, Artificial Sequence
  Description of Artificial Sequence: Synthetic oligonucleotide
caggcgucugucugucagg

SEQ ID NO: 1504896 - RNA, 19 nt, Artificial Sequence
  Description of Artificial Sequence: Synthetic oligonucleotide
cagcaugauggggacuugg

SEQ ID NO: 1504897 - RNA, 19 nt, Artificial Sequence
  Description of Artificial Sequence: Synthetic oligonucleotide
ccguuucugauauucccgc

SEQ ID NO: 1504898 - RNA, 19 nt, Artificial Sequence
  Description of Artificial Sequence: Synthetic oligonucleotide
ccuggugaaccaguuauag

SEQ ID NO: 1504899 - RNA, 19 nt, Artificial Sequence
  Description of Artificial Sequence: Synthetic oligonucleotide
aaccaguuauagaucucau

SEQ ID NO: 1504900 - RNA, 19 nt, Artificial Sequence
  Description of Artificial Sequence: Synthetic oligonucleotide
uccuggugaaccaguuaua

SEQ ID NO: 1504901 - RNA, 19 nt, Artificial Sequence
  Description of Artificial Sequence: Synthetic oligonucleotide
cuauggguccgggccaagg

SEQ ID NO: 1504902 - RNA, 19 nt, Artificial Sequence
  Description of Artificial Sequence: Synthetic oligonucleotide
ggcauuaagggcaccauaa

SEQ ID NO: 1504903 - RNA, 19 nt, Artificial Sequence
  Description of Artificial Sequence: Synthetic oligonucleotide
cauguccucuauggguccg

SEQ ID NO: 1504904 - RNA, 19 nt, Artificial Sequence
  Description of Artificial Sequence: Synthetic oligonucleotide
ggacugggcaguagggucg

SEQ ID NO: 1504905 - RNA, 19 nt, Artificial Sequence
  Description of Artificial Sequence: Synthetic oligonucleotide
acugaggcccgagaucaug

SEQ ID NO: 1504906 - RNA, 19 nt, Artificial Sequence
  Description of Artificial Sequence: Synthetic oligonucleotide
ugagguuguggcgcacagc

SEQ ID NO: 1504907 - RNA, 19 nt, Artificial Sequence
  Description of Artificial Sequence: Synthetic oligonucleotide
gguuccacagagucuuaac

SEQ ID NO: 1504908 - RNA, 19 nt, Artificial Sequence
  Description of Artificial Sequence: Synthetic oligonucleotide
gcgcacagcauucuuccag

SEQ ID NO: 1504909 - RNA, 19 nt, Artificial Sequence
  Description of Artificial Sequence: Synthetic oligonucleotide
gggauauuccuguccccag

SEQ ID NO: 1504910 - RNA, 19 nt, Artificial Sequence
  Description of Artificial Sequence: Synthetic oligonucleotide
accauaacugaggcccgag

SEQ ID NO: 1504911 - RNA, 19 nt, Artificial Sequence
  Description of Artificial Sequence: Synthetic oligonucleotide
cauaacugaggcccgagau

SEQ ID NO: 1504912 - RNA, 19 nt, Artificial Sequence
  Description of Artificial Sequence: Synthetic oligonucleotide
uguggcgcacagcauucuu

SEQ ID NO: 1504913 - RNA, 19 nt, Artificial Sequence
  Description of Artificial Sequence: Synthetic oligonucleotide
ucucaagaggguggcuugu

SEQ ID NO: 1504914 - RNA, 19 nt, Artificial Sequence
  Description of Artificial Sequence: Synthetic oligonucleotide
cuucggaaguaagcgaaca

SEQ ID NO: 1504915 - RNA, 19 nt, Artificial Sequence
  Description of Artificial Sequence: Synthetic oligonucleotide
ccuaucuggaguuuccaga

SEQ ID NO: 1504916 - RNA, 19 nt, Artificial Sequence
  Description of Artificial Sequence: Synthetic oligonucleotide
uggcaguguuucuucggaa

SEQ ID NO: 1504917 - RNA, 19 nt, Artificial Sequence
  Description of Artificial Sequence: Synthetic oligonucleotide
ccacgguccacacacgccc

SEQ ID NO: 1504918 - RNA, 19 nt, Artificial Sequence
  Description of Artificial Sequence: Synthetic oligonucleotide
gauaaggguugguggugaa

SEQ ID NO: 1504919 - RNA, 19 nt, Artificial Sequence
  Description of Artificial Sequence: Synthetic oligonucleotide
guggcuuguguaggguggg

SEQ ID NO: 1504920 - RNA, 19 nt, Artificial Sequence
  Description of Artificial Sequence: Synthetic oligonucleotide
uugguccuaugcagggguc

SEQ ID NO: 1504921 - RNA, 19 nt, Artificial Sequence
  Description of Artificial Sequence: Synthetic oligonucleotide
gcaauucuuaguagaacuc

SEQ ID NO: 1504922 - RNA, 19 nt, Artificial Sequence
  Description of Artificial Sequence: Synthetic oligonucleotide
gcauuaagggcaccauaac

SEQ ID NO: 1504923 - RNA, 19 nt, Artificial Sequence
  Description of Artificial Sequence: Synthetic oligonucleotide
cccgagaucauguucuuca

SEQ ID NO: 1504924 - RNA, 19 nt, Artificial Sequence
  Description of Artificial Sequence: Synthetic oligonucleotide
gcggauaagggaggcauag

SEQ ID NO: 1504925 - RNA, 19 nt, Artificial Sequence
  Description of Artificial Sequence: Synthetic oligonucleotide
aggcggggccccuugccuc

SEQ ID NO: 1504926 - RNA, 19 nt, Artificial Sequence
  Description of Artificial Sequence: Synthetic oligonucleotide
aggguucuguguccucuca

SEQ ID NO: 1504927 - RNA, 19 nt, Artificial Sequence
  Description of Artificial Sequence: Synthetic oligonucleotide
caucuguacucggcauugg

SEQ ID NO: 1504928 - RNA, 19 nt, Artificial Sequence
  Description of Artificial Sequence: Synthetic oligonucleotide
gccuaucuggaguuuccag

SEQ ID NO: 1504929 - RNA, 19 nt, Artificial Sequence
  Description of Artificial Sequence: Synthetic oligonucleotide
guuguggcgcacagcauuc

SEQ ID NO: 1504930 - RNA, 19 nt, Artificial Sequence
  Description of Artificial Sequence: Synthetic oligonucleotide
cucggacgaagcacuuaug

SEQ ID NO: 1504931 - RNA, 19 nt, Artificial Sequence
  Description of Artificial Sequence: Synthetic oligonucleotide
agcaugauggggacuuggu

SEQ ID NO: 1504932 - RNA, 19 nt, Artificial Sequence
  Description of Artificial Sequence: Synthetic oligonucleotide
ugggguucuccugggaaau

SEQ ID NO: 1504933 - RNA, 19 nt, Artificial Sequence
  Description of Artificial Sequence: Synthetic oligonucleotide
ccaaggagucuuucucagg

SEQ ID NO: 1504934 - RNA, 19 nt, Artificial Sequence
  Description of Artificial Sequence: Synthetic oligonucleotide
caagaggguggcuugugua

SEQ ID NO: 1504935 - RNA, 19 nt, Artificial Sequence
  Description of Artificial Sequence: Synthetic oligonucleotide
ucacuugcaccugguggcu

SEQ ID NO: 1504936 - RNA, 19 nt, Artificial Sequence
  Description of Artificial Sequence: Synthetic oligonucleotide
cacgguccacacacgcccc

SEQ ID NO: 1504937 - RNA, 19 nt, Artificial Sequence
  Description of Artificial Sequence: Synthetic oligonucleotide
ggugaaccaguuauagauc

SEQ ID NO: 1504938 - RNA, 19 nt, Artificial Sequence
  Description of Artificial Sequence: Synthetic oligonucleotide
aggggcuguagaguggggu

SEQ ID NO: 1504939 - RNA, 19 nt, Artificial Sequence
  Description of Artificial Sequence: Synthetic oligonucleotide
auguccucuauggguccgg

SEQ ID NO: 1504940 - RNA, 19 nt, Artificial Sequence
  Description of Artificial Sequence: Synthetic oligonucleotide
agccugauagcuggcauua

SEQ ID NO: 1504941 - RNA, 19 nt, Artificial Sequence
  Description of Artificial Sequence: Synthetic oligonucleotide
cagggugggacucccuguc

SEQ ID NO: 1504942 - RNA, 19 nt, Artificial Sequence
  Description of Artificial Sequence: Synthetic oligonucleotide
ucaccagggugggacuccc

SEQ ID NO: 1504943 - RNA, 19 nt, Artificial Sequence
  Description of Artificial Sequence: Synthetic oligonucleotide
guagggucguggccugccc

SEQ ID NO: 1504944 - RNA, 19 nt, Artificial Sequence
  Description of Artificial Sequence: Synthetic oligonucleotide
ccaggcgucugucugucag

SEQ ID NO: 1504945 - RNA, 19 nt, Artificial Sequence
  Description of Artificial Sequence: Synthetic oligonucleotide
ccauacucccagcaugaug

SEQ ID NO: 1504946 - RNA, 19 nt, Artificial Sequence
  Description of Artificial Sequence: Synthetic oligonucleotide
gcacuuaugcaggcugagg

SEQ ID NO: 1504947 - RNA, 19 nt, Artificial Sequence
  Description of Artificial Sequence: Synthetic oligonucleotide
gggauacauggggaaggcg

SEQ ID NO: 1504948 - RNA, 19 nt, Artificial Sequence
  Description of Artificial Sequence: Synthetic oligonucleotide
ggaucuccagcuguuggac

SEQ ID NO: 1504949 - RNA, 19 nt, Artificial Sequence
  Description of Artificial Sequence: Synthetic oligonucleotide
ggccccuugccucucaaga

SEQ ID NO: 1504950 - RNA, 19 nt, Artificial Sequence
  Description of Artificial Sequence: Synthetic oligonucleotide
agcgaacauccuggugaac

SEQ ID NO: 1504951 - RNA, 19 nt, Artificial Sequence
  Description of Artificial Sequence: Synthetic oligonucleotide
gcuguacugaggaggggag

SEQ ID NO: 1504952 - RNA, 19 nt, Artificial Sequence
  Description of Artificial Sequence: Synthetic oligonucleotide
agucagcugccuaucugga

SEQ ID NO: 1504953 - RNA, 19 nt, Artificial Sequence
  Description of Artificial Sequence: Synthetic oligonucleotide
ggcauugggccgugcuccg

SEQ ID NO: 1504954 - RNA, 19 nt, Artificial Sequence
  Description of Artificial Sequence: Synthetic oligonucleotide
gggauaaggguugguggug

SEQ ID NO: 1504955 - RNA, 19 nt, Artificial Sequence
  Description of Artificial Sequence: Synthetic oligonucleotide
gugcuccggucauccaaag

SEQ ID NO: 1504956 - RNA, 19 nt, Artificial Sequence
  Description of Artificial Sequence: Synthetic oligonucleotide
ugacguccccgaagugccu

SEQ ID NO: 1504957 - RNA, 19 nt, Artificial Sequence
  Description of Artificial Sequence: Synthetic oligonucleotide
ggcuguacugaggagggga

SEQ ID NO: 1504958 - RNA, 19 nt, Artificial Sequence
  Description of Artificial Sequence: Synthetic oligonucleotide
cuucaccagggugggacuc

SEQ ID NO: 1504959 - RNA, 19 nt, Artificial Sequence
  Description of Artificial Sequence: Synthetic oligonucleotide
ggguucagcaugccaggac

SEQ ID NO: 1504960 - RNA, 19 nt, Artificial Sequence
  Description of Artificial Sequence: Synthetic oligonucleotide
ccuuaggacaugucuucuc

SEQ ID NO: 1504961 - RNA, 19 nt, Artificial Sequence
  Description of Artificial Sequence: Synthetic oligonucleotide
ugggccgugcuccggucau

SEQ ID NO: 1504962 - RNA, 19 nt, Artificial Sequence
  Description of Artificial Sequence: Synthetic oligonucleotide
ucuauggguccgggccaag

SEQ ID NO: 1504963 - RNA, 19 nt, Artificial Sequence
  Description of Artificial Sequence: Synthetic oligonucleotide
ggccauggcagggugcucc

SEQ ID NO: 1504964 - RNA, 19 nt, Artificial Sequence
  Description of Artificial Sequence: Synthetic oligonucleotide
guagggugggauaaggguu

SEQ ID NO: 1504965 - RNA, 19 nt, Artificial Sequence
  Description of Artificial Sequence: Synthetic oligonucleotide
cagcccuuaggacaugucu

SEQ ID NO: 1504966 - RNA, 19 nt, Artificial Sequence
  Description of Artificial Sequence: Synthetic oligonucleotide
cauccuggcugaggggcag

SEQ ID NO: 1504967 - RNA, 19 nt, Artificial Sequence
  Description of Artificial Sequence: Synthetic oligonucleotide
ccgaagugccuugagguug

SEQ ID NO: 1504968 - RNA, 19 nt, Artificial Sequence
  Description of Artificial Sequence: Synthetic oligonucleotide
auucccgcucguccacggu

SEQ ID NO: 1504969 - RNA, 19 nt, Artificial Sequence
  Description of Artificial Sequence: Synthetic oligonucleotide
agagggcccuccauguccu

SEQ ID NO: 1504970 - RNA, 19 nt, Artificial Sequence
  Description of Artificial Sequence: Synthetic oligonucleotide
ccccauuuugacguccccg

SEQ ID NO: 1504971 - RNA, 19 nt, Artificial Sequence
  Description of Artificial Sequence: Synthetic oligonucleotide
cugggcaagcucugaaugu

SEQ ID NO: 1504972 - RNA, 19 nt, Artificial Sequence
  Description of Artificial Sequence: Synthetic oligonucleotide
ggucugaagagggcccucc

SEQ ID NO: 1504973 - RNA, 19 nt, Artificial Sequence
  Description of Artificial Sequence: Synthetic oligonucleotide
ggggauacauggggaaggc

SEQ ID NO: 1504974 - RNA, 19 nt, Artificial Sequence
  Description of Artificial Sequence: Synthetic oligonucleotide
gcaccugguggcuguacug

SEQ ID NO: 1504975 - RNA, 19 nt, Artificial Sequence
  Description of Artificial Sequence: Synthetic oligonucleotide
agcuggcauuaagggcacc

SEQ ID NO: 1504976 - RNA, 19 nt, Artificial Sequence
  Description of Artificial Sequence: Synthetic oligonucleotide
guccccgaagugccuugag

SEQ ID NO: 1504977 - RNA, 19 nt, Artificial Sequence
  Description of Artificial Sequence: Synthetic oligonucleotide
cugcggucuggacugggca

SEQ ID NO: 1504978 - RNA, 19 nt, Artificial Sequence
  Description of Artificial Sequence: Synthetic oligonucleotide
aggguucagcaugccagga

SEQ ID NO: 1504979 - RNA, 19 nt, Artificial Sequence
  Description of Artificial Sequence: Synthetic oligonucleotide
gcuggcauuaagggcacca

SEQ ID NO: 1504980 - RNA, 19 nt, Artificial Sequence
  Description of Artificial Sequence: Synthetic oligonucleotide
cugaggcccgagaucaugu

SEQ ID NO: 1504981 - RNA, 19 nt, Artificial Sequence
  Description of Artificial Sequence: Synthetic oligonucleotide
gcaccauaacugaggcccg

SEQ ID NO: 1504982 - RNA, 19 nt, Artificial Sequence
  Description of Artificial Sequence: Synthetic oligonucleotide
gacacccagucuguggccu

SEQ ID NO: 1504983 - RNA, 19 nt, Artificial Sequence
  Description of Artificial Sequence: Synthetic oligonucleotide
ccugggaaauguccaagga

SEQ ID NO: 1504984 - RNA, 19 nt, Artificial Sequence
  Description of Artificial Sequence: Synthetic oligonucleotide
ggucccacagugcuggggu

SEQ ID NO: 1504985 - RNA, 19 nt, Artificial Sequence
  Description of Artificial Sequence: Synthetic oligonucleotide
guuggaccaccugcaucug

SEQ ID NO: 1504986 - RNA, 19 nt, Artificial Sequence
  Description of Artificial Sequence: Synthetic oligonucleotide
ugggacucccugucaucuu

SEQ ID NO: 1504987 - RNA, 19 nt, Artificial Sequence
  Description of Artificial Sequence: Synthetic oligonucleotide
ggaaauguccaaggagucu

SEQ ID NO: 1504988 - RNA, 19 nt, Artificial Sequence
  Description of Artificial Sequence: Synthetic oligonucleotide
gcuuguguagggugggaua

SEQ ID NO: 1504989 - RNA, 19 nt, Artificial Sequence
  Description of Artificial Sequence: Synthetic oligonucleotide
guggugaacaugggguucu

SEQ ID NO: 1504990 - RNA, 19 nt, Artificial Sequence
  Description of Artificial Sequence: Synthetic oligonucleotide
gggcaucccugacacccag

SEQ ID NO: 1504991 - RNA, 19 nt, Artificial Sequence
  Description of Artificial Sequence: Synthetic oligonucleotide
ugucuucuccuggcagguc

SEQ ID NO: 1504992 - RNA, 19 nt, Artificial Sequence
  Description of Artificial Sequence: Synthetic oligonucleotide
ccuaugcaggggucugaag

SEQ ID NO: 1504993 - RNA, 19 nt, Artificial Sequence
  Description of Artificial Sequence: Synthetic oligonucleotide
ggcaguagggucguggccu

SEQ ID NO: 1504994 - RNA, 19 nt, Artificial Sequence
  Description of Artificial Sequence: Synthetic oligonucleotide
gugggacucccugucaucu

SEQ ID NO: 1504995 - RNA, 19 nt, Artificial Sequence
  Description of Artificial Sequence: Synthetic oligonucleotide
gggcaccauaacugaggcc

SEQ ID NO: 1504996 - RNA, 19 nt, Artificial Sequence
  Description of Artificial Sequence: Synthetic oligonucleotide
ggugggacucccugucauc

SEQ ID NO: 1504997 - RNA, 19 nt, Artificial Sequence
  Description of Artificial Sequence: Synthetic oligonucleotide
cuuggcggagcuggaucuc

SEQ ID NO: 1504998 - RNA, 19 nt, Artificial Sequence
  Description of Artificial Sequence: Synthetic oligonucleotide
gcaguagggucguggccug

SEQ ID NO: 1504999 - RNA, 19 nt, Artificial Sequence
  Description of Artificial Sequence: Synthetic oligonucleotide
cuguacugaggaggggaga

SEQ ID NO: 1505000 - RNA, 19 nt, Artificial Sequence
  Description of Artificial Sequence: Synthetic oligonucleotide
cauagggguuccacagagu

SEQ ID NO: 1505001 - RNA, 19 nt, Artificial Sequence
  Description of Artificial Sequence: Synthetic oligonucleotide
uggugaacaugggguucuc

SEQ ID NO: 1505002 - RNA, 19 nt, Artificial Sequence
  Description of Artificial Sequence: Synthetic oligonucleotide
aacugaggcccgagaucau

SEQ ID NO: 1505003 - RNA, 19 nt, Artificial Sequence
  Description of Artificial Sequence: Synthetic oligonucleotide
ccugucaucuuuggugguc

SEQ ID NO: 1505004 - RNA, 19 nt, Artificial Sequence
  Description of Artificial Sequence: Synthetic oligonucleotide
cucccguugcugggcagug

SEQ ID NO: 1505005 - RNA, 19 nt, Artificial Sequence
  Description of Artificial Sequence: Synthetic oligonucleotide
ggacucccugucaucuuug

SEQ ID NO: 1505006 - RNA, 19 nt, Artificial Sequence
  Description of Artificial Sequence: Synthetic oligonucleotide
uacucggcauugggccgug

SEQ ID NO: 1505007 - RNA, 19 nt, Artificial Sequence
  Description of Artificial Sequence: Synthetic oligonucleotide
ggccugacaucagcaauuc

SEQ ID NO: 1505008 - RNA, 19 nt, Artificial Sequence
  Description of Artificial Sequence: Synthetic oligonucleotide
gcuggcugagccaggguuc

SEQ ID NO: 1505009 - RNA, 19 nt, Artificial Sequence
  Description of Artificial Sequence: Synthetic oligonucleotide
ggccgugcuccggucaucc

SEQ ID NO: 1505010 - RNA, 19 nt, Artificial Sequence
  Description of Artificial Sequence: Synthetic oligonucleotide
gggaaggcggggccccuug

SEQ ID NO: 1505011 - RNA, 19 nt, Artificial Sequence
  Description of Artificial Sequence: Synthetic oligonucleotide
cuccggucauccaaagcau

SEQ ID NO: 1505012 - RNA, 19 nt, Artificial Sequence
  Description of Artificial Sequence: Synthetic oligonucleotide
cccugucuuccggaggucc

SEQ ID NO: 1505013 - RNA, 19 nt, Artificial Sequence
  Description of Artificial Sequence: Synthetic oligonucleotide
cggcauugggccgugcucc

SEQ ID NO: 1505014 - RNA, 19 nt, Artificial Sequence
  Description of Artificial Sequence: Synthetic oligonucleotide
cauugggccgugcuccggu

SEQ ID NO: 1505015 - RNA, 19 nt, Artificial Sequence
  Description of Artificial Sequence: Synthetic oligonucleotide
cauucagagucagcugccu

SEQ ID NO: 1505016 - RNA, 19 nt, Artificial Sequence
  Description of Artificial Sequence: Synthetic oligonucleotide
guccuaugcaggggucuga

SEQ ID NO: 1505017 - RNA, 19 nt, Artificial Sequence
  Description of Artificial Sequence: Synthetic oligonucleotide
ggcgucugucugucaggug

SEQ ID NO: 1505018 - RNA, 19 nt, Artificial Sequence
  Description of Artificial Sequence: Synthetic oligonucleotide
caguagggucguggccugc

SEQ ID NO: 1505019 - RNA, 19 nt, Artificial Sequence
  Description of Artificial Sequence: Synthetic oligonucleotide
caccauaacugaggcccga

SEQ ID NO: 1505020 - RNA, 19 nt, Artificial Sequence
  Description of Artificial Sequence: Synthetic oligonucleotide
cucggcauugggccgugcu

SEQ ID NO: 1505021 - RNA, 19 nt, Artificial Sequence
  Description of Artificial Sequence: Synthetic oligonucleotide
ccauaacugaggcccgaga

SEQ ID NO: 1505022 - RNA, 19 nt, Artificial Sequence
  Description of Artificial Sequence: Synthetic oligonucleotide
gccuguaaccgcucacucu

SEQ ID NO: 1505023 - RNA, 19 nt, Artificial Sequence
  Description of Artificial Sequence: Synthetic oligonucleotide
ggucuggacugggcaguag

SEQ ID NO: 1505024 - RNA, 19 nt, Artificial Sequence
  Description of Artificial Sequence: Synthetic oligonucleotide
cugcaucuguacucggcau

SEQ ID NO: 1505025 - RNA, 19 nt, Artificial Sequence
  Description of Artificial Sequence: Synthetic oligonucleotide
cuggacugggcaguagggu

SEQ ID NO: 1505026 - RNA, 19 nt, Artificial Sequence
  Description of Artificial Sequence: Synthetic oligonucleotide
gggccccuugccucucaag

SEQ ID NO: 1505027 - RNA, 19 nt, Artificial Sequence
  Description of Artificial Sequence: Synthetic oligonucleotide
ucccugucuuccggagguc

SEQ ID NO: 1505028 - RNA, 19 nt, Artificial Sequence
  Description of Artificial Sequence: Synthetic oligonucleotide
guacucggcauugggccgu

SEQ ID NO: 1505029 - RNA, 19 nt, Artificial Sequence
  Description of Artificial Sequence: Synthetic oligonucleotide
cucuauggguccgggccaa

SEQ ID NO: 1505030 - RNA, 19 nt, Artificial Sequence
  Description of Artificial Sequence: Synthetic oligonucleotide
cggauaagggaggcauagg

SEQ ID NO: 1505031 - RNA, 19 nt, Artificial Sequence
  Description of Artificial Sequence: Synthetic oligonucleotide
ggucguggccugccccgcc

SEQ ID NO: 1505032 - RNA, 19 nt, Artificial Sequence
  Description of Artificial Sequence: Synthetic oligonucleotide
gcauugggccgugcuccgg

SEQ ID NO: 1505033 - RNA, 19 nt, Artificial Sequence
  Description of Artificial Sequence: Synthetic oligonucleotide
cuuccggaggucccacagu

SEQ ID NO: 1505034 - RNA, 19 nt, Artificial Sequence
  Description of Artificial Sequence: Synthetic oligonucleotide
cuggcggauaagggaggca

SEQ ID NO: 1505035 - RNA, 19 nt, Artificial Sequence
  Description of Artificial Sequence: Synthetic oligonucleotide
gcugagguuguggcgcaca

SEQ ID NO: 1505036 - RNA, 19 nt, Artificial Sequence
  Description of Artificial Sequence: Synthetic oligonucleotide
ggggccugacaucagcaau

SEQ ID NO: 1505037 - RNA, 19 nt, Artificial Sequence
  Description of Artificial Sequence: Synthetic oligonucleotide
ccagcccuuaggacauguc

SEQ ID NO: 1505038 - RNA, 19 nt, Artificial Sequence
  Description of Artificial Sequence: Synthetic oligonucleotide
cagccugauagcuggcauu

SEQ ID NO: 1505039 - RNA, 19 nt, Artificial Sequence
  Description of Artificial Sequence: Synthetic oligonucleotide
gggcagaagacugcuggcu

SEQ ID NO: 1505040 - RNA, 19 nt, Artificial Sequence
  Description of Artificial Sequence: Synthetic oligonucleotide
gggcagggauauuccuguc

SEQ ID NO: 1505041 - RNA, 19 nt, Artificial Sequence
  Description of Artificial Sequence: Synthetic oligonucleotide
agcugccuaucuggaguuu

SEQ ID NO: 1505042 - RNA, 19 nt, Artificial Sequence
  Description of Artificial Sequence: Synthetic oligonucleotide
gggacucccugucaucuuu

SEQ ID NO: 1505043 - RNA, 19 nt, Artificial Sequence
  Description of Artificial Sequence: Synthetic oligonucleotide
gcagccugauagcuggcau

SEQ ID NO: 1505044 - RNA, 19 nt, Artificial Sequence
  Description of Artificial Sequence: Synthetic oligonucleotide
gucguggccugccccgccu

SEQ ID NO: 1505045 - RNA, 19 nt, Artificial Sequence
  Description of Artificial Sequence: Synthetic oligonucleotide
cguccacgguccacacacg

SEQ ID NO: 1505046 - RNA, 19 nt, Artificial Sequence
  Description of Artificial Sequence: Synthetic oligonucleotide
cacucggacgaagcacuua

SEQ ID NO: 1505047 - RNA, 19 nt, Artificial Sequence
  Description of Artificial Sequence: Synthetic oligonucleotide
cacucuccuuggcggagcu

SEQ ID NO: 1505048 - RNA, 19 nt, Artificial Sequence
  Description of Artificial Sequence: Synthetic oligonucleotide
ccggaggucccacagugcu

SEQ ID NO: 1505049 - RNA, 19 nt, Artificial Sequence
  Description of Artificial Sequence: Synthetic oligonucleotide
gacguccccgaagugccuu

SEQ ID NO: 1505050 - RNA, 19 nt, Artificial Sequence
  Description of Artificial Sequence: Synthetic oligonucleotide
cacccaugucauccuggcu

SEQ ID NO: 1505051 - RNA, 19 nt, Artificial Sequence
  Description of Artificial Sequence: Synthetic oligonucleotide
gggugggacucccugucau

SEQ ID NO: 1505052 - RNA, 19 nt, Artificial Sequence
  Description of Artificial Sequence: Synthetic oligonucleotide
ccgugcuccggucauccaa

SEQ ID NO: 1505053 - RNA, 19 nt, Artificial Sequence
  Description of Artificial Sequence: Synthetic oligonucleotide
cgugcuccggucauccaaa

SEQ ID NO: 1505054 - RNA, 19 nt, Artificial Sequence
  Description of Artificial Sequence: Synthetic oligonucleotide
gggccugacaucagcaauu

SEQ ID NO: 1505055 - RNA, 19 nt, Artificial Sequence
  Description of Artificial Sequence: Synthetic oligonucleotide
ggguccgggccaaggguuc

SEQ ID NO: 1505056 - RNA, 19 nt, Artificial Sequence
  Description of Artificial Sequence: Synthetic oligonucleotide
ggcuuguguagggugggau

SEQ ID NO: 1505057 - RNA, 19 nt, Artificial Sequence
  Description of Artificial Sequence: Synthetic oligonucleotide
ccgggccaaggguucugug

SEQ ID NO: 1505058 - RNA, 19 nt, Artificial Sequence
  Description of Artificial Sequence: Synthetic oligonucleotide
gcccgagaucauguucuuc

SEQ ID NO: 1505059 - RNA, 19 nt, Artificial Sequence
  Description of Artificial Sequence: Synthetic oligonucleotide
cuugcaccugguggcugua

SEQ ID NO: 1505060 - RNA, 19 nt, Artificial Sequence
  Description of Artificial Sequence: Synthetic oligonucleotide
gccccggccgccugucuuc

SEQ ID NO: 1505061 - RNA, 19 nt, Artificial Sequence
  Description of Artificial Sequence: Synthetic oligonucleotide
ggcggauaagggaggcaua

SEQ ID NO: 1505062 - RNA, 19 nt, Artificial Sequence
  Description of Artificial Sequence: Synthetic oligonucleotide
gggucguggccugccccgc

SEQ ID NO: 1505063 - RNA, 19 nt, Artificial Sequence
  Description of Artificial Sequence: Synthetic oligonucleotide
cccugacacccagucugug

SEQ ID NO: 1505064 - RNA, 19 nt, Artificial Sequence
  Description of Artificial Sequence: Synthetic oligonucleotide
cguuucugauauucccgcu

SEQ ID NO: 1505065 - RNA, 19 nt, Artificial Sequence
  Description of Artificial Sequence: Synthetic oligonucleotide
ggcugagguuguggcgcac

SEQ ID NO: 1505066 - RNA, 19 nt, Artificial Sequence
  Description of Artificial Sequence: Synthetic oligonucleotide
ccagggugggacucccugu

SEQ ID NO: 1505067 - RNA, 19 nt, Artificial Sequence
  Description of Artificial Sequence: Synthetic oligonucleotide
ccccaggcgucugucuguc

SEQ ID NO: 1505068 - RNA, 19 nt, Artificial Sequence
  Description of Artificial Sequence: Synthetic oligonucleotide
ggcggggccccuugccucu

SEQ ID NO: 1505069 - RNA, 19 nt, Artificial Sequence
  Description of Artificial Sequence: Synthetic oligonucleotide
gcggucuggacugggcagu

SEQ ID NO: 1505070 - RNA, 19 nt, Artificial Sequence
  Description of Artificial Sequence: Synthetic oligonucleotide
gccgugcuccggucaucca

SEQ ID NO: 1505071 - RNA, 19 nt, Artificial Sequence
  Description of Artificial Sequence: Synthetic oligonucleotide
cuccuuggcggagcuggau

SEQ ID NO: 1505072 - RNA, 19 nt, Artificial Sequence
  Description of Artificial Sequence: Synthetic oligonucleotide
gcucccguugcugggcagu

SEQ ID NO: 1505073 - RNA, 19 nt, Artificial Sequence
  Description of Artificial Sequence: Synthetic oligonucleotide
ccccggccgccugucuucc

SEQ ID NO: 1505074 - RNA, 19 nt, Artificial Sequence
  Description of Artificial Sequence: Synthetic oligonucleotide
gguccgggccaaggguucu

SEQ ID NO: 1505075 - RNA, 19 nt, Artificial Sequence
  Description of Artificial Sequence: Synthetic oligonucleotide
ggcccgagaucauguucuu

SEQ ID NO: 1505076 - RNA, 19 nt, Artificial Sequence
  Description of Artificial Sequence: Synthetic oligonucleotide
cgaagcacuuaugcaggcu

SEQ ID NO: 1505077 - RNA, 19 nt, Artificial Sequence
  Description of Artificial Sequence: Synthetic oligonucleotide
cccugucaucuuugguggu

SEQ ID NO: 1505078 - RNA, 19 nt, Artificial Sequence
  Description of Artificial Sequence: Synthetic oligonucleotide
gggugggauaaggguuggu

SEQ ID NO: 1505079 - RNA, 19 nt, Artificial Sequence
  Description of Artificial Sequence: Synthetic oligonucleotide
gggccgugcuccggucauc

SEQ ID NO: 1505080 - RNA, 19 nt, Artificial Sequence
  Description of Artificial Sequence: Synthetic oligonucleotide
ggucuccguuucugauauu

SEQ ID NO: 1505081 - RNA, 19 nt, Artificial Sequence
  Description of Artificial Sequence: Synthetic oligonucleotide
ccacucggacgaagcacuu

SEQ ID NO: 1505082 - RNA, 19 nt, Artificial Sequence
  Description of Artificial Sequence: Synthetic oligonucleotide
cggucauccaaagcauguu

SEQ ID NO: 1505083 - RNA, 19 nt, Artificial Sequence
  Description of Artificial Sequence: Synthetic oligonucleotide
aacaucuacaaccaccucc

SEQ ID NO: 1505084 - RNA, 19 nt, Artificial Sequence
  Description of Artificial Sequence: Synthetic oligonucleotide
uaacauaagauauaggucu

SEQ ID NO: 1505085 - RNA, 19 nt, Artificial Sequence
  Description of Artificial Sequence: Synthetic oligonucleotide
cugaguaacaucuacaacc

SEQ ID NO: 1505086 - RNA, 19 nt, Artificial Sequence
  Description of Artificial Sequence: Synthetic oligonucleotide
uaagauauaggucugugca

SEQ ID NO: 1505087 - RNA, 19 nt, Artificial Sequence
  Description of Artificial Sequence: Synthetic oligonucleotide
uuuacaaacacugcagugg

SEQ ID NO: 1505088 - RNA, 19 nt, Artificial Sequence
  Description of Artificial Sequence: Synthetic oligonucleotide
uucaaagcaaugcaggaag

SEQ ID NO: 1505089 - RNA, 19 nt, Artificial Sequence
  Description of Artificial Sequence: Synthetic oligonucleotide
auuaacuuucuucccaccc

SEQ ID NO: 1505090 - RNA, 19 nt, Artificial Sequence
  Description of Artificial Sequence: Synthetic oligonucleotide
ugugacucugcacagacag

SEQ ID NO: 1505091 - RNA, 19 nt, Artificial Sequence
  Description of Artificial Sequence: Synthetic oligonucleotide
uacauuguaaacaggacga

SEQ ID NO: 1505092 - RNA, 19 nt, Artificial Sequence
  Description of Artificial Sequence: Synthetic oligonucleotide
guauucaauuaguagaagg

SEQ ID NO: 1505093 - RNA, 19 nt, Artificial Sequence
  Description of Artificial Sequence: Synthetic oligonucleotide
aagagcagugccucaaagc

SEQ ID NO: 1505094 - RNA, 19 nt, Artificial Sequence
  Description of Artificial Sequence: Synthetic oligonucleotide
ucuacaaccaccucccagg

SEQ ID NO: 1505095 - RNA, 19 nt, Artificial Sequence
  Description of Artificial Sequence: Synthetic oligonucleotide
agguuuauugcauuguuuc

SEQ ID NO: 1505096 - RNA, 19 nt, Artificial Sequence
  Description of Artificial Sequence: Synthetic oligonucleotide
uucaauuaguagaaggggc

SEQ ID NO: 1505097 - RNA, 19 nt, Artificial Sequence
  Description of Artificial Sequence: Synthetic oligonucleotide
uggaaucccaccaugauga

SEQ ID NO: 1505098 - RNA, 19 nt, Artificial Sequence
  Description of Artificial Sequence: Synthetic oligonucleotide
guacauuguaaacaggacg

SEQ ID NO: 1505099 - RNA, 19 nt, Artificial Sequence
  Description of Artificial Sequence: Synthetic oligonucleotide
aaaacccuaucccuacccc

SEQ ID NO: 1505100 - RNA, 19 nt, Artificial Sequence
  Description of Artificial Sequence: Synthetic oligonucleotide
gaaugcaccguuuacaaac

SEQ ID NO: 1505101 - RNA, 19 nt, Artificial Sequence
  Description of Artificial Sequence: Synthetic oligonucleotide
aagauauaggucugugcac

SEQ ID NO: 1505102 - RNA, 19 nt, Artificial Sequence
  Description of Artificial Sequence: Synthetic oligonucleotide
uucaauuguucuauucccg

SEQ ID NO: 1505103 - RNA, 19 nt, Artificial Sequence
  Description of Artificial Sequence: Synthetic oligonucleotide
ucaaugaggguucugaguc

SEQ ID NO: 1505104 - RNA, 19 nt, Artificial Sequence
  Description of Artificial Sequence: Synthetic oligonucleotide
uuucaauuguucuauuccc

SEQ ID NO: 1505105 - RNA, 19 nt, Artificial Sequence
  Description of Artificial Sequence: Synthetic oligonucleotide
aacaggacgaaguacuucu

SEQ ID NO: 1505106 - RNA, 19 nt, Artificial Sequence
  Description of Artificial Sequence: Synthetic oligonucleotide
aauuguucuauucccgucu

SEQ ID NO: 1505107 - RNA, 19 nt, Artificial Sequence
  Description of Artificial Sequence: Synthetic oligonucleotide
guuuggaaaagguuuauug

SEQ ID NO: 1505108 - RNA, 19 nt, Artificial Sequence
  Description of Artificial Sequence: Synthetic oligonucleotide
ucaauuaguagaaggggca

SEQ ID NO: 1505109 - RNA, 19 nt, Artificial Sequence
  Description of Artificial Sequence: Synthetic oligonucleotide
auggagugcacuugggucc

SEQ ID NO: 1505110 - RNA, 19 nt, Artificial Sequence
  Description of Artificial Sequence: Synthetic oligonucleotide
aaauaaaauagagguuggg

SEQ ID NO: 1505111 - RNA, 19 nt, Artificial Sequence
  Description of Artificial Sequence: Synthetic oligonucleotide
ucgaugaacucuuuuagug

SEQ ID NO: 1505112 - RNA, 19 nt, Artificial Sequence
  Description of Artificial Sequence: Synthetic oligonucleotide
uuuaaaacccacuggugug

SEQ ID NO: 1505113 - RNA, 19 nt, Artificial Sequence
  Description of Artificial Sequence: Synthetic oligonucleotide
ucucgaugaacucuuuuag

SEQ ID NO: 1505114 - RNA, 19 nt, Artificial Sequence
  Description of Artificial Sequence: Synthetic oligonucleotide
acguuagucaugcugacag

SEQ ID NO: 1505115 - RNA, 19 nt, Artificial Sequence
  Description of Artificial Sequence: Synthetic oligonucleotide
aaaagggaguuuuguggcg

SEQ ID NO: 1505116 - RNA, 19 nt, Artificial Sequence
  Description of Artificial Sequence: Synthetic oligonucleotide
ugaguaacaucuacaacca

SEQ ID NO: 1505117 - RNA, 19 nt, Artificial Sequence
  Description of Artificial Sequence: Synthetic oligonucleotide
uacauuaacuuucuuccca

SEQ ID NO: 1505118 - RNA, 19 nt, Artificial Sequence
  Description of Artificial Sequence: Synthetic oligonucleotide
augagagcuauguacauug

SEQ ID NO: 1505119 - RNA, 19 nt, Artificial Sequence
  Description of Artificial Sequence: Synthetic oligonucleotide
uucuauucccgucucaucu

SEQ ID NO: 1505120 - RNA, 19 nt, Artificial Sequence
  Description of Artificial Sequence: Synthetic oligonucleotide
uuggccuaaacauucacga

SEQ ID NO: 1505121 - RNA, 19 nt, Artificial Sequence
  Description of Artificial Sequence: Synthetic oligonucleotide
cuaacauaagauauagguc

SEQ ID NO: 1505122 - RNA, 19 nt, Artificial Sequence
  Description of Artificial Sequence: Synthetic oligonucleotide
acauuaacuuucuucccac

SEQ ID NO: 1505123 - RNA, 19 nt, Artificial Sequence
  Description of Artificial Sequence: Synthetic oligonucleotide
aaaauagagguugggaacu

SEQ ID NO: 1505124 - RNA, 19 nt, Artificial Sequence
  Description of Artificial Sequence: Synthetic oligonucleotide
uccacguuagucaugcuga

SEQ ID NO: 1505125 - RNA, 19 nt, Artificial Sequence
  Description of Artificial Sequence: Synthetic oligonucleotide
aacaucacggaugugaaaa

SEQ ID NO: 1505126 - RNA, 19 nt, Artificial Sequence
  Description of Artificial Sequence: Synthetic oligonucleotide
gacgaaguacuucugguug

SEQ ID NO: 1505127 - RNA, 19 nt, Artificial Sequence
  Description of Artificial Sequence: Synthetic oligonucleotide
agagcagugccucaaagca

SEQ ID NO: 1505128 - RNA, 19 nt, Artificial Sequence
  Description of Artificial Sequence: Synthetic oligonucleotide
uuaacuuucuucccaccca

SEQ ID NO: 1505129 - RNA, 19 nt, Artificial Sequence
  Description of Artificial Sequence: Synthetic oligonucleotide
aaaaugaggaagagcagug

SEQ ID NO: 1505130 - RNA, 19 nt, Artificial Sequence
  Description of Artificial Sequence: Synthetic oligonucleotide
uugggucccaaacaucacg

SEQ ID NO: 1505131 - RNA, 19 nt, Artificial Sequence
  Description of Artificial Sequence: Synthetic oligonucleotide
uguacauuguaaacaggac

SEQ ID NO: 1505132 - RNA, 19 nt, Artificial Sequence
  Description of Artificial Sequence: Synthetic oligonucleotide
uuaaaacccacuggugugg

SEQ ID NO: 1505133 - RNA, 19 nt, Artificial Sequence
  Description of Artificial Sequence: Synthetic oligonucleotide
uuacaaacacugcaguggu

SEQ ID NO: 1505134 - RNA, 19 nt, Artificial Sequence
  Description of Artificial Sequence: Synthetic oligonucleotide
auuaguagaaggggcaggg

SEQ ID NO: 1505135 - RNA, 19 nt, Artificial Sequence
  Description of Artificial Sequence: Synthetic oligonucleotide
aaugggaggaguguucaag

SEQ ID NO: 1505136 - RNA, 19 nt, Artificial Sequence
  Description of Artificial Sequence: Synthetic oligonucleotide
uaacuuucuucccacccag

SEQ ID NO: 1505137 - RNA, 19 nt, Artificial Sequence
  Description of Artificial Sequence: Synthetic oligonucleotide
uccuucagaccacauacug

SEQ ID NO: 1505138 - RNA, 19 nt, Artificial Sequence
  Description of Artificial Sequence: Synthetic oligonucleotide
uggcauuuccuuuugggca

SEQ ID NO: 1505139 - RNA, 19 nt, Artificial Sequence
  Description of Artificial Sequence: Synthetic oligonucleotide
uauugcauuguuuccgugu

SEQ ID NO: 1505140 - RNA, 19 nt, Artificial Sequence
  Description of Artificial Sequence: Synthetic oligonucleotide
uccaucuugcgaaugcacc

SEQ ID NO: 1505141 - RNA, 19 nt, Artificial Sequence
  Description of Artificial Sequence: Synthetic oligonucleotide
ucacggaugugaaaaugag

SEQ ID NO: 1505142 - RNA, 19 nt, Artificial Sequence
  Description of Artificial Sequence: Synthetic oligonucleotide
auuguaaacaggacgaagu

SEQ ID NO: 1505143 - RNA, 19 nt, Artificial Sequence
  Description of Artificial Sequence: Synthetic oligonucleotide
accguuuacaaacacugca

SEQ ID NO: 1505144 - RNA, 19 nt, Artificial Sequence
  Description of Artificial Sequence: Synthetic oligonucleotide
ucuucaaugaggguucuga

SEQ ID NO: 1505145 - RNA, 19 nt, Artificial Sequence
  Description of Artificial Sequence: Synthetic oligonucleotide
gugcgcagggucuaaaugg

SEQ ID NO: 1505146 - RNA, 19 nt, Artificial Sequence
  Description of Artificial Sequence: Synthetic oligonucleotide
cauucacgagagcugaugg

SEQ ID NO: 1505147 - RNA, 19 nt, Artificial Sequence
  Description of Artificial Sequence: Synthetic oligonucleotide
ucaauuguucuauucccgu

SEQ ID NO: 1505148 - RNA, 19 nt, Artificial Sequence
  Description of Artificial Sequence: Synthetic oligonucleotide
gauggagugcacuuggguc

SEQ ID NO: 1505149 - RNA, 19 nt, Artificial Sequence
  Description of Artificial Sequence: Synthetic oligonucleotide
aaacauucacgagagcuga

SEQ ID NO: 1505150 - RNA, 19 nt, Artificial Sequence
  Description of Artificial Sequence: Synthetic oligonucleotide
gcuaacauaagauauaggu

SEQ ID NO: 1505151 - RNA, 19 nt, Artificial Sequence
  Description of Artificial Sequence: Synthetic oligonucleotide
acaaucuucaaugaggguu

SEQ ID NO: 1505152 - RNA, 19 nt, Artificial Sequence
  Description of Artificial Sequence: Synthetic oligonucleotide
ugcgcagggucuaaauggg

SEQ ID NO: 1505153 - RNA, 19 nt, Artificial Sequence
  Description of Artificial Sequence: Synthetic oligonucleotide
aaacaggacgaaguacuuc

SEQ ID NO: 1505154 - RNA, 19 nt, Artificial Sequence
  Description of Artificial Sequence: Synthetic oligonucleotide
auguacauuguaaacagga

SEQ ID NO: 1505155 - RNA, 19 nt, Artificial Sequence
  Description of Artificial Sequence: Synthetic oligonucleotide
uucaaugaggguucugagu

SEQ ID NO: 1505156 - RNA, 19 nt, Artificial Sequence
  Description of Artificial Sequence: Synthetic oligonucleotide
uguaaacaggacgaaguac

SEQ ID NO: 1505157 - RNA, 19 nt, Artificial Sequence
  Description of Artificial Sequence: Synthetic oligonucleotide
auucacgagagcugauggg

SEQ ID NO: 1505158 - RNA, 19 nt, Artificial Sequence
  Description of Artificial Sequence: Synthetic oligonucleotide
uguggaggacuucacggug

SEQ ID NO: 1505159 - RNA, 19 nt, Artificial Sequence
  Description of Artificial Sequence: Synthetic oligonucleotide
uguucaagaauggucuucu

SEQ ID NO: 1505160 - RNA, 19 nt, Artificial Sequence
  Description of Artificial Sequence: Synthetic oligonucleotide
ugggacggugccaugaugu

SEQ ID NO: 1505161 - RNA, 19 nt, Artificial Sequence
  Description of Artificial Sequence: Synthetic oligonucleotide
ugugcacaaucuucaauga

SEQ ID NO: 1505162 - RNA, 19 nt, Artificial Sequence
  Description of Artificial Sequence: Synthetic oligonucleotide
uuagucaugcugacagaca

SEQ ID NO: 1505163 - RNA, 19 nt, Artificial Sequence
  Description of Artificial Sequence: Synthetic oligonucleotide
gggguauucaauuaguaga

SEQ ID NO: 1505164 - RNA, 19 nt, Artificial Sequence
  Description of Artificial Sequence: Synthetic oligonucleotide
aagggaguuuuguggcgac

SEQ ID NO: 1505165 - RNA, 19 nt, Artificial Sequence
  Description of Artificial Sequence: Synthetic oligonucleotide
uuccuuuugggcacugccc

SEQ ID NO: 1505166 - RNA, 19 nt, Artificial Sequence
  Description of Artificial Sequence: Synthetic oligonucleotide
aggcuaacauaagauauag

SEQ ID NO: 1505167 - RNA, 19 nt, Artificial Sequence
  Description of Artificial Sequence: Synthetic oligonucleotide
uucacgagagcugauggga

SEQ ID NO: 1505168 - RNA, 19 nt, Artificial Sequence
  Description of Artificial Sequence: Synthetic oligonucleotide
guggcgacugcuuuaaaac

SEQ ID NO: 1505169 - RNA, 19 nt, Artificial Sequence
  Description of Artificial Sequence: Synthetic oligonucleotide
aggaaguggaaucccacca

SEQ ID NO: 1505170 - RNA, 19 nt, Artificial Sequence
  Description of Artificial Sequence: Synthetic oligonucleotide
uaaaugggaggaguguuca

SEQ ID NO: 1505171 - RNA, 19 nt, Artificial Sequence
  Description of Artificial Sequence: Synthetic oligonucleotide
ucacagggcuacauuaacu

SEQ ID NO: 1505172 - RNA, 19 nt, Artificial Sequence
  Description of Artificial Sequence: Synthetic oligonucleotide
gguccuucagaccacauac

SEQ ID NO: 1505173 - RNA, 19 nt, Artificial Sequence
  Description of Artificial Sequence: Synthetic oligonucleotide
gacuucacggugcgcaggg

SEQ ID NO: 1505174 - RNA, 19 nt, Artificial Sequence
  Description of Artificial Sequence: Synthetic oligonucleotide
caaugcaggaaguggaauc

SEQ ID NO: 1505175 - RNA, 19 nt, Artificial Sequence
  Description of Artificial Sequence: Synthetic oligonucleotide
aacucuuuuaguggcauuu

SEQ ID NO: 1505176 - RNA, 19 nt, Artificial Sequence
  Description of Artificial Sequence: Synthetic oligonucleotide
agauauaggucugugcaca

SEQ ID NO: 1505177 - RNA, 19 nt, Artificial Sequence
  Description of Artificial Sequence: Synthetic oligonucleotide
cagaccacauacugguacg

SEQ ID NO: 1505178 - RNA, 19 nt, Artificial Sequence
  Description of Artificial Sequence: Synthetic oligonucleotide
aaugaggguucugaguccu

SEQ ID NO: 1505179 - RNA, 19 nt, Artificial Sequence
  Description of Artificial Sequence: Synthetic oligonucleotide
ugcaccguuuacaaacacu

SEQ ID NO: 1505180 - RNA, 19 nt, Artificial Sequence
  Description of Artificial Sequence: Synthetic oligonucleotide
uguggcgacugcuuuaaaa

SEQ ID NO: 1505181 - RNA, 19 nt, Artificial Sequence
  Description of Artificial Sequence: Synthetic oligonucleotide
gugucaaugcuggucaggg

SEQ ID NO: 1505182 - RNA, 19 nt, Artificial Sequence
  Description of Artificial Sequence: Synthetic oligonucleotide
uggcgacugcuuuaaaacc

SEQ ID NO: 1505183 - RNA, 19 nt, Artificial Sequence
  Description of Artificial Sequence: Synthetic oligonucleotide
ucuauucccgucucaucug

SEQ ID NO: 1505184 - RNA, 19 nt, Artificial Sequence
  Description of Artificial Sequence: Synthetic oligonucleotide
cuaaaugggaggaguguuc

SEQ ID NO: 1505185 - RNA, 19 nt, Artificial Sequence
  Description of Artificial Sequence: Synthetic oligonucleotide
cauuguaaacaggacgaag

SEQ ID NO: 1505186 - RNA, 19 nt, Artificial Sequence
  Description of Artificial Sequence: Synthetic oligonucleotide
aagcaaugcaggaagugga

SEQ ID NO: 1505187 - RNA, 19 nt, Artificial Sequence
  Description of Artificial Sequence: Synthetic oligonucleotide
aaagggaguuuuguggcga

SEQ ID NO: 1505188 - RNA, 19 nt, Artificial Sequence
  Description of Artificial Sequence: Synthetic oligonucleotide
ggaggaguguucaagaaug

SEQ ID NO: 1505189 - RNA, 19 nt, Artificial Sequence
  Description of Artificial Sequence: Synthetic oligonucleotide
gcugacagacagcagagag

SEQ ID NO: 1505190 - RNA, 19 nt, Artificial Sequence
  Description of Artificial Sequence: Synthetic oligonucleotide
agagcuagucuguguggcg

SEQ ID NO: 1505191 - RNA, 19 nt, Artificial Sequence
  Description of Artificial Sequence: Synthetic oligonucleotide
cuuuaaaacccacuggugu

SEQ ID NO: 1505192 - RNA, 19 nt, Artificial Sequence
  Description of Artificial Sequence: Synthetic oligonucleotide
ucccaggcuaacauaagau

SEQ ID NO: 1505193 - RNA, 19 nt, Artificial Sequence
  Description of Artificial Sequence: Synthetic oligonucleotide
ugccagugcugccuugugg

SEQ ID NO: 1505194 - RNA, 19 nt, Artificial Sequence
  Description of Artificial Sequence: Synthetic oligonucleotide
ucugcaaugcuuuggccua

SEQ ID NO: 1505195 - RNA, 19 nt, Artificial Sequence
  Description of Artificial Sequence: Synthetic oligonucleotide
cauaagauauaggucugug

SEQ ID NO: 1505196 - RNA, 19 nt, Artificial Sequence
  Description of Artificial Sequence: Synthetic oligonucleotide
acuugggucccaaacauca

SEQ ID NO: 1505197 - RNA, 19 nt, Artificial Sequence
  Description of Artificial Sequence: Synthetic oligonucleotide
guggaaucccaccaugaug

SEQ ID NO: 1505198 - RNA, 19 nt, Artificial Sequence
  Description of Artificial Sequence: Synthetic oligonucleotide
ugcgaaugcaccguuuaca

SEQ ID NO: 1505199 - RNA, 19 nt, Artificial Sequence
  Description of Artificial Sequence: Synthetic oligonucleotide
cauuaacuuucuucccacc

SEQ ID NO: 1505200 - RNA, 19 nt, Artificial Sequence
  Description of Artificial Sequence: Synthetic oligonucleotide
cagagaagugauuuuaaaa

SEQ ID NO: 1505201 - RNA, 19 nt, Artificial Sequence
  Description of Artificial Sequence: Synthetic oligonucleotide
uggaggcucucgaugaacu

SEQ ID NO: 1505202 - RNA, 19 nt, Artificial Sequence
  Description of Artificial Sequence: Synthetic oligonucleotide
ucccacugacuucugaaaa

SEQ ID NO: 1505203 - RNA, 19 nt, Artificial Sequence
  Description of Artificial Sequence: Synthetic oligonucleotide
gagcuagucuguguggcgg

SEQ ID NO: 1505204 - RNA, 19 nt, Artificial Sequence
  Description of Artificial Sequence: Synthetic oligonucleotide
aaaacccacugguguggag

SEQ ID NO: 1505205 - RNA, 19 nt, Artificial Sequence
  Description of Artificial Sequence: Synthetic oligonucleotide
gaugacuguggugggaggc

SEQ ID NO: 1505206 - RNA, 19 nt, Artificial Sequence
  Description of Artificial Sequence: Synthetic oligonucleotide
uggccuaaacauucacgag

SEQ ID NO: 1505207 - RNA, 19 nt, Artificial Sequence
  Description of Artificial Sequence: Synthetic oligonucleotide
gaaucccaccaugaugagg

SEQ ID NO: 1505208 - RNA, 19 nt, Artificial Sequence
  Description of Artificial Sequence: Synthetic oligonucleotide
agauggagugcacuugggu

SEQ ID NO: 1505209 - RNA, 19 nt, Artificial Sequence
  Description of Artificial Sequence: Synthetic oligonucleotide
ucuaaaugggaggaguguu

SEQ ID NO: 1505210 - RNA, 19 nt, Artificial Sequence
  Description of Artificial Sequence: Synthetic oligonucleotide
aggucugugcacaaucuuc

SEQ ID NO: 1505211 - RNA, 19 nt, Artificial Sequence
  Description of Artificial Sequence: Synthetic oligonucleotide
guaaacaggacgaaguacu

SEQ ID NO: 1505212 - RNA, 19 nt, Artificial Sequence
  Description of Artificial Sequence: Synthetic oligonucleotide
accuccuacagcccugguc

SEQ ID NO: 1505213 - RNA, 19 nt, Artificial Sequence
  Description of Artificial Sequence: Synthetic oligonucleotide
cuccacguuagucaugcug

SEQ ID NO: 1505214 - RNA, 19 nt, Artificial Sequence
  Description of Artificial Sequence: Synthetic oligonucleotide
uuauugcauuguuuccgug

SEQ ID NO: 1505215 - RNA, 19 nt, Artificial Sequence
  Description of Artificial Sequence: Synthetic oligonucleotide
caauuaguagaaggggcag

SEQ ID NO: 1505216 - RNA, 19 nt, Artificial Sequence
  Description of Artificial Sequence: Synthetic oligonucleotide
augauguggucuguguguc

SEQ ID NO: 1505217 - RNA, 19 nt, Artificial Sequence
  Description of Artificial Sequence: Synthetic oligonucleotide
uuuccguguggaagcacug

SEQ ID NO: 1505218 - RNA, 19 nt, Artificial Sequence
  Description of Artificial Sequence: Synthetic oligonucleotide
gcuauguacauuguaaaca

SEQ ID NO: 1505219 - RNA, 19 nt, Artificial Sequence
  Description of Artificial Sequence: Synthetic oligonucleotide
cuaccgggccaguucaucc

SEQ ID NO: 1505220 - RNA, 19 nt, Artificial Sequence
  Description of Artificial Sequence: Synthetic oligonucleotide
aaugcaccguuuacaaaca

SEQ ID NO: 1505221 - RNA, 19 nt, Artificial Sequence
  Description of Artificial Sequence: Synthetic oligonucleotide
uguucuauucccgucucau

SEQ ID NO: 1505222 - RNA, 19 nt, Artificial Sequence
  Description of Artificial Sequence: Synthetic oligonucleotide
ccuccuacagcccuggucc

SEQ ID NO: 1505223 - RNA, 19 nt, Artificial Sequence
  Description of Artificial Sequence: Synthetic oligonucleotide
augggaggaguguucaaga

SEQ ID NO: 1505224 - RNA, 19 nt, Artificial Sequence
  Description of Artificial Sequence: Synthetic oligonucleotide
aaugagagcuauguacauu

SEQ ID NO: 1505225 - RNA, 19 nt, Artificial Sequence
  Description of Artificial Sequence: Synthetic oligonucleotide
cacgagagcugaugggacg

SEQ ID NO: 1505226 - RNA, 19 nt, Artificial Sequence
  Description of Artificial Sequence: Synthetic oligonucleotide
ucaaugcuggucagggguc

SEQ ID NO: 1505227 - RNA, 19 nt, Artificial Sequence
  Description of Artificial Sequence: Synthetic oligonucleotide
agcaugucccacugacuuc

SEQ ID NO: 1505228 - RNA, 19 nt, Artificial Sequence
  Description of Artificial Sequence: Synthetic oligonucleotide
aaacaucacggaugugaaa

SEQ ID NO: 1505229 - RNA, 19 nt, Artificial Sequence
  Description of Artificial Sequence: Synthetic oligonucleotide
cguggcaaggaaaugagag

SEQ ID NO: 1505230 - RNA, 19 nt, Artificial Sequence
  Description of Artificial Sequence: Synthetic oligonucleotide
caauuguucuauucccguc

SEQ ID NO: 1505231 - RNA, 19 nt, Artificial Sequence
  Description of Artificial Sequence: Synthetic oligonucleotide
ucacgagagcugaugggac

SEQ ID NO: 1505232 - RNA, 19 nt, Artificial Sequence
  Description of Artificial Sequence: Synthetic oligonucleotide
acgaaguacuucugguugu

SEQ ID NO: 1505233 - RNA, 19 nt, Artificial Sequence
  Description of Artificial Sequence: Synthetic oligonucleotide
agcugcacuuuguccaguc

SEQ ID NO: 1505234 - RNA, 19 nt, Artificial Sequence
  Description of Artificial Sequence: Synthetic oligonucleotide
uacaaacacugcaguggug

SEQ ID NO: 1505235 - RNA, 19 nt, Artificial Sequence
  Description of Artificial Sequence: Synthetic oligonucleotide
ucucugcaaugcuuuggcc

SEQ ID NO: 1505236 - RNA, 19 nt, Artificial Sequence
  Description of Artificial Sequence: Synthetic oligonucleotide
ggugccaugauguggucug

SEQ ID NO: 1505237 - RNA, 19 nt, Artificial Sequence
  Description of Artificial Sequence: Synthetic oligonucleotide
aguggaaucccaccaugau

SEQ ID NO: 1505238 - RNA, 19 nt, Artificial Sequence
  Description of Artificial Sequence: Synthetic oligonucleotide
aggaugacuguggugggag

SEQ ID NO: 1505239 - RNA, 19 nt, Artificial Sequence
  Description of Artificial Sequence: Synthetic oligonucleotide
ggccuaaacauucacgaga

SEQ ID NO: 1505240 - RNA, 19 nt, Artificial Sequence
  Description of Artificial Sequence: Synthetic oligonucleotide
agcuagucuguguggcggg

SEQ ID NO: 1505241 - RNA, 19 nt, Artificial Sequence
  Description of Artificial Sequence: Synthetic oligonucleotide
uuuuguggcgacugcuuua

SEQ ID NO: 1505242 - RNA, 19 nt, Artificial Sequence
  Description of Artificial Sequence: Synthetic oligonucleotide
uuuguggcgacugcuuuaa

SEQ ID NO: 1505243 - RNA, 19 nt, Artificial Sequence
  Description of Artificial Sequence: Synthetic oligonucleotide
gcucggucgggcuugaugc

SEQ ID NO: 1505244 - RNA, 19 nt, Artificial Sequence
  Description of Artificial Sequence: Synthetic oligonucleotide
ccaucuugcgaaugcaccg

SEQ ID NO: 1505245 - RNA, 19 nt, Artificial Sequence
  Description of Artificial Sequence: Synthetic oligonucleotide
ucccuaccgggccaguuca

SEQ ID NO: 1505246 - RNA, 19 nt, Artificial Sequence
  Description of Artificial Sequence: Synthetic oligonucleotide
guaacaucuacaaccaccu

SEQ ID NO: 1505247 - RNA, 19 nt, Artificial Sequence
  Description of Artificial Sequence: Synthetic oligonucleotide
acauucacgagagcugaug

SEQ ID NO: 1505248 - RNA, 19 nt, Artificial Sequence
  Description of Artificial Sequence: Synthetic oligonucleotide
acugguguggaggacuuca

SEQ ID NO: 1505249 - RNA, 19 nt, Artificial Sequence
  Description of Artificial Sequence: Synthetic oligonucleotide
ugaacucuuuuaguggcau

SEQ ID NO: 1505250 - RNA, 19 nt, Artificial Sequence
  Description of Artificial Sequence: Synthetic oligonucleotide
gucaaugcuggucaggggu

SEQ ID NO: 1505251 - RNA, 19 nt, Artificial Sequence
  Description of Artificial Sequence: Synthetic oligonucleotide
uugcgaaugcaccguuuac

SEQ ID NO: 1505252 - RNA, 19 nt, Artificial Sequence
  Description of Artificial Sequence: Synthetic oligonucleotide
caccguuuacaaacacugc

SEQ ID NO: 1505253 - RNA, 19 nt, Artificial Sequence
  Description of Artificial Sequence: Synthetic oligonucleotide
auacugguacgggucugcc

SEQ ID NO: 1505254 - RNA, 19 nt, Artificial Sequence
  Description of Artificial Sequence: Synthetic oligonucleotide
ucccaccaugaugagggcg

SEQ ID NO: 1505255 - RNA, 19 nt, Artificial Sequence
  Description of Artificial Sequence: Synthetic oligonucleotide
uuguucuauucccgucuca

SEQ ID NO: 1505256 - RNA, 19 nt, Artificial Sequence
  Description of Artificial Sequence: Synthetic oligonucleotide
ucguggcuucccuaccggg

SEQ ID NO: 1505257 - RNA, 19 nt, Artificial Sequence
  Description of Artificial Sequence: Synthetic oligonucleotide
ugaugagggcguggcaagg

SEQ ID NO: 1505258 - RNA, 19 nt, Artificial Sequence
  Description of Artificial Sequence: Synthetic oligonucleotide
agaccacauacugguacgg

SEQ ID NO: 1505259 - RNA, 19 nt, Artificial Sequence
  Description of Artificial Sequence: Synthetic oligonucleotide
ugaugggacggugccauga

SEQ ID NO: 1505260 - RNA, 19 nt, Artificial Sequence
  Description of Artificial Sequence: Synthetic oligonucleotide
cgaugaacucuuuuagugg

SEQ ID NO: 1505261 - RNA, 19 nt, Artificial Sequence
  Description of Artificial Sequence: Synthetic oligonucleotide
cuacaaccaccucccaggc

SEQ ID NO: 1505262 - RNA, 19 nt, Artificial Sequence
  Description of Artificial Sequence: Synthetic oligonucleotide
gccuaaacauucacgagag

SEQ ID NO: 1505263 - RNA, 19 nt, Artificial Sequence
  Description of Artificial Sequence: Synthetic oligonucleotide
aaaugggaggaguguucaa

SEQ ID NO: 1505264 - RNA, 19 nt, Artificial Sequence
  Description of Artificial Sequence: Synthetic oligonucleotide
caaacaucacggaugugaa

SEQ ID NO: 1505265 - RNA, 19 nt, Artificial Sequence
  Description of Artificial Sequence: Synthetic oligonucleotide
cagauggagugcacuuggg

SEQ ID NO: 1505266 - RNA, 19 nt, Artificial Sequence
  Description of Artificial Sequence: Synthetic oligonucleotide
uguacaccaccugcccagg

SEQ ID NO: 1505267 - RNA, 19 nt, Artificial Sequence
  Description of Artificial Sequence: Synthetic oligonucleotide
guggcuucccuaccgggcc

SEQ ID NO: 1505268 - RNA, 19 nt, Artificial Sequence
  Description of Artificial Sequence: Synthetic oligonucleotide
gcacuuguacaccaccugc

SEQ ID NO: 1505269 - RNA, 19 nt, Artificial Sequence
  Description of Artificial Sequence: Synthetic oligonucleotide
ccuucccuagcucaggacc

SEQ ID NO: 1505270 - RNA, 19 nt, Artificial Sequence
  Description of Artificial Sequence: Synthetic oligonucleotide
aggaaaugagagcuaugua

SEQ ID NO: 1505271 - RNA, 19 nt, Artificial Sequence
  Description of Artificial Sequence: Synthetic oligonucleotide
cauacugguacgggucugc

SEQ ID NO: 1505272 - RNA, 19 nt, Artificial Sequence
  Description of Artificial Sequence: Synthetic oligonucleotide
uguguggcgggcugaguaa

SEQ ID NO: 1505273 - RNA, 19 nt, Artificial Sequence
  Description of Artificial Sequence: Synthetic oligonucleotide
uucccuuggucuggugugg

SEQ ID NO: 1505274 - RNA, 19 nt, Artificial Sequence
  Description of Artificial Sequence: Synthetic oligonucleotide
ugagggcguggcaaggaaa

SEQ ID NO: 1505275 - RNA, 19 nt, Artificial Sequence
  Description of Artificial Sequence: Synthetic oligonucleotide
gggaagaggcagcaugucc

SEQ ID NO: 1505276 - RNA, 19 nt, Artificial Sequence
  Description of Artificial Sequence: Synthetic oligonucleotide
ugggcagcacccuccacgu

SEQ ID NO: 1505277 - RNA, 19 nt, Artificial Sequence
  Description of Artificial Sequence: Synthetic oligonucleotide
ggcgacugcuuuaaaaccc

SEQ ID NO: 1505278 - RNA, 19 nt, Artificial Sequence
  Description of Artificial Sequence: Synthetic oligonucleotide
ggcauuuccuuuugggcac

SEQ ID NO: 1505279 - RNA, 19 nt, Artificial Sequence
  Description of Artificial Sequence: Synthetic oligonucleotide
auaggucugugcacaaucu

SEQ ID NO: 1505280 - RNA, 19 nt, Artificial Sequence
  Description of Artificial Sequence: Synthetic oligonucleotide
uucccuaccgggccaguuc

SEQ ID NO: 1505281 - RNA, 19 nt, Artificial Sequence
  Description of Artificial Sequence: Synthetic oligonucleotide
aauagagguugggaacuuu

SEQ ID NO: 1505282 - RNA, 19 nt, Artificial Sequence
  Description of Artificial Sequence: Synthetic oligonucleotide
uaaaacccacuggugugga

SEQ ID NO: 1505283 - RNA, 19 nt, Artificial Sequence
  Description of Artificial Sequence: Synthetic oligonucleotide
gguauucaauuaguagaag

SEQ ID NO: 1505284 - RNA, 19 nt, Artificial Sequence
  Description of Artificial Sequence: Synthetic oligonucleotide
ccacccuagagagaaaggg

SEQ ID NO: 1505285 - RNA, 19 nt, Artificial Sequence
  Description of Artificial Sequence: Synthetic oligonucleotide
gauguggucugugugucaa

SEQ ID NO: 1505286 - RNA, 19 nt, Artificial Sequence
  Description of Artificial Sequence: Synthetic oligonucleotide
uaggucugugcacaaucuu

SEQ ID NO: 1505287 - RNA, 19 nt, Artificial Sequence
  Description of Artificial Sequence: Synthetic oligonucleotide
uuguucucgcccacacagu

SEQ ID NO: 1505288 - RNA, 19 nt, Artificial Sequence
  Description of Artificial Sequence: Synthetic oligonucleotide
ugauguggucuguguguca

SEQ ID NO: 1505289 - RNA, 19 nt, Artificial Sequence
  Description of Artificial Sequence: Synthetic oligonucleotide
agaaagagcugcacuuugu

SEQ ID NO: 1505290 - RNA, 19 nt, Artificial Sequence
  Description of Artificial Sequence: Synthetic oligonucleotide
aaauagagguugggaacuu

SEQ ID NO: 1505291 - RNA, 19 nt, Artificial Sequence
  Description of Artificial Sequence: Synthetic oligonucleotide
cuucccuagcucaggacca

SEQ ID NO: 1505292 - RNA, 19 nt, Artificial Sequence
  Description of Artificial Sequence: Synthetic oligonucleotide
aguguucaagaauggucuu

SEQ ID NO: 1505293 - RNA, 19 nt, Artificial Sequence
  Description of Artificial Sequence: Synthetic oligonucleotide
cuugggucccaaacaucac

SEQ ID NO: 1505294 - RNA, 19 nt, Artificial Sequence
  Description of Artificial Sequence: Synthetic oligonucleotide
cuucacggugcgcaggguc

SEQ ID NO: 1505295 - RNA, 19 nt, Artificial Sequence
  Description of Artificial Sequence: Synthetic oligonucleotide
cugugugucaaugcugguc

SEQ ID NO: 1505296 - RNA, 19 nt, Artificial Sequence
  Description of Artificial Sequence: Synthetic oligonucleotide
cguguggaagcacugacag

SEQ ID NO: 1505297 - RNA, 19 nt, Artificial Sequence
  Description of Artificial Sequence: Synthetic oligonucleotide
uguggcgggcugaguaaca

SEQ ID NO: 1505298 - RNA, 19 nt, Artificial Sequence
  Description of Artificial Sequence: Synthetic oligonucleotide
cucugcaaugcuuuggccu

SEQ ID NO: 1505299 - RNA, 19 nt, Artificial Sequence
  Description of Artificial Sequence: Synthetic oligonucleotide
aggaguguucaagaauggu

SEQ ID NO: 1505300 - RNA, 19 nt, Artificial Sequence
  Description of Artificial Sequence: Synthetic oligonucleotide
cucguggcuucccuaccgg

SEQ ID NO: 1505301 - RNA, 19 nt, Artificial Sequence
  Description of Artificial Sequence: Synthetic oligonucleotide
cuuggggcacuuguacacc

SEQ ID NO: 1505302 - RNA, 19 nt, Artificial Sequence
  Description of Artificial Sequence: Synthetic oligonucleotide
cccuagagagaaagggugg

SEQ ID NO: 1505303 - RNA, 19 nt, Artificial Sequence
  Description of Artificial Sequence: Synthetic oligonucleotide
ggugcgcagggucuaaaug

SEQ ID NO: 1505304 - RNA, 19 nt, Artificial Sequence
  Description of Artificial Sequence: Synthetic oligonucleotide
guucuauucccgucucauc

SEQ ID NO: 1505305 - RNA, 19 nt, Artificial Sequence
  Description of Artificial Sequence: Synthetic oligonucleotide
ggugggaggcgagaaagag

SEQ ID NO: 1505306 - RNA, 19 nt, Artificial Sequence
  Description of Artificial Sequence: Synthetic oligonucleotide
ucuugcgaaugcaccguuu

SEQ ID NO: 1505307 - RNA, 19 nt, Artificial Sequence
  Description of Artificial Sequence: Synthetic oligonucleotide
caaaggggcuggcccaccc

SEQ ID NO: 1505308 - RNA, 19 nt, Artificial Sequence
  Description of Artificial Sequence: Synthetic oligonucleotide
cuuuuaguggcauuuccuu

SEQ ID NO: 1505309 - RNA, 19 nt, Artificial Sequence
  Description of Artificial Sequence: Synthetic oligonucleotide
ggucuaaaugggaggagug

SEQ ID NO: 1505310 - RNA, 19 nt, Artificial Sequence
  Description of Artificial Sequence: Synthetic oligonucleotide
gcuuuaaaacccacuggug

SEQ ID NO: 1505311 - RNA, 19 nt, Artificial Sequence
  Description of Artificial Sequence: Synthetic oligonucleotide
uucagaccacauacuggua

SEQ ID NO: 1505312 - RNA, 19 nt, Artificial Sequence
  Description of Artificial Sequence: Synthetic oligonucleotide
ggcuaacauaagauauagg

SEQ ID NO: 1505313 - RNA, 19 nt, Artificial Sequence
  Description of Artificial Sequence: Synthetic oligonucleotide
aggcgagaaagagcugcac

SEQ ID NO: 1505314 - RNA, 19 nt, Artificial Sequence
  Description of Artificial Sequence: Synthetic oligonucleotide
cuugcgaaugcaccguuua

SEQ ID NO: 1505315 - RNA, 19 nt, Artificial Sequence
  Description of Artificial Sequence: Synthetic oligonucleotide
guguucaagaauggucuuc

SEQ ID NO: 1505316 - RNA, 19 nt, Artificial Sequence
  Description of Artificial Sequence: Synthetic oligonucleotide
augggacggugccaugaug

SEQ ID NO: 1505317 - RNA, 19 nt, Artificial Sequence
  Description of Artificial Sequence: Synthetic oligonucleotide
ggaguuuuguggcgacugc

SEQ ID NO: 1505318 - RNA, 19 nt, Artificial Sequence
  Description of Artificial Sequence: Synthetic oligonucleotide
acauuguaaacaggacgaa

SEQ ID NO: 1505319 - RNA, 19 nt, Artificial Sequence
  Description of Artificial Sequence: Synthetic oligonucleotide
uccuucccuagcucaggac

SEQ ID NO: 1505320 - RNA, 19 nt, Artificial Sequence
  Description of Artificial Sequence: Synthetic oligonucleotide
ugacuguggugggaggcga

SEQ ID NO: 1505321 - RNA, 19 nt, Artificial Sequence
  Description of Artificial Sequence: Synthetic oligonucleotide
uuguuuccguguggaagca

SEQ ID NO: 1505322 - RNA, 19 nt, Artificial Sequence
  Description of Artificial Sequence: Synthetic oligonucleotide
uacgggucugccuucccuu

SEQ ID NO: 1505323 - RNA, 19 nt, Artificial Sequence
  Description of Artificial Sequence: Synthetic oligonucleotide
ccugugacucugcacagac

SEQ ID NO: 1505324 - RNA, 19 nt, Artificial Sequence
  Description of Artificial Sequence: Synthetic oligonucleotide
gggaguuuuguggcgacug

SEQ ID NO: 1505325 - RNA, 19 nt, Artificial Sequence
  Description of Artificial Sequence: Synthetic oligonucleotide
gacggugccaugauguggu

SEQ ID NO: 1505326 - RNA, 19 nt, Artificial Sequence
  Description of Artificial Sequence: Synthetic oligonucleotide
gaugagggcguggcaagga

SEQ ID NO: 1505327 - RNA, 19 nt, Artificial Sequence
  Description of Artificial Sequence: Synthetic oligonucleotide
uucccuagcucaggaccag

SEQ ID NO: 1505328 - RNA, 19 nt, Artificial Sequence
  Description of Artificial Sequence: Synthetic oligonucleotide
cugguguggaggacuucac

SEQ ID NO: 1505329 - RNA, 19 nt, Artificial Sequence
  Description of Artificial Sequence: Synthetic oligonucleotide
ggaugacuguggugggagg

SEQ ID NO: 1505330 - RNA, 19 nt, Artificial Sequence
  Description of Artificial Sequence: Synthetic oligonucleotide
augagggcguggcaaggaa

SEQ ID NO: 1505331 - RNA, 19 nt, Artificial Sequence
  Description of Artificial Sequence: Synthetic oligonucleotide
guucaagaauggucuucuc

SEQ ID NO: 1505332 - RNA, 19 nt, Artificial Sequence
  Description of Artificial Sequence: Synthetic oligonucleotide
acgggucugccuucccuug

SEQ ID NO: 1505333 - RNA, 19 nt, Artificial Sequence
  Description of Artificial Sequence: Synthetic oligonucleotide
cucgaugaacucuuuuagu

SEQ ID NO: 1505334 - RNA, 19 nt, Artificial Sequence
  Description of Artificial Sequence: Synthetic oligonucleotide
gaggccagagaagugauuu

SEQ ID NO: 1505335 - RNA, 19 nt, Artificial Sequence
  Description of Artificial Sequence: Synthetic oligonucleotide
ccuagagagaaaggguggc

SEQ ID NO: 1505336 - RNA, 19 nt, Artificial Sequence
  Description of Artificial Sequence: Synthetic oligonucleotide
ucggucgggcuugaugcug

SEQ ID NO: 1505337 - RNA, 19 nt, Artificial Sequence
  Description of Artificial Sequence: Synthetic oligonucleotide
ggacggugccaugaugugg

SEQ ID NO: 1505338 - RNA, 19 nt, Artificial Sequence
  Description of Artificial Sequence: Synthetic oligonucleotide
uagcucaggaccagcccuu

SEQ ID NO: 1505339 - RNA, 19 nt, Artificial Sequence
  Description of Artificial Sequence: Synthetic oligonucleotide
cuugugggcaggaggaggu

SEQ ID NO: 1505340 - RNA, 19 nt, Artificial Sequence
  Description of Artificial Sequence: Synthetic oligonucleotide
accccaaggcaaaagcuaa

SEQ ID NO: 1505341 - RNA, 19 nt, Artificial Sequence
  Description of Artificial Sequence: Synthetic oligonucleotide
gcgaaugcaccguuuacaa

SEQ ID NO: 1505342 - RNA, 19 nt, Artificial Sequence
  Description of Artificial Sequence: Synthetic oligonucleotide
ggcguggcaaggaaaugag

SEQ ID NO: 1505343 - RNA, 19 nt, Artificial Sequence
  Description of Artificial Sequence: Synthetic oligonucleotide
auauaggucugugcacaau

SEQ ID NO: 1505344 - RNA, 19 nt, Artificial Sequence
  Description of Artificial Sequence: Synthetic oligonucleotide
uccugugacucugcacaga

SEQ ID NO: 1505345 - RNA, 19 nt, Artificial Sequence
  Description of Artificial Sequence: Synthetic oligonucleotide
uguuuccguguggaagcac

SEQ ID NO: 1505346 - RNA, 19 nt, Artificial Sequence
  Description of Artificial Sequence: Synthetic oligonucleotide
agguuuggaaaagguuuau

SEQ ID NO: 1505347 - RNA, 19 nt, Artificial Sequence
  Description of Artificial Sequence: Synthetic oligonucleotide
gacuguggugggaggcgag

SEQ ID NO: 1505348 - RNA, 19 nt, Artificial Sequence
  Description of Artificial Sequence: Synthetic oligonucleotide
gaggcgagaaagagcugca

SEQ ID NO: 1505349 - RNA, 19 nt, Artificial Sequence
  Description of Artificial Sequence: Synthetic oligonucleotide
guuuccguguggaagcacu

SEQ ID NO: 1505350 - RNA, 19 nt, Artificial Sequence
  Description of Artificial Sequence: Synthetic oligonucleotide
cacccuagagagaaagggu

SEQ ID NO: 1505351 - RNA, 19 nt, Artificial Sequence
  Description of Artificial Sequence: Synthetic oligonucleotide
cuguguggcgggcugagua

SEQ ID NO: 1505352 - RNA, 19 nt, Artificial Sequence
  Description of Artificial Sequence: Synthetic oligonucleotide
ccuagcucaggaccagccc

SEQ ID NO: 1505353 - RNA, 19 nt, Artificial Sequence
  Description of Artificial Sequence: Synthetic oligonucleotide
gucuaaaugggaggagugu

SEQ ID NO: 1505354 - RNA, 19 nt, Artificial Sequence
  Description of Artificial Sequence: Synthetic oligonucleotide
aggccagagaagugauuuu

SEQ ID NO: 1505355 - RNA, 19 nt, Artificial Sequence
  Description of Artificial Sequence: Synthetic oligonucleotide
cccuagcucaggaccagcc

SEQ ID NO: 1505356 - RNA, 19 nt, Artificial Sequence
  Description of Artificial Sequence: Synthetic oligonucleotide
ggcucggucgggcuugaug

SEQ ID NO: 1505357 - RNA, 19 nt, Artificial Sequence
  Description of Artificial Sequence: Synthetic oligonucleotide
ccucguggcuucccuaccg

SEQ ID NO: 1505358 - RNA, 19 nt, Artificial Sequence
  Description of Artificial Sequence: Synthetic oligonucleotide
ccaggcuaacauaagauau

SEQ ID NO: 1505359 - RNA, 19 nt, Artificial Sequence
  Description of Artificial Sequence: Synthetic oligonucleotide
cccacccuagagagaaagg

SEQ ID NO: 1505360 - RNA, 19 nt, Artificial Sequence
  Description of Artificial Sequence: Synthetic oligonucleotide
cuuucauguucauccacuu

SEQ ID NO: 1505361 - RNA, 19 nt, Artificial Sequence
  Description of Artificial Sequence: Synthetic oligonucleotide
cagugccucaaagcacagc

SEQ ID NO: 1505362 - RNA, 19 nt, Artificial Sequence
  Description of Artificial Sequence: Synthetic oligonucleotide
ggcagcacccuccacguua

SEQ ID NO: 1505363 - RNA, 19 nt, Artificial Sequence
  Description of Artificial Sequence: Synthetic oligonucleotide
gguccuucccuagcucagg

SEQ ID NO: 1505364 - RNA, 19 nt, Artificial Sequence
  Description of Artificial Sequence: Synthetic oligonucleotide
caugucccacugacuucug

SEQ ID NO: 1505365 - RNA, 19 nt, Artificial Sequence
  Description of Artificial Sequence: Synthetic oligonucleotide
cuauucccgucucaucugu

SEQ ID NO: 1505366 - RNA, 19 nt, Artificial Sequence
  Description of Artificial Sequence: Synthetic oligonucleotide
ggacuucacggugcgcagg

SEQ ID NO: 1505367 - RNA, 19 nt, Artificial Sequence
  Description of Artificial Sequence: Synthetic oligonucleotide
gggacggugccaugaugug

SEQ ID NO: 1505368 - RNA, 19 nt, Artificial Sequence
  Description of Artificial Sequence: Synthetic oligonucleotide
ggcgagaaagagcugcacu

SEQ ID NO: 1505369 - RNA, 19 nt, Artificial Sequence
  Description of Artificial Sequence: Synthetic oligonucleotide
gggcguggcaaggaaauga

SEQ ID NO: 1505370 - RNA, 19 nt, Artificial Sequence
  Description of Artificial Sequence: Synthetic oligonucleotide
cugguacgggucugccuuc

SEQ ID NO: 1505371 - RNA, 19 nt, Artificial Sequence
  Description of Artificial Sequence: Synthetic oligonucleotide
gaugggacggugccaugau

SEQ ID NO: 1505372 - RNA, 19 nt, Artificial Sequence
  Description of Artificial Sequence: Synthetic oligonucleotide
uuguggcgacugcuuuaaa

SEQ ID NO: 1505373 - RNA, 19 nt, Artificial Sequence
  Description of Artificial Sequence: Synthetic oligonucleotide
agggaguuuuguggcgacu

SEQ ID NO: 1505374 - RNA, 19 nt, Artificial Sequence
  Description of Artificial Sequence: Synthetic oligonucleotide
gagggcguggcaaggaaau

SEQ ID NO: 1505375 - RNA, 19 nt, Artificial Sequence
  Description of Artificial Sequence: Synthetic oligonucleotide
ggaggcucucgaugaacuc

SEQ ID NO: 1505376 - RNA, 19 nt, Artificial Sequence
  Description of Artificial Sequence: Synthetic oligonucleotide
agggcguggcaaggaaaug

SEQ ID NO: 1505377 - RNA, 19 nt, Artificial Sequence
  Description of Artificial Sequence: Synthetic oligonucleotide
guguggcgggcugaguaac

SEQ ID NO: 1505378 - RNA, 19 nt, Artificial Sequence
  Description of Artificial Sequence: Synthetic oligonucleotide
gcuuucauguucauccacu

SEQ ID NO: 1505379 - RNA, 19 nt, Artificial Sequence
  Description of Artificial Sequence: Synthetic oligonucleotide
cacguuagucaugcugaca

SEQ ID NO: 1505380 - RNA, 19 nt, Artificial Sequence
  Description of Artificial Sequence: Synthetic oligonucleotide
gguuguucucgcccacaca

SEQ ID NO: 1505381 - RNA, 19 nt, Artificial Sequence
  Description of Artificial Sequence: Synthetic oligonucleotide
ggucccaaacaucacggau

SEQ ID NO: 1505382 - RNA, 19 nt, Artificial Sequence
  Description of Artificial Sequence: Synthetic oligonucleotide
ucuguguggcgggcugagu

SEQ ID NO: 1505383 - RNA, 19 nt, Artificial Sequence
  Description of Artificial Sequence: Synthetic oligonucleotide
ggcgggcugaguaacaucu

SEQ ID NO: 1505384 - RNA, 19 nt, Artificial Sequence
  Description of Artificial Sequence: Synthetic oligonucleotide
aggcucucgaugaacucuu

SEQ ID NO: 1505385 - RNA, 19 nt, Artificial Sequence
  Description of Artificial Sequence: Synthetic oligonucleotide
gcagcacccuccacguuag

SEQ ID NO: 1505386 - RNA, 19 nt, Artificial Sequence
  Description of Artificial Sequence: Synthetic oligonucleotide
gaacucuuuuaguggcauu

SEQ ID NO: 1505387 - RNA, 19 nt, Artificial Sequence
  Description of Artificial Sequence: Synthetic oligonucleotide
ccacccaggacuagaguga

SEQ ID NO: 1505388 - RNA, 19 nt, Artificial Sequence
  Description of Artificial Sequence: Synthetic oligonucleotide
ccacguuagucaugcugac

SEQ ID NO: 1505389 - RNA, 19 nt, Artificial Sequence
  Description of Artificial Sequence: Synthetic oligonucleotide
guacgggucugccuucccu

SEQ ID NO: 1505390 - RNA, 19 nt, Artificial Sequence
  Description of Artificial Sequence: Synthetic oligonucleotide
gcgacugcuuuaaaaccca

SEQ ID NO: 1505391 - RNA, 19 nt, Artificial Sequence
  Description of Artificial Sequence: Synthetic oligonucleotide
ggccagagaagugauuuua

SEQ ID NO: 1505392 - RNA, 19 nt, Artificial Sequence
  Description of Artificial Sequence: Synthetic oligonucleotide
agggguccuucagaccaca

SEQ ID NO: 1505393 - RNA, 19 nt, Artificial Sequence
  Description of Artificial Sequence: Synthetic oligonucleotide
cgggcugaguaacaucuac

SEQ ID NO: 1505394 - RNA, 19 nt, Artificial Sequence
  Description of Artificial Sequence: Synthetic oligonucleotide
ccucccaggcuaacauaag

SEQ ID NO: 1505395 - RNA, 19 nt, Artificial Sequence
  Description of Artificial Sequence: Synthetic oligonucleotide
gggucuaaaugggaggagu

SEQ ID NO: 1505396 - RNA, 19 nt, Artificial Sequence
  Description of Artificial Sequence: Synthetic oligonucleotide
gcaugucccacugacuucu

SEQ ID NO: 1505397 - RNA, 19 nt, Artificial Sequence
  Description of Artificial Sequence: Synthetic oligonucleotide
gcccucguggcuucccuac

SEQ ID NO: 1505398 - RNA, 19 nt, Artificial Sequence
  Description of Artificial Sequence: Synthetic oligonucleotide
ggacgaaguacuucugguu

SEQ ID NO: 1505399 - RNA, 19 nt, Artificial Sequence
  Description of Artificial Sequence: Synthetic oligonucleotide
gggucccaaacaucacgga

SEQ ID NO: 1505400 - RNA, 19 nt, Artificial Sequence
  Description of Artificial Sequence: Synthetic oligonucleotide
ucacggugcgcagggucua

SEQ ID NO: 1505401 - RNA, 19 nt, Artificial Sequence
  Description of Artificial Sequence: Synthetic oligonucleotide
ggguccuucagaccacaua

SEQ ID NO: 1505402 - RNA, 19 nt, Artificial Sequence
  Description of Artificial Sequence: Synthetic oligonucleotide
gcuagucuguguggcgggc

SEQ ID NO: 1505403 - RNA, 19 nt, Artificial Sequence
  Description of Artificial Sequence: Synthetic oligonucleotide
cugguuguucucgcccaca

SEQ ID NO: 1505404 - RNA, 19 nt, Artificial Sequence
  Description of Artificial Sequence: Synthetic oligonucleotide
acuucacggugcgcagggu

SEQ ID NO: 1505405 - RNA, 19 nt, Artificial Sequence
  Description of Artificial Sequence: Synthetic oligonucleotide
cacccaggacuagagugaa

SEQ ID NO: 1505406 - RNA, 19 nt, Artificial Sequence
  Description of Artificial Sequence: Synthetic oligonucleotide
ccguguggaagcacugaca

SEQ ID NO: 1505407 - RNA, 19 nt, Artificial Sequence
  Description of Artificial Sequence: Synthetic oligonucleotide
cuguggugggaggcgagaa

SEQ ID NO: 1505408 - RNA, 19 nt, Artificial Sequence
  Description of Artificial Sequence: Synthetic oligonucleotide
cccaccaugaugagggcgu

SEQ ID NO: 1505409 - RNA, 19 nt, Artificial Sequence
  Description of Artificial Sequence: Synthetic oligonucleotide
guccuucagaccacauacu

SEQ ID NO: 1505410 - RNA, 19 nt, Artificial Sequence
  Description of Artificial Sequence: Synthetic oligonucleotide
ggcaaaggggcuggcccac

SEQ ID NO: 1505411 - RNA, 19 nt, Artificial Sequence
  Description of Artificial Sequence: Synthetic oligonucleotide
gguuuggaaaagguuuauu

SEQ ID NO: 1505412 - RNA, 19 nt, Artificial Sequence
  Description of Artificial Sequence: Synthetic oligonucleotide
acccuccacguuagucaug

SEQ ID NO: 1505413 - RNA, 19 nt, Artificial Sequence
  Description of Artificial Sequence: Synthetic oligonucleotide
agcucaggaccagcccuuu

SEQ ID NO: 1505414 - RNA, 19 nt, Artificial Sequence
  Description of Artificial Sequence: Synthetic oligonucleotide
cuagucuguguggcgggcu

SEQ ID NO: 1505415 - RNA, 19 nt, Artificial Sequence
  Description of Artificial Sequence: Synthetic oligonucleotide
ccuaccgggccaguucauc

SEQ ID NO: 1505416 - RNA, 19 nt, Artificial Sequence
  Description of Artificial Sequence: Synthetic oligonucleotide
gcugcacuuuguccagucu

SEQ ID NO: 1505417 - RNA, 19 nt, Artificial Sequence
  Description of Artificial Sequence: Synthetic oligonucleotide
cugcaaugcuuuggccuaa

SEQ ID NO: 1505418 - RNA, 19 nt, Artificial Sequence
  Description of Artificial Sequence: Synthetic oligonucleotide
cucggucgggcuugaugcu

SEQ ID NO: 1505419 - RNA, 19 nt, Artificial Sequence
  Description of Artificial Sequence: Synthetic oligonucleotide
acggugcgcagggucuaaa

SEQ ID NO: 1505420 - RNA, 19 nt, Artificial Sequence
  Description of Artificial Sequence: Synthetic oligonucleotide
gcguggcaaggaaaugaga

SEQ ID NO: 1505421 - RNA, 19 nt, Artificial Sequence
  Description of Artificial Sequence: Synthetic oligonucleotide
gcaaugcaggaaguggaau

SEQ ID NO: 1505422 - RNA, 19 nt, Artificial Sequence
  Description of Artificial Sequence: Synthetic oligonucleotide
ggggcuggcccacccuaga

SEQ ID NO: 1505423 - RNA, 19 nt, Artificial Sequence
  Description of Artificial Sequence: Synthetic oligonucleotide
gcaaaggggcuggcccacc

SEQ ID NO: 1505424 - RNA, 19 nt, Artificial Sequence
  Description of Artificial Sequence: Synthetic oligonucleotide
ggucgggcuugaugcugca

SEQ ID NO: 1505425 - RNA, 19 nt, Artificial Sequence
  Description of Artificial Sequence: Synthetic oligonucleotide
cuccuacagcccugguccu

SEQ ID NO: 1505426 - RNA, 19 nt, Artificial Sequence
  Description of Artificial Sequence: Synthetic oligonucleotide
ccaugaugagggcguggca

SEQ ID NO: 1505427 - RNA, 19 nt, Artificial Sequence
  Description of Artificial Sequence: Synthetic oligonucleotide
guggcgggcugaguaacau

SEQ ID NO: 1505428 - RNA, 19 nt, Artificial Sequence
  Description of Artificial Sequence: Synthetic oligonucleotide
acccaggacuagagugaaa

SEQ ID NO: 1505429 - RNA, 19 nt, Artificial Sequence
  Description of Artificial Sequence: Synthetic oligonucleotide
gggucugccuucccuuggu

SEQ ID NO: 1505430 - RNA, 19 nt, Artificial Sequence
  Description of Artificial Sequence: Synthetic oligonucleotide
cgaaugcaccguuuacaaa

SEQ ID NO: 1505431 - RNA, 19 nt, Artificial Sequence
  Description of Artificial Sequence: Synthetic oligonucleotide
ccccaaggcaaaagcuaaa

SEQ ID NO: 1505432 - RNA, 19 nt, Artificial Sequence
  Description of Artificial Sequence: Synthetic oligonucleotide
ccaccaugaugagggcgug

SEQ ID NO: 1505433 - RNA, 19 nt, Artificial Sequence
  Description of Artificial Sequence: Synthetic oligonucleotide
cgggccaguucauccacga

SEQ ID NO: 1505434 - RNA, 19 nt, Artificial Sequence
  Description of Artificial Sequence: Synthetic oligonucleotide
cccuuggucugguguggca

SEQ ID NO: 1505435 - RNA, 19 nt, Artificial Sequence
  Description of Artificial Sequence: Synthetic oligonucleotide
cacggugcgcagggucuaa

SEQ ID NO: 1505436 - RNA, 19 nt, Artificial Sequence
  Description of Artificial Sequence: Synthetic oligonucleotide
ggcccucguggcuucccua

SEQ ID NO: 1505437 - RNA, 19 nt, Artificial Sequence
  Description of Artificial Sequence: Synthetic oligonucleotide
gcauuuccuuuugggcacu

SEQ ID NO: 1505438 - RNA, 19 nt, Artificial Sequence
  Description of Artificial Sequence: Synthetic oligonucleotide
gggcccucguggcuucccu

SEQ ID NO: 1505439 - RNA, 19 nt, Artificial Sequence
  Description of Artificial Sequence: Synthetic oligonucleotide
ccagcccuuuccugugacu

SEQ ID NO: 1505440 - RNA, 19 nt, Artificial Sequence
  Description of Artificial Sequence: Synthetic oligonucleotide
gcgggcugaguaacaucua

SEQ ID NO: 1505441 - RNA, 19 nt, Artificial Sequence
  Description of Artificial Sequence: Synthetic oligonucleotide
caccuccuacagcccuggu

SEQ ID NO: 1505442 - RNA, 19 nt, Artificial Sequence
  Description of Artificial Sequence: Synthetic oligonucleotide
cagcacccuccacguuagu

SEQ ID NO: 1505443 - RNA, 19 nt, Artificial Sequence
  Description of Artificial Sequence: Synthetic oligonucleotide
gggguccuucagaccacau

SEQ ID NO: 1505444 - RNA, 19 nt, Artificial Sequence
  Description of Artificial Sequence: Synthetic oligonucleotide
ggcccacccuagagagaaa

SEQ ID NO: 1505445 - RNA, 19 nt, Artificial Sequence
  Description of Artificial Sequence: Synthetic oligonucleotide
cggugcgcagggucuaaau

SEQ ID NO: 1505446 - RNA, 19 nt, Artificial Sequence
  Description of Artificial Sequence: Synthetic oligonucleotide
cggugccaugauguggucu

SEQ ID NO: 1505447 - RNA, 19 nt, Artificial Sequence
  Description of Artificial Sequence: Synthetic oligonucleotide
ccuccacguuagucaugcu

SEQ ID NO: 1505448 - RNA, 19 nt, Artificial Sequence
  Description of Artificial Sequence: Synthetic oligonucleotide
gggcagcacccuccacguu

SEQ ID NO: 1505449 - RNA, 19 nt, Artificial Sequence
  Description of Artificial Sequence: Synthetic oligonucleotide
cccuaccgggccaguucau

SEQ ID NO: 1505450 - RNA, 19 nt, Artificial Sequence
  Description of Artificial Sequence: Synthetic oligonucleotide
cgagagcugaugggacggu

SEQ ID NO: 1505451 - RNA, 19 nt, Artificial Sequence
  Description of Artificial Sequence: Synthetic oligonucleotide
ugugauaagauucuccugg

SEQ ID NO: 1505452 - RNA, 19 nt, Artificial Sequence
  Description of Artificial Sequence: Synthetic oligonucleotide
aacaagacuauuucaacag

SEQ ID NO: 1505453 - RNA, 19 nt, Artificial Sequence
  Description of Artificial Sequence: Synthetic oligonucleotide
agacuauuucaacagagac

SEQ ID NO: 1505454 - RNA, 19 nt, Artificial Sequence
  Description of Artificial Sequence: Synthetic oligonucleotide
aaggcgacagucuaggcuc

SEQ ID NO: 1505455 - RNA, 19 nt, Artificial Sequence
  Description of Artificial Sequence: Synthetic oligonucleotide
uauugggucgcuuggaugg

SEQ ID NO: 1505456 - RNA, 19 nt, Artificial Sequence
  Description of Artificial Sequence: Synthetic oligonucleotide
aaagcagguagaccaaugg

SEQ ID NO: 1505457 - RNA, 19 nt, Artificial Sequence
  Description of Artificial Sequence: Synthetic oligonucleotide
gugauaaagcagcagaugg

SEQ ID NO: 1505458 - RNA, 19 nt, Artificial Sequence
  Description of Artificial Sequence: Synthetic oligonucleotide
uauccgauagacuuuguag

SEQ ID NO: 1505459 - RNA, 19 nt, Artificial Sequence
  Description of Artificial Sequence: Synthetic oligonucleotide
guauuauccaacuucggag

SEQ ID NO: 1505460 - RNA, 19 nt, Artificial Sequence
  Description of Artificial Sequence: Synthetic oligonucleotide
aagccuugaauauggcagc

SEQ ID NO: 1505461 - RNA, 19 nt, Artificial Sequence
  Description of Artificial Sequence: Synthetic oligonucleotide
caagccuugaauauggcag

SEQ ID NO: 1505462 - RNA, 19 nt, Artificial Sequence
  Description of Artificial Sequence: Synthetic oligonucleotide
agaacaagacuauuucaac

SEQ ID NO: 1505463 - RNA, 19 nt, Artificial Sequence
  Description of Artificial Sequence: Synthetic oligonucleotide
uaaagcagcagauggaugu

SEQ ID NO: 1505464 - RNA, 19 nt, Artificial Sequence
  Description of Artificial Sequence: Synthetic oligonucleotide
uauuauccaacuucggagc

SEQ ID NO: 1505465 - RNA, 19 nt, Artificial Sequence
  Description of Artificial Sequence: Synthetic oligonucleotide
auccgauagacuuuguagg

SEQ ID NO: 1505466 - RNA, 19 nt, Artificial Sequence
  Description of Artificial Sequence: Synthetic oligonucleotide
uuaaacagugcccaagccu

SEQ ID NO: 1505467 - RNA, 19 nt, Artificial Sequence
  Description of Artificial Sequence: Synthetic oligonucleotide
acggggaugggacaaaggc

SEQ ID NO: 1505468 - RNA, 19 nt, Artificial Sequence
  Description of Artificial Sequence: Synthetic oligonucleotide
aacaaagcggcuuucugcu

SEQ ID NO: 1505469 - RNA, 19 nt, Artificial Sequence
  Description of Artificial Sequence: Synthetic oligonucleotide
guaacagaaacaaagcggc

SEQ ID NO: 1505470 - RNA, 19 nt, Artificial Sequence
  Description of Artificial Sequence: Synthetic oligonucleotide
gaauauggcagcauccugg

SEQ ID NO: 1505471 - RNA, 19 nt, Artificial Sequence
  Description of Artificial Sequence: Synthetic oligonucleotide
agaccugaggaucagagug

SEQ ID NO: 1505472 - RNA, 19 nt, Artificial Sequence
  Description of Artificial Sequence: Synthetic oligonucleotide
guaggguucagcaacaucc

SEQ ID NO: 1505473 - RNA, 19 nt, Artificial Sequence
  Description of Artificial Sequence: Synthetic oligonucleotide
acagucuaggcucuccacc

SEQ ID NO: 1505474 - RNA, 19 nt, Artificial Sequence
  Description of Artificial Sequence: Synthetic oligonucleotide
caagacuauuucaacagag

SEQ ID NO: 1505475 - RNA, 19 nt, Artificial Sequence
  Description of Artificial Sequence: Synthetic oligonucleotide
cuugaauauggcagcaucc

SEQ ID NO: 1505476 - RNA, 19 nt, Artificial Sequence
  Description of Artificial Sequence: Synthetic oligonucleotide
aaugguguggagaacaaga

SEQ ID NO: 1505477 - RNA, 19 nt, Artificial Sequence
  Description of Artificial Sequence: Synthetic oligonucleotide
ugcucuauaaacacugggu

SEQ ID NO: 1505478 - RNA, 19 nt, Artificial Sequence
  Description of Artificial Sequence: Synthetic oligonucleotide
uccgauagacuuuguaggg

SEQ ID NO: 1505479 - RNA, 19 nt, Artificial Sequence
  Description of Artificial Sequence: Synthetic oligonucleotide
uauuucaacagagaccuga

SEQ ID NO: 1505480 - RNA, 19 nt, Artificial Sequence
  Description of Artificial Sequence: Synthetic oligonucleotide
cuagaaaucacguggccug

SEQ ID NO: 1505481 - RNA, 19 nt, Artificial Sequence
  Description of Artificial Sequence: Synthetic oligonucleotide
uuuaaacagugcccaagcc

SEQ ID NO: 1505482 - RNA, 19 nt, Artificial Sequence
  Description of Artificial Sequence: Synthetic oligonucleotide
aaaucacguggccugagcu

SEQ ID NO: 1505483 - RNA, 19 nt, Artificial Sequence
  Description of Artificial Sequence: Synthetic oligonucleotide
ucuauaaacacuggguccu

SEQ ID NO: 1505484 - RNA, 19 nt, Artificial Sequence
  Description of Artificial Sequence: Synthetic oligonucleotide
cuaaguuucaguucuccuc

SEQ ID NO: 1505485 - RNA, 19 nt, Artificial Sequence
  Description of Artificial Sequence: Synthetic oligonucleotide
ugauaaagcagcagaugga

SEQ ID NO: 1505486 - RNA, 19 nt, Artificial Sequence
  Description of Artificial Sequence: Synthetic oligonucleotide
aguaguccgaguucagagg

SEQ ID NO: 1505487 - RNA, 19 nt, Artificial Sequence
  Description of Artificial Sequence: Synthetic oligonucleotide
uaaaugccgggcaaaggcc

SEQ ID NO: 1505488 - RNA, 19 nt, Artificial Sequence
  Description of Artificial Sequence: Synthetic oligonucleotide
gaggaucagagugauaaag

SEQ ID NO: 1505489 - RNA, 19 nt, Artificial Sequence
  Description of Artificial Sequence: Synthetic oligonucleotide
ugcacugugauaagauucu

SEQ ID NO: 1505490 - RNA, 19 nt, Artificial Sequence
  Description of Artificial Sequence: Synthetic oligonucleotide
aagucucuagagaagcagg

SEQ ID NO: 1505491 - RNA, 19 nt, Artificial Sequence
  Description of Artificial Sequence: Synthetic oligonucleotide
gaucagagugauaaagcag

SEQ ID NO: 1505492 - RNA, 19 nt, Artificial Sequence
  Description of Artificial Sequence: Synthetic oligonucleotide
aaucacguggccugagcug

SEQ ID NO: 1505493 - RNA, 19 nt, Artificial Sequence
  Description of Artificial Sequence: Synthetic oligonucleotide
ggugacacagcacuauugg

SEQ ID NO: 1505494 - RNA, 19 nt, Artificial Sequence
  Description of Artificial Sequence: Synthetic oligonucleotide
gucugagggguuuacaagc

SEQ ID NO: 1505495 - RNA, 19 nt, Artificial Sequence
  Description of Artificial Sequence: Synthetic oligonucleotide
ugagcgaccgaggauauca

SEQ ID NO: 1505496 - RNA, 19 nt, Artificial Sequence
  Description of Artificial Sequence: Synthetic oligonucleotide
guaguccgaguucagaggc

SEQ ID NO: 1505497 - RNA, 19 nt, Artificial Sequence
  Description of Artificial Sequence: Synthetic oligonucleotide
aagcagguagaccaauggu

SEQ ID NO: 1505498 - RNA, 19 nt, Artificial Sequence
  Description of Artificial Sequence: Synthetic oligonucleotide
agcgugcuuugccugaggc

SEQ ID NO: 1505499 - RNA, 19 nt, Artificial Sequence
  Description of Artificial Sequence: Synthetic oligonucleotide
aucacguggccugagcugc

SEQ ID NO: 1505500 - RNA, 19 nt, Artificial Sequence
  Description of Artificial Sequence: Synthetic oligonucleotide
agcacuauugggucgcuug

SEQ ID NO: 1505501 - RNA, 19 nt, Artificial Sequence
  Description of Artificial Sequence: Synthetic oligonucleotide
ugcuggauaggcuccagug

SEQ ID NO: 1505502 - RNA, 19 nt, Artificial Sequence
  Description of Artificial Sequence: Synthetic oligonucleotide
ucucaagcugacucaguag

SEQ ID NO: 1505503 - RNA, 19 nt, Artificial Sequence
  Description of Artificial Sequence: Synthetic oligonucleotide
uuacaagcccacuggaccu

SEQ ID NO: 1505504 - RNA, 19 nt, Artificial Sequence
  Description of Artificial Sequence: Synthetic oligonucleotide
guuuccuagaaaucacgug

SEQ ID NO: 1505505 - RNA, 19 nt, Artificial Sequence
  Description of Artificial Sequence: Synthetic oligonucleotide
uucuaggcuagguuucugc

SEQ ID NO: 1505506 - RNA, 19 nt, Artificial Sequence
  Description of Artificial Sequence: Synthetic oligonucleotide
gcuguauuauccaacuucg

SEQ ID NO: 1505507 - RNA, 19 nt, Artificial Sequence
  Description of Artificial Sequence: Synthetic oligonucleotide
aagcccacuggaccuuccc

SEQ ID NO: 1505508 - RNA, 19 nt, Artificial Sequence
  Description of Artificial Sequence: Synthetic oligonucleotide
gguucagcaacauccauac

SEQ ID NO: 1505509 - RNA, 19 nt, Artificial Sequence
  Description of Artificial Sequence: Synthetic oligonucleotide
uccaccgugaucucgccca

SEQ ID NO: 1505510 - RNA, 19 nt, Artificial Sequence
  Description of Artificial Sequence: Synthetic oligonucleotide
uucgcuugggcuagcaccu

SEQ ID NO: 1505511 - RNA, 19 nt, Artificial Sequence
  Description of Artificial Sequence: Synthetic oligonucleotide
ggugcauuccaggagacgg

SEQ ID NO: 1505512 - RNA, 19 nt, Artificial Sequence
  Description of Artificial Sequence: Synthetic oligonucleotide
guggaugcucuauaaacac

SEQ ID NO: 1505513 - RNA, 19 nt, Artificial Sequence
  Description of Artificial Sequence: Synthetic oligonucleotide
agugauaaagcagcagaug

SEQ ID NO: 1505514 - RNA, 19 nt, Artificial Sequence
  Description of Artificial Sequence: Synthetic oligonucleotide
ucuacaguccccacccuaa

SEQ ID NO: 1505515 - RNA, 19 nt, Artificial Sequence
  Description of Artificial Sequence: Synthetic oligonucleotide
auuauccaacuucggagcu

SEQ ID NO: 1505516 - RNA, 19 nt, Artificial Sequence
  Description of Artificial Sequence: Synthetic oligonucleotide
gaccgaggauaucacaggc

SEQ ID NO: 1505517 - RNA, 19 nt, Artificial Sequence
  Description of Artificial Sequence: Synthetic oligonucleotide
ucuaggcuagguuucugcu

SEQ ID NO: 1505518 - RNA, 19 nt, Artificial Sequence
  Description of Artificial Sequence: Synthetic oligonucleotide
uagagaagcaggugguacu

SEQ ID NO: 1505519 - RNA, 19 nt, Artificial Sequence
  Description of Artificial Sequence: Synthetic oligonucleotide
uccuuauucucuucccucu

SEQ ID NO: 1505520 - RNA, 19 nt, Artificial Sequence
  Description of Artificial Sequence: Synthetic oligonucleotide
acaagacuauuucaacaga

SEQ ID NO: 1505521 - RNA, 19 nt, Artificial Sequence
  Description of Artificial Sequence: Synthetic oligonucleotide
ugauaagauucuccugggu

SEQ ID NO: 1505522 - RNA, 19 nt, Artificial Sequence
  Description of Artificial Sequence: Synthetic oligonucleotide
acauagucuuggcuguguc

SEQ ID NO: 1505523 - RNA, 19 nt, Artificial Sequence
  Description of Artificial Sequence: Synthetic oligonucleotide
uuucggaagucuugcuugc

SEQ ID NO: 1505524 - RNA, 19 nt, Artificial Sequence
  Description of Artificial Sequence: Synthetic oligonucleotide
cugaggaucagagugauaa

SEQ ID NO: 1505525 - RNA, 19 nt, Artificial Sequence
  Description of Artificial Sequence: Synthetic oligonucleotide
aggugcguuuccuagaaau

SEQ ID NO: 1505526 - RNA, 19 nt, Artificial Sequence
  Description of Artificial Sequence: Synthetic oligonucleotide
uacugaagagcuccacaca

SEQ ID NO: 1505527 - RNA, 19 nt, Artificial Sequence
  Description of Artificial Sequence: Synthetic oligonucleotide
ugggaggugcguuuccuag

SEQ ID NO: 1505528 - RNA, 19 nt, Artificial Sequence
  Description of Artificial Sequence: Synthetic oligonucleotide
gaaaucacguggccugagc

SEQ ID NO: 1505529 - RNA, 19 nt, Artificial Sequence
  Description of Artificial Sequence: Synthetic oligonucleotide
uuguucuaggcuagguuuc

SEQ ID NO: 1505530 - RNA, 19 nt, Artificial Sequence
  Description of Artificial Sequence: Synthetic oligonucleotide
gugucaucccagcacaccc

SEQ ID NO: 1505531 - RNA, 19 nt, Artificial Sequence
  Description of Artificial Sequence: Synthetic oligonucleotide
aguggaugcucuauaaaca

SEQ ID NO: 1505532 - RNA, 19 nt, Artificial Sequence
  Description of Artificial Sequence: Synthetic oligonucleotide
ggguuuacaagcccacugg

SEQ ID NO: 1505533 - RNA, 19 nt, Artificial Sequence
  Description of Artificial Sequence: Synthetic oligonucleotide
auccauacggccucucuca

SEQ ID NO: 1505534 - RNA, 19 nt, Artificial Sequence
  Description of Artificial Sequence: Synthetic oligonucleotide
guucagaggcaguggaugc

SEQ ID NO: 1505535 - RNA, 19 nt, Artificial Sequence
  Description of Artificial Sequence: Synthetic oligonucleotide
caacuucggagcuuccggg

SEQ ID NO: 1505536 - RNA, 19 nt, Artificial Sequence
  Description of Artificial Sequence: Synthetic oligonucleotide
ggaaacaccacuuguggca

SEQ ID NO: 1505537 - RNA, 19 nt, Artificial Sequence
  Description of Artificial Sequence: Synthetic oligonucleotide
agugcccaagccuugaaua

SEQ ID NO: 1505538 - RNA, 19 nt, Artificial Sequence
  Description of Artificial Sequence: Synthetic oligonucleotide
agagaccugaggaucagag

SEQ ID NO: 1505539 - RNA, 19 nt, Artificial Sequence
  Description of Artificial Sequence: Synthetic oligonucleotide
uuccaauugcuguauuauc

SEQ ID NO: 1505540 - RNA, 19 nt, Artificial Sequence
  Description of Artificial Sequence: Synthetic oligonucleotide
cuugccugcaugcuuccag

SEQ ID NO: 1505541 - RNA, 19 nt, Artificial Sequence
  Description of Artificial Sequence: Synthetic oligonucleotide
uccaacuucggagcuuccg

SEQ ID NO: 1505542 - RNA, 19 nt, Artificial Sequence
  Description of Artificial Sequence: Synthetic oligonucleotide
uccaguaaaugccgggcaa

SEQ ID NO: 1505543 - RNA, 19 nt, Artificial Sequence
  Description of Artificial Sequence: Synthetic oligonucleotide
gcagaugcggaccaggccc

SEQ ID NO: 1505544 - RNA, 19 nt, Artificial Sequence
  Description of Artificial Sequence: Synthetic oligonucleotide
acaaggcgacagucuaggc

SEQ ID NO: 1505545 - RNA, 19 nt, Artificial Sequence
  Description of Artificial Sequence: Synthetic oligonucleotide
gcgauuucuggcuucuugg

SEQ ID NO: 1505546 - RNA, 19 nt, Artificial Sequence
  Description of Artificial Sequence: Synthetic oligonucleotide
gauaggcuccaguggauca

SEQ ID NO: 1505547 - RNA, 19 nt, Artificial Sequence
  Description of Artificial Sequence: Synthetic oligonucleotide
cacaaggcgacagucuagg

SEQ ID NO: 1505548 - RNA, 19 nt, Artificial Sequence
  Description of Artificial Sequence: Synthetic oligonucleotide
accaaugguguggagaaca

SEQ ID NO: 1505549 - RNA, 19 nt, Artificial Sequence
  Description of Artificial Sequence: Synthetic oligonucleotide
acacagcacuauugggucg

SEQ ID NO: 1505550 - RNA, 19 nt, Artificial Sequence
  Description of Artificial Sequence: Synthetic oligonucleotide
auucaggacucuuguugag

SEQ ID NO: 1505551 - RNA, 19 nt, Artificial Sequence
  Description of Artificial Sequence: Synthetic oligonucleotide
cuuauugcugggcagcaga

SEQ ID NO: 1505552 - RNA, 19 nt, Artificial Sequence
  Description of Artificial Sequence: Synthetic oligonucleotide
cuagagaagcaggugguac

SEQ ID NO: 1505553 - RNA, 19 nt, Artificial Sequence
  Description of Artificial Sequence: Synthetic oligonucleotide
ucggaagucuugcuugccu

SEQ ID NO: 1505554 - RNA, 19 nt, Artificial Sequence
  Description of Artificial Sequence: Synthetic oligonucleotide
agucuugcuugccugcaug

SEQ ID NO: 1505555 - RNA, 19 nt, Artificial Sequence
  Description of Artificial Sequence: Synthetic oligonucleotide
uacugggccaagucucuag

SEQ ID NO: 1505556 - RNA, 19 nt, Artificial Sequence
  Description of Artificial Sequence: Synthetic oligonucleotide
cauacggccucucucagga

SEQ ID NO: 1505557 - RNA, 19 nt, Artificial Sequence
  Description of Artificial Sequence: Synthetic oligonucleotide
gcucuauaaacacuggguc

SEQ ID NO: 1505558 - RNA, 19 nt, Artificial Sequence
  Description of Artificial Sequence: Synthetic oligonucleotide
aaaugccgggcaaaggccu

SEQ ID NO: 1505559 - RNA, 19 nt, Artificial Sequence
  Description of Artificial Sequence: Synthetic oligonucleotide
ugugucaucccagcacacc

SEQ ID NO: 1505560 - RNA, 19 nt, Artificial Sequence
  Description of Artificial Sequence: Synthetic oligonucleotide
aacauagucuuggcugugu

SEQ ID NO: 1505561 - RNA, 19 nt, Artificial Sequence
  Description of Artificial Sequence: Synthetic oligonucleotide
cugugauaagauucuccug

SEQ ID NO: 1505562 - RNA, 19 nt, Artificial Sequence
  Description of Artificial Sequence: Synthetic oligonucleotide
uccauacggccucucucag

SEQ ID NO: 1505563 - RNA, 19 nt, Artificial Sequence
  Description of Artificial Sequence: Synthetic oligonucleotide
aaguuucaguucuccuccu

SEQ ID NO: 1505564 - RNA, 19 nt, Artificial Sequence
  Description of Artificial Sequence: Synthetic oligonucleotide
gagacuucgcuugggcuag

SEQ ID NO: 1505565 - RNA, 19 nt, Artificial Sequence
  Description of Artificial Sequence: Synthetic oligonucleotide
gaauccggaacauagucuu

SEQ ID NO: 1505566 - RNA, 19 nt, Artificial Sequence
  Description of Artificial Sequence: Synthetic oligonucleotide
agcaacauccauacggccu

SEQ ID NO: 1505567 - RNA, 19 nt, Artificial Sequence
  Description of Artificial Sequence: Synthetic oligonucleotide
agaaacaaagcggcuuucu

SEQ ID NO: 1505568 - RNA, 19 nt, Artificial Sequence
  Description of Artificial Sequence: Synthetic oligonucleotide
uccccuuucuacagucccc

SEQ ID NO: 1505569 - RNA, 19 nt, Artificial Sequence
  Description of Artificial Sequence: Synthetic oligonucleotide
aaagcggcuuucugcuccu

SEQ ID NO: 1505570 - RNA, 19 nt, Artificial Sequence
  Description of Artificial Sequence: Synthetic oligonucleotide
cuaggcuagguuucugcuc

SEQ ID NO: 1505571 - RNA, 19 nt, Artificial Sequence
  Description of Artificial Sequence: Synthetic oligonucleotide
uacaguccccacccuaagu

SEQ ID NO: 1505572 - RNA, 19 nt, Artificial Sequence
  Description of Artificial Sequence: Synthetic oligonucleotide
cuggauaggcuccagugga

SEQ ID NO: 1505573 - RNA, 19 nt, Artificial Sequence
  Description of Artificial Sequence: Synthetic oligonucleotide
uccugagcgaccgaggaua

SEQ ID NO: 1505574 - RNA, 19 nt, Artificial Sequence
  Description of Artificial Sequence: Synthetic oligonucleotide
ucaguaggugcuggauagg

SEQ ID NO: 1505575 - RNA, 19 nt, Artificial Sequence
  Description of Artificial Sequence: Synthetic oligonucleotide
uccggaacauagucuuggc

SEQ ID NO: 1505576 - RNA, 19 nt, Artificial Sequence
  Description of Artificial Sequence: Synthetic oligonucleotide
agcgaguaguccgaguuca

SEQ ID NO: 1505577 - RNA, 19 nt, Artificial Sequence
  Description of Artificial Sequence: Synthetic oligonucleotide
uacagcgugcuuugccuga

SEQ ID NO: 1505578 - RNA, 19 nt, Artificial Sequence
  Description of Artificial Sequence: Synthetic oligonucleotide
cacuggguccucuggagug

SEQ ID NO: 1505579 - RNA, 19 nt, Artificial Sequence
  Description of Artificial Sequence: Synthetic oligonucleotide
acacgcccacuguagauga

SEQ ID NO: 1505580 - RNA, 19 nt, Artificial Sequence
  Description of Artificial Sequence: Synthetic oligonucleotide
uagacuuuguaggguucag

SEQ ID NO: 1505581 - RNA, 19 nt, Artificial Sequence
  Description of Artificial Sequence: Synthetic oligonucleotide
caguauccgauagacuuug

SEQ ID NO: 1505582 - RNA, 19 nt, Artificial Sequence
  Description of Artificial Sequence: Synthetic oligonucleotide
auaaagcagcagauggaug

SEQ ID NO: 1505583 - RNA, 19 nt, Artificial Sequence
  Description of Artificial Sequence: Synthetic oligonucleotide
accgugaucucgcccacca

SEQ ID NO: 1505584 - RNA, 19 nt, Artificial Sequence
  Description of Artificial Sequence: Synthetic oligonucleotide
auugggucgcuuggauggc

SEQ ID NO: 1505585 - RNA, 19 nt, Artificial Sequence
  Description of Artificial Sequence: Synthetic oligonucleotide
gugcccacuuuccaauugc

SEQ ID NO: 1505586 - RNA, 19 nt, Artificial Sequence
  Description of Artificial Sequence: Synthetic oligonucleotide
cacagcacuauugggucgc

SEQ ID NO: 1505587 - RNA, 19 nt, Artificial Sequence
  Description of Artificial Sequence: Synthetic oligonucleotide
cuuguucuaggcuagguuu

SEQ ID NO: 1505588 - RNA, 19 nt, Artificial Sequence
  Description of Artificial Sequence: Synthetic oligonucleotide
gacaaaggcgcugaacaaa

SEQ ID NO: 1505589 - RNA, 19 nt, Artificial Sequence
  Description of Artificial Sequence: Synthetic oligonucleotide
gggaauccggaacauaguc

SEQ ID NO: 1505590 - RNA, 19 nt, Artificial Sequence
  Description of Artificial Sequence: Synthetic oligonucleotide
ugaggaucagagugauaaa

SEQ ID NO: 1505591 - RNA, 19 nt, Artificial Sequence
  Description of Artificial Sequence: Synthetic oligonucleotide
uguucuaggcuagguuucu

SEQ ID NO: 1505592 - RNA, 19 nt, Artificial Sequence
  Description of Artificial Sequence: Synthetic oligonucleotide
cagcaacauccauacggcc

SEQ ID NO: 1505593 - RNA, 19 nt, Artificial Sequence
  Description of Artificial Sequence: Synthetic oligonucleotide
acugggccaagucucuaga

SEQ ID NO: 1505594 - RNA, 19 nt, Artificial Sequence
  Description of Artificial Sequence: Synthetic oligonucleotide
uauugcugggcagcagaug

SEQ ID NO: 1505595 - RNA, 19 nt, Artificial Sequence
  Description of Artificial Sequence: Synthetic oligonucleotide
acaaaggcgcugaacaaaa

SEQ ID NO: 1505596 - RNA, 19 nt, Artificial Sequence
  Description of Artificial Sequence: Synthetic oligonucleotide
auaggcuccaguggaucag

SEQ ID NO: 1505597 - RNA, 19 nt, Artificial Sequence
  Description of Artificial Sequence: Synthetic oligonucleotide
gugugggaaacaccacuug

SEQ ID NO: 1505598 - RNA, 19 nt, Artificial Sequence
  Description of Artificial Sequence: Synthetic oligonucleotide
gauaucacaggcucagcuu

SEQ ID NO: 1505599 - RNA, 19 nt, Artificial Sequence
  Description of Artificial Sequence: Synthetic oligonucleotide
cacacacuuauugcugggc

SEQ ID NO: 1505600 - RNA, 19 nt, Artificial Sequence
  Description of Artificial Sequence: Synthetic oligonucleotide
aagucuugcuugccugcau

SEQ ID NO: 1505601 - RNA, 19 nt, Artificial Sequence
  Description of Artificial Sequence: Synthetic oligonucleotide
ccaacuucggagcuuccgg

SEQ ID NO: 1505602 - RNA, 19 nt, Artificial Sequence
  Description of Artificial Sequence: Synthetic oligonucleotide
aauccggaacauagucuug

SEQ ID NO: 1505603 - RNA, 19 nt, Artificial Sequence
  Description of Artificial Sequence: Synthetic oligonucleotide
cucucucaagcugacucag

SEQ ID NO: 1505604 - RNA, 19 nt, Artificial Sequence
  Description of Artificial Sequence: Synthetic oligonucleotide
caccacacgcccacuguag

SEQ ID NO: 1505605 - RNA, 19 nt, Artificial Sequence
  Description of Artificial Sequence: Synthetic oligonucleotide
ggcaguauccgauagacuu

SEQ ID NO: 1505606 - RNA, 19 nt, Artificial Sequence
  Description of Artificial Sequence: Synthetic oligonucleotide
cugacucaguaggugcugg

SEQ ID NO: 1505607 - RNA, 19 nt, Artificial Sequence
  Description of Artificial Sequence: Synthetic oligonucleotide
aguggagacuucgcuuggg

SEQ ID NO: 1505608 - RNA, 19 nt, Artificial Sequence
  Description of Artificial Sequence: Synthetic oligonucleotide
uaguccgaguucagaggca

SEQ ID NO: 1505609 - RNA, 19 nt, Artificial Sequence
  Description of Artificial Sequence: Synthetic oligonucleotide
ugacucaguaggugcugga

SEQ ID NO: 1505610 - RNA, 19 nt, Artificial Sequence
  Description of Artificial Sequence: Synthetic oligonucleotide
guccuuucggaagucuugc

SEQ ID NO: 1505611 - RNA, 19 nt, Artificial Sequence
  Description of Artificial Sequence: Synthetic oligonucleotide
ucucucaagcugacucagu

SEQ ID NO: 1505612 - RNA, 19 nt, Artificial Sequence
  Description of Artificial Sequence: Synthetic oligonucleotide
gcacuauugggucgcuugg

SEQ ID NO: 1505613 - RNA, 19 nt, Artificial Sequence
  Description of Artificial Sequence: Synthetic oligonucleotide
uugggcuagcaccuuccuc

SEQ ID NO: 1505614 - RNA, 19 nt, Artificial Sequence
  Description of Artificial Sequence: Synthetic oligonucleotide
agcuuccggguacagcgug

SEQ ID NO: 1505615 - RNA, 19 nt, Artificial Sequence
  Description of Artificial Sequence: Synthetic oligonucleotide
gcuagcaccuuccuccggc

SEQ ID NO: 1505616 - RNA, 19 nt, Artificial Sequence
  Description of Artificial Sequence: Synthetic oligonucleotide
ggcgauuucuggcuucuug

SEQ ID NO: 1505617 - RNA, 19 nt, Artificial Sequence
  Description of Artificial Sequence: Synthetic oligonucleotide
cagguagaccaauggugug

SEQ ID NO: 1505618 - RNA, 19 nt, Artificial Sequence
  Description of Artificial Sequence: Synthetic oligonucleotide
gacggggaugggacaaagg

SEQ ID NO: 1505619 - RNA, 19 nt, Artificial Sequence
  Description of Artificial Sequence: Synthetic oligonucleotide
cuucggagcuuccggguac

SEQ ID NO: 1505620 - RNA, 19 nt, Artificial Sequence
  Description of Artificial Sequence: Synthetic oligonucleotide
gccaagucucuagagaagc

SEQ ID NO: 1505621 - RNA, 19 nt, Artificial Sequence
  Description of Artificial Sequence: Synthetic oligonucleotide
ugguccuuucggaagucuu

SEQ ID NO: 1505622 - RNA, 19 nt, Artificial Sequence
  Description of Artificial Sequence: Synthetic oligonucleotide
cagucugagggguuuacaa

SEQ ID NO: 1505623 - RNA, 19 nt, Artificial Sequence
  Description of Artificial Sequence: Synthetic oligonucleotide
uggauaggcuccaguggau

SEQ ID NO: 1505624 - RNA, 19 nt, Artificial Sequence
  Description of Artificial Sequence: Synthetic oligonucleotide
guauccgauagacuuugua

SEQ ID NO: 1505625 - RNA, 19 nt, Artificial Sequence
  Description of Artificial Sequence: Synthetic oligonucleotide
ccuugaauauggcagcauc

SEQ ID NO: 1505626 - RNA, 19 nt, Artificial Sequence
  Description of Artificial Sequence: Synthetic oligonucleotide
agaaaucacguggccugag

SEQ ID NO: 1505627 - RNA, 19 nt, Artificial Sequence
  Description of Artificial Sequence: Synthetic oligonucleotide
gaacauagucuuggcugug

SEQ ID NO: 1505628 - RNA, 19 nt, Artificial Sequence
  Description of Artificial Sequence: Synthetic oligonucleotide
gcaacauccauacggccuc

SEQ ID NO: 1505629 - RNA, 19 nt, Artificial Sequence
  Description of Artificial Sequence: Synthetic oligonucleotide
caauugcuguauuauccaa

SEQ ID NO: 1505630 - RNA, 19 nt, Artificial Sequence
  Description of Artificial Sequence: Synthetic oligonucleotide
cuacaguccccacccuaag

SEQ ID NO: 1505631 - RNA, 19 nt, Artificial Sequence
  Description of Artificial Sequence: Synthetic oligonucleotide
aucugcacugugauaagau

SEQ ID NO: 1505632 - RNA, 19 nt, Artificial Sequence
  Description of Artificial Sequence: Synthetic oligonucleotide
aaugccgggcaaaggccug

SEQ ID NO: 1505633 - RNA, 19 nt, Artificial Sequence
  Description of Artificial Sequence: Synthetic oligonucleotide
uguggagaacaagacuauu

SEQ ID NO: 1505634 - RNA, 19 nt, Artificial Sequence
  Description of Artificial Sequence: Synthetic oligonucleotide
gcgaccgaggauaucacag

SEQ ID NO: 1505635 - RNA, 19 nt, Artificial Sequence
  Description of Artificial Sequence: Synthetic oligonucleotide
agcgaccgaggauaucaca

SEQ ID NO: 1505636 - RNA, 19 nt, Artificial Sequence
  Description of Artificial Sequence: Synthetic oligonucleotide
uucggaagucuugcuugcc

SEQ ID NO: 1505637 - RNA, 19 nt, Artificial Sequence
  Description of Artificial Sequence: Synthetic oligonucleotide
acgcccacuguagaugaag

SEQ ID NO: 1505638 - RNA, 19 nt, Artificial Sequence
  Description of Artificial Sequence: Synthetic oligonucleotide
gcugugucaucccagcaca

SEQ ID NO: 1505639 - RNA, 19 nt, Artificial Sequence
  Description of Artificial Sequence: Synthetic oligonucleotide
caggugguacugaagagcu

SEQ ID NO: 1505640 - RNA, 19 nt, Artificial Sequence
  Description of Artificial Sequence: Synthetic oligonucleotide
cacacgcccacuguagaug

SEQ ID NO: 1505641 - RNA, 19 nt, Artificial Sequence
  Description of Artificial Sequence: Synthetic oligonucleotide
ccgaggauaucacaggcuc

SEQ ID NO: 1505642 - RNA, 19 nt, Artificial Sequence
  Description of Artificial Sequence: Synthetic oligonucleotide
cuuguggcauguugcucuc

SEQ ID NO: 1505643 - RNA, 19 nt, Artificial Sequence
  Description of Artificial Sequence: Synthetic oligonucleotide
uccugggaggugcguuucc

SEQ ID NO: 1505644 - RNA, 19 nt, Artificial Sequence
  Description of Artificial Sequence: Synthetic oligonucleotide
aggugcauuccaggagacg

SEQ ID NO: 1505645 - RNA, 19 nt, Artificial Sequence
  Description of Artificial Sequence: Synthetic oligonucleotide
cuggaauuuucuccaguaa

SEQ ID NO: 1505646 - RNA, 19 nt, Artificial Sequence
  Description of Artificial Sequence: Synthetic oligonucleotide
gagggguuuacaagcccac

SEQ ID NO: 1505647 - RNA, 19 nt, Artificial Sequence
  Description of Artificial Sequence: Synthetic oligonucleotide
cuauuucaacagagaccug

SEQ ID NO: 1505648 - RNA, 19 nt, Artificial Sequence
  Description of Artificial Sequence: Synthetic oligonucleotide
agucuaggcucuccaccgu

SEQ ID NO: 1505649 - RNA, 19 nt, Artificial Sequence
  Description of Artificial Sequence: Synthetic oligonucleotide
ugcuugccugcaugcuucc

SEQ ID NO: 1505650 - RNA, 19 nt, Artificial Sequence
  Description of Artificial Sequence: Synthetic oligonucleotide
ggaacauagucuuggcugu

SEQ ID NO: 1505651 - RNA, 19 nt, Artificial Sequence
  Description of Artificial Sequence: Synthetic oligonucleotide
ggagacuucgcuugggcua

SEQ ID NO: 1505652 - RNA, 19 nt, Artificial Sequence
  Description of Artificial Sequence: Synthetic oligonucleotide
caggugcauuccaggagac

SEQ ID NO: 1505653 - RNA, 19 nt, Artificial Sequence
  Description of Artificial Sequence: Synthetic oligonucleotide
gagugauaaagcagcagau

SEQ ID NO: 1505654 - RNA, 19 nt, Artificial Sequence
  Description of Artificial Sequence: Synthetic oligonucleotide
agacggggaugggacaaag

SEQ ID NO: 1505655 - RNA, 19 nt, Artificial Sequence
  Description of Artificial Sequence: Synthetic oligonucleotide
caaggcgacagucuaggcu

SEQ ID NO: 1505656 - RNA, 19 nt, Artificial Sequence
  Description of Artificial Sequence: Synthetic oligonucleotide
cugugucaucccagcacac

SEQ ID NO: 1505657 - RNA, 19 nt, Artificial Sequence
  Description of Artificial Sequence: Synthetic oligonucleotide
ggcuucuugguugggcagg

SEQ ID NO: 1505658 - RNA, 19 nt, Artificial Sequence
  Description of Artificial Sequence: Synthetic oligonucleotide
accgaggauaucacaggcu

SEQ ID NO: 1505659 - RNA, 19 nt, Artificial Sequence
  Description of Artificial Sequence: Synthetic oligonucleotide
agcagcgaguaguccgagu

SEQ ID NO: 1505660 - RNA, 19 nt, Artificial Sequence
  Description of Artificial Sequence: Synthetic oligonucleotide
gguacagcgugcuuugccu

SEQ ID NO: 1505661 - RNA, 19 nt, Artificial Sequence
  Description of Artificial Sequence: Synthetic oligonucleotide
caagcccacuggaccuucc

SEQ ID NO: 1505662 - RNA, 19 nt, Artificial Sequence
  Description of Artificial Sequence: Synthetic oligonucleotide
agggaauccggaacauagu

SEQ ID NO: 1505663 - RNA, 19 nt, Artificial Sequence
  Description of Artificial Sequence: Synthetic oligonucleotide
cucuccgagacugaggggu

SEQ ID NO: 1505664 - RNA, 19 nt, Artificial Sequence
  Description of Artificial Sequence: Synthetic oligonucleotide
acagcgugcuuugccugag

SEQ ID NO: 1505665 - RNA, 19 nt, Artificial Sequence
  Description of Artificial Sequence: Synthetic oligonucleotide
cagcgaguaguccgaguuc

SEQ ID NO: 1505666 - RNA, 19 nt, Artificial Sequence
  Description of Artificial Sequence: Synthetic oligonucleotide
ucacguggccugagcugca

SEQ ID NO: 1505667 - RNA, 19 nt, Artificial Sequence
  Description of Artificial Sequence: Synthetic oligonucleotide
auccugagcgaccgaggau

SEQ ID NO: 1505668 - RNA, 19 nt, Artificial Sequence
  Description of Artificial Sequence: Synthetic oligonucleotide
ggugcguuuccuagaaauc

SEQ ID NO: 1505669 - RNA, 19 nt, Artificial Sequence
  Description of Artificial Sequence: Synthetic oligonucleotide
ggaggugcguuuccuagaa

SEQ ID NO: 1505670 - RNA, 19 nt, Artificial Sequence
  Description of Artificial Sequence: Synthetic oligonucleotide
caggguugccuggaacuug

SEQ ID NO: 1505671 - RNA, 19 nt, Artificial Sequence
  Description of Artificial Sequence: Synthetic oligonucleotide
agggguuuacaagcccacu

SEQ ID NO: 1505672 - RNA, 19 nt, Artificial Sequence
  Description of Artificial Sequence: Synthetic oligonucleotide
auccaacuucggagcuucc

SEQ ID NO: 1505673 - RNA, 19 nt, Artificial Sequence
  Description of Artificial Sequence: Synthetic oligonucleotide
gauggauguucuggguucu

SEQ ID NO: 1505674 - RNA, 19 nt, Artificial Sequence
  Description of Artificial Sequence: Synthetic oligonucleotide
cccuaaguuucaguucucc

SEQ ID NO: 1505675 - RNA, 19 nt, Artificial Sequence
  Description of Artificial Sequence: Synthetic oligonucleotide
cgaccgaggauaucacagg

SEQ ID NO: 1505676 - RNA, 19 nt, Artificial Sequence
  Description of Artificial Sequence: Synthetic oligonucleotide
gguggcaguauccgauaga

SEQ ID NO: 1505677 - RNA, 19 nt, Artificial Sequence
  Description of Artificial Sequence: Synthetic oligonucleotide
aggugguacugaagagcuc

SEQ ID NO: 1505678 - RNA, 19 nt, Artificial Sequence
  Description of Artificial Sequence: Synthetic oligonucleotide
gccauccugagcgaccgag

SEQ ID NO: 1505679 - RNA, 19 nt, Artificial Sequence
  Description of Artificial Sequence: Synthetic oligonucleotide
gggaagugcccacuuucca

SEQ ID NO: 1505680 - RNA, 19 nt, Artificial Sequence
  Description of Artificial Sequence: Synthetic oligonucleotide
gcgugcuuugccugaggcc

SEQ ID NO: 1505681 - RNA, 19 nt, Artificial Sequence
  Description of Artificial Sequence: Synthetic oligonucleotide
ccauacggccucucucagg

SEQ ID NO: 1505682 - RNA, 19 nt, Artificial Sequence
  Description of Artificial Sequence: Synthetic oligonucleotide
cagaugcggaccaggccca

SEQ ID NO: 1505683 - RNA, 19 nt, Artificial Sequence
  Description of Artificial Sequence: Synthetic oligonucleotide
cuggaguggagacuucgcu

SEQ ID NO: 1505684 - RNA, 19 nt, Artificial Sequence
  Description of Artificial Sequence: Synthetic oligonucleotide
gacucuuguugagggcaca

SEQ ID NO: 1505685 - RNA, 19 nt, Artificial Sequence
  Description of Artificial Sequence: Synthetic oligonucleotide
guugggcagggaggguucc

SEQ ID NO: 1505686 - RNA, 19 nt, Artificial Sequence
  Description of Artificial Sequence: Synthetic oligonucleotide
ggauguucuggguucugua

SEQ ID NO: 1505687 - RNA, 19 nt, Artificial Sequence
  Description of Artificial Sequence: Synthetic oligonucleotide
cagcgugcuuugccugagg

SEQ ID NO: 1505688 - RNA, 19 nt, Artificial Sequence
  Description of Artificial Sequence: Synthetic oligonucleotide
gcuagguuucugcucucuc

SEQ ID NO: 1505689 - RNA, 19 nt, Artificial Sequence
  Description of Artificial Sequence: Synthetic oligonucleotide
gcagguagaccaauggugu

SEQ ID NO: 1505690 - RNA, 19 nt, Artificial Sequence
  Description of Artificial Sequence: Synthetic oligonucleotide
gagcgaccgaggauaucac

SEQ ID NO: 1505691 - RNA, 19 nt, Artificial Sequence
  Description of Artificial Sequence: Synthetic oligonucleotide
gggucagccacaaggcgac

SEQ ID NO: 1505692 - RNA, 19 nt, Artificial Sequence
  Description of Artificial Sequence: Synthetic oligonucleotide
agacuucgcuugggcuagc

SEQ ID NO: 1505693 - RNA, 19 nt, Artificial Sequence
  Description of Artificial Sequence: Synthetic oligonucleotide
ggauaggcuccaguggauc

SEQ ID NO: 1505694 - RNA, 19 nt, Artificial Sequence
  Description of Artificial Sequence: Synthetic oligonucleotide
ggaccuucccuucuccuua

SEQ ID NO: 1505695 - RNA, 19 nt, Artificial Sequence
  Description of Artificial Sequence: Synthetic oligonucleotide
ggaauccggaacauagucu

SEQ ID NO: 1505696 - RNA, 19 nt, Artificial Sequence
  Description of Artificial Sequence: Synthetic oligonucleotide
ucggagcuuccggguacag

SEQ ID NO: 1505697 - RNA, 19 nt, Artificial Sequence
  Description of Artificial Sequence: Synthetic oligonucleotide
gugcccaagccuugaauau

SEQ ID NO: 1505698 - RNA, 19 nt, Artificial Sequence
  Description of Artificial Sequence: Synthetic oligonucleotide
guggcauguugcucuccga

SEQ ID NO: 1505699 - RNA, 19 nt, Artificial Sequence
  Description of Artificial Sequence: Synthetic oligonucleotide
aguauccgauagacuuugu

SEQ ID NO: 1505700 - RNA, 19 nt, Artificial Sequence
  Description of Artificial Sequence: Synthetic oligonucleotide
gacuucgcuugggcuagca

SEQ ID NO: 1505701 - RNA, 19 nt, Artificial Sequence
  Description of Artificial Sequence: Synthetic oligonucleotide
gaggugcguuuccuagaaa

SEQ ID NO: 1505702 - RNA, 19 nt, Artificial Sequence
  Description of Artificial Sequence: Synthetic oligonucleotide
ggguucagcaacauccaua

SEQ ID NO: 1505703 - RNA, 19 nt, Artificial Sequence
  Description of Artificial Sequence: Synthetic oligonucleotide
agcacaccccugggaagug

SEQ ID NO: 1505704 - RNA, 19 nt, Artificial Sequence
  Description of Artificial Sequence: Synthetic oligonucleotide
gucgcuuggauggcgauuu

SEQ ID NO: 1505705 - RNA, 19 nt, Artificial Sequence
  Description of Artificial Sequence: Synthetic oligonucleotide
gacucaguaggugcuggau

SEQ ID NO: 1505706 - RNA, 19 nt, Artificial Sequence
  Description of Artificial Sequence: Synthetic oligonucleotide
cugguggcaguauccgaua

SEQ ID NO: 1505707 - RNA, 19 nt, Artificial Sequence
  Description of Artificial Sequence: Synthetic oligonucleotide
cgugaucucgcccaccaca

SEQ ID NO: 1505708 - RNA, 19 nt, Artificial Sequence
  Description of Artificial Sequence: Synthetic oligonucleotide
agaugcggaccaggcccag

SEQ ID NO: 1505709 - RNA, 19 nt, Artificial Sequence
  Description of Artificial Sequence: Synthetic oligonucleotide
aggccucuccucccagaaa

SEQ ID NO: 1505710 - RNA, 19 nt, Artificial Sequence
  Description of Artificial Sequence: Synthetic oligonucleotide
cccaagccuugaauauggc

SEQ ID NO: 1505711 - RNA, 19 nt, Artificial Sequence
  Description of Artificial Sequence: Synthetic oligonucleotide
gcagcgaguaguccgaguu

SEQ ID NO: 1505712 - RNA, 19 nt, Artificial Sequence
  Description of Artificial Sequence: Synthetic oligonucleotide
auacggccucucucaggaa

SEQ ID NO: 1505713 - RNA, 19 nt, Artificial Sequence
  Description of Artificial Sequence: Synthetic oligonucleotide
ggacucuuguugagggcac

SEQ ID NO: 1505714 - RNA, 19 nt, Artificial Sequence
  Description of Artificial Sequence: Synthetic oligonucleotide
acagcacuauugggucgcu

SEQ ID NO: 1505715 - RNA, 19 nt, Artificial Sequence
  Description of Artificial Sequence: Synthetic oligonucleotide
ccuaaguuucaguucuccu

SEQ ID NO: 1505716 - RNA, 19 nt, Artificial Sequence
  Description of Artificial Sequence: Synthetic oligonucleotide
gcuuguucuaggcuagguu

SEQ ID NO: 1505717 - RNA, 19 nt, Artificial Sequence
  Description of Artificial Sequence: Synthetic oligonucleotide
cugggaggugcguuuccua

SEQ ID NO: 1505718 - RNA, 19 nt, Artificial Sequence
  Description of Artificial Sequence: Synthetic oligonucleotide
caccgugaucucgcccacc

SEQ ID NO: 1505719 - RNA, 19 nt, Artificial Sequence
  Description of Artificial Sequence: Synthetic oligonucleotide
cuagcaccuuccuccggcu

SEQ ID NO: 1505720 - RNA, 19 nt, Artificial Sequence
  Description of Artificial Sequence: Synthetic oligonucleotide
guguggagaacaagacuau

SEQ ID NO: 1505721 - RNA, 19 nt, Artificial Sequence
  Description of Artificial Sequence: Synthetic oligonucleotide
ccuagaaaucacguggccu

SEQ ID NO: 1505722 - RNA, 19 nt, Artificial Sequence
  Description of Artificial Sequence: Synthetic oligonucleotide
ggaucaggugugggaaaca

SEQ ID NO: 1505723 - RNA, 19 nt, Artificial Sequence
  Description of Artificial Sequence: Synthetic oligonucleotide
gagacggggaugggacaaa

SEQ ID NO: 1505724 - RNA, 19 nt, Artificial Sequence
  Description of Artificial Sequence: Synthetic oligonucleotide
gcuuccggguacagcgugc

SEQ ID NO: 1505725 - RNA, 19 nt, Artificial Sequence
  Description of Artificial Sequence: Synthetic oligonucleotide
cuugggcuagcaccuuccu

SEQ ID NO: 1505726 - RNA, 19 nt, Artificial Sequence
  Description of Artificial Sequence: Synthetic oligonucleotide
cagagaccugaggaucaga

SEQ ID NO: 1505727 - RNA, 19 nt, Artificial Sequence
  Description of Artificial Sequence: Synthetic oligonucleotide
gaccuucccuucuccuuau

SEQ ID NO: 1505728 - RNA, 19 nt, Artificial Sequence
  Description of Artificial Sequence: Synthetic oligonucleotide
ggcgagucuuccagacagc

SEQ ID NO: 1505729 - RNA, 19 nt, Artificial Sequence
  Description of Artificial Sequence: Synthetic oligonucleotide
cguuuccuagaaaucacgu

SEQ ID NO: 1505730 - RNA, 19 nt, Artificial Sequence
  Description of Artificial Sequence: Synthetic oligonucleotide
aggcgacagucuaggcucu

SEQ ID NO: 1505731 - RNA, 19 nt, Artificial Sequence
  Description of Artificial Sequence: Synthetic oligonucleotide
gcgaguaguccgaguucag

SEQ ID NO: 1505732 - RNA, 19 nt, Artificial Sequence
  Description of Artificial Sequence: Synthetic oligonucleotide
cugagcgaccgaggauauc

SEQ ID NO: 1505733 - RNA, 19 nt, Artificial Sequence
  Description of Artificial Sequence: Synthetic oligonucleotide
cccacccuaaguuucaguu

SEQ ID NO: 1505734 - RNA, 19 nt, Artificial Sequence
  Description of Artificial Sequence: Synthetic oligonucleotide
ggugugggaaacaccacuu

SEQ ID NO: 1505735 - RNA, 19 nt, Artificial Sequence
  Description of Artificial Sequence: Synthetic oligonucleotide
ccugguggcaguauccgau

SEQ ID NO: 1505736 - RNA, 19 nt, Artificial Sequence
  Description of Artificial Sequence: Synthetic oligonucleotide
cgaggauaucacaggcuca

SEQ ID NO: 1505737 - RNA, 19 nt, Artificial Sequence
  Description of Artificial Sequence: Synthetic oligonucleotide
cuaggcucuccaccgugau

SEQ ID NO: 1505738 - RNA, 19 nt, Artificial Sequence
  Description of Artificial Sequence: Synthetic oligonucleotide
gcccacuguagaugaaggu

SEQ ID NO: 1505739 - RNA, 19 nt, Artificial Sequence
  Description of Artificial Sequence: Synthetic oligonucleotide
cuuccggguacagcgugcu

SEQ ID NO: 1505740 - RNA, 19 nt, Artificial Sequence
  Description of Artificial Sequence: Synthetic oligonucleotide
caguccccacccuaaguuu

SEQ ID NO: 1505741 - RNA, 19 nt, Artificial Sequence
  Description of Artificial Sequence: Synthetic oligonucleotide
cuucuugguugggcaggga

SEQ ID NO: 1505742 - RNA, 19 nt, Artificial Sequence
  Description of Artificial Sequence: Synthetic oligonucleotide
cccuuucuacaguccccac

SEQ ID NO: 1505743 - RNA, 19 nt, Artificial Sequence
  Description of Artificial Sequence: Synthetic oligonucleotide
cagugcccaagccuugaau

SEQ ID NO: 1505744 - RNA, 19 nt, Artificial Sequence
  Description of Artificial Sequence: Synthetic oligonucleotide
ccccuuucuacagucccca

SEQ ID NO: 1505745 - RNA, 19 nt, Artificial Sequence
  Description of Artificial Sequence: Synthetic oligonucleotide
gagcuuccggguacagcgu

SEQ ID NO: 1505746 - RNA, 19 nt, Artificial Sequence
  Description of Artificial Sequence: Synthetic oligonucleotide
cgauagacuuuguaggguu

SEQ ID NO: 1505747 - RNA, 19 nt, Artificial Sequence
  Description of Artificial Sequence: Synthetic oligonucleotide
cacgcccacuguagaugaa

SEQ ID NO: 1505748 - RNA, 19 nt, Artificial Sequence
  Description of Artificial Sequence: Synthetic oligonucleotide
ccuuucggaagucuugcuu

SEQ ID NO: 1505749 - RNA, 19 nt, Artificial Sequence
  Description of Artificial Sequence: Synthetic oligonucleotide
ucgcuugggcuagcaccuu

SEQ ID NO: 1505750 - RNA, 19 nt, Artificial Sequence
  Description of Artificial Sequence: Synthetic oligonucleotide
ccggaacauagucuuggcu

SEQ ID NO: 1505751 - RNA, 19 nt, Artificial Sequence
  Description of Artificial Sequence: Synthetic oligonucleotide
gcaguauccgauagacuuu

SEQ ID NO: 1505752 - RNA, 19 nt, Artificial Sequence
  Description of Artificial Sequence: Synthetic oligonucleotide
ccaccgugaucucgcccac

SEQ ID NO: 1505753 - RNA, 19 nt, Artificial Sequence
  Description of Artificial Sequence: Synthetic oligonucleotide
cggagcuuccggguacagc

SEQ ID NO: 1505754 - RNA, 19 nt, Artificial Sequence
  Description of Artificial Sequence: Synthetic oligonucleotide
ccgauagacuuuguagggu

SEQ ID NO: 1505755 - RNA, 19 nt, Artificial Sequence
  Description of Artificial Sequence: Synthetic oligonucleotide
ggucagccacaaggcgaca

SEQ ID NO: 1505756 - RNA, 19 nt, Artificial Sequence
  Description of Artificial Sequence: Synthetic oligonucleotide
cgcaggcgagucuuccaga

SEQ ID NO: 1505757 - RNA, 19 nt, Artificial Sequence
  Description of Artificial Sequence: Synthetic oligonucleotide
gcaggguugccuggaacuu

SEQ ID NO: 1505758 - RNA, 19 nt, Artificial Sequence
  Description of Artificial Sequence: Synthetic oligonucleotide
ccacacgcccacuguagau

SEQ ID NO: 1505759 - RNA, 19 nt, Artificial Sequence
  Description of Artificial Sequence: Synthetic oligonucleotide
ggccauccugagcgaccga

SEQ ID NO: 1505760 - RNA, 19 nt, Artificial Sequence
  Description of Artificial Sequence: Synthetic oligonucleotide
ccagggaauccggaacaua

SEQ ID NO: 1505761 - RNA, 19 nt, Artificial Sequence
  Description of Artificial Sequence: Synthetic oligonucleotide
ccugagcgaccgaggauau

SEQ ID NO: 1505762 - RNA, 19 nt, Artificial Sequence
  Description of Artificial Sequence: Synthetic oligonucleotide
cggguacagcgugcuuugc

SEQ ID NO: 1505763 - RNA, 19 nt, Artificial Sequence
  Description of Artificial Sequence: Synthetic oligonucleotide
cagcacuauugggucgcuu

SEQ ID NO: 1505764 - RNA, 19 nt, Artificial Sequence
  Description of Artificial Sequence: Synthetic oligonucleotide
aagaauuacuauuaaaugg

SEQ ID NO: 1505765 - RNA, 19 nt, Artificial Sequence
  Description of Artificial Sequence: Synthetic oligonucleotide
aauaaucuaaguuguaggg

SEQ ID NO: 1505766 - RNA, 19 nt, Artificial Sequence
  Description of Artificial Sequence: Synthetic oligonucleotide
acuauaaaggcauagacag

SEQ ID NO: 1505767 - RNA, 19 nt, Artificial Sequence
  Description of Artificial Sequence: Synthetic oligonucleotide
aaauguuuaacacaagaug

SEQ ID NO: 1505768 - RNA, 19 nt, Artificial Sequence
  Description of Artificial Sequence: Synthetic oligonucleotide
aauaucccuaaacaucugc

SEQ ID NO: 1505769 - RNA, 19 nt, Artificial Sequence
  Description of Artificial Sequence: Synthetic oligonucleotide
agaauuacuauuaaauggc

SEQ ID NO: 1505770 - RNA, 19 nt, Artificial Sequence
  Description of Artificial Sequence: Synthetic oligonucleotide
uuuagcuauacuaacauau

SEQ ID NO: 1505771 - RNA, 19 nt, Artificial Sequence
  Description of Artificial Sequence: Synthetic oligonucleotide
aauggcuuuauauauauuu

SEQ ID NO: 1505772 - RNA, 19 nt, Artificial Sequence
  Description of Artificial Sequence: Synthetic oligonucleotide
uuauacgucuauauguagg

SEQ ID NO: 1505773 - RNA, 19 nt, Artificial Sequence
  Description of Artificial Sequence: Synthetic oligonucleotide
uaagaauuacuauuaaaug

SEQ ID NO: 1505774 - RNA, 19 nt, Artificial Sequence
  Description of Artificial Sequence: Synthetic oligonucleotide
auucgaauuucucaucucc

SEQ ID NO: 1505775 - RNA, 19 nt, Artificial Sequence
  Description of Artificial Sequence: Synthetic oligonucleotide
ucauuauacgucuauaugu

SEQ ID NO: 1505776 - RNA, 19 nt, Artificial Sequence
  Description of Artificial Sequence: Synthetic oligonucleotide
aaauaaguuuuauugauua

SEQ ID NO: 1505777 - RNA, 19 nt, Artificial Sequence
  Description of Artificial Sequence: Synthetic oligonucleotide
acagauuucagucugguca

SEQ ID NO: 1505778 - RNA, 19 nt, Artificial Sequence
  Description of Artificial Sequence: Synthetic oligonucleotide
aaauucauauuuucccuag

SEQ ID NO: 1505779 - RNA, 19 nt, Artificial Sequence
  Description of Artificial Sequence: Synthetic oligonucleotide
aaacugaguacuuccagag

SEQ ID NO: 1505780 - RNA, 19 nt, Artificial Sequence
  Description of Artificial Sequence: Synthetic oligonucleotide
ucuauauguaggaaccagg

SEQ ID NO: 1505781 - RNA, 19 nt, Artificial Sequence
  Description of Artificial Sequence: Synthetic oligonucleotide
acuuaucacauacuaaauc

SEQ ID NO: 1505782 - RNA, 19 nt, Artificial Sequence
  Description of Artificial Sequence: Synthetic oligonucleotide
uauaaaggcauagacagca

SEQ ID NO: 1505783 - RNA, 19 nt, Artificial Sequence
  Description of Artificial Sequence: Synthetic oligonucleotide
aaaucuaccuucuuaucca

SEQ ID NO: 1505784 - RNA, 19 nt, Artificial Sequence
  Description of Artificial Sequence: Synthetic oligonucleotide
uccacgaccuucauaagcg

SEQ ID NO: 1505785 - RNA, 19 nt, Artificial Sequence
  Description of Artificial Sequence: Synthetic oligonucleotide
uuaccaagaauaaucuaag

SEQ ID NO: 1505786 - RNA, 19 nt, Artificial Sequence
  Description of Artificial Sequence: Synthetic oligonucleotide
aaugacuuaucacauacua

SEQ ID NO: 1505787 - RNA, 19 nt, Artificial Sequence
  Description of Artificial Sequence: Synthetic oligonucleotide
acauacuaucuccagcugc

SEQ ID NO: 1505788 - RNA, 19 nt, Artificial Sequence
  Description of Artificial Sequence: Synthetic oligonucleotide
auaaucuaaguuguagggc

SEQ ID NO: 1505789 - RNA, 19 nt, Artificial Sequence
  Description of Artificial Sequence: Synthetic oligonucleotide
uuggugggcgugaagaucg

SEQ ID NO: 1505790 - RNA, 19 nt, Artificial Sequence
  Description of Artificial Sequence: Synthetic oligonucleotide
uugauuauguauaauuuua

SEQ ID NO: 1505791 - RNA, 19 nt, Artificial Sequence
  Description of Artificial Sequence: Synthetic oligonucleotide
uauguauaauuuuagcuau

SEQ ID NO: 1505792 - RNA, 19 nt, Artificial Sequence
  Description of Artificial Sequence: Synthetic oligonucleotide
ugcuuugugcucuuguugg

SEQ ID NO: 1505793 - RNA, 19 nt, Artificial Sequence
  Description of Artificial Sequence: Synthetic oligonucleotide
ugcaauaucccuaaacauc

SEQ ID NO: 1505794 - RNA, 19 nt, Artificial Sequence
  Description of Artificial Sequence: Synthetic oligonucleotide
auaaguuuuauugauuaug

SEQ ID NO: 1505795 - RNA, 19 nt, Artificial Sequence
  Description of Artificial Sequence: Synthetic oligonucleotide
uuuucccuagucauuauac

SEQ ID NO: 1505796 - RNA, 19 nt, Artificial Sequence
  Description of Artificial Sequence: Synthetic oligonucleotide
ucuguggaacuauaaaggc

SEQ ID NO: 1505797 - RNA, 19 nt, Artificial Sequence
  Description of Artificial Sequence: Synthetic oligonucleotide
uauacgucuauauguagga

SEQ ID NO: 1505798 - RNA, 19 nt, Artificial Sequence
  Description of Artificial Sequence: Synthetic oligonucleotide
agaauaaucuaaguuguag

SEQ ID NO: 1505799 - RNA, 19 nt, Artificial Sequence
  Description of Artificial Sequence: Synthetic oligonucleotide
acuaaaucuaccuucuuau

SEQ ID NO: 1505800 - RNA, 19 nt, Artificial Sequence
  Description of Artificial Sequence: Synthetic oligonucleotide
uuauuggcaggaugaagcg

SEQ ID NO: 1505801 - RNA, 19 nt, Artificial Sequence
  Description of Artificial Sequence: Synthetic oligonucleotide
uuuagucagaaucugcuua

SEQ ID NO: 1505802 - RNA, 19 nt, Artificial Sequence
  Description of Artificial Sequence: Synthetic oligonucleotide
cacaaugguugcaauaucc

SEQ ID NO: 1505803 - RNA, 19 nt, Artificial Sequence
  Description of Artificial Sequence: Synthetic oligonucleotide
aggauaacuguguaagguc

SEQ ID NO: 1505804 - RNA, 19 nt, Artificial Sequence
  Description of Artificial Sequence: Synthetic oligonucleotide
gugaagaucgacauggcgg

SEQ ID NO: 1505805 - RNA, 19 nt, Artificial Sequence
  Description of Artificial Sequence: Synthetic oligonucleotide
aucgacgagacauacuauc

SEQ ID NO: 1505806 - RNA, 19 nt, Artificial Sequence
  Description of Artificial Sequence: Synthetic oligonucleotide
agacauacuaucuccagcu

SEQ ID NO: 1505807 - RNA, 19 nt, Artificial Sequence
  Description of Artificial Sequence: Synthetic oligonucleotide
uagguaaauguuuaacaca

SEQ ID NO: 1505808 - RNA, 19 nt, Artificial Sequence
  Description of Artificial Sequence: Synthetic oligonucleotide
ucauucgaauuucucaucu

SEQ ID NO: 1505809 - RNA, 19 nt, Artificial Sequence
  Description of Artificial Sequence: Synthetic oligonucleotide
ucuccuuuagucagaaucu

SEQ ID NO: 1505810 - RNA, 19 nt, Artificial Sequence
  Description of Artificial Sequence: Synthetic oligonucleotide
ugugugucguucuuuaucu

SEQ ID NO: 1505811 - RNA, 19 nt, Artificial Sequence
  Description of Artificial Sequence: Synthetic oligonucleotide
gacgagacauacuaucucc

SEQ ID NO: 1505812 - RNA, 19 nt, Artificial Sequence
  Description of Artificial Sequence: Synthetic oligonucleotide
augaggauaacuguguaag

SEQ ID NO: 1505813 - RNA, 19 nt, Artificial Sequence
  Description of Artificial Sequence: Synthetic oligonucleotide
aacuauaaaggcauagaca

SEQ ID NO: 1505814 - RNA, 19 nt, Artificial Sequence
  Description of Artificial Sequence: Synthetic oligonucleotide
acgucuauauguaggaacc

SEQ ID NO: 1505815 - RNA, 19 nt, Artificial Sequence
  Description of Artificial Sequence: Synthetic oligonucleotide
uguagggccauguuuguug

SEQ ID NO: 1505816 - RNA, 19 nt, Artificial Sequence
  Description of Artificial Sequence: Synthetic oligonucleotide
acgucuuucaaacugagua

SEQ ID NO: 1505817 - RNA, 19 nt, Artificial Sequence
  Description of Artificial Sequence: Synthetic oligonucleotide
uucuaguaaacacuccacu

SEQ ID NO: 1505818 - RNA, 19 nt, Artificial Sequence
  Description of Artificial Sequence: Synthetic oligonucleotide
agcgcaaucucaugugagc

SEQ ID NO: 1505819 - RNA, 19 nt, Artificial Sequence
  Description of Artificial Sequence: Synthetic oligonucleotide
auuauacgucuauauguag

SEQ ID NO: 1505820 - RNA, 19 nt, Artificial Sequence
  Description of Artificial Sequence: Synthetic oligonucleotide
uuaucugacacuugaacuu

SEQ ID NO: 1505821 - RNA, 19 nt, Artificial Sequence
  Description of Artificial Sequence: Synthetic oligonucleotide
aaugaggauaacuguguaa

SEQ ID NO: 1505822 - RNA, 19 nt, Artificial Sequence
  Description of Artificial Sequence: Synthetic oligonucleotide
uacgucuauauguaggaac

SEQ ID NO: 1505823 - RNA, 19 nt, Artificial Sequence
  Description of Artificial Sequence: Synthetic oligonucleotide
ugucauucgaauuucucau

SEQ ID NO: 1505824 - RNA, 19 nt, Artificial Sequence
  Description of Artificial Sequence: Synthetic oligonucleotide
ugaggauaacuguguaagg

SEQ ID NO: 1505825 - RNA, 19 nt, Artificial Sequence
  Description of Artificial Sequence: Synthetic oligonucleotide
uuaaauggcuuuauauaua

SEQ ID NO: 1505826 - RNA, 19 nt, Artificial Sequence
  Description of Artificial Sequence: Synthetic oligonucleotide
uuaacacaagaugggaaag

SEQ ID NO: 1505827 - RNA, 19 nt, Artificial Sequence
  Description of Artificial Sequence: Synthetic oligonucleotide
ugugucguucuuuaucuga

SEQ ID NO: 1505828 - RNA, 19 nt, Artificial Sequence
  Description of Artificial Sequence: Synthetic oligonucleotide
gaaaguggcccguugcuug

SEQ ID NO: 1505829 - RNA, 19 nt, Artificial Sequence
  Description of Artificial Sequence: Synthetic oligonucleotide
uagcaggcgauuucgaagc

SEQ ID NO: 1505830 - RNA, 19 nt, Artificial Sequence
  Description of Artificial Sequence: Synthetic oligonucleotide
uguuuaacacaagauggga

SEQ ID NO: 1505831 - RNA, 19 nt, Artificial Sequence
  Description of Artificial Sequence: Synthetic oligonucleotide
ucuaguaaacacuccacuu

SEQ ID NO: 1505832 - RNA, 19 nt, Artificial Sequence
  Description of Artificial Sequence: Synthetic oligonucleotide
agucauuauacgucuauau

SEQ ID NO: 1505833 - RNA, 19 nt, Artificial Sequence
  Description of Artificial Sequence: Synthetic oligonucleotide
aacccuugcccuugguuuc

SEQ ID NO: 1505834 - RNA, 19 nt, Artificial Sequence
  Description of Artificial Sequence: Synthetic oligonucleotide
uuugcuggaaaccccaauu

SEQ ID NO: 1505835 - RNA, 19 nt, Artificial Sequence
  Description of Artificial Sequence: Synthetic oligonucleotide
uccuccacgucuuucaaac

SEQ ID NO: 1505836 - RNA, 19 nt, Artificial Sequence
  Description of Artificial Sequence: Synthetic oligonucleotide
auguuuaacacaagauggg

SEQ ID NO: 1505837 - RNA, 19 nt, Artificial Sequence
  Description of Artificial Sequence: Synthetic oligonucleotide
augaagcgcaaucucaugu

SEQ ID NO: 1505838 - RNA, 19 nt, Artificial Sequence
  Description of Artificial Sequence: Synthetic oligonucleotide
uucgaauuucucaucuccu

SEQ ID NO: 1505839 - RNA, 19 nt, Artificial Sequence
  Description of Artificial Sequence: Synthetic oligonucleotide
uccuuuagucagaaucugc

SEQ ID NO: 1505840 - RNA, 19 nt, Artificial Sequence
  Description of Artificial Sequence: Synthetic oligonucleotide
uggaacuauaaaggcauag

SEQ ID NO: 1505841 - RNA, 19 nt, Artificial Sequence
  Description of Artificial Sequence: Synthetic oligonucleotide
uuucgaagcgcuucccugc

SEQ ID NO: 1505842 - RNA, 19 nt, Artificial Sequence
  Description of Artificial Sequence: Synthetic oligonucleotide
auucuaguaaacacuccac

SEQ ID NO: 1505843 - RNA, 19 nt, Artificial Sequence
  Description of Artificial Sequence: Synthetic oligonucleotide
ugaagcgcaaucucaugug

SEQ ID NO: 1505844 - RNA, 19 nt, Artificial Sequence
  Description of Artificial Sequence: Synthetic oligonucleotide
uuagcuauacuaacauaua

SEQ ID NO: 1505845 - RNA, 19 nt, Artificial Sequence
  Description of Artificial Sequence: Synthetic oligonucleotide
guuauacagaccccucucc

SEQ ID NO: 1505846 - RNA, 19 nt, Artificial Sequence
  Description of Artificial Sequence: Synthetic oligonucleotide
cauucuaguaaacacucca

SEQ ID NO: 1505847 - RNA, 19 nt, Artificial Sequence
  Description of Artificial Sequence: Synthetic oligonucleotide
cacuugucugccacaaugg

SEQ ID NO: 1505848 - RNA, 19 nt, Artificial Sequence
  Description of Artificial Sequence: Synthetic oligonucleotide
auuucgaagcgcuucccug

SEQ ID NO: 1505849 - RNA, 19 nt, Artificial Sequence
  Description of Artificial Sequence: Synthetic oligonucleotide
ucgacgagacauacuaucu

SEQ ID NO: 1505850 - RNA, 19 nt, Artificial Sequence
  Description of Artificial Sequence: Synthetic oligonucleotide
uugcaauaucccuaaacau

SEQ ID NO: 1505851 - RNA, 19 nt, Artificial Sequence
  Description of Artificial Sequence: Synthetic oligonucleotide
ucuccaagcucacacccca

SEQ ID NO: 1505852 - RNA, 19 nt, Artificial Sequence
  Description of Artificial Sequence: Synthetic oligonucleotide
uggcuuuauauauauuuua

SEQ ID NO: 1505853 - RNA, 19 nt, Artificial Sequence
  Description of Artificial Sequence: Synthetic oligonucleotide
agaucgacauggcggcugc

SEQ ID NO: 1505854 - RNA, 19 nt, Artificial Sequence
  Description of Artificial Sequence: Synthetic oligonucleotide
gcuauacuaacauauauua

SEQ ID NO: 1505855 - RNA, 19 nt, Artificial Sequence
  Description of Artificial Sequence: Synthetic oligonucleotide
aucugaucugguugguggg

SEQ ID NO: 1505856 - RNA, 19 nt, Artificial Sequence
  Description of Artificial Sequence: Synthetic oligonucleotide
uccacgucuuucaaacuga

SEQ ID NO: 1505857 - RNA, 19 nt, Artificial Sequence
  Description of Artificial Sequence: Synthetic oligonucleotide
caagaauaaucuaaguugu

SEQ ID NO: 1505858 - RNA, 19 nt, Artificial Sequence
  Description of Artificial Sequence: Synthetic oligonucleotide
uuuuagcuauacuaacaua

SEQ ID NO: 1505859 - RNA, 19 nt, Artificial Sequence
  Description of Artificial Sequence: Synthetic oligonucleotide
ugggaaaguggcccguugc

SEQ ID NO: 1505860 - RNA, 19 nt, Artificial Sequence
  Description of Artificial Sequence: Synthetic oligonucleotide
uauagcaggcgauuucgaa

SEQ ID NO: 1505861 - RNA, 19 nt, Artificial Sequence
  Description of Artificial Sequence: Synthetic oligonucleotide
ucuuuaucugacacuugaa

SEQ ID NO: 1505862 - RNA, 19 nt, Artificial Sequence
  Description of Artificial Sequence: Synthetic oligonucleotide
caaccugaccuuuggaaac

SEQ ID NO: 1505863 - RNA, 19 nt, Artificial Sequence
  Description of Artificial Sequence: Synthetic oligonucleotide
cucuccaaugacuuaucac

SEQ ID NO: 1505864 - RNA, 19 nt, Artificial Sequence
  Description of Artificial Sequence: Synthetic oligonucleotide
cuccacgucuuucaaacug

SEQ ID NO: 1505865 - RNA, 19 nt, Artificial Sequence
  Description of Artificial Sequence: Synthetic oligonucleotide
cauuauacgucuauaugua

SEQ ID NO: 1505866 - RNA, 19 nt, Artificial Sequence
  Description of Artificial Sequence: Synthetic oligonucleotide
uuauagcaggcgauuucga

SEQ ID NO: 1505867 - RNA, 19 nt, Artificial Sequence
  Description of Artificial Sequence: Synthetic oligonucleotide
agugucauucgaauuucuc

SEQ ID NO: 1505868 - RNA, 19 nt, Artificial Sequence
  Description of Artificial Sequence: Synthetic oligonucleotide
ugaccuuuggaaacauuua

SEQ ID NO: 1505869 - RNA, 19 nt, Artificial Sequence
  Description of Artificial Sequence: Synthetic oligonucleotide
acgcucuaucuuuaucuuc

SEQ ID NO: 1505870 - RNA, 19 nt, Artificial Sequence
  Description of Artificial Sequence: Synthetic oligonucleotide
aagaucgacauggcggcug

SEQ ID NO: 1505871 - RNA, 19 nt, Artificial Sequence
  Description of Artificial Sequence: Synthetic oligonucleotide
cauuggucaaucugaucug

SEQ ID NO: 1505872 - RNA, 19 nt, Artificial Sequence
  Description of Artificial Sequence: Synthetic oligonucleotide
aaaguggcccguugcuuga

SEQ ID NO: 1505873 - RNA, 19 nt, Artificial Sequence
  Description of Artificial Sequence: Synthetic oligonucleotide
guuacgaccccgcggcgcg

SEQ ID NO: 1505874 - RNA, 19 nt, Artificial Sequence
  Description of Artificial Sequence: Synthetic oligonucleotide
acacaagaugggaaagugg

SEQ ID NO: 1505875 - RNA, 19 nt, Artificial Sequence
  Description of Artificial Sequence: Synthetic oligonucleotide
gguugcaauaucccuaaac

SEQ ID NO: 1505876 - RNA, 19 nt, Artificial Sequence
  Description of Artificial Sequence: Synthetic oligonucleotide
caugugagcacgcucuauc

SEQ ID NO: 1505877 - RNA, 19 nt, Artificial Sequence
  Description of Artificial Sequence: Synthetic oligonucleotide
gcuguuacgaccccgcggc

SEQ ID NO: 1505878 - RNA, 19 nt, Artificial Sequence
  Description of Artificial Sequence: Synthetic oligonucleotide
aaccccaauuuacaacaaa

SEQ ID NO: 1505879 - RNA, 19 nt, Artificial Sequence
  Description of Artificial Sequence: Synthetic oligonucleotide
agcacgcucuaucuuuauc

SEQ ID NO: 1505880 - RNA, 19 nt, Artificial Sequence
  Description of Artificial Sequence: Synthetic oligonucleotide
gacauacuaucuccagcug

SEQ ID NO: 1505881 - RNA, 19 nt, Artificial Sequence
  Description of Artificial Sequence: Synthetic oligonucleotide
ucguucuuuaucugacacu

SEQ ID NO: 1505882 - RNA, 19 nt, Artificial Sequence
  Description of Artificial Sequence: Synthetic oligonucleotide
gaagucuucucuccaagcu

SEQ ID NO: 1505883 - RNA, 19 nt, Artificial Sequence
  Description of Artificial Sequence: Synthetic oligonucleotide
acggcuacauuggucaauc

SEQ ID NO: 1505884 - RNA, 19 nt, Artificial Sequence
  Description of Artificial Sequence: Synthetic oligonucleotide
gaagcgcaaucucauguga

SEQ ID NO: 1505885 - RNA, 19 nt, Artificial Sequence
  Description of Artificial Sequence: Synthetic oligonucleotide
uuuugcuggaaaccccaau

SEQ ID NO: 1505886 - RNA, 19 nt, Artificial Sequence
  Description of Artificial Sequence: Synthetic oligonucleotide
ugggcgugaagaucgacau

SEQ ID NO: 1505887 - RNA, 19 nt, Artificial Sequence
  Description of Artificial Sequence: Synthetic oligonucleotide
cuguggaacuauaaaggca

SEQ ID NO: 1505888 - RNA, 19 nt, Artificial Sequence
  Description of Artificial Sequence: Synthetic oligonucleotide
aagcgcaaucucaugugag

SEQ ID NO: 1505889 - RNA, 19 nt, Artificial Sequence
  Description of Artificial Sequence: Synthetic oligonucleotide
uauuggcaggaugaagcgc

SEQ ID NO: 1505890 - RNA, 19 nt, Artificial Sequence
  Description of Artificial Sequence: Synthetic oligonucleotide
cacgaccuucauaagcggc

SEQ ID NO: 1505891 - RNA, 19 nt, Artificial Sequence
  Description of Artificial Sequence: Synthetic oligonucleotide
uucgaagcgcuucccugcc

SEQ ID NO: 1505892 - RNA, 19 nt, Artificial Sequence
  Description of Artificial Sequence: Synthetic oligonucleotide
ugucguucuuuaucugaca

SEQ ID NO: 1505893 - RNA, 19 nt, Artificial Sequence
  Description of Artificial Sequence: Synthetic oligonucleotide
uucagucuggucaucuguu

SEQ ID NO: 1505894 - RNA, 19 nt, Artificial Sequence
  Description of Artificial Sequence: Synthetic oligonucleotide
augugagcacgcucuaucu

SEQ ID NO: 1505895 - RNA, 19 nt, Artificial Sequence
  Description of Artificial Sequence: Synthetic oligonucleotide
ucauaagcggcuucagcuu

SEQ ID NO: 1505896 - RNA, 19 nt, Artificial Sequence
  Description of Artificial Sequence: Synthetic oligonucleotide
ucggcuguuacgaccccgc

SEQ ID NO: 1505897 - RNA, 19 nt, Artificial Sequence
  Description of Artificial Sequence: Synthetic oligonucleotide
cugaguacuuccagagaac

SEQ ID NO: 1505898 - RNA, 19 nt, Artificial Sequence
  Description of Artificial Sequence: Synthetic oligonucleotide
ggaaaccccaauuuacaac

SEQ ID NO: 1505899 - RNA, 19 nt, Artificial Sequence
  Description of Artificial Sequence: Synthetic oligonucleotide
auaucccuaaacaucugcu

SEQ ID NO: 1505900 - RNA, 19 nt, Artificial Sequence
  Description of Artificial Sequence: Synthetic oligonucleotide
gagagugucauucgaauuu

SEQ ID NO: 1505901 - RNA, 19 nt, Artificial Sequence
  Description of Artificial Sequence: Synthetic oligonucleotide
auacagaccccucuccaau

SEQ ID NO: 1505902 - RNA, 19 nt, Artificial Sequence
  Description of Artificial Sequence: Synthetic oligonucleotide
gugugugucguucuuuauc

SEQ ID NO: 1505903 - RNA, 19 nt, Artificial Sequence
  Description of Artificial Sequence: Synthetic oligonucleotide
accucgggcucuccaagcg

SEQ ID NO: 1505904 - RNA, 19 nt, Artificial Sequence
  Description of Artificial Sequence: Synthetic oligonucleotide
gaccgaguaguggaugucc

SEQ ID NO: 1505905 - RNA, 19 nt, Artificial Sequence
  Description of Artificial Sequence: Synthetic oligonucleotide
aguggcccguugcuugagc

SEQ ID NO: 1505906 - RNA, 19 nt, Artificial Sequence
  Description of Artificial Sequence: Synthetic oligonucleotide
ggaucgacgagacauacua

SEQ ID NO: 1505907 - RNA, 19 nt, Artificial Sequence
  Description of Artificial Sequence: Synthetic oligonucleotide
auuuucccuagucauuaua

SEQ ID NO: 1505908 - RNA, 19 nt, Artificial Sequence
  Description of Artificial Sequence: Synthetic oligonucleotide
gcuacauuggucaaucuga

SEQ ID NO: 1505909 - RNA, 19 nt, Artificial Sequence
  Description of Artificial Sequence: Synthetic oligonucleotide
aagcgcucggcuguuacga

SEQ ID NO: 1505910 - RNA, 19 nt, Artificial Sequence
  Description of Artificial Sequence: Synthetic oligonucleotide
agcuauacuaacauauauu

SEQ ID NO: 1505911 - RNA, 19 nt, Artificial Sequence
  Description of Artificial Sequence: Synthetic oligonucleotide
gaggauaacuguguaaggu

SEQ ID NO: 1505912 - RNA, 19 nt, Artificial Sequence
  Description of Artificial Sequence: Synthetic oligonucleotide
uaaguuguagggccauguu

SEQ ID NO: 1505913 - RNA, 19 nt, Artificial Sequence
  Description of Artificial Sequence: Synthetic oligonucleotide
uacagauuucagucugguc

SEQ ID NO: 1505914 - RNA, 19 nt, Artificial Sequence
  Description of Artificial Sequence: Synthetic oligonucleotide
cauucgaauuucucaucuc

SEQ ID NO: 1505915 - RNA, 19 nt, Artificial Sequence
  Description of Artificial Sequence: Synthetic oligonucleotide
accaacguccucuguggug

SEQ ID NO: 1505916 - RNA, 19 nt, Artificial Sequence
  Description of Artificial Sequence: Synthetic oligonucleotide
aaccaacguccucuguggu

SEQ ID NO: 1505917 - RNA, 19 nt, Artificial Sequence
  Description of Artificial Sequence: Synthetic oligonucleotide
gagcuggagagugucauuc

SEQ ID NO: 1505918 - RNA, 19 nt, Artificial Sequence
  Description of Artificial Sequence: Synthetic oligonucleotide
uccaaugacuuaucacaua

SEQ ID NO: 1505919 - RNA, 19 nt, Artificial Sequence
  Description of Artificial Sequence: Synthetic oligonucleotide
caggaugaagcgcaaucuc

SEQ ID NO: 1505920 - RNA, 19 nt, Artificial Sequence
  Description of Artificial Sequence: Synthetic oligonucleotide
uggucaaucugaucugguu

SEQ ID NO: 1505921 - RNA, 19 nt, Artificial Sequence
  Description of Artificial Sequence: Synthetic oligonucleotide
ggaagucuucucuccaagc

SEQ ID NO: 1505922 - RNA, 19 nt, Artificial Sequence
  Description of Artificial Sequence: Synthetic oligonucleotide
uguggugcuccagcugagg

SEQ ID NO: 1505923 - RNA, 19 nt, Artificial Sequence
  Description of Artificial Sequence: Synthetic oligonucleotide
cugaucugguuggugggcg

SEQ ID NO: 1505924 - RNA, 19 nt, Artificial Sequence
  Description of Artificial Sequence: Synthetic oligonucleotide
ucauccgcaccacggcuac

SEQ ID NO: 1505925 - RNA, 19 nt, Artificial Sequence
  Description of Artificial Sequence: Synthetic oligonucleotide
cauacuaucuccagcugcu

SEQ ID NO: 1505926 - RNA, 19 nt, Artificial Sequence
  Description of Artificial Sequence: Synthetic oligonucleotide
accccaauuuacaacaaaa

SEQ ID NO: 1505927 - RNA, 19 nt, Artificial Sequence
  Description of Artificial Sequence: Synthetic oligonucleotide
uguuacgaccccgcggcgc

SEQ ID NO: 1505928 - RNA, 19 nt, Artificial Sequence
  Description of Artificial Sequence: Synthetic oligonucleotide
ugugagcacgcucuaucuu

SEQ ID NO: 1505929 - RNA, 19 nt, Artificial Sequence
  Description of Artificial Sequence: Synthetic oligonucleotide
aagaauaaucuaaguugua

SEQ ID NO: 1505930 - RNA, 19 nt, Artificial Sequence
  Description of Artificial Sequence: Synthetic oligonucleotide
aacacccaguaccuaggua

SEQ ID NO: 1505931 - RNA, 19 nt, Artificial Sequence
  Description of Artificial Sequence: Synthetic oligonucleotide
uguugggcuugaccgagua

SEQ ID NO: 1505932 - RNA, 19 nt, Artificial Sequence
  Description of Artificial Sequence: Synthetic oligonucleotide
gucauucgaauuucucauc

SEQ ID NO: 1505933 - RNA, 19 nt, Artificial Sequence
  Description of Artificial Sequence: Synthetic oligonucleotide
agcaggcgauuucgaagcg

SEQ ID NO: 1505934 - RNA, 19 nt, Artificial Sequence
  Description of Artificial Sequence: Synthetic oligonucleotide
ucuaaguuguagggccaug

SEQ ID NO: 1505935 - RNA, 19 nt, Artificial Sequence
  Description of Artificial Sequence: Synthetic oligonucleotide
uagucauuauacgucuaua

SEQ ID NO: 1505936 - RNA, 19 nt, Artificial Sequence
  Description of Artificial Sequence: Synthetic oligonucleotide
augacuuaucacauacuaa

SEQ ID NO: 1505937 - RNA, 19 nt, Artificial Sequence
  Description of Artificial Sequence: Synthetic oligonucleotide
augggaaaguggcccguug

SEQ ID NO: 1505938 - RNA, 19 nt, Artificial Sequence
  Description of Artificial Sequence: Synthetic oligonucleotide
uaccuagguaaauguuuaa

SEQ ID NO: 1505939 - RNA, 19 nt, Artificial Sequence
  Description of Artificial Sequence: Synthetic oligonucleotide
gcuggaaaccccaauuuac

SEQ ID NO: 1505940 - RNA, 19 nt, Artificial Sequence
  Description of Artificial Sequence: Synthetic oligonucleotide
acgaccuucauaagcggcu

SEQ ID NO: 1505941 - RNA, 19 nt, Artificial Sequence
  Description of Artificial Sequence: Synthetic oligonucleotide
gauuucgaagcgcuucccu

SEQ ID NO: 1505942 - RNA, 19 nt, Artificial Sequence
  Description of Artificial Sequence: Synthetic oligonucleotide
uggcccguugcuugagcag

SEQ ID NO: 1505943 - RNA, 19 nt, Artificial Sequence
  Description of Artificial Sequence: Synthetic oligonucleotide
ggcuugaccgaguagugga

SEQ ID NO: 1505944 - RNA, 19 nt, Artificial Sequence
  Description of Artificial Sequence: Synthetic oligonucleotide
ggcuguuacgaccccgcgg

SEQ ID NO: 1505945 - RNA, 19 nt, Artificial Sequence
  Description of Artificial Sequence: Synthetic oligonucleotide
guugggcuugaccgaguag

SEQ ID NO: 1505946 - RNA, 19 nt, Artificial Sequence
  Description of Artificial Sequence: Synthetic oligonucleotide
ccagaccuggacuucauuc

SEQ ID NO: 1505947 - RNA, 19 nt, Artificial Sequence
  Description of Artificial Sequence: Synthetic oligonucleotide
guagggccauguuuguuga

SEQ ID NO: 1505948 - RNA, 19 nt, Artificial Sequence
  Description of Artificial Sequence: Synthetic oligonucleotide
agcgcucggcuguuacgac

SEQ ID NO: 1505949 - RNA, 19 nt, Artificial Sequence
  Description of Artificial Sequence: Synthetic oligonucleotide
guaccuagguaaauguuua

SEQ ID NO: 1505950 - RNA, 19 nt, Artificial Sequence
  Description of Artificial Sequence: Synthetic oligonucleotide
uggcaaccugaccuuugga

SEQ ID NO: 1505951 - RNA, 19 nt, Artificial Sequence
  Description of Artificial Sequence: Synthetic oligonucleotide
ccaacguccucuguggugc

SEQ ID NO: 1505952 - RNA, 19 nt, Artificial Sequence
  Description of Artificial Sequence: Synthetic oligonucleotide
gucuuucaaacugaguacu

SEQ ID NO: 1505953 - RNA, 19 nt, Artificial Sequence
  Description of Artificial Sequence: Synthetic oligonucleotide
uugcccuugguuuccuuuu

SEQ ID NO: 1505954 - RNA, 19 nt, Artificial Sequence
  Description of Artificial Sequence: Synthetic oligonucleotide
acaccccagaccuggacuu

SEQ ID NO: 1505955 - RNA, 19 nt, Artificial Sequence
  Description of Artificial Sequence: Synthetic oligonucleotide
ggcaaccugaccuuuggaa

SEQ ID NO: 1505956 - RNA, 19 nt, Artificial Sequence
  Description of Artificial Sequence: Synthetic oligonucleotide
caggaucgacgagacauac

SEQ ID NO: 1505957 - RNA, 19 nt, Artificial Sequence
  Description of Artificial Sequence: Synthetic oligonucleotide
gcgauuucgaagcgcuucc

SEQ ID NO: 1505958 - RNA, 19 nt, Artificial Sequence
  Description of Artificial Sequence: Synthetic oligonucleotide
acgagacauacuaucucca

SEQ ID NO: 1505959 - RNA, 19 nt, Artificial Sequence
  Description of Artificial Sequence: Synthetic oligonucleotide
acccuugcccuugguuucc

SEQ ID NO: 1505960 - RNA, 19 nt, Artificial Sequence
  Description of Artificial Sequence: Synthetic oligonucleotide
cgugaagaucgacauggcg

SEQ ID NO: 1505961 - RNA, 19 nt, Artificial Sequence
  Description of Artificial Sequence: Synthetic oligonucleotide
ucgaagcgcuucccugccc

SEQ ID NO: 1505962 - RNA, 19 nt, Artificial Sequence
  Description of Artificial Sequence: Synthetic oligonucleotide
gugugucguucuuuaucug

SEQ ID NO: 1505963 - RNA, 19 nt, Artificial Sequence
  Description of Artificial Sequence: Synthetic oligonucleotide
agggccauguuuguugaaa

SEQ ID NO: 1505964 - RNA, 19 nt, Artificial Sequence
  Description of Artificial Sequence: Synthetic oligonucleotide
cuggagagugucauucgaa

SEQ ID NO: 1505965 - RNA, 19 nt, Artificial Sequence
  Description of Artificial Sequence: Synthetic oligonucleotide
auacgucuauauguaggaa

SEQ ID NO: 1505966 - RNA, 19 nt, Artificial Sequence
  Description of Artificial Sequence: Synthetic oligonucleotide
uuguugggcuugaccgagu

SEQ ID NO: 1505967 - RNA, 19 nt, Artificial Sequence
  Description of Artificial Sequence: Synthetic oligonucleotide
gugggcgugaagaucgaca

SEQ ID NO: 1505968 - RNA, 19 nt, Artificial Sequence
  Description of Artificial Sequence: Synthetic oligonucleotide
cucggcuguuacgaccccg

SEQ ID NO: 1505969 - RNA, 19 nt, Artificial Sequence
  Description of Artificial Sequence: Synthetic oligonucleotide
agaccccucuccaaugacu

SEQ ID NO: 1505970 - RNA, 19 nt, Artificial Sequence
  Description of Artificial Sequence: Synthetic oligonucleotide
ggauaacuguguaaggucu

SEQ ID NO: 1505971 - RNA, 19 nt, Artificial Sequence
  Description of Artificial Sequence: Synthetic oligonucleotide
cagaccuggacuucauucu

SEQ ID NO: 1505972 - RNA, 19 nt, Artificial Sequence
  Description of Artificial Sequence: Synthetic oligonucleotide
ggcccguugcuugagcagg

SEQ ID NO: 1505973 - RNA, 19 nt, Artificial Sequence
  Description of Artificial Sequence: Synthetic oligonucleotide
ccacuuuguuauacagacc

SEQ ID NO: 1505974 - RNA, 19 nt, Artificial Sequence
  Description of Artificial Sequence: Synthetic oligonucleotide
guggcccguugcuugagca

SEQ ID NO: 1505975 - RNA, 19 nt, Artificial Sequence
  Description of Artificial Sequence: Synthetic oligonucleotide
ucuagcugugugugucguu

SEQ ID NO: 1505976 - RNA, 19 nt, Artificial Sequence
  Description of Artificial Sequence: Synthetic oligonucleotide
caggcgauuucgaagcgcu

SEQ ID NO: 1505977 - RNA, 19 nt, Artificial Sequence
  Description of Artificial Sequence: Synthetic oligonucleotide
cuaaguuguagggccaugu

SEQ ID NO: 1505978 - RNA, 19 nt, Artificial Sequence
  Description of Artificial Sequence: Synthetic oligonucleotide
auguauaauuuuagcuaua

SEQ ID NO: 1505979 - RNA, 19 nt, Artificial Sequence
  Description of Artificial Sequence: Synthetic oligonucleotide
ccuuuagucagaaucugcu

SEQ ID NO: 1505980 - RNA, 19 nt, Artificial Sequence
  Description of Artificial Sequence: Synthetic oligonucleotide
ggcgauuucgaagcgcuuc

SEQ ID NO: 1505981 - RNA, 19 nt, Artificial Sequence
  Description of Artificial Sequence: Synthetic oligonucleotide
cuguuacgaccccgcggcg

SEQ ID NO: 1505982 - RNA, 19 nt, Artificial Sequence
  Description of Artificial Sequence: Synthetic oligonucleotide
agaugggaaaguggcccgu

SEQ ID NO: 1505983 - RNA, 19 nt, Artificial Sequence
  Description of Artificial Sequence: Synthetic oligonucleotide
ugaccgaguaguggauguc

SEQ ID NO: 1505984 - RNA, 19 nt, Artificial Sequence
  Description of Artificial Sequence: Synthetic oligonucleotide
cacuccgccagccgacgac

SEQ ID NO: 1505985 - RNA, 19 nt, Artificial Sequence
  Description of Artificial Sequence: Synthetic oligonucleotide
cuuuagucagaaucugcuu

SEQ ID NO: 1505986 - RNA, 19 nt, Artificial Sequence
  Description of Artificial Sequence: Synthetic oligonucleotide
cagccgacgaccuuguuuu

SEQ ID NO: 1505987 - RNA, 19 nt, Artificial Sequence
  Description of Artificial Sequence: Synthetic oligonucleotide
ccacgaccuucauaagcgg

SEQ ID NO: 1505988 - RNA, 19 nt, Artificial Sequence
  Description of Artificial Sequence: Synthetic oligonucleotide
uggugggcgugaagaucga

SEQ ID NO: 1505989 - RNA, 19 nt, Artificial Sequence
  Description of Artificial Sequence: Synthetic oligonucleotide
gauaacuguguaaggucuu

SEQ ID NO: 1505990 - RNA, 19 nt, Artificial Sequence
  Description of Artificial Sequence: Synthetic oligonucleotide
aggaucgacgagacauacu

SEQ ID NO: 1505991 - RNA, 19 nt, Artificial Sequence
  Description of Artificial Sequence: Synthetic oligonucleotide
cacccaguaccuagguaaa

SEQ ID NO: 1505992 - RNA, 19 nt, Artificial Sequence
  Description of Artificial Sequence: Synthetic oligonucleotide
uagggccauguuuguugaa

SEQ ID NO: 1505993 - RNA, 19 nt, Artificial Sequence
  Description of Artificial Sequence: Synthetic oligonucleotide
gggccauguuuguugaaaa

SEQ ID NO: 1505994 - RNA, 19 nt, Artificial Sequence
  Description of Artificial Sequence: Synthetic oligonucleotide
cccuaaacaucugcucuag

SEQ ID NO: 1505995 - RNA, 19 nt, Artificial Sequence
  Description of Artificial Sequence: Synthetic oligonucleotide
cuucauccgcaccacggcu

SEQ ID NO: 1505996 - RNA, 19 nt, Artificial Sequence
  Description of Artificial Sequence: Synthetic oligonucleotide
cgcucggcuguuacgaccc

SEQ ID NO: 1505997 - RNA, 19 nt, Artificial Sequence
  Description of Artificial Sequence: Synthetic oligonucleotide
uggcucucucaaugaggau

SEQ ID NO: 1505998 - RNA, 19 nt, Artificial Sequence
  Description of Artificial Sequence: Synthetic oligonucleotide
ccaguaccuagguaaaugu

SEQ ID NO: 1505999 - RNA, 19 nt, Artificial Sequence
  Description of Artificial Sequence: Synthetic oligonucleotide
gcgcucggcuguuacgacc

SEQ ID NO: 1506000 - RNA, 19 nt, Artificial Sequence
  Description of Artificial Sequence: Synthetic oligonucleotide
cauaagcggcuucagcuuu

SEQ ID NO: 1506001 - RNA, 19 nt, Artificial Sequence
  Description of Artificial Sequence: Synthetic oligonucleotide
cucgggcucuccaagcgcu

SEQ ID NO: 1506002 - RNA, 19 nt, Artificial Sequence
  Description of Artificial Sequence: Synthetic oligonucleotide
gcaggcgauuucgaagcgc

SEQ ID NO: 1506003 - RNA, 19 nt, Artificial Sequence
  Description of Artificial Sequence: Synthetic oligonucleotide
cauggcggcugcucacaga

SEQ ID NO: 1506004 - RNA, 19 nt, Artificial Sequence
  Description of Artificial Sequence: Synthetic oligonucleotide
ccacaaugguugcaauauc

SEQ ID NO: 1506005 - RNA, 19 nt, Artificial Sequence
  Description of Artificial Sequence: Synthetic oligonucleotide
auaagcggcuucagcuuuu

SEQ ID NO: 1506006 - RNA, 19 nt, Artificial Sequence
  Description of Artificial Sequence: Synthetic oligonucleotide
agcgcuucccugcccgcuu

SEQ ID NO: 1506007 - RNA, 19 nt, Artificial Sequence
  Description of Artificial Sequence: Synthetic oligonucleotide
cgacgagacauacuaucuc

SEQ ID NO: 1506008 - RNA, 19 nt, Artificial Sequence
  Description of Artificial Sequence: Synthetic oligonucleotide
ggagagugucauucgaauu

SEQ ID NO: 1506009 - RNA, 19 nt, Artificial Sequence
  Description of Artificial Sequence: Synthetic oligonucleotide
gaccccucuccaaugacuu

SEQ ID NO: 1506010 - RNA, 19 nt, Artificial Sequence
  Description of Artificial Sequence: Synthetic oligonucleotide
accugaccuuuggaaacau

SEQ ID NO: 1506011 - RNA, 19 nt, Artificial Sequence
  Description of Artificial Sequence: Synthetic oligonucleotide
gaucgacgagacauacuau

SEQ ID NO: 1506012 - RNA, 19 nt, Artificial Sequence
  Description of Artificial Sequence: Synthetic oligonucleotide
cacgucuuucaaacugagu

SEQ ID NO: 1506013 - RNA, 19 nt, Artificial Sequence
  Description of Artificial Sequence: Synthetic oligonucleotide
caguaccuagguaaauguu

SEQ ID NO: 1506014 - RNA, 19 nt, Artificial Sequence
  Description of Artificial Sequence: Synthetic oligonucleotide
cucaugugagcacgcucua

SEQ ID NO: 1506015 - RNA, 19 nt, Artificial Sequence
  Description of Artificial Sequence: Synthetic oligonucleotide
gaccccgcggcgcgcgaac

SEQ ID NO: 1506016 - RNA, 19 nt, Artificial Sequence
  Description of Artificial Sequence: Synthetic oligonucleotide
uuacgaccccgcggcgcgc

SEQ ID NO: 1506017 - RNA, 19 nt, Artificial Sequence
  Description of Artificial Sequence: Synthetic oligonucleotide
cacgcucuaucuuuaucuu

SEQ ID NO: 1506018 - RNA, 19 nt, Artificial Sequence
  Description of Artificial Sequence: Synthetic oligonucleotide
gaagaucgacauggcggcu

SEQ ID NO: 1506019 - RNA, 19 nt, Artificial Sequence
  Description of Artificial Sequence: Synthetic oligonucleotide
guggaacuauaaaggcaua

SEQ ID NO: 1506020 - RNA, 19 nt, Artificial Sequence
  Description of Artificial Sequence: Synthetic oligonucleotide
cuguuccaaaugcacugau

SEQ ID NO: 1506021 - RNA, 19 nt, Artificial Sequence
  Description of Artificial Sequence: Synthetic oligonucleotide
gcccguugcuugagcaggg

SEQ ID NO: 1506022 - RNA, 19 nt, Artificial Sequence
  Description of Artificial Sequence: Synthetic oligonucleotide
cucacagaccucgggcucu

SEQ ID NO: 1506023 - RNA, 19 nt, Artificial Sequence
  Description of Artificial Sequence: Synthetic oligonucleotide
gagcacgcucuaucuuuau

SEQ ID NO: 1506024 - RNA, 19 nt, Artificial Sequence
  Description of Artificial Sequence: Synthetic oligonucleotide
uugcuugagcagggcuuuu

SEQ ID NO: 1506025 - RNA, 19 nt, Artificial Sequence
  Description of Artificial Sequence: Synthetic oligonucleotide
gggcuuuuggcaggucaca

SEQ ID NO: 1506026 - RNA, 19 nt, Artificial Sequence
  Description of Artificial Sequence: Synthetic oligonucleotide
ggugggcgugaagaucgac

SEQ ID NO: 1506027 - RNA, 19 nt, Artificial Sequence
  Description of Artificial Sequence: Synthetic oligonucleotide
cguucuuuaucugacacuu

SEQ ID NO: 1506028 - RNA, 19 nt, Artificial Sequence
  Description of Artificial Sequence: Synthetic oligonucleotide
uccaagcgcucggcuguua

SEQ ID NO: 1506029 - RNA, 19 nt, Artificial Sequence
  Description of Artificial Sequence: Synthetic oligonucleotide
cgauuucgaagcgcuuccc

SEQ ID NO: 1506030 - RNA, 19 nt, Artificial Sequence
  Description of Artificial Sequence: Synthetic oligonucleotide
ccgcuucauccgcaccacg

SEQ ID NO: 1506031 - RNA, 19 nt, Artificial Sequence
  Description of Artificial Sequence: Synthetic oligonucleotide
ccuagucauuauacgucua

SEQ ID NO: 1506032 - RNA, 19 nt, Artificial Sequence
  Description of Artificial Sequence: Synthetic oligonucleotide
ggaaaguggcccguugcuu

SEQ ID NO: 1506033 - RNA, 19 nt, Artificial Sequence
  Description of Artificial Sequence: Synthetic oligonucleotide
gcucggcuguuacgacccc

SEQ ID NO: 1506034 - RNA, 19 nt, Artificial Sequence
  Description of Artificial Sequence: Synthetic oligonucleotide
aggcgauuucgaagcgcuu

SEQ ID NO: 1506035 - RNA, 19 nt, Artificial Sequence
  Description of Artificial Sequence: Synthetic oligonucleotide
cgucuauauguaggaacca

SEQ ID NO: 1506036 - RNA, 19 nt, Artificial Sequence
  Description of Artificial Sequence: Synthetic oligonucleotide
cggcuguuacgaccccgcg

SEQ ID NO: 1506037 - RNA, 19 nt, Artificial Sequence
  Description of Artificial Sequence: Synthetic oligonucleotide
cacggcuacauuggucaau

SEQ ID NO: 1506038 - RNA, 19 nt, Artificial Sequence
  Description of Artificial Sequence: Synthetic oligonucleotide
gaucgacauggcggcugcu

SEQ ID NO: 1506039 - RNA, 19 nt, Artificial Sequence
  Description of Artificial Sequence: Synthetic oligonucleotide
caacguccucuguggugcu

SEQ ID NO: 1506040 - RNA, 19 nt, Artificial Sequence
  Description of Artificial Sequence: Synthetic oligonucleotide
ccacgccacuccgccagcc

SEQ ID NO: 1506041 - RNA, 19 nt, Artificial Sequence
  Description of Artificial Sequence: Synthetic oligonucleotide
cuccgccagccgacgaccu

SEQ ID NO: 1506042 - RNA, 19 nt, Artificial Sequence
  Description of Artificial Sequence: Synthetic oligonucleotide
cguugcuugagcagggcuu

SEQ ID NO: 1506043 - RNA, 19 nt, Artificial Sequence
  Description of Artificial Sequence: Synthetic oligonucleotide
gcgcuucccugcccgcuuc

SEQ ID NO: 1506044 - RNA, 19 nt, Artificial Sequence
  Description of Artificial Sequence: Synthetic oligonucleotide
cgccacuccgccagccgac

SEQ ID NO: 1506045 - RNA, 19 nt, Artificial Sequence
  Description of Artificial Sequence: Synthetic oligonucleotide
cauccgcaccacggcuaca

SEQ ID NO: 1506046 - RNA, 19 nt, Artificial Sequence
  Description of Artificial Sequence: Synthetic oligonucleotide
ccguugcuugagcagggcu

SEQ ID NO: 1506047 - RNA, 19 nt, Artificial Sequence
  Description of Artificial Sequence: Synthetic oligonucleotide
ccuccacgucuuucaaacu

SEQ ID NO: 1506048 - RNA, 19 nt, Artificial Sequence
  Description of Artificial Sequence: Synthetic oligonucleotide
ccacggcuacauuggucaa

SEQ ID NO: 1506049 - RNA, 19 nt, Artificial Sequence
  Description of Artificial Sequence: Synthetic oligonucleotide
ccugaccuuuggaaacauu

SEQ ID NO: 1506050 - RNA, 19 nt, Artificial Sequence
  Description of Artificial Sequence: Synthetic oligonucleotide
cccagaccuggacuucauu

SEQ ID NO: 1506051 - RNA, 19 nt, Artificial Sequence
  Description of Artificial Sequence: Synthetic oligonucleotide
aaaggaaucagucagugcc

SEQ ID NO: 1506052 - RNA, 19 nt, Artificial Sequence
  Description of Artificial Sequence: Synthetic oligonucleotide
aaaguaaauauacaguugg

SEQ ID NO: 1506053 - RNA, 19 nt, Artificial Sequence
  Description of Artificial Sequence: Synthetic oligonucleotide
aaagcuguucuucaaagcc

SEQ ID NO: 1506054 - RNA, 19 nt, Artificial Sequence
  Description of Artificial Sequence: Synthetic oligonucleotide
auacuaguaauucaaaacc

SEQ ID NO: 1506055 - RNA, 19 nt, Artificial Sequence
  Description of Artificial Sequence: Synthetic oligonucleotide
uauauauaaauauauauaa

SEQ ID NO: 1506056 - RNA, 19 nt, Artificial Sequence
  Description of Artificial Sequence: Synthetic oligonucleotide
cauucauugaaccagaacc

SEQ ID NO: 1506057 - RNA, 19 nt, Artificial Sequence
  Description of Artificial Sequence: Synthetic oligonucleotide
uauauauauauaaauauau

SEQ ID NO: 1506058 - RNA, 19 nt, Artificial Sequence
  Description of Artificial Sequence: Synthetic oligonucleotide
aauucgaagacuugaagag

SEQ ID NO: 1506059 - RNA, 19 nt, Artificial Sequence
  Description of Artificial Sequence: Synthetic oligonucleotide
uuuauauauauauaaauau

SEQ ID NO: 1506060 - RNA, 19 nt, Artificial Sequence
  Description of Artificial Sequence: Synthetic oligonucleotide
aauguaguuuuauuggagg

SEQ ID NO: 1506061 - RNA, 19 nt, Artificial Sequence
  Description of Artificial Sequence: Synthetic oligonucleotide
uauauauauaaauauauau

SEQ ID NO: 1506062 - RNA, 19 nt, Artificial Sequence
  Description of Artificial Sequence: Synthetic oligonucleotide
aaaguuacuuuucuggcuc

SEQ ID NO: 1506063 - RNA, 19 nt, Artificial Sequence
  Description of Artificial Sequence: Synthetic oligonucleotide
aaaggaagcaacuacagaa

SEQ ID NO: 1506064 - RNA, 19 nt, Artificial Sequence
  Description of Artificial Sequence: Synthetic oligonucleotide
uuuauauuaccaaauuuug

SEQ ID NO: 1506065 - RNA, 19 nt, Artificial Sequence
  Description of Artificial Sequence: Synthetic oligonucleotide
ucagauuuuauauauauau

SEQ ID NO: 1506066 - RNA, 19 nt, Artificial Sequence
  Description of Artificial Sequence: Synthetic oligonucleotide
uuuuauauauauauaaaua

SEQ ID NO: 1506067 - RNA, 19 nt, Artificial Sequence
  Description of Artificial Sequence: Synthetic oligonucleotide
cucgauuuucauuagaacg

SEQ ID NO: 1506068 - RNA, 19 nt, Artificial Sequence
  Description of Artificial Sequence: Synthetic oligonucleotide
aacauuaauucuccacugc

SEQ ID NO: 1506069 - RNA, 19 nt, Artificial Sequence
  Description of Artificial Sequence: Synthetic oligonucleotide
acagaaagcuuuuauuugc

SEQ ID NO: 1506070 - RNA, 19 nt, Artificial Sequence
  Description of Artificial Sequence: Synthetic oligonucleotide
aaauucgaagacuugaaga

SEQ ID NO: 1506071 - RNA, 19 nt, Artificial Sequence
  Description of Artificial Sequence: Synthetic oligonucleotide
aaacccaagauucagauuu

SEQ ID NO: 1506072 - RNA, 19 nt, Artificial Sequence
  Description of Artificial Sequence: Synthetic oligonucleotide
aaucuaaauuuucuucugg

SEQ ID NO: 1506073 - RNA, 19 nt, Artificial Sequence
  Description of Artificial Sequence: Synthetic oligonucleotide
uuaucaaacauucuauugu

SEQ ID NO: 1506074 - RNA, 19 nt, Artificial Sequence
  Description of Artificial Sequence: Synthetic oligonucleotide
auuucaacuuucuacaaag

SEQ ID NO: 1506075 - RNA, 19 nt, Artificial Sequence
  Description of Artificial Sequence: Synthetic oligonucleotide
aaauucuucgggcucugcc

SEQ ID NO: 1506076 - RNA, 19 nt, Artificial Sequence
  Description of Artificial Sequence: Synthetic oligonucleotide
uaguccacgaaucauaacc

SEQ ID NO: 1506077 - RNA, 19 nt, Artificial Sequence
  Description of Artificial Sequence: Synthetic oligonucleotide
uuuugguugacuaaugacu

SEQ ID NO: 1506078 - RNA, 19 nt, Artificial Sequence
  Description of Artificial Sequence: Synthetic oligonucleotide
uacaacaugguuaucaaac

SEQ ID NO: 1506079 - RNA, 19 nt, Artificial Sequence
  Description of Artificial Sequence: Synthetic oligonucleotide
acaaaguuacuuuucuggc

SEQ ID NO: 1506080 - RNA, 19 nt, Artificial Sequence
  Description of Artificial Sequence: Synthetic oligonucleotide
agauuuuauauauauauaa

SEQ ID NO: 1506081 - RNA, 19 nt, Artificial Sequence
  Description of Artificial Sequence: Synthetic oligonucleotide
auuuuauauauauauaaau

SEQ ID NO: 1506082 - RNA, 19 nt, Artificial Sequence
  Description of Artificial Sequence: Synthetic oligonucleotide
agucagugccuuuugaugc

SEQ ID NO: 1506083 - RNA, 19 nt, Artificial Sequence
  Description of Artificial Sequence: Synthetic oligonucleotide
auuugcuaucaucagauuc

SEQ ID NO: 1506084 - RNA, 19 nt, Artificial Sequence
  Description of Artificial Sequence: Synthetic oligonucleotide
ccaaauacugaaaagaugg

SEQ ID NO: 1506085 - RNA, 19 nt, Artificial Sequence
  Description of Artificial Sequence: Synthetic oligonucleotide
ucgauuuucauuagaacgc

SEQ ID NO: 1506086 - RNA, 19 nt, Artificial Sequence
  Description of Artificial Sequence: Synthetic oligonucleotide
uucaacuuucuacaaagag

SEQ ID NO: 1506087 - RNA, 19 nt, Artificial Sequence
  Description of Artificial Sequence: Synthetic oligonucleotide
aaaauucgaagacuugaag

SEQ ID NO: 1506088 - RNA, 19 nt, Artificial Sequence
  Description of Artificial Sequence: Synthetic oligonucleotide
uaaggaaugagucagggua

SEQ ID NO: 1506089 - RNA, 19 nt, Artificial Sequence
  Description of Artificial Sequence: Synthetic oligonucleotide
uucacugucagauaaagau

SEQ ID NO: 1506090 - RNA, 19 nt, Artificial Sequence
  Description of Artificial Sequence: Synthetic oligonucleotide
aaauacaacaugguuauca

SEQ ID NO: 1506091 - RNA, 19 nt, Artificial Sequence
  Description of Artificial Sequence: Synthetic oligonucleotide
guaaauauacaguuggaug

SEQ ID NO: 1506092 - RNA, 19 nt, Artificial Sequence
  Description of Artificial Sequence: Synthetic oligonucleotide
ucuaccacaaauucuucgg

SEQ ID NO: 1506093 - RNA, 19 nt, Artificial Sequence
  Description of Artificial Sequence: Synthetic oligonucleotide
uuauauauauauaaauaua

SEQ ID NO: 1506094 - RNA, 19 nt, Artificial Sequence
  Description of Artificial Sequence: Synthetic oligonucleotide
auuaucagcaucugugaac

SEQ ID NO: 1506095 - RNA, 19 nt, Artificial Sequence
  Description of Artificial Sequence: Synthetic oligonucleotide
uauucguucaggaucaaga

SEQ ID NO: 1506096 - RNA, 19 nt, Artificial Sequence
  Description of Artificial Sequence: Synthetic oligonucleotide
uuugguugacuaaugacug

SEQ ID NO: 1506097 - RNA, 19 nt, Artificial Sequence
  Description of Artificial Sequence: Synthetic oligonucleotide
ucuucuuuaacuguauucc

SEQ ID NO: 1506098 - RNA, 19 nt, Artificial Sequence
  Description of Artificial Sequence: Synthetic oligonucleotide
aagaccucuggcaaaaccc

SEQ ID NO: 1506099 - RNA, 19 nt, Artificial Sequence
  Description of Artificial Sequence: Synthetic oligonucleotide
aguaauucaaaacccaaga

SEQ ID NO: 1506100 - RNA, 19 nt, Artificial Sequence
  Description of Artificial Sequence: Synthetic oligonucleotide
ugagaaacauuaauucucc

SEQ ID NO: 1506101 - RNA, 19 nt, Artificial Sequence
  Description of Artificial Sequence: Synthetic oligonucleotide
ugcuaauguaguuuuauug

SEQ ID NO: 1506102 - RNA, 19 nt, Artificial Sequence
  Description of Artificial Sequence: Synthetic oligonucleotide
aagccgagaaaauacaaca

SEQ ID NO: 1506103 - RNA, 19 nt, Artificial Sequence
  Description of Artificial Sequence: Synthetic oligonucleotide
uucaaagccgagaaaauac

SEQ ID NO: 1506104 - RNA, 19 nt, Artificial Sequence
  Description of Artificial Sequence: Synthetic oligonucleotide
aaacauuaauucuccacug

SEQ ID NO: 1506105 - RNA, 19 nt, Artificial Sequence
  Description of Artificial Sequence: Synthetic oligonucleotide
ucguucaggaucaagaccu

SEQ ID NO: 1506106 - RNA, 19 nt, Artificial Sequence
  Description of Artificial Sequence: Synthetic oligonucleotide
aauaaguuuugguugacua

SEQ ID NO: 1506107 - RNA, 19 nt, Artificial Sequence
  Description of Artificial Sequence: Synthetic oligonucleotide
uauuuauugaccacuguuc

SEQ ID NO: 1506108 - RNA, 19 nt, Artificial Sequence
  Description of Artificial Sequence: Synthetic oligonucleotide
uauuaccaaauuuuguuca

SEQ ID NO: 1506109 - RNA, 19 nt, Artificial Sequence
  Description of Artificial Sequence: Synthetic oligonucleotide
auucacuacacgccggucc

SEQ ID NO: 1506110 - RNA, 19 nt, Artificial Sequence
  Description of Artificial Sequence: Synthetic oligonucleotide
uaauguaguuuuauuggag

SEQ ID NO: 1506111 - RNA, 19 nt, Artificial Sequence
  Description of Artificial Sequence: Synthetic oligonucleotide
ugugaaaggaagcaacuac

SEQ ID NO: 1506112 - RNA, 19 nt, Artificial Sequence
  Description of Artificial Sequence: Synthetic oligonucleotide
uucuauacuaguaauucaa

SEQ ID NO: 1506113 - RNA, 19 nt, Artificial Sequence
  Description of Artificial Sequence: Synthetic oligonucleotide
aguauuaucagcaucugug

SEQ ID NO: 1506114 - RNA, 19 nt, Artificial Sequence
  Description of Artificial Sequence: Synthetic oligonucleotide
ugccuuuugaugcaaaaca

SEQ ID NO: 1506115 - RNA, 19 nt, Artificial Sequence
  Description of Artificial Sequence: Synthetic oligonucleotide
gaaaagauggauccuacca

SEQ ID NO: 1506116 - RNA, 19 nt, Artificial Sequence
  Description of Artificial Sequence: Synthetic oligonucleotide
augucaauggguuugaaau

SEQ ID NO: 1506117 - RNA, 19 nt, Artificial Sequence
  Description of Artificial Sequence: Synthetic oligonucleotide
gcuaauguaguuuuauugg

SEQ ID NO: 1506118 - RNA, 19 nt, Artificial Sequence
  Description of Artificial Sequence: Synthetic oligonucleotide
uuuaaaauucgaagacuug

SEQ ID NO: 1506119 - RNA, 19 nt, Artificial Sequence
  Description of Artificial Sequence: Synthetic oligonucleotide
gaaucauaaccuuuuagga

SEQ ID NO: 1506120 - RNA, 19 nt, Artificial Sequence
  Description of Artificial Sequence: Synthetic oligonucleotide
uuaauucuggacaaucuaa

SEQ ID NO: 1506121 - RNA, 19 nt, Artificial Sequence
  Description of Artificial Sequence: Synthetic oligonucleotide
acaauuauugggcuucauc

SEQ ID NO: 1506122 - RNA, 19 nt, Artificial Sequence
  Description of Artificial Sequence: Synthetic oligonucleotide
aaagauggauccuaccagu

SEQ ID NO: 1506123 - RNA, 19 nt, Artificial Sequence
  Description of Artificial Sequence: Synthetic oligonucleotide
ucauuuaugucaauggguu

SEQ ID NO: 1506124 - RNA, 19 nt, Artificial Sequence
  Description of Artificial Sequence: Synthetic oligonucleotide
aauuauucguucaggauca

SEQ ID NO: 1506125 - RNA, 19 nt, Artificial Sequence
  Description of Artificial Sequence: Synthetic oligonucleotide
caauuauucguucaggauc

SEQ ID NO: 1506126 - RNA, 19 nt, Artificial Sequence
  Description of Artificial Sequence: Synthetic oligonucleotide
gauggauccuaccaguaag

SEQ ID NO: 1506127 - RNA, 19 nt, Artificial Sequence
  Description of Artificial Sequence: Synthetic oligonucleotide
agaaagcuuuuauuugccc

SEQ ID NO: 1506128 - RNA, 19 nt, Artificial Sequence
  Description of Artificial Sequence: Synthetic oligonucleotide
augagaaacauuaauucuc

SEQ ID NO: 1506129 - RNA, 19 nt, Artificial Sequence
  Description of Artificial Sequence: Synthetic oligonucleotide
aaagccgagaaaauacaac

SEQ ID NO: 1506130 - RNA, 19 nt, Artificial Sequence
  Description of Artificial Sequence: Synthetic oligonucleotide
auuaauucuccacugcugu

SEQ ID NO: 1506131 - RNA, 19 nt, Artificial Sequence
  Description of Artificial Sequence: Synthetic oligonucleotide
uguucuucaaagccgagaa

SEQ ID NO: 1506132 - RNA, 19 nt, Artificial Sequence
  Description of Artificial Sequence: Synthetic oligonucleotide
uguggcaccaauuauucgu

SEQ ID NO: 1506133 - RNA, 19 nt, Artificial Sequence
  Description of Artificial Sequence: Synthetic oligonucleotide
gcuaucaucagauucacug

SEQ ID NO: 1506134 - RNA, 19 nt, Artificial Sequence
  Description of Artificial Sequence: Synthetic oligonucleotide
gucauuaauuuauauuacc

SEQ ID NO: 1506135 - RNA, 19 nt, Artificial Sequence
  Description of Artificial Sequence: Synthetic oligonucleotide
uuauugaccacuguucacc

SEQ ID NO: 1506136 - RNA, 19 nt, Artificial Sequence
  Description of Artificial Sequence: Synthetic oligonucleotide
uacagaaagcuuuuauuug

SEQ ID NO: 1506137 - RNA, 19 nt, Artificial Sequence
  Description of Artificial Sequence: Synthetic oligonucleotide
aauacaacaugguuaucaa

SEQ ID NO: 1506138 - RNA, 19 nt, Artificial Sequence
  Description of Artificial Sequence: Synthetic oligonucleotide
aaacuauuuauugaccacu

SEQ ID NO: 1506139 - RNA, 19 nt, Artificial Sequence
  Description of Artificial Sequence: Synthetic oligonucleotide
cuucccauucacuacacgc

SEQ ID NO: 1506140 - RNA, 19 nt, Artificial Sequence
  Description of Artificial Sequence: Synthetic oligonucleotide
acuguucaccauuauuuac

SEQ ID NO: 1506141 - RNA, 19 nt, Artificial Sequence
  Description of Artificial Sequence: Synthetic oligonucleotide
gacaagaaugccaagucag

SEQ ID NO: 1506142 - RNA, 19 nt, Artificial Sequence
  Description of Artificial Sequence: Synthetic oligonucleotide
ucaaacauucuauugugaa

SEQ ID NO: 1506143 - RNA, 19 nt, Artificial Sequence
  Description of Artificial Sequence: Synthetic oligonucleotide
uugacuaaugacuguaaga

SEQ ID NO: 1506144 - RNA, 19 nt, Artificial Sequence
  Description of Artificial Sequence: Synthetic oligonucleotide
aaagcuuuuauuugcccaa

SEQ ID NO: 1506145 - RNA, 19 nt, Artificial Sequence
  Description of Artificial Sequence: Synthetic oligonucleotide
ugacuaaugacuguaagau

SEQ ID NO: 1506146 - RNA, 19 nt, Artificial Sequence
  Description of Artificial Sequence: Synthetic oligonucleotide
aaugacaaucugaggacac

SEQ ID NO: 1506147 - RNA, 19 nt, Artificial Sequence
  Description of Artificial Sequence: Synthetic oligonucleotide
agaaugccaagucagccuc

SEQ ID NO: 1506148 - RNA, 19 nt, Artificial Sequence
  Description of Artificial Sequence: Synthetic oligonucleotide
uucucuaccacaaauucuu

SEQ ID NO: 1506149 - RNA, 19 nt, Artificial Sequence
  Description of Artificial Sequence: Synthetic oligonucleotide
aagaaugccaagucagccu

SEQ ID NO: 1506150 - RNA, 19 nt, Artificial Sequence
  Description of Artificial Sequence: Synthetic oligonucleotide
agcauaucaaacucgauuu

SEQ ID NO: 1506151 - RNA, 19 nt, Artificial Sequence
  Description of Artificial Sequence: Synthetic oligonucleotide
ggagauuucaacuuucuac

SEQ ID NO: 1506152 - RNA, 19 nt, Artificial Sequence
  Description of Artificial Sequence: Synthetic oligonucleotide
aauaucccaacuacuauca

SEQ ID NO: 1506153 - RNA, 19 nt, Artificial Sequence
  Description of Artificial Sequence: Synthetic oligonucleotide
acucgauuuucauuagaac

SEQ ID NO: 1506154 - RNA, 19 nt, Artificial Sequence
  Description of Artificial Sequence: Synthetic oligonucleotide
aauuaauucuggacaaucu

SEQ ID NO: 1506155 - RNA, 19 nt, Artificial Sequence
  Description of Artificial Sequence: Synthetic oligonucleotide
uuucuauacuaguaauuca

SEQ ID NO: 1506156 - RNA, 19 nt, Artificial Sequence
  Description of Artificial Sequence: Synthetic oligonucleotide
auauauauaaauauauaua

SEQ ID NO: 1506157 - RNA, 19 nt, Artificial Sequence
  Description of Artificial Sequence: Synthetic oligonucleotide
uuacuuuucuggcucauuc

SEQ ID NO: 1506158 - RNA, 19 nt, Artificial Sequence
  Description of Artificial Sequence: Synthetic oligonucleotide
acaugguuaucaaacauuc

SEQ ID NO: 1506159 - RNA, 19 nt, Artificial Sequence
  Description of Artificial Sequence: Synthetic oligonucleotide
aaaauaaguuuugguugac

SEQ ID NO: 1506160 - RNA, 19 nt, Artificial Sequence
  Description of Artificial Sequence: Synthetic oligonucleotide
auuuaugucaauggguuug

SEQ ID NO: 1506161 - RNA, 19 nt, Artificial Sequence
  Description of Artificial Sequence: Synthetic oligonucleotide
agaaaauacaacaugguua

SEQ ID NO: 1506162 - RNA, 19 nt, Artificial Sequence
  Description of Artificial Sequence: Synthetic oligonucleotide
uucuucaaagccgagaaaa

SEQ ID NO: 1506163 - RNA, 19 nt, Artificial Sequence
  Description of Artificial Sequence: Synthetic oligonucleotide
uguaagaucuccucagcgu

SEQ ID NO: 1506164 - RNA, 19 nt, Artificial Sequence
  Description of Artificial Sequence: Synthetic oligonucleotide
uguaguuuuauuggaggcc

SEQ ID NO: 1506165 - RNA, 19 nt, Artificial Sequence
  Description of Artificial Sequence: Synthetic oligonucleotide
uucauuagaacgcuauuuu

SEQ ID NO: 1506166 - RNA, 19 nt, Artificial Sequence
  Description of Artificial Sequence: Synthetic oligonucleotide
augguuaucaaacauucua

SEQ ID NO: 1506167 - RNA, 19 nt, Artificial Sequence
  Description of Artificial Sequence: Synthetic oligonucleotide
cuugaggaaauacuccacc

SEQ ID NO: 1506168 - RNA, 19 nt, Artificial Sequence
  Description of Artificial Sequence: Synthetic oligonucleotide
ucaaagccgagaaaauaca

SEQ ID NO: 1506169 - RNA, 19 nt, Artificial Sequence
  Description of Artificial Sequence: Synthetic oligonucleotide
aacuacagaaagcuuuuau

SEQ ID NO: 1506170 - RNA, 19 nt, Artificial Sequence
  Description of Artificial Sequence: Synthetic oligonucleotide
ucccauucacuacacgccg

SEQ ID NO: 1506171 - RNA, 19 nt, Artificial Sequence
  Description of Artificial Sequence: Synthetic oligonucleotide
uccucagcguuuaagaaaa

SEQ ID NO: 1506172 - RNA, 19 nt, Artificial Sequence
  Description of Artificial Sequence: Synthetic oligonucleotide
uuuuaggagauuucaacuu

SEQ ID NO: 1506173 - RNA, 19 nt, Artificial Sequence
  Description of Artificial Sequence: Synthetic oligonucleotide
acauuaauucuccacugcu

SEQ ID NO: 1506174 - RNA, 19 nt, Artificial Sequence
  Description of Artificial Sequence: Synthetic oligonucleotide
augacauucugauacuaca

SEQ ID NO: 1506175 - RNA, 19 nt, Artificial Sequence
  Description of Artificial Sequence: Synthetic oligonucleotide
aagcaugcaagucauuaau

SEQ ID NO: 1506176 - RNA, 19 nt, Artificial Sequence
  Description of Artificial Sequence: Synthetic oligonucleotide
gacacuucauauuugccuc

SEQ ID NO: 1506177 - RNA, 19 nt, Artificial Sequence
  Description of Artificial Sequence: Synthetic oligonucleotide
auggguuugaaauugccaa

SEQ ID NO: 1506178 - RNA, 19 nt, Artificial Sequence
  Description of Artificial Sequence: Synthetic oligonucleotide
acuguauuccauuuccaca

SEQ ID NO: 1506179 - RNA, 19 nt, Artificial Sequence
  Description of Artificial Sequence: Synthetic oligonucleotide
aucuaaauuuucuucuggu

SEQ ID NO: 1506180 - RNA, 19 nt, Artificial Sequence
  Description of Artificial Sequence: Synthetic oligonucleotide
aauuauugggcuucaucuu

SEQ ID NO: 1506181 - RNA, 19 nt, Artificial Sequence
  Description of Artificial Sequence: Synthetic oligonucleotide
ugguuaucaaacauucuau

SEQ ID NO: 1506182 - RNA, 19 nt, Artificial Sequence
  Description of Artificial Sequence: Synthetic oligonucleotide
ugguucccaaguauuauca

SEQ ID NO: 1506183 - RNA, 19 nt, Artificial Sequence
  Description of Artificial Sequence: Synthetic oligonucleotide
aaagcaugcaagucauuaa

SEQ ID NO: 1506184 - RNA, 19 nt, Artificial Sequence
  Description of Artificial Sequence: Synthetic oligonucleotide
ucuauacuaguaauucaaa

SEQ ID NO: 1506185 - RNA, 19 nt, Artificial Sequence
  Description of Artificial Sequence: Synthetic oligonucleotide
uaccaguaaggaaugaguc

SEQ ID NO: 1506186 - RNA, 19 nt, Artificial Sequence
  Description of Artificial Sequence: Synthetic oligonucleotide
gauuuuauauauauauaaa

SEQ ID NO: 1506187 - RNA, 19 nt, Artificial Sequence
  Description of Artificial Sequence: Synthetic oligonucleotide
uucuggacaagaaugccaa

SEQ ID NO: 1506188 - RNA, 19 nt, Artificial Sequence
  Description of Artificial Sequence: Synthetic oligonucleotide
guugacuaaugacuguaag

SEQ ID NO: 1506189 - RNA, 19 nt, Artificial Sequence
  Description of Artificial Sequence: Synthetic oligonucleotide
aagaguucaccgcucagau

SEQ ID NO: 1506190 - RNA, 19 nt, Artificial Sequence
  Description of Artificial Sequence: Synthetic oligonucleotide
accaauuauucguucagga

SEQ ID NO: 1506191 - RNA, 19 nt, Artificial Sequence
  Description of Artificial Sequence: Synthetic oligonucleotide
ugaaaagauggauccuacc

SEQ ID NO: 1506192 - RNA, 19 nt, Artificial Sequence
  Description of Artificial Sequence: Synthetic oligonucleotide
auucugauacuacaaaguu

SEQ ID NO: 1506193 - RNA, 19 nt, Artificial Sequence
  Description of Artificial Sequence: Synthetic oligonucleotide
ucuguggcaccaauuauuc

SEQ ID NO: 1506194 - RNA, 19 nt, Artificial Sequence
  Description of Artificial Sequence: Synthetic oligonucleotide
ccgagaaaauacaacaugg

SEQ ID NO: 1506195 - RNA, 19 nt, Artificial Sequence
  Description of Artificial Sequence: Synthetic oligonucleotide
cgaaucauaaccuuuuagg

SEQ ID NO: 1506196 - RNA, 19 nt, Artificial Sequence
  Description of Artificial Sequence: Synthetic oligonucleotide
uucgaagacuugaagaguu

SEQ ID NO: 1506197 - RNA, 19 nt, Artificial Sequence
  Description of Artificial Sequence: Synthetic oligonucleotide
cuguaagaucuccucagcg

SEQ ID NO: 1506198 - RNA, 19 nt, Artificial Sequence
  Description of Artificial Sequence: Synthetic oligonucleotide
gacuugaagaguucaccgc

SEQ ID NO: 1506199 - RNA, 19 nt, Artificial Sequence
  Description of Artificial Sequence: Synthetic oligonucleotide
cauuaauucuccacugcug

SEQ ID NO: 1506200 - RNA, 19 nt, Artificial Sequence
  Description of Artificial Sequence: Synthetic oligonucleotide
guuuugguugacuaaugac

SEQ ID NO: 1506201 - RNA, 19 nt, Artificial Sequence
  Description of Artificial Sequence: Synthetic oligonucleotide
aaccuuuuaggagauuuca

SEQ ID NO: 1506202 - RNA, 19 nt, Artificial Sequence
  Description of Artificial Sequence: Synthetic oligonucleotide
acuacagaaagcuuuuauu

SEQ ID NO: 1506203 - RNA, 19 nt, Artificial Sequence
  Description of Artificial Sequence: Synthetic oligonucleotide
ucauucauugaaccagaac

SEQ ID NO: 1506204 - RNA, 19 nt, Artificial Sequence
  Description of Artificial Sequence: Synthetic oligonucleotide
uucuuuaacuguauuccau

SEQ ID NO: 1506205 - RNA, 19 nt, Artificial Sequence
  Description of Artificial Sequence: Synthetic oligonucleotide
aguuuugguugacuaauga

SEQ ID NO: 1506206 - RNA, 19 nt, Artificial Sequence
  Description of Artificial Sequence: Synthetic oligonucleotide
aacuauuuauugaccacug

SEQ ID NO: 1506207 - RNA, 19 nt, Artificial Sequence
  Description of Artificial Sequence: Synthetic oligonucleotide
gauacuacaaaguuacuuu

SEQ ID NO: 1506208 - RNA, 19 nt, Artificial Sequence
  Description of Artificial Sequence: Synthetic oligonucleotide
ugacauucugauacuacaa

SEQ ID NO: 1506209 - RNA, 19 nt, Artificial Sequence
  Description of Artificial Sequence: Synthetic oligonucleotide
cagcguuuaagaaaagcug

SEQ ID NO: 1506210 - RNA, 19 nt, Artificial Sequence
  Description of Artificial Sequence: Synthetic oligonucleotide
ucagccucuccucauaaaa

SEQ ID NO: 1506211 - RNA, 19 nt, Artificial Sequence
  Description of Artificial Sequence: Synthetic oligonucleotide
aguaaauauacaguuggau

SEQ ID NO: 1506212 - RNA, 19 nt, Artificial Sequence
  Description of Artificial Sequence: Synthetic oligonucleotide
ucuucgauuugcuaucauc

SEQ ID NO: 1506213 - RNA, 19 nt, Artificial Sequence
  Description of Artificial Sequence: Synthetic oligonucleotide
aaccaaauacugaaaagau

SEQ ID NO: 1506214 - RNA, 19 nt, Artificial Sequence
  Description of Artificial Sequence: Synthetic oligonucleotide
acaacaugguuaucaaaca

SEQ ID NO: 1506215 - RNA, 19 nt, Artificial Sequence
  Description of Artificial Sequence: Synthetic oligonucleotide
uuucaacuuucuacaaaga

SEQ ID NO: 1506216 - RNA, 19 nt, Artificial Sequence
  Description of Artificial Sequence: Synthetic oligonucleotide
ucuggcaaaaccccuuggu

SEQ ID NO: 1506217 - RNA, 19 nt, Artificial Sequence
  Description of Artificial Sequence: Synthetic oligonucleotide
aaacucgauuuucauuaga

SEQ ID NO: 1506218 - RNA, 19 nt, Artificial Sequence
  Description of Artificial Sequence: Synthetic oligonucleotide
ucugugaaccccuuccacu

SEQ ID NO: 1506219 - RNA, 19 nt, Artificial Sequence
  Description of Artificial Sequence: Synthetic oligonucleotide
ugauacuacaaaguuacuu

SEQ ID NO: 1506220 - RNA, 19 nt, Artificial Sequence
  Description of Artificial Sequence: Synthetic oligonucleotide
cuggcucauucauugaacc

SEQ ID NO: 1506221 - RNA, 19 nt, Artificial Sequence
  Description of Artificial Sequence: Synthetic oligonucleotide
uuucauuagaacgcuauuu

SEQ ID NO: 1506222 - RNA, 19 nt, Artificial Sequence
  Description of Artificial Sequence: Synthetic oligonucleotide
cuaauguaguuuuauugga

SEQ ID NO: 1506223 - RNA, 19 nt, Artificial Sequence
  Description of Artificial Sequence: Synthetic oligonucleotide
cagaaagcuuuuauuugcc

SEQ ID NO: 1506224 - RNA, 19 nt, Artificial Sequence
  Description of Artificial Sequence: Synthetic oligonucleotide
caauuauugggcuucaucu

SEQ ID NO: 1506225 - RNA, 19 nt, Artificial Sequence
  Description of Artificial Sequence: Synthetic oligonucleotide
aaauaaguuuugguugacu

SEQ ID NO: 1506226 - RNA, 19 nt, Artificial Sequence
  Description of Artificial Sequence: Synthetic oligonucleotide
aaccagcauaucaaacucg

SEQ ID NO: 1506227 - RNA, 19 nt, Artificial Sequence
  Description of Artificial Sequence: Synthetic oligonucleotide
auaaguuuugguugacuaa

SEQ ID NO: 1506228 - RNA, 19 nt, Artificial Sequence
  Description of Artificial Sequence: Synthetic oligonucleotide
ucuuuaacuguauuccauu

SEQ ID NO: 1506229 - RNA, 19 nt, Artificial Sequence
  Description of Artificial Sequence: Synthetic oligonucleotide
gaaauugccaacaucuucu

SEQ ID NO: 1506230 - RNA, 19 nt, Artificial Sequence
  Description of Artificial Sequence: Synthetic oligonucleotide
aacucgauuuucauuagaa

SEQ ID NO: 1506231 - RNA, 19 nt, Artificial Sequence
  Description of Artificial Sequence: Synthetic oligonucleotide
aaucagucagugccuuuug

SEQ ID NO: 1506232 - RNA, 19 nt, Artificial Sequence
  Description of Artificial Sequence: Synthetic oligonucleotide
uugcccaaaggaaucaguc

SEQ ID NO: 1506233 - RNA, 19 nt, Artificial Sequence
  Description of Artificial Sequence: Synthetic oligonucleotide
uacaguuggaugacauucu

SEQ ID NO: 1506234 - RNA, 19 nt, Artificial Sequence
  Description of Artificial Sequence: Synthetic oligonucleotide
acagauaguccacgaauca

SEQ ID NO: 1506235 - RNA, 19 nt, Artificial Sequence
  Description of Artificial Sequence: Synthetic oligonucleotide
auauauaaauauauauaaa

SEQ ID NO: 1506236 - RNA, 19 nt, Artificial Sequence
  Description of Artificial Sequence: Synthetic oligonucleotide
ucuggcucauucauugaac

SEQ ID NO: 1506237 - RNA, 19 nt, Artificial Sequence
  Description of Artificial Sequence: Synthetic oligonucleotide
uauuugccuccuuugccag

SEQ ID NO: 1506238 - RNA, 19 nt, Artificial Sequence
  Description of Artificial Sequence: Synthetic oligonucleotide
ucuucugguucccaaguau

SEQ ID NO: 1506239 - RNA, 19 nt, Artificial Sequence
  Description of Artificial Sequence: Synthetic oligonucleotide
caagaaugccaagucagcc

SEQ ID NO: 1506240 - RNA, 19 nt, Artificial Sequence
  Description of Artificial Sequence: Synthetic oligonucleotide
uguucaccauuauuuacaa

SEQ ID NO: 1506241 - RNA, 19 nt, Artificial Sequence
  Description of Artificial Sequence: Synthetic oligonucleotide
uaucccaacuacuaucaau

SEQ ID NO: 1506242 - RNA, 19 nt, Artificial Sequence
  Description of Artificial Sequence: Synthetic oligonucleotide
guauuaucagcaucuguga

SEQ ID NO: 1506243 - RNA, 19 nt, Artificial Sequence
  Description of Artificial Sequence: Synthetic oligonucleotide
uuugcccaaaggaaucagu

SEQ ID NO: 1506244 - RNA, 19 nt, Artificial Sequence
  Description of Artificial Sequence: Synthetic oligonucleotide
agcguuuaagaaaagcugu

SEQ ID NO: 1506245 - RNA, 19 nt, Artificial Sequence
  Description of Artificial Sequence: Synthetic oligonucleotide
cuguucaccauuauuuaca

SEQ ID NO: 1506246 - RNA, 19 nt, Artificial Sequence
  Description of Artificial Sequence: Synthetic oligonucleotide
auauauauauaaauauaua

SEQ ID NO: 1506247 - RNA, 19 nt, Artificial Sequence
  Description of Artificial Sequence: Synthetic oligonucleotide
uucaccgcucagaugcucc

SEQ ID NO: 1506248 - RNA, 19 nt, Artificial Sequence
  Description of Artificial Sequence: Synthetic oligonucleotide
gauccuaccaguaaggaau

SEQ ID NO: 1506249 - RNA, 19 nt, Artificial Sequence
  Description of Artificial Sequence: Synthetic oligonucleotide
gaugacauucugauacuac

SEQ ID NO: 1506250 - RNA, 19 nt, Artificial Sequence
  Description of Artificial Sequence: Synthetic oligonucleotide
acuuucaaaaccagcauau

SEQ ID NO: 1506251 - RNA, 19 nt, Artificial Sequence
  Description of Artificial Sequence: Synthetic oligonucleotide
auaguccacgaaucauaac

SEQ ID NO: 1506252 - RNA, 19 nt, Artificial Sequence
  Description of Artificial Sequence: Synthetic oligonucleotide
ucuuuugcuaauguaguuu

SEQ ID NO: 1506253 - RNA, 19 nt, Artificial Sequence
  Description of Artificial Sequence: Synthetic oligonucleotide
aaguaaauauacaguugga

SEQ ID NO: 1506254 - RNA, 19 nt, Artificial Sequence
  Description of Artificial Sequence: Synthetic oligonucleotide
auuuucauuagaacgcuau

SEQ ID NO: 1506255 - RNA, 19 nt, Artificial Sequence
  Description of Artificial Sequence: Synthetic oligonucleotide
agcaaacagauaguccacg

SEQ ID NO: 1506256 - RNA, 19 nt, Artificial Sequence
  Description of Artificial Sequence: Synthetic oligonucleotide
agagucucccggcugcgcg

SEQ ID NO: 1506257 - RNA, 19 nt, Artificial Sequence
  Description of Artificial Sequence: Synthetic oligonucleotide
uccucauaaaaggcaauga

SEQ ID NO: 1506258 - RNA, 19 nt, Artificial Sequence
  Description of Artificial Sequence: Synthetic oligonucleotide
uuuaugucaauggguuuga

SEQ ID NO: 1506259 - RNA, 19 nt, Artificial Sequence
  Description of Artificial Sequence: Synthetic oligonucleotide
auaucaaacucgauuuuca

SEQ ID NO: 1506260 - RNA, 19 nt, Artificial Sequence
  Description of Artificial Sequence: Synthetic oligonucleotide
acuauuuauugaccacugu

SEQ ID NO: 1506261 - RNA, 19 nt, Artificial Sequence
  Description of Artificial Sequence: Synthetic oligonucleotide
gacuaaugacuguaagauc

SEQ ID NO: 1506262 - RNA, 19 nt, Artificial Sequence
  Description of Artificial Sequence: Synthetic oligonucleotide
uggcaaaaccccuugguuu

SEQ ID NO: 1506263 - RNA, 19 nt, Artificial Sequence
  Description of Artificial Sequence: Synthetic oligonucleotide
aaguuacuuuucuggcuca

SEQ ID NO: 1506264 - RNA, 19 nt, Artificial Sequence
  Description of Artificial Sequence: Synthetic oligonucleotide
guuugaaauugccaacauc

SEQ ID NO: 1506265 - RNA, 19 nt, Artificial Sequence
  Description of Artificial Sequence: Synthetic oligonucleotide
ugcccaaaggaaucaguca

SEQ ID NO: 1506266 - RNA, 19 nt, Artificial Sequence
  Description of Artificial Sequence: Synthetic oligonucleotide
uccuuucugugucucaguc

SEQ ID NO: 1506267 - RNA, 19 nt, Artificial Sequence
  Description of Artificial Sequence: Synthetic oligonucleotide
cucagcguuuaagaaaagc

SEQ ID NO: 1506268 - RNA, 19 nt, Artificial Sequence
  Description of Artificial Sequence: Synthetic oligonucleotide
aaugguccuuucugugucu

SEQ ID NO: 1506269 - RNA, 19 nt, Artificial Sequence
  Description of Artificial Sequence: Synthetic oligonucleotide
uggguuugaaauugccaac

SEQ ID NO: 1506270 - RNA, 19 nt, Artificial Sequence
  Description of Artificial Sequence: Synthetic oligonucleotide
uccacgaaucauaaccuuu

SEQ ID NO: 1506271 - RNA, 19 nt, Artificial Sequence
  Description of Artificial Sequence: Synthetic oligonucleotide
uuauucguucaggaucaag

SEQ ID NO: 1506272 - RNA, 19 nt, Artificial Sequence
  Description of Artificial Sequence: Synthetic oligonucleotide
auugugaaaggaagcaacu

SEQ ID NO: 1506273 - RNA, 19 nt, Artificial Sequence
  Description of Artificial Sequence: Synthetic oligonucleotide
ucugaggacacuucauauu

SEQ ID NO: 1506274 - RNA, 19 nt, Artificial Sequence
  Description of Artificial Sequence: Synthetic oligonucleotide
ucauaaccuuuuaggagau

SEQ ID NO: 1506275 - RNA, 19 nt, Artificial Sequence
  Description of Artificial Sequence: Synthetic oligonucleotide
agcaacuacagaaagcuuu

SEQ ID NO: 1506276 - RNA, 19 nt, Artificial Sequence
  Description of Artificial Sequence: Synthetic oligonucleotide
augcaagucauuaauuuau

SEQ ID NO: 1506277 - RNA, 19 nt, Artificial Sequence
  Description of Artificial Sequence: Synthetic oligonucleotide
caaacucgauuuucauuag

SEQ ID NO: 1506278 - RNA, 19 nt, Artificial Sequence
  Description of Artificial Sequence: Synthetic oligonucleotide
aaauugccaacaucuucuu

SEQ ID NO: 1506279 - RNA, 19 nt, Artificial Sequence
  Description of Artificial Sequence: Synthetic oligonucleotide
ugcaagucauuaauuuaua

SEQ ID NO: 1506280 - RNA, 19 nt, Artificial Sequence
  Description of Artificial Sequence: Synthetic oligonucleotide
uugaaauugccaacaucuu

SEQ ID NO: 1506281 - RNA, 19 nt, Artificial Sequence
  Description of Artificial Sequence: Synthetic oligonucleotide
aaguuuugguugacuaaug

SEQ ID NO: 1506282 - RNA, 19 nt, Artificial Sequence
  Description of Artificial Sequence: Synthetic oligonucleotide
uuaauucuccacugcuguc

SEQ ID NO: 1506283 - RNA, 19 nt, Artificial Sequence
  Description of Artificial Sequence: Synthetic oligonucleotide
uacacgccgguccagcacu

SEQ ID NO: 1506284 - RNA, 19 nt, Artificial Sequence
  Description of Artificial Sequence: Synthetic oligonucleotide
gaagacuugaagaguucac

SEQ ID NO: 1506285 - RNA, 19 nt, Artificial Sequence
  Description of Artificial Sequence: Synthetic oligonucleotide
auggauccuaccaguaagg

SEQ ID NO: 1506286 - RNA, 19 nt, Artificial Sequence
  Description of Artificial Sequence: Synthetic oligonucleotide
ggcucauucauugaaccag

SEQ ID NO: 1506287 - RNA, 19 nt, Artificial Sequence
  Description of Artificial Sequence: Synthetic oligonucleotide
uggcucauucauugaacca

SEQ ID NO: 1506288 - RNA, 19 nt, Artificial Sequence
  Description of Artificial Sequence: Synthetic oligonucleotide
gaaccccuuccacuugagg

SEQ ID NO: 1506289 - RNA, 19 nt, Artificial Sequence
  Description of Artificial Sequence: Synthetic oligonucleotide
uauacaguuggaugacauu

SEQ ID NO: 1506290 - RNA, 19 nt, Artificial Sequence
  Description of Artificial Sequence: Synthetic oligonucleotide
gccgagaaaauacaacaug

SEQ ID NO: 1506291 - RNA, 19 nt, Artificial Sequence
  Description of Artificial Sequence: Synthetic oligonucleotide
cagaaccaaauacugaaaa

SEQ ID NO: 1506292 - RNA, 19 nt, Artificial Sequence
  Description of Artificial Sequence: Synthetic oligonucleotide
aauugccaacaucuucuuu

SEQ ID NO: 1506293 - RNA, 19 nt, Artificial Sequence
  Description of Artificial Sequence: Synthetic oligonucleotide
caguaaggaaugagucagg

SEQ ID NO: 1506294 - RNA, 19 nt, Artificial Sequence
  Description of Artificial Sequence: Synthetic oligonucleotide
caaacauucuauugugaaa

SEQ ID NO: 1506295 - RNA, 19 nt, Artificial Sequence
  Description of Artificial Sequence: Synthetic oligonucleotide
gauaguccacgaaucauaa

SEQ ID NO: 1506296 - RNA, 19 nt, Artificial Sequence
  Description of Artificial Sequence: Synthetic oligonucleotide
ccaguaaggaaugagucag

SEQ ID NO: 1506297 - RNA, 19 nt, Artificial Sequence
  Description of Artificial Sequence: Synthetic oligonucleotide
uuucccaucuuuugcuaau

SEQ ID NO: 1506298 - RNA, 19 nt, Artificial Sequence
  Description of Artificial Sequence: Synthetic oligonucleotide
ugugaaccccuuccacuug

SEQ ID NO: 1506299 - RNA, 19 nt, Artificial Sequence
  Description of Artificial Sequence: Synthetic oligonucleotide
cuugaagaguucaccgcuc

SEQ ID NO: 1506300 - RNA, 19 nt, Artificial Sequence
  Description of Artificial Sequence: Synthetic oligonucleotide
uggaugacauucugauacu

SEQ ID NO: 1506301 - RNA, 19 nt, Artificial Sequence
  Description of Artificial Sequence: Synthetic oligonucleotide
cagauuuuauauauauaua

SEQ ID NO: 1506302 - RNA, 19 nt, Artificial Sequence
  Description of Artificial Sequence: Synthetic oligonucleotide
aucccaacuacuaucaaua

SEQ ID NO: 1506303 - RNA, 19 nt, Artificial Sequence
  Description of Artificial Sequence: Synthetic oligonucleotide
aaggaaugagucaggguaa

SEQ ID NO: 1506304 - RNA, 19 nt, Artificial Sequence
  Description of Artificial Sequence: Synthetic oligonucleotide
caccaauuauucguucagg

SEQ ID NO: 1506305 - RNA, 19 nt, Artificial Sequence
  Description of Artificial Sequence: Synthetic oligonucleotide
auugaaccagaaccaaaua

SEQ ID NO: 1506306 - RNA, 19 nt, Artificial Sequence
  Description of Artificial Sequence: Synthetic oligonucleotide
cugguucccaaguauuauc

SEQ ID NO: 1506307 - RNA, 19 nt, Artificial Sequence
  Description of Artificial Sequence: Synthetic oligonucleotide
auucgaagacuugaagagu

SEQ ID NO: 1506308 - RNA, 19 nt, Artificial Sequence
  Description of Artificial Sequence: Synthetic oligonucleotide
ugucuguggcaccaauuau

SEQ ID NO: 1506309 - RNA, 19 nt, Artificial Sequence
  Description of Artificial Sequence: Synthetic oligonucleotide
agauggauccuaccaguaa

SEQ ID NO: 1506310 - RNA, 19 nt, Artificial Sequence
  Description of Artificial Sequence: Synthetic oligonucleotide
guauuccauuuccacagca

SEQ ID NO: 1506311 - RNA, 19 nt, Artificial Sequence
  Description of Artificial Sequence: Synthetic oligonucleotide
agugccuuuugaugcaaaa

SEQ ID NO: 1506312 - RNA, 19 nt, Artificial Sequence
  Description of Artificial Sequence: Synthetic oligonucleotide
ucccaacuacuaucaauac

SEQ ID NO: 1506313 - RNA, 19 nt, Artificial Sequence
  Description of Artificial Sequence: Synthetic oligonucleotide
ccucauaaaaggcaaugac

SEQ ID NO: 1506314 - RNA, 19 nt, Artificial Sequence
  Description of Artificial Sequence: Synthetic oligonucleotide
ugguugacuaaugacugua

SEQ ID NO: 1506315 - RNA, 19 nt, Artificial Sequence
  Description of Artificial Sequence: Synthetic oligonucleotide
caggaucaagaccucuggc

SEQ ID NO: 1506316 - RNA, 19 nt, Artificial Sequence
  Description of Artificial Sequence: Synthetic oligonucleotide
ucaauuaauucuggacaau

SEQ ID NO: 1506317 - RNA, 19 nt, Artificial Sequence
  Description of Artificial Sequence: Synthetic oligonucleotide
ucgaagacuugaagaguuc

SEQ ID NO: 1506318 - RNA, 19 nt, Artificial Sequence
  Description of Artificial Sequence: Synthetic oligonucleotide
aguccacgaaucauaaccu

SEQ ID NO: 1506319 - RNA, 19 nt, Artificial Sequence
  Description of Artificial Sequence: Synthetic oligonucleotide
ugaaccccuuccacuugag

SEQ ID NO: 1506320 - RNA, 19 nt, Artificial Sequence
  Description of Artificial Sequence: Synthetic oligonucleotide
accagcauaucaaacucga

SEQ ID NO: 1506321 - RNA, 19 nt, Artificial Sequence
  Description of Artificial Sequence: Synthetic oligonucleotide
uggauccuaccaguaagga

SEQ ID NO: 1506322 - RNA, 19 nt, Artificial Sequence
  Description of Artificial Sequence: Synthetic oligonucleotide
cauugaaccagaaccaaau

SEQ ID NO: 1506323 - RNA, 19 nt, Artificial Sequence
  Description of Artificial Sequence: Synthetic oligonucleotide
aaacccagaaugguccuuu

SEQ ID NO: 1506324 - RNA, 19 nt, Artificial Sequence
  Description of Artificial Sequence: Synthetic oligonucleotide
uugugaaaggaagcaacua

SEQ ID NO: 1506325 - RNA, 19 nt, Artificial Sequence
  Description of Artificial Sequence: Synthetic oligonucleotide
ucugguucccaaguauuau

SEQ ID NO: 1506326 - RNA, 19 nt, Artificial Sequence
  Description of Artificial Sequence: Synthetic oligonucleotide
ggaagcaacuacagaaagc

SEQ ID NO: 1506327 - RNA, 19 nt, Artificial Sequence
  Description of Artificial Sequence: Synthetic oligonucleotide
gcaccaauuauucguucag

SEQ ID NO: 1506328 - RNA, 19 nt, Artificial Sequence
  Description of Artificial Sequence: Synthetic oligonucleotide
ugaccacuguucaccauua

SEQ ID NO: 1506329 - RNA, 19 nt, Artificial Sequence
  Description of Artificial Sequence: Synthetic oligonucleotide
cuauuuauugaccacuguu

SEQ ID NO: 1506330 - RNA, 19 nt, Artificial Sequence
  Description of Artificial Sequence: Synthetic oligonucleotide
caaagccgagaaaauacaa

SEQ ID NO: 1506331 - RNA, 19 nt, Artificial Sequence
  Description of Artificial Sequence: Synthetic oligonucleotide
agaguucaccgcucagaug

SEQ ID NO: 1506332 - RNA, 19 nt, Artificial Sequence
  Description of Artificial Sequence: Synthetic oligonucleotide
ucuccucauaaaaggcaau

SEQ ID NO: 1506333 - RNA, 19 nt, Artificial Sequence
  Description of Artificial Sequence: Synthetic oligonucleotide
agauaguccacgaaucaua

SEQ ID NO: 1506334 - RNA, 19 nt, Artificial Sequence
  Description of Artificial Sequence: Synthetic oligonucleotide
cuaccaguaaggaaugagu

SEQ ID NO: 1506335 - RNA, 19 nt, Artificial Sequence
  Description of Artificial Sequence: Synthetic oligonucleotide
caaguauuaucagcaucug

SEQ ID NO: 1506336 - RNA, 19 nt, Artificial Sequence
  Description of Artificial Sequence: Synthetic oligonucleotide
caaaacccaagauucagau

SEQ ID NO: 1506337 - RNA, 19 nt, Artificial Sequence
  Description of Artificial Sequence: Synthetic oligonucleotide
gaucaagaccucuggcaaa

SEQ ID NO: 1506338 - RNA, 19 nt, Artificial Sequence
  Description of Artificial Sequence: Synthetic oligonucleotide
uucccaucuuuugcuaaug

SEQ ID NO: 1506339 - RNA, 19 nt, Artificial Sequence
  Description of Artificial Sequence: Synthetic oligonucleotide
cacugucagauaaagauuu

SEQ ID NO: 1506340 - RNA, 19 nt, Artificial Sequence
  Description of Artificial Sequence: Synthetic oligonucleotide
aucaagaccucuggcaaaa

SEQ ID NO: 1506341 - RNA, 19 nt, Artificial Sequence
  Description of Artificial Sequence: Synthetic oligonucleotide
ccaaguauuaucagcaucu

SEQ ID NO: 1506342 - RNA, 19 nt, Artificial Sequence
  Description of Artificial Sequence: Synthetic oligonucleotide
cuaucaucagauucacugu

SEQ ID NO: 1506343 - RNA, 19 nt, Artificial Sequence
  Description of Artificial Sequence: Synthetic oligonucleotide
ccaacuacuaucaauacuu

SEQ ID NO: 1506344 - RNA, 19 nt, Artificial Sequence
  Description of Artificial Sequence: Synthetic oligonucleotide
ucccaaguauuaucagcau

SEQ ID NO: 1506345 - RNA, 19 nt, Artificial Sequence
  Description of Artificial Sequence: Synthetic oligonucleotide
aagauggauccuaccagua

SEQ ID NO: 1506346 - RNA, 19 nt, Artificial Sequence
  Description of Artificial Sequence: Synthetic oligonucleotide
aagcuuuuauuugcccaaa

SEQ ID NO: 1506347 - RNA, 19 nt, Artificial Sequence
  Description of Artificial Sequence: Synthetic oligonucleotide
acuacacgccgguccagca

SEQ ID NO: 1506348 - RNA, 19 nt, Artificial Sequence
  Description of Artificial Sequence: Synthetic oligonucleotide
guaagaucuccucagcguu

SEQ ID NO: 1506349 - RNA, 19 nt, Artificial Sequence
  Description of Artificial Sequence: Synthetic oligonucleotide
agucagccucuccucauaa

SEQ ID NO: 1506350 - RNA, 19 nt, Artificial Sequence
  Description of Artificial Sequence: Synthetic oligonucleotide
uucuucgauuugcuaucau

SEQ ID NO: 1506351 - RNA, 19 nt, Artificial Sequence
  Description of Artificial Sequence: Synthetic oligonucleotide
accccuugguuugucagca

SEQ ID NO: 1506352 - RNA, 19 nt, Artificial Sequence
  Description of Artificial Sequence: Synthetic oligonucleotide
gcaaacagauaguccacga

SEQ ID NO: 1506353 - RNA, 19 nt, Artificial Sequence
  Description of Artificial Sequence: Synthetic oligonucleotide
gagucucccggcugcgcgc

SEQ ID NO: 1506354 - RNA, 19 nt, Artificial Sequence
  Description of Artificial Sequence: Synthetic oligonucleotide
ccuaccaguaaggaaugag

SEQ ID NO: 1506355 - RNA, 19 nt, Artificial Sequence
  Description of Artificial Sequence: Synthetic oligonucleotide
aguuuuauuggaggccauu

SEQ ID NO: 1506356 - RNA, 19 nt, Artificial Sequence
  Description of Artificial Sequence: Synthetic oligonucleotide
cuacacgccgguccagcac

SEQ ID NO: 1506357 - RNA, 19 nt, Artificial Sequence
  Description of Artificial Sequence: Synthetic oligonucleotide
gugaaccccuuccacuuga

SEQ ID NO: 1506358 - RNA, 19 nt, Artificial Sequence
  Description of Artificial Sequence: Synthetic oligonucleotide
ggguuugaaauugccaaca

SEQ ID NO: 1506359 - RNA, 19 nt, Artificial Sequence
  Description of Artificial Sequence: Synthetic oligonucleotide
cagcauaucaaacucgauu

SEQ ID NO: 1506360 - RNA, 19 nt, Artificial Sequence
  Description of Artificial Sequence: Synthetic oligonucleotide
guaaggaaugagucagggu

SEQ ID NO: 1506361 - RNA, 19 nt, Artificial Sequence
  Description of Artificial Sequence: Synthetic oligonucleotide
agccgagaaaauacaacau

SEQ ID NO: 1506362 - RNA, 19 nt, Artificial Sequence
  Description of Artificial Sequence: Synthetic oligonucleotide
uggcaccaauuauucguuc

SEQ ID NO: 1506363 - RNA, 19 nt, Artificial Sequence
  Description of Artificial Sequence: Synthetic oligonucleotide
ggauccugcagagucuccc

SEQ ID NO: 1506364 - RNA, 19 nt, Artificial Sequence
  Description of Artificial Sequence: Synthetic oligonucleotide
ugccucaucugaguccuuc

SEQ ID NO: 1506365 - RNA, 19 nt, Artificial Sequence
  Description of Artificial Sequence: Synthetic oligonucleotide
caucugugaaccccuucca

SEQ ID NO: 1506366 - RNA, 19 nt, Artificial Sequence
  Description of Artificial Sequence: Synthetic oligonucleotide
auccuaccaguaaggaaug

SEQ ID NO: 1506367 - RNA, 19 nt, Artificial Sequence
  Description of Artificial Sequence: Synthetic oligonucleotide
agcaugcaagucauuaauu

SEQ ID NO: 1506368 - RNA, 19 nt, Artificial Sequence
  Description of Artificial Sequence: Synthetic oligonucleotide
ugcugucuguggcaccaau

SEQ ID NO: 1506369 - RNA, 19 nt, Artificial Sequence
  Description of Artificial Sequence: Synthetic oligonucleotide
ggauccuaccaguaaggaa

SEQ ID NO: 1506370 - RNA, 19 nt, Artificial Sequence
  Description of Artificial Sequence: Synthetic oligonucleotide
gcucagaugcuccgggcgc

SEQ ID NO: 1506371 - RNA, 19 nt, Artificial Sequence
  Description of Artificial Sequence: Synthetic oligonucleotide
cacuacacgccgguccagc

SEQ ID NO: 1506372 - RNA, 19 nt, Artificial Sequence
  Description of Artificial Sequence: Synthetic oligonucleotide
aagcaacuacagaaagcuu

SEQ ID NO: 1506373 - RNA, 19 nt, Artificial Sequence
  Description of Artificial Sequence: Synthetic oligonucleotide
cuggacaagaaugccaagu

SEQ ID NO: 1506374 - RNA, 19 nt, Artificial Sequence
  Description of Artificial Sequence: Synthetic oligonucleotide
gguuaucaaacauucuauu

SEQ ID NO: 1506375 - RNA, 19 nt, Artificial Sequence
  Description of Artificial Sequence: Synthetic oligonucleotide
caugguuaucaaacauucu

SEQ ID NO: 1506376 - RNA, 19 nt, Artificial Sequence
  Description of Artificial Sequence: Synthetic oligonucleotide
gaugcuccgggcgcggauc

SEQ ID NO: 1506377 - RNA, 19 nt, Artificial Sequence
  Description of Artificial Sequence: Synthetic oligonucleotide
aguuacuuuucuggcucau

SEQ ID NO: 1506378 - RNA, 19 nt, Artificial Sequence
  Description of Artificial Sequence: Synthetic oligonucleotide
ucaagaccucuggcaaaac

SEQ ID NO: 1506379 - RNA, 19 nt, Artificial Sequence
  Description of Artificial Sequence: Synthetic oligonucleotide
aacccaagauucagauuuu

SEQ ID NO: 1506380 - RNA, 19 nt, Artificial Sequence
  Description of Artificial Sequence: Synthetic oligonucleotide
ucacuacacgccgguccag

SEQ ID NO: 1506381 - RNA, 19 nt, Artificial Sequence
  Description of Artificial Sequence: Synthetic oligonucleotide
gguccagcacuuucucuac

SEQ ID NO: 1506382 - RNA, 19 nt, Artificial Sequence
  Description of Artificial Sequence: Synthetic oligonucleotide
cuucuucgauuugcuauca

SEQ ID NO: 1506383 - RNA, 19 nt, Artificial Sequence
  Description of Artificial Sequence: Synthetic oligonucleotide
gcgcggauccugcagaguc

SEQ ID NO: 1506384 - RNA, 19 nt, Artificial Sequence
  Description of Artificial Sequence: Synthetic oligonucleotide
gauuugcuaucaucagauu

SEQ ID NO: 1506385 - RNA, 19 nt, Artificial Sequence
  Description of Artificial Sequence: Synthetic oligonucleotide
ggacaaucuaaauuuucuu

SEQ ID NO: 1506386 - RNA, 19 nt, Artificial Sequence
  Description of Artificial Sequence: Synthetic oligonucleotide
cuucugguucccaaguauu

SEQ ID NO: 1506387 - RNA, 19 nt, Artificial Sequence
  Description of Artificial Sequence: Synthetic oligonucleotide
cguuuaagaaaagcuguuc

SEQ ID NO: 1506388 - RNA, 19 nt, Artificial Sequence
  Description of Artificial Sequence: Synthetic oligonucleotide
agaugcuccgggcgcggau

SEQ ID NO: 1506389 - RNA, 19 nt, Artificial Sequence
  Description of Artificial Sequence: Synthetic oligonucleotide
caaaaccccuugguuuguc

SEQ ID NO: 1506390 - RNA, 19 nt, Artificial Sequence
  Description of Artificial Sequence: Synthetic oligonucleotide
cauuuaugucaauggguuu

SEQ ID NO: 1506391 - RNA, 19 nt, Artificial Sequence
  Description of Artificial Sequence: Synthetic oligonucleotide
gccaagucagccucuccuc

SEQ ID NO: 1506392 - RNA, 19 nt, Artificial Sequence
  Description of Artificial Sequence: Synthetic oligonucleotide
gucuguggcaccaauuauu

SEQ ID NO: 1506393 - RNA, 19 nt, Artificial Sequence
  Description of Artificial Sequence: Synthetic oligonucleotide
cugugaaccccuuccacuu

SEQ ID NO: 1506394 - RNA, 19 nt, Artificial Sequence
  Description of Artificial Sequence: Synthetic oligonucleotide
caccgcucagaugcuccgg

SEQ ID NO: 1506395 - RNA, 19 nt, Artificial Sequence
  Description of Artificial Sequence: Synthetic oligonucleotide
auuauucguucaggaucaa

SEQ ID NO: 1506396 - RNA, 19 nt, Artificial Sequence
  Description of Artificial Sequence: Synthetic oligonucleotide
gguugacuaaugacuguaa

SEQ ID NO: 1506397 - RNA, 19 nt, Artificial Sequence
  Description of Artificial Sequence: Synthetic oligonucleotide
cuuuucuggcucauucauu

SEQ ID NO: 1506398 - RNA, 19 nt, Artificial Sequence
  Description of Artificial Sequence: Synthetic oligonucleotide
cuggcaaaaccccuugguu

SEQ ID NO: 1506399 - RNA, 19 nt, Artificial Sequence
  Description of Artificial Sequence: Synthetic oligonucleotide
gguuugaaauugccaacau

SEQ ID NO: 1506400 - RNA, 19 nt, Artificial Sequence
  Description of Artificial Sequence: Synthetic oligonucleotide
guucaccgcucagaugcuc

SEQ ID NO: 1506401 - RNA, 19 nt, Artificial Sequence
  Description of Artificial Sequence: Synthetic oligonucleotide
aguucaccgcucagaugcu

SEQ ID NO: 1506402 - RNA, 19 nt, Artificial Sequence
  Description of Artificial Sequence: Synthetic oligonucleotide
cugauacuacaaaguuacu

SEQ ID NO: 1506403 - RNA, 19 nt, Artificial Sequence
  Description of Artificial Sequence: Synthetic oligonucleotide
ccaauuauucguucaggau

SEQ ID NO: 1506404 - RNA, 19 nt, Artificial Sequence
  Description of Artificial Sequence: Synthetic oligonucleotide
ggaugacauucugauacua

SEQ ID NO: 1506405 - RNA, 19 nt, Artificial Sequence
  Description of Artificial Sequence: Synthetic oligonucleotide
cagauaguccacgaaucau

SEQ ID NO: 1506406 - RNA, 19 nt, Artificial Sequence
  Description of Artificial Sequence: Synthetic oligonucleotide
cccaucuuuugcuaaugua

SEQ ID NO: 1506407 - RNA, 19 nt, Artificial Sequence
  Description of Artificial Sequence: Synthetic oligonucleotide
cgagaaaauacaacauggu

SEQ ID NO: 1506408 - RNA, 19 nt, Artificial Sequence
  Description of Artificial Sequence: Synthetic oligonucleotide
gggcgcggauccugcagag

SEQ ID NO: 1506409 - RNA, 19 nt, Artificial Sequence
  Description of Artificial Sequence: Synthetic oligonucleotide
gcuguucuucaaagccgag

SEQ ID NO: 1506410 - RNA, 19 nt, Artificial Sequence
  Description of Artificial Sequence: Synthetic oligonucleotide
gcagagucucccggcugcg

SEQ ID NO: 1506411 - RNA, 19 nt, Artificial Sequence
  Description of Artificial Sequence: Synthetic oligonucleotide
caagucagccucuccucau

SEQ ID NO: 1506412 - RNA, 19 nt, Artificial Sequence
  Description of Artificial Sequence: Synthetic oligonucleotide
cgaagacuugaagaguuca

SEQ ID NO: 1506413 - RNA, 19 nt, Artificial Sequence
  Description of Artificial Sequence: Synthetic oligonucleotide
cagugccuuuugaugcaaa

SEQ ID NO: 1506414 - RNA, 19 nt, Artificial Sequence
  Description of Artificial Sequence: Synthetic oligonucleotide
cccaacuacuaucaauacu

SEQ ID NO: 1506415 - RNA, 19 nt, Artificial Sequence
  Description of Artificial Sequence: Synthetic oligonucleotide
caacuacagaaagcuuuua

SEQ ID NO: 1506416 - RNA, 19 nt, Artificial Sequence
  Description of Artificial Sequence: Synthetic oligonucleotide
ccucagcguuuaagaaaag

SEQ ID NO: 1506417 - RNA, 19 nt, Artificial Sequence
  Description of Artificial Sequence: Synthetic oligonucleotide
gcaacuacagaaagcuuuu

SEQ ID NO: 1506418 - RNA, 19 nt, Artificial Sequence
  Description of Artificial Sequence: Synthetic oligonucleotide
guggcaccaauuauucguu

SEQ ID NO: 1506419 - RNA, 19 nt, Artificial Sequence
  Description of Artificial Sequence: Synthetic oligonucleotide
gaccacuguucaccauuau

SEQ ID NO: 1506420 - RNA, 19 nt, Artificial Sequence
  Description of Artificial Sequence: Synthetic oligonucleotide
ccacgaaucauaaccuuuu

SEQ ID NO: 1506421 - RNA, 19 nt, Artificial Sequence
  Description of Artificial Sequence: Synthetic oligonucleotide
gcguuuaagaaaagcuguu

SEQ ID NO: 1506422 - RNA, 19 nt, Artificial Sequence
  Description of Artificial Sequence: Synthetic oligonucleotide
ccgggcgcggauccugcag

SEQ ID NO: 1506423 - RNA, 19 nt, Artificial Sequence
  Description of Artificial Sequence: Synthetic oligonucleotide
gcuccgggcgcggauccug

SEQ ID NO: 1506424 - RNA, 19 nt, Artificial Sequence
  Description of Artificial Sequence: Synthetic oligonucleotide
ggaaucagucagugccuuu

SEQ ID NO: 1506425 - RNA, 19 nt, Artificial Sequence
  Description of Artificial Sequence: Synthetic oligonucleotide
cggauccugcagagucucc

SEQ ID NO: 1506426 - RNA, 19 nt, Artificial Sequence
  Description of Artificial Sequence: Synthetic oligonucleotide
acacgccgguccagcacuu

SEQ ID NO: 1506427 - RNA, 19 nt, Artificial Sequence
  Description of Artificial Sequence: Synthetic oligonucleotide
gcugucuguggcaccaauu

SEQ ID NO: 1506428 - RNA, 19 nt, Artificial Sequence
  Description of Artificial Sequence: Synthetic oligonucleotide
ccagcauaucaaacucgau

SEQ ID NO: 1506429 - RNA, 19 nt, Artificial Sequence
  Description of Artificial Sequence: Synthetic oligonucleotide
cgggcgcggauccugcaga

SEQ ID NO: 1506430 - RNA, 19 nt, Artificial Sequence
  Description of Artificial Sequence: Synthetic oligonucleotide
cgcggauccugcagagucu

SEQ ID NO: 1506431 - RNA, 19 nt, Artificial Sequence
  Description of Artificial Sequence: Synthetic oligonucleotide
ggcgcggauccugcagagu

SEQ ID NO: 1506432 - RNA, 19 nt, Artificial Sequence
  Description of Artificial Sequence: Synthetic oligonucleotide
cacgccgguccagcacuuu

SEQ ID NO: 1506433 - RNA, 19 nt, Artificial Sequence
  Description of Artificial Sequence: Synthetic oligonucleotide
cgccucagcucagccacau

SEQ ID NO: 1506434 - RNA, 19 nt, Artificial Sequence
  Description of Artificial Sequence: Synthetic oligonucleotide
aauaugaaguuuaagaagc

SEQ ID NO: 1506435 - RNA, 19 nt, Artificial Sequence
  Description of Artificial Sequence: Synthetic oligonucleotide
uaucaauuaauccuaaggg

SEQ ID NO: 1506436 - RNA, 19 nt, Artificial Sequence
  Description of Artificial Sequence: Synthetic oligonucleotide
aauauguuaguacuucacc

SEQ ID NO: 1506437 - RNA, 19 nt, Artificial Sequence
  Description of Artificial Sequence: Synthetic oligonucleotide
auaaguguaacacagugac

SEQ ID NO: 1506438 - RNA, 19 nt, Artificial Sequence
  Description of Artificial Sequence: Synthetic oligonucleotide
cagacuauagucaugaugg

SEQ ID NO: 1506439 - RNA, 19 nt, Artificial Sequence
  Description of Artificial Sequence: Synthetic oligonucleotide
aacaugauaaugcaccagg

SEQ ID NO: 1506440 - RNA, 19 nt, Artificial Sequence
  Description of Artificial Sequence: Synthetic oligonucleotide
auauguuaguacuucaccc

SEQ ID NO: 1506441 - RNA, 19 nt, Artificial Sequence
  Description of Artificial Sequence: Synthetic oligonucleotide
uucaauuagauuaugggcu

SEQ ID NO: 1506442 - RNA, 19 nt, Artificial Sequence
  Description of Artificial Sequence: Synthetic oligonucleotide
auccuuagaagacacaagc

SEQ ID NO: 1506443 - RNA, 19 nt, Artificial Sequence
  Description of Artificial Sequence: Synthetic oligonucleotide
ugaugguuaacaaagcaag

SEQ ID NO: 1506444 - RNA, 19 nt, Artificial Sequence
  Description of Artificial Sequence: Synthetic oligonucleotide
aaaguaaccucugucagac

SEQ ID NO: 1506445 - RNA, 19 nt, Artificial Sequence
  Description of Artificial Sequence: Synthetic oligonucleotide
guaucaauuaauccuaagg

SEQ ID NO: 1506446 - RNA, 19 nt, Artificial Sequence
  Description of Artificial Sequence: Synthetic oligonucleotide
ucaauuaauccuaagggac

SEQ ID NO: 1506447 - RNA, 19 nt, Artificial Sequence
  Description of Artificial Sequence: Synthetic oligonucleotide
aacagcguucaauaaauuc

SEQ ID NO: 1506448 - RNA, 19 nt, Artificial Sequence
  Description of Artificial Sequence: Synthetic oligonucleotide
uaguacuucaauuagauua

SEQ ID NO: 1506449 - RNA, 19 nt, Artificial Sequence
  Description of Artificial Sequence: Synthetic oligonucleotide
uggaaauugugcuacaucc

SEQ ID NO: 1506450 - RNA, 19 nt, Artificial Sequence
  Description of Artificial Sequence: Synthetic oligonucleotide
uuaaccuacccaaauauga

SEQ ID NO: 1506451 - RNA, 19 nt, Artificial Sequence
  Description of Artificial Sequence: Synthetic oligonucleotide
ugcaaauggauuaucaucu

SEQ ID NO: 1506452 - RNA, 19 nt, Artificial Sequence
  Description of Artificial Sequence: Synthetic oligonucleotide
aguuuaagaagccaaaacu

SEQ ID NO: 1506453 - RNA, 19 nt, Artificial Sequence
  Description of Artificial Sequence: Synthetic oligonucleotide
accguuaauaaucacaucu

SEQ ID NO: 1506454 - RNA, 19 nt, Artificial Sequence
  Description of Artificial Sequence: Synthetic oligonucleotide
aauugagaaaugcaauuga

SEQ ID NO: 1506455 - RNA, 19 nt, Artificial Sequence
  Description of Artificial Sequence: Synthetic oligonucleotide
aaguguaacacagugacga

SEQ ID NO: 1506456 - RNA, 19 nt, Artificial Sequence
  Description of Artificial Sequence: Synthetic oligonucleotide
auaacaaggucauuaaacu

SEQ ID NO: 1506457 - RNA, 19 nt, Artificial Sequence
  Description of Artificial Sequence: Synthetic oligonucleotide
ucagaaaaggguauuuuca

SEQ ID NO: 1506458 - RNA, 19 nt, Artificial Sequence
  Description of Artificial Sequence: Synthetic oligonucleotide
agaaugaccguuaauaauc

SEQ ID NO: 1506459 - RNA, 19 nt, Artificial Sequence
  Description of Artificial Sequence: Synthetic oligonucleotide
uacuucaauuagauuaugg

SEQ ID NO: 1506460 - RNA, 19 nt, Artificial Sequence
  Description of Artificial Sequence: Synthetic oligonucleotide
uguuagacuucacacaugu

SEQ ID NO: 1506461 - RNA, 19 nt, Artificial Sequence
  Description of Artificial Sequence: Synthetic oligonucleotide
aucccuaacaugauaaugc

SEQ ID NO: 1506462 - RNA, 19 nt, Artificial Sequence
  Description of Artificial Sequence: Synthetic oligonucleotide
uauguuaguacuucacccc

SEQ ID NO: 1506463 - RNA, 19 nt, Artificial Sequence
  Description of Artificial Sequence: Synthetic oligonucleotide
aaauuguauuuccucaagu

SEQ ID NO: 1506464 - RNA, 19 nt, Artificial Sequence
  Description of Artificial Sequence: Synthetic oligonucleotide
auugacuggugcuucuucc

SEQ ID NO: 1506465 - RNA, 19 nt, Artificial Sequence
  Description of Artificial Sequence: Synthetic oligonucleotide
ugcuacauccaccaaaaga

SEQ ID NO: 1506466 - RNA, 19 nt, Artificial Sequence
  Description of Artificial Sequence: Synthetic oligonucleotide
agagcuuuuacaaugaagu

SEQ ID NO: 1506467 - RNA, 19 nt, Artificial Sequence
  Description of Artificial Sequence: Synthetic oligonucleotide
aacuuaaacacuauucaca

SEQ ID NO: 1506468 - RNA, 19 nt, Artificial Sequence
  Description of Artificial Sequence: Synthetic oligonucleotide
agacacaagccucaaauug

SEQ ID NO: 1506469 - RNA, 19 nt, Artificial Sequence
  Description of Artificial Sequence: Synthetic oligonucleotide
aaccuacccaaauaugaag

SEQ ID NO: 1506470 - RNA, 19 nt, Artificial Sequence
  Description of Artificial Sequence: Synthetic oligonucleotide
uagauuaugggcuguguug

SEQ ID NO: 1506471 - RNA, 19 nt, Artificial Sequence
  Description of Artificial Sequence: Synthetic oligonucleotide
aaauugugcuacauccacc

SEQ ID NO: 1506472 - RNA, 19 nt, Artificial Sequence
  Description of Artificial Sequence: Synthetic oligonucleotide
ucaauaaauucuucuuccc

SEQ ID NO: 1506473 - RNA, 19 nt, Artificial Sequence
  Description of Artificial Sequence: Synthetic oligonucleotide
uaagggaccaguuuagccu

SEQ ID NO: 1506474 - RNA, 19 nt, Artificial Sequence
  Description of Artificial Sequence: Synthetic oligonucleotide
uuuauuaagcaugcaagac

SEQ ID NO: 1506475 - RNA, 19 nt, Artificial Sequence
  Description of Artificial Sequence: Synthetic oligonucleotide
uacauuaagccauggggcc

SEQ ID NO: 1506476 - RNA, 19 nt, Artificial Sequence
  Description of Artificial Sequence: Synthetic oligonucleotide
caauuaauccuaagggacc

SEQ ID NO: 1506477 - RNA, 19 nt, Artificial Sequence
  Description of Artificial Sequence: Synthetic oligonucleotide
acuauucacacugaacacg

SEQ ID NO: 1506478 - RNA, 19 nt, Artificial Sequence
  Description of Artificial Sequence: Synthetic oligonucleotide
ucaauuagauuaugggcug

SEQ ID NO: 1506479 - RNA, 19 nt, Artificial Sequence
  Description of Artificial Sequence: Synthetic oligonucleotide
gaaauugugcuacauccac

SEQ ID NO: 1506480 - RNA, 19 nt, Artificial Sequence
  Description of Artificial Sequence: Synthetic oligonucleotide
aaugcaauugagaaaugca

SEQ ID NO: 1506481 - RNA, 19 nt, Artificial Sequence
  Description of Artificial Sequence: Synthetic oligonucleotide
aguguggaaauugugcuac

SEQ ID NO: 1506482 - RNA, 19 nt, Artificial Sequence
  Description of Artificial Sequence: Synthetic oligonucleotide
agacauucuguguaaugac

SEQ ID NO: 1506483 - RNA, 19 nt, Artificial Sequence
  Description of Artificial Sequence: Synthetic oligonucleotide
aagggaccaguuuagccuc

SEQ ID NO: 1506484 - RNA, 19 nt, Artificial Sequence
  Description of Artificial Sequence: Synthetic oligonucleotide
agcacuuuuauuaagcaug

SEQ ID NO: 1506485 - RNA, 19 nt, Artificial Sequence
  Description of Artificial Sequence: Synthetic oligonucleotide
ugaccguuaauaaucacau

SEQ ID NO: 1506486 - RNA, 19 nt, Artificial Sequence
  Description of Artificial Sequence: Synthetic oligonucleotide
aacucaguaucccuaacau

SEQ ID NO: 1506487 - RNA, 19 nt, Artificial Sequence
  Description of Artificial Sequence: Synthetic oligonucleotide
ucuguguaaugacacuucc

SEQ ID NO: 1506488 - RNA, 19 nt, Artificial Sequence
  Description of Artificial Sequence: Synthetic oligonucleotide
aaugaauccuuagaagaca

SEQ ID NO: 1506489 - RNA, 19 nt, Artificial Sequence
  Description of Artificial Sequence: Synthetic oligonucleotide
ugaugcuugggcuaguacu

SEQ ID NO: 1506490 - RNA, 19 nt, Artificial Sequence
  Description of Artificial Sequence: Synthetic oligonucleotide
ugacacuuccaguuaacag

SEQ ID NO: 1506491 - RNA, 19 nt, Artificial Sequence
  Description of Artificial Sequence: Synthetic oligonucleotide
aacuguucuagcuuuguua

SEQ ID NO: 1506492 - RNA, 19 nt, Artificial Sequence
  Description of Artificial Sequence: Synthetic oligonucleotide
aauuaauccuaagggacca

SEQ ID NO: 1506493 - RNA, 19 nt, Artificial Sequence
  Description of Artificial Sequence: Synthetic oligonucleotide
auagucaugaugguuaaca

SEQ ID NO: 1506494 - RNA, 19 nt, Artificial Sequence
  Description of Artificial Sequence: Synthetic oligonucleotide
uaaguguaacacagugacg

SEQ ID NO: 1506495 - RNA, 19 nt, Artificial Sequence
  Description of Artificial Sequence: Synthetic oligonucleotide
ugcaauugagaaaucugcu

SEQ ID NO: 1506496 - RNA, 19 nt, Artificial Sequence
  Description of Artificial Sequence: Synthetic oligonucleotide
aaaagagggccccgucuac

SEQ ID NO: 1506497 - RNA, 19 nt, Artificial Sequence
  Description of Artificial Sequence: Synthetic oligonucleotide
ugugcuacauccaccaaaa

SEQ ID NO: 1506498 - RNA, 19 nt, Artificial Sequence
  Description of Artificial Sequence: Synthetic oligonucleotide
uccuuagaagacacaagcc

SEQ ID NO: 1506499 - RNA, 19 nt, Artificial Sequence
  Description of Artificial Sequence: Synthetic oligonucleotide
uaaugcaccaggcgaaagc

SEQ ID NO: 1506500 - RNA, 19 nt, Artificial Sequence
  Description of Artificial Sequence: Synthetic oligonucleotide
cuuacuucguaacagucuc

SEQ ID NO: 1506501 - RNA, 19 nt, Artificial Sequence
  Description of Artificial Sequence: Synthetic oligonucleotide
cuucguaacagucucagca

SEQ ID NO: 1506502 - RNA, 19 nt, Artificial Sequence
  Description of Artificial Sequence: Synthetic oligonucleotide
caaugaauccuuagaagac

SEQ ID NO: 1506503 - RNA, 19 nt, Artificial Sequence
  Description of Artificial Sequence: Synthetic oligonucleotide
uaauuugguucuuugucac

SEQ ID NO: 1506504 - RNA, 19 nt, Artificial Sequence
  Description of Artificial Sequence: Synthetic oligonucleotide
caacuuaaacacuauucac

SEQ ID NO: 1506505 - RNA, 19 nt, Artificial Sequence
  Description of Artificial Sequence: Synthetic oligonucleotide
acguauggcagcuuaaccu

SEQ ID NO: 1506506 - RNA, 19 nt, Artificial Sequence
  Description of Artificial Sequence: Synthetic oligonucleotide
ugagaaugaccguuaauaa

SEQ ID NO: 1506507 - RNA, 19 nt, Artificial Sequence
  Description of Artificial Sequence: Synthetic oligonucleotide
cuaagggaccaguuuagcc

SEQ ID NO: 1506508 - RNA, 19 nt, Artificial Sequence
  Description of Artificial Sequence: Synthetic oligonucleotide
aguaaccucugucagacau

SEQ ID NO: 1506509 - RNA, 19 nt, Artificial Sequence
  Description of Artificial Sequence: Synthetic oligonucleotide
uuaugggcuguguuggucc

SEQ ID NO: 1506510 - RNA, 19 nt, Artificial Sequence
  Description of Artificial Sequence: Synthetic oligonucleotide
uuacuaauauuuucaacuu

SEQ ID NO: 1506511 - RNA, 19 nt, Artificial Sequence
  Description of Artificial Sequence: Synthetic oligonucleotide
ccaaauaugaaguuuaaga

SEQ ID NO: 1506512 - RNA, 19 nt, Artificial Sequence
  Description of Artificial Sequence: Synthetic oligonucleotide
acugaacacguauggcagc

SEQ ID NO: 1506513 - RNA, 19 nt, Artificial Sequence
  Description of Artificial Sequence: Synthetic oligonucleotide
caaagcaaggaagagcacc

SEQ ID NO: 1506514 - RNA, 19 nt, Artificial Sequence
  Description of Artificial Sequence: Synthetic oligonucleotide
ugauaaugcaccaggcgaa

SEQ ID NO: 1506515 - RNA, 19 nt, Artificial Sequence
  Description of Artificial Sequence: Synthetic oligonucleotide
aguaucaauuaauccuaag

SEQ ID NO: 1506516 - RNA, 19 nt, Artificial Sequence
  Description of Artificial Sequence: Synthetic oligonucleotide
acuaauauuuucaacuuaa

SEQ ID NO: 1506517 - RNA, 19 nt, Artificial Sequence
  Description of Artificial Sequence: Synthetic oligonucleotide
auggcuaugaugcaaugaa

SEQ ID NO: 1506518 - RNA, 19 nt, Artificial Sequence
  Description of Artificial Sequence: Synthetic oligonucleotide
uuuaacccagugcacggca

SEQ ID NO: 1506519 - RNA, 19 nt, Artificial Sequence
  Description of Artificial Sequence: Synthetic oligonucleotide
ugaugcaaugaauccuuag

SEQ ID NO: 1506520 - RNA, 19 nt, Artificial Sequence
  Description of Artificial Sequence: Synthetic oligonucleotide
acagcguucaauaaauucu

SEQ ID NO: 1506521 - RNA, 19 nt, Artificial Sequence
  Description of Artificial Sequence: Synthetic oligonucleotide
aaccuaauuuacuuauuuu

SEQ ID NO: 1506522 - RNA, 19 nt, Artificial Sequence
  Description of Artificial Sequence: Synthetic oligonucleotide
aaagcaaggaagagcacca

SEQ ID NO: 1506523 - RNA, 19 nt, Artificial Sequence
  Description of Artificial Sequence: Synthetic oligonucleotide
aaacuggucuuggauuugg

SEQ ID NO: 1506524 - RNA, 19 nt, Artificial Sequence
  Description of Artificial Sequence: Synthetic oligonucleotide
guuaguacuucaccccagg

SEQ ID NO: 1506525 - RNA, 19 nt, Artificial Sequence
  Description of Artificial Sequence: Synthetic oligonucleotide
cacaagaucuuccagagaa

SEQ ID NO: 1506526 - RNA, 19 nt, Artificial Sequence
  Description of Artificial Sequence: Synthetic oligonucleotide
cuuaaccuacccaaauaug

SEQ ID NO: 1506527 - RNA, 19 nt, Artificial Sequence
  Description of Artificial Sequence: Synthetic oligonucleotide
acauccaccaaaagagggc

SEQ ID NO: 1506528 - RNA, 19 nt, Artificial Sequence
  Description of Artificial Sequence: Synthetic oligonucleotide
ugcugucuuuacauuaagc

SEQ ID NO: 1506529 - RNA, 19 nt, Artificial Sequence
  Description of Artificial Sequence: Synthetic oligonucleotide
gacgagagagcuuuuacaa

SEQ ID NO: 1506530 - RNA, 19 nt, Artificial Sequence
  Description of Artificial Sequence: Synthetic oligonucleotide
agacaagucagugagaguu

SEQ ID NO: 1506531 - RNA, 19 nt, Artificial Sequence
  Description of Artificial Sequence: Synthetic oligonucleotide
ugacgagagagcuuuuaca

SEQ ID NO: 1506532 - RNA, 19 nt, Artificial Sequence
  Description of Artificial Sequence: Synthetic oligonucleotide
augcaaugaauccuuagaa

SEQ ID NO: 1506533 - RNA, 19 nt, Artificial Sequence
  Description of Artificial Sequence: Synthetic oligonucleotide
uaaccuacccaaauaugaa

SEQ ID NO: 1506534 - RNA, 19 nt, Artificial Sequence
  Description of Artificial Sequence: Synthetic oligonucleotide
augaauccuuagaagacac

SEQ ID NO: 1506535 - RNA, 19 nt, Artificial Sequence
  Description of Artificial Sequence: Synthetic oligonucleotide
uccuaagggaccaguuuag

SEQ ID NO: 1506536 - RNA, 19 nt, Artificial Sequence
  Description of Artificial Sequence: Synthetic oligonucleotide
uguuaguacuucaccccag

SEQ ID NO: 1506537 - RNA, 19 nt, Artificial Sequence
  Description of Artificial Sequence: Synthetic oligonucleotide
ucacugauaacaaggucau

SEQ ID NO: 1506538 - RNA, 19 nt, Artificial Sequence
  Description of Artificial Sequence: Synthetic oligonucleotide
uuagauuaugggcuguguu

SEQ ID NO: 1506539 - RNA, 19 nt, Artificial Sequence
  Description of Artificial Sequence: Synthetic oligonucleotide
uacuaauauuuucaacuua

SEQ ID NO: 1506540 - RNA, 19 nt, Artificial Sequence
  Description of Artificial Sequence: Synthetic oligonucleotide
gagagcuuuuacaaugaag

SEQ ID NO: 1506541 - RNA, 19 nt, Artificial Sequence
  Description of Artificial Sequence: Synthetic oligonucleotide
ugauaacaaggucauuaaa

SEQ ID NO: 1506542 - RNA, 19 nt, Artificial Sequence
  Description of Artificial Sequence: Synthetic oligonucleotide
uucuuacuucguaacaguc

SEQ ID NO: 1506543 - RNA, 19 nt, Artificial Sequence
  Description of Artificial Sequence: Synthetic oligonucleotide
uucguaacagucucagcac

SEQ ID NO: 1506544 - RNA, 19 nt, Artificial Sequence
  Description of Artificial Sequence: Synthetic oligonucleotide
uacuucguaacagucucag

SEQ ID NO: 1506545 - RNA, 19 nt, Artificial Sequence
  Description of Artificial Sequence: Synthetic oligonucleotide
acuauagucaugaugguua

SEQ ID NO: 1506546 - RNA, 19 nt, Artificial Sequence
  Description of Artificial Sequence: Synthetic oligonucleotide
acuuucaguaacuguguga

SEQ ID NO: 1506547 - RNA, 19 nt, Artificial Sequence
  Description of Artificial Sequence: Synthetic oligonucleotide
gcuaugaugcaaugaaucc

SEQ ID NO: 1506548 - RNA, 19 nt, Artificial Sequence
  Description of Artificial Sequence: Synthetic oligonucleotide
aacuuuggcaaugcauaag

SEQ ID NO: 1506549 - RNA, 19 nt, Artificial Sequence
  Description of Artificial Sequence: Synthetic oligonucleotide
ucuacucaaauauguuagu

SEQ ID NO: 1506550 - RNA, 19 nt, Artificial Sequence
  Description of Artificial Sequence: Synthetic oligonucleotide
aagagggccccgucuacuc

SEQ ID NO: 1506551 - RNA, 19 nt, Artificial Sequence
  Description of Artificial Sequence: Synthetic oligonucleotide
gguuaacaaagcaaggaag

SEQ ID NO: 1506552 - RNA, 19 nt, Artificial Sequence
  Description of Artificial Sequence: Synthetic oligonucleotide
cagccaacgaauccugucg

SEQ ID NO: 1506553 - RNA, 19 nt, Artificial Sequence
  Description of Artificial Sequence: Synthetic oligonucleotide
gcauaaguguaacacagug

SEQ ID NO: 1506554 - RNA, 19 nt, Artificial Sequence
  Description of Artificial Sequence: Synthetic oligonucleotide
uccucaaguucaccgcagg

SEQ ID NO: 1506555 - RNA, 19 nt, Artificial Sequence
  Description of Artificial Sequence: Synthetic oligonucleotide
aaaccaugcuaccaucuuu

SEQ ID NO: 1506556 - RNA, 19 nt, Artificial Sequence
  Description of Artificial Sequence: Synthetic oligonucleotide
auguuaguacuucacccca

SEQ ID NO: 1506557 - RNA, 19 nt, Artificial Sequence
  Description of Artificial Sequence: Synthetic oligonucleotide
uugaugaugcuugggcuag

SEQ ID NO: 1506558 - RNA, 19 nt, Artificial Sequence
  Description of Artificial Sequence: Synthetic oligonucleotide
agcauuucuuggaaacagc

SEQ ID NO: 1506559 - RNA, 19 nt, Artificial Sequence
  Description of Artificial Sequence: Synthetic oligonucleotide
aguaucccuaacaugauaa

SEQ ID NO: 1506560 - RNA, 19 nt, Artificial Sequence
  Description of Artificial Sequence: Synthetic oligonucleotide
agucaugaugguuaacaaa

SEQ ID NO: 1506561 - RNA, 19 nt, Artificial Sequence
  Description of Artificial Sequence: Synthetic oligonucleotide
uucaugagaaugaccguua

SEQ ID NO: 1506562 - RNA, 19 nt, Artificial Sequence
  Description of Artificial Sequence: Synthetic oligonucleotide
cuugggcuaguacugcugc

SEQ ID NO: 1506563 - RNA, 19 nt, Artificial Sequence
  Description of Artificial Sequence: Synthetic oligonucleotide
augaugcuugggcuaguac

SEQ ID NO: 1506564 - RNA, 19 nt, Artificial Sequence
  Description of Artificial Sequence: Synthetic oligonucleotide
agccaacgaauccugucgg

SEQ ID NO: 1506565 - RNA, 19 nt, Artificial Sequence
  Description of Artificial Sequence: Synthetic oligonucleotide
auugaugaugcuugggcua

SEQ ID NO: 1506566 - RNA, 19 nt, Artificial Sequence
  Description of Artificial Sequence: Synthetic oligonucleotide
ucaaaaccaugcuaccauc

SEQ ID NO: 1506567 - RNA, 19 nt, Artificial Sequence
  Description of Artificial Sequence: Synthetic oligonucleotide
aguguaacacagugacgag

SEQ ID NO: 1506568 - RNA, 19 nt, Artificial Sequence
  Description of Artificial Sequence: Synthetic oligonucleotide
acucaguaucccuaacaug

SEQ ID NO: 1506569 - RNA, 19 nt, Artificial Sequence
  Description of Artificial Sequence: Synthetic oligonucleotide
ucguaacagucucagcacu

SEQ ID NO: 1506570 - RNA, 19 nt, Artificial Sequence
  Description of Artificial Sequence: Synthetic oligonucleotide
ugaucaccaaaguaaccuc

SEQ ID NO: 1506571 - RNA, 19 nt, Artificial Sequence
  Description of Artificial Sequence: Synthetic oligonucleotide
augaccguuaauaaucaca

SEQ ID NO: 1506572 - RNA, 19 nt, Artificial Sequence
  Description of Artificial Sequence: Synthetic oligonucleotide
uccgcggaucuccacaggc

SEQ ID NO: 1506573 - RNA, 19 nt, Artificial Sequence
  Description of Artificial Sequence: Synthetic oligonucleotide
gagaucucgagcuggaaua

SEQ ID NO: 1506574 - RNA, 19 nt, Artificial Sequence
  Description of Artificial Sequence: Synthetic oligonucleotide
ugaauccuuagaagacaca

SEQ ID NO: 1506575 - RNA, 19 nt, Artificial Sequence
  Description of Artificial Sequence: Synthetic oligonucleotide
ugcucuugaccacaagauc

SEQ ID NO: 1506576 - RNA, 19 nt, Artificial Sequence
  Description of Artificial Sequence: Synthetic oligonucleotide
cauccaccaaaagagggcc

SEQ ID NO: 1506577 - RNA, 19 nt, Artificial Sequence
  Description of Artificial Sequence: Synthetic oligonucleotide
ugcgacuuggaucuuucau

SEQ ID NO: 1506578 - RNA, 19 nt, Artificial Sequence
  Description of Artificial Sequence: Synthetic oligonucleotide
aguacuucaauuagauuau

SEQ ID NO: 1506579 - RNA, 19 nt, Artificial Sequence
  Description of Artificial Sequence: Synthetic oligonucleotide
uuaauccuaagggaccagu

SEQ ID NO: 1506580 - RNA, 19 nt, Artificial Sequence
  Description of Artificial Sequence: Synthetic oligonucleotide
uugguucuuugucacaauu

SEQ ID NO: 1506581 - RNA, 19 nt, Artificial Sequence
  Description of Artificial Sequence: Synthetic oligonucleotide
uagucaugaugguuaacaa

SEQ ID NO: 1506582 - RNA, 19 nt, Artificial Sequence
  Description of Artificial Sequence: Synthetic oligonucleotide
auccuaagggaccaguuua

SEQ ID NO: 1506583 - RNA, 19 nt, Artificial Sequence
  Description of Artificial Sequence: Synthetic oligonucleotide
acacguauggcagcuuaac

SEQ ID NO: 1506584 - RNA, 19 nt, Artificial Sequence
  Description of Artificial Sequence: Synthetic oligonucleotide
ccacucaaaaccaugcuac

SEQ ID NO: 1506585 - RNA, 19 nt, Artificial Sequence
  Description of Artificial Sequence: Synthetic oligonucleotide
cacguauggcagcuuaacc

SEQ ID NO: 1506586 - RNA, 19 nt, Artificial Sequence
  Description of Artificial Sequence: Synthetic oligonucleotide
aaguucaccgcagggagaa

SEQ ID NO: 1506587 - RNA, 19 nt, Artificial Sequence
  Description of Artificial Sequence: Synthetic oligonucleotide
uugcaaaguguagacauua

SEQ ID NO: 1506588 - RNA, 19 nt, Artificial Sequence
  Description of Artificial Sequence: Synthetic oligonucleotide
cacucaaaaccaugcuacc

SEQ ID NO: 1506589 - RNA, 19 nt, Artificial Sequence
  Description of Artificial Sequence: Synthetic oligonucleotide
aggucauuaaacuggucuu

SEQ ID NO: 1506590 - RNA, 19 nt, Artificial Sequence
  Description of Artificial Sequence: Synthetic oligonucleotide
uuuuaacccagugcacggc

SEQ ID NO: 1506591 - RNA, 19 nt, Artificial Sequence
  Description of Artificial Sequence: Synthetic oligonucleotide
gauucagauugcucuugac

SEQ ID NO: 1506592 - RNA, 19 nt, Artificial Sequence
  Description of Artificial Sequence: Synthetic oligonucleotide
cagcauuucuuggaaacag

SEQ ID NO: 1506593 - RNA, 19 nt, Artificial Sequence
  Description of Artificial Sequence: Synthetic oligonucleotide
aauugugcugcagacuaua

SEQ ID NO: 1506594 - RNA, 19 nt, Artificial Sequence
  Description of Artificial Sequence: Synthetic oligonucleotide
ucaugagaaugaccguuaa

SEQ ID NO: 1506595 - RNA, 19 nt, Artificial Sequence
  Description of Artificial Sequence: Synthetic oligonucleotide
uccaccaaaagagggcccc

SEQ ID NO: 1506596 - RNA, 19 nt, Artificial Sequence
  Description of Artificial Sequence: Synthetic oligonucleotide
uuacuucguaacagucuca

SEQ ID NO: 1506597 - RNA, 19 nt, Artificial Sequence
  Description of Artificial Sequence: Synthetic oligonucleotide
augaugguuaacaaagcaa

SEQ ID NO: 1506598 - RNA, 19 nt, Artificial Sequence
  Description of Artificial Sequence: Synthetic oligonucleotide
gaaugaccguuaauaauca

SEQ ID NO: 1506599 - RNA, 19 nt, Artificial Sequence
  Description of Artificial Sequence: Synthetic oligonucleotide
uaauccuaagggaccaguu

SEQ ID NO: 1506600 - RNA, 19 nt, Artificial Sequence
  Description of Artificial Sequence: Synthetic oligonucleotide
uccaguuaacagacuuucu

SEQ ID NO: 1506601 - RNA, 19 nt, Artificial Sequence
  Description of Artificial Sequence: Synthetic oligonucleotide
ugugggagaucucgagcug

SEQ ID NO: 1506602 - RNA, 19 nt, Artificial Sequence
  Description of Artificial Sequence: Synthetic oligonucleotide
accacucaaaaccaugcua

SEQ ID NO: 1506603 - RNA, 19 nt, Artificial Sequence
  Description of Artificial Sequence: Synthetic oligonucleotide
ugcaaaguguagacauuaa

SEQ ID NO: 1506604 - RNA, 19 nt, Artificial Sequence
  Description of Artificial Sequence: Synthetic oligonucleotide
agcaaggaagagcaccacu

SEQ ID NO: 1506605 - RNA, 19 nt, Artificial Sequence
  Description of Artificial Sequence: Synthetic oligonucleotide
accuacccaaauaugaagu

SEQ ID NO: 1506606 - RNA, 19 nt, Artificial Sequence
  Description of Artificial Sequence: Synthetic oligonucleotide
accaaaagagggccccguc

SEQ ID NO: 1506607 - RNA, 19 nt, Artificial Sequence
  Description of Artificial Sequence: Synthetic oligonucleotide
gacggcagccaacgaaucc

SEQ ID NO: 1506608 - RNA, 19 nt, Artificial Sequence
  Description of Artificial Sequence: Synthetic oligonucleotide
ggaucuuucaugguuggug

SEQ ID NO: 1506609 - RNA, 19 nt, Artificial Sequence
  Description of Artificial Sequence: Synthetic oligonucleotide
gaaacagcguucaauaaau

SEQ ID NO: 1506610 - RNA, 19 nt, Artificial Sequence
  Description of Artificial Sequence: Synthetic oligonucleotide
uucaccccaggaacaaacu

SEQ ID NO: 1506611 - RNA, 19 nt, Artificial Sequence
  Description of Artificial Sequence: Synthetic oligonucleotide
uggcaaugcauaaguguaa

SEQ ID NO: 1506612 - RNA, 19 nt, Artificial Sequence
  Description of Artificial Sequence: Synthetic oligonucleotide
cagacauucuguguaauga

SEQ ID NO: 1506613 - RNA, 19 nt, Artificial Sequence
  Description of Artificial Sequence: Synthetic oligonucleotide
ugcugcagacuauagucau

SEQ ID NO: 1506614 - RNA, 19 nt, Artificial Sequence
  Description of Artificial Sequence: Synthetic oligonucleotide
acucaaaaccaugcuacca

SEQ ID NO: 1506615 - RNA, 19 nt, Artificial Sequence
  Description of Artificial Sequence: Synthetic oligonucleotide
gcuucuuacuucguaacag

SEQ ID NO: 1506616 - RNA, 19 nt, Artificial Sequence
  Description of Artificial Sequence: Synthetic oligonucleotide
uuucaguaacugugugaca

SEQ ID NO: 1506617 - RNA, 19 nt, Artificial Sequence
  Description of Artificial Sequence: Synthetic oligonucleotide
aaccaugcuaccaucuuuu

SEQ ID NO: 1506618 - RNA, 19 nt, Artificial Sequence
  Description of Artificial Sequence: Synthetic oligonucleotide
agcuuaaccuacccaaaua

SEQ ID NO: 1506619 - RNA, 19 nt, Artificial Sequence
  Description of Artificial Sequence: Synthetic oligonucleotide
gugacgagagagcuuuuac

SEQ ID NO: 1506620 - RNA, 19 nt, Artificial Sequence
  Description of Artificial Sequence: Synthetic oligonucleotide
ccaaaguaaccucugucag

SEQ ID NO: 1506621 - RNA, 19 nt, Artificial Sequence
  Description of Artificial Sequence: Synthetic oligonucleotide
gagaaugaccguuaauaau

SEQ ID NO: 1506622 - RNA, 19 nt, Artificial Sequence
  Description of Artificial Sequence: Synthetic oligonucleotide
auuagauuaugggcugugu

SEQ ID NO: 1506623 - RNA, 19 nt, Artificial Sequence
  Description of Artificial Sequence: Synthetic oligonucleotide
agccauggggccauucuac

SEQ ID NO: 1506624 - RNA, 19 nt, Artificial Sequence
  Description of Artificial Sequence: Synthetic oligonucleotide
aaagagggccccgucuacu

SEQ ID NO: 1506625 - RNA, 19 nt, Artificial Sequence
  Description of Artificial Sequence: Synthetic oligonucleotide
cauugcugucuuuacauua

SEQ ID NO: 1506626 - RNA, 19 nt, Artificial Sequence
  Description of Artificial Sequence: Synthetic oligonucleotide
uggcuaugaugcaaugaau

SEQ ID NO: 1506627 - RNA, 19 nt, Artificial Sequence
  Description of Artificial Sequence: Synthetic oligonucleotide
uguggaaauugugcuacau

SEQ ID NO: 1506628 - RNA, 19 nt, Artificial Sequence
  Description of Artificial Sequence: Synthetic oligonucleotide
augcuugggcuaguacugc

SEQ ID NO: 1506629 - RNA, 19 nt, Artificial Sequence
  Description of Artificial Sequence: Synthetic oligonucleotide
ugggcuaguacugcugcga

SEQ ID NO: 1506630 - RNA, 19 nt, Artificial Sequence
  Description of Artificial Sequence: Synthetic oligonucleotide
acaagucagugagaguuga

SEQ ID NO: 1506631 - RNA, 19 nt, Artificial Sequence
  Description of Artificial Sequence: Synthetic oligonucleotide
uugguguucguugucguuu

SEQ ID NO: 1506632 - RNA, 19 nt, Artificial Sequence
  Description of Artificial Sequence: Synthetic oligonucleotide
aaguaucaauuaauccuaa

SEQ ID NO: 1506633 - RNA, 19 nt, Artificial Sequence
  Description of Artificial Sequence: Synthetic oligonucleotide
uucaccgcagggagaacuc

SEQ ID NO: 1506634 - RNA, 19 nt, Artificial Sequence
  Description of Artificial Sequence: Synthetic oligonucleotide
auuaauccuaagggaccag

SEQ ID NO: 1506635 - RNA, 19 nt, Artificial Sequence
  Description of Artificial Sequence: Synthetic oligonucleotide
ugggagaucucgagcugga

SEQ ID NO: 1506636 - RNA, 19 nt, Artificial Sequence
  Description of Artificial Sequence: Synthetic oligonucleotide
gaacacguauggcagcuua

SEQ ID NO: 1506637 - RNA, 19 nt, Artificial Sequence
  Description of Artificial Sequence: Synthetic oligonucleotide
gacacaagccucaaauugu

SEQ ID NO: 1506638 - RNA, 19 nt, Artificial Sequence
  Description of Artificial Sequence: Synthetic oligonucleotide
acgagagagcuuuuacaau

SEQ ID NO: 1506639 - RNA, 19 nt, Artificial Sequence
  Description of Artificial Sequence: Synthetic oligonucleotide
ggccauucuacuuucagua

SEQ ID NO: 1506640 - RNA, 19 nt, Artificial Sequence
  Description of Artificial Sequence: Synthetic oligonucleotide
cugaucaccaaaguaaccu

SEQ ID NO: 1506641 - RNA, 19 nt, Artificial Sequence
  Description of Artificial Sequence: Synthetic oligonucleotide
uuugguucuuugucacaau

SEQ ID NO: 1506642 - RNA, 19 nt, Artificial Sequence
  Description of Artificial Sequence: Synthetic oligonucleotide
acacauguauggcuaugau

SEQ ID NO: 1506643 - RNA, 19 nt, Artificial Sequence
  Description of Artificial Sequence: Synthetic oligonucleotide
cugcagacuauagucauga

SEQ ID NO: 1506644 - RNA, 19 nt, Artificial Sequence
  Description of Artificial Sequence: Synthetic oligonucleotide
gguccauagucugugggag

SEQ ID NO: 1506645 - RNA, 19 nt, Artificial Sequence
  Description of Artificial Sequence: Synthetic oligonucleotide
acauuaagccauggggcca

SEQ ID NO: 1506646 - RNA, 19 nt, Artificial Sequence
  Description of Artificial Sequence: Synthetic oligonucleotide
ugcuugggcuaguacugcu

SEQ ID NO: 1506647 - RNA, 19 nt, Artificial Sequence
  Description of Artificial Sequence: Synthetic oligonucleotide
cacaauugacuggugcuuc

SEQ ID NO: 1506648 - RNA, 19 nt, Artificial Sequence
  Description of Artificial Sequence: Synthetic oligonucleotide
cagacugaucaccaaagua

SEQ ID NO: 1506649 - RNA, 19 nt, Artificial Sequence
  Description of Artificial Sequence: Synthetic oligonucleotide
acggcagccaacgaauccu

SEQ ID NO: 1506650 - RNA, 19 nt, Artificial Sequence
  Description of Artificial Sequence: Synthetic oligonucleotide
caaggaagagcaccacuca

SEQ ID NO: 1506651 - RNA, 19 nt, Artificial Sequence
  Description of Artificial Sequence: Synthetic oligonucleotide
uauagucaugaugguuaac

SEQ ID NO: 1506652 - RNA, 19 nt, Artificial Sequence
  Description of Artificial Sequence: Synthetic oligonucleotide
gaccguuaauaaucacauc

SEQ ID NO: 1506653 - RNA, 19 nt, Artificial Sequence
  Description of Artificial Sequence: Synthetic oligonucleotide
gucuuuacauuaagccaug

SEQ ID NO: 1506654 - RNA, 19 nt, Artificial Sequence
  Description of Artificial Sequence: Synthetic oligonucleotide
gaagguuauuuaauuuggu

SEQ ID NO: 1506655 - RNA, 19 nt, Artificial Sequence
  Description of Artificial Sequence: Synthetic oligonucleotide
acgaauccugucggccucc

SEQ ID NO: 1506656 - RNA, 19 nt, Artificial Sequence
  Description of Artificial Sequence: Synthetic oligonucleotide
guguaacacagugacgaga

SEQ ID NO: 1506657 - RNA, 19 nt, Artificial Sequence
  Description of Artificial Sequence: Synthetic oligonucleotide
gauaaugcaccaggcgaaa

SEQ ID NO: 1506658 - RNA, 19 nt, Artificial Sequence
  Description of Artificial Sequence: Synthetic oligonucleotide
caccgcagggagaacucag

SEQ ID NO: 1506659 - RNA, 19 nt, Artificial Sequence
  Description of Artificial Sequence: Synthetic oligonucleotide
cuaugaugcaaugaauccu

SEQ ID NO: 1506660 - RNA, 19 nt, Artificial Sequence
  Description of Artificial Sequence: Synthetic oligonucleotide
ucuugaccacaagaucuuc

SEQ ID NO: 1506661 - RNA, 19 nt, Artificial Sequence
  Description of Artificial Sequence: Synthetic oligonucleotide
aacacguauggcagcuuaa

SEQ ID NO: 1506662 - RNA, 19 nt, Artificial Sequence
  Description of Artificial Sequence: Synthetic oligonucleotide
cuacuuucaguaacugugu

SEQ ID NO: 1506663 - RNA, 19 nt, Artificial Sequence
  Description of Artificial Sequence: Synthetic oligonucleotide
ggggccauucuacuuucag

SEQ ID NO: 1506664 - RNA, 19 nt, Artificial Sequence
  Description of Artificial Sequence: Synthetic oligonucleotide
cauuucuuggaaacagcgu

SEQ ID NO: 1506665 - RNA, 19 nt, Artificial Sequence
  Description of Artificial Sequence: Synthetic oligonucleotide
caaaagagggccccgucua

SEQ ID NO: 1506666 - RNA, 19 nt, Artificial Sequence
  Description of Artificial Sequence: Synthetic oligonucleotide
ggcaaugcauaaguguaac

SEQ ID NO: 1506667 - RNA, 19 nt, Artificial Sequence
  Description of Artificial Sequence: Synthetic oligonucleotide
gcaccacucaaaaccaugc

SEQ ID NO: 1506668 - RNA, 19 nt, Artificial Sequence
  Description of Artificial Sequence: Synthetic oligonucleotide
gccagacugaucaccaaag

SEQ ID NO: 1506669 - RNA, 19 nt, Artificial Sequence
  Description of Artificial Sequence: Synthetic oligonucleotide
ugguguucguugucguuuu

SEQ ID NO: 1506670 - RNA, 19 nt, Artificial Sequence
  Description of Artificial Sequence: Synthetic oligonucleotide
gcuuaaccuacccaaauau

SEQ ID NO: 1506671 - RNA, 19 nt, Artificial Sequence
  Description of Artificial Sequence: Synthetic oligonucleotide
cacacauguauggcuauga

SEQ ID NO: 1506672 - RNA, 19 nt, Artificial Sequence
  Description of Artificial Sequence: Synthetic oligonucleotide
aaacagcguucaauaaauu

SEQ ID NO: 1506673 - RNA, 19 nt, Artificial Sequence
  Description of Artificial Sequence: Synthetic oligonucleotide
ggaaauugugcuacaucca

SEQ ID NO: 1506674 - RNA, 19 nt, Artificial Sequence
  Description of Artificial Sequence: Synthetic oligonucleotide
ugacagcuucuuacuucgu

SEQ ID NO: 1506675 - RNA, 19 nt, Artificial Sequence
  Description of Artificial Sequence: Synthetic oligonucleotide
cagugagaguugaagguua

SEQ ID NO: 1506676 - RNA, 19 nt, Artificial Sequence
  Description of Artificial Sequence: Synthetic oligonucleotide
agaucucgagcuggaauaa

SEQ ID NO: 1506677 - RNA, 19 nt, Artificial Sequence
  Description of Artificial Sequence: Synthetic oligonucleotide
gcucuugaccacaagaucu

SEQ ID NO: 1506678 - RNA, 19 nt, Artificial Sequence
  Description of Artificial Sequence: Synthetic oligonucleotide
gugcuacauccaccaaaag

SEQ ID NO: 1506679 - RNA, 19 nt, Artificial Sequence
  Description of Artificial Sequence: Synthetic oligonucleotide
ccaacgaauccugucggcc

SEQ ID NO: 1506680 - RNA, 19 nt, Artificial Sequence
  Description of Artificial Sequence: Synthetic oligonucleotide
guacuucaccccaggaaca

SEQ ID NO: 1506681 - RNA, 19 nt, Artificial Sequence
  Description of Artificial Sequence: Synthetic oligonucleotide
caggcgaaagccagacuga

SEQ ID NO: 1506682 - RNA, 19 nt, Artificial Sequence
  Description of Artificial Sequence: Synthetic oligonucleotide
guguuagacuucacacaug

SEQ ID NO: 1506683 - RNA, 19 nt, Artificial Sequence
  Description of Artificial Sequence: Synthetic oligonucleotide
uggaucuuucaugguuggu

SEQ ID NO: 1506684 - RNA, 19 nt, Artificial Sequence
  Description of Artificial Sequence: Synthetic oligonucleotide
ucaccgcagggagaacuca

SEQ ID NO: 1506685 - RNA, 19 nt, Artificial Sequence
  Description of Artificial Sequence: Synthetic oligonucleotide
cccaaauaugaaguuuaag

SEQ ID NO: 1506686 - RNA, 19 nt, Artificial Sequence
  Description of Artificial Sequence: Synthetic oligonucleotide
caccaggcgaaagccagac

SEQ ID NO: 1506687 - RNA, 19 nt, Artificial Sequence
  Description of Artificial Sequence: Synthetic oligonucleotide
agugacgagagagcuuuua

SEQ ID NO: 1506688 - RNA, 19 nt, Artificial Sequence
  Description of Artificial Sequence: Synthetic oligonucleotide
acacaagccucaaauugua

SEQ ID NO: 1506689 - RNA, 19 nt, Artificial Sequence
  Description of Artificial Sequence: Synthetic oligonucleotide
caugguugguguucguugu

SEQ ID NO: 1506690 - RNA, 19 nt, Artificial Sequence
  Description of Artificial Sequence: Synthetic oligonucleotide
agaaccuaauuuacuuauu

SEQ ID NO: 1506691 - RNA, 19 nt, Artificial Sequence
  Description of Artificial Sequence: Synthetic oligonucleotide
ugcagacuauagucaugau

SEQ ID NO: 1506692 - RNA, 19 nt, Artificial Sequence
  Description of Artificial Sequence: Synthetic oligonucleotide
cuaguacugcugcgacuug

SEQ ID NO: 1506693 - RNA, 19 nt, Artificial Sequence
  Description of Artificial Sequence: Synthetic oligonucleotide
agugagaguugaagguuau

SEQ ID NO: 1506694 - RNA, 19 nt, Artificial Sequence
  Description of Artificial Sequence: Synthetic oligonucleotide
uggggccauucuacuuuca

SEQ ID NO: 1506695 - RNA, 19 nt, Artificial Sequence
  Description of Artificial Sequence: Synthetic oligonucleotide
cuaauacugccuucacagu

SEQ ID NO: 1506696 - RNA, 19 nt, Artificial Sequence
  Description of Artificial Sequence: Synthetic oligonucleotide
gacuauagucaugaugguu

SEQ ID NO: 1506697 - RNA, 19 nt, Artificial Sequence
  Description of Artificial Sequence: Synthetic oligonucleotide
ugucggccuccgcggaucu

SEQ ID NO: 1506698 - RNA, 19 nt, Artificial Sequence
  Description of Artificial Sequence: Synthetic oligonucleotide
gaugaugcuugggcuagua

SEQ ID NO: 1506699 - RNA, 19 nt, Artificial Sequence
  Description of Artificial Sequence: Synthetic oligonucleotide
caacgaauccugucggccu

SEQ ID NO: 1506700 - RNA, 19 nt, Artificial Sequence
  Description of Artificial Sequence: Synthetic oligonucleotide
guugguccuguguuagacu

SEQ ID NO: 1506701 - RNA, 19 nt, Artificial Sequence
  Description of Artificial Sequence: Synthetic oligonucleotide
acccaaauaugaaguuuaa

SEQ ID NO: 1506702 - RNA, 19 nt, Artificial Sequence
  Description of Artificial Sequence: Synthetic oligonucleotide
agucugugggagaucucga

SEQ ID NO: 1506703 - RNA, 19 nt, Artificial Sequence
  Description of Artificial Sequence: Synthetic oligonucleotide
guguggaaauugugcuaca

SEQ ID NO: 1506704 - RNA, 19 nt, Artificial Sequence
  Description of Artificial Sequence: Synthetic oligonucleotide
gcaauugagaaaucugcuu

SEQ ID NO: 1506705 - RNA, 19 nt, Artificial Sequence
  Description of Artificial Sequence: Synthetic oligonucleotide
guaucccuaacaugauaau

SEQ ID NO: 1506706 - RNA, 19 nt, Artificial Sequence
  Description of Artificial Sequence: Synthetic oligonucleotide
aggcgaaagccagacugau

SEQ ID NO: 1506707 - RNA, 19 nt, Artificial Sequence
  Description of Artificial Sequence: Synthetic oligonucleotide
guucaccgcagggagaacu

SEQ ID NO: 1506708 - RNA, 19 nt, Artificial Sequence
  Description of Artificial Sequence: Synthetic oligonucleotide
caguaucccuaacaugaua

SEQ ID NO: 1506709 - RNA, 19 nt, Artificial Sequence
  Description of Artificial Sequence: Synthetic oligonucleotide
ugaugaugcuugggcuagu

SEQ ID NO: 1506710 - RNA, 19 nt, Artificial Sequence
  Description of Artificial Sequence: Synthetic oligonucleotide
gaucucgagcuggaauaaa

SEQ ID NO: 1506711 - RNA, 19 nt, Artificial Sequence
  Description of Artificial Sequence: Synthetic oligonucleotide
aguaacugugugacagcuu

SEQ ID NO: 1506712 - RNA, 19 nt, Artificial Sequence
  Description of Artificial Sequence: Synthetic oligonucleotide
cauggggccauucuacuuu

SEQ ID NO: 1506713 - RNA, 19 nt, Artificial Sequence
  Description of Artificial Sequence: Synthetic oligonucleotide
ccuaagggaccaguuuagc

SEQ ID NO: 1506714 - RNA, 19 nt, Artificial Sequence
  Description of Artificial Sequence: Synthetic oligonucleotide
cuccgcggaucuccacagg

SEQ ID NO: 1506715 - RNA, 19 nt, Artificial Sequence
  Description of Artificial Sequence: Synthetic oligonucleotide
gggcuaguacugcugcgac

SEQ ID NO: 1506716 - RNA, 19 nt, Artificial Sequence
  Description of Artificial Sequence: Synthetic oligonucleotide
cuguguugguccuguguua

SEQ ID NO: 1506717 - RNA, 19 nt, Artificial Sequence
  Description of Artificial Sequence: Synthetic oligonucleotide
agauugcucuugaccacaa

SEQ ID NO: 1506718 - RNA, 19 nt, Artificial Sequence
  Description of Artificial Sequence: Synthetic oligonucleotide
agcggggacggcagccaac

SEQ ID NO: 1506719 - RNA, 19 nt, Artificial Sequence
  Description of Artificial Sequence: Synthetic oligonucleotide
cugaacacguauggcagcu

SEQ ID NO: 1506720 - RNA, 19 nt, Artificial Sequence
  Description of Artificial Sequence: Synthetic oligonucleotide
gcuugggcuaguacugcug

SEQ ID NO: 1506721 - RNA, 19 nt, Artificial Sequence
  Description of Artificial Sequence: Synthetic oligonucleotide
cauuuggauucagauugcu

SEQ ID NO: 1506722 - RNA, 19 nt, Artificial Sequence
  Description of Artificial Sequence: Synthetic oligonucleotide
gccccgucuacucaaauau

SEQ ID NO: 1506723 - RNA, 19 nt, Artificial Sequence
  Description of Artificial Sequence: Synthetic oligonucleotide
caugagaaugaccguuaau

SEQ ID NO: 1506724 - RNA, 19 nt, Artificial Sequence
  Description of Artificial Sequence: Synthetic oligonucleotide
ccuccgcggaucuccacag

SEQ ID NO: 1506725 - RNA, 19 nt, Artificial Sequence
  Description of Artificial Sequence: Synthetic oligonucleotide
ggggacggcagccaacgaa

SEQ ID NO: 1506726 - RNA, 19 nt, Artificial Sequence
  Description of Artificial Sequence: Synthetic oligonucleotide
ugcugcgacuuggaucuuu

SEQ ID NO: 1506727 - RNA, 19 nt, Artificial Sequence
  Description of Artificial Sequence: Synthetic oligonucleotide
cucuugaccacaagaucuu

SEQ ID NO: 1506728 - RNA, 19 nt, Artificial Sequence
  Description of Artificial Sequence: Synthetic oligonucleotide
augaugcaaugaauccuua

SEQ ID NO: 1506729 - RNA, 19 nt, Artificial Sequence
  Description of Artificial Sequence: Synthetic oligonucleotide
gcuguguugguccuguguu

SEQ ID NO: 1506730 - RNA, 19 nt, Artificial Sequence
  Description of Artificial Sequence: Synthetic oligonucleotide
gcuaguacugcugcgacuu

SEQ ID NO: 1506731 - RNA, 19 nt, Artificial Sequence
  Description of Artificial Sequence: Synthetic oligonucleotide
guuagacuucacacaugua

SEQ ID NO: 1506732 - RNA, 19 nt, Artificial Sequence
  Description of Artificial Sequence: Synthetic oligonucleotide
gggccauucuacuuucagu

SEQ ID NO: 1506733 - RNA, 19 nt, Artificial Sequence
  Description of Artificial Sequence: Synthetic oligonucleotide
cugucggccuccgcggauc

SEQ ID NO: 1506734 - RNA, 19 nt, Artificial Sequence
  Description of Artificial Sequence: Synthetic oligonucleotide
guugguguucguugucguu

SEQ ID NO: 1506735 - RNA, 19 nt, Artificial Sequence
  Description of Artificial Sequence: Synthetic oligonucleotide
gguugguguucguugucgu

SEQ ID NO: 1506736 - RNA, 19 nt, Artificial Sequence
  Description of Artificial Sequence: Synthetic oligonucleotide
gcugcgacuuggaucuuuc

SEQ ID NO: 1506737 - RNA, 19 nt, Artificial Sequence
  Description of Artificial Sequence: Synthetic oligonucleotide
gccuccgcggaucuccaca

SEQ ID NO: 1506738 - RNA, 19 nt, Artificial Sequence
  Description of Artificial Sequence: Synthetic oligonucleotide
ccaccaaaagagggccccg

SEQ ID NO: 1506739 - RNA, 19 nt, Artificial Sequence
  Description of Artificial Sequence: Synthetic oligonucleotide
ggccccgucuacucaaaua

SEQ ID NO: 1506740 - RNA, 19 nt, Artificial Sequence
  Description of Artificial Sequence: Synthetic oligonucleotide
ggcgaaagccagacugauc

SEQ ID NO: 1506741 - RNA, 19 nt, Artificial Sequence
  Description of Artificial Sequence: Synthetic oligonucleotide
agggaccaguuuagccuca

SEQ ID NO: 1506742 - RNA, 19 nt, Artificial Sequence
  Description of Artificial Sequence: Synthetic oligonucleotide
ccguuaauaaucacaucuu

SEQ ID NO: 1506743 - RNA, 19 nt, Artificial Sequence
  Description of Artificial Sequence: Synthetic oligonucleotide
cagucucagcacuuuuauu

SEQ ID NO: 1506744 - RNA, 19 nt, Artificial Sequence
  Description of Artificial Sequence: Synthetic oligonucleotide
gggacggcagccaacgaau

SEQ ID NO: 1506745 - RNA, 19 nt, Artificial Sequence
  Description of Artificial Sequence: Synthetic oligonucleotide
auuaagccauggggccauu

SEQ ID NO: 1506746 - RNA, 19 nt, Artificial Sequence
  Description of Artificial Sequence: Synthetic oligonucleotide
ggacggcagccaacgaauc

SEQ ID NO: 1506747 - RNA, 19 nt, Artificial Sequence
  Description of Artificial Sequence: Synthetic oligonucleotide
ccuacccaaauaugaaguu

SEQ ID NO: 1506748 - RNA, 19 nt, Artificial Sequence
  Description of Artificial Sequence: Synthetic oligonucleotide
gccauggggccauucuacu

SEQ ID NO: 1506749 - RNA, 19 nt, Artificial Sequence
  Description of Artificial Sequence: Synthetic oligonucleotide
caccaaaagagggccccgu

SEQ ID NO: 1506750 - RNA, 19 nt, Artificial Sequence
  Description of Artificial Sequence: Synthetic oligonucleotide
agggccccgucuacucaaa

SEQ ID NO: 1506751 - RNA, 19 nt, Artificial Sequence
  Description of Artificial Sequence: Synthetic oligonucleotide
ccgucuacucaaauauguu

SEQ ID NO: 1506752 - RNA, 19 nt, Artificial Sequence
  Description of Artificial Sequence: Synthetic oligonucleotide
ggccuccgcggaucuccac

SEQ ID NO: 1506753 - RNA, 19 nt, Artificial Sequence
  Description of Artificial Sequence: Synthetic oligonucleotide
ggucuuggauuugguccau

SEQ ID NO: 1506754 - RNA, 19 nt, Artificial Sequence
  Description of Artificial Sequence: Synthetic oligonucleotide
gggccccgucuacucaaau

SEQ ID NO: 1506755 - RNA, 19 nt, Artificial Sequence
  Description of Artificial Sequence: Synthetic oligonucleotide
cggggacggcagccaacga

SEQ ID NO: 1506756 - RNA, 19 nt, Artificial Sequence
  Description of Artificial Sequence: Synthetic oligonucleotide
aauaauugcuaaaagauac

SEQ ID NO: 1506757 - RNA, 19 nt, Artificial Sequence
  Description of Artificial Sequence: Synthetic oligonucleotide
aguauuaugauauuucuuc

SEQ ID NO: 1506758 - RNA, 19 nt, Artificial Sequence
  Description of Artificial Sequence: Synthetic oligonucleotide
ugaguugaaauuaaggagg

SEQ ID NO: 1506759 - RNA, 19 nt, Artificial Sequence
  Description of Artificial Sequence: Synthetic oligonucleotide
uucuauaauacucauaccc

SEQ ID NO: 1506760 - RNA, 19 nt, Artificial Sequence
  Description of Artificial Sequence: Synthetic oligonucleotide
aaaucuuuuggucaauacg

SEQ ID NO: 1506761 - RNA, 19 nt, Artificial Sequence
  Description of Artificial Sequence: Synthetic oligonucleotide
agcuguauaaggcaaaugc

SEQ ID NO: 1506762 - RNA, 19 nt, Artificial Sequence
  Description of Artificial Sequence: Synthetic oligonucleotide
aauggaucuauaaaucucc

SEQ ID NO: 1506763 - RNA, 19 nt, Artificial Sequence
  Description of Artificial Sequence: Synthetic oligonucleotide
uuguuuauaagcaugggca

SEQ ID NO: 1506764 - RNA, 19 nt, Artificial Sequence
  Description of Artificial Sequence: Synthetic oligonucleotide
aguucuauuagucugaggu

SEQ ID NO: 1506765 - RNA, 19 nt, Artificial Sequence
  Description of Artificial Sequence: Synthetic oligonucleotide
uaucuguuguacaacaugg

SEQ ID NO: 1506766 - RNA, 19 nt, Artificial Sequence
  Description of Artificial Sequence: Synthetic oligonucleotide
uuacaagucacaaauauuc

SEQ ID NO: 1506767 - RNA, 19 nt, Artificial Sequence
  Description of Artificial Sequence: Synthetic oligonucleotide
uagcaacuaaaauagaagg

SEQ ID NO: 1506768 - RNA, 19 nt, Artificial Sequence
  Description of Artificial Sequence: Synthetic oligonucleotide
uuagcaacuaaaauagaag

SEQ ID NO: 1506769 - RNA, 19 nt, Artificial Sequence
  Description of Artificial Sequence: Synthetic oligonucleotide
aaauucuccggguaauagc

SEQ ID NO: 1506770 - RNA, 19 nt, Artificial Sequence
  Description of Artificial Sequence: Synthetic oligonucleotide
aaaagcucauauucauucc

SEQ ID NO: 1506771 - RNA, 19 nt, Artificial Sequence
  Description of Artificial Sequence: Synthetic oligonucleotide
uuuaucuagauguucaaug

SEQ ID NO: 1506772 - RNA, 19 nt, Artificial Sequence
  Description of Artificial Sequence: Synthetic oligonucleotide
aaagcucauauucauuccg

SEQ ID NO: 1506773 - RNA, 19 nt, Artificial Sequence
  Description of Artificial Sequence: Synthetic oligonucleotide
uuaucuagauguucaaugg

SEQ ID NO: 1506774 - RNA, 19 nt, Artificial Sequence
  Description of Artificial Sequence: Synthetic oligonucleotide
aggaguccuauauauaucc

SEQ ID NO: 1506775 - RNA, 19 nt, Artificial Sequence
  Description of Artificial Sequence: Synthetic oligonucleotide
uguuguacaacauggguag

SEQ ID NO: 1506776 - RNA, 19 nt, Artificial Sequence
  Description of Artificial Sequence: Synthetic oligonucleotide
ucuaauuguucuauaauac

SEQ ID NO: 1506777 - RNA, 19 nt, Artificial Sequence
  Description of Artificial Sequence: Synthetic oligonucleotide
aaaugaguugaaauuaagg

SEQ ID NO: 1506778 - RNA, 19 nt, Artificial Sequence
  Description of Artificial Sequence: Synthetic oligonucleotide
uccacauauaguauuauga

SEQ ID NO: 1506779 - RNA, 19 nt, Artificial Sequence
  Description of Artificial Sequence: Synthetic oligonucleotide
aagccaaccuucuagcugg

SEQ ID NO: 1506780 - RNA, 19 nt, Artificial Sequence
  Description of Artificial Sequence: Synthetic oligonucleotide
aagaagauaagagaguucu

SEQ ID NO: 1506781 - RNA, 19 nt, Artificial Sequence
  Description of Artificial Sequence: Synthetic oligonucleotide
gauaagagaguucuauuag

SEQ ID NO: 1506782 - RNA, 19 nt, Artificial Sequence
  Description of Artificial Sequence: Synthetic oligonucleotide
aguaauugucuauaacugg

SEQ ID NO: 1506783 - RNA, 19 nt, Artificial Sequence
  Description of Artificial Sequence: Synthetic oligonucleotide
aauucaagaaggaaaagcu

SEQ ID NO: 1506784 - RNA, 19 nt, Artificial Sequence
  Description of Artificial Sequence: Synthetic oligonucleotide
gauagcauuuaauaauacc

SEQ ID NO: 1506785 - RNA, 19 nt, Artificial Sequence
  Description of Artificial Sequence: Synthetic oligonucleotide
ucuuuugacucacucagag

SEQ ID NO: 1506786 - RNA, 19 nt, Artificial Sequence
  Description of Artificial Sequence: Synthetic oligonucleotide
ucuauaauacucauaccca

SEQ ID NO: 1506787 - RNA, 19 nt, Artificial Sequence
  Description of Artificial Sequence: Synthetic oligonucleotide
aaccuuugaccccaguggc

SEQ ID NO: 1506788 - RNA, 19 nt, Artificial Sequence
  Description of Artificial Sequence: Synthetic oligonucleotide
gucacaaauauucugauuc

SEQ ID NO: 1506789 - RNA, 19 nt, Artificial Sequence
  Description of Artificial Sequence: Synthetic oligonucleotide
uaauuguucuauaauacuc

SEQ ID NO: 1506790 - RNA, 19 nt, Artificial Sequence
  Description of Artificial Sequence: Synthetic oligonucleotide
agaaccaacaucuugguaa

SEQ ID NO: 1506791 - RNA, 19 nt, Artificial Sequence
  Description of Artificial Sequence: Synthetic oligonucleotide
aaauuaaggaggacuacac

SEQ ID NO: 1506792 - RNA, 19 nt, Artificial Sequence
  Description of Artificial Sequence: Synthetic oligonucleotide
ugugauagcauuuaauaau

SEQ ID NO: 1506793 - RNA, 19 nt, Artificial Sequence
  Description of Artificial Sequence: Synthetic oligonucleotide
uguaacggaaccuuugacc

SEQ ID NO: 1506794 - RNA, 19 nt, Artificial Sequence
  Description of Artificial Sequence: Synthetic oligonucleotide
aaucuuuuggucaauacga

SEQ ID NO: 1506795 - RNA, 19 nt, Artificial Sequence
  Description of Artificial Sequence: Synthetic oligonucleotide
aaagagugcaaauuucaga

SEQ ID NO: 1506796 - RNA, 19 nt, Artificial Sequence
  Description of Artificial Sequence: Synthetic oligonucleotide
cuugguaaaggcuaggcug

SEQ ID NO: 1506797 - RNA, 19 nt, Artificial Sequence
  Description of Artificial Sequence: Synthetic oligonucleotide
caucauaguaacuguaacg

SEQ ID NO: 1506798 - RNA, 19 nt, Artificial Sequence
  Description of Artificial Sequence: Synthetic oligonucleotide
uuggucaauacgaagguca

SEQ ID NO: 1506799 - RNA, 19 nt, Artificial Sequence
  Description of Artificial Sequence: Synthetic oligonucleotide
acuaggauccgcuagauau

SEQ ID NO: 1506800 - RNA, 19 nt, Artificial Sequence
  Description of Artificial Sequence: Synthetic oligonucleotide
agcauuuaauaauaccccg

SEQ ID NO: 1506801 - RNA, 19 nt, Artificial Sequence
  Description of Artificial Sequence: Synthetic oligonucleotide
uagcauuuaauaauacccc

SEQ ID NO: 1506802 - RNA, 19 nt, Artificial Sequence
  Description of Artificial Sequence: Synthetic oligonucleotide
aggaugaaaauucuccggg

SEQ ID NO: 1506803 - RNA, 19 nt, Artificial Sequence
  Description of Artificial Sequence: Synthetic oligonucleotide
aaagauacaggaucuaauu

SEQ ID NO: 1506804 - RNA, 19 nt, Artificial Sequence
  Description of Artificial Sequence: Synthetic oligonucleotide
ugcacgaggaugaaugagg

SEQ ID NO: 1506805 - RNA, 19 nt, Artificial Sequence
  Description of Artificial Sequence: Synthetic oligonucleotide
acucauacccauuuuaucu

SEQ ID NO: 1506806 - RNA, 19 nt, Artificial Sequence
  Description of Artificial Sequence: Synthetic oligonucleotide
ucuuauauucuaauacaga

SEQ ID NO: 1506807 - RNA, 19 nt, Artificial Sequence
  Description of Artificial Sequence: Synthetic oligonucleotide
guaacggaaccuuugaccc

SEQ ID NO: 1506808 - RNA, 19 nt, Artificial Sequence
  Description of Artificial Sequence: Synthetic oligonucleotide
auuagucugagguuucagg

SEQ ID NO: 1506809 - RNA, 19 nt, Artificial Sequence
  Description of Artificial Sequence: Synthetic oligonucleotide
uauauauauccacacugga

SEQ ID NO: 1506810 - RNA, 19 nt, Artificial Sequence
  Description of Artificial Sequence: Synthetic oligonucleotide
ucugugauagcauuuaaua

SEQ ID NO: 1506811 - RNA, 19 nt, Artificial Sequence
  Description of Artificial Sequence: Synthetic oligonucleotide
auaguauuaugauauuucu

SEQ ID NO: 1506812 - RNA, 19 nt, Artificial Sequence
  Description of Artificial Sequence: Synthetic oligonucleotide
auacgaaggucauacagag

SEQ ID NO: 1506813 - RNA, 19 nt, Artificial Sequence
  Description of Artificial Sequence: Synthetic oligonucleotide
uaauugcuaaaagauacag

SEQ ID NO: 1506814 - RNA, 19 nt, Artificial Sequence
  Description of Artificial Sequence: Synthetic oligonucleotide
uguucaauggaucuauaaa

SEQ ID NO: 1506815 - RNA, 19 nt, Artificial Sequence
  Description of Artificial Sequence: Synthetic oligonucleotide
caauaauggcucuagcagg

SEQ ID NO: 1506816 - RNA, 19 nt, Artificial Sequence
  Description of Artificial Sequence: Synthetic oligonucleotide
ucaauggaucuauaaaucu

SEQ ID NO: 1506817 - RNA, 19 nt, Artificial Sequence
  Description of Artificial Sequence: Synthetic oligonucleotide
uuauauucuaauacagauc

SEQ ID NO: 1506818 - RNA, 19 nt, Artificial Sequence
  Description of Artificial Sequence: Synthetic oligonucleotide
acgaggaugaaugaggagg

SEQ ID NO: 1506819 - RNA, 19 nt, Artificial Sequence
  Description of Artificial Sequence: Synthetic oligonucleotide
ucugaaagcggaauauaug

SEQ ID NO: 1506820 - RNA, 19 nt, Artificial Sequence
  Description of Artificial Sequence: Synthetic oligonucleotide
uucaauggaucuauaaauc

SEQ ID NO: 1506821 - RNA, 19 nt, Artificial Sequence
  Description of Artificial Sequence: Synthetic oligonucleotide
guauguguauccugcaugg

SEQ ID NO: 1506822 - RNA, 19 nt, Artificial Sequence
  Description of Artificial Sequence: Synthetic oligonucleotide
aauuguucuauaauacuca

SEQ ID NO: 1506823 - RNA, 19 nt, Artificial Sequence
  Description of Artificial Sequence: Synthetic oligonucleotide
uuagucugagguuucagga

SEQ ID NO: 1506824 - RNA, 19 nt, Artificial Sequence
  Description of Artificial Sequence: Synthetic oligonucleotide
uuuucguagacugaacuug

SEQ ID NO: 1506825 - RNA, 19 nt, Artificial Sequence
  Description of Artificial Sequence: Synthetic oligonucleotide
ucuguguacaaucugcaaa

SEQ ID NO: 1506826 - RNA, 19 nt, Artificial Sequence
  Description of Artificial Sequence: Synthetic oligonucleotide
ucuuuucguagacugaacu

SEQ ID NO: 1506827 - RNA, 19 nt, Artificial Sequence
  Description of Artificial Sequence: Synthetic oligonucleotide
aauacuguguucaucuuca

SEQ ID NO: 1506828 - RNA, 19 nt, Artificial Sequence
  Description of Artificial Sequence: Synthetic oligonucleotide
gauuacuaggauccgcuag

SEQ ID NO: 1506829 - RNA, 19 nt, Artificial Sequence
  Description of Artificial Sequence: Synthetic oligonucleotide
accaguacaggaauaaugg

SEQ ID NO: 1506830 - RNA, 19 nt, Artificial Sequence
  Description of Artificial Sequence: Synthetic oligonucleotide
uugaaauuaaggaggacua

SEQ ID NO: 1506831 - RNA, 19 nt, Artificial Sequence
  Description of Artificial Sequence: Synthetic oligonucleotide
aaaauucuccggguaauag

SEQ ID NO: 1506832 - RNA, 19 nt, Artificial Sequence
  Description of Artificial Sequence: Synthetic oligonucleotide
aagagaguucuauuagucu

SEQ ID NO: 1506833 - RNA, 19 nt, Artificial Sequence
  Description of Artificial Sequence: Synthetic oligonucleotide
aauaauaccccgaugggau

SEQ ID NO: 1506834 - RNA, 19 nt, Artificial Sequence
  Description of Artificial Sequence: Synthetic oligonucleotide
uaagagaguucuauuaguc

SEQ ID NO: 1506835 - RNA, 19 nt, Artificial Sequence
  Description of Artificial Sequence: Synthetic oligonucleotide
auguguauccugcaugggg

SEQ ID NO: 1506836 - RNA, 19 nt, Artificial Sequence
  Description of Artificial Sequence: Synthetic oligonucleotide
uggugcacgaggaugaaug

SEQ ID NO: 1506837 - RNA, 19 nt, Artificial Sequence
  Description of Artificial Sequence: Synthetic oligonucleotide
uccguaaaucuuuugguca

SEQ ID NO: 1506838 - RNA, 19 nt, Artificial Sequence
  Description of Artificial Sequence: Synthetic oligonucleotide
uggcuuuagcuguauaagg

SEQ ID NO: 1506839 - RNA, 19 nt, Artificial Sequence
  Description of Artificial Sequence: Synthetic oligonucleotide
uuguguagcccuuuauuag

SEQ ID NO: 1506840 - RNA, 19 nt, Artificial Sequence
  Description of Artificial Sequence: Synthetic oligonucleotide
guaaacucaucuuuauggc

SEQ ID NO: 1506841 - RNA, 19 nt, Artificial Sequence
  Description of Artificial Sequence: Synthetic oligonucleotide
uaaugguaaacucaucuuu

SEQ ID NO: 1506842 - RNA, 19 nt, Artificial Sequence
  Description of Artificial Sequence: Synthetic oligonucleotide
gacuacaccuacuagaaaa

SEQ ID NO: 1506843 - RNA, 19 nt, Artificial Sequence
  Description of Artificial Sequence: Synthetic oligonucleotide
uuuuggucaauacgaaggu

SEQ ID NO: 1506844 - RNA, 19 nt, Artificial Sequence
  Description of Artificial Sequence: Synthetic oligonucleotide
uauaacuggagauuucuua

SEQ ID NO: 1506845 - RNA, 19 nt, Artificial Sequence
  Description of Artificial Sequence: Synthetic oligonucleotide
uguguagcccuuuauuagc

SEQ ID NO: 1506846 - RNA, 19 nt, Artificial Sequence
  Description of Artificial Sequence: Synthetic oligonucleotide
aucuaauuguucuauaaua

SEQ ID NO: 1506847 - RNA, 19 nt, Artificial Sequence
  Description of Artificial Sequence: Synthetic oligonucleotide
aauacgaaggucauacaga

SEQ ID NO: 1506848 - RNA, 19 nt, Artificial Sequence
  Description of Artificial Sequence: Synthetic oligonucleotide
uacuagaaaagaagauaag

SEQ ID NO: 1506849 - RNA, 19 nt, Artificial Sequence
  Description of Artificial Sequence: Synthetic oligonucleotide
cucuccguaaaucuuuugg

SEQ ID NO: 1506850 - RNA, 19 nt, Artificial Sequence
  Description of Artificial Sequence: Synthetic oligonucleotide
auuaugauauuucuucaaa

SEQ ID NO: 1506851 - RNA, 19 nt, Artificial Sequence
  Description of Artificial Sequence: Synthetic oligonucleotide
aauucuccggguaauagcu

SEQ ID NO: 1506852 - RNA, 19 nt, Artificial Sequence
  Description of Artificial Sequence: Synthetic oligonucleotide
agaggaguccuauauauau

SEQ ID NO: 1506853 - RNA, 19 nt, Artificial Sequence
  Description of Artificial Sequence: Synthetic oligonucleotide
uuuauggcuuuccauggcu

SEQ ID NO: 1506854 - RNA, 19 nt, Artificial Sequence
  Description of Artificial Sequence: Synthetic oligonucleotide
ucacaaauauucugauucc

SEQ ID NO: 1506855 - RNA, 19 nt, Artificial Sequence
  Description of Artificial Sequence: Synthetic oligonucleotide
uauuaugauauuucuucaa

SEQ ID NO: 1506856 - RNA, 19 nt, Artificial Sequence
  Description of Artificial Sequence: Synthetic oligonucleotide
gucaauacgaaggucauac

SEQ ID NO: 1506857 - RNA, 19 nt, Artificial Sequence
  Description of Artificial Sequence: Synthetic oligonucleotide
ucuauaacuggagauuucu

SEQ ID NO: 1506858 - RNA, 19 nt, Artificial Sequence
  Description of Artificial Sequence: Synthetic oligonucleotide
ugaaagcggaauauaugug

SEQ ID NO: 1506859 - RNA, 19 nt, Artificial Sequence
  Description of Artificial Sequence: Synthetic oligonucleotide
uauaugugcaugagucugc

SEQ ID NO: 1506860 - RNA, 19 nt, Artificial Sequence
  Description of Artificial Sequence: Synthetic oligonucleotide
auaagagaguucuauuagu

SEQ ID NO: 1506861 - RNA, 19 nt, Artificial Sequence
  Description of Artificial Sequence: Synthetic oligonucleotide
cuacuagaaaagaagauaa

SEQ ID NO: 1506862 - RNA, 19 nt, Artificial Sequence
  Description of Artificial Sequence: Synthetic oligonucleotide
uucuacacuggcucgacug

SEQ ID NO: 1506863 - RNA, 19 nt, Artificial Sequence
  Description of Artificial Sequence: Synthetic oligonucleotide
uaucuagauguucaaugga

SEQ ID NO: 1506864 - RNA, 19 nt, Artificial Sequence
  Description of Artificial Sequence: Synthetic oligonucleotide
agauaagagaguucuauua

SEQ ID NO: 1506865 - RNA, 19 nt, Artificial Sequence
  Description of Artificial Sequence: Synthetic oligonucleotide
agacugaacuugugaaagc

SEQ ID NO: 1506866 - RNA, 19 nt, Artificial Sequence
  Description of Artificial Sequence: Synthetic oligonucleotide
uaaaugcuuuacaagucac

SEQ ID NO: 1506867 - RNA, 19 nt, Artificial Sequence
  Description of Artificial Sequence: Synthetic oligonucleotide
uaaacucaucuuuauggcu

SEQ ID NO: 1506868 - RNA, 19 nt, Artificial Sequence
  Description of Artificial Sequence: Synthetic oligonucleotide
auuacuaggauccgcuaga

SEQ ID NO: 1506869 - RNA, 19 nt, Artificial Sequence
  Description of Artificial Sequence: Synthetic oligonucleotide
auaguaacuguaacggaac

SEQ ID NO: 1506870 - RNA, 19 nt, Artificial Sequence
  Description of Artificial Sequence: Synthetic oligonucleotide
ucuagauguucaauggauc

SEQ ID NO: 1506871 - RNA, 19 nt, Artificial Sequence
  Description of Artificial Sequence: Synthetic oligonucleotide
uucugaaagcggaauauau

SEQ ID NO: 1506872 - RNA, 19 nt, Artificial Sequence
  Description of Artificial Sequence: Synthetic oligonucleotide
augcuaaaugcuuuacaag

SEQ ID NO: 1506873 - RNA, 19 nt, Artificial Sequence
  Description of Artificial Sequence: Synthetic oligonucleotide
uaaaggcuaggcuggaccc

SEQ ID NO: 1506874 - RNA, 19 nt, Artificial Sequence
  Description of Artificial Sequence: Synthetic oligonucleotide
agagauuacuaggauccgc

SEQ ID NO: 1506875 - RNA, 19 nt, Artificial Sequence
  Description of Artificial Sequence: Synthetic oligonucleotide
uaauaauaccccgauggga

SEQ ID NO: 1506876 - RNA, 19 nt, Artificial Sequence
  Description of Artificial Sequence: Synthetic oligonucleotide
auccgcuagauauuuacug

SEQ ID NO: 1506877 - RNA, 19 nt, Artificial Sequence
  Description of Artificial Sequence: Synthetic oligonucleotide
auauauauccacacuggag

SEQ ID NO: 1506878 - RNA, 19 nt, Artificial Sequence
  Description of Artificial Sequence: Synthetic oligonucleotide
uauucauuccguucuucug

SEQ ID NO: 1506879 - RNA, 19 nt, Artificial Sequence
  Description of Artificial Sequence: Synthetic oligonucleotide
gaggacuacaccuacuaga

SEQ ID NO: 1506880 - RNA, 19 nt, Artificial Sequence
  Description of Artificial Sequence: Synthetic oligonucleotide
aacucacugaacugucuug

SEQ ID NO: 1506881 - RNA, 19 nt, Artificial Sequence
  Description of Artificial Sequence: Synthetic oligonucleotide
ccuauauauauccacacug

SEQ ID NO: 1506882 - RNA, 19 nt, Artificial Sequence
  Description of Artificial Sequence: Synthetic oligonucleotide
auuagcaacuaaaauagaa

SEQ ID NO: 1506883 - RNA, 19 nt, Artificial Sequence
  Description of Artificial Sequence: Synthetic oligonucleotide
aagauaagagaguucuauu

SEQ ID NO: 1506884 - RNA, 19 nt, Artificial Sequence
  Description of Artificial Sequence: Synthetic oligonucleotide
ucuccguaaaucuuuuggu

SEQ ID NO: 1506885 - RNA, 19 nt, Artificial Sequence
  Description of Artificial Sequence: Synthetic oligonucleotide
uccuauauauauccacacu

SEQ ID NO: 1506886 - RNA, 19 nt, Artificial Sequence
  Description of Artificial Sequence: Synthetic oligonucleotide
caauggaucuauaaaucuc

SEQ ID NO: 1506887 - RNA, 19 nt, Artificial Sequence
  Description of Artificial Sequence: Synthetic oligonucleotide
cuuauauucuaauacagau

SEQ ID NO: 1506888 - RNA, 19 nt, Artificial Sequence
  Description of Artificial Sequence: Synthetic oligonucleotide
ugcauaacucacugaacug

SEQ ID NO: 1506889 - RNA, 19 nt, Artificial Sequence
  Description of Artificial Sequence: Synthetic oligonucleotide
aaaagauacaggaucuaau

SEQ ID NO: 1506890 - RNA, 19 nt, Artificial Sequence
  Description of Artificial Sequence: Synthetic oligonucleotide
cucacucagagcuccaacc

SEQ ID NO: 1506891 - RNA, 19 nt, Artificial Sequence
  Description of Artificial Sequence: Synthetic oligonucleotide
ugguaaacucaucuuuaug

SEQ ID NO: 1506892 - RNA, 19 nt, Artificial Sequence
  Description of Artificial Sequence: Synthetic oligonucleotide
ugcaaagagugcaaauuuc

SEQ ID NO: 1506893 - RNA, 19 nt, Artificial Sequence
  Description of Artificial Sequence: Synthetic oligonucleotide
gaagguaucuguuguacaa

SEQ ID NO: 1506894 - RNA, 19 nt, Artificial Sequence
  Description of Artificial Sequence: Synthetic oligonucleotide
uccgcuagauauuuacuga

SEQ ID NO: 1506895 - RNA, 19 nt, Artificial Sequence
  Description of Artificial Sequence: Synthetic oligonucleotide
uuucguagacugaacuugu

SEQ ID NO: 1506896 - RNA, 19 nt, Artificial Sequence
  Description of Artificial Sequence: Synthetic oligonucleotide
ucguagacugaacuuguga

SEQ ID NO: 1506897 - RNA, 19 nt, Artificial Sequence
  Description of Artificial Sequence: Synthetic oligonucleotide
ggauucaucauaguaacug

SEQ ID NO: 1506898 - RNA, 19 nt, Artificial Sequence
  Description of Artificial Sequence: Synthetic oligonucleotide
ugcaaauuucagauaugcu

SEQ ID NO: 1506899 - RNA, 19 nt, Artificial Sequence
  Description of Artificial Sequence: Synthetic oligonucleotide
uauaagcaugggcagcaca

SEQ ID NO: 1506900 - RNA, 19 nt, Artificial Sequence
  Description of Artificial Sequence: Synthetic oligonucleotide
aguacaggaauaaugguaa

SEQ ID NO: 1506901 - RNA, 19 nt, Artificial Sequence
  Description of Artificial Sequence: Synthetic oligonucleotide
cacaaagagauuacuagga

SEQ ID NO: 1506902 - RNA, 19 nt, Artificial Sequence
  Description of Artificial Sequence: Synthetic oligonucleotide
cacugaacugucuugccag

SEQ ID NO: 1506903 - RNA, 19 nt, Artificial Sequence
  Description of Artificial Sequence: Synthetic oligonucleotide
aggaauaaugguaaacuca

SEQ ID NO: 1506904 - RNA, 19 nt, Artificial Sequence
  Description of Artificial Sequence: Synthetic oligonucleotide
augugcaugagucugcaaa

SEQ ID NO: 1506905 - RNA, 19 nt, Artificial Sequence
  Description of Artificial Sequence: Synthetic oligonucleotide
uuuagcuguauaaggcaaa

SEQ ID NO: 1506906 - RNA, 19 nt, Artificial Sequence
  Description of Artificial Sequence: Synthetic oligonucleotide
auacagaggaguccuauau

SEQ ID NO: 1506907 - RNA, 19 nt, Artificial Sequence
  Description of Artificial Sequence: Synthetic oligonucleotide
aaagcggaauauaugugca

SEQ ID NO: 1506908 - RNA, 19 nt, Artificial Sequence
  Description of Artificial Sequence: Synthetic oligonucleotide
cuucaguggaccgugagug

SEQ ID NO: 1506909 - RNA, 19 nt, Artificial Sequence
  Description of Artificial Sequence: Synthetic oligonucleotide
agaucauuuauaaaugcaa

SEQ ID NO: 1506910 - RNA, 19 nt, Artificial Sequence
  Description of Artificial Sequence: Synthetic oligonucleotide
uucuaauacagaucauuua

SEQ ID NO: 1506911 - RNA, 19 nt, Artificial Sequence
  Description of Artificial Sequence: Synthetic oligonucleotide
aggaaaagcucauauucau

SEQ ID NO: 1506912 - RNA, 19 nt, Artificial Sequence
  Description of Artificial Sequence: Synthetic oligonucleotide
auaaugguaaacucaucuu

SEQ ID NO: 1506913 - RNA, 19 nt, Artificial Sequence
  Description of Artificial Sequence: Synthetic oligonucleotide
aaugguaaacucaucuuua

SEQ ID NO: 1506914 - RNA, 19 nt, Artificial Sequence
  Description of Artificial Sequence: Synthetic oligonucleotide
cauuucaauacuguguuca

SEQ ID NO: 1506915 - RNA, 19 nt, Artificial Sequence
  Description of Artificial Sequence: Synthetic oligonucleotide
uaauggcucuagcaggucu

SEQ ID NO: 1506916 - RNA, 19 nt, Artificial Sequence
  Description of Artificial Sequence: Synthetic oligonucleotide
aaacucaucuuuauggcuu

SEQ ID NO: 1506917 - RNA, 19 nt, Artificial Sequence
  Description of Artificial Sequence: Synthetic oligonucleotide
uaguauuaugauauuucuu

SEQ ID NO: 1506918 - RNA, 19 nt, Artificial Sequence
  Description of Artificial Sequence: Synthetic oligonucleotide
uagcccuuuauuagcaacu

SEQ ID NO: 1506919 - RNA, 19 nt, Artificial Sequence
  Description of Artificial Sequence: Synthetic oligonucleotide
auggcuuuagcuguauaag

SEQ ID NO: 1506920 - RNA, 19 nt, Artificial Sequence
  Description of Artificial Sequence: Synthetic oligonucleotide
uaaggaggacuacaccuac

SEQ ID NO: 1506921 - RNA, 19 nt, Artificial Sequence
  Description of Artificial Sequence: Synthetic oligonucleotide
cuuuugacucacucagagc

SEQ ID NO: 1506922 - RNA, 19 nt, Artificial Sequence
  Description of Artificial Sequence: Synthetic oligonucleotide
caggaauaaugguaaacuc

SEQ ID NO: 1506923 - RNA, 19 nt, Artificial Sequence
  Description of Artificial Sequence: Synthetic oligonucleotide
agcuccaaccaguacagga

SEQ ID NO: 1506924 - RNA, 19 nt, Artificial Sequence
  Description of Artificial Sequence: Synthetic oligonucleotide
acuguaacggaaccuuuga

SEQ ID NO: 1506925 - RNA, 19 nt, Artificial Sequence
  Description of Artificial Sequence: Synthetic oligonucleotide
gacaucuuggugccugugc

SEQ ID NO: 1506926 - RNA, 19 nt, Artificial Sequence
  Description of Artificial Sequence: Synthetic oligonucleotide
gacaggggcacaugauggg

SEQ ID NO: 1506927 - RNA, 19 nt, Artificial Sequence
  Description of Artificial Sequence: Synthetic oligonucleotide
aaaugcuuuacaagucaca

SEQ ID NO: 1506928 - RNA, 19 nt, Artificial Sequence
  Description of Artificial Sequence: Synthetic oligonucleotide
aacuguaacggaaccuuug

SEQ ID NO: 1506929 - RNA, 19 nt, Artificial Sequence
  Description of Artificial Sequence: Synthetic oligonucleotide
ucugcaaagagugcaaauu

SEQ ID NO: 1506930 - RNA, 19 nt, Artificial Sequence
  Description of Artificial Sequence: Synthetic oligonucleotide
auggaucuauaaaucuccc

SEQ ID NO: 1506931 - RNA, 19 nt, Artificial Sequence
  Description of Artificial Sequence: Synthetic oligonucleotide
acuugugaaagccaaccuu

SEQ ID NO: 1506932 - RNA, 19 nt, Artificial Sequence
  Description of Artificial Sequence: Synthetic oligonucleotide
agcaggucuuuucguagac

SEQ ID NO: 1506933 - RNA, 19 nt, Artificial Sequence
  Description of Artificial Sequence: Synthetic oligonucleotide
cugaaagcggaauauaugu

SEQ ID NO: 1506934 - RNA, 19 nt, Artificial Sequence
  Description of Artificial Sequence: Synthetic oligonucleotide
agcaacuaaaauagaaggu

SEQ ID NO: 1506935 - RNA, 19 nt, Artificial Sequence
  Description of Artificial Sequence: Synthetic oligonucleotide
gaugaaugaggaggcggcg

SEQ ID NO: 1506936 - RNA, 19 nt, Artificial Sequence
  Description of Artificial Sequence: Synthetic oligonucleotide
aguuguguagcccuuuauu

SEQ ID NO: 1506937 - RNA, 19 nt, Artificial Sequence
  Description of Artificial Sequence: Synthetic oligonucleotide
auauaguauuaugauauuu

SEQ ID NO: 1506938 - RNA, 19 nt, Artificial Sequence
  Description of Artificial Sequence: Synthetic oligonucleotide
agaagguaucuguuguaca

SEQ ID NO: 1506939 - RNA, 19 nt, Artificial Sequence
  Description of Artificial Sequence: Synthetic oligonucleotide
guccuauauauauccacac

SEQ ID NO: 1506940 - RNA, 19 nt, Artificial Sequence
  Description of Artificial Sequence: Synthetic oligonucleotide
uugcuaaaagauacaggau

SEQ ID NO: 1506941 - RNA, 19 nt, Artificial Sequence
  Description of Artificial Sequence: Synthetic oligonucleotide
cuccguaaaucuuuugguc

SEQ ID NO: 1506942 - RNA, 19 nt, Artificial Sequence
  Description of Artificial Sequence: Synthetic oligonucleotide
uauuagucugagguuucag

SEQ ID NO: 1506943 - RNA, 19 nt, Artificial Sequence
  Description of Artificial Sequence: Synthetic oligonucleotide
aacggaaccuuugacccca

SEQ ID NO: 1506944 - RNA, 19 nt, Artificial Sequence
  Description of Artificial Sequence: Synthetic oligonucleotide
guuguguagcccuuuauua

SEQ ID NO: 1506945 - RNA, 19 nt, Artificial Sequence
  Description of Artificial Sequence: Synthetic oligonucleotide
acuuguuuauaagcauggg

SEQ ID NO: 1506946 - RNA, 19 nt, Artificial Sequence
  Description of Artificial Sequence: Synthetic oligonucleotide
auacccauuuuaucuagau

SEQ ID NO: 1506947 - RNA, 19 nt, Artificial Sequence
  Description of Artificial Sequence: Synthetic oligonucleotide
ucgguuggacaucuuggug

SEQ ID NO: 1506948 - RNA, 19 nt, Artificial Sequence
  Description of Artificial Sequence: Synthetic oligonucleotide
agagaccacaaagagauua

SEQ ID NO: 1506949 - RNA, 19 nt, Artificial Sequence
  Description of Artificial Sequence: Synthetic oligonucleotide
cuggagagcgcacaucgag

SEQ ID NO: 1506950 - RNA, 19 nt, Artificial Sequence
  Description of Artificial Sequence: Synthetic oligonucleotide
uaacucacugaacugucuu

SEQ ID NO: 1506951 - RNA, 19 nt, Artificial Sequence
  Description of Artificial Sequence: Synthetic oligonucleotide
ugucuauaacuggagauuu

SEQ ID NO: 1506952 - RNA, 19 nt, Artificial Sequence
  Description of Artificial Sequence: Synthetic oligonucleotide
aguaacuguaacggaaccu

SEQ ID NO: 1506953 - RNA, 19 nt, Artificial Sequence
  Description of Artificial Sequence: Synthetic oligonucleotide
ucgacugggcauaauucaa

SEQ ID NO: 1506954 - RNA, 19 nt, Artificial Sequence
  Description of Artificial Sequence: Synthetic oligonucleotide
cuuuacaagucacaaauau

SEQ ID NO: 1506955 - RNA, 19 nt, Artificial Sequence
  Description of Artificial Sequence: Synthetic oligonucleotide
agcggaauauaugugcaug

SEQ ID NO: 1506956 - RNA, 19 nt, Artificial Sequence
  Description of Artificial Sequence: Synthetic oligonucleotide
acucgguuggacaucuugg

SEQ ID NO: 1506957 - RNA, 19 nt, Artificial Sequence
  Description of Artificial Sequence: Synthetic oligonucleotide
aguugaaauuaaggaggac

SEQ ID NO: 1506958 - RNA, 19 nt, Artificial Sequence
  Description of Artificial Sequence: Synthetic oligonucleotide
auaauaccccgaugggaug

SEQ ID NO: 1506959 - RNA, 19 nt, Artificial Sequence
  Description of Artificial Sequence: Synthetic oligonucleotide
ugaaaauucuccggguaau

SEQ ID NO: 1506960 - RNA, 19 nt, Artificial Sequence
  Description of Artificial Sequence: Synthetic oligonucleotide
auaauugcuaaaagauaca

SEQ ID NO: 1506961 - RNA, 19 nt, Artificial Sequence
  Description of Artificial Sequence: Synthetic oligonucleotide
uauguguauccugcauggg

SEQ ID NO: 1506962 - RNA, 19 nt, Artificial Sequence
  Description of Artificial Sequence: Synthetic oligonucleotide
auauucugauuccagccuu

SEQ ID NO: 1506963 - RNA, 19 nt, Artificial Sequence
  Description of Artificial Sequence: Synthetic oligonucleotide
uauucugauuccagccuuc

SEQ ID NO: 1506964 - RNA, 19 nt, Artificial Sequence
  Description of Artificial Sequence: Synthetic oligonucleotide
acauucguucaaacauucc

SEQ ID NO: 1506965 - RNA, 19 nt, Artificial Sequence
  Description of Artificial Sequence: Synthetic oligonucleotide
uugucuauaacuggagauu

SEQ ID NO: 1506966 - RNA, 19 nt, Artificial Sequence
  Description of Artificial Sequence: Synthetic oligonucleotide
cuauggugcacgaggauga

SEQ ID NO: 1506967 - RNA, 19 nt, Artificial Sequence
  Description of Artificial Sequence: Synthetic oligonucleotide
gaagauaagagaguucuau

SEQ ID NO: 1506968 - RNA, 19 nt, Artificial Sequence
  Description of Artificial Sequence: Synthetic oligonucleotide
cuaauuguucuauaauacu

SEQ ID NO: 1506969 - RNA, 19 nt, Artificial Sequence
  Description of Artificial Sequence: Synthetic oligonucleotide
ugggcauucagcugagguc

SEQ ID NO: 1506970 - RNA, 19 nt, Artificial Sequence
  Description of Artificial Sequence: Synthetic oligonucleotide
agggucggagcuucagugg

SEQ ID NO: 1506971 - RNA, 19 nt, Artificial Sequence
  Description of Artificial Sequence: Synthetic oligonucleotide
augaaugaggaggcggcgg

SEQ ID NO: 1506972 - RNA, 19 nt, Artificial Sequence
  Description of Artificial Sequence: Synthetic oligonucleotide
auuucaauacuguguucau

SEQ ID NO: 1506973 - RNA, 19 nt, Artificial Sequence
  Description of Artificial Sequence: Synthetic oligonucleotide
guagcccuuuauuagcaac

SEQ ID NO: 1506974 - RNA, 19 nt, Artificial Sequence
  Description of Artificial Sequence: Synthetic oligonucleotide
ccggguaauagcuggaucc

SEQ ID NO: 1506975 - RNA, 19 nt, Artificial Sequence
  Description of Artificial Sequence: Synthetic oligonucleotide
ucaauacgaaggucauaca

SEQ ID NO: 1506976 - RNA, 19 nt, Artificial Sequence
  Description of Artificial Sequence: Synthetic oligonucleotide
agauguucaauggaucuau

SEQ ID NO: 1506977 - RNA, 19 nt, Artificial Sequence
  Description of Artificial Sequence: Synthetic oligonucleotide
uucguagacugaacuugug

SEQ ID NO: 1506978 - RNA, 19 nt, Artificial Sequence
  Description of Artificial Sequence: Synthetic oligonucleotide
aguggaccgugagugcucc

SEQ ID NO: 1506979 - RNA, 19 nt, Artificial Sequence
  Description of Artificial Sequence: Synthetic oligonucleotide
auggguaguaauugucuau

SEQ ID NO: 1506980 - RNA, 19 nt, Artificial Sequence
  Description of Artificial Sequence: Synthetic oligonucleotide
aagcggaauauaugugcau

SEQ ID NO: 1506981 - RNA, 19 nt, Artificial Sequence
  Description of Artificial Sequence: Synthetic oligonucleotide
agagccacaguauguguau

SEQ ID NO: 1506982 - RNA, 19 nt, Artificial Sequence
  Description of Artificial Sequence: Synthetic oligonucleotide
uaacggaaccuuugacccc

SEQ ID NO: 1506983 - RNA, 19 nt, Artificial Sequence
  Description of Artificial Sequence: Synthetic oligonucleotide
uacagaggaguccuauaua

SEQ ID NO: 1506984 - RNA, 19 nt, Artificial Sequence
  Description of Artificial Sequence: Synthetic oligonucleotide
cuguuguacaacaugggua

SEQ ID NO: 1506985 - RNA, 19 nt, Artificial Sequence
  Description of Artificial Sequence: Synthetic oligonucleotide
gcagaaaucagaagagacc

SEQ ID NO: 1506986 - RNA, 19 nt, Artificial Sequence
  Description of Artificial Sequence: Synthetic oligonucleotide
caguacaggaauaauggua

SEQ ID NO: 1506987 - RNA, 19 nt, Artificial Sequence
  Description of Artificial Sequence: Synthetic oligonucleotide
ggauccacuuguuuauaag

SEQ ID NO: 1506988 - RNA, 19 nt, Artificial Sequence
  Description of Artificial Sequence: Synthetic oligonucleotide
uuagcuguauaaggcaaau

SEQ ID NO: 1506989 - RNA, 19 nt, Artificial Sequence
  Description of Artificial Sequence: Synthetic oligonucleotide
ggauccgcuagauauuuac

SEQ ID NO: 1506990 - RNA, 19 nt, Artificial Sequence
  Description of Artificial Sequence: Synthetic oligonucleotide
uaauaccccgaugggaugu

SEQ ID NO: 1506991 - RNA, 19 nt, Artificial Sequence
  Description of Artificial Sequence: Synthetic oligonucleotide
cauucguucaaacauuccu

SEQ ID NO: 1506992 - RNA, 19 nt, Artificial Sequence
  Description of Artificial Sequence: Synthetic oligonucleotide
acuauucugaaagcggaau

SEQ ID NO: 1506993 - RNA, 19 nt, Artificial Sequence
  Description of Artificial Sequence: Synthetic oligonucleotide
acauggguaguaauugucu

SEQ ID NO: 1506994 - RNA, 19 nt, Artificial Sequence
  Description of Artificial Sequence: Synthetic oligonucleotide
gcucuagcaggucuuuucg

SEQ ID NO: 1506995 - RNA, 19 nt, Artificial Sequence
  Description of Artificial Sequence: Synthetic oligonucleotide
uggauccacuuguuuauaa

SEQ ID NO: 1506996 - RNA, 19 nt, Artificial Sequence
  Description of Artificial Sequence: Synthetic oligonucleotide
cucgacugggcauaauuca

SEQ ID NO: 1506997 - RNA, 19 nt, Artificial Sequence
  Description of Artificial Sequence: Synthetic oligonucleotide
acaguauguguauccugca

SEQ ID NO: 1506998 - RNA, 19 nt, Artificial Sequence
  Description of Artificial Sequence: Synthetic oligonucleotide
uggguaguaauugucuaua

SEQ ID NO: 1506999 - RNA, 19 nt, Artificial Sequence
  Description of Artificial Sequence: Synthetic oligonucleotide
aggaggacuacaccuacua

SEQ ID NO: 1507000 - RNA, 19 nt, Artificial Sequence
  Description of Artificial Sequence: Synthetic oligonucleotide
auucagcugagguccugag

SEQ ID NO: 1507001 - RNA, 19 nt, Artificial Sequence
  Description of Artificial Sequence: Synthetic oligonucleotide
agaguucuauuagucugag

SEQ ID NO: 1507002 - RNA, 19 nt, Artificial Sequence
  Description of Artificial Sequence: Synthetic oligonucleotide
uccgaauuccuguucuuuu

SEQ ID NO: 1507003 - RNA, 19 nt, Artificial Sequence
  Description of Artificial Sequence: Synthetic oligonucleotide
ggaucuaauuguucuauaa

SEQ ID NO: 1507004 - RNA, 19 nt, Artificial Sequence
  Description of Artificial Sequence: Synthetic oligonucleotide
ucggagcuucaguggaccg

SEQ ID NO: 1507005 - RNA, 19 nt, Artificial Sequence
  Description of Artificial Sequence: Synthetic oligonucleotide
ggcagaaaucagaagagac

SEQ ID NO: 1507006 - RNA, 19 nt, Artificial Sequence
  Description of Artificial Sequence: Synthetic oligonucleotide
uuuggucaauacgaagguc

SEQ ID NO: 1507007 - RNA, 19 nt, Artificial Sequence
  Description of Artificial Sequence: Synthetic oligonucleotide
auacucauacccauuuuau

SEQ ID NO: 1507008 - RNA, 19 nt, Artificial Sequence
  Description of Artificial Sequence: Synthetic oligonucleotide
cuguaacggaaccuuugac

SEQ ID NO: 1507009 - RNA, 19 nt, Artificial Sequence
  Description of Artificial Sequence: Synthetic oligonucleotide
gugauagcauuuaauaaua

SEQ ID NO: 1507010 - RNA, 19 nt, Artificial Sequence
  Description of Artificial Sequence: Synthetic oligonucleotide
gacagagugugagucugug

SEQ ID NO: 1507011 - RNA, 19 nt, Artificial Sequence
  Description of Artificial Sequence: Synthetic oligonucleotide
gaggaugaaugaggaggcg

SEQ ID NO: 1507012 - RNA, 19 nt, Artificial Sequence
  Description of Artificial Sequence: Synthetic oligonucleotide
acaucuugguaaaggcuag

SEQ ID NO: 1507013 - RNA, 19 nt, Artificial Sequence
  Description of Artificial Sequence: Synthetic oligonucleotide
aggacuacaccuacuagaa

SEQ ID NO: 1507014 - RNA, 19 nt, Artificial Sequence
  Description of Artificial Sequence: Synthetic oligonucleotide
cacucgguuggacaucuug

SEQ ID NO: 1507015 - RNA, 19 nt, Artificial Sequence
  Description of Artificial Sequence: Synthetic oligonucleotide
uggaccgugagugcuccag

SEQ ID NO: 1507016 - RNA, 19 nt, Artificial Sequence
  Description of Artificial Sequence: Synthetic oligonucleotide
gcaacuaaaauagaaggua

SEQ ID NO: 1507017 - RNA, 19 nt, Artificial Sequence
  Description of Artificial Sequence: Synthetic oligonucleotide
aacuauucugaaagcggaa

SEQ ID NO: 1507018 - RNA, 19 nt, Artificial Sequence
  Description of Artificial Sequence: Synthetic oligonucleotide
acaggaucuaauuguucua

SEQ ID NO: 1507019 - RNA, 19 nt, Artificial Sequence
  Description of Artificial Sequence: Synthetic oligonucleotide
uccggguaauagcuggauc

SEQ ID NO: 1507020 - RNA, 19 nt, Artificial Sequence
  Description of Artificial Sequence: Synthetic oligonucleotide
gagauuacuaggauccgcu

SEQ ID NO: 1507021 - RNA, 19 nt, Artificial Sequence
  Description of Artificial Sequence: Synthetic oligonucleotide
uuccugucuuccauagcuc

SEQ ID NO: 1507022 - RNA, 19 nt, Artificial Sequence
  Description of Artificial Sequence: Synthetic oligonucleotide
uguagcccuuuauuagcaa

SEQ ID NO: 1507023 - RNA, 19 nt, Artificial Sequence
  Description of Artificial Sequence: Synthetic oligonucleotide
uagauguucaauggaucua

SEQ ID NO: 1507024 - RNA, 19 nt, Artificial Sequence
  Description of Artificial Sequence: Synthetic oligonucleotide
uccaaccaguacaggaaua

SEQ ID NO: 1507025 - RNA, 19 nt, Artificial Sequence
  Description of Artificial Sequence: Synthetic oligonucleotide
ucuccggguaauagcugga

SEQ ID NO: 1507026 - RNA, 19 nt, Artificial Sequence
  Description of Artificial Sequence: Synthetic oligonucleotide
ggaugaaugaggaggcggc

SEQ ID NO: 1507027 - RNA, 19 nt, Artificial Sequence
  Description of Artificial Sequence: Synthetic oligonucleotide
auaauggcucuagcagguc

SEQ ID NO: 1507028 - RNA, 19 nt, Artificial Sequence
  Description of Artificial Sequence: Synthetic oligonucleotide
uagcuguauaaggcaaaug

SEQ ID NO: 1507029 - RNA, 19 nt, Artificial Sequence
  Description of Artificial Sequence: Synthetic oligonucleotide
auaugugcaugagucugca

SEQ ID NO: 1507030 - RNA, 19 nt, Artificial Sequence
  Description of Artificial Sequence: Synthetic oligonucleotide
ugaccccaguggcagaaau

SEQ ID NO: 1507031 - RNA, 19 nt, Artificial Sequence
  Description of Artificial Sequence: Synthetic oligonucleotide
cacgaggaugaaugaggag

SEQ ID NO: 1507032 - RNA, 19 nt, Artificial Sequence
  Description of Artificial Sequence: Synthetic oligonucleotide
agcucauauucauuccguu

SEQ ID NO: 1507033 - RNA, 19 nt, Artificial Sequence
  Description of Artificial Sequence: Synthetic oligonucleotide
accuacuagaaaagaagau

SEQ ID NO: 1507034 - RNA, 19 nt, Artificial Sequence
  Description of Artificial Sequence: Synthetic oligonucleotide
cugucuugccagcuucuac

SEQ ID NO: 1507035 - RNA, 19 nt, Artificial Sequence
  Description of Artificial Sequence: Synthetic oligonucleotide
gcucauauucauuccguuc

SEQ ID NO: 1507036 - RNA, 19 nt, Artificial Sequence
  Description of Artificial Sequence: Synthetic oligonucleotide
caucuugguaaaggcuagg

SEQ ID NO: 1507037 - RNA, 19 nt, Artificial Sequence
  Description of Artificial Sequence: Synthetic oligonucleotide
agaccacaaagagauuacu

SEQ ID NO: 1507038 - RNA, 19 nt, Artificial Sequence
  Description of Artificial Sequence: Synthetic oligonucleotide
cauuccugucuuccauagc

SEQ ID NO: 1507039 - RNA, 19 nt, Artificial Sequence
  Description of Artificial Sequence: Synthetic oligonucleotide
agcgcacaucgagacaggg

SEQ ID NO: 1507040 - RNA, 19 nt, Artificial Sequence
  Description of Artificial Sequence: Synthetic oligonucleotide
ggaggacuacaccuacuag

SEQ ID NO: 1507041 - RNA, 19 nt, Artificial Sequence
  Description of Artificial Sequence: Synthetic oligonucleotide
agauuacuaggauccgcua

SEQ ID NO: 1507042 - RNA, 19 nt, Artificial Sequence
  Description of Artificial Sequence: Synthetic oligonucleotide
uaggauccgcuagauauuu

SEQ ID NO: 1507043 - RNA, 19 nt, Artificial Sequence
  Description of Artificial Sequence: Synthetic oligonucleotide
aggaucuaauuguucuaua

SEQ ID NO: 1507044 - RNA, 19 nt, Artificial Sequence
  Description of Artificial Sequence: Synthetic oligonucleotide
accgugagugcuccagcug

SEQ ID NO: 1507045 - RNA, 19 nt, Artificial Sequence
  Description of Artificial Sequence: Synthetic oligonucleotide
uuauaagcaugggcagcac

SEQ ID NO: 1507046 - RNA, 19 nt, Artificial Sequence
  Description of Artificial Sequence: Synthetic oligonucleotide
cauggguaguaauugucua

SEQ ID NO: 1507047 - RNA, 19 nt, Artificial Sequence
  Description of Artificial Sequence: Synthetic oligonucleotide
gcuguauaaggcaaaugca

SEQ ID NO: 1507048 - RNA, 19 nt, Artificial Sequence
  Description of Artificial Sequence: Synthetic oligonucleotide
ggaauauaugugcaugagu

SEQ ID NO: 1507049 - RNA, 19 nt, Artificial Sequence
  Description of Artificial Sequence: Synthetic oligonucleotide
cauacccauuuuaucuaga

SEQ ID NO: 1507050 - RNA, 19 nt, Artificial Sequence
  Description of Artificial Sequence: Synthetic oligonucleotide
agacauucguucaaacauu

SEQ ID NO: 1507051 - RNA, 19 nt, Artificial Sequence
  Description of Artificial Sequence: Synthetic oligonucleotide
gcuaaaagauacaggaucu

SEQ ID NO: 1507052 - RNA, 19 nt, Artificial Sequence
  Description of Artificial Sequence: Synthetic oligonucleotide
gcauuuaauaauaccccga

SEQ ID NO: 1507053 - RNA, 19 nt, Artificial Sequence
  Description of Artificial Sequence: Synthetic oligonucleotide
uuccgaauuccuguucuuu

SEQ ID NO: 1507054 - RNA, 19 nt, Artificial Sequence
  Description of Artificial Sequence: Synthetic oligonucleotide
guaacuguaacggaaccuu

SEQ ID NO: 1507055 - RNA, 19 nt, Artificial Sequence
  Description of Artificial Sequence: Synthetic oligonucleotide
ccgccuauggugcacgagg

SEQ ID NO: 1507056 - RNA, 19 nt, Artificial Sequence
  Description of Artificial Sequence: Synthetic oligonucleotide
aucuuuuggucaauacgaa

SEQ ID NO: 1507057 - RNA, 19 nt, Artificial Sequence
  Description of Artificial Sequence: Synthetic oligonucleotide
ugacucacucagagcucca

SEQ ID NO: 1507058 - RNA, 19 nt, Artificial Sequence
  Description of Artificial Sequence: Synthetic oligonucleotide
acacuggagagcgcacauc

SEQ ID NO: 1507059 - RNA, 19 nt, Artificial Sequence
  Description of Artificial Sequence: Synthetic oligonucleotide
accacucgguuggacaucu

SEQ ID NO: 1507060 - RNA, 19 nt, Artificial Sequence
  Description of Artificial Sequence: Synthetic oligonucleotide
guaauagcuggauccacuu

SEQ ID NO: 1507061 - RNA, 19 nt, Artificial Sequence
  Description of Artificial Sequence: Synthetic oligonucleotide
uggaccccggacagagugu

SEQ ID NO: 1507062 - RNA, 19 nt, Artificial Sequence
  Description of Artificial Sequence: Synthetic oligonucleotide
accuucuagcugggcauuc

SEQ ID NO: 1507063 - RNA, 19 nt, Artificial Sequence
  Description of Artificial Sequence: Synthetic oligonucleotide
guguagcccuuuauuagca

SEQ ID NO: 1507064 - RNA, 19 nt, Artificial Sequence
  Description of Artificial Sequence: Synthetic oligonucleotide
cuuuucguagacugaacuu

SEQ ID NO: 1507065 - RNA, 19 nt, Artificial Sequence
  Description of Artificial Sequence: Synthetic oligonucleotide
ccgaauuccuguucuuuug

SEQ ID NO: 1507066 - RNA, 19 nt, Artificial Sequence
  Description of Artificial Sequence: Synthetic oligonucleotide
cacaagagccacaguaugu

SEQ ID NO: 1507067 - RNA, 19 nt, Artificial Sequence
  Description of Artificial Sequence: Synthetic oligonucleotide
cauacagaggaguccuaua

SEQ ID NO: 1507068 - RNA, 19 nt, Artificial Sequence
  Description of Artificial Sequence: Synthetic oligonucleotide
gucuauaacuggagauuuc

SEQ ID NO: 1507069 - RNA, 19 nt, Artificial Sequence
  Description of Artificial Sequence: Synthetic oligonucleotide
gagagcgcacaucgagaca

SEQ ID NO: 1507070 - RNA, 19 nt, Artificial Sequence
  Description of Artificial Sequence: Synthetic oligonucleotide
ggucuuuucguagacugaa

SEQ ID NO: 1507071 - RNA, 19 nt, Artificial Sequence
  Description of Artificial Sequence: Synthetic oligonucleotide
augggcagcacaagagcca

SEQ ID NO: 1507072 - RNA, 19 nt, Artificial Sequence
  Description of Artificial Sequence: Synthetic oligonucleotide
gucuuuucguagacugaac

SEQ ID NO: 1507073 - RNA, 19 nt, Artificial Sequence
  Description of Artificial Sequence: Synthetic oligonucleotide
guucuauuagucugagguu

SEQ ID NO: 1507074 - RNA, 19 nt, Artificial Sequence
  Description of Artificial Sequence: Synthetic oligonucleotide
gucugugcagguggcgucc

SEQ ID NO: 1507075 - RNA, 19 nt, Artificial Sequence
  Description of Artificial Sequence: Synthetic oligonucleotide
cuaaaagauacaggaucua

SEQ ID NO: 1507076 - RNA, 19 nt, Artificial Sequence
  Description of Artificial Sequence: Synthetic oligonucleotide
cuauuagucugagguuuca

SEQ ID NO: 1507077 - RNA, 19 nt, Artificial Sequence
  Description of Artificial Sequence: Synthetic oligonucleotide
auucuccggguaauagcug

SEQ ID NO: 1507078 - RNA, 19 nt, Artificial Sequence
  Description of Artificial Sequence: Synthetic oligonucleotide
cgcuagauauuuacugaag

SEQ ID NO: 1507079 - RNA, 19 nt, Artificial Sequence
  Description of Artificial Sequence: Synthetic oligonucleotide
aaccuucuagcugggcauu

SEQ ID NO: 1507080 - RNA, 19 nt, Artificial Sequence
  Description of Artificial Sequence: Synthetic oligonucleotide
gauccgcuagauauuuacu

SEQ ID NO: 1507081 - RNA, 19 nt, Artificial Sequence
  Description of Artificial Sequence: Synthetic oligonucleotide
aggucuuuucguagacuga

SEQ ID NO: 1507082 - RNA, 19 nt, Artificial Sequence
  Description of Artificial Sequence: Synthetic oligonucleotide
ugugccgccuauggugcac

SEQ ID NO: 1507083 - RNA, 19 nt, Artificial Sequence
  Description of Artificial Sequence: Synthetic oligonucleotide
gguggcgucccugaggguc

SEQ ID NO: 1507084 - RNA, 19 nt, Artificial Sequence
  Description of Artificial Sequence: Synthetic oligonucleotide
gagcgcacaucgagacagg

SEQ ID NO: 1507085 - RNA, 19 nt, Artificial Sequence
  Description of Artificial Sequence: Synthetic oligonucleotide
ggugcacgaggaugaauga

SEQ ID NO: 1507086 - RNA, 19 nt, Artificial Sequence
  Description of Artificial Sequence: Synthetic oligonucleotide
gaccgugagugcuccagcu

SEQ ID NO: 1507087 - RNA, 19 nt, Artificial Sequence
  Description of Artificial Sequence: Synthetic oligonucleotide
ggaugaaaauucuccgggu

SEQ ID NO: 1507088 - RNA, 19 nt, Artificial Sequence
  Description of Artificial Sequence: Synthetic oligonucleotide
gugcaugagucugcaaaga

SEQ ID NO: 1507089 - RNA, 19 nt, Artificial Sequence
  Description of Artificial Sequence: Synthetic oligonucleotide
cguagacugaacuugugaa

SEQ ID NO: 1507090 - RNA, 19 nt, Artificial Sequence
  Description of Artificial Sequence: Synthetic oligonucleotide
cauauaguauuaugauauu

SEQ ID NO: 1507091 - RNA, 19 nt, Artificial Sequence
  Description of Artificial Sequence: Synthetic oligonucleotide
aucgagacaggggcacaug

SEQ ID NO: 1507092 - RNA, 19 nt, Artificial Sequence
  Description of Artificial Sequence: Synthetic oligonucleotide
gggcaauaauggcucuagc

SEQ ID NO: 1507093 - RNA, 19 nt, Artificial Sequence
  Description of Artificial Sequence: Synthetic oligonucleotide
acuggcucgacugggcaua

SEQ ID NO: 1507094 - RNA, 19 nt, Artificial Sequence
  Description of Artificial Sequence: Synthetic oligonucleotide
cucgguuggacaucuuggu

SEQ ID NO: 1507095 - RNA, 19 nt, Artificial Sequence
  Description of Artificial Sequence: Synthetic oligonucleotide
ccccugggauucaucauag

SEQ ID NO: 1507096 - RNA, 19 nt, Artificial Sequence
  Description of Artificial Sequence: Synthetic oligonucleotide
gaggcggcggcggcggcgg

SEQ ID NO: 1507097 - RNA, 19 nt, Artificial Sequence
  Description of Artificial Sequence: Synthetic oligonucleotide
ggggcacaugaugggaagg

SEQ ID NO: 1507098 - RNA, 19 nt, Artificial Sequence
  Description of Artificial Sequence: Synthetic oligonucleotide
guacaacauggguaguaau

SEQ ID NO: 1507099 - RNA, 19 nt, Artificial Sequence
  Description of Artificial Sequence: Synthetic oligonucleotide
gcugcauaacucacugaac

SEQ ID NO: 1507100 - RNA, 19 nt, Artificial Sequence
  Description of Artificial Sequence: Synthetic oligonucleotide
gcucgacugggcauaauuc

SEQ ID NO: 1507101 - RNA, 19 nt, Artificial Sequence
  Description of Artificial Sequence: Synthetic oligonucleotide
ccacauauaguauuaugau

SEQ ID NO: 1507102 - RNA, 19 nt, Artificial Sequence
  Description of Artificial Sequence: Synthetic oligonucleotide
cgguguaccagcucccggc

SEQ ID NO: 1507103 - RNA, 19 nt, Artificial Sequence
  Description of Artificial Sequence: Synthetic oligonucleotide
ggaccgugagugcuccagc

SEQ ID NO: 1507104 - RNA, 19 nt, Artificial Sequence
  Description of Artificial Sequence: Synthetic oligonucleotide
gaguuguguagcccuuuau

SEQ ID NO: 1507105 - RNA, 19 nt, Artificial Sequence
  Description of Artificial Sequence: Synthetic oligonucleotide
cuauaacuggagauuucuu

SEQ ID NO: 1507106 - RNA, 19 nt, Artificial Sequence
  Description of Artificial Sequence: Synthetic oligonucleotide
gcgcacaucgagacagggg

SEQ ID NO: 1507107 - RNA, 19 nt, Artificial Sequence
  Description of Artificial Sequence: Synthetic oligonucleotide
gcacgaggaugaaugagga

SEQ ID NO: 1507108 - RNA, 19 nt, Artificial Sequence
  Description of Artificial Sequence: Synthetic oligonucleotide
acuggagagcgcacaucga

SEQ ID NO: 1507109 - RNA, 19 nt, Artificial Sequence
  Description of Artificial Sequence: Synthetic oligonucleotide
gacucacucagagcuccaa

SEQ ID NO: 1507110 - RNA, 19 nt, Artificial Sequence
  Description of Artificial Sequence: Synthetic oligonucleotide
cggaauauaugugcaugag

SEQ ID NO: 1507111 - RNA, 19 nt, Artificial Sequence
  Description of Artificial Sequence: Synthetic oligonucleotide
gcgguguaccagcucccgg

SEQ ID NO: 1507112 - RNA, 19 nt, Artificial Sequence
  Description of Artificial Sequence: Synthetic oligonucleotide
ccguaaaucuuuuggucaa

SEQ ID NO: 1507113 - RNA, 19 nt, Artificial Sequence
  Description of Artificial Sequence: Synthetic oligonucleotide
cgaaggucauacagaggag

SEQ ID NO: 1507114 - RNA, 19 nt, Artificial Sequence
  Description of Artificial Sequence: Synthetic oligonucleotide
ccggcagaccacucgguug

SEQ ID NO: 1507115 - RNA, 19 nt, Artificial Sequence
  Description of Artificial Sequence: Synthetic oligonucleotide
ugccgccuauggugcacga

SEQ ID NO: 1507116 - RNA, 19 nt, Artificial Sequence
  Description of Artificial Sequence: Synthetic oligonucleotide
cuaggauccgcuagauauu

SEQ ID NO: 1507117 - RNA, 19 nt, Artificial Sequence
  Description of Artificial Sequence: Synthetic oligonucleotide
auggugcacgaggaugaau

SEQ ID NO: 1507118 - RNA, 19 nt, Artificial Sequence
  Description of Artificial Sequence: Synthetic oligonucleotide
ccgcuagauauuuacugaa

SEQ ID NO: 1507119 - RNA, 19 nt, Artificial Sequence
  Description of Artificial Sequence: Synthetic oligonucleotide
ccaaccaguacaggaauaa

SEQ ID NO: 1507120 - RNA, 19 nt, Artificial Sequence
  Description of Artificial Sequence: Synthetic oligonucleotide
agcucuccguaaaucuuuu

SEQ ID NO: 1507121 - RNA, 19 nt, Artificial Sequence
  Description of Artificial Sequence: Synthetic oligonucleotide
uggcgucccugagggucgg

SEQ ID NO: 1507122 - RNA, 19 nt, Artificial Sequence
  Description of Artificial Sequence: Synthetic oligonucleotide
gcagagacauucguucaaa

SEQ ID NO: 1507123 - RNA, 19 nt, Artificial Sequence
  Description of Artificial Sequence: Synthetic oligonucleotide
ggacuacaccuacuagaaa

SEQ ID NO: 1507124 - RNA, 19 nt, Artificial Sequence
  Description of Artificial Sequence: Synthetic oligonucleotide
auggcucuagcaggucuuu

SEQ ID NO: 1507125 - RNA, 19 nt, Artificial Sequence
  Description of Artificial Sequence: Synthetic oligonucleotide
gcccuuuauuagcaacuaa

SEQ ID NO: 1507126 - RNA, 19 nt, Artificial Sequence
  Description of Artificial Sequence: Synthetic oligonucleotide
ccgaugggaugucuuccac

SEQ ID NO: 1507127 - RNA, 19 nt, Artificial Sequence
  Description of Artificial Sequence: Synthetic oligonucleotide
cggacagagugugagucug

SEQ ID NO: 1507128 - RNA, 19 nt, Artificial Sequence
  Description of Artificial Sequence: Synthetic oligonucleotide
ccaguacaggaauaauggu

SEQ ID NO: 1507129 - RNA, 19 nt, Artificial Sequence
  Description of Artificial Sequence: Synthetic oligonucleotide
gagcuucaguggaccguga

SEQ ID NO: 1507130 - RNA, 19 nt, Artificial Sequence
  Description of Artificial Sequence: Synthetic oligonucleotide
cccgaugggaugucuucca

SEQ ID NO: 1507131 - RNA, 19 nt, Artificial Sequence
  Description of Artificial Sequence: Synthetic oligonucleotide
aggauccgcuagauauuua

SEQ ID NO: 1507132 - RNA, 19 nt, Artificial Sequence
  Description of Artificial Sequence: Synthetic oligonucleotide
caaccaguacaggaauaau

SEQ ID NO: 1507133 - RNA, 19 nt, Artificial Sequence
  Description of Artificial Sequence: Synthetic oligonucleotide
ggucaauacgaaggucaua

SEQ ID NO: 1507134 - RNA, 19 nt, Artificial Sequence
  Description of Artificial Sequence: Synthetic oligonucleotide
cugugccgccuauggugca

SEQ ID NO: 1507135 - RNA, 19 nt, Artificial Sequence
  Description of Artificial Sequence: Synthetic oligonucleotide
cugaggcgguguaccagcu

SEQ ID NO: 1507136 - RNA, 19 nt, Artificial Sequence
  Description of Artificial Sequence: Synthetic oligonucleotide
gcacaucgagacaggggca

SEQ ID NO: 1507137 - RNA, 19 nt, Artificial Sequence
  Description of Artificial Sequence: Synthetic oligonucleotide
gccgccuauggugcacgag

SEQ ID NO: 1507138 - RNA, 19 nt, Artificial Sequence
  Description of Artificial Sequence: Synthetic oligonucleotide
cgccuauggugcacgagga

SEQ ID NO: 1507139 - RNA, 19 nt, Artificial Sequence
  Description of Artificial Sequence: Synthetic oligonucleotide
cggguaauagcuggaucca

SEQ ID NO: 1507140 - RNA, 19 nt, Artificial Sequence
  Description of Artificial Sequence: Synthetic oligonucleotide
cuccggguaauagcuggau

SEQ ID NO: 1507141 - RNA, 19 nt, Artificial Sequence
  Description of Artificial Sequence: Synthetic oligonucleotide
gccuauggugcacgaggau

SEQ ID NO: 1507142 - RNA, 19 nt, Artificial Sequence
  Description of Artificial Sequence: Synthetic oligonucleotide
gcagcacaagagccacagu

SEQ ID NO: 1507143 - RNA, 19 nt, Artificial Sequence
  Description of Artificial Sequence: Synthetic oligonucleotide
ggcuucccggcagaccacu

SEQ ID NO: 1507144 - RNA, 19 nt, Artificial Sequence
  Description of Artificial Sequence: Synthetic oligonucleotide
cugugcagguggcgucccu

SEQ ID NO: 1507145 - RNA, 19 nt, Artificial Sequence
  Description of Artificial Sequence: Synthetic oligonucleotide
cguggcuggcuucccggca

SEQ ID NO: 1507146 - RNA, 19 nt, Artificial Sequence
  Description of Artificial Sequence: Synthetic oligonucleotide
cccggcagaccacucgguu

SEQ ID NO: 1507147 - RNA, 19 nt, Artificial Sequence
  Description of Artificial Sequence: Synthetic oligonucleotide
cggagcuucaguggaccgu

SEQ ID NO: 1507148 - RNA, 19 nt, Artificial Sequence
  Description of Artificial Sequence: Synthetic oligonucleotide
gcuggaccccggacagagu

SEQ ID NO: 1507149 - RNA, 19 nt, Artificial Sequence
  Description of Artificial Sequence: Synthetic oligonucleotide
aauacagaauauuuauuac

SEQ ID NO: 1507150 - RNA, 19 nt, Artificial Sequence
  Description of Artificial Sequence: Synthetic oligonucleotide
uauuacaggacuaugaaga

SEQ ID NO: 1507151 - RNA, 19 nt, Artificial Sequence
  Description of Artificial Sequence: Synthetic oligonucleotide
aauagaguugcucuaauga

SEQ ID NO: 1507152 - RNA, 19 nt, Artificial Sequence
  Description of Artificial Sequence: Synthetic oligonucleotide
aaauucauuaaguagcccu

SEQ ID NO: 1507153 - RNA, 19 nt, Artificial Sequence
  Description of Artificial Sequence: Synthetic oligonucleotide
aaguuuaagcaccuuucgc

SEQ ID NO: 1507154 - RNA, 19 nt, Artificial Sequence
  Description of Artificial Sequence: Synthetic oligonucleotide
ucaagaaacgccauuagcu

SEQ ID NO: 1507155 - RNA, 19 nt, Artificial Sequence
  Description of Artificial Sequence: Synthetic oligonucleotide
uccaaucugagcaagacca

SEQ ID NO: 1507156 - RNA, 19 nt, Artificial Sequence
  Description of Artificial Sequence: Synthetic oligonucleotide
ucuagguccccauuuaugg

SEQ ID NO: 1507157 - RNA, 19 nt, Artificial Sequence
  Description of Artificial Sequence: Synthetic oligonucleotide
uagauacuugacuagaaag

SEQ ID NO: 1507158 - RNA, 19 nt, Artificial Sequence
  Description of Artificial Sequence: Synthetic oligonucleotide
cuauuuaccagauccaggc

SEQ ID NO: 1507159 - RNA, 19 nt, Artificial Sequence
  Description of Artificial Sequence: Synthetic oligonucleotide
aauaaguucucaagaaacg

SEQ ID NO: 1507160 - RNA, 19 nt, Artificial Sequence
  Description of Artificial Sequence: Synthetic oligonucleotide
uuaauaggggcuaaacaag

SEQ ID NO: 1507161 - RNA, 19 nt, Artificial Sequence
  Description of Artificial Sequence: Synthetic oligonucleotide
uuaacauagugcuccaagg

SEQ ID NO: 1507162 - RNA, 19 nt, Artificial Sequence
  Description of Artificial Sequence: Synthetic oligonucleotide
ucuccaaauaaccaggcca

SEQ ID NO: 1507163 - RNA, 19 nt, Artificial Sequence
  Description of Artificial Sequence: Synthetic oligonucleotide
ucuaaugaagacugcacag

SEQ ID NO: 1507164 - RNA, 19 nt, Artificial Sequence
  Description of Artificial Sequence: Synthetic oligonucleotide
gacccuguaauguagacgc

SEQ ID NO: 1507165 - RNA, 19 nt, Artificial Sequence
  Description of Artificial Sequence: Synthetic oligonucleotide
uaauaggggcuaaacaagg

SEQ ID NO: 1507166 - RNA, 19 nt, Artificial Sequence
  Description of Artificial Sequence: Synthetic oligonucleotide
aguuaaaccacacccaaug

SEQ ID NO: 1507167 - RNA, 19 nt, Artificial Sequence
  Description of Artificial Sequence: Synthetic oligonucleotide
caagauuucgcguacacac

SEQ ID NO: 1507168 - RNA, 19 nt, Artificial Sequence
  Description of Artificial Sequence: Synthetic oligonucleotide
ugauacauguguaagaguu

SEQ ID NO: 1507169 - RNA, 19 nt, Artificial Sequence
  Description of Artificial Sequence: Synthetic oligonucleotide
auaaguucucaagaaacgc

SEQ ID NO: 1507170 - RNA, 19 nt, Artificial Sequence
  Description of Artificial Sequence: Synthetic oligonucleotide
ucuauuuaccagauccagg

SEQ ID NO: 1507171 - RNA, 19 nt, Artificial Sequence
  Description of Artificial Sequence: Synthetic oligonucleotide
gaaguuuaagcaccuuucg

SEQ ID NO: 1507172 - RNA, 19 nt, Artificial Sequence
  Description of Artificial Sequence: Synthetic oligonucleotide
accauagaagccuaugccg

SEQ ID NO: 1507173 - RNA, 19 nt, Artificial Sequence
  Description of Artificial Sequence: Synthetic oligonucleotide
uuagcaaacuuucuccacc

SEQ ID NO: 1507174 - RNA, 19 nt, Artificial Sequence
  Description of Artificial Sequence: Synthetic oligonucleotide
caggaguuaaaccacaccc

SEQ ID NO: 1507175 - RNA, 19 nt, Artificial Sequence
  Description of Artificial Sequence: Synthetic oligonucleotide
cuaccaauucuuuugacac

SEQ ID NO: 1507176 - RNA, 19 nt, Artificial Sequence
  Description of Artificial Sequence: Synthetic oligonucleotide
aguuuaagcaccuuucgcu

SEQ ID NO: 1507177 - RNA, 19 nt, Artificial Sequence
  Description of Artificial Sequence: Synthetic oligonucleotide
agaaauucauuaaguagcc

SEQ ID NO: 1507178 - RNA, 19 nt, Artificial Sequence
  Description of Artificial Sequence: Synthetic oligonucleotide
aagaccauaagguagccuu

SEQ ID NO: 1507179 - RNA, 19 nt, Artificial Sequence
  Description of Artificial Sequence: Synthetic oligonucleotide
uagaguugcucuaaugaag

SEQ ID NO: 1507180 - RNA, 19 nt, Artificial Sequence
  Description of Artificial Sequence: Synthetic oligonucleotide
auguagacgcacuacuccc

SEQ ID NO: 1507181 - RNA, 19 nt, Artificial Sequence
  Description of Artificial Sequence: Synthetic oligonucleotide
ucagaugcuagauacuuga

SEQ ID NO: 1507182 - RNA, 19 nt, Artificial Sequence
  Description of Artificial Sequence: Synthetic oligonucleotide
cagaauauuuauuacagga

SEQ ID NO: 1507183 - RNA, 19 nt, Artificial Sequence
  Description of Artificial Sequence: Synthetic oligonucleotide
aaaccacacccaaugaagc

SEQ ID NO: 1507184 - RNA, 19 nt, Artificial Sequence
  Description of Artificial Sequence: Synthetic oligonucleotide
aacacacuccaaucugagc

SEQ ID NO: 1507185 - RNA, 19 nt, Artificial Sequence
  Description of Artificial Sequence: Synthetic oligonucleotide
cuuaauaggggcuaaacaa

SEQ ID NO: 1507186 - RNA, 19 nt, Artificial Sequence
  Description of Artificial Sequence: Synthetic oligonucleotide
acacacuccaaucugagca

SEQ ID NO: 1507187 - RNA, 19 nt, Artificial Sequence
  Description of Artificial Sequence: Synthetic oligonucleotide
aaacaggauggaaacacac

SEQ ID NO: 1507188 - RNA, 19 nt, Artificial Sequence
  Description of Artificial Sequence: Synthetic oligonucleotide
auuagcuguuccuuacucg

SEQ ID NO: 1507189 - RNA, 19 nt, Artificial Sequence
  Description of Artificial Sequence: Synthetic oligonucleotide
aggaccaccacugcgaggc

SEQ ID NO: 1507190 - RNA, 19 nt, Artificial Sequence
  Description of Artificial Sequence: Synthetic oligonucleotide
acagaauauuuauuacagg

SEQ ID NO: 1507191 - RNA, 19 nt, Artificial Sequence
  Description of Artificial Sequence: Synthetic oligonucleotide
aagaagagucgcccguagc

SEQ ID NO: 1507192 - RNA, 19 nt, Artificial Sequence
  Description of Artificial Sequence: Synthetic oligonucleotide
gacacuaaccugcaggcgc

SEQ ID NO: 1507193 - RNA, 19 nt, Artificial Sequence
  Description of Artificial Sequence: Synthetic oligonucleotide
uugaauuccuugcaggagu

SEQ ID NO: 1507194 - RNA, 19 nt, Artificial Sequence
  Description of Artificial Sequence: Synthetic oligonucleotide
aggaaucgcagauguaagc

SEQ ID NO: 1507195 - RNA, 19 nt, Artificial Sequence
  Description of Artificial Sequence: Synthetic oligonucleotide
caggccauuaacauagugc

SEQ ID NO: 1507196 - RNA, 19 nt, Artificial Sequence
  Description of Artificial Sequence: Synthetic oligonucleotide
gaugcuagauacuugacua

SEQ ID NO: 1507197 - RNA, 19 nt, Artificial Sequence
  Description of Artificial Sequence: Synthetic oligonucleotide
agaacggugaagagaaugc

SEQ ID NO: 1507198 - RNA, 19 nt, Artificial Sequence
  Description of Artificial Sequence: Synthetic oligonucleotide
uguguaagaguucuugauc

SEQ ID NO: 1507199 - RNA, 19 nt, Artificial Sequence
  Description of Artificial Sequence: Synthetic oligonucleotide
aaguuagauggacucuuag

SEQ ID NO: 1507200 - RNA, 19 nt, Artificial Sequence
  Description of Artificial Sequence: Synthetic oligonucleotide
gacacugcuagguaucugc

SEQ ID NO: 1507201 - RNA, 19 nt, Artificial Sequence
  Description of Artificial Sequence: Synthetic oligonucleotide
guugcucuaaugaagacug

SEQ ID NO: 1507202 - RNA, 19 nt, Artificial Sequence
  Description of Artificial Sequence: Synthetic oligonucleotide
gagaaugcucauuucauca

SEQ ID NO: 1507203 - RNA, 19 nt, Artificial Sequence
  Description of Artificial Sequence: Synthetic oligonucleotide
aaggaguucucugugagcu

SEQ ID NO: 1507204 - RNA, 19 nt, Artificial Sequence
  Description of Artificial Sequence: Synthetic oligonucleotide
agauuucgcguacacacuc

SEQ ID NO: 1507205 - RNA, 19 nt, Artificial Sequence
  Description of Artificial Sequence: Synthetic oligonucleotide
uggaaggaaucgcagaugu

SEQ ID NO: 1507206 - RNA, 19 nt, Artificial Sequence
  Description of Artificial Sequence: Synthetic oligonucleotide
aagucaaaccacuggcuug

SEQ ID NO: 1507207 - RNA, 19 nt, Artificial Sequence
  Description of Artificial Sequence: Synthetic oligonucleotide
auuuaccagauccaggcca

SEQ ID NO: 1507208 - RNA, 19 nt, Artificial Sequence
  Description of Artificial Sequence: Synthetic oligonucleotide
aagaccugcuccccuggcc

SEQ ID NO: 1507209 - RNA, 19 nt, Artificial Sequence
  Description of Artificial Sequence: Synthetic oligonucleotide
uuucuaccaauucuuuuga

SEQ ID NO: 1507210 - RNA, 19 nt, Artificial Sequence
  Description of Artificial Sequence: Synthetic oligonucleotide
uuagcuguuccuuacucgu

SEQ ID NO: 1507211 - RNA, 19 nt, Artificial Sequence
  Description of Artificial Sequence: Synthetic oligonucleotide
uguagacgcacuacucccg

SEQ ID NO: 1507212 - RNA, 19 nt, Artificial Sequence
  Description of Artificial Sequence: Synthetic oligonucleotide
aggaagugccuucugcggc

SEQ ID NO: 1507213 - RNA, 19 nt, Artificial Sequence
  Description of Artificial Sequence: Synthetic oligonucleotide
uaggggcuaaacaagggug

SEQ ID NO: 1507214 - RNA, 19 nt, Artificial Sequence
  Description of Artificial Sequence: Synthetic oligonucleotide
aagagucgcccguagcuuc

SEQ ID NO: 1507215 - RNA, 19 nt, Artificial Sequence
  Description of Artificial Sequence: Synthetic oligonucleotide
ggagacacuaaccugcagg

SEQ ID NO: 1507216 - RNA, 19 nt, Artificial Sequence
  Description of Artificial Sequence: Synthetic oligonucleotide
caagaaacgccauuagcug

SEQ ID NO: 1507217 - RNA, 19 nt, Artificial Sequence
  Description of Artificial Sequence: Synthetic oligonucleotide
aauaggggcuaaacaaggg

SEQ ID NO: 1507218 - RNA, 19 nt, Artificial Sequence
  Description of Artificial Sequence: Synthetic oligonucleotide
ugagcuggaaggaaucgca

SEQ ID NO: 1507219 - RNA, 19 nt, Artificial Sequence
  Description of Artificial Sequence: Synthetic oligonucleotide
agcaccuuucgcugaaggc

SEQ ID NO: 1507220 - RNA, 19 nt, Artificial Sequence
  Description of Artificial Sequence: Synthetic oligonucleotide
uagguaucugcuuaguguc

SEQ ID NO: 1507221 - RNA, 19 nt, Artificial Sequence
  Description of Artificial Sequence: Synthetic oligonucleotide
aagcaccuuucgcugaagg

SEQ ID NO: 1507222 - RNA, 19 nt, Artificial Sequence
  Description of Artificial Sequence: Synthetic oligonucleotide
uuuuccgcccaucucgacc

SEQ ID NO: 1507223 - RNA, 19 nt, Artificial Sequence
  Description of Artificial Sequence: Synthetic oligonucleotide
acacucuggagacacuaac

SEQ ID NO: 1507224 - RNA, 19 nt, Artificial Sequence
  Description of Artificial Sequence: Synthetic oligonucleotide
ucucgauuggcuccuuucc

SEQ ID NO: 1507225 - RNA, 19 nt, Artificial Sequence
  Description of Artificial Sequence: Synthetic oligonucleotide
acuuugaauagaguugcuc

SEQ ID NO: 1507226 - RNA, 19 nt, Artificial Sequence
  Description of Artificial Sequence: Synthetic oligonucleotide
agaagagucgcccguagcu

SEQ ID NO: 1507227 - RNA, 19 nt, Artificial Sequence
  Description of Artificial Sequence: Synthetic oligonucleotide
uucgcguacacacucugga

SEQ ID NO: 1507228 - RNA, 19 nt, Artificial Sequence
  Description of Artificial Sequence: Synthetic oligonucleotide
uuggucuugcaagauuucg

SEQ ID NO: 1507229 - RNA, 19 nt, Artificial Sequence
  Description of Artificial Sequence: Synthetic oligonucleotide
cucaagaaacgccauuagc

SEQ ID NO: 1507230 - RNA, 19 nt, Artificial Sequence
  Description of Artificial Sequence: Synthetic oligonucleotide
acagagucucgauuggcuc

SEQ ID NO: 1507231 - RNA, 19 nt, Artificial Sequence
  Description of Artificial Sequence: Synthetic oligonucleotide
aaucgcagauguaagccag

SEQ ID NO: 1507232 - RNA, 19 nt, Artificial Sequence
  Description of Artificial Sequence: Synthetic oligonucleotide
agauguaagccagcgugcc

SEQ ID NO: 1507233 - RNA, 19 nt, Artificial Sequence
  Description of Artificial Sequence: Synthetic oligonucleotide
ucauuaaguagcccuugac

SEQ ID NO: 1507234 - RNA, 19 nt, Artificial Sequence
  Description of Artificial Sequence: Synthetic oligonucleotide
auagaguugcucuaaugaa

SEQ ID NO: 1507235 - RNA, 19 nt, Artificial Sequence
  Description of Artificial Sequence: Synthetic oligonucleotide
acucccgugauacaugugu

SEQ ID NO: 1507236 - RNA, 19 nt, Artificial Sequence
  Description of Artificial Sequence: Synthetic oligonucleotide
uaauguagacgcacuacuc

SEQ ID NO: 1507237 - RNA, 19 nt, Artificial Sequence
  Description of Artificial Sequence: Synthetic oligonucleotide
aacggugaagagaaugcuc

SEQ ID NO: 1507238 - RNA, 19 nt, Artificial Sequence
  Description of Artificial Sequence: Synthetic oligonucleotide
uauuuaccagauccaggcc

SEQ ID NO: 1507239 - RNA, 19 nt, Artificial Sequence
  Description of Artificial Sequence: Synthetic oligonucleotide
ugacaaaccugucucaguu

SEQ ID NO: 1507240 - RNA, 19 nt, Artificial Sequence
  Description of Artificial Sequence: Synthetic oligonucleotide
uggacagaacacaaggaau

SEQ ID NO: 1507241 - RNA, 19 nt, Artificial Sequence
  Description of Artificial Sequence: Synthetic oligonucleotide
uagauggacucuuagcaaa

SEQ ID NO: 1507242 - RNA, 19 nt, Artificial Sequence
  Description of Artificial Sequence: Synthetic oligonucleotide
uuugaauagaguugcucua

SEQ ID NO: 1507243 - RNA, 19 nt, Artificial Sequence
  Description of Artificial Sequence: Synthetic oligonucleotide
uuuugacacugcuagguau

SEQ ID NO: 1507244 - RNA, 19 nt, Artificial Sequence
  Description of Artificial Sequence: Synthetic oligonucleotide
ggucuugcaagauuucgcg

SEQ ID NO: 1507245 - RNA, 19 nt, Artificial Sequence
  Description of Artificial Sequence: Synthetic oligonucleotide
gaaggaaucgcagauguaa

SEQ ID NO: 1507246 - RNA, 19 nt, Artificial Sequence
  Description of Artificial Sequence: Synthetic oligonucleotide
agaagccuaugccgcagcc

SEQ ID NO: 1507247 - RNA, 19 nt, Artificial Sequence
  Description of Artificial Sequence: Synthetic oligonucleotide
gagaacggugaagagaaug

SEQ ID NO: 1507248 - RNA, 19 nt, Artificial Sequence
  Description of Artificial Sequence: Synthetic oligonucleotide
uuucgcguacacacucugg

SEQ ID NO: 1507249 - RNA, 19 nt, Artificial Sequence
  Description of Artificial Sequence: Synthetic oligonucleotide
aaccacacccaaugaagcu

SEQ ID NO: 1507250 - RNA, 19 nt, Artificial Sequence
  Description of Artificial Sequence: Synthetic oligonucleotide
auaggggcuaaacaagggu

SEQ ID NO: 1507251 - RNA, 19 nt, Artificial Sequence
  Description of Artificial Sequence: Synthetic oligonucleotide
cuagguuccacagagucuc

SEQ ID NO: 1507252 - RNA, 19 nt, Artificial Sequence
  Description of Artificial Sequence: Synthetic oligonucleotide
aaacacacuccaaucugag

SEQ ID NO: 1507253 - RNA, 19 nt, Artificial Sequence
  Description of Artificial Sequence: Synthetic oligonucleotide
ucgauuggcuccuuucccc

SEQ ID NO: 1507254 - RNA, 19 nt, Artificial Sequence
  Description of Artificial Sequence: Synthetic oligonucleotide
aaggaaucgcagauguaag

SEQ ID NO: 1507255 - RNA, 19 nt, Artificial Sequence
  Description of Artificial Sequence: Synthetic oligonucleotide
uuaaguagcccuugacaaa

SEQ ID NO: 1507256 - RNA, 19 nt, Artificial Sequence
  Description of Artificial Sequence: Synthetic oligonucleotide
guaagaguucuugaucucc

SEQ ID NO: 1507257 - RNA, 19 nt, Artificial Sequence
  Description of Artificial Sequence: Synthetic oligonucleotide
cuuucgcaacuccacaccc

SEQ ID NO: 1507258 - RNA, 19 nt, Artificial Sequence
  Description of Artificial Sequence: Synthetic oligonucleotide
auaagguagccuucuauuu

SEQ ID NO: 1507259 - RNA, 19 nt, Artificial Sequence
  Description of Artificial Sequence: Synthetic oligonucleotide
accuuaauaggggcuaaac

SEQ ID NO: 1507260 - RNA, 19 nt, Artificial Sequence
  Description of Artificial Sequence: Synthetic oligonucleotide
cacucuggagacacuaacc

SEQ ID NO: 1507261 - RNA, 19 nt, Artificial Sequence
  Description of Artificial Sequence: Synthetic oligonucleotide
uucuuucgcaacuccacac

SEQ ID NO: 1507262 - RNA, 19 nt, Artificial Sequence
  Description of Artificial Sequence: Synthetic oligonucleotide
cuuagcaaacuuucuccac

SEQ ID NO: 1507263 - RNA, 19 nt, Artificial Sequence
  Description of Artificial Sequence: Synthetic oligonucleotide
uuacaggacuaugaagacc

SEQ ID NO: 1507264 - RNA, 19 nt, Artificial Sequence
  Description of Artificial Sequence: Synthetic oligonucleotide
gccauuaacauagugcucc

SEQ ID NO: 1507265 - RNA, 19 nt, Artificial Sequence
  Description of Artificial Sequence: Synthetic oligonucleotide
aagccagcgugccuagguc

SEQ ID NO: 1507266 - RNA, 19 nt, Artificial Sequence
  Description of Artificial Sequence: Synthetic oligonucleotide
acugcuagguaucugcuua

SEQ ID NO: 1507267 - RNA, 19 nt, Artificial Sequence
  Description of Artificial Sequence: Synthetic oligonucleotide
agugaugagaacggugaag

SEQ ID NO: 1507268 - RNA, 19 nt, Artificial Sequence
  Description of Artificial Sequence: Synthetic oligonucleotide
aacaagggugaaguuuaag

SEQ ID NO: 1507269 - RNA, 19 nt, Artificial Sequence
  Description of Artificial Sequence: Synthetic oligonucleotide
gaaucgcagauguaagcca

SEQ ID NO: 1507270 - RNA, 19 nt, Artificial Sequence
  Description of Artificial Sequence: Synthetic oligonucleotide
gaaauucauuaaguagccc

SEQ ID NO: 1507271 - RNA, 19 nt, Artificial Sequence
  Description of Artificial Sequence: Synthetic oligonucleotide
aguugcucuaaugaagacu

SEQ ID NO: 1507272 - RNA, 19 nt, Artificial Sequence
  Description of Artificial Sequence: Synthetic oligonucleotide
ugcuagauacuugacuaga

SEQ ID NO: 1507273 - RNA, 19 nt, Artificial Sequence
  Description of Artificial Sequence: Synthetic oligonucleotide
cagagucucgauuggcucc

SEQ ID NO: 1507274 - RNA, 19 nt, Artificial Sequence
  Description of Artificial Sequence: Synthetic oligonucleotide
agaguugcucuaaugaaga

SEQ ID NO: 1507275 - RNA, 19 nt, Artificial Sequence
  Description of Artificial Sequence: Synthetic oligonucleotide
guguaagaguucuugaucu

SEQ ID NO: 1507276 - RNA, 19 nt, Artificial Sequence
  Description of Artificial Sequence: Synthetic oligonucleotide
ugaauagaguugcucuaau

SEQ ID NO: 1507277 - RNA, 19 nt, Artificial Sequence
  Description of Artificial Sequence: Synthetic oligonucleotide
cuugaauuccuugcaggag

SEQ ID NO: 1507278 - RNA, 19 nt, Artificial Sequence
  Description of Artificial Sequence: Synthetic oligonucleotide
gugaugagaacggugaaga

SEQ ID NO: 1507279 - RNA, 19 nt, Artificial Sequence
  Description of Artificial Sequence: Synthetic oligonucleotide
auuucgcguacacacucug

SEQ ID NO: 1507280 - RNA, 19 nt, Artificial Sequence
  Description of Artificial Sequence: Synthetic oligonucleotide
ugaaguuagauggacucuu

SEQ ID NO: 1507281 - RNA, 19 nt, Artificial Sequence
  Description of Artificial Sequence: Synthetic oligonucleotide
ucgcagauguaagccagcg

SEQ ID NO: 1507282 - RNA, 19 nt, Artificial Sequence
  Description of Artificial Sequence: Synthetic oligonucleotide
ugaucuccuagguuccaca

SEQ ID NO: 1507283 - RNA, 19 nt, Artificial Sequence
  Description of Artificial Sequence: Synthetic oligonucleotide
uugaauagaguugcucuaa

SEQ ID NO: 1507284 - RNA, 19 nt, Artificial Sequence
  Description of Artificial Sequence: Synthetic oligonucleotide
agugcuccaaggcaccgug

SEQ ID NO: 1507285 - RNA, 19 nt, Artificial Sequence
  Description of Artificial Sequence: Synthetic oligonucleotide
aaaucccauucucuagaaa

SEQ ID NO: 1507286 - RNA, 19 nt, Artificial Sequence
  Description of Artificial Sequence: Synthetic oligonucleotide
uguaagaguucuugaucuc

SEQ ID NO: 1507287 - RNA, 19 nt, Artificial Sequence
  Description of Artificial Sequence: Synthetic oligonucleotide
cauuagcuguuccuuacuc

SEQ ID NO: 1507288 - RNA, 19 nt, Artificial Sequence
  Description of Artificial Sequence: Synthetic oligonucleotide
ggaaucgcagauguaagcc

SEQ ID NO: 1507289 - RNA, 19 nt, Artificial Sequence
  Description of Artificial Sequence: Synthetic oligonucleotide
uccacaccccaaaaggguc

SEQ ID NO: 1507290 - RNA, 19 nt, Artificial Sequence
  Description of Artificial Sequence: Synthetic oligonucleotide
ggacagaacacaaggaaug

SEQ ID NO: 1507291 - RNA, 19 nt, Artificial Sequence
  Description of Artificial Sequence: Synthetic oligonucleotide
guaauguagacgcacuacu

SEQ ID NO: 1507292 - RNA, 19 nt, Artificial Sequence
  Description of Artificial Sequence: Synthetic oligonucleotide
uugacaaaccugucucagu

SEQ ID NO: 1507293 - RNA, 19 nt, Artificial Sequence
  Description of Artificial Sequence: Synthetic oligonucleotide
cauuuauggacagaacaca

SEQ ID NO: 1507294 - RNA, 19 nt, Artificial Sequence
  Description of Artificial Sequence: Synthetic oligonucleotide
cuucuauuuaccagaucca

SEQ ID NO: 1507295 - RNA, 19 nt, Artificial Sequence
  Description of Artificial Sequence: Synthetic oligonucleotide
gauacauguguaagaguuc

SEQ ID NO: 1507296 - RNA, 19 nt, Artificial Sequence
  Description of Artificial Sequence: Synthetic oligonucleotide
gcuggaucaauccauuuuc

SEQ ID NO: 1507297 - RNA, 19 nt, Artificial Sequence
  Description of Artificial Sequence: Synthetic oligonucleotide
agacgcacuacucccguga

SEQ ID NO: 1507298 - RNA, 19 nt, Artificial Sequence
  Description of Artificial Sequence: Synthetic oligonucleotide
ccauagaagccuaugccgc

SEQ ID NO: 1507299 - RNA, 19 nt, Artificial Sequence
  Description of Artificial Sequence: Synthetic oligonucleotide
agucaaaccacuggcuuga

SEQ ID NO: 1507300 - RNA, 19 nt, Artificial Sequence
  Description of Artificial Sequence: Synthetic oligonucleotide
ucgcguacacacucuggag

SEQ ID NO: 1507301 - RNA, 19 nt, Artificial Sequence
  Description of Artificial Sequence: Synthetic oligonucleotide
ugccuucugcggcagaggu

SEQ ID NO: 1507302 - RNA, 19 nt, Artificial Sequence
  Description of Artificial Sequence: Synthetic oligonucleotide
aagauuucgcguacacacu

SEQ ID NO: 1507303 - RNA, 19 nt, Artificial Sequence
  Description of Artificial Sequence: Synthetic oligonucleotide
uaggucuagguccccauuu

SEQ ID NO: 1507304 - RNA, 19 nt, Artificial Sequence
  Description of Artificial Sequence: Synthetic oligonucleotide
ucauccugacagucagugc

SEQ ID NO: 1507305 - RNA, 19 nt, Artificial Sequence
  Description of Artificial Sequence: Synthetic oligonucleotide
uucuaccaauucuuuugac

SEQ ID NO: 1507306 - RNA, 19 nt, Artificial Sequence
  Description of Artificial Sequence: Synthetic oligonucleotide
agcuggaucaauccauuuu

SEQ ID NO: 1507307 - RNA, 19 nt, Artificial Sequence
  Description of Artificial Sequence: Synthetic oligonucleotide
cacagucuccaaauaacca

SEQ ID NO: 1507308 - RNA, 19 nt, Artificial Sequence
  Description of Artificial Sequence: Synthetic oligonucleotide
ggacuaugaagaccuauac

SEQ ID NO: 1507309 - RNA, 19 nt, Artificial Sequence
  Description of Artificial Sequence: Synthetic oligonucleotide
accgugaagaagagucgcc

SEQ ID NO: 1507310 - RNA, 19 nt, Artificial Sequence
  Description of Artificial Sequence: Synthetic oligonucleotide
agguaucugcuuagugucc

SEQ ID NO: 1507311 - RNA, 19 nt, Artificial Sequence
  Description of Artificial Sequence: Synthetic oligonucleotide
ucguuucuuggucuugcaa

SEQ ID NO: 1507312 - RNA, 19 nt, Artificial Sequence
  Description of Artificial Sequence: Synthetic oligonucleotide
uagaagccuaugccgcagc

SEQ ID NO: 1507313 - RNA, 19 nt, Artificial Sequence
  Description of Artificial Sequence: Synthetic oligonucleotide
gacaaaccugucucaguuc

SEQ ID NO: 1507314 - RNA, 19 nt, Artificial Sequence
  Description of Artificial Sequence: Synthetic oligonucleotide
aggaguuaaaccacaccca

SEQ ID NO: 1507315 - RNA, 19 nt, Artificial Sequence
  Description of Artificial Sequence: Synthetic oligonucleotide
cagauccaggccauuaaca

SEQ ID NO: 1507316 - RNA, 19 nt, Artificial Sequence
  Description of Artificial Sequence: Synthetic oligonucleotide
uccuuacucguuucuuggu

SEQ ID NO: 1507317 - RNA, 19 nt, Artificial Sequence
  Description of Artificial Sequence: Synthetic oligonucleotide
uaguaaaguuuugcuuccc

SEQ ID NO: 1507318 - RNA, 19 nt, Artificial Sequence
  Description of Artificial Sequence: Synthetic oligonucleotide
cugcgaagggccuggcugc

SEQ ID NO: 1507319 - RNA, 19 nt, Artificial Sequence
  Description of Artificial Sequence: Synthetic oligonucleotide
uccuucaucguggugucuc

SEQ ID NO: 1507320 - RNA, 19 nt, Artificial Sequence
  Description of Artificial Sequence: Synthetic oligonucleotide
agacacuaaccugcaggcg

SEQ ID NO: 1507321 - RNA, 19 nt, Artificial Sequence
  Description of Artificial Sequence: Synthetic oligonucleotide
uugcucuaaugaagacugc

SEQ ID NO: 1507322 - RNA, 19 nt, Artificial Sequence
  Description of Artificial Sequence: Synthetic oligonucleotide
caccgcgaagaccugcucc

SEQ ID NO: 1507323 - RNA, 19 nt, Artificial Sequence
  Description of Artificial Sequence: Synthetic oligonucleotide
caccgugaagaagagucgc

SEQ ID NO: 1507324 - RNA, 19 nt, Artificial Sequence
  Description of Artificial Sequence: Synthetic oligonucleotide
ucgacccuguaauguagac

SEQ ID NO: 1507325 - RNA, 19 nt, Artificial Sequence
  Description of Artificial Sequence: Synthetic oligonucleotide
agaccauaagguagccuuc

SEQ ID NO: 1507326 - RNA, 19 nt, Artificial Sequence
  Description of Artificial Sequence: Synthetic oligonucleotide
agcuguuccuuacucguuu

SEQ ID NO: 1507327 - RNA, 19 nt, Artificial Sequence
  Description of Artificial Sequence: Synthetic oligonucleotide
ucccgugauacauguguaa

SEQ ID NO: 1507328 - RNA, 19 nt, Artificial Sequence
  Description of Artificial Sequence: Synthetic oligonucleotide
cugcuagguaucugcuuag

SEQ ID NO: 1507329 - RNA, 19 nt, Artificial Sequence
  Description of Artificial Sequence: Synthetic oligonucleotide
ggaguuaaaccacacccaa

SEQ ID NO: 1507330 - RNA, 19 nt, Artificial Sequence
  Description of Artificial Sequence: Synthetic oligonucleotide
aucgcagauguaagccagc

SEQ ID NO: 1507331 - RNA, 19 nt, Artificial Sequence
  Description of Artificial Sequence: Synthetic oligonucleotide
cagaugcuagauacuugac

SEQ ID NO: 1507332 - RNA, 19 nt, Artificial Sequence
  Description of Artificial Sequence: Synthetic oligonucleotide
cgugauacauguguaagag

SEQ ID NO: 1507333 - RNA, 19 nt, Artificial Sequence
  Description of Artificial Sequence: Synthetic oligonucleotide
gucucgauuggcuccuuuc

SEQ ID NO: 1507334 - RNA, 19 nt, Artificial Sequence
  Description of Artificial Sequence: Synthetic oligonucleotide
cuuacucguuucuuggucu

SEQ ID NO: 1507335 - RNA, 19 nt, Artificial Sequence
  Description of Artificial Sequence: Synthetic oligonucleotide
gcuagguaucugcuuagug

SEQ ID NO: 1507336 - RNA, 19 nt, Artificial Sequence
  Description of Artificial Sequence: Synthetic oligonucleotide
uccaaauaaccaggccaca

SEQ ID NO: 1507337 - RNA, 19 nt, Artificial Sequence
  Description of Artificial Sequence: Synthetic oligonucleotide
gucagaugcuagauacuug

SEQ ID NO: 1507338 - RNA, 19 nt, Artificial Sequence
  Description of Artificial Sequence: Synthetic oligonucleotide
uuacucguuucuuggucuu

SEQ ID NO: 1507339 - RNA, 19 nt, Artificial Sequence
  Description of Artificial Sequence: Synthetic oligonucleotide
acuacucccgugauacaug

SEQ ID NO: 1507340 - RNA, 19 nt, Artificial Sequence
  Description of Artificial Sequence: Synthetic oligonucleotide
auguaagccagcgugccua

SEQ ID NO: 1507341 - RNA, 19 nt, Artificial Sequence
  Description of Artificial Sequence: Synthetic oligonucleotide
ugaagaagagucgcccgua

SEQ ID NO: 1507342 - RNA, 19 nt, Artificial Sequence
  Description of Artificial Sequence: Synthetic oligonucleotide
ucuccaccauagaagccua

SEQ ID NO: 1507343 - RNA, 19 nt, Artificial Sequence
  Description of Artificial Sequence: Synthetic oligonucleotide
aggacuaugaagaccuaua

SEQ ID NO: 1507344 - RNA, 19 nt, Artificial Sequence
  Description of Artificial Sequence: Synthetic oligonucleotide
cugcugucgggccuuuccc

SEQ ID NO: 1507345 - RNA, 19 nt, Artificial Sequence
  Description of Artificial Sequence: Synthetic oligonucleotide
uccugacagucagugcugc

SEQ ID NO: 1507346 - RNA, 19 nt, Artificial Sequence
  Description of Artificial Sequence: Synthetic oligonucleotide
aggggcuaaacaaggguga

SEQ ID NO: 1507347 - RNA, 19 nt, Artificial Sequence
  Description of Artificial Sequence: Synthetic oligonucleotide
caaaccugucucaguucug

SEQ ID NO: 1507348 - RNA, 19 nt, Artificial Sequence
  Description of Artificial Sequence: Synthetic oligonucleotide
aucauacuuugaauagagu

SEQ ID NO: 1507349 - RNA, 19 nt, Artificial Sequence
  Description of Artificial Sequence: Synthetic oligonucleotide
cuagguccccauuuaugga

SEQ ID NO: 1507350 - RNA, 19 nt, Artificial Sequence
  Description of Artificial Sequence: Synthetic oligonucleotide
ucgucggcacgcucggggc

SEQ ID NO: 1507351 - RNA, 19 nt, Artificial Sequence
  Description of Artificial Sequence: Synthetic oligonucleotide
gcuguaguaaaguuuugcu

SEQ ID NO: 1507352 - RNA, 19 nt, Artificial Sequence
  Description of Artificial Sequence: Synthetic oligonucleotide
ugcugcggcgucccgcuga

SEQ ID NO: 1507353 - RNA, 19 nt, Artificial Sequence
  Description of Artificial Sequence: Synthetic oligonucleotide
agagucucgauuggcuccu

SEQ ID NO: 1507354 - RNA, 19 nt, Artificial Sequence
  Description of Artificial Sequence: Synthetic oligonucleotide
uguggagcccgcgcacccg

SEQ ID NO: 1507355 - RNA, 19 nt, Artificial Sequence
  Description of Artificial Sequence: Synthetic oligonucleotide
ccuuaauaggggcuaaaca

SEQ ID NO: 1507356 - RNA, 19 nt, Artificial Sequence
  Description of Artificial Sequence: Synthetic oligonucleotide
cuaugccgcagccagaagu

SEQ ID NO: 1507357 - RNA, 19 nt, Artificial Sequence
  Description of Artificial Sequence: Synthetic oligonucleotide
cugcacagucuccaaauaa

SEQ ID NO: 1507358 - RNA, 19 nt, Artificial Sequence
  Description of Artificial Sequence: Synthetic oligonucleotide
uagacgcacuacucccgug

SEQ ID NO: 1507359 - RNA, 19 nt, Artificial Sequence
  Description of Artificial Sequence: Synthetic oligonucleotide
aaccuuaauaggggcuaaa

SEQ ID NO: 1507360 - RNA, 19 nt, Artificial Sequence
  Description of Artificial Sequence: Synthetic oligonucleotide
cccuugacaaaccugucuc

SEQ ID NO: 1507361 - RNA, 19 nt, Artificial Sequence
  Description of Artificial Sequence: Synthetic oligonucleotide
ucgcccguagcuucccaga

SEQ ID NO: 1507362 - RNA, 19 nt, Artificial Sequence
  Description of Artificial Sequence: Synthetic oligonucleotide
agaggucuaccagcgccuc

SEQ ID NO: 1507363 - RNA, 19 nt, Artificial Sequence
  Description of Artificial Sequence: Synthetic oligonucleotide
gagggcguccaccgcgaag

SEQ ID NO: 1507364 - RNA, 19 nt, Artificial Sequence
  Description of Artificial Sequence: Synthetic oligonucleotide
uacucguuucuuggucuug

SEQ ID NO: 1507365 - RNA, 19 nt, Artificial Sequence
  Description of Artificial Sequence: Synthetic oligonucleotide
guaaaguuuugcuucccuu

SEQ ID NO: 1507366 - RNA, 19 nt, Artificial Sequence
  Description of Artificial Sequence: Synthetic oligonucleotide
cuguaguaaaguuuugcuu

SEQ ID NO: 1507367 - RNA, 19 nt, Artificial Sequence
  Description of Artificial Sequence: Synthetic oligonucleotide
cuaaugaagacugcacagu

SEQ ID NO: 1507368 - RNA, 19 nt, Artificial Sequence
  Description of Artificial Sequence: Synthetic oligonucleotide
uacucccgugauacaugug

SEQ ID NO: 1507369 - RNA, 19 nt, Artificial Sequence
  Description of Artificial Sequence: Synthetic oligonucleotide
gaagugccuucugcggcag

SEQ ID NO: 1507370 - RNA, 19 nt, Artificial Sequence
  Description of Artificial Sequence: Synthetic oligonucleotide
cgugaagaagagucgcccg

SEQ ID NO: 1507371 - RNA, 19 nt, Artificial Sequence
  Description of Artificial Sequence: Synthetic oligonucleotide
gucgcccguagcuucccag

SEQ ID NO: 1507372 - RNA, 19 nt, Artificial Sequence
  Description of Artificial Sequence: Synthetic oligonucleotide
gaagccuaugccgcagcca

SEQ ID NO: 1507373 - RNA, 19 nt, Artificial Sequence
  Description of Artificial Sequence: Synthetic oligonucleotide
guggagcccgcgcacccgg

SEQ ID NO: 1507374 - RNA, 19 nt, Artificial Sequence
  Description of Artificial Sequence: Synthetic oligonucleotide
acacccaaugaagcuucag

SEQ ID NO: 1507375 - RNA, 19 nt, Artificial Sequence
  Description of Artificial Sequence: Synthetic oligonucleotide
ggaggaccaccacugcgag

SEQ ID NO: 1507376 - RNA, 19 nt, Artificial Sequence
  Description of Artificial Sequence: Synthetic oligonucleotide
ccaaauaaccaggccacac

SEQ ID NO: 1507377 - RNA, 19 nt, Artificial Sequence
  Description of Artificial Sequence: Synthetic oligonucleotide
ccuuacucguuucuugguc

SEQ ID NO: 1507378 - RNA, 19 nt, Artificial Sequence
  Description of Artificial Sequence: Synthetic oligonucleotide
cacacuccaaucugagcaa

SEQ ID NO: 1507379 - RNA, 19 nt, Artificial Sequence
  Description of Artificial Sequence: Synthetic oligonucleotide
gaacggugaagagaaugcu

SEQ ID NO: 1507380 - RNA, 19 nt, Artificial Sequence
  Description of Artificial Sequence: Synthetic oligonucleotide
cuguaauguagacgcacua

SEQ ID NO: 1507381 - RNA, 19 nt, Artificial Sequence
  Description of Artificial Sequence: Synthetic oligonucleotide
cucgacccuguaauguaga

SEQ ID NO: 1507382 - RNA, 19 nt, Artificial Sequence
  Description of Artificial Sequence: Synthetic oligonucleotide
cgcacuacucccgugauac

SEQ ID NO: 1507383 - RNA, 19 nt, Artificial Sequence
  Description of Artificial Sequence: Synthetic oligonucleotide
gugauacauguguaagagu

SEQ ID NO: 1507384 - RNA, 19 nt, Artificial Sequence
  Description of Artificial Sequence: Synthetic oligonucleotide
ggaagugccuucugcggca

SEQ ID NO: 1507385 - RNA, 19 nt, Artificial Sequence
  Description of Artificial Sequence: Synthetic oligonucleotide
gguaucugcuuagugucca

SEQ ID NO: 1507386 - RNA, 19 nt, Artificial Sequence
  Description of Artificial Sequence: Synthetic oligonucleotide
cucuguggagcccgcgcac

SEQ ID NO: 1507387 - RNA, 19 nt, Artificial Sequence
  Description of Artificial Sequence: Synthetic oligonucleotide
gcaccgugaagaagagucg

SEQ ID NO: 1507388 - RNA, 19 nt, Artificial Sequence
  Description of Artificial Sequence: Synthetic oligonucleotide
cgggccuuuccccacaucc

SEQ ID NO: 1507389 - RNA, 19 nt, Artificial Sequence
  Description of Artificial Sequence: Synthetic oligonucleotide
cccgugauacauguguaag

SEQ ID NO: 1507390 - RNA, 19 nt, Artificial Sequence
  Description of Artificial Sequence: Synthetic oligonucleotide
cacgcucggggcccguccg

SEQ ID NO: 1507391 - RNA, 19 nt, Artificial Sequence
  Description of Artificial Sequence: Synthetic oligonucleotide
gaacacaaggaaugacguu

SEQ ID NO: 1507392 - RNA, 19 nt, Artificial Sequence
  Description of Artificial Sequence: Synthetic oligonucleotide
cuccacaccccaaaagggu

SEQ ID NO: 1507393 - RNA, 19 nt, Artificial Sequence
  Description of Artificial Sequence: Synthetic oligonucleotide
acgcucggggcccguccgc

SEQ ID NO: 1507394 - RNA, 19 nt, Artificial Sequence
  Description of Artificial Sequence: Synthetic oligonucleotide
cuaccagcgccucccgguc

SEQ ID NO: 1507395 - RNA, 19 nt, Artificial Sequence
  Description of Artificial Sequence: Synthetic oligonucleotide
cacuccaaucugagcaaga

SEQ ID NO: 1507396 - RNA, 19 nt, Artificial Sequence
  Description of Artificial Sequence: Synthetic oligonucleotide
aggccacacagaaauccca

SEQ ID NO: 1507397 - RNA, 19 nt, Artificial Sequence
  Description of Artificial Sequence: Synthetic oligonucleotide
ccggucgucggcacgcucg

SEQ ID NO: 1507398 - RNA, 19 nt, Artificial Sequence
  Description of Artificial Sequence: Synthetic oligonucleotide
guagcuucccagaaguuuu

SEQ ID NO: 1507399 - RNA, 19 nt, Artificial Sequence
  Description of Artificial Sequence: Synthetic oligonucleotide
cuuucgcugaaggcucuuc

SEQ ID NO: 1507400 - RNA, 19 nt, Artificial Sequence
  Description of Artificial Sequence: Synthetic oligonucleotide
gaccauaagguagccuucu

SEQ ID NO: 1507401 - RNA, 19 nt, Artificial Sequence
  Description of Artificial Sequence: Synthetic oligonucleotide
uucugcggcagaggucuac

SEQ ID NO: 1507402 - RNA, 19 nt, Artificial Sequence
  Description of Artificial Sequence: Synthetic oligonucleotide
uccuugcaaaggaguucuc

SEQ ID NO: 1507403 - RNA, 19 nt, Artificial Sequence
  Description of Artificial Sequence: Synthetic oligonucleotide
ccgugaagaagagucgccc

SEQ ID NO: 1507404 - RNA, 19 nt, Artificial Sequence
  Description of Artificial Sequence: Synthetic oligonucleotide
acuaaccugcaggcgcugu

SEQ ID NO: 1507405 - RNA, 19 nt, Artificial Sequence
  Description of Artificial Sequence: Synthetic oligonucleotide
gauuucgcguacacacucu

SEQ ID NO: 1507406 - RNA, 19 nt, Artificial Sequence
  Description of Artificial Sequence: Synthetic oligonucleotide
ucccgcugaggaagugccu

SEQ ID NO: 1507407 - RNA, 19 nt, Artificial Sequence
  Description of Artificial Sequence: Synthetic oligonucleotide
guaagccagcgugccuagg

SEQ ID NO: 1507408 - RNA, 19 nt, Artificial Sequence
  Description of Artificial Sequence: Synthetic oligonucleotide
gucuugcaagauuucgcgu

SEQ ID NO: 1507409 - RNA, 19 nt, Artificial Sequence
  Description of Artificial Sequence: Synthetic oligonucleotide
cccuguaauguagacgcac

SEQ ID NO: 1507410 - RNA, 19 nt, Artificial Sequence
  Description of Artificial Sequence: Synthetic oligonucleotide
gggcuaaacaagggugaag

SEQ ID NO: 1507411 - RNA, 19 nt, Artificial Sequence
  Description of Artificial Sequence: Synthetic oligonucleotide
guagacgcacuacucccgu

SEQ ID NO: 1507412 - RNA, 19 nt, Artificial Sequence
  Description of Artificial Sequence: Synthetic oligonucleotide
cugucgggccuuuccccac

SEQ ID NO: 1507413 - RNA, 19 nt, Artificial Sequence
  Description of Artificial Sequence: Synthetic oligonucleotide
gccagaagucaaaccacug

SEQ ID NO: 1507414 - RNA, 19 nt, Artificial Sequence
  Description of Artificial Sequence: Synthetic oligonucleotide
caucucgacccuguaaugu

SEQ ID NO: 1507415 - RNA, 19 nt, Artificial Sequence
  Description of Artificial Sequence: Synthetic oligonucleotide
ccaggccauuaacauagug

SEQ ID NO: 1507416 - RNA, 19 nt, Artificial Sequence
  Description of Artificial Sequence: Synthetic oligonucleotide
cuguccccgggcugcgaag

SEQ ID NO: 1507417 - RNA, 19 nt, Artificial Sequence
  Description of Artificial Sequence: Synthetic oligonucleotide
gcuagauacuugacuagaa

SEQ ID NO: 1507418 - RNA, 19 nt, Artificial Sequence
  Description of Artificial Sequence: Synthetic oligonucleotide
gcuguuccuuacucguuuc

SEQ ID NO: 1507419 - RNA, 19 nt, Artificial Sequence
  Description of Artificial Sequence: Synthetic oligonucleotide
gcaagauuucgcguacaca

SEQ ID NO: 1507420 - RNA, 19 nt, Artificial Sequence
  Description of Artificial Sequence: Synthetic oligonucleotide
ccgugauacauguguaaga

SEQ ID NO: 1507421 - RNA, 19 nt, Artificial Sequence
  Description of Artificial Sequence: Synthetic oligonucleotide
caggagcgcagccgggcug

SEQ ID NO: 1507422 - RNA, 19 nt, Artificial Sequence
  Description of Artificial Sequence: Synthetic oligonucleotide
gcaaccuuaauaggggcua

SEQ ID NO: 1507423 - RNA, 19 nt, Artificial Sequence
  Description of Artificial Sequence: Synthetic oligonucleotide
gcaccuuucgcugaaggcu

SEQ ID NO: 1507424 - RNA, 19 nt, Artificial Sequence
  Description of Artificial Sequence: Synthetic oligonucleotide
guccccgggcugcgaaggg

SEQ ID NO: 1507425 - RNA, 19 nt, Artificial Sequence
  Description of Artificial Sequence: Synthetic oligonucleotide
cucccgugauacaugugua

SEQ ID NO: 1507426 - RNA, 19 nt, Artificial Sequence
  Description of Artificial Sequence: Synthetic oligonucleotide
aggagcgcagccgggcuga

SEQ ID NO: 1507427 - RNA, 19 nt, Artificial Sequence
  Description of Artificial Sequence: Synthetic oligonucleotide
acuugacuagaaagucuuu

SEQ ID NO: 1507428 - RNA, 19 nt, Artificial Sequence
  Description of Artificial Sequence: Synthetic oligonucleotide
ccaucucgacccuguaaug

SEQ ID NO: 1507429 - RNA, 19 nt, Artificial Sequence
  Description of Artificial Sequence: Synthetic oligonucleotide
gucggcacgcucggggccc

SEQ ID NO: 1507430 - RNA, 19 nt, Artificial Sequence
  Description of Artificial Sequence: Synthetic oligonucleotide
cgacccuguaauguagacg

SEQ ID NO: 1507431 - RNA, 19 nt, Artificial Sequence
  Description of Artificial Sequence: Synthetic oligonucleotide
ugcgaagggccuggcugcu

SEQ ID NO: 1507432 - RNA, 19 nt, Artificial Sequence
  Description of Artificial Sequence: Synthetic oligonucleotide
gaagagucgcccguagcuu

SEQ ID NO: 1507433 - RNA, 19 nt, Artificial Sequence
  Description of Artificial Sequence: Synthetic oligonucleotide
gcccguagcuucccagaag

SEQ ID NO: 1507434 - RNA, 19 nt, Artificial Sequence
  Description of Artificial Sequence: Synthetic oligonucleotide
uccgcccaucucgacccug

SEQ ID NO: 1507435 - RNA, 19 nt, Artificial Sequence
  Description of Artificial Sequence: Synthetic oligonucleotide
acgcacuacucccgugaua

SEQ ID NO: 1507436 - RNA, 19 nt, Artificial Sequence
  Description of Artificial Sequence: Synthetic oligonucleotide
cacuacucccgugauacau

SEQ ID NO: 1507437 - RNA, 19 nt, Artificial Sequence
  Description of Artificial Sequence: Synthetic oligonucleotide
caaugaagcuucagucuuu

SEQ ID NO: 1507438 - RNA, 19 nt, Artificial Sequence
  Description of Artificial Sequence: Synthetic oligonucleotide
uuccgcccaucucgacccu

SEQ ID NO: 1507439 - RNA, 19 nt, Artificial Sequence
  Description of Artificial Sequence: Synthetic oligonucleotide
ggcgcuguccccgggcugc

SEQ ID NO: 1507440 - RNA, 19 nt, Artificial Sequence
  Description of Artificial Sequence: Synthetic oligonucleotide
gacgcacuacucccgugau

SEQ ID NO: 1507441 - RNA, 19 nt, Artificial Sequence
  Description of Artificial Sequence: Synthetic oligonucleotide
uuaccagauccaggccauu

SEQ ID NO: 1507442 - RNA, 19 nt, Artificial Sequence
  Description of Artificial Sequence: Synthetic oligonucleotide
cacuaaccugcaggcgcug

SEQ ID NO: 1507443 - RNA, 19 nt, Artificial Sequence
  Description of Artificial Sequence: Synthetic oligonucleotide
ggccauuaacauagugcuc

SEQ ID NO: 1507444 - RNA, 19 nt, Artificial Sequence
  Description of Artificial Sequence: Synthetic oligonucleotide
gggcccguccgcugcugcg

SEQ ID NO: 1507445 - RNA, 19 nt, Artificial Sequence
  Description of Artificial Sequence: Synthetic oligonucleotide
gcugcggcgucccgcugag

SEQ ID NO: 1507446 - RNA, 19 nt, Artificial Sequence
  Description of Artificial Sequence: Synthetic oligonucleotide
cgcguacacacucuggaga

SEQ ID NO: 1507447 - RNA, 19 nt, Artificial Sequence
  Description of Artificial Sequence: Synthetic oligonucleotide
gcccuugacaaaccugucu

SEQ ID NO: 1507448 - RNA, 19 nt, Artificial Sequence
  Description of Artificial Sequence: Synthetic oligonucleotide
acccuguaauguagacgca

SEQ ID NO: 1507449 - RNA, 19 nt, Artificial Sequence
  Description of Artificial Sequence: Synthetic oligonucleotide
ugccuaggucuaggucccc

SEQ ID NO: 1507450 - RNA, 19 nt, Artificial Sequence
  Description of Artificial Sequence: Synthetic oligonucleotide
guccccauuuauggacaga

SEQ ID NO: 1507451 - RNA, 19 nt, Artificial Sequence
  Description of Artificial Sequence: Synthetic oligonucleotide
caagaccauaagguagccu

SEQ ID NO: 1507452 - RNA, 19 nt, Artificial Sequence
  Description of Artificial Sequence: Synthetic oligonucleotide
gccuucuauuuaccagauc

SEQ ID NO: 1507453 - RNA, 19 nt, Artificial Sequence
  Description of Artificial Sequence: Synthetic oligonucleotide
ggcccguccgcugcugcgg

SEQ ID NO: 1507454 - RNA, 19 nt, Artificial Sequence
  Description of Artificial Sequence: Synthetic oligonucleotide
cugcggccccucuguggag

SEQ ID NO: 1507455 - RNA, 19 nt, Artificial Sequence
  Description of Artificial Sequence: Synthetic oligonucleotide
caggacuaugaagaccuau

SEQ ID NO: 1507456 - RNA, 19 nt, Artificial Sequence
  Description of Artificial Sequence: Synthetic oligonucleotide
cugcugcggccccucugug

SEQ ID NO: 1507457 - RNA, 19 nt, Artificial Sequence
  Description of Artificial Sequence: Synthetic oligonucleotide
ccuuucgcccugcuucauc

SEQ ID NO: 1507458 - RNA, 19 nt, Artificial Sequence
  Description of Artificial Sequence: Synthetic oligonucleotide
cccaucucgacccuguaau

SEQ ID NO: 1507459 - RNA, 19 nt, Artificial Sequence
  Description of Artificial Sequence: Synthetic oligonucleotide
gccuaugccgcagccagaa

SEQ ID NO: 1507460 - RNA, 19 nt, Artificial Sequence
  Description of Artificial Sequence: Synthetic oligonucleotide
ccuagguuccacagagucu

SEQ ID NO: 1507461 - RNA, 19 nt, Artificial Sequence
  Description of Artificial Sequence: Synthetic oligonucleotide
gcacgcucggggcccgucc

SEQ ID NO: 1507462 - RNA, 19 nt, Artificial Sequence
  Description of Artificial Sequence: Synthetic oligonucleotide
gcuaaacaagggugaaguu

SEQ ID NO: 1507463 - RNA, 19 nt, Artificial Sequence
  Description of Artificial Sequence: Synthetic oligonucleotide
ccucuguggagcccgcgca

SEQ ID NO: 1507464 - RNA, 19 nt, Artificial Sequence
  Description of Artificial Sequence: Synthetic oligonucleotide
ccuaugccgcagccagaag

SEQ ID NO: 1507465 - RNA, 19 nt, Artificial Sequence
  Description of Artificial Sequence: Synthetic oligonucleotide
agccuaugccgcagccaga

SEQ ID NO: 1507466 - RNA, 19 nt, Artificial Sequence
  Description of Artificial Sequence: Synthetic oligonucleotide
cuaggucuagguccccauu

SEQ ID NO: 1507467 - RNA, 19 nt, Artificial Sequence
  Description of Artificial Sequence: Synthetic oligonucleotide
cuccuagguuccacagagu

SEQ ID NO: 1507468 - RNA, 19 nt, Artificial Sequence
  Description of Artificial Sequence: Synthetic oligonucleotide
caucguggugucucugcuu

SEQ ID NO: 1507469 - RNA, 19 nt, Artificial Sequence
  Description of Artificial Sequence: Synthetic oligonucleotide
ggaaggaaucgcagaugua

SEQ ID NO: 1507470 - RNA, 19 nt, Artificial Sequence
  Description of Artificial Sequence: Synthetic oligonucleotide
cgucccgcugaggaagugc

SEQ ID NO: 1507471 - RNA, 19 nt, Artificial Sequence
  Description of Artificial Sequence: Synthetic oligonucleotide
gcacuacucccgugauaca

SEQ ID NO: 1507472 - RNA, 19 nt, Artificial Sequence
  Description of Artificial Sequence: Synthetic oligonucleotide
gcggccccucuguggagcc

SEQ ID NO: 1507473 - RNA, 19 nt, Artificial Sequence
  Description of Artificial Sequence: Synthetic oligonucleotide
gggugaaguuuaagcaccu

SEQ ID NO: 1507474 - RNA, 19 nt, Artificial Sequence
  Description of Artificial Sequence: Synthetic oligonucleotide
ggggcccguccgcugcugc

SEQ ID NO: 1507475 - RNA, 19 nt, Artificial Sequence
  Description of Artificial Sequence: Synthetic oligonucleotide
ccgcagccagaagucaaac

SEQ ID NO: 1507476 - RNA, 19 nt, Artificial Sequence
  Description of Artificial Sequence: Synthetic oligonucleotide
ccgggcugagcugcugcgg

SEQ ID NO: 1507477 - RNA, 19 nt, Artificial Sequence
  Description of Artificial Sequence: Synthetic oligonucleotide
gccuaggucuaggucccca

SEQ ID NO: 1507478 - RNA, 19 nt, Artificial Sequence
  Description of Artificial Sequence: Synthetic oligonucleotide
ccauuagcuguuccuuacu

SEQ ID NO: 1507479 - RNA, 19 nt, Artificial Sequence
  Description of Artificial Sequence: Synthetic oligonucleotide
cggucgucggcacgcucgg

SEQ ID NO: 1507480 - RNA, 19 nt, Artificial Sequence
  Description of Artificial Sequence: Synthetic oligonucleotide
gccuucugcggcagagguc

SEQ ID NO: 1507481 - RNA, 19 nt, Artificial Sequence
  Description of Artificial Sequence: Synthetic oligonucleotide
gcucggggcccguccgcug

SEQ ID NO: 1507482 - RNA, 19 nt, Artificial Sequence
  Description of Artificial Sequence: Synthetic oligonucleotide
cuccaccauagaagccuau

SEQ ID NO: 1507483 - RNA, 19 nt, Artificial Sequence
  Description of Artificial Sequence: Synthetic oligonucleotide
cgcgcacccggagagccag

SEQ ID NO: 1507484 - RNA, 19 nt, Artificial Sequence
  Description of Artificial Sequence: Synthetic oligonucleotide
cugcggcgucccgcugagg

SEQ ID NO: 1507485 - RNA, 19 nt, Artificial Sequence
  Description of Artificial Sequence: Synthetic oligonucleotide
ccgcggcaggcucgggccg

SEQ ID NO: 1507486 - RNA, 19 nt, Artificial Sequence
  Description of Artificial Sequence: Synthetic oligonucleotide
gcgcagccgggcugagcug

SEQ ID NO: 1507487 - RNA, 19 nt, Artificial Sequence
  Description of Artificial Sequence: Synthetic oligonucleotide
gccagcgugccuaggucua

SEQ ID NO: 1507488 - RNA, 19 nt, Artificial Sequence
  Description of Artificial Sequence: Synthetic oligonucleotide
gucgggccuuuccccacau

SEQ ID NO: 1507489 - RNA, 19 nt, Artificial Sequence
  Description of Artificial Sequence: Synthetic oligonucleotide
ccuaggucuagguccccau

SEQ ID NO: 1507490 - RNA, 19 nt, Artificial Sequence
  Description of Artificial Sequence: Synthetic oligonucleotide
gcggcaggcucgggccgcg

SEQ ID NO: 1507491 - RNA, 19 nt, Artificial Sequence
  Description of Artificial Sequence: Synthetic oligonucleotide
gcgcuguccccgggcugcg

SEQ ID NO: 1507492 - RNA, 19 nt, Artificial Sequence
  Description of Artificial Sequence: Synthetic oligonucleotide
gcgucccgcugaggaagug

SEQ ID NO: 1507493 - RNA, 19 nt, Artificial Sequence
  Description of Artificial Sequence: Synthetic oligonucleotide
ccgggcugcgaagggccug

SEQ ID NO: 1507494 - RNA, 19 nt, Artificial Sequence
  Description of Artificial Sequence: Synthetic oligonucleotide
cccggucgucggcacgcuc

SEQ ID NO: 1507495 - RNA, 19 nt, Artificial Sequence
  Description of Artificial Sequence: Synthetic oligonucleotide
cguccaccgcgaagaccug

SEQ ID NO: 1507496 - RNA, 19 nt, Artificial Sequence
  Description of Artificial Sequence: Synthetic oligonucleotide
cuccccuggccaccaccau

SEQ ID NO: 1507497 - RNA, 19 nt, Artificial Sequence
  Description of Artificial Sequence: Synthetic oligonucleotide
cgcccguagcuucccagaa

SEQ ID NO: 1507498 - RNA, 19 nt, Artificial Sequence
  Description of Artificial Sequence: Synthetic oligonucleotide
cccggguggcagccgcuca

SEQ ID NO: 1507499 - RNA, 19 nt, Artificial Sequence
  Description of Artificial Sequence: Synthetic oligonucleotide
gagucucgauuggcuccuu

SEQ ID NO: 1507500 - RNA, 19 nt, Artificial Sequence
  Description of Artificial Sequence: Synthetic oligonucleotide
ccgcccaucucgacccugu

SEQ ID NO: 1507501 - RNA, 19 nt, Artificial Sequence
  Description of Artificial Sequence: Synthetic oligonucleotide
ggcgucccgcugaggaagu

SEQ ID NO: 1507502 - RNA, 19 nt, Artificial Sequence
  Description of Artificial Sequence: Synthetic oligonucleotide
cugcgaggccagguucuuu

SEQ ID NO: 1507503 - RNA, 19 nt, Artificial Sequence
  Description of Artificial Sequence: Synthetic oligonucleotide
ccuuucgcugaaggcucuu

SEQ ID NO: 1507504 - RNA, 19 nt, Artificial Sequence
  Description of Artificial Sequence: Synthetic oligonucleotide
cggcaggcucgggccgcgc

SEQ ID NO: 1507505 - RNA, 19 nt, Artificial Sequence
  Description of Artificial Sequence: Synthetic oligonucleotide
cccuuucgcccugcuucau

SEQ ID NO: 1507506 - RNA, 19 nt, Artificial Sequence
  Description of Artificial Sequence: Synthetic oligonucleotide
aaugaaagcuaucaaaagc

SEQ ID NO: 1507507 - RNA, 19 nt, Artificial Sequence
  Description of Artificial Sequence: Synthetic oligonucleotide
uggauucacaguaagagcg

SEQ ID NO: 1507508 - RNA, 19 nt, Artificial Sequence
  Description of Artificial Sequence: Synthetic oligonucleotide
uuagugaagguguugaugg

SEQ ID NO: 1507509 - RNA, 19 nt, Artificial Sequence
  Description of Artificial Sequence: Synthetic oligonucleotide
aaugucuuacaauaacagg

SEQ ID NO: 1507510 - RNA, 19 nt, Artificial Sequence
  Description of Artificial Sequence: Synthetic oligonucleotide
ugaaauacaugauuggugc

SEQ ID NO: 1507511 - RNA, 19 nt, Artificial Sequence
  Description of Artificial Sequence: Synthetic oligonucleotide
aaaugugaacacuggauuc

SEQ ID NO: 1507512 - RNA, 19 nt, Artificial Sequence
  Description of Artificial Sequence: Synthetic oligonucleotide
augucuuacaauaacaggc

SEQ ID NO: 1507513 - RNA, 19 nt, Artificial Sequence
  Description of Artificial Sequence: Synthetic oligonucleotide
uuagcaagggcucaggaag

SEQ ID NO: 1507514 - RNA, 19 nt, Artificial Sequence
  Description of Artificial Sequence: Synthetic oligonucleotide
aauaacaggccuccagggc

SEQ ID NO: 1507515 - RNA, 19 nt, Artificial Sequence
  Description of Artificial Sequence: Synthetic oligonucleotide
agaaggacuagugaggucc

SEQ ID NO: 1507516 - RNA, 19 nt, Artificial Sequence
  Description of Artificial Sequence: Synthetic oligonucleotide
ggauuaauggccuugagag

SEQ ID NO: 1507517 - RNA, 19 nt, Artificial Sequence
  Description of Artificial Sequence: Synthetic oligonucleotide
acaaugggcagauaccugc

SEQ ID NO: 1507518 - RNA, 19 nt, Artificial Sequence
  Description of Artificial Sequence: Synthetic oligonucleotide
aagccaaugaggucaggcc

SEQ ID NO: 1507519 - RNA, 19 nt, Artificial Sequence
  Description of Artificial Sequence: Synthetic oligonucleotide
aaggaaaucaugguaaaug

SEQ ID NO: 1507520 - RNA, 19 nt, Artificial Sequence
  Description of Artificial Sequence: Synthetic oligonucleotide
aaacaacuccccuugauga

SEQ ID NO: 1507521 - RNA, 19 nt, Artificial Sequence
  Description of Artificial Sequence: Synthetic oligonucleotide
aaagccaaugaggucaggc

SEQ ID NO: 1507522 - RNA, 19 nt, Artificial Sequence
  Description of Artificial Sequence: Synthetic oligonucleotide
aaucaugguaaaugugaac

SEQ ID NO: 1507523 - RNA, 19 nt, Artificial Sequence
  Description of Artificial Sequence: Synthetic oligonucleotide
gaaacgaagcaccugguag

SEQ ID NO: 1507524 - RNA, 19 nt, Artificial Sequence
  Description of Artificial Sequence: Synthetic oligonucleotide
aaaugucuuacaauaacag

SEQ ID NO: 1507525 - RNA, 19 nt, Artificial Sequence
  Description of Artificial Sequence: Synthetic oligonucleotide
aaagaaaaugucuuacaau

SEQ ID NO: 1507526 - RNA, 19 nt, Artificial Sequence
  Description of Artificial Sequence: Synthetic oligonucleotide
agagagaccugacacacgg

SEQ ID NO: 1507527 - RNA, 19 nt, Artificial Sequence
  Description of Artificial Sequence: Synthetic oligonucleotide
aauggugaaauacaugauu

SEQ ID NO: 1507528 - RNA, 19 nt, Artificial Sequence
  Description of Artificial Sequence: Synthetic oligonucleotide
ugucuuacaauaacaggcc

SEQ ID NO: 1507529 - RNA, 19 nt, Artificial Sequence
  Description of Artificial Sequence: Synthetic oligonucleotide
ugcaggaaaagccaaugag

SEQ ID NO: 1507530 - RNA, 19 nt, Artificial Sequence
  Description of Artificial Sequence: Synthetic oligonucleotide
aauggaauguagcaacacu

SEQ ID NO: 1507531 - RNA, 19 nt, Artificial Sequence
  Description of Artificial Sequence: Synthetic oligonucleotide
guaaauggaauguagcaac

SEQ ID NO: 1507532 - RNA, 19 nt, Artificial Sequence
  Description of Artificial Sequence: Synthetic oligonucleotide
cuaucaaaagcccagcaac

SEQ ID NO: 1507533 - RNA, 19 nt, Artificial Sequence
  Description of Artificial Sequence: Synthetic oligonucleotide
auaagguuaauaccaggag

SEQ ID NO: 1507534 - RNA, 19 nt, Artificial Sequence
  Description of Artificial Sequence: Synthetic oligonucleotide
aauaccaggaggacaaguc

SEQ ID NO: 1507535 - RNA, 19 nt, Artificial Sequence
  Description of Artificial Sequence: Synthetic oligonucleotide
auuaauggccuugagagug

SEQ ID NO: 1507536 - RNA, 19 nt, Artificial Sequence
  Description of Artificial Sequence: Synthetic oligonucleotide
ugauccaggaggaacuuag

SEQ ID NO: 1507537 - RNA, 19 nt, Artificial Sequence
  Description of Artificial Sequence: Synthetic oligonucleotide
gauaccugcaccaggaaag

SEQ ID NO: 1507538 - RNA, 19 nt, Artificial Sequence
  Description of Artificial Sequence: Synthetic oligonucleotide
ugcaaugagaccccaaacu

SEQ ID NO: 1507539 - RNA, 19 nt, Artificial Sequence
  Description of Artificial Sequence: Synthetic oligonucleotide
uuucauuaggaguggaaug

SEQ ID NO: 1507540 - RNA, 19 nt, Artificial Sequence
  Description of Artificial Sequence: Synthetic oligonucleotide
uaucaaaagcccagcaacc

SEQ ID NO: 1507541 - RNA, 19 nt, Artificial Sequence
  Description of Artificial Sequence: Synthetic oligonucleotide
aggugcugcaaugagaccc

SEQ ID NO: 1507542 - RNA, 19 nt, Artificial Sequence
  Description of Artificial Sequence: Synthetic oligonucleotide
auguagcaacacuugauac

SEQ ID NO: 1507543 - RNA, 19 nt, Artificial Sequence
  Description of Artificial Sequence: Synthetic oligonucleotide
aaauggaauguagcaacac

SEQ ID NO: 1507544 - RNA, 19 nt, Artificial Sequence
  Description of Artificial Sequence: Synthetic oligonucleotide
auaccuguggggcagggac

SEQ ID NO: 1507545 - RNA, 19 nt, Artificial Sequence
  Description of Artificial Sequence: Synthetic oligonucleotide
uuaguguuggucaucuugu

SEQ ID NO: 1507546 - RNA, 19 nt, Artificial Sequence
  Description of Artificial Sequence: Synthetic oligonucleotide
aagguuaauaccaggagga

SEQ ID NO: 1507547 - RNA, 19 nt, Artificial Sequence
  Description of Artificial Sequence: Synthetic oligonucleotide
uguagcaacacuugauaca

SEQ ID NO: 1507548 - RNA, 19 nt, Artificial Sequence
  Description of Artificial Sequence: Synthetic oligonucleotide
gaaacaacuccccuugaug

SEQ ID NO: 1507549 - RNA, 19 nt, Artificial Sequence
  Description of Artificial Sequence: Synthetic oligonucleotide
cuagggaacagacuucugg

SEQ ID NO: 1507550 - RNA, 19 nt, Artificial Sequence
  Description of Artificial Sequence: Synthetic oligonucleotide
ugccucgucuaaaaggugg

SEQ ID NO: 1507551 - RNA, 19 nt, Artificial Sequence
  Description of Artificial Sequence: Synthetic oligonucleotide
guugaugggauuaauggcc

SEQ ID NO: 1507552 - RNA, 19 nt, Artificial Sequence
  Description of Artificial Sequence: Synthetic oligonucleotide
ugguaaaugugaacacugg

SEQ ID NO: 1507553 - RNA, 19 nt, Artificial Sequence
  Description of Artificial Sequence: Synthetic oligonucleotide
ucacaaguuuucauuagga

SEQ ID NO: 1507554 - RNA, 19 nt, Artificial Sequence
  Description of Artificial Sequence: Synthetic oligonucleotide
uggaaugaaagcuaucaaa

SEQ ID NO: 1507555 - RNA, 19 nt, Artificial Sequence
  Description of Artificial Sequence: Synthetic oligonucleotide
aaacgaagcaccugguagu

SEQ ID NO: 1507556 - RNA, 19 nt, Artificial Sequence
  Description of Artificial Sequence: Synthetic oligonucleotide
guuaguguuggucaucuug

SEQ ID NO: 1507557 - RNA, 19 nt, Artificial Sequence
  Description of Artificial Sequence: Synthetic oligonucleotide
uggugaaauacaugauugg

SEQ ID NO: 1507558 - RNA, 19 nt, Artificial Sequence
  Description of Artificial Sequence: Synthetic oligonucleotide
aaauacaugauuggugcca

SEQ ID NO: 1507559 - RNA, 19 nt, Artificial Sequence
  Description of Artificial Sequence: Synthetic oligonucleotide
gaaguucccgaagaaaggg

SEQ ID NO: 1507560 - RNA, 19 nt, Artificial Sequence
  Description of Artificial Sequence: Synthetic oligonucleotide
auuaggaguggaaugaaag

SEQ ID NO: 1507561 - RNA, 19 nt, Artificial Sequence
  Description of Artificial Sequence: Synthetic oligonucleotide
ucuagagcugucaugccug

SEQ ID NO: 1507562 - RNA, 19 nt, Artificial Sequence
  Description of Artificial Sequence: Synthetic oligonucleotide
guauaaggcaaagaaaaug

SEQ ID NO: 1507563 - RNA, 19 nt, Artificial Sequence
  Description of Artificial Sequence: Synthetic oligonucleotide
caggaaacgaagcaccugg

SEQ ID NO: 1507564 - RNA, 19 nt, Artificial Sequence
  Description of Artificial Sequence: Synthetic oligonucleotide
uccaggaggaacuuaguga

SEQ ID NO: 1507565 - RNA, 19 nt, Artificial Sequence
  Description of Artificial Sequence: Synthetic oligonucleotide
uacuggucaaaguccaccg

SEQ ID NO: 1507566 - RNA, 19 nt, Artificial Sequence
  Description of Artificial Sequence: Synthetic oligonucleotide
uacaugauuggugccaagg

SEQ ID NO: 1507567 - RNA, 19 nt, Artificial Sequence
  Description of Artificial Sequence: Synthetic oligonucleotide
ugggaaacaacuccccuug

SEQ ID NO: 1507568 - RNA, 19 nt, Artificial Sequence
  Description of Artificial Sequence: Synthetic oligonucleotide
ugagcuccaaauuccaucu

SEQ ID NO: 1507569 - RNA, 19 nt, Artificial Sequence
  Description of Artificial Sequence: Synthetic oligonucleotide
aguggaaugaaagcuauca

SEQ ID NO: 1507570 - RNA, 19 nt, Artificial Sequence
  Description of Artificial Sequence: Synthetic oligonucleotide
uaaauggaauguagcaaca

SEQ ID NO: 1507571 - RNA, 19 nt, Artificial Sequence
  Description of Artificial Sequence: Synthetic oligonucleotide
gucacaaguuuucauuagg

SEQ ID NO: 1507572 - RNA, 19 nt, Artificial Sequence
  Description of Artificial Sequence: Synthetic oligonucleotide
aaugugaacacuggauuca

SEQ ID NO: 1507573 - RNA, 19 nt, Artificial Sequence
  Description of Artificial Sequence: Synthetic oligonucleotide
cuccaauaagguuaauacc

SEQ ID NO: 1507574 - RNA, 19 nt, Artificial Sequence
  Description of Artificial Sequence: Synthetic oligonucleotide
caaccaaagaggcagugag

SEQ ID NO: 1507575 - RNA, 19 nt, Artificial Sequence
  Description of Artificial Sequence: Synthetic oligonucleotide
ugacagaagcacuuguggc

SEQ ID NO: 1507576 - RNA, 19 nt, Artificial Sequence
  Description of Artificial Sequence: Synthetic oligonucleotide
uguucuggucacaaugggc

SEQ ID NO: 1507577 - RNA, 19 nt, Artificial Sequence
  Description of Artificial Sequence: Synthetic oligonucleotide
auaacaggccuccagggcu

SEQ ID NO: 1507578 - RNA, 19 nt, Artificial Sequence
  Description of Artificial Sequence: Synthetic oligonucleotide
ucuaaaagguggucagugc

SEQ ID NO: 1507579 - RNA, 19 nt, Artificial Sequence
  Description of Artificial Sequence: Synthetic oligonucleotide
agguauaaggcaaagaaaa

SEQ ID NO: 1507580 - RNA, 19 nt, Artificial Sequence
  Description of Artificial Sequence: Synthetic oligonucleotide
accaaagaggcagugagag

SEQ ID NO: 1507581 - RNA, 19 nt, Artificial Sequence
  Description of Artificial Sequence: Synthetic oligonucleotide
uaggcaggaacccuggacu

SEQ ID NO: 1507582 - RNA, 19 nt, Artificial Sequence
  Description of Artificial Sequence: Synthetic oligonucleotide
caaugagaccccaaacugc

SEQ ID NO: 1507583 - RNA, 19 nt, Artificial Sequence
  Description of Artificial Sequence: Synthetic oligonucleotide
ucgucuaaaagguggucag

SEQ ID NO: 1507584 - RNA, 19 nt, Artificial Sequence
  Description of Artificial Sequence: Synthetic oligonucleotide
uuuucauuaggaguggaau

SEQ ID NO: 1507585 - RNA, 19 nt, Artificial Sequence
  Description of Artificial Sequence: Synthetic oligonucleotide
uacuucccuaucacuaggg

SEQ ID NO: 1507586 - RNA, 19 nt, Artificial Sequence
  Description of Artificial Sequence: Synthetic oligonucleotide
ugagaccccaaacugcuga

SEQ ID NO: 1507587 - RNA, 19 nt, Artificial Sequence
  Description of Artificial Sequence: Synthetic oligonucleotide
aggaaguucccgaagaaag

SEQ ID NO: 1507588 - RNA, 19 nt, Artificial Sequence
  Description of Artificial Sequence: Synthetic oligonucleotide
auggugaaauacaugauug

SEQ ID NO: 1507589 - RNA, 19 nt, Artificial Sequence
  Description of Artificial Sequence: Synthetic oligonucleotide
ugugcaguaccaucucuag

SEQ ID NO: 1507590 - RNA, 19 nt, Artificial Sequence
  Description of Artificial Sequence: Synthetic oligonucleotide
ggugccaaggaaaucaugg

SEQ ID NO: 1507591 - RNA, 19 nt, Artificial Sequence
  Description of Artificial Sequence: Synthetic oligonucleotide
gaggacaaguccaacuggg

SEQ ID NO: 1507592 - RNA, 19 nt, Artificial Sequence
  Description of Artificial Sequence: Synthetic oligonucleotide
agcaugagccugcagguag

SEQ ID NO: 1507593 - RNA, 19 nt, Artificial Sequence
  Description of Artificial Sequence: Synthetic oligonucleotide
aggaggacaaguccaacug

SEQ ID NO: 1507594 - RNA, 19 nt, Artificial Sequence
  Description of Artificial Sequence: Synthetic oligonucleotide
aggaaugggcacuuggucu

SEQ ID NO: 1507595 - RNA, 19 nt, Artificial Sequence
  Description of Artificial Sequence: Synthetic oligonucleotide
aagagggucacaaguuuuc

SEQ ID NO: 1507596 - RNA, 19 nt, Artificial Sequence
  Description of Artificial Sequence: Synthetic oligonucleotide
aaagcagucaggaaacgaa

SEQ ID NO: 1507597 - RNA, 19 nt, Artificial Sequence
  Description of Artificial Sequence: Synthetic oligonucleotide
gguggugagagcaugagcc

SEQ ID NO: 1507598 - RNA, 19 nt, Artificial Sequence
  Description of Artificial Sequence: Synthetic oligonucleotide
gugaaauacaugauuggug

SEQ ID NO: 1507599 - RNA, 19 nt, Artificial Sequence
  Description of Artificial Sequence: Synthetic oligonucleotide
aaguuuucauuaggagugg

SEQ ID NO: 1507600 - RNA, 19 nt, Artificial Sequence
  Description of Artificial Sequence: Synthetic oligonucleotide
uguccaguuggugagcucc

SEQ ID NO: 1507601 - RNA, 19 nt, Artificial Sequence
  Description of Artificial Sequence: Synthetic oligonucleotide
gacuagugagguccaaaag

SEQ ID NO: 1507602 - RNA, 19 nt, Artificial Sequence
  Description of Artificial Sequence: Synthetic oligonucleotide
aacccuggacuccaauaag

SEQ ID NO: 1507603 - RNA, 19 nt, Artificial Sequence
  Description of Artificial Sequence: Synthetic oligonucleotide
ugcugauuuggcagagggg

SEQ ID NO: 1507604 - RNA, 19 nt, Artificial Sequence
  Description of Artificial Sequence: Synthetic oligonucleotide
gguggcaugggcuugggag

SEQ ID NO: 1507605 - RNA, 19 nt, Artificial Sequence
  Description of Artificial Sequence: Synthetic oligonucleotide
cacgggugcaggaaaagcc

SEQ ID NO: 1507606 - RNA, 19 nt, Artificial Sequence
  Description of Artificial Sequence: Synthetic oligonucleotide
aguaaauggaauguagcaa

SEQ ID NO: 1507607 - RNA, 19 nt, Artificial Sequence
  Description of Artificial Sequence: Synthetic oligonucleotide
agagaccugacacacgggu

SEQ ID NO: 1507608 - RNA, 19 nt, Artificial Sequence
  Description of Artificial Sequence: Synthetic oligonucleotide
ucccguacaaccugggugu

SEQ ID NO: 1507609 - RNA, 19 nt, Artificial Sequence
  Description of Artificial Sequence: Synthetic oligonucleotide
cugagcacgauaggaaugg

SEQ ID NO: 1507610 - RNA, 19 nt, Artificial Sequence
  Description of Artificial Sequence: Synthetic oligonucleotide
caguaaauggaauguagca

SEQ ID NO: 1507611 - RNA, 19 nt, Artificial Sequence
  Description of Artificial Sequence: Synthetic oligonucleotide
aggauugacugcuggcagg

SEQ ID NO: 1507612 - RNA, 19 nt, Artificial Sequence
  Description of Artificial Sequence: Synthetic oligonucleotide
uugaggauugacugcuggc

SEQ ID NO: 1507613 - RNA, 19 nt, Artificial Sequence
  Description of Artificial Sequence: Synthetic oligonucleotide
uccucaguaaauggaaugu

SEQ ID NO: 1507614 - RNA, 19 nt, Artificial Sequence
  Description of Artificial Sequence: Synthetic oligonucleotide
ucaaaagcccagcaaccaa

SEQ ID NO: 1507615 - RNA, 19 nt, Artificial Sequence
  Description of Artificial Sequence: Synthetic oligonucleotide
aggaacuuagugaaggugu

SEQ ID NO: 1507616 - RNA, 19 nt, Artificial Sequence
  Description of Artificial Sequence: Synthetic oligonucleotide
agagcaugagccugcaggu

SEQ ID NO: 1507617 - RNA, 19 nt, Artificial Sequence
  Description of Artificial Sequence: Synthetic oligonucleotide
caaagguuagcaagggcuc

SEQ ID NO: 1507618 - RNA, 19 nt, Artificial Sequence
  Description of Artificial Sequence: Synthetic oligonucleotide
aagcagucaggaaacgaag

SEQ ID NO: 1507619 - RNA, 19 nt, Artificial Sequence
  Description of Artificial Sequence: Synthetic oligonucleotide
gcaacugucucccugagca

SEQ ID NO: 1507620 - RNA, 19 nt, Artificial Sequence
  Description of Artificial Sequence: Synthetic oligonucleotide
ugggcagauaccugcacca

SEQ ID NO: 1507621 - RNA, 19 nt, Artificial Sequence
  Description of Artificial Sequence: Synthetic oligonucleotide
cuccucaguaaauggaaug

SEQ ID NO: 1507622 - RNA, 19 nt, Artificial Sequence
  Description of Artificial Sequence: Synthetic oligonucleotide
cucuggcagaguuuggagc

SEQ ID NO: 1507623 - RNA, 19 nt, Artificial Sequence
  Description of Artificial Sequence: Synthetic oligonucleotide
ugccaaggaaaucauggua

SEQ ID NO: 1507624 - RNA, 19 nt, Artificial Sequence
  Description of Artificial Sequence: Synthetic oligonucleotide
uagugaagguguugauggg

SEQ ID NO: 1507625 - RNA, 19 nt, Artificial Sequence
  Description of Artificial Sequence: Synthetic oligonucleotide
gaugggauuaauggccuug

SEQ ID NO: 1507626 - RNA, 19 nt, Artificial Sequence
  Description of Artificial Sequence: Synthetic oligonucleotide
aauacaugauuggugccaa

SEQ ID NO: 1507627 - RNA, 19 nt, Artificial Sequence
  Description of Artificial Sequence: Synthetic oligonucleotide
agcacgauaggaaugggca

SEQ ID NO: 1507628 - RNA, 19 nt, Artificial Sequence
  Description of Artificial Sequence: Synthetic oligonucleotide
gucuaaaagguggucagug

SEQ ID NO: 1507629 - RNA, 19 nt, Artificial Sequence
  Description of Artificial Sequence: Synthetic oligonucleotide
uaucacuagggaacagacu

SEQ ID NO: 1507630 - RNA, 19 nt, Artificial Sequence
  Description of Artificial Sequence: Synthetic oligonucleotide
acuggucaaaguccaccgg

SEQ ID NO: 1507631 - RNA, 19 nt, Artificial Sequence
  Description of Artificial Sequence: Synthetic oligonucleotide
cacuuguggcgccagagag

SEQ ID NO: 1507632 - RNA, 19 nt, Artificial Sequence
  Description of Artificial Sequence: Synthetic oligonucleotide
agccaaugaggucaggccu

SEQ ID NO: 1507633 - RNA, 19 nt, Artificial Sequence
  Description of Artificial Sequence: Synthetic oligonucleotide
cacucucuggcuuucauca

SEQ ID NO: 1507634 - RNA, 19 nt, Artificial Sequence
  Description of Artificial Sequence: Synthetic oligonucleotide
gauucacaguaagagcgcc

SEQ ID NO: 1507635 - RNA, 19 nt, Artificial Sequence
  Description of Artificial Sequence: Synthetic oligonucleotide
guacuucccuaucacuagg

SEQ ID NO: 1507636 - RNA, 19 nt, Artificial Sequence
  Description of Artificial Sequence: Synthetic oligonucleotide
gcaaugagaccccaaacug

SEQ ID NO: 1507637 - RNA, 19 nt, Artificial Sequence
  Description of Artificial Sequence: Synthetic oligonucleotide
ggucacaaugggcagauac

SEQ ID NO: 1507638 - RNA, 19 nt, Artificial Sequence
  Description of Artificial Sequence: Synthetic oligonucleotide
gggucuugaggauugacug

SEQ ID NO: 1507639 - RNA, 19 nt, Artificial Sequence
  Description of Artificial Sequence: Synthetic oligonucleotide
ugagagguauaaggcaaag

SEQ ID NO: 1507640 - RNA, 19 nt, Artificial Sequence
  Description of Artificial Sequence: Synthetic oligonucleotide
ucccacagugugcaguacc

SEQ ID NO: 1507641 - RNA, 19 nt, Artificial Sequence
  Description of Artificial Sequence: Synthetic oligonucleotide
aacaacuccccuugaugau

SEQ ID NO: 1507642 - RNA, 19 nt, Artificial Sequence
  Description of Artificial Sequence: Synthetic oligonucleotide
uccuaggcaggaacccugg

SEQ ID NO: 1507643 - RNA, 19 nt, Artificial Sequence
  Description of Artificial Sequence: Synthetic oligonucleotide
cuuguggcgccagagagac

SEQ ID NO: 1507644 - RNA, 19 nt, Artificial Sequence
  Description of Artificial Sequence: Synthetic oligonucleotide
ucauuguacuggucaaagu

SEQ ID NO: 1507645 - RNA, 19 nt, Artificial Sequence
  Description of Artificial Sequence: Synthetic oligonucleotide
gaauggcccaggcugggcc

SEQ ID NO: 1507646 - RNA, 19 nt, Artificial Sequence
  Description of Artificial Sequence: Synthetic oligonucleotide
aaguagcaaauggugaaau

SEQ ID NO: 1507647 - RNA, 19 nt, Artificial Sequence
  Description of Artificial Sequence: Synthetic oligonucleotide
gagagugauggcagcaucc

SEQ ID NO: 1507648 - RNA, 19 nt, Artificial Sequence
  Description of Artificial Sequence: Synthetic oligonucleotide
ugggcuugggagcugucgc

SEQ ID NO: 1507649 - RNA, 19 nt, Artificial Sequence
  Description of Artificial Sequence: Synthetic oligonucleotide
auucacaguaagagcgccc

SEQ ID NO: 1507650 - RNA, 19 nt, Artificial Sequence
  Description of Artificial Sequence: Synthetic oligonucleotide
uguuguauuucugcugcac

SEQ ID NO: 1507651 - RNA, 19 nt, Artificial Sequence
  Description of Artificial Sequence: Synthetic oligonucleotide
ucaugccuggccauaccug

SEQ ID NO: 1507652 - RNA, 19 nt, Artificial Sequence
  Description of Artificial Sequence: Synthetic oligonucleotide
gguacuucccuaucacuag

SEQ ID NO: 1507653 - RNA, 19 nt, Artificial Sequence
  Description of Artificial Sequence: Synthetic oligonucleotide
gaacccuggacuccaauaa

SEQ ID NO: 1507654 - RNA, 19 nt, Artificial Sequence
  Description of Artificial Sequence: Synthetic oligonucleotide
acacgggugcaggaaaagc

SEQ ID NO: 1507655 - RNA, 19 nt, Artificial Sequence
  Description of Artificial Sequence: Synthetic oligonucleotide
aguaccaucucuagagcug

SEQ ID NO: 1507656 - RNA, 19 nt, Artificial Sequence
  Description of Artificial Sequence: Synthetic oligonucleotide
ucucccugagcacgauagg

SEQ ID NO: 1507657 - RNA, 19 nt, Artificial Sequence
  Description of Artificial Sequence: Synthetic oligonucleotide
gcagguuagggccaaagac

SEQ ID NO: 1507658 - RNA, 19 nt, Artificial Sequence
  Description of Artificial Sequence: Synthetic oligonucleotide
uagugagguccaaaaggcu

SEQ ID NO: 1507659 - RNA, 19 nt, Artificial Sequence
  Description of Artificial Sequence: Synthetic oligonucleotide
gaaaagccaaugaggucag

SEQ ID NO: 1507660 - RNA, 19 nt, Artificial Sequence
  Description of Artificial Sequence: Synthetic oligonucleotide
agcuaucaaaagcccagca

SEQ ID NO: 1507661 - RNA, 19 nt, Artificial Sequence
  Description of Artificial Sequence: Synthetic oligonucleotide
cagguaggcaacugucucc

SEQ ID NO: 1507662 - RNA, 19 nt, Artificial Sequence
  Description of Artificial Sequence: Synthetic oligonucleotide
agugagagguauaaggcaa

SEQ ID NO: 1507663 - RNA, 19 nt, Artificial Sequence
  Description of Artificial Sequence: Synthetic oligonucleotide
agauaccugcaccaggaaa

SEQ ID NO: 1507664 - RNA, 19 nt, Artificial Sequence
  Description of Artificial Sequence: Synthetic oligonucleotide
agguuaauaccaggaggac

SEQ ID NO: 1507665 - RNA, 19 nt, Artificial Sequence
  Description of Artificial Sequence: Synthetic oligonucleotide
ugggauuaauggccuugag

SEQ ID NO: 1507666 - RNA, 19 nt, Artificial Sequence
  Description of Artificial Sequence: Synthetic oligonucleotide
uaauaccaggaggacaagu

SEQ ID NO: 1507667 - RNA, 19 nt, Artificial Sequence
  Description of Artificial Sequence: Synthetic oligonucleotide
acagugugcaguaccaucu

SEQ ID NO: 1507668 - RNA, 19 nt, Artificial Sequence
  Description of Artificial Sequence: Synthetic oligonucleotide
gucucccugagcacgauag

SEQ ID NO: 1507669 - RNA, 19 nt, Artificial Sequence
  Description of Artificial Sequence: Synthetic oligonucleotide
ggacaaguccaacuggggc

SEQ ID NO: 1507670 - RNA, 19 nt, Artificial Sequence
  Description of Artificial Sequence: Synthetic oligonucleotide
ggaggacaaguccaacugg

SEQ ID NO: 1507671 - RNA, 19 nt, Artificial Sequence
  Description of Artificial Sequence: Synthetic oligonucleotide
gacacugcagguacuuccc

SEQ ID NO: 1507672 - RNA, 19 nt, Artificial Sequence
  Description of Artificial Sequence: Synthetic oligonucleotide
guacuggucaaaguccacc

SEQ ID NO: 1507673 - RNA, 19 nt, Artificial Sequence
  Description of Artificial Sequence: Synthetic oligonucleotide
gacuacagccagguuagug

SEQ ID NO: 1507674 - RNA, 19 nt, Artificial Sequence
  Description of Artificial Sequence: Synthetic oligonucleotide
gagguauaaggcaaagaaa

SEQ ID NO: 1507675 - RNA, 19 nt, Artificial Sequence
  Description of Artificial Sequence: Synthetic oligonucleotide
cuagagcugucaugccugg

SEQ ID NO: 1507676 - RNA, 19 nt, Artificial Sequence
  Description of Artificial Sequence: Synthetic oligonucleotide
aacugcugauuuggcagag

SEQ ID NO: 1507677 - RNA, 19 nt, Artificial Sequence
  Description of Artificial Sequence: Synthetic oligonucleotide
aguagcaaauggugaaaua

SEQ ID NO: 1507678 - RNA, 19 nt, Artificial Sequence
  Description of Artificial Sequence: Synthetic oligonucleotide
ucaggaaacgaagcaccug

SEQ ID NO: 1507679 - RNA, 19 nt, Artificial Sequence
  Description of Artificial Sequence: Synthetic oligonucleotide
agaggucaaagguuagcaa

SEQ ID NO: 1507680 - RNA, 19 nt, Artificial Sequence
  Description of Artificial Sequence: Synthetic oligonucleotide
cugaucuccggaagaugcc

SEQ ID NO: 1507681 - RNA, 19 nt, Artificial Sequence
  Description of Artificial Sequence: Synthetic oligonucleotide
ggaaugggcacuuggucug

SEQ ID NO: 1507682 - RNA, 19 nt, Artificial Sequence
  Description of Artificial Sequence: Synthetic oligonucleotide
ggucacaaguuuucauuag

SEQ ID NO: 1507683 - RNA, 19 nt, Artificial Sequence
  Description of Artificial Sequence: Synthetic oligonucleotide
uguuggcugaucuccggaa

SEQ ID NO: 1507684 - RNA, 19 nt, Artificial Sequence
  Description of Artificial Sequence: Synthetic oligonucleotide
guuagcaagggcucaggaa

SEQ ID NO: 1507685 - RNA, 19 nt, Artificial Sequence
  Description of Artificial Sequence: Synthetic oligonucleotide
gcagugagagguauaaggc

SEQ ID NO: 1507686 - RNA, 19 nt, Artificial Sequence
  Description of Artificial Sequence: Synthetic oligonucleotide
acuucccuaucacuaggga

SEQ ID NO: 1507687 - RNA, 19 nt, Artificial Sequence
  Description of Artificial Sequence: Synthetic oligonucleotide
uuaauaccaggaggacaag

SEQ ID NO: 1507688 - RNA, 19 nt, Artificial Sequence
  Description of Artificial Sequence: Synthetic oligonucleotide
cugcaaugagaccccaaac

SEQ ID NO: 1507689 - RNA, 19 nt, Artificial Sequence
  Description of Artificial Sequence: Synthetic oligonucleotide
gcaaagaaaaugucuuaca

SEQ ID NO: 1507690 - RNA, 19 nt, Artificial Sequence
  Description of Artificial Sequence: Synthetic oligonucleotide
agguuaguguuggucaucu

SEQ ID NO: 1507691 - RNA, 19 nt, Artificial Sequence
  Description of Artificial Sequence: Synthetic oligonucleotide
ucucuagagcugucaugcc

SEQ ID NO: 1507692 - RNA, 19 nt, Artificial Sequence
  Description of Artificial Sequence: Synthetic oligonucleotide
uccccuugaugauccagga

SEQ ID NO: 1507693 - RNA, 19 nt, Artificial Sequence
  Description of Artificial Sequence: Synthetic oligonucleotide
caugauuggugccaaggaa

SEQ ID NO: 1507694 - RNA, 19 nt, Artificial Sequence
  Description of Artificial Sequence: Synthetic oligonucleotide
uacaaccuggguguuggcu

SEQ ID NO: 1507695 - RNA, 19 nt, Artificial Sequence
  Description of Artificial Sequence: Synthetic oligonucleotide
caaaaggcuccucaguaaa

SEQ ID NO: 1507696 - RNA, 19 nt, Artificial Sequence
  Description of Artificial Sequence: Synthetic oligonucleotide
uuucaucaauguugaggaa

SEQ ID NO: 1507697 - RNA, 19 nt, Artificial Sequence
  Description of Artificial Sequence: Synthetic oligonucleotide
gggauuaauggccuugaga

SEQ ID NO: 1507698 - RNA, 19 nt, Artificial Sequence
  Description of Artificial Sequence: Synthetic oligonucleotide
cacaaugggcagauaccug

SEQ ID NO: 1507699 - RNA, 19 nt, Artificial Sequence
  Description of Artificial Sequence: Synthetic oligonucleotide
aaaagccaaugaggucagg

SEQ ID NO: 1507700 - RNA, 19 nt, Artificial Sequence
  Description of Artificial Sequence: Synthetic oligonucleotide
cugcagguaggcaacuguc

SEQ ID NO: 1507701 - RNA, 19 nt, Artificial Sequence
  Description of Artificial Sequence: Synthetic oligonucleotide
cuucccuaucacuagggaa

SEQ ID NO: 1507702 - RNA, 19 nt, Artificial Sequence
  Description of Artificial Sequence: Synthetic oligonucleotide
gacuccaauaagguuaaua

SEQ ID NO: 1507703 - RNA, 19 nt, Artificial Sequence
  Description of Artificial Sequence: Synthetic oligonucleotide
agcacuuguggcgccagag

SEQ ID NO: 1507704 - RNA, 19 nt, Artificial Sequence
  Description of Artificial Sequence: Synthetic oligonucleotide
ugagcacgauaggaauggg

SEQ ID NO: 1507705 - RNA, 19 nt, Artificial Sequence
  Description of Artificial Sequence: Synthetic oligonucleotide
ggcagauaccugcaccagg

SEQ ID NO: 1507706 - RNA, 19 nt, Artificial Sequence
  Description of Artificial Sequence: Synthetic oligonucleotide
ucauuaggaguggaaugaa

SEQ ID NO: 1507707 - RNA, 19 nt, Artificial Sequence
  Description of Artificial Sequence: Synthetic oligonucleotide
auacaugauuggugccaag

SEQ ID NO: 1507708 - RNA, 19 nt, Artificial Sequence
  Description of Artificial Sequence: Synthetic oligonucleotide
aggacaaguccaacugggg

SEQ ID NO: 1507709 - RNA, 19 nt, Artificial Sequence
  Description of Artificial Sequence: Synthetic oligonucleotide
aaaaggcuccucaguaaau

SEQ ID NO: 1507710 - RNA, 19 nt, Artificial Sequence
  Description of Artificial Sequence: Synthetic oligonucleotide
aaccaaagaggcagugaga

SEQ ID NO: 1507711 - RNA, 19 nt, Artificial Sequence
  Description of Artificial Sequence: Synthetic oligonucleotide
agaauggcccaggcugggc

SEQ ID NO: 1507712 - RNA, 19 nt, Artificial Sequence
  Description of Artificial Sequence: Synthetic oligonucleotide
cucgucuaaaaggugguca

SEQ ID NO: 1507713 - RNA, 19 nt, Artificial Sequence
  Description of Artificial Sequence: Synthetic oligonucleotide
agggaacagacuucuggaa

SEQ ID NO: 1507714 - RNA, 19 nt, Artificial Sequence
  Description of Artificial Sequence: Synthetic oligonucleotide
agggccccuuccuaggcag

SEQ ID NO: 1507715 - RNA, 19 nt, Artificial Sequence
  Description of Artificial Sequence: Synthetic oligonucleotide
cagagagaccugacacacg

SEQ ID NO: 1507716 - RNA, 19 nt, Artificial Sequence
  Description of Artificial Sequence: Synthetic oligonucleotide
uucugcugcacuucccgua

SEQ ID NO: 1507717 - RNA, 19 nt, Artificial Sequence
  Description of Artificial Sequence: Synthetic oligonucleotide
agggucuugaggauugacu

SEQ ID NO: 1507718 - RNA, 19 nt, Artificial Sequence
  Description of Artificial Sequence: Synthetic oligonucleotide
cagguuagggccaaagacu

SEQ ID NO: 1507719 - RNA, 19 nt, Artificial Sequence
  Description of Artificial Sequence: Synthetic oligonucleotide
ugcugcacuucccguacaa

SEQ ID NO: 1507720 - RNA, 19 nt, Artificial Sequence
  Description of Artificial Sequence: Synthetic oligonucleotide
gaaugggcacuuggucugg

SEQ ID NO: 1507721 - RNA, 19 nt, Artificial Sequence
  Description of Artificial Sequence: Synthetic oligonucleotide
gagaccugacacacgggug

SEQ ID NO: 1507722 - RNA, 19 nt, Artificial Sequence
  Description of Artificial Sequence: Synthetic oligonucleotide
gaggcagugagagguauaa

SEQ ID NO: 1507723 - RNA, 19 nt, Artificial Sequence
  Description of Artificial Sequence: Synthetic oligonucleotide
uaccuguggggcagggaca

SEQ ID NO: 1507724 - RNA, 19 nt, Artificial Sequence
  Description of Artificial Sequence: Synthetic oligonucleotide
guggaaugaaagcuaucaa

SEQ ID NO: 1507725 - RNA, 19 nt, Artificial Sequence
  Description of Artificial Sequence: Synthetic oligonucleotide
ucgguggugagagcaugag

SEQ ID NO: 1507726 - RNA, 19 nt, Artificial Sequence
  Description of Artificial Sequence: Synthetic oligonucleotide
gagagguauaaggcaaaga

SEQ ID NO: 1507727 - RNA, 19 nt, Artificial Sequence
  Description of Artificial Sequence: Synthetic oligonucleotide
agguacuucccuaucacua

SEQ ID NO: 1507728 - RNA, 19 nt, Artificial Sequence
  Description of Artificial Sequence: Synthetic oligonucleotide
gccagguuaguguugguca

SEQ ID NO: 1507729 - RNA, 19 nt, Artificial Sequence
  Description of Artificial Sequence: Synthetic oligonucleotide
gguguuggcugaucuccgg

SEQ ID NO: 1507730 - RNA, 19 nt, Artificial Sequence
  Description of Artificial Sequence: Synthetic oligonucleotide
aacgaagcaccugguaguu

SEQ ID NO: 1507731 - RNA, 19 nt, Artificial Sequence
  Description of Artificial Sequence: Synthetic oligonucleotide
gguuaauaccaggaggaca

SEQ ID NO: 1507732 - RNA, 19 nt, Artificial Sequence
  Description of Artificial Sequence: Synthetic oligonucleotide
ggucaaaguccaccggcag

SEQ ID NO: 1507733 - RNA, 19 nt, Artificial Sequence
  Description of Artificial Sequence: Synthetic oligonucleotide
gacacacgggugcaggaaa

SEQ ID NO: 1507734 - RNA, 19 nt, Artificial Sequence
  Description of Artificial Sequence: Synthetic oligonucleotide
cauuaggaguggaaugaaa

SEQ ID NO: 1507735 - RNA, 19 nt, Artificial Sequence
  Description of Artificial Sequence: Synthetic oligonucleotide
gcaaauggugaaauacaug

SEQ ID NO: 1507736 - RNA, 19 nt, Artificial Sequence
  Description of Artificial Sequence: Synthetic oligonucleotide
guuuucauuaggaguggaa

SEQ ID NO: 1507737 - RNA, 19 nt, Artificial Sequence
  Description of Artificial Sequence: Synthetic oligonucleotide
gagaaggacuagugagguc

SEQ ID NO: 1507738 - RNA, 19 nt, Artificial Sequence
  Description of Artificial Sequence: Synthetic oligonucleotide
ccccauguuguauuucugc

SEQ ID NO: 1507739 - RNA, 19 nt, Artificial Sequence
  Description of Artificial Sequence: Synthetic oligonucleotide
agcaaccaaagaggcagug

SEQ ID NO: 1507740 - RNA, 19 nt, Artificial Sequence
  Description of Artificial Sequence: Synthetic oligonucleotide
gcaaaagcagaauggccca

SEQ ID NO: 1507741 - RNA, 19 nt, Artificial Sequence
  Description of Artificial Sequence: Synthetic oligonucleotide
accaucucuagagcuguca

SEQ ID NO: 1507742 - RNA, 19 nt, Artificial Sequence
  Description of Artificial Sequence: Synthetic oligonucleotide
uccggaagaugcccucggu

SEQ ID NO: 1507743 - RNA, 19 nt, Artificial Sequence
  Description of Artificial Sequence: Synthetic oligonucleotide
gaagcacuuguggcgccag

SEQ ID NO: 1507744 - RNA, 19 nt, Artificial Sequence
  Description of Artificial Sequence: Synthetic oligonucleotide
ggauucacaguaagagcgc

SEQ ID NO: 1507745 - RNA, 19 nt, Artificial Sequence
  Description of Artificial Sequence: Synthetic oligonucleotide
uggcagaguuuggagcgcc

SEQ ID NO: 1507746 - RNA, 19 nt, Artificial Sequence
  Description of Artificial Sequence: Synthetic oligonucleotide
gacugacagaagcacuugu

SEQ ID NO: 1507747 - RNA, 19 nt, Artificial Sequence
  Description of Artificial Sequence: Synthetic oligonucleotide
acgggugcaggaaaagcca

SEQ ID NO: 1507748 - RNA, 19 nt, Artificial Sequence
  Description of Artificial Sequence: Synthetic oligonucleotide
ggacuagugagguccaaaa

SEQ ID NO: 1507749 - RNA, 19 nt, Artificial Sequence
  Description of Artificial Sequence: Synthetic oligonucleotide
ggaaagcagucaggaaacg

SEQ ID NO: 1507750 - RNA, 19 nt, Artificial Sequence
  Description of Artificial Sequence: Synthetic oligonucleotide
ggggcuguccaguugguga

SEQ ID NO: 1507751 - RNA, 19 nt, Artificial Sequence
  Description of Artificial Sequence: Synthetic oligonucleotide
gcaguaccaucucuagagc

SEQ ID NO: 1507752 - RNA, 19 nt, Artificial Sequence
  Description of Artificial Sequence: Synthetic oligonucleotide
aagcacuuguggcgccaga

SEQ ID NO: 1507753 - RNA, 19 nt, Artificial Sequence
  Description of Artificial Sequence: Synthetic oligonucleotide
ccagagagaccugacacac

SEQ ID NO: 1507754 - RNA, 19 nt, Artificial Sequence
  Description of Artificial Sequence: Synthetic oligonucleotide
caugguaaaugugaacacu

SEQ ID NO: 1507755 - RNA, 19 nt, Artificial Sequence
  Description of Artificial Sequence: Synthetic oligonucleotide
cagaagcacuuguggcgcc

SEQ ID NO: 1507756 - RNA, 19 nt, Artificial Sequence
  Description of Artificial Sequence: Synthetic oligonucleotide
aggcaacugucucccugag

SEQ ID NO: 1507757 - RNA, 19 nt, Artificial Sequence
  Description of Artificial Sequence: Synthetic oligonucleotide
caacugucucccugagcac

SEQ ID NO: 1507758 - RNA, 19 nt, Artificial Sequence
  Description of Artificial Sequence: Synthetic oligonucleotide
agcgccugcuguguuaccu

SEQ ID NO: 1507759 - RNA, 19 nt, Artificial Sequence
  Description of Artificial Sequence: Synthetic oligonucleotide
ccugagcacgauaggaaug

SEQ ID NO: 1507760 - RNA, 19 nt, Artificial Sequence
  Description of Artificial Sequence: Synthetic oligonucleotide
aaagaggcagugagaggua

SEQ ID NO: 1507761 - RNA, 19 nt, Artificial Sequence
  Description of Artificial Sequence: Synthetic oligonucleotide
ucccgaagaaagggucuug

SEQ ID NO: 1507762 - RNA, 19 nt, Artificial Sequence
  Description of Artificial Sequence: Synthetic oligonucleotide
gaaggacuagugaggucca

SEQ ID NO: 1507763 - RNA, 19 nt, Artificial Sequence
  Description of Artificial Sequence: Synthetic oligonucleotide
ugaugggauuaauggccuu

SEQ ID NO: 1507764 - RNA, 19 nt, Artificial Sequence
  Description of Artificial Sequence: Synthetic oligonucleotide
caguaccaucucuagagcu

SEQ ID NO: 1507765 - RNA, 19 nt, Artificial Sequence
  Description of Artificial Sequence: Synthetic oligonucleotide
ugucucccugagcacgaua

SEQ ID NO: 1507766 - RNA, 19 nt, Artificial Sequence
  Description of Artificial Sequence: Synthetic oligonucleotide
gguuagcaagggcucagga

SEQ ID NO: 1507767 - RNA, 19 nt, Artificial Sequence
  Description of Artificial Sequence: Synthetic oligonucleotide
cugccucgucuaaaaggug

SEQ ID NO: 1507768 - RNA, 19 nt, Artificial Sequence
  Description of Artificial Sequence: Synthetic oligonucleotide
aacuccccuugaugaucca

SEQ ID NO: 1507769 - RNA, 19 nt, Artificial Sequence
  Description of Artificial Sequence: Synthetic oligonucleotide
acuuguggcgccagagaga

SEQ ID NO: 1507770 - RNA, 19 nt, Artificial Sequence
  Description of Artificial Sequence: Synthetic oligonucleotide
cacacgggugcaggaaaag

SEQ ID NO: 1507771 - RNA, 19 nt, Artificial Sequence
  Description of Artificial Sequence: Synthetic oligonucleotide
aggacuagugagguccaaa

SEQ ID NO: 1507772 - RNA, 19 nt, Artificial Sequence
  Description of Artificial Sequence: Synthetic oligonucleotide
uucccgaagaaagggucuu

SEQ ID NO: 1507773 - RNA, 19 nt, Artificial Sequence
  Description of Artificial Sequence: Synthetic oligonucleotide
agaagcacuuguggcgcca

SEQ ID NO: 1507774 - RNA, 19 nt, Artificial Sequence
  Description of Artificial Sequence: Synthetic oligonucleotide
caugccuggccauaccugu

SEQ ID NO: 1507775 - RNA, 19 nt, Artificial Sequence
  Description of Artificial Sequence: Synthetic oligonucleotide
cagugugcaguaccaucuc

SEQ ID NO: 1507776 - RNA, 19 nt, Artificial Sequence
  Description of Artificial Sequence: Synthetic oligonucleotide
gucaugccuggccauaccu

SEQ ID NO: 1507777 - RNA, 19 nt, Artificial Sequence
  Description of Artificial Sequence: Synthetic oligonucleotide
gaguggaaugaaagcuauc

SEQ ID NO: 1507778 - RNA, 19 nt, Artificial Sequence
  Description of Artificial Sequence: Synthetic oligonucleotide
gagcuccaaauuccaucuc

SEQ ID NO: 1507779 - RNA, 19 nt, Artificial Sequence
  Description of Artificial Sequence: Synthetic oligonucleotide
ccaacuggggcugccagag

SEQ ID NO: 1507780 - RNA, 19 nt, Artificial Sequence
  Description of Artificial Sequence: Synthetic oligonucleotide
uaauggccuugagagugau

SEQ ID NO: 1507781 - RNA, 19 nt, Artificial Sequence
  Description of Artificial Sequence: Synthetic oligonucleotide
gcugguuaggggcuggaaa

SEQ ID NO: 1507782 - RNA, 19 nt, Artificial Sequence
  Description of Artificial Sequence: Synthetic oligonucleotide
cccuuccuaggcaggaacc

SEQ ID NO: 1507783 - RNA, 19 nt, Artificial Sequence
  Description of Artificial Sequence: Synthetic oligonucleotide
cucgguggugagagcauga

SEQ ID NO: 1507784 - RNA, 19 nt, Artificial Sequence
  Description of Artificial Sequence: Synthetic oligonucleotide
aggcagugagagguauaag

SEQ ID NO: 1507785 - RNA, 19 nt, Artificial Sequence
  Description of Artificial Sequence: Synthetic oligonucleotide
uaccaucucuagagcuguc

SEQ ID NO: 1507786 - RNA, 19 nt, Artificial Sequence
  Description of Artificial Sequence: Synthetic oligonucleotide
aucccacagugugcaguac

SEQ ID NO: 1507787 - RNA, 19 nt, Artificial Sequence
  Description of Artificial Sequence: Synthetic oligonucleotide
cugacacacgggugcagga

SEQ ID NO: 1507788 - RNA, 19 nt, Artificial Sequence
  Description of Artificial Sequence: Synthetic oligonucleotide
gaagagggucacaaguuuu

SEQ ID NO: 1507789 - RNA, 19 nt, Artificial Sequence
  Description of Artificial Sequence: Synthetic oligonucleotide
uggagcgccugcuguguua

SEQ ID NO: 1507790 - RNA, 19 nt, Artificial Sequence
  Description of Artificial Sequence: Synthetic oligonucleotide
gcacuucccguacaaccug

SEQ ID NO: 1507791 - RNA, 19 nt, Artificial Sequence
  Description of Artificial Sequence: Synthetic oligonucleotide
aggaaacgaagcaccuggu

SEQ ID NO: 1507792 - RNA, 19 nt, Artificial Sequence
  Description of Artificial Sequence: Synthetic oligonucleotide
caucuuguucuggucacaa

SEQ ID NO: 1507793 - RNA, 19 nt, Artificial Sequence
  Description of Artificial Sequence: Synthetic oligonucleotide
cuggcagaguuuggagcgc

SEQ ID NO: 1507794 - RNA, 19 nt, Artificial Sequence
  Description of Artificial Sequence: Synthetic oligonucleotide
aggaacccuggacuccaau

SEQ ID NO: 1507795 - RNA, 19 nt, Artificial Sequence
  Description of Artificial Sequence: Synthetic oligonucleotide
guacaaccuggguguuggc

SEQ ID NO: 1507796 - RNA, 19 nt, Artificial Sequence
  Description of Artificial Sequence: Synthetic oligonucleotide
ggaacccuggacuccaaua

SEQ ID NO: 1507797 - RNA, 19 nt, Artificial Sequence
  Description of Artificial Sequence: Synthetic oligonucleotide
acuagggaacagacuucug

SEQ ID NO: 1507798 - RNA, 19 nt, Artificial Sequence
  Description of Artificial Sequence: Synthetic oligonucleotide
ggaaacgaagcaccuggua

SEQ ID NO: 1507799 - RNA, 19 nt, Artificial Sequence
  Description of Artificial Sequence: Synthetic oligonucleotide
ccuuccuaggcaggaaccc

SEQ ID NO: 1507800 - RNA, 19 nt, Artificial Sequence
  Description of Artificial Sequence: Synthetic oligonucleotide
guaccaucucuagagcugu

SEQ ID NO: 1507801 - RNA, 19 nt, Artificial Sequence
  Description of Artificial Sequence: Synthetic oligonucleotide
cgccagagagaccugacac

SEQ ID NO: 1507802 - RNA, 19 nt, Artificial Sequence
  Description of Artificial Sequence: Synthetic oligonucleotide
acgauaggaaugggcacuu

SEQ ID NO: 1507803 - RNA, 19 nt, Artificial Sequence
  Description of Artificial Sequence: Synthetic oligonucleotide
gugugcaguaccaucucua

SEQ ID NO: 1507804 - RNA, 19 nt, Artificial Sequence
  Description of Artificial Sequence: Synthetic oligonucleotide
cagguuaguguuggucauc

SEQ ID NO: 1507805 - RNA, 19 nt, Artificial Sequence
  Description of Artificial Sequence: Synthetic oligonucleotide
cacgauaggaaugggcacu

SEQ ID NO: 1507806 - RNA, 19 nt, Artificial Sequence
  Description of Artificial Sequence: Synthetic oligonucleotide
ggagaaggacuagugaggu

SEQ ID NO: 1507807 - RNA, 19 nt, Artificial Sequence
  Description of Artificial Sequence: Synthetic oligonucleotide
gaagcaccugguaguucuc

SEQ ID NO: 1507808 - RNA, 19 nt, Artificial Sequence
  Description of Artificial Sequence: Synthetic oligonucleotide
agacgcccugggcaucugu

SEQ ID NO: 1507809 - RNA, 19 nt, Artificial Sequence
  Description of Artificial Sequence: Synthetic oligonucleotide
ccugccucgucuaaaaggu

SEQ ID NO: 1507810 - RNA, 19 nt, Artificial Sequence
  Description of Artificial Sequence: Synthetic oligonucleotide
cacuagggaacagacuucu

SEQ ID NO: 1507811 - RNA, 19 nt, Artificial Sequence
  Description of Artificial Sequence: Synthetic oligonucleotide
agggacacugcagguacuu

SEQ ID NO: 1507812 - RNA, 19 nt, Artificial Sequence
  Description of Artificial Sequence: Synthetic oligonucleotide
uccaguuggugagcuccaa

SEQ ID NO: 1507813 - RNA, 19 nt, Artificial Sequence
  Description of Artificial Sequence: Synthetic oligonucleotide
uuguggcgccagagagacc

SEQ ID NO: 1507814 - RNA, 19 nt, Artificial Sequence
  Description of Artificial Sequence: Synthetic oligonucleotide
ccggaagaugcccucggug

SEQ ID NO: 1507815 - RNA, 19 nt, Artificial Sequence
  Description of Artificial Sequence: Synthetic oligonucleotide
aggccuccagggcugguua

SEQ ID NO: 1507816 - RNA, 19 nt, Artificial Sequence
  Description of Artificial Sequence: Synthetic oligonucleotide
augagaccccaaacugcug

SEQ ID NO: 1507817 - RNA, 19 nt, Artificial Sequence
  Description of Artificial Sequence: Synthetic oligonucleotide
gaccugacacacgggugca

SEQ ID NO: 1507818 - RNA, 19 nt, Artificial Sequence
  Description of Artificial Sequence: Synthetic oligonucleotide
ccuaucacuagggaacaga

SEQ ID NO: 1507819 - RNA, 19 nt, Artificial Sequence
  Description of Artificial Sequence: Synthetic oligonucleotide
ggaaacaacuccccuugau

SEQ ID NO: 1507820 - RNA, 19 nt, Artificial Sequence
  Description of Artificial Sequence: Synthetic oligonucleotide
gaucuccggaagaugcccu

SEQ ID NO: 1507821 - RNA, 19 nt, Artificial Sequence
  Description of Artificial Sequence: Synthetic oligonucleotide
cacugcagguacuucccua

SEQ ID NO: 1507822 - RNA, 19 nt, Artificial Sequence
  Description of Artificial Sequence: Synthetic oligonucleotide
guucccgaagaaagggucu

SEQ ID NO: 1507823 - RNA, 19 nt, Artificial Sequence
  Description of Artificial Sequence: Synthetic oligonucleotide
ggaggaacuuagugaaggu

SEQ ID NO: 1507824 - RNA, 19 nt, Artificial Sequence
  Description of Artificial Sequence: Synthetic oligonucleotide
cagguacuucccuaucacu

SEQ ID NO: 1507825 - RNA, 19 nt, Artificial Sequence
  Description of Artificial Sequence: Synthetic oligonucleotide
cuugaugauccaggaggaa

SEQ ID NO: 1507826 - RNA, 19 nt, Artificial Sequence
  Description of Artificial Sequence: Synthetic oligonucleotide
gcagaguuuggagcgccug

SEQ ID NO: 1507827 - RNA, 19 nt, Artificial Sequence
  Description of Artificial Sequence: Synthetic oligonucleotide
caccugguaguucuccucu

SEQ ID NO: 1507828 - RNA, 19 nt, Artificial Sequence
  Description of Artificial Sequence: Synthetic oligonucleotide
acacacgggugcaggaaaa

SEQ ID NO: 1507829 - RNA, 19 nt, Artificial Sequence
  Description of Artificial Sequence: Synthetic oligonucleotide
cuacagccagguuaguguu

SEQ ID NO: 1507830 - RNA, 19 nt, Artificial Sequence
  Description of Artificial Sequence: Synthetic oligonucleotide
ggccugccucgucuaaaag

SEQ ID NO: 1507831 - RNA, 19 nt, Artificial Sequence
  Description of Artificial Sequence: Synthetic oligonucleotide
ggagcgccugcuguguuac

SEQ ID NO: 1507832 - RNA, 19 nt, Artificial Sequence
  Description of Artificial Sequence: Synthetic oligonucleotide
ggcugaucuccggaagaug

SEQ ID NO: 1507833 - RNA, 19 nt, Artificial Sequence
  Description of Artificial Sequence: Synthetic oligonucleotide
augccuggccauaccugug

SEQ ID NO: 1507834 - RNA, 19 nt, Artificial Sequence
  Description of Artificial Sequence: Synthetic oligonucleotide
gcacuuguggcgccagaga

SEQ ID NO: 1507835 - RNA, 19 nt, Artificial Sequence
  Description of Artificial Sequence: Synthetic oligonucleotide
gagcgccugcuguguuacc

SEQ ID NO: 1507836 - RNA, 19 nt, Artificial Sequence
  Description of Artificial Sequence: Synthetic oligonucleotide
gggcagauaccugcaccag

SEQ ID NO: 1507837 - RNA, 19 nt, Artificial Sequence
  Description of Artificial Sequence: Synthetic oligonucleotide
ggaagaugcccucgguggu

SEQ ID NO: 1507838 - RNA, 19 nt, Artificial Sequence
  Description of Artificial Sequence: Synthetic oligonucleotide
ccaaugaggucaggccugc

SEQ ID NO: 1507839 - RNA, 19 nt, Artificial Sequence
  Description of Artificial Sequence: Synthetic oligonucleotide
cagauaccugcaccaggaa

SEQ ID NO: 1507840 - RNA, 19 nt, Artificial Sequence
  Description of Artificial Sequence: Synthetic oligonucleotide
ggaguggaaugaaagcuau

SEQ ID NO: 1507841 - RNA, 19 nt, Artificial Sequence
  Description of Artificial Sequence: Synthetic oligonucleotide
ugcccucgguggugagagc

SEQ ID NO: 1507842 - RNA, 19 nt, Artificial Sequence
  Description of Artificial Sequence: Synthetic oligonucleotide
ccaaagacuacagccaggu

SEQ ID NO: 1507843 - RNA, 19 nt, Artificial Sequence
  Description of Artificial Sequence: Synthetic oligonucleotide
agaggcagugagagguaua

SEQ ID NO: 1507844 - RNA, 19 nt, Artificial Sequence
  Description of Artificial Sequence: Synthetic oligonucleotide
ggauugacugcuggcaggu

SEQ ID NO: 1507845 - RNA, 19 nt, Artificial Sequence
  Description of Artificial Sequence: Synthetic oligonucleotide
gcugggaaacaacuccccu

SEQ ID NO: 1507846 - RNA, 19 nt, Artificial Sequence
  Description of Artificial Sequence: Synthetic oligonucleotide
cauaccuguggggcaggga

SEQ ID NO: 1507847 - RNA, 19 nt, Artificial Sequence
  Description of Artificial Sequence: Synthetic oligonucleotide
gagugauggcagcauccuu

SEQ ID NO: 1507848 - RNA, 19 nt, Artificial Sequence
  Description of Artificial Sequence: Synthetic oligonucleotide
gagcaugagccugcaggua

SEQ ID NO: 1507849 - RNA, 19 nt, Artificial Sequence
  Description of Artificial Sequence: Synthetic oligonucleotide
guccaguuggugagcucca

SEQ ID NO: 1507850 - RNA, 19 nt, Artificial Sequence
  Description of Artificial Sequence: Synthetic oligonucleotide
ggucaggccugccucgucu

SEQ ID NO: 1507851 - RNA, 19 nt, Artificial Sequence
  Description of Artificial Sequence: Synthetic oligonucleotide
gucaggccugccucgucua

SEQ ID NO: 1507852 - RNA, 19 nt, Artificial Sequence
  Description of Artificial Sequence: Synthetic oligonucleotide
cgaagcaccugguaguucu

SEQ ID NO: 1507853 - RNA, 19 nt, Artificial Sequence
  Description of Artificial Sequence: Synthetic oligonucleotide
ggggcuucagggccccuuc

SEQ ID NO: 1507854 - RNA, 19 nt, Artificial Sequence
  Description of Artificial Sequence: Synthetic oligonucleotide
cgguggugagagcaugagc

SEQ ID NO: 1507855 - RNA, 19 nt, Artificial Sequence
  Description of Artificial Sequence: Synthetic oligonucleotide
gcgccagagagaccugaca

SEQ ID NO: 1507856 - RNA, 19 nt, Artificial Sequence
  Description of Artificial Sequence: Synthetic oligonucleotide
gcugcacuucccguacaac

SEQ ID NO: 1507857 - RNA, 19 nt, Artificial Sequence
  Description of Artificial Sequence: Synthetic oligonucleotide
gcccucgguggugagagca

SEQ ID NO: 1507858 - RNA, 19 nt, Artificial Sequence
  Description of Artificial Sequence: Synthetic oligonucleotide
ggaacuuagugaagguguu

SEQ ID NO: 1507859 - RNA, 19 nt, Artificial Sequence
  Description of Artificial Sequence: Synthetic oligonucleotide
cccgaagaaagggucuuga

SEQ ID NO: 1507860 - RNA, 19 nt, Artificial Sequence
  Description of Artificial Sequence: Synthetic oligonucleotide
ccauaccuguggggcaggg

SEQ ID NO: 1507861 - RNA, 19 nt, Artificial Sequence
  Description of Artificial Sequence: Synthetic oligonucleotide
cugcugcacuucccguaca

SEQ ID NO: 1507862 - RNA, 19 nt, Artificial Sequence
  Description of Artificial Sequence: Synthetic oligonucleotide
cccuggacuccaauaaggu

SEQ ID NO: 1507863 - RNA, 19 nt, Artificial Sequence
  Description of Artificial Sequence: Synthetic oligonucleotide
cagcaaccaaagaggcagu

SEQ ID NO: 1507864 - RNA, 19 nt, Artificial Sequence
  Description of Artificial Sequence: Synthetic oligonucleotide
ggcaugaggccuggacuga

SEQ ID NO: 1507865 - RNA, 19 nt, Artificial Sequence
  Description of Artificial Sequence: Synthetic oligonucleotide
gcgccugcuguguuaccuc

SEQ ID NO: 1507866 - RNA, 19 nt, Artificial Sequence
  Description of Artificial Sequence: Synthetic oligonucleotide
gccauaccuguggggcagg

SEQ ID NO: 1507867 - RNA, 19 nt, Artificial Sequence
  Description of Artificial Sequence: Synthetic oligonucleotide
ccucgguggugagagcaug

SEQ ID NO: 1507868 - RNA, 19 nt, Artificial Sequence
  Description of Artificial Sequence: Synthetic oligonucleotide
ccucgucuaaaaggugguc

SEQ ID NO: 1507869 - RNA, 19 nt, Artificial Sequence
  Description of Artificial Sequence: Synthetic oligonucleotide
ggcgccagagagaccugac

SEQ ID NO: 1507870 - RNA, 19 nt, Artificial Sequence
  Description of Artificial Sequence: Synthetic oligonucleotide
cuccuggaggugcugcaau

SEQ ID NO: 1507871 - RNA, 19 nt, Artificial Sequence
  Description of Artificial Sequence: Synthetic oligonucleotide
cccuaucacuagggaacag

SEQ ID NO: 1507872 - RNA, 19 nt, Artificial Sequence
  Description of Artificial Sequence: Synthetic oligonucleotide
acagcagguuagggccaaa

SEQ ID NO: 1507873 - RNA, 19 nt, Artificial Sequence
  Description of Artificial Sequence: Synthetic oligonucleotide
ccaguuggugagcuccaaa

SEQ ID NO: 1507874 - RNA, 19 nt, Artificial Sequence
  Description of Artificial Sequence: Synthetic oligonucleotide
ggccccuuccuaggcagga

SEQ ID NO: 1507875 - RNA, 19 nt, Artificial Sequence
  Description of Artificial Sequence: Synthetic oligonucleotide
ggcgugguggcaugggcuu

SEQ ID NO: 1507876 - RNA, 19 nt, Artificial Sequence
  Description of Artificial Sequence: Synthetic oligonucleotide
ccguacaaccuggguguug

SEQ ID NO: 1507877 - RNA, 19 nt, Artificial Sequence
  Description of Artificial Sequence: Synthetic oligonucleotide
gccucgucuaaaagguggu

SEQ ID NO: 1507878 - RNA, 19 nt, Artificial Sequence
  Description of Artificial Sequence: Synthetic oligonucleotide
ccuaggcaggaacccugga

SEQ ID NO: 1507879 - RNA, 19 nt, Artificial Sequence
  Description of Artificial Sequence: Synthetic oligonucleotide
cagacgcccugggcaucug

SEQ ID NO: 1507880 - RNA, 19 nt, Artificial Sequence
  Description of Artificial Sequence: Synthetic oligonucleotide
cuccaacuacaggcugaaa

SEQ ID NO: 1507881 - RNA, 19 nt, Artificial Sequence
  Description of Artificial Sequence: Synthetic oligonucleotide
gggcgugguggcaugggcu

SEQ ID NO: 1507882 - RNA, 19 nt, Artificial Sequence
  Description of Artificial Sequence: Synthetic oligonucleotide
ggcugguuaggggcuggaa

SEQ ID NO: 1507883 - RNA, 19 nt, Artificial Sequence
  Description of Artificial Sequence: Synthetic oligonucleotide
gguuaguguuggucaucuu

SEQ ID NO: 1507884 - RNA, 19 nt, Artificial Sequence
  Description of Artificial Sequence: Synthetic oligonucleotide
gcaugggcuugggagcugu

SEQ ID NO: 1507885 - RNA, 19 nt, Artificial Sequence
  Description of Artificial Sequence: Synthetic oligonucleotide
ggcacuuggucuggauuuu

SEQ ID NO: 1507886 - RNA, 19 nt, Artificial Sequence
  Description of Artificial Sequence: Synthetic oligonucleotide
ggcagaguuuggagcgccu

SEQ ID NO: 1507887 - RNA, 19 nt, Artificial Sequence
  Description of Artificial Sequence: Synthetic oligonucleotide
cgucuaaaagguggucagu

SEQ ID NO: 1507888 - RNA, 19 nt, Artificial Sequence
  Description of Artificial Sequence: Synthetic oligonucleotide
cugucucccugagcacgau

SEQ ID NO: 1507889 - RNA, 19 nt, Artificial Sequence
  Description of Artificial Sequence: Synthetic oligonucleotide
cccucgguggugagagcau

SEQ ID NO: 1507890 - RNA, 19 nt, Artificial Sequence
  Description of Artificial Sequence: Synthetic oligonucleotide
cccguacaaccuggguguu

SEQ ID NO: 1507891 - RNA, 19 nt, Artificial Sequence
  Description of Artificial Sequence: Synthetic oligonucleotide
aaaacuacaaaccaacacc

SEQ ID NO: 1507892 - RNA, 19 nt, Artificial Sequence
  Description of Artificial Sequence: Synthetic oligonucleotide
aauauauuacuucagguca

SEQ ID NO: 1507893 - RNA, 19 nt, Artificial Sequence
  Description of Artificial Sequence: Synthetic oligonucleotide
agaguuauugcauugcucc

SEQ ID NO: 1507894 - RNA, 19 nt, Artificial Sequence
  Description of Artificial Sequence: Synthetic oligonucleotide
auuaugacugcuuaggaac

SEQ ID NO: 1507895 - RNA, 19 nt, Artificial Sequence
  Description of Artificial Sequence: Synthetic oligonucleotide
uacaagauaguacaguacg

SEQ ID NO: 1507896 - RNA, 19 nt, Artificial Sequence
  Description of Artificial Sequence: Synthetic oligonucleotide
aacauauuggacccgaaug

SEQ ID NO: 1507897 - RNA, 19 nt, Artificial Sequence
  Description of Artificial Sequence: Synthetic oligonucleotide
gaaugguuaauacugguag

SEQ ID NO: 1507898 - RNA, 19 nt, Artificial Sequence
  Description of Artificial Sequence: Synthetic oligonucleotide
acauauuggacccgaaugc

SEQ ID NO: 1507899 - RNA, 19 nt, Artificial Sequence
  Description of Artificial Sequence: Synthetic oligonucleotide
aauaaauaaggaccagcuc

SEQ ID NO: 1507900 - RNA, 19 nt, Artificial Sequence
  Description of Artificial Sequence: Synthetic oligonucleotide
aauaagguaaaauucucau

SEQ ID NO: 1507901 - RNA, 19 nt, Artificial Sequence
  Description of Artificial Sequence: Synthetic oligonucleotide
accaacaccgguuuugucc

SEQ ID NO: 1507902 - RNA, 19 nt, Artificial Sequence
  Description of Artificial Sequence: Synthetic oligonucleotide
acccacaacauauuggacc

SEQ ID NO: 1507903 - RNA, 19 nt, Artificial Sequence
  Description of Artificial Sequence: Synthetic oligonucleotide
aaugcucuuguacugguag

SEQ ID NO: 1507904 - RNA, 19 nt, Artificial Sequence
  Description of Artificial Sequence: Synthetic oligonucleotide
aaucagcaaacauacaacu

SEQ ID NO: 1507905 - RNA, 19 nt, Artificial Sequence
  Description of Artificial Sequence: Synthetic oligonucleotide
aaacuacaaaccaacaccg

SEQ ID NO: 1507906 - RNA, 19 nt, Artificial Sequence
  Description of Artificial Sequence: Synthetic oligonucleotide
acuaaaacuacaaaccaac

SEQ ID NO: 1507907 - RNA, 19 nt, Artificial Sequence
  Description of Artificial Sequence: Synthetic oligonucleotide
ucaauugccucguugaacc

SEQ ID NO: 1507908 - RNA, 19 nt, Artificial Sequence
  Description of Artificial Sequence: Synthetic oligonucleotide
ucgggaaugguuaauacug

SEQ ID NO: 1507909 - RNA, 19 nt, Artificial Sequence
  Description of Artificial Sequence: Synthetic oligonucleotide
auuacuucaggucauaaau

SEQ ID NO: 1507910 - RNA, 19 nt, Artificial Sequence
  Description of Artificial Sequence: Synthetic oligonucleotide
aagcaugauaggcacugcc

SEQ ID NO: 1507911 - RNA, 19 nt, Artificial Sequence
  Description of Artificial Sequence: Synthetic oligonucleotide
uccaguuucacucgguuag

SEQ ID NO: 1507912 - RNA, 19 nt, Artificial Sequence
  Description of Artificial Sequence: Synthetic oligonucleotide
aaacauacaacuguugaca

SEQ ID NO: 1507913 - RNA, 19 nt, Artificial Sequence
  Description of Artificial Sequence: Synthetic oligonucleotide
gaagcuaaaguuaggagag

SEQ ID NO: 1507914 - RNA, 19 nt, Artificial Sequence
  Description of Artificial Sequence: Synthetic oligonucleotide
ucaagcauguccuuccggg

SEQ ID NO: 1507915 - RNA, 19 nt, Artificial Sequence
  Description of Artificial Sequence: Synthetic oligonucleotide
aaaauugagguauuugguu

SEQ ID NO: 1507916 - RNA, 19 nt, Artificial Sequence
  Description of Artificial Sequence: Synthetic oligonucleotide
uugaucaaggcagugaugc

SEQ ID NO: 1507917 - RNA, 19 nt, Artificial Sequence
  Description of Artificial Sequence: Synthetic oligonucleotide
aaguuaggagagaugauac

SEQ ID NO: 1507918 - RNA, 19 nt, Artificial Sequence
  Description of Artificial Sequence: Synthetic oligonucleotide
gagacguugaucaaggcag

SEQ ID NO: 1507919 - RNA, 19 nt, Artificial Sequence
  Description of Artificial Sequence: Synthetic oligonucleotide
ugucagagggacuugaugu

SEQ ID NO: 1507920 - RNA, 19 nt, Artificial Sequence
  Description of Artificial Sequence: Synthetic oligonucleotide
gaaacgucauaauuuauuc

SEQ ID NO: 1507921 - RNA, 19 nt, Artificial Sequence
  Description of Artificial Sequence: Synthetic oligonucleotide
ucuucuaugaguagacacu

SEQ ID NO: 1507922 - RNA, 19 nt, Artificial Sequence
  Description of Artificial Sequence: Synthetic oligonucleotide
gauaguacaguacgcaaac

SEQ ID NO: 1507923 - RNA, 19 nt, Artificial Sequence
  Description of Artificial Sequence: Synthetic oligonucleotide
ucuaugaguagacacugac

SEQ ID NO: 1507924 - RNA, 19 nt, Artificial Sequence
  Description of Artificial Sequence: Synthetic oligonucleotide
acuugauguacccacaaca

SEQ ID NO: 1507925 - RNA, 19 nt, Artificial Sequence
  Description of Artificial Sequence: Synthetic oligonucleotide
uaaggaccagcucaaauga

SEQ ID NO: 1507926 - RNA, 19 nt, Artificial Sequence
  Description of Artificial Sequence: Synthetic oligonucleotide
agguaugucaagcaugaag

SEQ ID NO: 1507927 - RNA, 19 nt, Artificial Sequence
  Description of Artificial Sequence: Synthetic oligonucleotide
aauucucauacguguaugu

SEQ ID NO: 1507928 - RNA, 19 nt, Artificial Sequence
  Description of Artificial Sequence: Synthetic oligonucleotide
uuggccgagacguugauca

SEQ ID NO: 1507929 - RNA, 19 nt, Artificial Sequence
  Description of Artificial Sequence: Synthetic oligonucleotide
uaguacaguacgcaaacac

SEQ ID NO: 1507930 - RNA, 19 nt, Artificial Sequence
  Description of Artificial Sequence: Synthetic oligonucleotide
ucgguuaguccucaugagg

SEQ ID NO: 1507931 - RNA, 19 nt, Artificial Sequence
  Description of Artificial Sequence: Synthetic oligonucleotide
uuauuaugacugcuuagga

SEQ ID NO: 1507932 - RNA, 19 nt, Artificial Sequence
  Description of Artificial Sequence: Synthetic oligonucleotide
aaaacgcuucauauccucc

SEQ ID NO: 1507933 - RNA, 19 nt, Artificial Sequence
  Description of Artificial Sequence: Synthetic oligonucleotide
guugaaaccaaaccugccc

SEQ ID NO: 1507934 - RNA, 19 nt, Artificial Sequence
  Description of Artificial Sequence: Synthetic oligonucleotide
uccucaugagguaagcaag

SEQ ID NO: 1507935 - RNA, 19 nt, Artificial Sequence
  Description of Artificial Sequence: Synthetic oligonucleotide
aauaaggaccagcucaaau

SEQ ID NO: 1507936 - RNA, 19 nt, Artificial Sequence
  Description of Artificial Sequence: Synthetic oligonucleotide
agggacuugauguacccac

SEQ ID NO: 1507937 - RNA, 19 nt, Artificial Sequence
  Description of Artificial Sequence: Synthetic oligonucleotide
ucuuagaagaagaaauaua

SEQ ID NO: 1507938 - RNA, 19 nt, Artificial Sequence
  Description of Artificial Sequence: Synthetic oligonucleotide
cuucauauccuccuuggag

SEQ ID NO: 1507939 - RNA, 19 nt, Artificial Sequence
  Description of Artificial Sequence: Synthetic oligonucleotide
ucugaagauaguucagggc

SEQ ID NO: 1507940 - RNA, 19 nt, Artificial Sequence
  Description of Artificial Sequence: Synthetic oligonucleotide
aauauccacaccuccccug

SEQ ID NO: 1507941 - RNA, 19 nt, Artificial Sequence
  Description of Artificial Sequence: Synthetic oligonucleotide
uuaugacugcuuaggaacc

SEQ ID NO: 1507942 - RNA, 19 nt, Artificial Sequence
  Description of Artificial Sequence: Synthetic oligonucleotide
uauuggacccgaaugcuga

SEQ ID NO: 1507943 - RNA, 19 nt, Artificial Sequence
  Description of Artificial Sequence: Synthetic oligonucleotide
uaggagagaugauacuccg

SEQ ID NO: 1507944 - RNA, 19 nt, Artificial Sequence
  Description of Artificial Sequence: Synthetic oligonucleotide
uggcaauggacaaauacuc

SEQ ID NO: 1507945 - RNA, 19 nt, Artificial Sequence
  Description of Artificial Sequence: Synthetic oligonucleotide
ucauacguguaugucgucg

SEQ ID NO: 1507946 - RNA, 19 nt, Artificial Sequence
  Description of Artificial Sequence: Synthetic oligonucleotide
uauuaugacugcuuaggaa

SEQ ID NO: 1507947 - RNA, 19 nt, Artificial Sequence
  Description of Artificial Sequence: Synthetic oligonucleotide
aaaguuaggagagaugaua

SEQ ID NO: 1507948 - RNA, 19 nt, Artificial Sequence
  Description of Artificial Sequence: Synthetic oligonucleotide
cugaagauaguucagggca

SEQ ID NO: 1507949 - RNA, 19 nt, Artificial Sequence
  Description of Artificial Sequence: Synthetic oligonucleotide
ugaguagacacugacauuu

SEQ ID NO: 1507950 - RNA, 19 nt, Artificial Sequence
  Description of Artificial Sequence: Synthetic oligonucleotide
ucauuauuaugacugcuua

SEQ ID NO: 1507951 - RNA, 19 nt, Artificial Sequence
  Description of Artificial Sequence: Synthetic oligonucleotide
caagugaagaaacuggcuc

SEQ ID NO: 1507952 - RNA, 19 nt, Artificial Sequence
  Description of Artificial Sequence: Synthetic oligonucleotide
aagauaguacaguacgcaa

SEQ ID NO: 1507953 - RNA, 19 nt, Artificial Sequence
  Description of Artificial Sequence: Synthetic oligonucleotide
caaacauacaacuguugac

SEQ ID NO: 1507954 - RNA, 19 nt, Artificial Sequence
  Description of Artificial Sequence: Synthetic oligonucleotide
cucugaagauaguucaggg

SEQ ID NO: 1507955 - RNA, 19 nt, Artificial Sequence
  Description of Artificial Sequence: Synthetic oligonucleotide
uuacaagauaguacaguac

SEQ ID NO: 1507956 - RNA, 19 nt, Artificial Sequence
  Description of Artificial Sequence: Synthetic oligonucleotide
cuuagaagaagaaauauau

SEQ ID NO: 1507957 - RNA, 19 nt, Artificial Sequence
  Description of Artificial Sequence: Synthetic oligonucleotide
aaacgcuucauauccuccu

SEQ ID NO: 1507958 - RNA, 19 nt, Artificial Sequence
  Description of Artificial Sequence: Synthetic oligonucleotide
aacauacaacuguugacaa

SEQ ID NO: 1507959 - RNA, 19 nt, Artificial Sequence
  Description of Artificial Sequence: Synthetic oligonucleotide
guagugacccucaaagugg

SEQ ID NO: 1507960 - RNA, 19 nt, Artificial Sequence
  Description of Artificial Sequence: Synthetic oligonucleotide
gggucuauuuacaagauag

SEQ ID NO: 1507961 - RNA, 19 nt, Artificial Sequence
  Description of Artificial Sequence: Synthetic oligonucleotide
cauuauuaugacugcuuag

SEQ ID NO: 1507962 - RNA, 19 nt, Artificial Sequence
  Description of Artificial Sequence: Synthetic oligonucleotide
acaagauaguacaguacgc

SEQ ID NO: 1507963 - RNA, 19 nt, Artificial Sequence
  Description of Artificial Sequence: Synthetic oligonucleotide
aguguugaaaccaaaccug

SEQ ID NO: 1507964 - RNA, 19 nt, Artificial Sequence
  Description of Artificial Sequence: Synthetic oligonucleotide
uccuaguaacaaaaugucu

SEQ ID NO: 1507965 - RNA, 19 nt, Artificial Sequence
  Description of Artificial Sequence: Synthetic oligonucleotide
acugcuuaggaacccagug

SEQ ID NO: 1507966 - RNA, 19 nt, Artificial Sequence
  Description of Artificial Sequence: Synthetic oligonucleotide
aaaccaaaccugcccuggg

SEQ ID NO: 1507967 - RNA, 19 nt, Artificial Sequence
  Description of Artificial Sequence: Synthetic oligonucleotide
cuuguacugguagugaccc

SEQ ID NO: 1507968 - RNA, 19 nt, Artificial Sequence
  Description of Artificial Sequence: Synthetic oligonucleotide
uaaaauucucauacgugua

SEQ ID NO: 1507969 - RNA, 19 nt, Artificial Sequence
  Description of Artificial Sequence: Synthetic oligonucleotide
uuaauagaaacgucauaau

SEQ ID NO: 1507970 - RNA, 19 nt, Artificial Sequence
  Description of Artificial Sequence: Synthetic oligonucleotide
aggacaauuggccgagacg

SEQ ID NO: 1507971 - RNA, 19 nt, Artificial Sequence
  Description of Artificial Sequence: Synthetic oligonucleotide
auccuaguaacaaaauguc

SEQ ID NO: 1507972 - RNA, 19 nt, Artificial Sequence
  Description of Artificial Sequence: Synthetic oligonucleotide
cauacguguaugucgucgg

SEQ ID NO: 1507973 - RNA, 19 nt, Artificial Sequence
  Description of Artificial Sequence: Synthetic oligonucleotide
ugaagauaguucagggcac

SEQ ID NO: 1507974 - RNA, 19 nt, Artificial Sequence
  Description of Artificial Sequence: Synthetic oligonucleotide
uauuacuucaggucauaaa

SEQ ID NO: 1507975 - RNA, 19 nt, Artificial Sequence
  Description of Artificial Sequence: Synthetic oligonucleotide
guuaauacugguagguaug

SEQ ID NO: 1507976 - RNA, 19 nt, Artificial Sequence
  Description of Artificial Sequence: Synthetic oligonucleotide
cauuugugaaggcagacca

SEQ ID NO: 1507977 - RNA, 19 nt, Artificial Sequence
  Description of Artificial Sequence: Synthetic oligonucleotide
agcaugauaggcacugccc

SEQ ID NO: 1507978 - RNA, 19 nt, Artificial Sequence
  Description of Artificial Sequence: Synthetic oligonucleotide
aggucauaaauaaucagca

SEQ ID NO: 1507979 - RNA, 19 nt, Artificial Sequence
  Description of Artificial Sequence: Synthetic oligonucleotide
guacccacaacauauugga

SEQ ID NO: 1507980 - RNA, 19 nt, Artificial Sequence
  Description of Artificial Sequence: Synthetic oligonucleotide
gaaaccaaaccugcccugg

SEQ ID NO: 1507981 - RNA, 19 nt, Artificial Sequence
  Description of Artificial Sequence: Synthetic oligonucleotide
aacuaaaacuacaaaccaa

SEQ ID NO: 1507982 - RNA, 19 nt, Artificial Sequence
  Description of Artificial Sequence: Synthetic oligonucleotide
gagaauauccacaccuccc

SEQ ID NO: 1507983 - RNA, 19 nt, Artificial Sequence
  Description of Artificial Sequence: Synthetic oligonucleotide
uugucagagggacuugaug

SEQ ID NO: 1507984 - RNA, 19 nt, Artificial Sequence
  Description of Artificial Sequence: Synthetic oligonucleotide
aauugccucguugaaccag

SEQ ID NO: 1507985 - RNA, 19 nt, Artificial Sequence
  Description of Artificial Sequence: Synthetic oligonucleotide
aacccaguggaacucggga

SEQ ID NO: 1507986 - RNA, 19 nt, Artificial Sequence
  Description of Artificial Sequence: Synthetic oligonucleotide
aaaugucuugcaguaguca

SEQ ID NO: 1507987 - RNA, 19 nt, Artificial Sequence
  Description of Artificial Sequence: Synthetic oligonucleotide
ugcugaguucagcaaaugu

SEQ ID NO: 1507988 - RNA, 19 nt, Artificial Sequence
  Description of Artificial Sequence: Synthetic oligonucleotide
aguuauugcauugcuccuc

SEQ ID NO: 1507989 - RNA, 19 nt, Artificial Sequence
  Description of Artificial Sequence: Synthetic oligonucleotide
uguaugucgucgggaaugg

SEQ ID NO: 1507990 - RNA, 19 nt, Artificial Sequence
  Description of Artificial Sequence: Synthetic oligonucleotide
ccgaaaacgcuucauaucc

SEQ ID NO: 1507991 - RNA, 19 nt, Artificial Sequence
  Description of Artificial Sequence: Synthetic oligonucleotide
acaguacgcaaacacaaaa

SEQ ID NO: 1507992 - RNA, 19 nt, Artificial Sequence
  Description of Artificial Sequence: Synthetic oligonucleotide
aagucauccuaguaacaaa

SEQ ID NO: 1507993 - RNA, 19 nt, Artificial Sequence
  Description of Artificial Sequence: Synthetic oligonucleotide
gaugauacuccgccucugc

SEQ ID NO: 1507994 - RNA, 19 nt, Artificial Sequence
  Description of Artificial Sequence: Synthetic oligonucleotide
gcucaaaugagucucuccc

SEQ ID NO: 1507995 - RNA, 19 nt, Artificial Sequence
  Description of Artificial Sequence: Synthetic oligonucleotide
guagggcuuaaauaaauaa

SEQ ID NO: 1507996 - RNA, 19 nt, Artificial Sequence
  Description of Artificial Sequence: Synthetic oligonucleotide
gauacuccgccucugcuuc

SEQ ID NO: 1507997 - RNA, 19 nt, Artificial Sequence
  Description of Artificial Sequence: Synthetic oligonucleotide
uguccaccaguguugaaac

SEQ ID NO: 1507998 - RNA, 19 nt, Artificial Sequence
  Description of Artificial Sequence: Synthetic oligonucleotide
ugggcaagugaagaaacug

SEQ ID NO: 1507999 - RNA, 19 nt, Artificial Sequence
  Description of Artificial Sequence: Synthetic oligonucleotide
aaggcgucaagcauguccu

SEQ ID NO: 1508000 - RNA, 19 nt, Artificial Sequence
  Description of Artificial Sequence: Synthetic oligonucleotide
auucucauacguguauguc

SEQ ID NO: 1508001 - RNA, 19 nt, Artificial Sequence
  Description of Artificial Sequence: Synthetic oligonucleotide
uaugucgucgggaaugguu

SEQ ID NO: 1508002 - RNA, 19 nt, Artificial Sequence
  Description of Artificial Sequence: Synthetic oligonucleotide
auguacccacaacauauug

SEQ ID NO: 1508003 - RNA, 19 nt, Artificial Sequence
  Description of Artificial Sequence: Synthetic oligonucleotide
ugaaaccaaaccugcccug

SEQ ID NO: 1508004 - RNA, 19 nt, Artificial Sequence
  Description of Artificial Sequence: Synthetic oligonucleotide
uggcacgagaauauccaca

SEQ ID NO: 1508005 - RNA, 19 nt, Artificial Sequence
  Description of Artificial Sequence: Synthetic oligonucleotide
uacaaaccaacaccgguuu

SEQ ID NO: 1508006 - RNA, 19 nt, Artificial Sequence
  Description of Artificial Sequence: Synthetic oligonucleotide
ugaucguagagaggggugc

SEQ ID NO: 1508007 - RNA, 19 nt, Artificial Sequence
  Description of Artificial Sequence: Synthetic oligonucleotide
aguuaggagagaugauacu

SEQ ID NO: 1508008 - RNA, 19 nt, Artificial Sequence
  Description of Artificial Sequence: Synthetic oligonucleotide
uguacugguagugacccuc

SEQ ID NO: 1508009 - RNA, 19 nt, Artificial Sequence
  Description of Artificial Sequence: Synthetic oligonucleotide
ugguucuucuaugaguaga

SEQ ID NO: 1508010 - RNA, 19 nt, Artificial Sequence
  Description of Artificial Sequence: Synthetic oligonucleotide
uaugucaagcaugaaguuu

SEQ ID NO: 1508011 - RNA, 19 nt, Artificial Sequence
  Description of Artificial Sequence: Synthetic oligonucleotide
uacaacuguugacaacuaa

SEQ ID NO: 1508012 - RNA, 19 nt, Artificial Sequence
  Description of Artificial Sequence: Synthetic oligonucleotide
guagacacugacauuugug

SEQ ID NO: 1508013 - RNA, 19 nt, Artificial Sequence
  Description of Artificial Sequence: Synthetic oligonucleotide
cuguucgugggguggacgg

SEQ ID NO: 1508014 - RNA, 19 nt, Artificial Sequence
  Description of Artificial Sequence: Synthetic oligonucleotide
ugcauccggauucugcgcu

SEQ ID NO: 1508015 - RNA, 19 nt, Artificial Sequence
  Description of Artificial Sequence: Synthetic oligonucleotide
guuuuguccaccaguguug

SEQ ID NO: 1508016 - RNA, 19 nt, Artificial Sequence
  Description of Artificial Sequence: Synthetic oligonucleotide
auacguguaugucgucggg

SEQ ID NO: 1508017 - RNA, 19 nt, Artificial Sequence
  Description of Artificial Sequence: Synthetic oligonucleotide
uaggacaauuggccgagac

SEQ ID NO: 1508018 - RNA, 19 nt, Artificial Sequence
  Description of Artificial Sequence: Synthetic oligonucleotide
caugauaggcacugcccag

SEQ ID NO: 1508019 - RNA, 19 nt, Artificial Sequence
  Description of Artificial Sequence: Synthetic oligonucleotide
guugacaacuaaaacuaca

SEQ ID NO: 1508020 - RNA, 19 nt, Artificial Sequence
  Description of Artificial Sequence: Synthetic oligonucleotide
guuaggacaauuggccgag

SEQ ID NO: 1508021 - RNA, 19 nt, Artificial Sequence
  Description of Artificial Sequence: Synthetic oligonucleotide
guagguaugucaagcauga

SEQ ID NO: 1508022 - RNA, 19 nt, Artificial Sequence
  Description of Artificial Sequence: Synthetic oligonucleotide
agccgaaaacgcuucauau

SEQ ID NO: 1508023 - RNA, 19 nt, Artificial Sequence
  Description of Artificial Sequence: Synthetic oligonucleotide
aaccaacaccgguuuuguc

SEQ ID NO: 1508024 - RNA, 19 nt, Artificial Sequence
  Description of Artificial Sequence: Synthetic oligonucleotide
gaaggcagaccaccuacac

SEQ ID NO: 1508025 - RNA, 19 nt, Artificial Sequence
  Description of Artificial Sequence: Synthetic oligonucleotide
uacaguacgcaaacacaaa

SEQ ID NO: 1508026 - RNA, 19 nt, Artificial Sequence
  Description of Artificial Sequence: Synthetic oligonucleotide
agaaacgucauaauuuauu

SEQ ID NO: 1508027 - RNA, 19 nt, Artificial Sequence
  Description of Artificial Sequence: Synthetic oligonucleotide
aagccgaaaacgcuucaua

SEQ ID NO: 1508028 - RNA, 19 nt, Artificial Sequence
  Description of Artificial Sequence: Synthetic oligonucleotide
uaugacugcuuaggaaccc

SEQ ID NO: 1508029 - RNA, 19 nt, Artificial Sequence
  Description of Artificial Sequence: Synthetic oligonucleotide
acaacuguugacaacuaaa

SEQ ID NO: 1508030 - RNA, 19 nt, Artificial Sequence
  Description of Artificial Sequence: Synthetic oligonucleotide
guguaugucgucgggaaug

SEQ ID NO: 1508031 - RNA, 19 nt, Artificial Sequence
  Description of Artificial Sequence: Synthetic oligonucleotide
ugaucaaggcagugaugcc

SEQ ID NO: 1508032 - RNA, 19 nt, Artificial Sequence
  Description of Artificial Sequence: Synthetic oligonucleotide
cccacaacauauuggaccc

SEQ ID NO: 1508033 - RNA, 19 nt, Artificial Sequence
  Description of Artificial Sequence: Synthetic oligonucleotide
caaaugucuugcaguaguc

SEQ ID NO: 1508034 - RNA, 19 nt, Artificial Sequence
  Description of Artificial Sequence: Synthetic oligonucleotide
auuugugaaggcagaccac

SEQ ID NO: 1508035 - RNA, 19 nt, Artificial Sequence
  Description of Artificial Sequence: Synthetic oligonucleotide
ucccaugggaggaguggcg

SEQ ID NO: 1508036 - RNA, 19 nt, Artificial Sequence
  Description of Artificial Sequence: Synthetic oligonucleotide
ggacaaauacucucccucc

SEQ ID NO: 1508037 - RNA, 19 nt, Artificial Sequence
  Description of Artificial Sequence: Synthetic oligonucleotide
auugccucguugaaccagg

SEQ ID NO: 1508038 - RNA, 19 nt, Artificial Sequence
  Description of Artificial Sequence: Synthetic oligonucleotide
caagauaguacaguacgca

SEQ ID NO: 1508039 - RNA, 19 nt, Artificial Sequence
  Description of Artificial Sequence: Synthetic oligonucleotide
ucccagaguuauugcauug

SEQ ID NO: 1508040 - RNA, 19 nt, Artificial Sequence
  Description of Artificial Sequence: Synthetic oligonucleotide
acggggaaguugaagacag

SEQ ID NO: 1508041 - RNA, 19 nt, Artificial Sequence
  Description of Artificial Sequence: Synthetic oligonucleotide
gcaauggacaaauacucuc

SEQ ID NO: 1508042 - RNA, 19 nt, Artificial Sequence
  Description of Artificial Sequence: Synthetic oligonucleotide
cagagggacuugauguacc

SEQ ID NO: 1508043 - RNA, 19 nt, Artificial Sequence
  Description of Artificial Sequence: Synthetic oligonucleotide
ggcacgagaauauccacac

SEQ ID NO: 1508044 - RNA, 19 nt, Artificial Sequence
  Description of Artificial Sequence: Synthetic oligonucleotide
ugcgcugucagggacacua

SEQ ID NO: 1508045 - RNA, 19 nt, Artificial Sequence
  Description of Artificial Sequence: Synthetic oligonucleotide
agucauccuaguaacaaaa

SEQ ID NO: 1508046 - RNA, 19 nt, Artificial Sequence
  Description of Artificial Sequence: Synthetic oligonucleotide
ucagagggacuugauguac

SEQ ID NO: 1508047 - RNA, 19 nt, Artificial Sequence
  Description of Artificial Sequence: Synthetic oligonucleotide
ucgugauggggcucugaag

SEQ ID NO: 1508048 - RNA, 19 nt, Artificial Sequence
  Description of Artificial Sequence: Synthetic oligonucleotide
gguaugucaagcaugaagu

SEQ ID NO: 1508049 - RNA, 19 nt, Artificial Sequence
  Description of Artificial Sequence: Synthetic oligonucleotide
ugaguucagcaaaugucuu

SEQ ID NO: 1508050 - RNA, 19 nt, Artificial Sequence
  Description of Artificial Sequence: Synthetic oligonucleotide
ugauaggcacugcccaggu

SEQ ID NO: 1508051 - RNA, 19 nt, Artificial Sequence
  Description of Artificial Sequence: Synthetic oligonucleotide
cugaucguagagaggggug

SEQ ID NO: 1508052 - RNA, 19 nt, Artificial Sequence
  Description of Artificial Sequence: Synthetic oligonucleotide
uuugucagagggacuugau

SEQ ID NO: 1508053 - RNA, 19 nt, Artificial Sequence
  Description of Artificial Sequence: Synthetic oligonucleotide
uuucacucgguuaguccuc

SEQ ID NO: 1508054 - RNA, 19 nt, Artificial Sequence
  Description of Artificial Sequence: Synthetic oligonucleotide
ucucucccagaguuauugc

SEQ ID NO: 1508055 - RNA, 19 nt, Artificial Sequence
  Description of Artificial Sequence: Synthetic oligonucleotide
auuggacccgaaugcugag

SEQ ID NO: 1508056 - RNA, 19 nt, Artificial Sequence
  Description of Artificial Sequence: Synthetic oligonucleotide
ugcccugggucuauuuaca

SEQ ID NO: 1508057 - RNA, 19 nt, Artificial Sequence
  Description of Artificial Sequence: Synthetic oligonucleotide
agggacacuaguacucagg

SEQ ID NO: 1508058 - RNA, 19 nt, Artificial Sequence
  Description of Artificial Sequence: Synthetic oligonucleotide
uggacccgaaugcugaguu

SEQ ID NO: 1508059 - RNA, 19 nt, Artificial Sequence
  Description of Artificial Sequence: Synthetic oligonucleotide
ucguugaaccaggagcuga

SEQ ID NO: 1508060 - RNA, 19 nt, Artificial Sequence
  Description of Artificial Sequence: Synthetic oligonucleotide
gacccgaaugcugaguuca

SEQ ID NO: 1508061 - RNA, 19 nt, Artificial Sequence
  Description of Artificial Sequence: Synthetic oligonucleotide
agauaguacaguacgcaaa

SEQ ID NO: 1508062 - RNA, 19 nt, Artificial Sequence
  Description of Artificial Sequence: Synthetic oligonucleotide
aguggcgucccgguggcac

SEQ ID NO: 1508063 - RNA, 19 nt, Artificial Sequence
  Description of Artificial Sequence: Synthetic oligonucleotide
ugggucuauuuacaagaua

SEQ ID NO: 1508064 - RNA, 19 nt, Artificial Sequence
  Description of Artificial Sequence: Synthetic oligonucleotide
uucugcgcugucagggaca

SEQ ID NO: 1508065 - RNA, 19 nt, Artificial Sequence
  Description of Artificial Sequence: Synthetic oligonucleotide
acguguaugucgucgggaa

SEQ ID NO: 1508066 - RNA, 19 nt, Artificial Sequence
  Description of Artificial Sequence: Synthetic oligonucleotide
uacccacaacauauuggac

SEQ ID NO: 1508067 - RNA, 19 nt, Artificial Sequence
  Description of Artificial Sequence: Synthetic oligonucleotide
auauuggacccgaaugcug

SEQ ID NO: 1508068 - RNA, 19 nt, Artificial Sequence
  Description of Artificial Sequence: Synthetic oligonucleotide
ugccucguugaaccaggag

SEQ ID NO: 1508069 - RNA, 19 nt, Artificial Sequence
  Description of Artificial Sequence: Synthetic oligonucleotide
auauauuacuucaggucau

SEQ ID NO: 1508070 - RNA, 19 nt, Artificial Sequence
  Description of Artificial Sequence: Synthetic oligonucleotide
caugggaggaguggcgucc

SEQ ID NO: 1508071 - RNA, 19 nt, Artificial Sequence
  Description of Artificial Sequence: Synthetic oligonucleotide
uacguguaugucgucggga

SEQ ID NO: 1508072 - RNA, 19 nt, Artificial Sequence
  Description of Artificial Sequence: Synthetic oligonucleotide
gaaacuggcucagaguccu

SEQ ID NO: 1508073 - RNA, 19 nt, Artificial Sequence
  Description of Artificial Sequence: Synthetic oligonucleotide
agauaguucagggcacugu

SEQ ID NO: 1508074 - RNA, 19 nt, Artificial Sequence
  Description of Artificial Sequence: Synthetic oligonucleotide
ggacacuaguacucagggg

SEQ ID NO: 1508075 - RNA, 19 nt, Artificial Sequence
  Description of Artificial Sequence: Synthetic oligonucleotide
uuauugcauugcuccuccc

SEQ ID NO: 1508076 - RNA, 19 nt, Artificial Sequence
  Description of Artificial Sequence: Synthetic oligonucleotide
gguuaggacaauuggccga

SEQ ID NO: 1508077 - RNA, 19 nt, Artificial Sequence
  Description of Artificial Sequence: Synthetic oligonucleotide
gaacccaguggaacucggg

SEQ ID NO: 1508078 - RNA, 19 nt, Artificial Sequence
  Description of Artificial Sequence: Synthetic oligonucleotide
aguggaacucgggagggga

SEQ ID NO: 1508079 - RNA, 19 nt, Artificial Sequence
  Description of Artificial Sequence: Synthetic oligonucleotide
acgucauaauuuauucugu

SEQ ID NO: 1508080 - RNA, 19 nt, Artificial Sequence
  Description of Artificial Sequence: Synthetic oligonucleotide
aggaacccaguggaacucg

SEQ ID NO: 1508081 - RNA, 19 nt, Artificial Sequence
  Description of Artificial Sequence: Synthetic oligonucleotide
uguucgugggguggacggg

SEQ ID NO: 1508082 - RNA, 19 nt, Artificial Sequence
  Description of Artificial Sequence: Synthetic oligonucleotide
ucguagagaggggugcuac

SEQ ID NO: 1508083 - RNA, 19 nt, Artificial Sequence
  Description of Artificial Sequence: Synthetic oligonucleotide
ugguuaauacugguaggua

SEQ ID NO: 1508084 - RNA, 19 nt, Artificial Sequence
  Description of Artificial Sequence: Synthetic oligonucleotide
auauuacuucaggucauaa

SEQ ID NO: 1508085 - RNA, 19 nt, Artificial Sequence
  Description of Artificial Sequence: Synthetic oligonucleotide
acguugaucaaggcaguga

SEQ ID NO: 1508086 - RNA, 19 nt, Artificial Sequence
  Description of Artificial Sequence: Synthetic oligonucleotide
uauccacaccuccccuggc

SEQ ID NO: 1508087 - RNA, 19 nt, Artificial Sequence
  Description of Artificial Sequence: Synthetic oligonucleotide
gagguauuugguucuucua

SEQ ID NO: 1508088 - RNA, 19 nt, Artificial Sequence
  Description of Artificial Sequence: Synthetic oligonucleotide
gguuaauacugguagguau

SEQ ID NO: 1508089 - RNA, 19 nt, Artificial Sequence
  Description of Artificial Sequence: Synthetic oligonucleotide
auuggccgagacguugauc

SEQ ID NO: 1508090 - RNA, 19 nt, Artificial Sequence
  Description of Artificial Sequence: Synthetic oligonucleotide
auaguacaguacgcaaaca

SEQ ID NO: 1508091 - RNA, 19 nt, Artificial Sequence
  Description of Artificial Sequence: Synthetic oligonucleotide
guuaguccucaugagguaa

SEQ ID NO: 1508092 - RNA, 19 nt, Artificial Sequence
  Description of Artificial Sequence: Synthetic oligonucleotide
uucacucgguuaguccuca

SEQ ID NO: 1508093 - RNA, 19 nt, Artificial Sequence
  Description of Artificial Sequence: Synthetic oligonucleotide
aguucagggcacuguucgu

SEQ ID NO: 1508094 - RNA, 19 nt, Artificial Sequence
  Description of Artificial Sequence: Synthetic oligonucleotide
ggacaauuggccgagacgu

SEQ ID NO: 1508095 - RNA, 19 nt, Artificial Sequence
  Description of Artificial Sequence: Synthetic oligonucleotide
cacucgguuaguccucaug

SEQ ID NO: 1508096 - RNA, 19 nt, Artificial Sequence
  Description of Artificial Sequence: Synthetic oligonucleotide
guggcacgagaauauccac

SEQ ID NO: 1508097 - RNA, 19 nt, Artificial Sequence
  Description of Artificial Sequence: Synthetic oligonucleotide
acaccgguuuuguccacca

SEQ ID NO: 1508098 - RNA, 19 nt, Artificial Sequence
  Description of Artificial Sequence: Synthetic oligonucleotide
uccggauucugcgcuguca

SEQ ID NO: 1508099 - RNA, 19 nt, Artificial Sequence
  Description of Artificial Sequence: Synthetic oligonucleotide
caauuggccgagacguuga

SEQ ID NO: 1508100 - RNA, 19 nt, Artificial Sequence
  Description of Artificial Sequence: Synthetic oligonucleotide
gucgggaaugguuaauacu

SEQ ID NO: 1508101 - RNA, 19 nt, Artificial Sequence
  Description of Artificial Sequence: Synthetic oligonucleotide
ggagaugccggccuggcaa

SEQ ID NO: 1508102 - RNA, 19 nt, Artificial Sequence
  Description of Artificial Sequence: Synthetic oligonucleotide
gaauauccacaccuccccu

SEQ ID NO: 1508103 - RNA, 19 nt, Artificial Sequence
  Description of Artificial Sequence: Synthetic oligonucleotide
cgagaauauccacaccucc

SEQ ID NO: 1508104 - RNA, 19 nt, Artificial Sequence
  Description of Artificial Sequence: Synthetic oligonucleotide
gaguuauugcauugcuccu

SEQ ID NO: 1508105 - RNA, 19 nt, Artificial Sequence
  Description of Artificial Sequence: Synthetic oligonucleotide
gcgucaagcauguccuucc

SEQ ID NO: 1508106 - RNA, 19 nt, Artificial Sequence
  Description of Artificial Sequence: Synthetic oligonucleotide
ucugcgcugucagggacac

SEQ ID NO: 1508107 - RNA, 19 nt, Artificial Sequence
  Description of Artificial Sequence: Synthetic oligonucleotide
cacaacauauuggacccga

SEQ ID NO: 1508108 - RNA, 19 nt, Artificial Sequence
  Description of Artificial Sequence: Synthetic oligonucleotide
ugucgucgggaaugguuaa

SEQ ID NO: 1508109 - RNA, 19 nt, Artificial Sequence
  Description of Artificial Sequence: Synthetic oligonucleotide
gguggcacgagaauaucca

SEQ ID NO: 1508110 - RNA, 19 nt, Artificial Sequence
  Description of Artificial Sequence: Synthetic oligonucleotide
ucgucgggaaugguuaaua

SEQ ID NO: 1508111 - RNA, 19 nt, Artificial Sequence
  Description of Artificial Sequence: Synthetic oligonucleotide
augagguaagcaaggcaga

SEQ ID NO: 1508112 - RNA, 19 nt, Artificial Sequence
  Description of Artificial Sequence: Synthetic oligonucleotide
ccgguuuuguccaccagug

SEQ ID NO: 1508113 - RNA, 19 nt, Artificial Sequence
  Description of Artificial Sequence: Synthetic oligonucleotide
ugauggggcucugaagaua

SEQ ID NO: 1508114 - RNA, 19 nt, Artificial Sequence
  Description of Artificial Sequence: Synthetic oligonucleotide
gccgaaaacgcuucauauc

SEQ ID NO: 1508115 - RNA, 19 nt, Artificial Sequence
  Description of Artificial Sequence: Synthetic oligonucleotide
augucgucgggaaugguua

SEQ ID NO: 1508116 - RNA, 19 nt, Artificial Sequence
  Description of Artificial Sequence: Synthetic oligonucleotide
gaacucgggaggggagggg

SEQ ID NO: 1508117 - RNA, 19 nt, Artificial Sequence
  Description of Artificial Sequence: Synthetic oligonucleotide
acaaaccaacaccgguuuu

SEQ ID NO: 1508118 - RNA, 19 nt, Artificial Sequence
  Description of Artificial Sequence: Synthetic oligonucleotide
uugccucguugaaccagga

SEQ ID NO: 1508119 - RNA, 19 nt, Artificial Sequence
  Description of Artificial Sequence: Synthetic oligonucleotide
gaagauaguucagggcacu

SEQ ID NO: 1508120 - RNA, 19 nt, Artificial Sequence
  Description of Artificial Sequence: Synthetic oligonucleotide
ggagacggggaaguugaag

SEQ ID NO: 1508121 - RNA, 19 nt, Artificial Sequence
  Description of Artificial Sequence: Synthetic oligonucleotide
ggaacucgggaggggaggg

SEQ ID NO: 1508122 - RNA, 19 nt, Artificial Sequence
  Description of Artificial Sequence: Synthetic oligonucleotide
uuggacccgaaugcugagu

SEQ ID NO: 1508123 - RNA, 19 nt, Artificial Sequence
  Description of Artificial Sequence: Synthetic oligonucleotide
auccggauucugcgcuguc

SEQ ID NO: 1508124 - RNA, 19 nt, Artificial Sequence
  Description of Artificial Sequence: Synthetic oligonucleotide
ggaccagcucaaaugaguc

SEQ ID NO: 1508125 - RNA, 19 nt, Artificial Sequence
  Description of Artificial Sequence: Synthetic oligonucleotide
cauauuggacccgaaugcu

SEQ ID NO: 1508126 - RNA, 19 nt, Artificial Sequence
  Description of Artificial Sequence: Synthetic oligonucleotide
cgggaaugguuaauacugg

SEQ ID NO: 1508127 - RNA, 19 nt, Artificial Sequence
  Description of Artificial Sequence: Synthetic oligonucleotide
cccucaaagugguuaggac

SEQ ID NO: 1508128 - RNA, 19 nt, Artificial Sequence
  Description of Artificial Sequence: Synthetic oligonucleotide
ucccgguggcacgagaaua

SEQ ID NO: 1508129 - RNA, 19 nt, Artificial Sequence
  Description of Artificial Sequence: Synthetic oligonucleotide
ccaacaccgguuuugucca

SEQ ID NO: 1508130 - RNA, 19 nt, Artificial Sequence
  Description of Artificial Sequence: Synthetic oligonucleotide
ccggauucugcgcugucag

SEQ ID NO: 1508131 - RNA, 19 nt, Artificial Sequence
  Description of Artificial Sequence: Synthetic oligonucleotide
cggucaaggacagccaugg

SEQ ID NO: 1508132 - RNA, 19 nt, Artificial Sequence
  Description of Artificial Sequence: Synthetic oligonucleotide
cccagaguuauugcauugc

SEQ ID NO: 1508133 - RNA, 19 nt, Artificial Sequence
  Description of Artificial Sequence: Synthetic oligonucleotide
agacguugaucaaggcagu

SEQ ID NO: 1508134 - RNA, 19 nt, Artificial Sequence
  Description of Artificial Sequence: Synthetic oligonucleotide
uuaggacaauuggccgaga

SEQ ID NO: 1508135 - RNA, 19 nt, Artificial Sequence
  Description of Artificial Sequence: Synthetic oligonucleotide
ccucguccaguuucacucg

SEQ ID NO: 1508136 - RNA, 19 nt, Artificial Sequence
  Description of Artificial Sequence: Synthetic oligonucleotide
gccccggucaaggacagcc

SEQ ID NO: 1508137 - RNA, 19 nt, Artificial Sequence
  Description of Artificial Sequence: Synthetic oligonucleotide
guaugucaagcaugaaguu

SEQ ID NO: 1508138 - RNA, 19 nt, Artificial Sequence
  Description of Artificial Sequence: Synthetic oligonucleotide
caauugccucguugaacca

SEQ ID NO: 1508139 - RNA, 19 nt, Artificial Sequence
  Description of Artificial Sequence: Synthetic oligonucleotide
caacauauuggacccgaau

SEQ ID NO: 1508140 - RNA, 19 nt, Artificial Sequence
  Description of Artificial Sequence: Synthetic oligonucleotide
augccggccuggcaaugga

SEQ ID NO: 1508141 - RNA, 19 nt, Artificial Sequence
  Description of Artificial Sequence: Synthetic oligonucleotide
caguggaacucgggagggg

SEQ ID NO: 1508142 - RNA, 19 nt, Artificial Sequence
  Description of Artificial Sequence: Synthetic oligonucleotide
ggccgagacguugaucaag

SEQ ID NO: 1508143 - RNA, 19 nt, Artificial Sequence
  Description of Artificial Sequence: Synthetic oligonucleotide
gagucucucccagaguuau

SEQ ID NO: 1508144 - RNA, 19 nt, Artificial Sequence
  Description of Artificial Sequence: Synthetic oligonucleotide
gaaugcucuuguacuggua

SEQ ID NO: 1508145 - RNA, 19 nt, Artificial Sequence
  Description of Artificial Sequence: Synthetic oligonucleotide
caccgguuuuguccaccag

SEQ ID NO: 1508146 - RNA, 19 nt, Artificial Sequence
  Description of Artificial Sequence: Synthetic oligonucleotide
gcacgagaauauccacacc

SEQ ID NO: 1508147 - RNA, 19 nt, Artificial Sequence
  Description of Artificial Sequence: Synthetic oligonucleotide
uagguaugucaagcaugaa

SEQ ID NO: 1508148 - RNA, 19 nt, Artificial Sequence
  Description of Artificial Sequence: Synthetic oligonucleotide
caggaagccgaaaacgcuu

SEQ ID NO: 1508149 - RNA, 19 nt, Artificial Sequence
  Description of Artificial Sequence: Synthetic oligonucleotide
ggcugaccgggagaugccg

SEQ ID NO: 1508150 - RNA, 19 nt, Artificial Sequence
  Description of Artificial Sequence: Synthetic oligonucleotide
ccgggaagcaugauaggca

SEQ ID NO: 1508151 - RNA, 19 nt, Artificial Sequence
  Description of Artificial Sequence: Synthetic oligonucleotide
ggacuguuugcugcacagc

SEQ ID NO: 1508152 - RNA, 19 nt, Artificial Sequence
  Description of Artificial Sequence: Synthetic oligonucleotide
gguuaguccucaugaggua

SEQ ID NO: 1508153 - RNA, 19 nt, Artificial Sequence
  Description of Artificial Sequence: Synthetic oligonucleotide
gaucguagagaggggugcu

SEQ ID NO: 1508154 - RNA, 19 nt, Artificial Sequence
  Description of Artificial Sequence: Synthetic oligonucleotide
gauguacccacaacauauu

SEQ ID NO: 1508155 - RNA, 19 nt, Artificial Sequence
  Description of Artificial Sequence: Synthetic oligonucleotide
uggccgagacguugaucaa

SEQ ID NO: 1508156 - RNA, 19 nt, Artificial Sequence
  Description of Artificial Sequence: Synthetic oligonucleotide
gaagccgaaaacgcuucau

SEQ ID NO: 1508157 - RNA, 19 nt, Artificial Sequence
  Description of Artificial Sequence: Synthetic oligonucleotide
caacaccgguuuuguccac

SEQ ID NO: 1508158 - RNA, 19 nt, Artificial Sequence
  Description of Artificial Sequence: Synthetic oligonucleotide
ccucguugaaccaggagcu

SEQ ID NO: 1508159 - RNA, 19 nt, Artificial Sequence
  Description of Artificial Sequence: Synthetic oligonucleotide
gcugaccgggagaugccgg

SEQ ID NO: 1508160 - RNA, 19 nt, Artificial Sequence
  Description of Artificial Sequence: Synthetic oligonucleotide
ggaaugcucuuguacuggu

SEQ ID NO: 1508161 - RNA, 19 nt, Artificial Sequence
  Description of Artificial Sequence: Synthetic oligonucleotide
ccucccaugggaggagugg

SEQ ID NO: 1508162 - RNA, 19 nt, Artificial Sequence
  Description of Artificial Sequence: Synthetic oligonucleotide
cgucgggaaugguuaauac

SEQ ID NO: 1508163 - RNA, 19 nt, Artificial Sequence
  Description of Artificial Sequence: Synthetic oligonucleotide
gaggucgugauggggcucu

SEQ ID NO: 1508164 - RNA, 19 nt, Artificial Sequence
  Description of Artificial Sequence: Synthetic oligonucleotide
cugggucuauuuacaagau

SEQ ID NO: 1508165 - RNA, 19 nt, Artificial Sequence
  Description of Artificial Sequence: Synthetic oligonucleotide
aggccucguccaguuucac

SEQ ID NO: 1508166 - RNA, 19 nt, Artificial Sequence
  Description of Artificial Sequence: Synthetic oligonucleotide
ggcgucaagcauguccuuc

SEQ ID NO: 1508167 - RNA, 19 nt, Artificial Sequence
  Description of Artificial Sequence: Synthetic oligonucleotide
gucauccuaguaacaaaau

SEQ ID NO: 1508168 - RNA, 19 nt, Artificial Sequence
  Description of Artificial Sequence: Synthetic oligonucleotide
agaugccggccuggcaaug

SEQ ID NO: 1508169 - RNA, 19 nt, Artificial Sequence
  Description of Artificial Sequence: Synthetic oligonucleotide
cccugaucguagagagggg

SEQ ID NO: 1508170 - RNA, 19 nt, Artificial Sequence
  Description of Artificial Sequence: Synthetic oligonucleotide
ggcaauggacaaauacucu

SEQ ID NO: 1508171 - RNA, 19 nt, Artificial Sequence
  Description of Artificial Sequence: Synthetic oligonucleotide
aucguagagaggggugcua

SEQ ID NO: 1508172 - RNA, 19 nt, Artificial Sequence
  Description of Artificial Sequence: Synthetic oligonucleotide
ggguggacuguuugcugca

SEQ ID NO: 1508173 - RNA, 19 nt, Artificial Sequence
  Description of Artificial Sequence: Synthetic oligonucleotide
gcauccggauucugcgcug

SEQ ID NO: 1508174 - RNA, 19 nt, Artificial Sequence
  Description of Artificial Sequence: Synthetic oligonucleotide
ucacucgguuaguccucau

SEQ ID NO: 1508175 - RNA, 19 nt, Artificial Sequence
  Description of Artificial Sequence: Synthetic oligonucleotide
gagaugccggccuggcaau

SEQ ID NO: 1508176 - RNA, 19 nt, Artificial Sequence
  Description of Artificial Sequence: Synthetic oligonucleotide
uggcgucccgguggcacga

SEQ ID NO: 1508177 - RNA, 19 nt, Artificial Sequence
  Description of Artificial Sequence: Synthetic oligonucleotide
cacuguucgugggguggac

SEQ ID NO: 1508178 - RNA, 19 nt, Artificial Sequence
  Description of Artificial Sequence: Synthetic oligonucleotide
ccgagacguugaucaaggc

SEQ ID NO: 1508179 - RNA, 19 nt, Artificial Sequence
  Description of Artificial Sequence: Synthetic oligonucleotide
gcuuugucagagggacuug

SEQ ID NO: 1508180 - RNA, 19 nt, Artificial Sequence
  Description of Artificial Sequence: Synthetic oligonucleotide
ccacaacauauuggacccg

SEQ ID NO: 1508181 - RNA, 19 nt, Artificial Sequence
  Description of Artificial Sequence: Synthetic oligonucleotide
gguggacuguuugcugcac

SEQ ID NO: 1508182 - RNA, 19 nt, Artificial Sequence
  Description of Artificial Sequence: Synthetic oligonucleotide
gggguagggcuuaaauaaa

SEQ ID NO: 1508183 - RNA, 19 nt, Artificial Sequence
  Description of Artificial Sequence: Synthetic oligonucleotide
aggcgucaagcauguccuu

SEQ ID NO: 1508184 - RNA, 19 nt, Artificial Sequence
  Description of Artificial Sequence: Synthetic oligonucleotide
cggauucugcgcugucagg

SEQ ID NO: 1508185 - RNA, 19 nt, Artificial Sequence
  Description of Artificial Sequence: Synthetic oligonucleotide
aaacuggcucagaguccuu

SEQ ID NO: 1508186 - RNA, 19 nt, Artificial Sequence
  Description of Artificial Sequence: Synthetic oligonucleotide
gggcacuguucguggggug

SEQ ID NO: 1508187 - RNA, 19 nt, Artificial Sequence
  Description of Artificial Sequence: Synthetic oligonucleotide
ccaugggaggaguggcguc

SEQ ID NO: 1508188 - RNA, 19 nt, Artificial Sequence
  Description of Artificial Sequence: Synthetic oligonucleotide
gcucggggcaggaagccga

SEQ ID NO: 1508189 - RNA, 19 nt, Artificial Sequence
  Description of Artificial Sequence: Synthetic oligonucleotide
gccggccuggcaauggaca

SEQ ID NO: 1508190 - RNA, 19 nt, Artificial Sequence
  Description of Artificial Sequence: Synthetic oligonucleotide
gacaauuggccgagacguu

SEQ ID NO: 1508191 - RNA, 19 nt, Artificial Sequence
  Description of Artificial Sequence: Synthetic oligonucleotide
gcccugggucuauuuacaa

SEQ ID NO: 1508192 - RNA, 19 nt, Artificial Sequence
  Description of Artificial Sequence: Synthetic oligonucleotide
gggaggucgugauggggcu

SEQ ID NO: 1508193 - RNA, 19 nt, Artificial Sequence
  Description of Artificial Sequence: Synthetic oligonucleotide
ccugaucguagagaggggu

SEQ ID NO: 1508194 - RNA, 19 nt, Artificial Sequence
  Description of Artificial Sequence: Synthetic oligonucleotide
ugccccggucaaggacagc

SEQ ID NO: 1508195 - RNA, 19 nt, Artificial Sequence
  Description of Artificial Sequence: Synthetic oligonucleotide
ggaggucgugauggggcuc

SEQ ID NO: 1508196 - RNA, 19 nt, Artificial Sequence
  Description of Artificial Sequence: Synthetic oligonucleotide
gucccgguggcacgagaau

SEQ ID NO: 1508197 - RNA, 19 nt, Artificial Sequence
  Description of Artificial Sequence: Synthetic oligonucleotide
cccaaggcgucaagcaugu

SEQ ID NO: 1508198 - RNA, 19 nt, Artificial Sequence
  Description of Artificial Sequence: Synthetic oligonucleotide
cauccggauucugcgcugu

SEQ ID NO: 1508199 - RNA, 19 nt, Artificial Sequence
  Description of Artificial Sequence: Synthetic oligonucleotide
guaugucgucgggaauggu

SEQ ID NO: 1508200 - RNA, 19 nt, Artificial Sequence
  Description of Artificial Sequence: Synthetic oligonucleotide
gucgucgggaaugguuaau

SEQ ID NO: 1508201 - RNA, 19 nt, Artificial Sequence
  Description of Artificial Sequence: Synthetic oligonucleotide
ggucgugauggggcucuga

SEQ ID NO: 1508202 - RNA, 19 nt, Artificial Sequence
  Description of Artificial Sequence: Synthetic oligonucleotide
cgaaaacgcuucauauccu

SEQ ID NO: 1508203 - RNA, 19 nt, Artificial Sequence
  Description of Artificial Sequence: Synthetic oligonucleotide
ccggccuggcaauggacaa

SEQ ID NO: 1508204 - RNA, 19 nt, Artificial Sequence
  Description of Artificial Sequence: Synthetic oligonucleotide
ccgguggcacgagaauauc

SEQ ID NO: 1508205 - RNA, 19 nt, Artificial Sequence
  Description of Artificial Sequence: Synthetic oligonucleotide
cccgguggcacgagaauau

SEQ ID NO: 1508206 - RNA, 19 nt, Artificial Sequence
  Description of Artificial Sequence: Synthetic oligonucleotide
caggagcugcauccggauu

SEQ ID NO: 1508207 - RNA, 19 nt, Artificial Sequence
  Description of Artificial Sequence: Synthetic oligonucleotide
ccccggucaaggacagcca

SEQ ID NO: 1508208 - RNA, 19 nt, Artificial Sequence
  Description of Artificial Sequence: Synthetic oligonucleotide
cccggucaaggacagccau

SEQ ID NO: 1508209 - RNA, 19 nt, Artificial Sequence
  Description of Artificial Sequence: Synthetic oligonucleotide
cguguaugucgucgggaau

SEQ ID NO: 1508210 - RNA, 19 nt, Artificial Sequence
  Description of Artificial Sequence: Synthetic oligonucleotide
ccaaggcgucaagcauguc

SEQ ID NO: 1508211 - RNA, 19 nt, Artificial Sequence
  Description of Artificial Sequence: Synthetic oligonucleotide
cgguuuuguccaccagugu

SEQ ID NO: 1508212 - RNA, 19 nt, Artificial Sequence
  Description of Artificial Sequence: Synthetic oligonucleotide
cugcgcugucagggacacu

SEQ ID NO: 1508213 - RNA, 19 nt, Artificial Sequence
  Description of Artificial Sequence: Synthetic oligonucleotide
aaaacuauaucauaaaccc

SEQ ID NO: 1508214 - RNA, 19 nt, Artificial Sequence
  Description of Artificial Sequence: Synthetic oligonucleotide
aaaacuaacacugauuuac

SEQ ID NO: 1508215 - RNA, 19 nt, Artificial Sequence
  Description of Artificial Sequence: Synthetic oligonucleotide
ucuaaauuuaacuuucugg

SEQ ID NO: 1508216 - RNA, 19 nt, Artificial Sequence
  Description of Artificial Sequence: Synthetic oligonucleotide
aaauaguaacaauagaugu

SEQ ID NO: 1508217 - RNA, 19 nt, Artificial Sequence
  Description of Artificial Sequence: Synthetic oligonucleotide
uggcauauagacuauaugg

SEQ ID NO: 1508218 - RNA, 19 nt, Artificial Sequence
  Description of Artificial Sequence: Synthetic oligonucleotide
uuaguuagcauacuuauga

SEQ ID NO: 1508219 - RNA, 19 nt, Artificial Sequence
  Description of Artificial Sequence: Synthetic oligonucleotide
aacuauaucauaaacccac

SEQ ID NO: 1508220 - RNA, 19 nt, Artificial Sequence
  Description of Artificial Sequence: Synthetic oligonucleotide
aaugucgggacucuugacc

SEQ ID NO: 1508221 - RNA, 19 nt, Artificial Sequence
  Description of Artificial Sequence: Synthetic oligonucleotide
gaaacaggauguuauaugg

SEQ ID NO: 1508222 - RNA, 19 nt, Artificial Sequence
  Description of Artificial Sequence: Synthetic oligonucleotide
aauucuuuuagugggaaac

SEQ ID NO: 1508223 - RNA, 19 nt, Artificial Sequence
  Description of Artificial Sequence: Synthetic oligonucleotide
uuagguauuucuauggcag

SEQ ID NO: 1508224 - RNA, 19 nt, Artificial Sequence
  Description of Artificial Sequence: Synthetic oligonucleotide
uauauggcaauccaauuag

SEQ ID NO: 1508225 - RNA, 19 nt, Artificial Sequence
  Description of Artificial Sequence: Synthetic oligonucleotide
uaugauguuauaaucucag

SEQ ID NO: 1508226 - RNA, 19 nt, Artificial Sequence
  Description of Artificial Sequence: Synthetic oligonucleotide
aucuaacuugcuuacaccc

SEQ ID NO: 1508227 - RNA, 19 nt, Artificial Sequence
  Description of Artificial Sequence: Synthetic oligonucleotide
caugauaccaggcacauag

SEQ ID NO: 1508228 - RNA, 19 nt, Artificial Sequence
  Description of Artificial Sequence: Synthetic oligonucleotide
ugaugaaaaguuuugugag

SEQ ID NO: 1508229 - RNA, 19 nt, Artificial Sequence
  Description of Artificial Sequence: Synthetic oligonucleotide
ugucuuuuaauaaauagua

SEQ ID NO: 1508230 - RNA, 19 nt, Artificial Sequence
  Description of Artificial Sequence: Synthetic oligonucleotide
auaucuaacuugcuuacac

SEQ ID NO: 1508231 - RNA, 19 nt, Artificial Sequence
  Description of Artificial Sequence: Synthetic oligonucleotide
aauuuguacugccauguag

SEQ ID NO: 1508232 - RNA, 19 nt, Artificial Sequence
  Description of Artificial Sequence: Synthetic oligonucleotide
auaccaggcacauaggugg

SEQ ID NO: 1508233 - RNA, 19 nt, Artificial Sequence
  Description of Artificial Sequence: Synthetic oligonucleotide
auuuacauaucuuagguau

SEQ ID NO: 1508234 - RNA, 19 nt, Artificial Sequence
  Description of Artificial Sequence: Synthetic oligonucleotide
auauagacuauauggcagc

SEQ ID NO: 1508235 - RNA, 19 nt, Artificial Sequence
  Description of Artificial Sequence: Synthetic oligonucleotide
uguacugccauguagguac

SEQ ID NO: 1508236 - RNA, 19 nt, Artificial Sequence
  Description of Artificial Sequence: Synthetic oligonucleotide
aacagauucaauuggcaug

SEQ ID NO: 1508237 - RNA, 19 nt, Artificial Sequence
  Description of Artificial Sequence: Synthetic oligonucleotide
gaaauguaucuacaguugg

SEQ ID NO: 1508238 - RNA, 19 nt, Artificial Sequence
  Description of Artificial Sequence: Synthetic oligonucleotide
uccuguuccagccagauga

SEQ ID NO: 1508239 - RNA, 19 nt, Artificial Sequence
  Description of Artificial Sequence: Synthetic oligonucleotide
uuaucuaaaguugaaaacu

SEQ ID NO: 1508240 - RNA, 19 nt, Artificial Sequence
  Description of Artificial Sequence: Synthetic oligonucleotide
aagagauaggcacugauau

SEQ ID NO: 1508241 - RNA, 19 nt, Artificial Sequence
  Description of Artificial Sequence: Synthetic oligonucleotide
aauaaauuggaaccuugca

SEQ ID NO: 1508242 - RNA, 19 nt, Artificial Sequence
  Description of Artificial Sequence: Synthetic oligonucleotide
uuaacuuucuggaaaccag

SEQ ID NO: 1508243 - RNA, 19 nt, Artificial Sequence
  Description of Artificial Sequence: Synthetic oligonucleotide
uucugaaucaauaaauuau

SEQ ID NO: 1508244 - RNA, 19 nt, Artificial Sequence
  Description of Artificial Sequence: Synthetic oligonucleotide
cuaaauuuaacuuucugga

SEQ ID NO: 1508245 - RNA, 19 nt, Artificial Sequence
  Description of Artificial Sequence: Synthetic oligonucleotide
cuuguuuaaagagauaggc

SEQ ID NO: 1508246 - RNA, 19 nt, Artificial Sequence
  Description of Artificial Sequence: Synthetic oligonucleotide
aaucugacuguucuucaac

SEQ ID NO: 1508247 - RNA, 19 nt, Artificial Sequence
  Description of Artificial Sequence: Synthetic oligonucleotide
auaggcacugauaugaccc

SEQ ID NO: 1508248 - RNA, 19 nt, Artificial Sequence
  Description of Artificial Sequence: Synthetic oligonucleotide
uuaggcacaauaaauugga

SEQ ID NO: 1508249 - RNA, 19 nt, Artificial Sequence
  Description of Artificial Sequence: Synthetic oligonucleotide
cuauauggcagcaaucagg

SEQ ID NO: 1508250 - RNA, 19 nt, Artificial Sequence
  Description of Artificial Sequence: Synthetic oligonucleotide
uggauagucacuugaaacc

SEQ ID NO: 1508251 - RNA, 19 nt, Artificial Sequence
  Description of Artificial Sequence: Synthetic oligonucleotide
aaaccaauagcauuucuau

SEQ ID NO: 1508252 - RNA, 19 nt, Artificial Sequence
  Description of Artificial Sequence: Synthetic oligonucleotide
gucacuugaaaccagauuc

SEQ ID NO: 1508253 - RNA, 19 nt, Artificial Sequence
  Description of Artificial Sequence: Synthetic oligonucleotide
uggaauauaggcauccucu

SEQ ID NO: 1508254 - RNA, 19 nt, Artificial Sequence
  Description of Artificial Sequence: Synthetic oligonucleotide
ucuuuuagugggaaacagg

SEQ ID NO: 1508255 - RNA, 19 nt, Artificial Sequence
  Description of Artificial Sequence: Synthetic oligonucleotide
ugaaggaaacguucaaagg

SEQ ID NO: 1508256 - RNA, 19 nt, Artificial Sequence
  Description of Artificial Sequence: Synthetic oligonucleotide
aaaguuuugugagaagaag

SEQ ID NO: 1508257 - RNA, 19 nt, Artificial Sequence
  Description of Artificial Sequence: Synthetic oligonucleotide
cauauagacuauauggcag

SEQ ID NO: 1508258 - RNA, 19 nt, Artificial Sequence
  Description of Artificial Sequence: Synthetic oligonucleotide
cuuaggcacaauaaauugg

SEQ ID NO: 1508259 - RNA, 19 nt, Artificial Sequence
  Description of Artificial Sequence: Synthetic oligonucleotide
aguaaauuaucuaaaguug

SEQ ID NO: 1508260 - RNA, 19 nt, Artificial Sequence
  Description of Artificial Sequence: Synthetic oligonucleotide
uguuauauggcaauccaau

SEQ ID NO: 1508261 - RNA, 19 nt, Artificial Sequence
  Description of Artificial Sequence: Synthetic oligonucleotide
aaccuuaucaauguguacu

SEQ ID NO: 1508262 - RNA, 19 nt, Artificial Sequence
  Description of Artificial Sequence: Synthetic oligonucleotide
ucaauuggcaugauaccag

SEQ ID NO: 1508263 - RNA, 19 nt, Artificial Sequence
  Description of Artificial Sequence: Synthetic oligonucleotide
auagggagaauucuuuuag

SEQ ID NO: 1508264 - RNA, 19 nt, Artificial Sequence
  Description of Artificial Sequence: Synthetic oligonucleotide
ucauaucuaaauuuaacuu

SEQ ID NO: 1508265 - RNA, 19 nt, Artificial Sequence
  Description of Artificial Sequence: Synthetic oligonucleotide
uuauauggcaauccaauua

SEQ ID NO: 1508266 - RNA, 19 nt, Artificial Sequence
  Description of Artificial Sequence: Synthetic oligonucleotide
caauaauaagacuuggguc

SEQ ID NO: 1508267 - RNA, 19 nt, Artificial Sequence
  Description of Artificial Sequence: Synthetic oligonucleotide
ucaguuucaacaauucuau

SEQ ID NO: 1508268 - RNA, 19 nt, Artificial Sequence
  Description of Artificial Sequence: Synthetic oligonucleotide
uaccacaauaauaagacuu

SEQ ID NO: 1508269 - RNA, 19 nt, Artificial Sequence
  Description of Artificial Sequence: Synthetic oligonucleotide
ugauguuauaaucucaguu

SEQ ID NO: 1508270 - RNA, 19 nt, Artificial Sequence
  Description of Artificial Sequence: Synthetic oligonucleotide
aucugacuguucuucaacc

SEQ ID NO: 1508271 - RNA, 19 nt, Artificial Sequence
  Description of Artificial Sequence: Synthetic oligonucleotide
cauauaacagcauauagua

SEQ ID NO: 1508272 - RNA, 19 nt, Artificial Sequence
  Description of Artificial Sequence: Synthetic oligonucleotide
agaauaucuaacuugcuua

SEQ ID NO: 1508273 - RNA, 19 nt, Artificial Sequence
  Description of Artificial Sequence: Synthetic oligonucleotide
cuuaugauguuauaaucuc

SEQ ID NO: 1508274 - RNA, 19 nt, Artificial Sequence
  Description of Artificial Sequence: Synthetic oligonucleotide
aauguaucuacaguuggca

SEQ ID NO: 1508275 - RNA, 19 nt, Artificial Sequence
  Description of Artificial Sequence: Synthetic oligonucleotide
aauaacuucaggacuauau

SEQ ID NO: 1508276 - RNA, 19 nt, Artificial Sequence
  Description of Artificial Sequence: Synthetic oligonucleotide
uaaaucaaguuaauagaaa

SEQ ID NO: 1508277 - RNA, 19 nt, Artificial Sequence
  Description of Artificial Sequence: Synthetic oligonucleotide
ugugagaagaagucuccgg

SEQ ID NO: 1508278 - RNA, 19 nt, Artificial Sequence
  Description of Artificial Sequence: Synthetic oligonucleotide
ucuacaguuggcaacugac

SEQ ID NO: 1508279 - RNA, 19 nt, Artificial Sequence
  Description of Artificial Sequence: Synthetic oligonucleotide
auaacuucaggacuauaug

SEQ ID NO: 1508280 - RNA, 19 nt, Artificial Sequence
  Description of Artificial Sequence: Synthetic oligonucleotide
ucggauuucgcaaccaggc

SEQ ID NO: 1508281 - RNA, 19 nt, Artificial Sequence
  Description of Artificial Sequence: Synthetic oligonucleotide
ugaaaccagauucuggcac

SEQ ID NO: 1508282 - RNA, 19 nt, Artificial Sequence
  Description of Artificial Sequence: Synthetic oligonucleotide
auacuuaugaaggaaacgu

SEQ ID NO: 1508283 - RNA, 19 nt, Artificial Sequence
  Description of Artificial Sequence: Synthetic oligonucleotide
ucuaaaguugaaaacuaua

SEQ ID NO: 1508284 - RNA, 19 nt, Artificial Sequence
  Description of Artificial Sequence: Synthetic oligonucleotide
cagacguacacuugaaggg

SEQ ID NO: 1508285 - RNA, 19 nt, Artificial Sequence
  Description of Artificial Sequence: Synthetic oligonucleotide
uucuuaauucaaaacuaac

SEQ ID NO: 1508286 - RNA, 19 nt, Artificial Sequence
  Description of Artificial Sequence: Synthetic oligonucleotide
cacaauaauaagacuuggg

SEQ ID NO: 1508287 - RNA, 19 nt, Artificial Sequence
  Description of Artificial Sequence: Synthetic oligonucleotide
ucuuagguauuucuauggc

SEQ ID NO: 1508288 - RNA, 19 nt, Artificial Sequence
  Description of Artificial Sequence: Synthetic oligonucleotide
ugacccauaacacuggcau

SEQ ID NO: 1508289 - RNA, 19 nt, Artificial Sequence
  Description of Artificial Sequence: Synthetic oligonucleotide
uucuauggcaguaaauuau

SEQ ID NO: 1508290 - RNA, 19 nt, Artificial Sequence
  Description of Artificial Sequence: Synthetic oligonucleotide
ucucgauuuccaaucaucu

SEQ ID NO: 1508291 - RNA, 19 nt, Artificial Sequence
  Description of Artificial Sequence: Synthetic oligonucleotide
uuuaacuuucuggaaacca

SEQ ID NO: 1508292 - RNA, 19 nt, Artificial Sequence
  Description of Artificial Sequence: Synthetic oligonucleotide
gugaguauggcacuuagca

SEQ ID NO: 1508293 - RNA, 19 nt, Artificial Sequence
  Description of Artificial Sequence: Synthetic oligonucleotide
uccgguauagaauaucuaa

SEQ ID NO: 1508294 - RNA, 19 nt, Artificial Sequence
  Description of Artificial Sequence: Synthetic oligonucleotide
uacaaauuuguacugccau

SEQ ID NO: 1508295 - RNA, 19 nt, Artificial Sequence
  Description of Artificial Sequence: Synthetic oligonucleotide
ugcuguuccauuccuuagg

SEQ ID NO: 1508296 - RNA, 19 nt, Artificial Sequence
  Description of Artificial Sequence: Synthetic oligonucleotide
aaguacugcuuuaaauuac

SEQ ID NO: 1508297 - RNA, 19 nt, Artificial Sequence
  Description of Artificial Sequence: Synthetic oligonucleotide
uaucuaaaguugaaaacua

SEQ ID NO: 1508298 - RNA, 19 nt, Artificial Sequence
  Description of Artificial Sequence: Synthetic oligonucleotide
uggcaacugacccauaaca

SEQ ID NO: 1508299 - RNA, 19 nt, Artificial Sequence
  Description of Artificial Sequence: Synthetic oligonucleotide
gcauauaguacuuaugaug

SEQ ID NO: 1508300 - RNA, 19 nt, Artificial Sequence
  Description of Artificial Sequence: Synthetic oligonucleotide
uggcacuuagcauuugggg

SEQ ID NO: 1508301 - RNA, 19 nt, Artificial Sequence
  Description of Artificial Sequence: Synthetic oligonucleotide
uaucuauucugaaucaaua

SEQ ID NO: 1508302 - RNA, 19 nt, Artificial Sequence
  Description of Artificial Sequence: Synthetic oligonucleotide
uauaugauucaaguacugc

SEQ ID NO: 1508303 - RNA, 19 nt, Artificial Sequence
  Description of Artificial Sequence: Synthetic oligonucleotide
uucuuguaggcuucgaacu

SEQ ID NO: 1508304 - RNA, 19 nt, Artificial Sequence
  Description of Artificial Sequence: Synthetic oligonucleotide
uuagcauacuuaugaagga

SEQ ID NO: 1508305 - RNA, 19 nt, Artificial Sequence
  Description of Artificial Sequence: Synthetic oligonucleotide
cuucaggacuauaugauuc

SEQ ID NO: 1508306 - RNA, 19 nt, Artificial Sequence
  Description of Artificial Sequence: Synthetic oligonucleotide
aauaagacuugggucaacu

SEQ ID NO: 1508307 - RNA, 19 nt, Artificial Sequence
  Description of Artificial Sequence: Synthetic oligonucleotide
auuucuaucuauucugaau

SEQ ID NO: 1508308 - RNA, 19 nt, Artificial Sequence
  Description of Artificial Sequence: Synthetic oligonucleotide
uccaucuaggaucuuacaa

SEQ ID NO: 1508309 - RNA, 19 nt, Artificial Sequence
  Description of Artificial Sequence: Synthetic oligonucleotide
aagucuccgguauagaaua

SEQ ID NO: 1508310 - RNA, 19 nt, Artificial Sequence
  Description of Artificial Sequence: Synthetic oligonucleotide
ugcgccuccaguaaugaug

SEQ ID NO: 1508311 - RNA, 19 nt, Artificial Sequence
  Description of Artificial Sequence: Synthetic oligonucleotide
gagauaggcacugauauga

SEQ ID NO: 1508312 - RNA, 19 nt, Artificial Sequence
  Description of Artificial Sequence: Synthetic oligonucleotide
agcuccaugagaguucugc

SEQ ID NO: 1508313 - RNA, 19 nt, Artificial Sequence
  Description of Artificial Sequence: Synthetic oligonucleotide
uaucuaacuugcuuacacc

SEQ ID NO: 1508314 - RNA, 19 nt, Artificial Sequence
  Description of Artificial Sequence: Synthetic oligonucleotide
uuacaaauuuguacugcca

SEQ ID NO: 1508315 - RNA, 19 nt, Artificial Sequence
  Description of Artificial Sequence: Synthetic oligonucleotide
gcaauaacagauucaauug

SEQ ID NO: 1508316 - RNA, 19 nt, Artificial Sequence
  Description of Artificial Sequence: Synthetic oligonucleotide
acuuaugauguuauaaucu

SEQ ID NO: 1508317 - RNA, 19 nt, Artificial Sequence
  Description of Artificial Sequence: Synthetic oligonucleotide
auaaucucaguuucaacaa

SEQ ID NO: 1508318 - RNA, 19 nt, Artificial Sequence
  Description of Artificial Sequence: Synthetic oligonucleotide
aacugagaaguucgcuacg

SEQ ID NO: 1508319 - RNA, 19 nt, Artificial Sequence
  Description of Artificial Sequence: Synthetic oligonucleotide
aucuaaauuuaacuuucug

SEQ ID NO: 1508320 - RNA, 19 nt, Artificial Sequence
  Description of Artificial Sequence: Synthetic oligonucleotide
ugauaccaggcacauaggu

SEQ ID NO: 1508321 - RNA, 19 nt, Artificial Sequence
  Description of Artificial Sequence: Synthetic oligonucleotide
acauaucuuagguauuucu

SEQ ID NO: 1508322 - RNA, 19 nt, Artificial Sequence
  Description of Artificial Sequence: Synthetic oligonucleotide
aguacuuaugauguuauaa

SEQ ID NO: 1508323 - RNA, 19 nt, Artificial Sequence
  Description of Artificial Sequence: Synthetic oligonucleotide
uuggcuuguaccacaauaa

SEQ ID NO: 1508324 - RNA, 19 nt, Artificial Sequence
  Description of Artificial Sequence: Synthetic oligonucleotide
cuauguaaaggacaauguc

SEQ ID NO: 1508325 - RNA, 19 nt, Artificial Sequence
  Description of Artificial Sequence: Synthetic oligonucleotide
uguaaaggacaaugucggg

SEQ ID NO: 1508326 - RNA, 19 nt, Artificial Sequence
  Description of Artificial Sequence: Synthetic oligonucleotide
uuaucaauguguacuggau

SEQ ID NO: 1508327 - RNA, 19 nt, Artificial Sequence
  Description of Artificial Sequence: Synthetic oligonucleotide
acaaauuuguacugccaug

SEQ ID NO: 1508328 - RNA, 19 nt, Artificial Sequence
  Description of Artificial Sequence: Synthetic oligonucleotide
gaacugagaaguucgcuac

SEQ ID NO: 1508329 - RNA, 19 nt, Artificial Sequence
  Description of Artificial Sequence: Synthetic oligonucleotide
ucuaacuugcuuacaccca

SEQ ID NO: 1508330 - RNA, 19 nt, Artificial Sequence
  Description of Artificial Sequence: Synthetic oligonucleotide
augggagaaacaaaguguc

SEQ ID NO: 1508331 - RNA, 19 nt, Artificial Sequence
  Description of Artificial Sequence: Synthetic oligonucleotide
auucugaaucaauaaauua

SEQ ID NO: 1508332 - RNA, 19 nt, Artificial Sequence
  Description of Artificial Sequence: Synthetic oligonucleotide
auccaauuaguuagcauac

SEQ ID NO: 1508333 - RNA, 19 nt, Artificial Sequence
  Description of Artificial Sequence: Synthetic oligonucleotide
uucuuuuagugggaaacag

SEQ ID NO: 1508334 - RNA, 19 nt, Artificial Sequence
  Description of Artificial Sequence: Synthetic oligonucleotide
aacuugcuuacacccauga

SEQ ID NO: 1508335 - RNA, 19 nt, Artificial Sequence
  Description of Artificial Sequence: Synthetic oligonucleotide
aauagaugucauaucacau

SEQ ID NO: 1508336 - RNA, 19 nt, Artificial Sequence
  Description of Artificial Sequence: Synthetic oligonucleotide
gauguuauaaucucaguuu

SEQ ID NO: 1508337 - RNA, 19 nt, Artificial Sequence
  Description of Artificial Sequence: Synthetic oligonucleotide
gagaaguucgcuacgugag

SEQ ID NO: 1508338 - RNA, 19 nt, Artificial Sequence
  Description of Artificial Sequence: Synthetic oligonucleotide
gacuauauggcagcaauca

SEQ ID NO: 1508339 - RNA, 19 nt, Artificial Sequence
  Description of Artificial Sequence: Synthetic oligonucleotide
acaauagaugucauaucac

SEQ ID NO: 1508340 - RNA, 19 nt, Artificial Sequence
  Description of Artificial Sequence: Synthetic oligonucleotide
acuauauggcagcaaucag

SEQ ID NO: 1508341 - RNA, 19 nt, Artificial Sequence
  Description of Artificial Sequence: Synthetic oligonucleotide
aacuaacacugauuuacau

SEQ ID NO: 1508342 - RNA, 19 nt, Artificial Sequence
  Description of Artificial Sequence: Synthetic oligonucleotide
uaucggauuucgcaaccag

SEQ ID NO: 1508343 - RNA, 19 nt, Artificial Sequence
  Description of Artificial Sequence: Synthetic oligonucleotide
ucacuugaaaccagauucu

SEQ ID NO: 1508344 - RNA, 19 nt, Artificial Sequence
  Description of Artificial Sequence: Synthetic oligonucleotide
gucauaucuaaauuuaacu

SEQ ID NO: 1508345 - RNA, 19 nt, Artificial Sequence
  Description of Artificial Sequence: Synthetic oligonucleotide
caucuaggaucuuacaauc

SEQ ID NO: 1508346 - RNA, 19 nt, Artificial Sequence
  Description of Artificial Sequence: Synthetic oligonucleotide
cuagguaucggauuucgca

SEQ ID NO: 1508347 - RNA, 19 nt, Artificial Sequence
  Description of Artificial Sequence: Synthetic oligonucleotide
acacccaugagugccaaac

SEQ ID NO: 1508348 - RNA, 19 nt, Artificial Sequence
  Description of Artificial Sequence: Synthetic oligonucleotide
uucucgauuuccaaucauc

SEQ ID NO: 1508349 - RNA, 19 nt, Artificial Sequence
  Description of Artificial Sequence: Synthetic oligonucleotide
uucuagguaucggauuucg

SEQ ID NO: 1508350 - RNA, 19 nt, Artificial Sequence
  Description of Artificial Sequence: Synthetic oligonucleotide
auagaugucauaucacauu

SEQ ID NO: 1508351 - RNA, 19 nt, Artificial Sequence
  Description of Artificial Sequence: Synthetic oligonucleotide
acagauucaauuggcauga

SEQ ID NO: 1508352 - RNA, 19 nt, Artificial Sequence
  Description of Artificial Sequence: Synthetic oligonucleotide
agguaucggauuucgcaac

SEQ ID NO: 1508353 - RNA, 19 nt, Artificial Sequence
  Description of Artificial Sequence: Synthetic oligonucleotide
acuaacacugauuuacaua

SEQ ID NO: 1508354 - RNA, 19 nt, Artificial Sequence
  Description of Artificial Sequence: Synthetic oligonucleotide
gauaccaggcacauaggug

SEQ ID NO: 1508355 - RNA, 19 nt, Artificial Sequence
  Description of Artificial Sequence: Synthetic oligonucleotide
acuauaugauucaaguacu

SEQ ID NO: 1508356 - RNA, 19 nt, Artificial Sequence
  Description of Artificial Sequence: Synthetic oligonucleotide
uguccaucuaggaucuuac

SEQ ID NO: 1508357 - RNA, 19 nt, Artificial Sequence
  Description of Artificial Sequence: Synthetic oligonucleotide
accuuaucaauguguacug

SEQ ID NO: 1508358 - RNA, 19 nt, Artificial Sequence
  Description of Artificial Sequence: Synthetic oligonucleotide
agacguacacuugaagggg

SEQ ID NO: 1508359 - RNA, 19 nt, Artificial Sequence
  Description of Artificial Sequence: Synthetic oligonucleotide
acguucaaaggcaucauag

SEQ ID NO: 1508360 - RNA, 19 nt, Artificial Sequence
  Description of Artificial Sequence: Synthetic oligonucleotide
acccaugagugccaaacag

SEQ ID NO: 1508361 - RNA, 19 nt, Artificial Sequence
  Description of Artificial Sequence: Synthetic oligonucleotide
uauuucuauggcaguaaau

SEQ ID NO: 1508362 - RNA, 19 nt, Artificial Sequence
  Description of Artificial Sequence: Synthetic oligonucleotide
ggcaguaaauuaucuaaag

SEQ ID NO: 1508363 - RNA, 19 nt, Artificial Sequence
  Description of Artificial Sequence: Synthetic oligonucleotide
ggaaacaggauguuauaug

SEQ ID NO: 1508364 - RNA, 19 nt, Artificial Sequence
  Description of Artificial Sequence: Synthetic oligonucleotide
uagguaucggauuucgcaa

SEQ ID NO: 1508365 - RNA, 19 nt, Artificial Sequence
  Description of Artificial Sequence: Synthetic oligonucleotide
agguaaguagugcugucug

SEQ ID NO: 1508366 - RNA, 19 nt, Artificial Sequence
  Description of Artificial Sequence: Synthetic oligonucleotide
gucaacuggaacugagaag

SEQ ID NO: 1508367 - RNA, 19 nt, Artificial Sequence
  Description of Artificial Sequence: Synthetic oligonucleotide
uuuguacugccauguaggu

SEQ ID NO: 1508368 - RNA, 19 nt, Artificial Sequence
  Description of Artificial Sequence: Synthetic oligonucleotide
cuaaaguugaaaacuauau

SEQ ID NO: 1508369 - RNA, 19 nt, Artificial Sequence
  Description of Artificial Sequence: Synthetic oligonucleotide
acuugaaaccagauucugg

SEQ ID NO: 1508370 - RNA, 19 nt, Artificial Sequence
  Description of Artificial Sequence: Synthetic oligonucleotide
uuuacauaucuuagguauu

SEQ ID NO: 1508371 - RNA, 19 nt, Artificial Sequence
  Description of Artificial Sequence: Synthetic oligonucleotide
cuuagguauuucuauggca

SEQ ID NO: 1508372 - RNA, 19 nt, Artificial Sequence
  Description of Artificial Sequence: Synthetic oligonucleotide
acaaugucgggacucuuga

SEQ ID NO: 1508373 - RNA, 19 nt, Artificial Sequence
  Description of Artificial Sequence: Synthetic oligonucleotide
ugggagaaacaaagugucc

SEQ ID NO: 1508374 - RNA, 19 nt, Artificial Sequence
  Description of Artificial Sequence: Synthetic oligonucleotide
uugugagaagaagucuccg

SEQ ID NO: 1508375 - RNA, 19 nt, Artificial Sequence
  Description of Artificial Sequence: Synthetic oligonucleotide
accacaauaauaagacuug

SEQ ID NO: 1508376 - RNA, 19 nt, Artificial Sequence
  Description of Artificial Sequence: Synthetic oligonucleotide
gccauauaacagcauauag

SEQ ID NO: 1508377 - RNA, 19 nt, Artificial Sequence
  Description of Artificial Sequence: Synthetic oligonucleotide
auaagacuugggucaacug

SEQ ID NO: 1508378 - RNA, 19 nt, Artificial Sequence
  Description of Artificial Sequence: Synthetic oligonucleotide
cuccaugagaguucugcgc

SEQ ID NO: 1508379 - RNA, 19 nt, Artificial Sequence
  Description of Artificial Sequence: Synthetic oligonucleotide
uuuuagugggaaacaggau

SEQ ID NO: 1508380 - RNA, 19 nt, Artificial Sequence
  Description of Artificial Sequence: Synthetic oligonucleotide
acaauaaauuggaaccuug

SEQ ID NO: 1508381 - RNA, 19 nt, Artificial Sequence
  Description of Artificial Sequence: Synthetic oligonucleotide
uacuuaugaaggaaacguu

SEQ ID NO: 1508382 - RNA, 19 nt, Artificial Sequence
  Description of Artificial Sequence: Synthetic oligonucleotide
agcauauaguacuuaugau

SEQ ID NO: 1508383 - RNA, 19 nt, Artificial Sequence
  Description of Artificial Sequence: Synthetic oligonucleotide
agagauaggcacugauaug

SEQ ID NO: 1508384 - RNA, 19 nt, Artificial Sequence
  Description of Artificial Sequence: Synthetic oligonucleotide
ucuagguaucggauuucgc

SEQ ID NO: 1508385 - RNA, 19 nt, Artificial Sequence
  Description of Artificial Sequence: Synthetic oligonucleotide
ggcauauagacuauauggc

SEQ ID NO: 1508386 - RNA, 19 nt, Artificial Sequence
  Description of Artificial Sequence: Synthetic oligonucleotide
aaacuaacacugauuuaca

SEQ ID NO: 1508387 - RNA, 19 nt, Artificial Sequence
  Description of Artificial Sequence: Synthetic oligonucleotide
gauagucacuugaaaccag

SEQ ID NO: 1508388 - RNA, 19 nt, Artificial Sequence
  Description of Artificial Sequence: Synthetic oligonucleotide
guaucugcuguuccauucc

SEQ ID NO: 1508389 - RNA, 19 nt, Artificial Sequence
  Description of Artificial Sequence: Synthetic oligonucleotide
uucgcaaccaggccaaauu

SEQ ID NO: 1508390 - RNA, 19 nt, Artificial Sequence
  Description of Artificial Sequence: Synthetic oligonucleotide
guaaaggacaaugucggga

SEQ ID NO: 1508391 - RNA, 19 nt, Artificial Sequence
  Description of Artificial Sequence: Synthetic oligonucleotide
aucucaguuucaacaauuc

SEQ ID NO: 1508392 - RNA, 19 nt, Artificial Sequence
  Description of Artificial Sequence: Synthetic oligonucleotide
aaaggacaaugucgggacu

SEQ ID NO: 1508393 - RNA, 19 nt, Artificial Sequence
  Description of Artificial Sequence: Synthetic oligonucleotide
uauagacuauauggcagca

SEQ ID NO: 1508394 - RNA, 19 nt, Artificial Sequence
  Description of Artificial Sequence: Synthetic oligonucleotide
acaggucuguaucugcugu

SEQ ID NO: 1508395 - RNA, 19 nt, Artificial Sequence
  Description of Artificial Sequence: Synthetic oligonucleotide
gccagaugaaugcacacag

SEQ ID NO: 1508396 - RNA, 19 nt, Artificial Sequence
  Description of Artificial Sequence: Synthetic oligonucleotide
cuuguaggcuucgaacucc

SEQ ID NO: 1508397 - RNA, 19 nt, Artificial Sequence
  Description of Artificial Sequence: Synthetic oligonucleotide
cuggcauauagacuauaug

SEQ ID NO: 1508398 - RNA, 19 nt, Artificial Sequence
  Description of Artificial Sequence: Synthetic oligonucleotide
ucguggaauauaggcaucc

SEQ ID NO: 1508399 - RNA, 19 nt, Artificial Sequence
  Description of Artificial Sequence: Synthetic oligonucleotide
ucuaucuauucugaaucaa

SEQ ID NO: 1508400 - RNA, 19 nt, Artificial Sequence
  Description of Artificial Sequence: Synthetic oligonucleotide
cauguagguacaguucagc

SEQ ID NO: 1508401 - RNA, 19 nt, Artificial Sequence
  Description of Artificial Sequence: Synthetic oligonucleotide
aguagugcugucugcuugu

SEQ ID NO: 1508402 - RNA, 19 nt, Artificial Sequence
  Description of Artificial Sequence: Synthetic oligonucleotide
aggauguuauauggcaauc

SEQ ID NO: 1508403 - RNA, 19 nt, Artificial Sequence
  Description of Artificial Sequence: Synthetic oligonucleotide
aguacugcuuuaaauuacu

SEQ ID NO: 1508404 - RNA, 19 nt, Artificial Sequence
  Description of Artificial Sequence: Synthetic oligonucleotide
aggaucuuacaaucugacu

SEQ ID NO: 1508405 - RNA, 19 nt, Artificial Sequence
  Description of Artificial Sequence: Synthetic oligonucleotide
cuaggaucuuacaaucuga

SEQ ID NO: 1508406 - RNA, 19 nt, Artificial Sequence
  Description of Artificial Sequence: Synthetic oligonucleotide
gcauauagacuauauggca

SEQ ID NO: 1508407 - RNA, 19 nt, Artificial Sequence
  Description of Artificial Sequence: Synthetic oligonucleotide
uucgcuacgugaguauggc

SEQ ID NO: 1508408 - RNA, 19 nt, Artificial Sequence
  Description of Artificial Sequence: Synthetic oligonucleotide
caauguguacuggauaguc

SEQ ID NO: 1508409 - RNA, 19 nt, Artificial Sequence
  Description of Artificial Sequence: Synthetic oligonucleotide
augauucaaguacugcuuu

SEQ ID NO: 1508410 - RNA, 19 nt, Artificial Sequence
  Description of Artificial Sequence: Synthetic oligonucleotide
acgugaguauggcacuuag

SEQ ID NO: 1508411 - RNA, 19 nt, Artificial Sequence
  Description of Artificial Sequence: Synthetic oligonucleotide
uaacuugcuuacacccaug

SEQ ID NO: 1508412 - RNA, 19 nt, Artificial Sequence
  Description of Artificial Sequence: Synthetic oligonucleotide
cuugggucaacuggaacug

SEQ ID NO: 1508413 - RNA, 19 nt, Artificial Sequence
  Description of Artificial Sequence: Synthetic oligonucleotide
aucggauuucgcaaccagg

SEQ ID NO: 1508414 - RNA, 19 nt, Artificial Sequence
  Description of Artificial Sequence: Synthetic oligonucleotide
guacuuaugauguuauaau

SEQ ID NO: 1508415 - RNA, 19 nt, Artificial Sequence
  Description of Artificial Sequence: Synthetic oligonucleotide
uggcuugucugaagagucc

SEQ ID NO: 1508416 - RNA, 19 nt, Artificial Sequence
  Description of Artificial Sequence: Synthetic oligonucleotide
aaguucgcuacgugaguau

SEQ ID NO: 1508417 - RNA, 19 nt, Artificial Sequence
  Description of Artificial Sequence: Synthetic oligonucleotide
acuucaggacuauaugauu

SEQ ID NO: 1508418 - RNA, 19 nt, Artificial Sequence
  Description of Artificial Sequence: Synthetic oligonucleotide
auggcacuuagcauuuggg

SEQ ID NO: 1508419 - RNA, 19 nt, Artificial Sequence
  Description of Artificial Sequence: Synthetic oligonucleotide
agaaguucgcuacgugagu

SEQ ID NO: 1508420 - RNA, 19 nt, Artificial Sequence
  Description of Artificial Sequence: Synthetic oligonucleotide
agacuauauggcagcaauc

SEQ ID NO: 1508421 - RNA, 19 nt, Artificial Sequence
  Description of Artificial Sequence: Synthetic oligonucleotide
gcauaggccgcucacagac

SEQ ID NO: 1508422 - RNA, 19 nt, Artificial Sequence
  Description of Artificial Sequence: Synthetic oligonucleotide
uagcauacuuaugaaggaa

SEQ ID NO: 1508423 - RNA, 19 nt, Artificial Sequence
  Description of Artificial Sequence: Synthetic oligonucleotide
uuaaagagauaggcacuga

SEQ ID NO: 1508424 - RNA, 19 nt, Artificial Sequence
  Description of Artificial Sequence: Synthetic oligonucleotide
ugauucaaguacugcuuua

SEQ ID NO: 1508425 - RNA, 19 nt, Artificial Sequence
  Description of Artificial Sequence: Synthetic oligonucleotide
aguucagcagucaggauau

SEQ ID NO: 1508426 - RNA, 19 nt, Artificial Sequence
  Description of Artificial Sequence: Synthetic oligonucleotide
auaguacuuaugauguuau

SEQ ID NO: 1508427 - RNA, 19 nt, Artificial Sequence
  Description of Artificial Sequence: Synthetic oligonucleotide
guucgcuacgugaguaugg

SEQ ID NO: 1508428 - RNA, 19 nt, Artificial Sequence
  Description of Artificial Sequence: Synthetic oligonucleotide
cacagacguacacuugaag

SEQ ID NO: 1508429 - RNA, 19 nt, Artificial Sequence
  Description of Artificial Sequence: Synthetic oligonucleotide
guggaauauaggcauccuc

SEQ ID NO: 1508430 - RNA, 19 nt, Artificial Sequence
  Description of Artificial Sequence: Synthetic oligonucleotide
ggauuucgcaaccaggcca

SEQ ID NO: 1508431 - RNA, 19 nt, Artificial Sequence
  Description of Artificial Sequence: Synthetic oligonucleotide
agauaggcacugauaugac

SEQ ID NO: 1508432 - RNA, 19 nt, Artificial Sequence
  Description of Artificial Sequence: Synthetic oligonucleotide
uuguaggcuucgaacuccu

SEQ ID NO: 1508433 - RNA, 19 nt, Artificial Sequence
  Description of Artificial Sequence: Synthetic oligonucleotide
caaccuuaucaauguguac

SEQ ID NO: 1508434 - RNA, 19 nt, Artificial Sequence
  Description of Artificial Sequence: Synthetic oligonucleotide
cuggaacugagaaguucgc

SEQ ID NO: 1508435 - RNA, 19 nt, Artificial Sequence
  Description of Artificial Sequence: Synthetic oligonucleotide
uacacuugaaggggagccc

SEQ ID NO: 1508436 - RNA, 19 nt, Artificial Sequence
  Description of Artificial Sequence: Synthetic oligonucleotide
aggucuguaucugcuguuc

SEQ ID NO: 1508437 - RNA, 19 nt, Artificial Sequence
  Description of Artificial Sequence: Synthetic oligonucleotide
gaauucuuuuagugggaaa

SEQ ID NO: 1508438 - RNA, 19 nt, Artificial Sequence
  Description of Artificial Sequence: Synthetic oligonucleotide
accuuucucgauuuccaau

SEQ ID NO: 1508439 - RNA, 19 nt, Artificial Sequence
  Description of Artificial Sequence: Synthetic oligonucleotide
acauugaguauaugagauu

SEQ ID NO: 1508440 - RNA, 19 nt, Artificial Sequence
  Description of Artificial Sequence: Synthetic oligonucleotide
guucguggaauauaggcau

SEQ ID NO: 1508441 - RNA, 19 nt, Artificial Sequence
  Description of Artificial Sequence: Synthetic oligonucleotide
agauucaauuggcaugaua

SEQ ID NO: 1508442 - RNA, 19 nt, Artificial Sequence
  Description of Artificial Sequence: Synthetic oligonucleotide
uugcaauaacagauucaau

SEQ ID NO: 1508443 - RNA, 19 nt, Artificial Sequence
  Description of Artificial Sequence: Synthetic oligonucleotide
ucaauguguacuggauagu

SEQ ID NO: 1508444 - RNA, 19 nt, Artificial Sequence
  Description of Artificial Sequence: Synthetic oligonucleotide
ucacagacguacacuugaa

SEQ ID NO: 1508445 - RNA, 19 nt, Artificial Sequence
  Description of Artificial Sequence: Synthetic oligonucleotide
ugccauauaacagcauaua

SEQ ID NO: 1508446 - RNA, 19 nt, Artificial Sequence
  Description of Artificial Sequence: Synthetic oligonucleotide
cuuggucugucauaucuaa

SEQ ID NO: 1508447 - RNA, 19 nt, Artificial Sequence
  Description of Artificial Sequence: Synthetic oligonucleotide
agcccaccgagccuccugg

SEQ ID NO: 1508448 - RNA, 19 nt, Artificial Sequence
  Description of Artificial Sequence: Synthetic oligonucleotide
ugccuucacuucucaagug

SEQ ID NO: 1508449 - RNA, 19 nt, Artificial Sequence
  Description of Artificial Sequence: Synthetic oligonucleotide
ucgcaaccaggccaaauuu

SEQ ID NO: 1508450 - RNA, 19 nt, Artificial Sequence
  Description of Artificial Sequence: Synthetic oligonucleotide
gcuuacacccaugagugcc

SEQ ID NO: 1508451 - RNA, 19 nt, Artificial Sequence
  Description of Artificial Sequence: Synthetic oligonucleotide
aacuccuguucguggaaua

SEQ ID NO: 1508452 - RNA, 19 nt, Artificial Sequence
  Description of Artificial Sequence: Synthetic oligonucleotide
uggaacugagaaguucgcu

SEQ ID NO: 1508453 - RNA, 19 nt, Artificial Sequence
  Description of Artificial Sequence: Synthetic oligonucleotide
auaauaagacuugggucaa

SEQ ID NO: 1508454 - RNA, 19 nt, Artificial Sequence
  Description of Artificial Sequence: Synthetic oligonucleotide
acuauaucauaaacccacu

SEQ ID NO: 1508455 - RNA, 19 nt, Artificial Sequence
  Description of Artificial Sequence: Synthetic oligonucleotide
uucguggaauauaggcauc

SEQ ID NO: 1508456 - RNA, 19 nt, Artificial Sequence
  Description of Artificial Sequence: Synthetic oligonucleotide
gguaucggauuucgcaacc

SEQ ID NO: 1508457 - RNA, 19 nt, Artificial Sequence
  Description of Artificial Sequence: Synthetic oligonucleotide
cauaggccgcucacagacg

SEQ ID NO: 1508458 - RNA, 19 nt, Artificial Sequence
  Description of Artificial Sequence: Synthetic oligonucleotide
auauaguacuuaugauguu

SEQ ID NO: 1508459 - RNA, 19 nt, Artificial Sequence
  Description of Artificial Sequence: Synthetic oligonucleotide
ugggaaacaggauguuaua

SEQ ID NO: 1508460 - RNA, 19 nt, Artificial Sequence
  Description of Artificial Sequence: Synthetic oligonucleotide
ccgguauagaauaucuaac

SEQ ID NO: 1508461 - RNA, 19 nt, Artificial Sequence
  Description of Artificial Sequence: Synthetic oligonucleotide
gggagaaacaaagugucca

SEQ ID NO: 1508462 - RNA, 19 nt, Artificial Sequence
  Description of Artificial Sequence: Synthetic oligonucleotide
ugcuuacacccaugagugc

SEQ ID NO: 1508463 - RNA, 19 nt, Artificial Sequence
  Description of Artificial Sequence: Synthetic oligonucleotide
aagaagucuccgguauaga

SEQ ID NO: 1508464 - RNA, 19 nt, Artificial Sequence
  Description of Artificial Sequence: Synthetic oligonucleotide
aguucgcuacgugaguaug

SEQ ID NO: 1508465 - RNA, 19 nt, Artificial Sequence
  Description of Artificial Sequence: Synthetic oligonucleotide
gauuucgcaaccaggccaa

SEQ ID NO: 1508466 - RNA, 19 nt, Artificial Sequence
  Description of Artificial Sequence: Synthetic oligonucleotide
ggaacugagaaguucgcua

SEQ ID NO: 1508467 - RNA, 19 nt, Artificial Sequence
  Description of Artificial Sequence: Synthetic oligonucleotide
aucuaaaguugaaaacuau

SEQ ID NO: 1508468 - RNA, 19 nt, Artificial Sequence
  Description of Artificial Sequence: Synthetic oligonucleotide
gccauguagguacaguuca

SEQ ID NO: 1508469 - RNA, 19 nt, Artificial Sequence
  Description of Artificial Sequence: Synthetic oligonucleotide
cacuugaaaccagauucug

SEQ ID NO: 1508470 - RNA, 19 nt, Artificial Sequence
  Description of Artificial Sequence: Synthetic oligonucleotide
ggucaacuggaacugagaa

SEQ ID NO: 1508471 - RNA, 19 nt, Artificial Sequence
  Description of Artificial Sequence: Synthetic oligonucleotide
ucaggacuauaugauucaa

SEQ ID NO: 1508472 - RNA, 19 nt, Artificial Sequence
  Description of Artificial Sequence: Synthetic oligonucleotide
ggauagucacuugaaacca

SEQ ID NO: 1508473 - RNA, 19 nt, Artificial Sequence
  Description of Artificial Sequence: Synthetic oligonucleotide
acuggcauauagacuauau

SEQ ID NO: 1508474 - RNA, 19 nt, Artificial Sequence
  Description of Artificial Sequence: Synthetic oligonucleotide
guuuaaagagauaggcacu

SEQ ID NO: 1508475 - RNA, 19 nt, Artificial Sequence
  Description of Artificial Sequence: Synthetic oligonucleotide
cauuucuaucuauucugaa

SEQ ID NO: 1508476 - RNA, 19 nt, Artificial Sequence
  Description of Artificial Sequence: Synthetic oligonucleotide
auguuauauggcaauccaa

SEQ ID NO: 1508477 - RNA, 19 nt, Artificial Sequence
  Description of Artificial Sequence: Synthetic oligonucleotide
cuaucuauucugaaucaau

SEQ ID NO: 1508478 - RNA, 19 nt, Artificial Sequence
  Description of Artificial Sequence: Synthetic oligonucleotide
cuucgaacuccuguucgug

SEQ ID NO: 1508479 - RNA, 19 nt, Artificial Sequence
  Description of Artificial Sequence: Synthetic oligonucleotide
gaaguucgcuacgugagua

SEQ ID NO: 1508480 - RNA, 19 nt, Artificial Sequence
  Description of Artificial Sequence: Synthetic oligonucleotide
ugagaguucugcgccucca

SEQ ID NO: 1508481 - RNA, 19 nt, Artificial Sequence
  Description of Artificial Sequence: Synthetic oligonucleotide
augauaccaggcacauagg

SEQ ID NO: 1508482 - RNA, 19 nt, Artificial Sequence
  Description of Artificial Sequence: Synthetic oligonucleotide
acaggauguuauauggcaa

SEQ ID NO: 1508483 - RNA, 19 nt, Artificial Sequence
  Description of Artificial Sequence: Synthetic oligonucleotide
aaaugccauauaacagcau

SEQ ID NO: 1508484 - RNA, 19 nt, Artificial Sequence
  Description of Artificial Sequence: Synthetic oligonucleotide
guuauauggcaauccaauu

SEQ ID NO: 1508485 - RNA, 19 nt, Artificial Sequence
  Description of Artificial Sequence: Synthetic oligonucleotide
guaaugauggucuccuguu

SEQ ID NO: 1508486 - RNA, 19 nt, Artificial Sequence
  Description of Artificial Sequence: Synthetic oligonucleotide
gaauauaggcauccucuuu

SEQ ID NO: 1508487 - RNA, 19 nt, Artificial Sequence
  Description of Artificial Sequence: Synthetic oligonucleotide
gacguacacuugaagggga

SEQ ID NO: 1508488 - RNA, 19 nt, Artificial Sequence
  Description of Artificial Sequence: Synthetic oligonucleotide
uaauaagacuugggucaac

SEQ ID NO: 1508489 - RNA, 19 nt, Artificial Sequence
  Description of Artificial Sequence: Synthetic oligonucleotide
gguauagaauaucuaacuu

SEQ ID NO: 1508490 - RNA, 19 nt, Artificial Sequence
  Description of Artificial Sequence: Synthetic oligonucleotide
ggcaacugacccauaacac

SEQ ID NO: 1508491 - RNA, 19 nt, Artificial Sequence
  Description of Artificial Sequence: Synthetic oligonucleotide
cacauaggugggccauggg

SEQ ID NO: 1508492 - RNA, 19 nt, Artificial Sequence
  Description of Artificial Sequence: Synthetic oligonucleotide
cauaucacauugaguauau

SEQ ID NO: 1508493 - RNA, 19 nt, Artificial Sequence
  Description of Artificial Sequence: Synthetic oligonucleotide
gcgccuccaguaaugaugg

SEQ ID NO: 1508494 - RNA, 19 nt, Artificial Sequence
  Description of Artificial Sequence: Synthetic oligonucleotide
cgcuacgugaguauggcac

SEQ ID NO: 1508495 - RNA, 19 nt, Artificial Sequence
  Description of Artificial Sequence: Synthetic oligonucleotide
agcauaggccgcucacaga

SEQ ID NO: 1508496 - RNA, 19 nt, Artificial Sequence
  Description of Artificial Sequence: Synthetic oligonucleotide
ggcaccuuucucgauuucc

SEQ ID NO: 1508497 - RNA, 19 nt, Artificial Sequence
  Description of Artificial Sequence: Synthetic oligonucleotide
auagacuauauggcagcaa

SEQ ID NO: 1508498 - RNA, 19 nt, Artificial Sequence
  Description of Artificial Sequence: Synthetic oligonucleotide
aaaccagauucagguuagu

SEQ ID NO: 1508499 - RNA, 19 nt, Artificial Sequence
  Description of Artificial Sequence: Synthetic oligonucleotide
ucgcuacgugaguauggca

SEQ ID NO: 1508500 - RNA, 19 nt, Artificial Sequence
  Description of Artificial Sequence: Synthetic oligonucleotide
uuguacugccauguaggua

SEQ ID NO: 1508501 - RNA, 19 nt, Artificial Sequence
  Description of Artificial Sequence: Synthetic oligonucleotide
ggacuauaugauucaagua

SEQ ID NO: 1508502 - RNA, 19 nt, Artificial Sequence
  Description of Artificial Sequence: Synthetic oligonucleotide
ugucgggacucuugacccu

SEQ ID NO: 1508503 - RNA, 19 nt, Artificial Sequence
  Description of Artificial Sequence: Synthetic oligonucleotide
acguacacuugaaggggag

SEQ ID NO: 1508504 - RNA, 19 nt, Artificial Sequence
  Description of Artificial Sequence: Synthetic oligonucleotide
caguaaugauggucuccug

SEQ ID NO: 1508505 - RNA, 19 nt, Artificial Sequence
  Description of Artificial Sequence: Synthetic oligonucleotide
uuucgcaaccaggccaaau

SEQ ID NO: 1508506 - RNA, 19 nt, Artificial Sequence
  Description of Artificial Sequence: Synthetic oligonucleotide
caccgagccuccuggcacc

SEQ ID NO: 1508507 - RNA, 19 nt, Artificial Sequence
  Description of Artificial Sequence: Synthetic oligonucleotide
ggcaauccaauuaguuagc

SEQ ID NO: 1508508 - RNA, 19 nt, Artificial Sequence
  Description of Artificial Sequence: Synthetic oligonucleotide
ccuguucguggaauauagg

SEQ ID NO: 1508509 - RNA, 19 nt, Artificial Sequence
  Description of Artificial Sequence: Synthetic oligonucleotide
caugagaguucugcgccuc

SEQ ID NO: 1508510 - RNA, 19 nt, Artificial Sequence
  Description of Artificial Sequence: Synthetic oligonucleotide
cugacccauaacacuggca

SEQ ID NO: 1508511 - RNA, 19 nt, Artificial Sequence
  Description of Artificial Sequence: Synthetic oligonucleotide
gucauaucacauugaguau

SEQ ID NO: 1508512 - RNA, 19 nt, Artificial Sequence
  Description of Artificial Sequence: Synthetic oligonucleotide
cuucuagguaucggauuuc

SEQ ID NO: 1508513 - RNA, 19 nt, Artificial Sequence
  Description of Artificial Sequence: Synthetic oligonucleotide
acuccuguucguggaauau

SEQ ID NO: 1508514 - RNA, 19 nt, Artificial Sequence
  Description of Artificial Sequence: Synthetic oligonucleotide
ggcacuacuuggucuguca

SEQ ID NO: 1508515 - RNA, 19 nt, Artificial Sequence
  Description of Artificial Sequence: Synthetic oligonucleotide
cagucaggauauuuucuua

SEQ ID NO: 1508516 - RNA, 19 nt, Artificial Sequence
  Description of Artificial Sequence: Synthetic oligonucleotide
caucauagggagaauucuu

SEQ ID NO: 1508517 - RNA, 19 nt, Artificial Sequence
  Description of Artificial Sequence: Synthetic oligonucleotide
caggauguuauauggcaau

SEQ ID NO: 1508518 - RNA, 19 nt, Artificial Sequence
  Description of Artificial Sequence: Synthetic oligonucleotide
guaucggauuucgcaacca

SEQ ID NO: 1508519 - RNA, 19 nt, Artificial Sequence
  Description of Artificial Sequence: Synthetic oligonucleotide
cuguuccauuccuuaggca

SEQ ID NO: 1508520 - RNA, 19 nt, Artificial Sequence
  Description of Artificial Sequence: Synthetic oligonucleotide
ucgggacucuugacccucu

SEQ ID NO: 1508521 - RNA, 19 nt, Artificial Sequence
  Description of Artificial Sequence: Synthetic oligonucleotide
cuacuuggucugucauauc

SEQ ID NO: 1508522 - RNA, 19 nt, Artificial Sequence
  Description of Artificial Sequence: Synthetic oligonucleotide
acuuggucugucauaucua

SEQ ID NO: 1508523 - RNA, 19 nt, Artificial Sequence
  Description of Artificial Sequence: Synthetic oligonucleotide
cuggcaccgccgcucuccg

SEQ ID NO: 1508524 - RNA, 19 nt, Artificial Sequence
  Description of Artificial Sequence: Synthetic oligonucleotide
uacgugaguauggcacuua

SEQ ID NO: 1508525 - RNA, 19 nt, Artificial Sequence
  Description of Artificial Sequence: Synthetic oligonucleotide
caaacagcauaggccgcuc

SEQ ID NO: 1508526 - RNA, 19 nt, Artificial Sequence
  Description of Artificial Sequence: Synthetic oligonucleotide
guguccaucuaggaucuua

SEQ ID NO: 1508527 - RNA, 19 nt, Artificial Sequence
  Description of Artificial Sequence: Synthetic oligonucleotide
gagucucuugagaucuucu

SEQ ID NO: 1508528 - RNA, 19 nt, Artificial Sequence
  Description of Artificial Sequence: Synthetic oligonucleotide
caccuuucucgauuuccaa

SEQ ID NO: 1508529 - RNA, 19 nt, Artificial Sequence
  Description of Artificial Sequence: Synthetic oligonucleotide
cccauccucugaugaaaag

SEQ ID NO: 1508530 - RNA, 19 nt, Artificial Sequence
  Description of Artificial Sequence: Synthetic oligonucleotide
uucuggcaccuuucucgau

SEQ ID NO: 1508531 - RNA, 19 nt, Artificial Sequence
  Description of Artificial Sequence: Synthetic oligonucleotide
cugccauguagguacaguu

SEQ ID NO: 1508532 - RNA, 19 nt, Artificial Sequence
  Description of Artificial Sequence: Synthetic oligonucleotide
cgugaguauggcacuuagc

SEQ ID NO: 1508533 - RNA, 19 nt, Artificial Sequence
  Description of Artificial Sequence: Synthetic oligonucleotide
cguucaaaggcaucauaga

SEQ ID NO: 1508534 - RNA, 19 nt, Artificial Sequence
  Description of Artificial Sequence: Synthetic oligonucleotide
uggcaccuuucucgauuuc

SEQ ID NO: 1508535 - RNA, 19 nt, Artificial Sequence
  Description of Artificial Sequence: Synthetic oligonucleotide
gccgcucacagacguacac

SEQ ID NO: 1508536 - RNA, 19 nt, Artificial Sequence
  Description of Artificial Sequence: Synthetic oligonucleotide
gucgggacucuugacccuc

SEQ ID NO: 1508537 - RNA, 19 nt, Artificial Sequence
  Description of Artificial Sequence: Synthetic oligonucleotide
guauggcacuuagcauuug

SEQ ID NO: 1508538 - RNA, 19 nt, Artificial Sequence
  Description of Artificial Sequence: Synthetic oligonucleotide
ggucugucauaucuaaauu

SEQ ID NO: 1508539 - RNA, 19 nt, Artificial Sequence
  Description of Artificial Sequence: Synthetic oligonucleotide
aaccagauucuggcaccuu

SEQ ID NO: 1508540 - RNA, 19 nt, Artificial Sequence
  Description of Artificial Sequence: Synthetic oligonucleotide
cagguaaguagugcugucu

SEQ ID NO: 1508541 - RNA, 19 nt, Artificial Sequence
  Description of Artificial Sequence: Synthetic oligonucleotide
gcuacgugaguauggcacu

SEQ ID NO: 1508542 - RNA, 19 nt, Artificial Sequence
  Description of Artificial Sequence: Synthetic oligonucleotide
uggcagcaaucagguaagu

SEQ ID NO: 1508543 - RNA, 19 nt, Artificial Sequence
  Description of Artificial Sequence: Synthetic oligonucleotide
agucuccgguauagaauau

SEQ ID NO: 1508544 - RNA, 19 nt, Artificial Sequence
  Description of Artificial Sequence: Synthetic oligonucleotide
gggucaacuggaacugaga

SEQ ID NO: 1508545 - RNA, 19 nt, Artificial Sequence
  Description of Artificial Sequence: Synthetic oligonucleotide
ccauuccuuaggcacaaua

SEQ ID NO: 1508546 - RNA, 19 nt, Artificial Sequence
  Description of Artificial Sequence: Synthetic oligonucleotide
cuccuguucguggaauaua

SEQ ID NO: 1508547 - RNA, 19 nt, Artificial Sequence
  Description of Artificial Sequence: Synthetic oligonucleotide
guacugccauguagguaca

SEQ ID NO: 1508548 - RNA, 19 nt, Artificial Sequence
  Description of Artificial Sequence: Synthetic oligonucleotide
ccuucuagguaucggauuu

SEQ ID NO: 1508549 - RNA, 19 nt, Artificial Sequence
  Description of Artificial Sequence: Synthetic oligonucleotide
ggcuugucugaagaguccu

SEQ ID NO: 1508550 - RNA, 19 nt, Artificial Sequence
  Description of Artificial Sequence: Synthetic oligonucleotide
auuucgcaaccaggccaaa

SEQ ID NO: 1508551 - RNA, 19 nt, Artificial Sequence
  Description of Artificial Sequence: Synthetic oligonucleotide
cuggcaccuuucucgauuu

SEQ ID NO: 1508552 - RNA, 19 nt, Artificial Sequence
  Description of Artificial Sequence: Synthetic oligonucleotide
ggcaugauaccaggcacau

SEQ ID NO: 1508553 - RNA, 19 nt, Artificial Sequence
  Description of Artificial Sequence: Synthetic oligonucleotide
gcacuacuuggucugucau

SEQ ID NO: 1508554 - RNA, 19 nt, Artificial Sequence
  Description of Artificial Sequence: Synthetic oligonucleotide
ccccauccucugaugaaaa

SEQ ID NO: 1508555 - RNA, 19 nt, Artificial Sequence
  Description of Artificial Sequence: Synthetic oligonucleotide
cuacgugaguauggcacuu

SEQ ID NO: 1508556 - RNA, 19 nt, Artificial Sequence
  Description of Artificial Sequence: Synthetic oligonucleotide
gcccaccgagccuccuggc

SEQ ID NO: 1508557 - RNA, 19 nt, Artificial Sequence
  Description of Artificial Sequence: Synthetic oligonucleotide
cccaccgagccuccuggca

SEQ ID NO: 1508558 - RNA, 19 nt, Artificial Sequence
  Description of Artificial Sequence: Synthetic oligonucleotide
aguuggcaacugacccaua

SEQ ID NO: 1508559 - RNA, 19 nt, Artificial Sequence
  Description of Artificial Sequence: Synthetic oligonucleotide
guagugcugucugcuuguu

SEQ ID NO: 1508560 - RNA, 19 nt, Artificial Sequence
  Description of Artificial Sequence: Synthetic oligonucleotide
ccccuucuagguaucggau

SEQ ID NO: 1508561 - RNA, 19 nt, Artificial Sequence
  Description of Artificial Sequence: Synthetic oligonucleotide
gcaugauaccaggcacaua

SEQ ID NO: 1508562 - RNA, 19 nt, Artificial Sequence
  Description of Artificial Sequence: Synthetic oligonucleotide
cagauucaauuggcaugau

SEQ ID NO: 1508563 - RNA, 19 nt, Artificial Sequence
  Description of Artificial Sequence: Synthetic oligonucleotide
gcuugucugaagaguccuu

SEQ ID NO: 1508564 - RNA, 19 nt, Artificial Sequence
  Description of Artificial Sequence: Synthetic oligonucleotide
ggacaaugucgggacucuu

SEQ ID NO: 1508565 - RNA, 19 nt, Artificial Sequence
  Description of Artificial Sequence: Synthetic oligonucleotide
ggggcacuacuuggucugu

SEQ ID NO: 1508566 - RNA, 19 nt, Artificial Sequence
  Description of Artificial Sequence: Synthetic oligonucleotide
caccgccgcucuccgcgcu

SEQ ID NO: 1508567 - RNA, 19 nt, Artificial Sequence
  Description of Artificial Sequence: Synthetic oligonucleotide
aauagaguauguaagggcc

SEQ ID NO: 1508568 - RNA, 19 nt, Artificial Sequence
  Description of Artificial Sequence: Synthetic oligonucleotide
uaugaaguaguuuucagcc

SEQ ID NO: 1508569 - RNA, 19 nt, Artificial Sequence
  Description of Artificial Sequence: Synthetic oligonucleotide
aagauuagcguuugcgucc

SEQ ID NO: 1508570 - RNA, 19 nt, Artificial Sequence
  Description of Artificial Sequence: Synthetic oligonucleotide
aguggguuaguauagaagg

SEQ ID NO: 1508571 - RNA, 19 nt, Artificial Sequence
  Description of Artificial Sequence: Synthetic oligonucleotide
aucauggaagcauaguugc

SEQ ID NO: 1508572 - RNA, 19 nt, Artificial Sequence
  Description of Artificial Sequence: Synthetic oligonucleotide
  modified_base (2)..(2): a, c, u, g, unknown or other
unaauuucugcugaaaacc

SEQ ID NO: 1508573 - RNA, 19 nt, Artificial Sequence
  Description of Artificial Sequence: Synthetic oligonucleotide
ugaagagucccucaaauuc

SEQ ID NO: 1508574 - RNA, 19 nt, Artificial Sequence
  Description of Artificial Sequence: Synthetic oligonucleotide
gaauagaguauguaagggc

SEQ ID NO: 1508575 - RNA, 19 nt, Artificial Sequence
  Description of Artificial Sequence: Synthetic oligonucleotide
gacgaaagguacuaagggg

SEQ ID NO: 1508576 - RNA, 19 nt, Artificial Sequence
  Description of Artificial Sequence: Synthetic oligonucleotide
aguaagauuagcguuugcg

SEQ ID NO: 1508577 - RNA, 19 nt, Artificial Sequence
  Description of Artificial Sequence: Synthetic oligonucleotide
uauguaagggccauacagc

SEQ ID NO: 1508578 - RNA, 19 nt, Artificial Sequence
  Description of Artificial Sequence: Synthetic oligonucleotide
ucgacgaaagguacuaagg

SEQ ID NO: 1508579 - RNA, 19 nt, Artificial Sequence
  Description of Artificial Sequence: Synthetic oligonucleotide
  modified_base (3)..(3): a, c, u, g, unknown or other
cunaauuucugcugaaaac

SEQ ID NO: 1508580 - RNA, 19 nt, Artificial Sequence
  Description of Artificial Sequence: Synthetic oligonucleotide
cugaaaaccaguuccaaac

SEQ ID NO: 1508581 - RNA, 19 nt, Artificial Sequence
  Description of Artificial Sequence: Synthetic oligonucleotide
agcaacaacaccauccacc

SEQ ID NO: 1508582 - RNA, 19 nt, Artificial Sequence
  Description of Artificial Sequence: Synthetic oligonucleotide
acgaaagguacuaaggggc

SEQ ID NO: 1508583 - RNA, 19 nt, Artificial Sequence
  Description of Artificial Sequence: Synthetic oligonucleotide
gagggcaaaacuuuugagc

SEQ ID NO: 1508584 - RNA, 19 nt, Artificial Sequence
  Description of Artificial Sequence: Synthetic oligonucleotide
  modified_base (8)..(8): a, c, u, g, unknown or other
uguagcunaauuucugcug

SEQ ID NO: 1508585 - RNA, 19 nt, Artificial Sequence
  Description of Artificial Sequence: Synthetic oligonucleotide
aguaccgcagaguacacag

SEQ ID NO: 1508586 - RNA, 19 nt, Artificial Sequence
  Description of Artificial Sequence: Synthetic oligonucleotide
ucuaugugguccaugucag

SEQ ID NO: 1508587 - RNA, 19 nt, Artificial Sequence
  Description of Artificial Sequence: Synthetic oligonucleotide
  modified_base (10)..(10): a, c, u, g, unknown or other
guuguagcunaauuucugc

SEQ ID NO: 1508588 - RNA, 19 nt, Artificial Sequence
  Description of Artificial Sequence: Synthetic oligonucleotide
  modified_base (11)..(11): a, c, u, g, unknown or other
uguuguagcunaauuucug

SEQ ID NO: 1508589 - RNA, 19 nt, Artificial Sequence
  Description of Artificial Sequence: Synthetic oligonucleotide
guuggagcguucuaugugg

SEQ ID NO: 1508590 - RNA, 19 nt, Artificial Sequence
  Description of Artificial Sequence: Synthetic oligonucleotide
cuaaagaggaacugccugc

SEQ ID NO: 1508591 - RNA, 19 nt, Artificial Sequence
  Description of Artificial Sequence: Synthetic oligonucleotide
cuauccaugcccgacaggg

SEQ ID NO: 1508592 - RNA, 19 nt, Artificial Sequence
  Description of Artificial Sequence: Synthetic oligonucleotide
cuuuugagcauuucacagc

SEQ ID NO: 1508593 - RNA, 19 nt, Artificial Sequence
  Description of Artificial Sequence: Synthetic oligonucleotide
aguuucucggaugacaguc

SEQ ID NO: 1508594 - RNA, 19 nt, Artificial Sequence
  Description of Artificial Sequence: Synthetic oligonucleotide
guaagggccauacagcagc

SEQ ID NO: 1508595 - RNA, 19 nt, Artificial Sequence
  Description of Artificial Sequence: Synthetic oligonucleotide
uggguuuagacgcugggcu

SEQ ID NO: 1508596 - RNA, 19 nt, Artificial Sequence
  Description of Artificial Sequence: Synthetic oligonucleotide
uuagcccugacucccaggc

SEQ ID NO: 1508597 - RNA, 19 nt, Artificial Sequence
  Description of Artificial Sequence: Synthetic oligonucleotide
uaccgcagaguacacagag

SEQ ID NO: 1508598 - RNA, 19 nt, Artificial Sequence
  Description of Artificial Sequence: Synthetic oligonucleotide
uucgacgaaagguacuaag

SEQ ID NO: 1508599 - RNA, 19 nt, Artificial Sequence
  Description of Artificial Sequence: Synthetic oligonucleotide
ucugcaauagugcgugcag

SEQ ID NO: 1508600 - RNA, 19 nt, Artificial Sequence
  Description of Artificial Sequence: Synthetic oligonucleotide
aauagugcgugcagcgagc

SEQ ID NO: 1508601 - RNA, 19 nt, Artificial Sequence
  Description of Artificial Sequence: Synthetic oligonucleotide
uggccuagagcccacacca

SEQ ID NO: 1508602 - RNA, 19 nt, Artificial Sequence
  Description of Artificial Sequence: Synthetic oligonucleotide
uucagguggucccaacagg

SEQ ID NO: 1508603 - RNA, 19 nt, Artificial Sequence
  Description of Artificial Sequence: Synthetic oligonucleotide
aagaagucgucaccaaaga

SEQ ID NO: 1508604 - RNA, 19 nt, Artificial Sequence
  Description of Artificial Sequence: Synthetic oligonucleotide
uaguauagaaggucacuug

SEQ ID NO: 1508605 - RNA, 19 nt, Artificial Sequence
  Description of Artificial Sequence: Synthetic oligonucleotide
  modified_base (9)..(9): a, c, u, g, unknown or other
uuguagcunaauuucugcu

SEQ ID NO: 1508606 - RNA, 19 nt, Artificial Sequence
  Description of Artificial Sequence: Synthetic oligonucleotide
gauuccaguguccucucag

SEQ ID NO: 1508607 - RNA, 19 nt, Artificial Sequence
  Description of Artificial Sequence: Synthetic oligonucleotide
aauguccuggggccuaaag

SEQ ID NO: 1508608 - RNA, 19 nt, Artificial Sequence
  Description of Artificial Sequence: Synthetic oligonucleotide
aauuucugcugaaaaccag

SEQ ID NO: 1508609 - RNA, 19 nt, Artificial Sequence
  Description of Artificial Sequence: Synthetic oligonucleotide
caauuugcccgucguaucg

SEQ ID NO: 1508610 - RNA, 19 nt, Artificial Sequence
  Description of Artificial Sequence: Synthetic oligonucleotide
gaagcauaguugccagugg

SEQ ID NO: 1508611 - RNA, 19 nt, Artificial Sequence
  Description of Artificial Sequence: Synthetic oligonucleotide
  modified_base (18)..(18): a, c, u, g, unknown or other
gagguaauguuguagcuna

SEQ ID NO: 1508612 - RNA, 19 nt, Artificial Sequence
  Description of Artificial Sequence: Synthetic oligonucleotide
ugagggcaaaacuuuugag

SEQ ID NO: 1508613 - RNA, 19 nt, Artificial Sequence
  Description of Artificial Sequence: Synthetic oligonucleotide
acaacacaggcuucagccg

SEQ ID NO: 1508614 - RNA, 19 nt, Artificial Sequence
  Description of Artificial Sequence: Synthetic oligonucleotide
gucccucaaauucaucucg

SEQ ID NO: 1508615 - RNA, 19 nt, Artificial Sequence
  Description of Artificial Sequence: Synthetic oligonucleotide
uuauccggcccacaauuug

SEQ ID NO: 1508616 - RNA, 19 nt, Artificial Sequence
  Description of Artificial Sequence: Synthetic oligonucleotide
gaucguaugaaguaguuuu

SEQ ID NO: 1508617 - RNA, 19 nt, Artificial Sequence
  Description of Artificial Sequence: Synthetic oligonucleotide
uuauacagcuccaggccca

SEQ ID NO: 1508618 - RNA, 19 nt, Artificial Sequence
  Description of Artificial Sequence: Synthetic oligonucleotide
agaucggcugaagaguccc

SEQ ID NO: 1508619 - RNA, 19 nt, Artificial Sequence
  Description of Artificial Sequence: Synthetic oligonucleotide
uguaagggccauacagcag

SEQ ID NO: 1508620 - RNA, 19 nt, Artificial Sequence
  Description of Artificial Sequence: Synthetic oligonucleotide
uagcguuugcguccuaucc

SEQ ID NO: 1508621 - RNA, 19 nt, Artificial Sequence
  Description of Artificial Sequence: Synthetic oligonucleotide
uuaguauagaaggucacuu

SEQ ID NO: 1508622 - RNA, 19 nt, Artificial Sequence
  Description of Artificial Sequence: Synthetic oligonucleotide
guuugcguccuauccaugc

SEQ ID NO: 1508623 - RNA, 19 nt, Artificial Sequence
  Description of Artificial Sequence: Synthetic oligonucleotide
ugcguccuauccaugcccg

SEQ ID NO: 1508624 - RNA, 19 nt, Artificial Sequence
  Description of Artificial Sequence: Synthetic oligonucleotide
agugcaugccucuugguaa

SEQ ID NO: 1508625 - RNA, 19 nt, Artificial Sequence
  Description of Artificial Sequence: Synthetic oligonucleotide
gagcucucagaucagucgc

SEQ ID NO: 1508626 - RNA, 19 nt, Artificial Sequence
  Description of Artificial Sequence: Synthetic oligonucleotide
gcucauaaugcagaggugg

SEQ ID NO: 1508627 - RNA, 19 nt, Artificial Sequence
  Description of Artificial Sequence: Synthetic oligonucleotide
uuugcguccuauccaugcc

SEQ ID NO: 1508628 - RNA, 19 nt, Artificial Sequence
  Description of Artificial Sequence: Synthetic oligonucleotide
uuuucagccaggugcagau

SEQ ID NO: 1508629 - RNA, 19 nt, Artificial Sequence
  Description of Artificial Sequence: Synthetic oligonucleotide
auuugcccgucguaucggc

SEQ ID NO: 1508630 - RNA, 19 nt, Artificial Sequence
  Description of Artificial Sequence: Synthetic oligonucleotide
uggccauugugcagaauag

SEQ ID NO: 1508631 - RNA, 19 nt, Artificial Sequence
  Description of Artificial Sequence: Synthetic oligonucleotide
aauuugcccgucguaucgg

SEQ ID NO: 1508632 - RNA, 19 nt, Artificial Sequence
  Description of Artificial Sequence: Synthetic oligonucleotide
caauagugcgugcagcgag

SEQ ID NO: 1508633 - RNA, 19 nt, Artificial Sequence
  Description of Artificial Sequence: Synthetic oligonucleotide
gauagcuucgacgaaaggu

SEQ ID NO: 1508634 - RNA, 19 nt, Artificial Sequence
  Description of Artificial Sequence: Synthetic oligonucleotide
gcagaauagaguauguaag

SEQ ID NO: 1508635 - RNA, 19 nt, Artificial Sequence
  Description of Artificial Sequence: Synthetic oligonucleotide
auagugccgggccucaaag

SEQ ID NO: 1508636 - RNA, 19 nt, Artificial Sequence
  Description of Artificial Sequence: Synthetic oligonucleotide
uccuggggccuaaagagga

SEQ ID NO: 1508637 - RNA, 19 nt, Artificial Sequence
  Description of Artificial Sequence: Synthetic oligonucleotide
aagugcaugccucuuggua

SEQ ID NO: 1508638 - RNA, 19 nt, Artificial Sequence
  Description of Artificial Sequence: Synthetic oligonucleotide
gaaagguacuaaggggccg

SEQ ID NO: 1508639 - RNA, 19 nt, Artificial Sequence
  Description of Artificial Sequence: Synthetic oligonucleotide
agcggcaacauagugccgg

SEQ ID NO: 1508640 - RNA, 19 nt, Artificial Sequence
  Description of Artificial Sequence: Synthetic oligonucleotide
gaaggcacugaucguauga

SEQ ID NO: 1508641 - RNA, 19 nt, Artificial Sequence
  Description of Artificial Sequence: Synthetic oligonucleotide
uccuauccaugcccgacag

SEQ ID NO: 1508642 - RNA, 19 nt, Artificial Sequence
  Description of Artificial Sequence: Synthetic oligonucleotide
gugcagauagcuucgacga

SEQ ID NO: 1508643 - RNA, 19 nt, Artificial Sequence
  Description of Artificial Sequence: Synthetic oligonucleotide
caucacuugcugcaguaag

SEQ ID NO: 1508644 - RNA, 19 nt, Artificial Sequence
  Description of Artificial Sequence: Synthetic oligonucleotide
uuagacgcugggcugcugu

SEQ ID NO: 1508645 - RNA, 19 nt, Artificial Sequence
  Description of Artificial Sequence: Synthetic oligonucleotide
agaugugcugagugguggg

SEQ ID NO: 1508646 - RNA, 19 nt, Artificial Sequence
  Description of Artificial Sequence: Synthetic oligonucleotide
cuucagguggucccaacag

SEQ ID NO: 1508647 - RNA, 19 nt, Artificial Sequence
  Description of Artificial Sequence: Synthetic oligonucleotide
aguaguuuucagccaggug

SEQ ID NO: 1508648 - RNA, 19 nt, Artificial Sequence
  Description of Artificial Sequence: Synthetic oligonucleotide
uugcguccuauccaugccc

SEQ ID NO: 1508649 - RNA, 19 nt, Artificial Sequence
  Description of Artificial Sequence: Synthetic oligonucleotide
caugagggcaaaacuuuug

SEQ ID NO: 1508650 - RNA, 19 nt, Artificial Sequence
  Description of Artificial Sequence: Synthetic oligonucleotide
aaagguacuaaggggccgu

SEQ ID NO: 1508651 - RNA, 19 nt, Artificial Sequence
  Description of Artificial Sequence: Synthetic oligonucleotide
cagauagcuucgacgaaag

SEQ ID NO: 1508652 - RNA, 19 nt, Artificial Sequence
  Description of Artificial Sequence: Synthetic oligonucleotide
gaagagucccucaaauuca

SEQ ID NO: 1508653 - RNA, 19 nt, Artificial Sequence
  Description of Artificial Sequence: Synthetic oligonucleotide
uacuaaggggccguggccc

SEQ ID NO: 1508654 - RNA, 19 nt, Artificial Sequence
  Description of Artificial Sequence: Synthetic oligonucleotide
ucguaugaaguaguuuuca

SEQ ID NO: 1508655 - RNA, 19 nt, Artificial Sequence
  Description of Artificial Sequence: Synthetic oligonucleotide
ugcagaucggcugaagagu

SEQ ID NO: 1508656 - RNA, 19 nt, Artificial Sequence
  Description of Artificial Sequence: Synthetic oligonucleotide
uuccgggccaaucauggaa

SEQ ID NO: 1508657 - RNA, 19 nt, Artificial Sequence
  Description of Artificial Sequence: Synthetic oligonucleotide
agaagaagucgucaccaaa

SEQ ID NO: 1508658 - RNA, 19 nt, Artificial Sequence
  Description of Artificial Sequence: Synthetic oligonucleotide
guaagauuagcguuugcgu

SEQ ID NO: 1508659 - RNA, 19 nt, Artificial Sequence
  Description of Artificial Sequence: Synthetic oligonucleotide
gagguuggagcguucuaug

SEQ ID NO: 1508660 - RNA, 19 nt, Artificial Sequence
  Description of Artificial Sequence: Synthetic oligonucleotide
ugguaacaguugauggucu

SEQ ID NO: 1508661 - RNA, 19 nt, Artificial Sequence
  Description of Artificial Sequence: Synthetic oligonucleotide
agauagcuucgacgaaagg

SEQ ID NO: 1508662 - RNA, 19 nt, Artificial Sequence
  Description of Artificial Sequence: Synthetic oligonucleotide
aguggccuagagcccacac

SEQ ID NO: 1508663 - RNA, 19 nt, Artificial Sequence
  Description of Artificial Sequence: Synthetic oligonucleotide
acuuaccaccuuauacagc

SEQ ID NO: 1508664 - RNA, 19 nt, Artificial Sequence
  Description of Artificial Sequence: Synthetic oligonucleotide
cucuugguaacaguugaug

SEQ ID NO: 1508665 - RNA, 19 nt, Artificial Sequence
  Description of Artificial Sequence: Synthetic oligonucleotide
aucguaugaaguaguuuuc

SEQ ID NO: 1508666 - RNA, 19 nt, Artificial Sequence
  Description of Artificial Sequence: Synthetic oligonucleotide
ucguaucggcaguuucucg

SEQ ID NO: 1508667 - RNA, 19 nt, Artificial Sequence
  Description of Artificial Sequence: Synthetic oligonucleotide
agcguuugcguccuaucca

SEQ ID NO: 1508668 - RNA, 19 nt, Artificial Sequence
  Description of Artificial Sequence: Synthetic oligonucleotide
  modified_base (4)..(4): a, c, u, g, unknown or other
gcunaauuucugcugaaaa

SEQ ID NO: 1508669 - RNA, 19 nt, Artificial Sequence
  Description of Artificial Sequence: Synthetic oligonucleotide
ugccacaacugcuguacug

SEQ ID NO: 1508670 - RNA, 19 nt, Artificial Sequence
  Description of Artificial Sequence: Synthetic oligonucleotide
ccgcagaguacacagaggg

SEQ ID NO: 1508671 - RNA, 19 nt, Artificial Sequence
  Description of Artificial Sequence: Synthetic oligonucleotide
gguacuaaggggccguggc

SEQ ID NO: 1508672 - RNA, 19 nt, Artificial Sequence
  Description of Artificial Sequence: Synthetic oligonucleotide
cacugaucguaugaaguag

SEQ ID NO: 1508673 - RNA, 19 nt, Artificial Sequence
  Description of Artificial Sequence: Synthetic oligonucleotide
agcaauuugcccgucguau

SEQ ID NO: 1508674 - RNA, 19 nt, Artificial Sequence
  Description of Artificial Sequence: Synthetic oligonucleotide
aggugcagauagcuucgac

SEQ ID NO: 1508675 - RNA, 19 nt, Artificial Sequence
  Description of Artificial Sequence: Synthetic oligonucleotide
uccaugcccgacagggaag

SEQ ID NO: 1508676 - RNA, 19 nt, Artificial Sequence
  Description of Artificial Sequence: Synthetic oligonucleotide
ggaagcauaguugccagug

SEQ ID NO: 1508677 - RNA, 19 nt, Artificial Sequence
  Description of Artificial Sequence: Synthetic oligonucleotide
uuaggacacccaucacuug

SEQ ID NO: 1508678 - RNA, 19 nt, Artificial Sequence
  Description of Artificial Sequence: Synthetic oligonucleotide
gauuauccggcccacaauu

SEQ ID NO: 1508679 - RNA, 19 nt, Artificial Sequence
  Description of Artificial Sequence: Synthetic oligonucleotide
uggggccuaaagaggaacu

SEQ ID NO: 1508680 - RNA, 19 nt, Artificial Sequence
  Description of Artificial Sequence: Synthetic oligonucleotide
gcagcgagcggcaacauag

SEQ ID NO: 1508681 - RNA, 19 nt, Artificial Sequence
  Description of Artificial Sequence: Synthetic oligonucleotide
aggcacugaucguaugaag

SEQ ID NO: 1508682 - RNA, 19 nt, Artificial Sequence
  Description of Artificial Sequence: Synthetic oligonucleotide
ggcaacauagugccgggcc

SEQ ID NO: 1508683 - RNA, 19 nt, Artificial Sequence
  Description of Artificial Sequence: Synthetic oligonucleotide
ggagcguucuauguggucc

SEQ ID NO: 1508684 - RNA, 19 nt, Artificial Sequence
  Description of Artificial Sequence: Synthetic oligonucleotide
uuagcguuugcguccuauc

SEQ ID NO: 1508685 - RNA, 19 nt, Artificial Sequence
  Description of Artificial Sequence: Synthetic oligonucleotide
gccauugugcagaauagag

SEQ ID NO: 1508686 - RNA, 19 nt, Artificial Sequence
  Description of Artificial Sequence: Synthetic oligonucleotide
aggcccaugagggcaaaac

SEQ ID NO: 1508687 - RNA, 19 nt, Artificial Sequence
  Description of Artificial Sequence: Synthetic oligonucleotide
cacccuggagaagaagucg

SEQ ID NO: 1508688 - RNA, 19 nt, Artificial Sequence
  Description of Artificial Sequence: Synthetic oligonucleotide
cucgcggccggucacuugc

SEQ ID NO: 1508689 - RNA, 19 nt, Artificial Sequence
  Description of Artificial Sequence: Synthetic oligonucleotide
ucauaaugcagagguggaa

SEQ ID NO: 1508690 - RNA, 19 nt, Artificial Sequence
  Description of Artificial Sequence: Synthetic oligonucleotide
aaggcacugaucguaugaa

SEQ ID NO: 1508691 - RNA, 19 nt, Artificial Sequence
  Description of Artificial Sequence: Synthetic oligonucleotide
gucagcaacagccacgccu

SEQ ID NO: 1508692 - RNA, 19 nt, Artificial Sequence
  Description of Artificial Sequence: Synthetic oligonucleotide
auccaugcccgacagggaa

SEQ ID NO: 1508693 - RNA, 19 nt, Artificial Sequence
  Description of Artificial Sequence: Synthetic oligonucleotide
auagugcgugcagcgagcg

SEQ ID NO: 1508694 - RNA, 19 nt, Artificial Sequence
  Description of Artificial Sequence: Synthetic oligonucleotide
guacuaaggggccguggcc

SEQ ID NO: 1508695 - RNA, 19 nt, Artificial Sequence
  Description of Artificial Sequence: Synthetic oligonucleotide
uagagcccacaccacgcug

SEQ ID NO: 1508696 - RNA, 19 nt, Artificial Sequence
  Description of Artificial Sequence: Synthetic oligonucleotide
cccacuuaccaccuuauac

SEQ ID NO: 1508697 - RNA, 19 nt, Artificial Sequence
  Description of Artificial Sequence: Synthetic oligonucleotide
cacagcaauuugcccgucg

SEQ ID NO: 1508698 - RNA, 19 nt, Artificial Sequence
  Description of Artificial Sequence: Synthetic oligonucleotide
cucauaaugcagaggugga

SEQ ID NO: 1508699 - RNA, 19 nt, Artificial Sequence
  Description of Artificial Sequence: Synthetic oligonucleotide
aucggcaguuucucggaug

SEQ ID NO: 1508700 - RNA, 19 nt, Artificial Sequence
  Description of Artificial Sequence: Synthetic oligonucleotide
ugccuugggcuucccaaug

SEQ ID NO: 1508701 - RNA, 19 nt, Artificial Sequence
  Description of Artificial Sequence: Synthetic oligonucleotide
acugaucguaugaaguagu

SEQ ID NO: 1508702 - RNA, 19 nt, Artificial Sequence
  Description of Artificial Sequence: Synthetic oligonucleotide
uauccaugcccgacaggga

SEQ ID NO: 1508703 - RNA, 19 nt, Artificial Sequence
  Description of Artificial Sequence: Synthetic oligonucleotide
cgagcggcaacauagugcc

SEQ ID NO: 1508704 - RNA, 19 nt, Artificial Sequence
  Description of Artificial Sequence: Synthetic oligonucleotide
ccaccaagagguaauguug

SEQ ID NO: 1508705 - RNA, 19 nt, Artificial Sequence
  Description of Artificial Sequence: Synthetic oligonucleotide
gauggucucugcagaucgg

SEQ ID NO: 1508706 - RNA, 19 nt, Artificial Sequence
  Description of Artificial Sequence: Synthetic oligonucleotide
ugagcaugguuaacuggua

SEQ ID NO: 1508707 - RNA, 19 nt, Artificial Sequence
  Description of Artificial Sequence: Synthetic oligonucleotide
aucagucgcugcuaccaca

SEQ ID NO: 1508708 - RNA, 19 nt, Artificial Sequence
  Description of Artificial Sequence: Synthetic oligonucleotide
gaucugagcaugguuaacu

SEQ ID NO: 1508709 - RNA, 19 nt, Artificial Sequence
  Description of Artificial Sequence: Synthetic oligonucleotide
auagaguauguaagggcca

SEQ ID NO: 1508710 - RNA, 19 nt, Artificial Sequence
  Description of Artificial Sequence: Synthetic oligonucleotide
ugccgggccucaaagcugu

SEQ ID NO: 1508711 - RNA, 19 nt, Artificial Sequence
  Description of Artificial Sequence: Synthetic oligonucleotide
guacccgcagcccaggcuc

SEQ ID NO: 1508712 - RNA, 19 nt, Artificial Sequence
  Description of Artificial Sequence: Synthetic oligonucleotide
ucacccugaggcacaggca

SEQ ID NO: 1508713 - RNA, 19 nt, Artificial Sequence
  Description of Artificial Sequence: Synthetic oligonucleotide
ucgcugcuaccacaaaguc

SEQ ID NO: 1508714 - RNA, 19 nt, Artificial Sequence
  Description of Artificial Sequence: Synthetic oligonucleotide
cuaugugguccaugucagc

SEQ ID NO: 1508715 - RNA, 19 nt, Artificial Sequence
  Description of Artificial Sequence: Synthetic oligonucleotide
agcgagcggcaacauagug

SEQ ID NO: 1508716 - RNA, 19 nt, Artificial Sequence
  Description of Artificial Sequence: Synthetic oligonucleotide
uuggagcguucuauguggu

SEQ ID NO: 1508717 - RNA, 19 nt, Artificial Sequence
  Description of Artificial Sequence: Synthetic oligonucleotide
ugaucguaugaaguaguuu

SEQ ID NO: 1508718 - RNA, 19 nt, Artificial Sequence
  Description of Artificial Sequence: Synthetic oligonucleotide
cguaucggcaguuucucgg

SEQ ID NO: 1508719 - RNA, 19 nt, Artificial Sequence
  Description of Artificial Sequence: Synthetic oligonucleotide
  modified_base (15)..(15): a, c, u, g, unknown or other
guaauguuguagcunaauu

SEQ ID NO: 1508720 - RNA, 19 nt, Artificial Sequence
  Description of Artificial Sequence: Synthetic oligonucleotide
gaucagucgcugcuaccac

SEQ ID NO: 1508721 - RNA, 19 nt, Artificial Sequence
  Description of Artificial Sequence: Synthetic oligonucleotide
cacaccacgcugucuugcc

SEQ ID NO: 1508722 - RNA, 19 nt, Artificial Sequence
  Description of Artificial Sequence: Synthetic oligonucleotide
ccacuuaccaccuuauaca

SEQ ID NO: 1508723 - RNA, 19 nt, Artificial Sequence
  Description of Artificial Sequence: Synthetic oligonucleotide
acgcugucuugccaggucu

SEQ ID NO: 1508724 - RNA, 19 nt, Artificial Sequence
  Description of Artificial Sequence: Synthetic oligonucleotide
aucugcaauagugcgugca

SEQ ID NO: 1508725 - RNA, 19 nt, Artificial Sequence
  Description of Artificial Sequence: Synthetic oligonucleotide
ugcagauagcuucgacgaa

SEQ ID NO: 1508726 - RNA, 19 nt, Artificial Sequence
  Description of Artificial Sequence: Synthetic oligonucleotide
uagugcgugcagcgagcgg

SEQ ID NO: 1508727 - RNA, 19 nt, Artificial Sequence
  Description of Artificial Sequence: Synthetic oligonucleotide
ucaggcucgcggccgguca

SEQ ID NO: 1508728 - RNA, 19 nt, Artificial Sequence
  Description of Artificial Sequence: Synthetic oligonucleotide
caacacaggcuucagccga

SEQ ID NO: 1508729 - RNA, 19 nt, Artificial Sequence
  Description of Artificial Sequence: Synthetic oligonucleotide
ucagccgagggcccuugcu

SEQ ID NO: 1508730 - RNA, 19 nt, Artificial Sequence
  Description of Artificial Sequence: Synthetic oligonucleotide
cugcaauagugcgugcagc

SEQ ID NO: 1508731 - RNA, 19 nt, Artificial Sequence
  Description of Artificial Sequence: Synthetic oligonucleotide
aguacccgcagcccaggcu

SEQ ID NO: 1508732 - RNA, 19 nt, Artificial Sequence
  Description of Artificial Sequence: Synthetic oligonucleotide
uagugccgggccucaaagc

SEQ ID NO: 1508733 - RNA, 19 nt, Artificial Sequence
  Description of Artificial Sequence: Synthetic oligonucleotide
guggccuagagcccacacc

SEQ ID NO: 1508734 - RNA, 19 nt, Artificial Sequence
  Description of Artificial Sequence: Synthetic oligonucleotide
ucgacugugcuggggaagu

SEQ ID NO: 1508735 - RNA, 19 nt, Artificial Sequence
  Description of Artificial Sequence: Synthetic oligonucleotide
aaguaccgcagaguacaca

SEQ ID NO: 1508736 - RNA, 19 nt, Artificial Sequence
  Description of Artificial Sequence: Synthetic oligonucleotide
  modified_base (6)..(6): a, c, u, g, unknown or other
uagcunaauuucugcugaa

SEQ ID NO: 1508737 - RNA, 19 nt, Artificial Sequence
  Description of Artificial Sequence: Synthetic oligonucleotide
ugugcucgacugugcuggg

SEQ ID NO: 1508738 - RNA, 19 nt, Artificial Sequence
  Description of Artificial Sequence: Synthetic oligonucleotide
caaucauggaagcauaguu

SEQ ID NO: 1508739 - RNA, 19 nt, Artificial Sequence
  Description of Artificial Sequence: Synthetic oligonucleotide
ggccuaaagaggaacugcc

SEQ ID NO: 1508740 - RNA, 19 nt, Artificial Sequence
  Description of Artificial Sequence: Synthetic oligonucleotide
gccuagagcccacaccacg

SEQ ID NO: 1508741 - RNA, 19 nt, Artificial Sequence
  Description of Artificial Sequence: Synthetic oligonucleotide
gagcguucuauguggucca

SEQ ID NO: 1508742 - RNA, 19 nt, Artificial Sequence
  Description of Artificial Sequence: Synthetic oligonucleotide
caaaacuuuugagcauuuc

SEQ ID NO: 1508743 - RNA, 19 nt, Artificial Sequence
  Description of Artificial Sequence: Synthetic oligonucleotide
  modified_base (5)..(5): a, c, u, g, unknown or other
agcunaauuucugcugaaa

SEQ ID NO: 1508744 - RNA, 19 nt, Artificial Sequence
  Description of Artificial Sequence: Synthetic oligonucleotide
uggaagcauaguugccagu

SEQ ID NO: 1508745 - RNA, 19 nt, Artificial Sequence
  Description of Artificial Sequence: Synthetic oligonucleotide
guuaguauagaaggucacu

SEQ ID NO: 1508746 - RNA, 19 nt, Artificial Sequence
  Description of Artificial Sequence: Synthetic oligonucleotide
aguugccaguggccuagag

SEQ ID NO: 1508747 - RNA, 19 nt, Artificial Sequence
  Description of Artificial Sequence: Synthetic oligonucleotide
agauuagcguuugcguccu

SEQ ID NO: 1508748 - RNA, 19 nt, Artificial Sequence
  Description of Artificial Sequence: Synthetic oligonucleotide
auuagcguuugcguccuau

SEQ ID NO: 1508749 - RNA, 19 nt, Artificial Sequence
  Description of Artificial Sequence: Synthetic oligonucleotide
uggggaaguaccgcagagu

SEQ ID NO: 1508750 - RNA, 19 nt, Artificial Sequence
  Description of Artificial Sequence: Synthetic oligonucleotide
gguuuagacgcugggcugc

SEQ ID NO: 1508751 - RNA, 19 nt, Artificial Sequence
  Description of Artificial Sequence: Synthetic oligonucleotide
cuguuccgggccaaucaug

SEQ ID NO: 1508752 - RNA, 19 nt, Artificial Sequence
  Description of Artificial Sequence: Synthetic oligonucleotide
acuaaggggccguggccca

SEQ ID NO: 1508753 - RNA, 19 nt, Artificial Sequence
  Description of Artificial Sequence: Synthetic oligonucleotide
ggguuaguauagaagguca

SEQ ID NO: 1508754 - RNA, 19 nt, Artificial Sequence
  Description of Artificial Sequence: Synthetic oligonucleotide
uaucggcaguuucucggau

SEQ ID NO: 1508755 - RNA, 19 nt, Artificial Sequence
  Description of Artificial Sequence: Synthetic oligonucleotide
gguuaguauagaaggucac

SEQ ID NO: 1508756 - RNA, 19 nt, Artificial Sequence
  Description of Artificial Sequence: Synthetic oligonucleotide
aagguacuaaggggccgug

SEQ ID NO: 1508757 - RNA, 19 nt, Artificial Sequence
  Description of Artificial Sequence: Synthetic oligonucleotide
gaacaacuggagggcuggg

SEQ ID NO: 1508758 - RNA, 19 nt, Artificial Sequence
  Description of Artificial Sequence: Synthetic oligonucleotide
caguaagauuagcguuugc

SEQ ID NO: 1508759 - RNA, 19 nt, Artificial Sequence
  Description of Artificial Sequence: Synthetic oligonucleotide
cucacccucacagcucagc

SEQ ID NO: 1508760 - RNA, 19 nt, Artificial Sequence
  Description of Artificial Sequence: Synthetic oligonucleotide
ggguuuagacgcugggcug

SEQ ID NO: 1508761 - RNA, 19 nt, Artificial Sequence
  Description of Artificial Sequence: Synthetic oligonucleotide
ggggaaguaccgcagagua

SEQ ID NO: 1508762 - RNA, 19 nt, Artificial Sequence
  Description of Artificial Sequence: Synthetic oligonucleotide
cgaaagguacuaaggggcc

SEQ ID NO: 1508763 - RNA, 19 nt, Artificial Sequence
  Description of Artificial Sequence: Synthetic oligonucleotide
uggagcguucuaugugguc

SEQ ID NO: 1508764 - RNA, 19 nt, Artificial Sequence
  Description of Artificial Sequence: Synthetic oligonucleotide
caccaagagguaauguugu

SEQ ID NO: 1508765 - RNA, 19 nt, Artificial Sequence
  Description of Artificial Sequence: Synthetic oligonucleotide
gucguaucggcaguuucuc

SEQ ID NO: 1508766 - RNA, 19 nt, Artificial Sequence
  Description of Artificial Sequence: Synthetic oligonucleotide
gaaguaccgcagaguacac

SEQ ID NO: 1508767 - RNA, 19 nt, Artificial Sequence
  Description of Artificial Sequence: Synthetic oligonucleotide
guccuauccaugcccgaca

SEQ ID NO: 1508768 - RNA, 19 nt, Artificial Sequence
  Description of Artificial Sequence: Synthetic oligonucleotide
cuggggccuaaagaggaac

SEQ ID NO: 1508769 - RNA, 19 nt, Artificial Sequence
  Description of Artificial Sequence: Synthetic oligonucleotide
cucgacugugcuggggaag

SEQ ID NO: 1508770 - RNA, 19 nt, Artificial Sequence
  Description of Artificial Sequence: Synthetic oligonucleotide
agagucccucaaauucauc

SEQ ID NO: 1508771 - RNA, 19 nt, Artificial Sequence
  Description of Artificial Sequence: Synthetic oligonucleotide
ggggccguggcccacuuac

SEQ ID NO: 1508772 - RNA, 19 nt, Artificial Sequence
  Description of Artificial Sequence: Synthetic oligonucleotide
caacauagugccgggccuc

SEQ ID NO: 1508773 - RNA, 19 nt, Artificial Sequence
  Description of Artificial Sequence: Synthetic oligonucleotide
gcaauuugcccgucguauc

SEQ ID NO: 1508774 - RNA, 19 nt, Artificial Sequence
  Description of Artificial Sequence: Synthetic oligonucleotide
gcgagcggcaacauagugc

SEQ ID NO: 1508775 - RNA, 19 nt, Artificial Sequence
  Description of Artificial Sequence: Synthetic oligonucleotide
ccugccacaacugcuguac

SEQ ID NO: 1508776 - RNA, 19 nt, Artificial Sequence
  Description of Artificial Sequence: Synthetic oligonucleotide
ugcccgucguaucggcagu

SEQ ID NO: 1508777 - RNA, 19 nt, Artificial Sequence
  Description of Artificial Sequence: Synthetic oligonucleotide
gggauuauccggcccacaa

SEQ ID NO: 1508778 - RNA, 19 nt, Artificial Sequence
  Description of Artificial Sequence: Synthetic oligonucleotide
cacccucacagcucagcuc

SEQ ID NO: 1508779 - RNA, 19 nt, Artificial Sequence
  Description of Artificial Sequence: Synthetic oligonucleotide
agggcccuugcuccagucu

SEQ ID NO: 1508780 - RNA, 19 nt, Artificial Sequence
  Description of Artificial Sequence: Synthetic oligonucleotide
cagugauuccaguguccuc

SEQ ID NO: 1508781 - RNA, 19 nt, Artificial Sequence
  Description of Artificial Sequence: Synthetic oligonucleotide
gucgcugcuaccacaaagu

SEQ ID NO: 1508782 - RNA, 19 nt, Artificial Sequence
  Description of Artificial Sequence: Synthetic oligonucleotide
cacgcugucuugccagguc

SEQ ID NO: 1508783 - RNA, 19 nt, Artificial Sequence
  Description of Artificial Sequence: Synthetic oligonucleotide
agcuucgacgaaagguacu

SEQ ID NO: 1508784 - RNA, 19 nt, Artificial Sequence
  Description of Artificial Sequence: Synthetic oligonucleotide
uuuagacgcugggcugcug

SEQ ID NO: 1508785 - RNA, 19 nt, Artificial Sequence
  Description of Artificial Sequence: Synthetic oligonucleotide
accaccuuauacagcucca

SEQ ID NO: 1508786 - RNA, 19 nt, Artificial Sequence
  Description of Artificial Sequence: Synthetic oligonucleotide
auuauccggcccacaauuu

SEQ ID NO: 1508787 - RNA, 19 nt, Artificial Sequence
  Description of Artificial Sequence: Synthetic oligonucleotide
  modified_base (16)..(16): a, c, u, g, unknown or other
gguaauguuguagcunaau

SEQ ID NO: 1508788 - RNA, 19 nt, Artificial Sequence
  Description of Artificial Sequence: Synthetic oligonucleotide
cauaguugccaguggccua

SEQ ID NO: 1508789 - RNA, 19 nt, Artificial Sequence
  Description of Artificial Sequence: Synthetic oligonucleotide
gcagauagcuucgacgaaa

SEQ ID NO: 1508790 - RNA, 19 nt, Artificial Sequence
  Description of Artificial Sequence: Synthetic oligonucleotide
ccguggcccacuuaccacc

SEQ ID NO: 1508791 - RNA, 19 nt, Artificial Sequence
  Description of Artificial Sequence: Synthetic oligonucleotide
uacccgcagcccaggcuca

SEQ ID NO: 1508792 - RNA, 19 nt, Artificial Sequence
  Description of Artificial Sequence: Synthetic oligonucleotide
ugggauuauccggcccaca

SEQ ID NO: 1508793 - RNA, 19 nt, Artificial Sequence
  Description of Artificial Sequence: Synthetic oligonucleotide
ggcacugaucguaugaagu

SEQ ID NO: 1508794 - RNA, 19 nt, Artificial Sequence
  Description of Artificial Sequence: Synthetic oligonucleotide
cagccacgccuccauuagc

SEQ ID NO: 1508795 - RNA, 19 nt, Artificial Sequence
  Description of Artificial Sequence: Synthetic oligonucleotide
cuuguaggucuggguuuag

SEQ ID NO: 1508796 - RNA, 19 nt, Artificial Sequence
  Description of Artificial Sequence: Synthetic oligonucleotide
agcucucagaucagucgcu

SEQ ID NO: 1508797 - RNA, 19 nt, Artificial Sequence
  Description of Artificial Sequence: Synthetic oligonucleotide
gcggcaacauagugccggg

SEQ ID NO: 1508798 - RNA, 19 nt, Artificial Sequence
  Description of Artificial Sequence: Synthetic oligonucleotide
ggggccuaaagaggaacug

SEQ ID NO: 1508799 - RNA, 19 nt, Artificial Sequence
  Description of Artificial Sequence: Synthetic oligonucleotide
cauagugccgggccucaaa

SEQ ID NO: 1508800 - RNA, 19 nt, Artificial Sequence
  Description of Artificial Sequence: Synthetic oligonucleotide
guggguuaguauagaaggu

SEQ ID NO: 1508801 - RNA, 19 nt, Artificial Sequence
  Description of Artificial Sequence: Synthetic oligonucleotide
gugcagaauagaguaugua

SEQ ID NO: 1508802 - RNA, 19 nt, Artificial Sequence
  Description of Artificial Sequence: Synthetic oligonucleotide
ggcugggauuauccggccc

SEQ ID NO: 1508803 - RNA, 19 nt, Artificial Sequence
  Description of Artificial Sequence: Synthetic oligonucleotide
cacccaccaagagguaaug

SEQ ID NO: 1508804 - RNA, 19 nt, Artificial Sequence
  Description of Artificial Sequence: Synthetic oligonucleotide
ccaauaagccugccacaac

SEQ ID NO: 1508805 - RNA, 19 nt, Artificial Sequence
  Description of Artificial Sequence: Synthetic oligonucleotide
cugaagagucccucaaauu

SEQ ID NO: 1508806 - RNA, 19 nt, Artificial Sequence
  Description of Artificial Sequence: Synthetic oligonucleotide
gugcucgacugugcugggg

SEQ ID NO: 1508807 - RNA, 19 nt, Artificial Sequence
  Description of Artificial Sequence: Synthetic oligonucleotide
gagggcccuugcuccaguc

SEQ ID NO: 1508808 - RNA, 19 nt, Artificial Sequence
  Description of Artificial Sequence: Synthetic oligonucleotide
gugccgggccucaaagcug

SEQ ID NO: 1508809 - RNA, 19 nt, Artificial Sequence
  Description of Artificial Sequence: Synthetic oligonucleotide
uccggcccacaauuugcuu

SEQ ID NO: 1508810 - RNA, 19 nt, Artificial Sequence
  Description of Artificial Sequence: Synthetic oligonucleotide
agaguauguaagggccaua

SEQ ID NO: 1508811 - RNA, 19 nt, Artificial Sequence
  Description of Artificial Sequence: Synthetic oligonucleotide
gcucucagaucagucgcug

SEQ ID NO: 1508812 - RNA, 19 nt, Artificial Sequence
  Description of Artificial Sequence: Synthetic oligonucleotide
ggccguggcccacuuacca

SEQ ID NO: 1508813 - RNA, 19 nt, Artificial Sequence
  Description of Artificial Sequence: Synthetic oligonucleotide
cugaucguaugaaguaguu

SEQ ID NO: 1508814 - RNA, 19 nt, Artificial Sequence
  Description of Artificial Sequence: Synthetic oligonucleotide
gcuucgacgaaagguacua

SEQ ID NO: 1508815 - RNA, 19 nt, Artificial Sequence
  Description of Artificial Sequence: Synthetic oligonucleotide
aggucuggguuuagacgcu

SEQ ID NO: 1508816 - RNA, 19 nt, Artificial Sequence
  Description of Artificial Sequence: Synthetic oligonucleotide
ggauccaguggguuaguau

SEQ ID NO: 1508817 - RNA, 19 nt, Artificial Sequence
  Description of Artificial Sequence: Synthetic oligonucleotide
ggcaaaacuuuugagcauu

SEQ ID NO: 1508818 - RNA, 19 nt, Artificial Sequence
  Description of Artificial Sequence: Synthetic oligonucleotide
gcaacauagugccgggccu

SEQ ID NO: 1508819 - RNA, 19 nt, Artificial Sequence
  Description of Artificial Sequence: Synthetic oligonucleotide
guaccgcagaguacacaga

SEQ ID NO: 1508820 - RNA, 19 nt, Artificial Sequence
  Description of Artificial Sequence: Synthetic oligonucleotide
gcccaauaagccugccaca

SEQ ID NO: 1508821 - RNA, 19 nt, Artificial Sequence
  Description of Artificial Sequence: Synthetic oligonucleotide
ggcccaugagggcaaaacu

SEQ ID NO: 1508822 - RNA, 19 nt, Artificial Sequence
  Description of Artificial Sequence: Synthetic oligonucleotide
cuagagcccacaccacgcu

SEQ ID NO: 1508823 - RNA, 19 nt, Artificial Sequence
  Description of Artificial Sequence: Synthetic oligonucleotide
gcaauagugcgugcagcga

SEQ ID NO: 1508824 - RNA, 19 nt, Artificial Sequence
  Description of Artificial Sequence: Synthetic oligonucleotide
gcaccgagcuugcuuuuca

SEQ ID NO: 1508825 - RNA, 19 nt, Artificial Sequence
  Description of Artificial Sequence: Synthetic oligonucleotide
aaggggccguggcccacuu

SEQ ID NO: 1508826 - RNA, 19 nt, Artificial Sequence
  Description of Artificial Sequence: Synthetic oligonucleotide
caggcucgcggccggucac

SEQ ID NO: 1508827 - RNA, 19 nt, Artificial Sequence
  Description of Artificial Sequence: Synthetic oligonucleotide
gccguggcccacuuaccac

SEQ ID NO: 1508828 - RNA, 19 nt, Artificial Sequence
  Description of Artificial Sequence: Synthetic oligonucleotide
ccgggccaaucauggaagc

SEQ ID NO: 1508829 - RNA, 19 nt, Artificial Sequence
  Description of Artificial Sequence: Synthetic oligonucleotide
ucgcggccggucacuugcu

SEQ ID NO: 1508830 - RNA, 19 nt, Artificial Sequence
  Description of Artificial Sequence: Synthetic oligonucleotide
cugaguggugggauccagu

SEQ ID NO: 1508831 - RNA, 19 nt, Artificial Sequence
  Description of Artificial Sequence: Synthetic oligonucleotide
cuucgacgaaagguacuaa

SEQ ID NO: 1508832 - RNA, 19 nt, Artificial Sequence
  Description of Artificial Sequence: Synthetic oligonucleotide
gcagugauuccaguguccu

SEQ ID NO: 1508833 - RNA, 19 nt, Artificial Sequence
  Description of Artificial Sequence: Synthetic oligonucleotide
uaguugccaguggccuaga

SEQ ID NO: 1508834 - RNA, 19 nt, Artificial Sequence
  Description of Artificial Sequence: Synthetic oligonucleotide
cccaauaagccugccacaa

SEQ ID NO: 1508835 - RNA, 19 nt, Artificial Sequence
  Description of Artificial Sequence: Synthetic oligonucleotide
gggccauacagcagcaucu

SEQ ID NO: 1508836 - RNA, 19 nt, Artificial Sequence
  Description of Artificial Sequence: Synthetic oligonucleotide
ggauuauccggcccacaau

SEQ ID NO: 1508837 - RNA, 19 nt, Artificial Sequence
  Description of Artificial Sequence: Synthetic oligonucleotide
caugcccgacagggaagug

SEQ ID NO: 1508838 - RNA, 19 nt, Artificial Sequence
  Description of Artificial Sequence: Synthetic oligonucleotide
gggccaaucauggaagcau

SEQ ID NO: 1508839 - RNA, 19 nt, Artificial Sequence
  Description of Artificial Sequence: Synthetic oligonucleotide
ccgucguaucggcaguuuc

SEQ ID NO: 1508840 - RNA, 19 nt, Artificial Sequence
  Description of Artificial Sequence: Synthetic oligonucleotide
caggcccaauaagccugcc

SEQ ID NO: 1508841 - RNA, 19 nt, Artificial Sequence
  Description of Artificial Sequence: Synthetic oligonucleotide
aggcaccgagcuugcuuuu

SEQ ID NO: 1508842 - RNA, 19 nt, Artificial Sequence
  Description of Artificial Sequence: Synthetic oligonucleotide
agcguucuaugugguccau

SEQ ID NO: 1508843 - RNA, 19 nt, Artificial Sequence
  Description of Artificial Sequence: Synthetic oligonucleotide
gcguuugcguccuauccau

SEQ ID NO: 1508844 - RNA, 19 nt, Artificial Sequence
  Description of Artificial Sequence: Synthetic oligonucleotide
gcguucuaugugguccaug

SEQ ID NO: 1508845 - RNA, 19 nt, Artificial Sequence
  Description of Artificial Sequence: Synthetic oligonucleotide
guuuagacgcugggcugcu

SEQ ID NO: 1508846 - RNA, 19 nt, Artificial Sequence
  Description of Artificial Sequence: Synthetic oligonucleotide
ccggucacuugcugaacca

SEQ ID NO: 1508847 - RNA, 19 nt, Artificial Sequence
  Description of Artificial Sequence: Synthetic oligonucleotide
cucaggcucgcggccgguc

SEQ ID NO: 1508848 - RNA, 19 nt, Artificial Sequence
  Description of Artificial Sequence: Synthetic oligonucleotide
cguccuauccaugcccgac

SEQ ID NO: 1508849 - RNA, 19 nt, Artificial Sequence
  Description of Artificial Sequence: Synthetic oligonucleotide
gauuagcguuugcguccua

SEQ ID NO: 1508850 - RNA, 19 nt, Artificial Sequence
  Description of Artificial Sequence: Synthetic oligonucleotide
gcaacagccacgccuccau

SEQ ID NO: 1508851 - RNA, 19 nt, Artificial Sequence
  Description of Artificial Sequence: Synthetic oligonucleotide
cccaugagggcaaaacuuu

SEQ ID NO: 1508852 - RNA, 19 nt, Artificial Sequence
  Description of Artificial Sequence: Synthetic oligonucleotide
gcuguuccgggccaaucau

SEQ ID NO: 1508853 - RNA, 19 nt, Artificial Sequence
  Description of Artificial Sequence: Synthetic oligonucleotide
ccauaguucugagcucuca

SEQ ID NO: 1508854 - RNA, 19 nt, Artificial Sequence
  Description of Artificial Sequence: Synthetic oligonucleotide
caggugcagauagcuucga

SEQ ID NO: 1508855 - RNA, 19 nt, Artificial Sequence
  Description of Artificial Sequence: Synthetic oligonucleotide
gcgugcagcgagcggcaac

SEQ ID NO: 1508856 - RNA, 19 nt, Artificial Sequence
  Description of Artificial Sequence: Synthetic oligonucleotide
ggcaccgagcuugcuuuuc

SEQ ID NO: 1508857 - RNA, 19 nt, Artificial Sequence
  Description of Artificial Sequence: Synthetic oligonucleotide
gcccaugagggcaaaacuu

SEQ ID NO: 1508858 - RNA, 19 nt, Artificial Sequence
  Description of Artificial Sequence: Synthetic oligonucleotide
cguuugcguccuauccaug

SEQ ID NO: 1508859 - RNA, 19 nt, Artificial Sequence
  Description of Artificial Sequence: Synthetic oligonucleotide
cggucacuugcugaaccag

SEQ ID NO: 1508860 - RNA, 19 nt, Artificial Sequence
  Description of Artificial Sequence: Synthetic oligonucleotide
gcucgacugugcuggggaa

SEQ ID NO: 1508861 - RNA, 19 nt, Artificial Sequence
  Description of Artificial Sequence: Synthetic oligonucleotide
cagcgagcggcaacauagu

SEQ ID NO: 1508862 - RNA, 19 nt, Artificial Sequence
  Description of Artificial Sequence: Synthetic oligonucleotide
cgugcagcgagcggcaaca

SEQ ID NO: 1508863 - RNA, 19 nt, Artificial Sequence
  Description of Artificial Sequence: Synthetic oligonucleotide
ggccuagagcccacaccac

SEQ ID NO: 1508864 - RNA, 19 nt, Artificial Sequence
  Description of Artificial Sequence: Synthetic oligonucleotide
cgucguaucggcaguuucu

SEQ ID NO: 1508865 - RNA, 19 nt, Artificial Sequence
  Description of Artificial Sequence: Synthetic oligonucleotide
gcguccuauccaugcccga

SEQ ID NO: 1508866 - RNA, 19 nt, Artificial Sequence
  Description of Artificial Sequence: Synthetic oligonucleotide
gcucgcggccggucacuug

SEQ ID NO: 1508867 - RNA, 19 nt, Artificial Sequence
  Description of Artificial Sequence: Synthetic oligonucleotide
gggccguggcccacuuacc

SEQ ID NO: 1508868 - RNA, 19 nt, Artificial Sequence
  Description of Artificial Sequence: Synthetic oligonucleotide
gcccacuuaccaccuuaua

SEQ ID NO: 1508869 - RNA, 19 nt, Artificial Sequence
  Description of Artificial Sequence: Synthetic oligonucleotide
gcaaaacuuuugagcauuu

SEQ ID NO: 1508870 - RNA, 19 nt, Artificial Sequence
  Description of Artificial Sequence: Synthetic oligonucleotide
ccaugagggcaaaacuuuu

SEQ ID NO: 1508871 - RNA, 19 nt, Artificial Sequence
  Description of Artificial Sequence: Synthetic oligonucleotide
aggggccguggcccacuua

SEQ ID NO: 1508872 - RNA, 19 nt, Artificial Sequence
  Description of Artificial Sequence: Synthetic oligonucleotide
ggccggucacuugcugaac

SEQ ID NO: 1508873 - RNA, 19 nt, Artificial Sequence
  Description of Artificial Sequence: Synthetic oligonucleotide
gggauccaguggguuagua

SEQ ID NO: 1508874 - RNA, 19 nt, Artificial Sequence
  Description of Artificial Sequence: Synthetic oligonucleotide
gcacccaccaagagguaau

SEQ ID NO: 1508875 - RNA, 19 nt, Artificial Sequence
  Description of Artificial Sequence: Synthetic oligonucleotide
cggcaacauagugccgggc

SEQ ID NO: 1508876 - RNA, 19 nt, Artificial Sequence
  Description of Artificial Sequence: Synthetic oligonucleotide
caacagccacgccuccauu

SEQ ID NO: 1508877 - RNA, 19 nt, Artificial Sequence
  Description of Artificial Sequence: Synthetic oligonucleotide
ggcccuugcuccagucucu

SEQ ID NO: 1508878 - RNA, 19 nt, Artificial Sequence
  Description of Artificial Sequence: Synthetic oligonucleotide
ggcccacuuaccaccuuau

SEQ ID NO: 1508879 - RNA, 19 nt, Artificial Sequence
  Description of Artificial Sequence: Synthetic oligonucleotide
ccaugcccgacagggaagu

SEQ ID NO: 1508880 - RNA, 19 nt, Artificial Sequence
  Description of Artificial Sequence: Synthetic oligonucleotide
cucgggcccacugcaggau

SEQ ID NO: 1508881 - RNA, 19 nt, Artificial Sequence
  Description of Artificial Sequence: Synthetic oligonucleotide
cgcggccggucacuugcug

SEQ ID NO: 1508882 - RNA, 19 nt, Artificial Sequence
  Description of Artificial Sequence: Synthetic oligonucleotide
cguggcccacuuaccaccu

SEQ ID NO: 1508883 - RNA, 19 nt, Artificial Sequence
  Description of Artificial Sequence: Synthetic oligonucleotide
gcccgucguaucggcaguu

SEQ ID NO: 1508884 - RNA, 19 nt, Artificial Sequence
  Description of Artificial Sequence: Synthetic oligonucleotide
gcucaggcucgcggccggu

SEQ ID NO: 1508885 - RNA, 19 nt, Artificial Sequence
  Description of Artificial Sequence: Synthetic oligonucleotide
cccgucguaucggcaguuu

SEQ ID NO: 1508886 - RNA, 19 nt, Artificial Sequence
  Description of Artificial Sequence: Synthetic oligonucleotide
uuuacaauuagaauaaagc

SEQ ID NO: 1508887 - RNA, 19 nt, Artificial Sequence
  Description of Artificial Sequence: Synthetic oligonucleotide
aauaaagcuagacauuagg

SEQ ID NO: 1508888 - RNA, 19 nt, Artificial Sequence
  Description of Artificial Sequence: Synthetic oligonucleotide
guuauggucauauaaagcc

SEQ ID NO: 1508889 - RNA, 19 nt, Artificial Sequence
  Description of Artificial Sequence: Synthetic oligonucleotide
uuagaauaaagcuagacau

SEQ ID NO: 1508890 - RNA, 19 nt, Artificial Sequence
  Description of Artificial Sequence: Synthetic oligonucleotide
auaauaauuucucaaaacu

SEQ ID NO: 1508891 - RNA, 19 nt, Artificial Sequence
  Description of Artificial Sequence: Synthetic oligonucleotide
uaaagcuagacauuagggg

SEQ ID NO: 1508892 - RNA, 19 nt, Artificial Sequence
  Description of Artificial Sequence: Synthetic oligonucleotide
cuacguaagacacagaagc

SEQ ID NO: 1508893 - RNA, 19 nt, Artificial Sequence
  Description of Artificial Sequence: Synthetic oligonucleotide
uuacaauuagaauaaagcu

SEQ ID NO: 1508894 - RNA, 19 nt, Artificial Sequence
  Description of Artificial Sequence: Synthetic oligonucleotide
aauuagaauaaagcuagac

SEQ ID NO: 1508895 - RNA, 19 nt, Artificial Sequence
  Description of Artificial Sequence: Synthetic oligonucleotide
uuugauuuucacagaaccg

SEQ ID NO: 1508896 - RNA, 19 nt, Artificial Sequence
  Description of Artificial Sequence: Synthetic oligonucleotide
auaaguaaguuacuuuuac

SEQ ID NO: 1508897 - RNA, 19 nt, Artificial Sequence
  Description of Artificial Sequence: Synthetic oligonucleotide
agacuuacgaguuaugguc

SEQ ID NO: 1508898 - RNA, 19 nt, Artificial Sequence
  Description of Artificial Sequence: Synthetic oligonucleotide
uuaaucugagcacacauac

SEQ ID NO: 1508899 - RNA, 19 nt, Artificial Sequence
  Description of Artificial Sequence: Synthetic oligonucleotide
cuauagaugccucugaagc

SEQ ID NO: 1508900 - RNA, 19 nt, Artificial Sequence
  Description of Artificial Sequence: Synthetic oligonucleotide
ucuaaaguaacaucuguga

SEQ ID NO: 1508901 - RNA, 19 nt, Artificial Sequence
  Description of Artificial Sequence: Synthetic oligonucleotide
uucacgaaagcaaucgggg

SEQ ID NO: 1508902 - RNA, 19 nt, Artificial Sequence
  Description of Artificial Sequence: Synthetic oligonucleotide
aaagcugccuuccacaugu

SEQ ID NO: 1508903 - RNA, 19 nt, Artificial Sequence
  Description of Artificial Sequence: Synthetic oligonucleotide
aucaaauacacucuggccu

SEQ ID NO: 1508904 - RNA, 19 nt, Artificial Sequence
  Description of Artificial Sequence: Synthetic oligonucleotide
aauaagcucaagaauaucu

SEQ ID NO: 1508905 - RNA, 19 nt, Artificial Sequence
  Description of Artificial Sequence: Synthetic oligonucleotide
guacauauaaguaaguuac

SEQ ID NO: 1508906 - RNA, 19 nt, Artificial Sequence
  Description of Artificial Sequence: Synthetic oligonucleotide
aaagcaaucgggguugugg

SEQ ID NO: 1508907 - RNA, 19 nt, Artificial Sequence
  Description of Artificial Sequence: Synthetic oligonucleotide
ucuaucaaauacacucugg

SEQ ID NO: 1508908 - RNA, 19 nt, Artificial Sequence
  Description of Artificial Sequence: Synthetic oligonucleotide
uagauguacaccuucauuc

SEQ ID NO: 1508909 - RNA, 19 nt, Artificial Sequence
  Description of Artificial Sequence: Synthetic oligonucleotide
auuaacauauauucucaag

SEQ ID NO: 1508910 - RNA, 19 nt, Artificial Sequence
  Description of Artificial Sequence: Synthetic oligonucleotide
auuugauuuguauuugcag

SEQ ID NO: 1508911 - RNA, 19 nt, Artificial Sequence
  Description of Artificial Sequence: Synthetic oligonucleotide
agaaccgaaacuuugcuca

SEQ ID NO: 1508912 - RNA, 19 nt, Artificial Sequence
  Description of Artificial Sequence: Synthetic oligonucleotide
guacacauuauccaccacg

SEQ ID NO: 1508913 - RNA, 19 nt, Artificial Sequence
  Description of Artificial Sequence: Synthetic oligonucleotide
uaagacuuacgaguuaugg

SEQ ID NO: 1508914 - RNA, 19 nt, Artificial Sequence
  Description of Artificial Sequence: Synthetic oligonucleotide
auauaaguaaguuacuuuu

SEQ ID NO: 1508915 - RNA, 19 nt, Artificial Sequence
  Description of Artificial Sequence: Synthetic oligonucleotide
auugccaggucucaccacc

SEQ ID NO: 1508916 - RNA, 19 nt, Artificial Sequence
  Description of Artificial Sequence: Synthetic oligonucleotide
ucuaacaggauaacuguga

SEQ ID NO: 1508917 - RNA, 19 nt, Artificial Sequence
  Description of Artificial Sequence: Synthetic oligonucleotide
ugugguauuacacuggcuu

SEQ ID NO: 1508918 - RNA, 19 nt, Artificial Sequence
  Description of Artificial Sequence: Synthetic oligonucleotide
uucgauaucuaacaggaua

SEQ ID NO: 1508919 - RNA, 19 nt, Artificial Sequence
  Description of Artificial Sequence: Synthetic oligonucleotide
agguauagcucgcugaagg

SEQ ID NO: 1508920 - RNA, 19 nt, Artificial Sequence
  Description of Artificial Sequence: Synthetic oligonucleotide
guaguaugucuucucaucg

SEQ ID NO: 1508921 - RNA, 19 nt, Artificial Sequence
  Description of Artificial Sequence: Synthetic oligonucleotide
gaaaccacgaccauuuccc

SEQ ID NO: 1508922 - RNA, 19 nt, Artificial Sequence
  Description of Artificial Sequence: Synthetic oligonucleotide
auaucuaacaggauaacug

SEQ ID NO: 1508923 - RNA, 19 nt, Artificial Sequence
  Description of Artificial Sequence: Synthetic oligonucleotide
acauuagagcucuuugugg

SEQ ID NO: 1508924 - RNA, 19 nt, Artificial Sequence
  Description of Artificial Sequence: Synthetic oligonucleotide
cugacauuccuccucaucc

SEQ ID NO: 1508925 - RNA, 19 nt, Artificial Sequence
  Description of Artificial Sequence: Synthetic oligonucleotide
uaucaaauacacucuggcc

SEQ ID NO: 1508926 - RNA, 19 nt, Artificial Sequence
  Description of Artificial Sequence: Synthetic oligonucleotide
auaaagcuagacauuaggg

SEQ ID NO: 1508927 - RNA, 19 nt, Artificial Sequence
  Description of Artificial Sequence: Synthetic oligonucleotide
aagacuuacgaguuauggu

SEQ ID NO: 1508928 - RNA, 19 nt, Artificial Sequence
  Description of Artificial Sequence: Synthetic oligonucleotide
uguuacugguugaacaccc

SEQ ID NO: 1508929 - RNA, 19 nt, Artificial Sequence
  Description of Artificial Sequence: Synthetic oligonucleotide
uuugugguauuacacuggc

SEQ ID NO: 1508930 - RNA, 19 nt, Artificial Sequence
  Description of Artificial Sequence: Synthetic oligonucleotide
ucgauaucuaacaggauaa

SEQ ID NO: 1508931 - RNA, 19 nt, Artificial Sequence
  Description of Artificial Sequence: Synthetic oligonucleotide
auauucucaagcuacguaa

SEQ ID NO: 1508932 - RNA, 19 nt, Artificial Sequence
  Description of Artificial Sequence: Synthetic oligonucleotide
uacacauuagagcucuuug

SEQ ID NO: 1508933 - RNA, 19 nt, Artificial Sequence
  Description of Artificial Sequence: Synthetic oligonucleotide
ccuucuaucaaauacacuc

SEQ ID NO: 1508934 - RNA, 19 nt, Artificial Sequence
  Description of Artificial Sequence: Synthetic oligonucleotide
cuucacgaaagcaaucggg

SEQ ID NO: 1508935 - RNA, 19 nt, Artificial Sequence
  Description of Artificial Sequence: Synthetic oligonucleotide
cauauauucucaagcuacg

SEQ ID NO: 1508936 - RNA, 19 nt, Artificial Sequence
  Description of Artificial Sequence: Synthetic oligonucleotide
acagugcuaacacuggcgg

SEQ ID NO: 1508937 - RNA, 19 nt, Artificial Sequence
  Description of Artificial Sequence: Synthetic oligonucleotide
uauagcucgcugaaggaug

SEQ ID NO: 1508938 - RNA, 19 nt, Artificial Sequence
  Description of Artificial Sequence: Synthetic oligonucleotide
uuugaaauaacaggucucu

SEQ ID NO: 1508939 - RNA, 19 nt, Artificial Sequence
  Description of Artificial Sequence: Synthetic oligonucleotide
uucuaucaaauacacucug

SEQ ID NO: 1508940 - RNA, 19 nt, Artificial Sequence
  Description of Artificial Sequence: Synthetic oligonucleotide
aguaugucuucucaucguc

SEQ ID NO: 1508941 - RNA, 19 nt, Artificial Sequence
  Description of Artificial Sequence: Synthetic oligonucleotide
ucuauagaugccucugaag

SEQ ID NO: 1508942 - RNA, 19 nt, Artificial Sequence
  Description of Artificial Sequence: Synthetic oligonucleotide
gauuggaacggccccaucc

SEQ ID NO: 1508943 - RNA, 19 nt, Artificial Sequence
  Description of Artificial Sequence: Synthetic oligonucleotide
uauucucaagcuacguaag

SEQ ID NO: 1508944 - RNA, 19 nt, Artificial Sequence
  Description of Artificial Sequence: Synthetic oligonucleotide
ugauaaacacccacauuug

SEQ ID NO: 1508945 - RNA, 19 nt, Artificial Sequence
  Description of Artificial Sequence: Synthetic oligonucleotide
uggaaauuaaucugagcac

SEQ ID NO: 1508946 - RNA, 19 nt, Artificial Sequence
  Description of Artificial Sequence: Synthetic oligonucleotide
uagauuuccauuccaguaa

SEQ ID NO: 1508947 - RNA, 19 nt, Artificial Sequence
  Description of Artificial Sequence: Synthetic oligonucleotide
uuauggucauauaaagccu

SEQ ID NO: 1508948 - RNA, 19 nt, Artificial Sequence
  Description of Artificial Sequence: Synthetic oligonucleotide
aaugcuguuauaaaauuua

SEQ ID NO: 1508949 - RNA, 19 nt, Artificial Sequence
  Description of Artificial Sequence: Synthetic oligonucleotide
uccuucacgaaagcaaucg

SEQ ID NO: 1508950 - RNA, 19 nt, Artificial Sequence
  Description of Artificial Sequence: Synthetic oligonucleotide
uaaguaaguuacuuuuaca

SEQ ID NO: 1508951 - RNA, 19 nt, Artificial Sequence
  Description of Artificial Sequence: Synthetic oligonucleotide
ucuggauaauaauuucuca

SEQ ID NO: 1508952 - RNA, 19 nt, Artificial Sequence
  Description of Artificial Sequence: Synthetic oligonucleotide
auuugauaaacacccacau

SEQ ID NO: 1508953 - RNA, 19 nt, Artificial Sequence
  Description of Artificial Sequence: Synthetic oligonucleotide
accuucgauaucuaacagg

SEQ ID NO: 1508954 - RNA, 19 nt, Artificial Sequence
  Description of Artificial Sequence: Synthetic oligonucleotide
ucucaagcuacguaagaca

SEQ ID NO: 1508955 - RNA, 19 nt, Artificial Sequence
  Description of Artificial Sequence: Synthetic oligonucleotide
uauggucauauaaagccuc

SEQ ID NO: 1508956 - RNA, 19 nt, Artificial Sequence
  Description of Artificial Sequence: Synthetic oligonucleotide
uggucuuccgaucaugaga

SEQ ID NO: 1508957 - RNA, 19 nt, Artificial Sequence
  Description of Artificial Sequence: Synthetic oligonucleotide
uguaguaugucuucucauc

SEQ ID NO: 1508958 - RNA, 19 nt, Artificial Sequence
  Description of Artificial Sequence: Synthetic oligonucleotide
gaagaguagauguacaccu

SEQ ID NO: 1508959 - RNA, 19 nt, Artificial Sequence
  Description of Artificial Sequence: Synthetic oligonucleotide
cucuaaaguaacaucugug

SEQ ID NO: 1508960 - RNA, 19 nt, Artificial Sequence
  Description of Artificial Sequence: Synthetic oligonucleotide
uauaaguaaguuacuuuua

SEQ ID NO: 1508961 - RNA, 19 nt, Artificial Sequence
  Description of Artificial Sequence: Synthetic oligonucleotide
aagauguuacugguugaac

SEQ ID NO: 1508962 - RNA, 19 nt, Artificial Sequence
  Description of Artificial Sequence: Synthetic oligonucleotide
uauauucucaagcuacgua

SEQ ID NO: 1508963 - RNA, 19 nt, Artificial Sequence
  Description of Artificial Sequence: Synthetic oligonucleotide
ugguaaagaggacaacaca

SEQ ID NO: 1508964 - RNA, 19 nt, Artificial Sequence
  Description of Artificial Sequence: Synthetic oligonucleotide
uacguaagacacagaagcc

SEQ ID NO: 1508965 - RNA, 19 nt, Artificial Sequence
  Description of Artificial Sequence: Synthetic oligonucleotide
cucaagcuacguaagacac

SEQ ID NO: 1508966 - RNA, 19 nt, Artificial Sequence
  Description of Artificial Sequence: Synthetic oligonucleotide
acgaccauuucccugccgg

SEQ ID NO: 1508967 - RNA, 19 nt, Artificial Sequence
  Description of Artificial Sequence: Synthetic oligonucleotide
agcuacguaagacacagaa

SEQ ID NO: 1508968 - RNA, 19 nt, Artificial Sequence
  Description of Artificial Sequence: Synthetic oligonucleotide
uccauuccaguaaagaauu

SEQ ID NO: 1508969 - RNA, 19 nt, Artificial Sequence
  Description of Artificial Sequence: Synthetic oligonucleotide
caagcuacguaagacacag

SEQ ID NO: 1508970 - RNA, 19 nt, Artificial Sequence
  Description of Artificial Sequence: Synthetic oligonucleotide
uggguuccucuauagaugc

SEQ ID NO: 1508971 - RNA, 19 nt, Artificial Sequence
  Description of Artificial Sequence: Synthetic oligonucleotide
cugccaguacacauuaucc

SEQ ID NO: 1508972 - RNA, 19 nt, Artificial Sequence
  Description of Artificial Sequence: Synthetic oligonucleotide
acgaguuauggucauauaa

SEQ ID NO: 1508973 - RNA, 19 nt, Artificial Sequence
  Description of Artificial Sequence: Synthetic oligonucleotide
auaagcucaagaauaucuc

SEQ ID NO: 1508974 - RNA, 19 nt, Artificial Sequence
  Description of Artificial Sequence: Synthetic oligonucleotide
aaguguccuucacgaaagc

SEQ ID NO: 1508975 - RNA, 19 nt, Artificial Sequence
  Description of Artificial Sequence: Synthetic oligonucleotide
uguuugagcgcuguggucu

SEQ ID NO: 1508976 - RNA, 19 nt, Artificial Sequence
  Description of Artificial Sequence: Synthetic oligonucleotide
ucaaauacacucuggccuc

SEQ ID NO: 1508977 - RNA, 19 nt, Artificial Sequence
  Description of Artificial Sequence: Synthetic oligonucleotide
ucaguaagacuuacgaguu

SEQ ID NO: 1508978 - RNA, 19 nt, Artificial Sequence
  Description of Artificial Sequence: Synthetic oligonucleotide
cacauuagagcucuuugug

SEQ ID NO: 1508979 - RNA, 19 nt, Artificial Sequence
  Description of Artificial Sequence: Synthetic oligonucleotide
gaugugaugagguuguagu

SEQ ID NO: 1508980 - RNA, 19 nt, Artificial Sequence
  Description of Artificial Sequence: Synthetic oligonucleotide
aacggccccauccaggugu

SEQ ID NO: 1508981 - RNA, 19 nt, Artificial Sequence
  Description of Artificial Sequence: Synthetic oligonucleotide
aacuuugcucaccuaugug

SEQ ID NO: 1508982 - RNA, 19 nt, Artificial Sequence
  Description of Artificial Sequence: Synthetic oligonucleotide
guguguacauauaaguaag

SEQ ID NO: 1508983 - RNA, 19 nt, Artificial Sequence
  Description of Artificial Sequence: Synthetic oligonucleotide
aaagccucuuuacaugaau

SEQ ID NO: 1508984 - RNA, 19 nt, Artificial Sequence
  Description of Artificial Sequence: Synthetic oligonucleotide
ugacggcagguauagcucg

SEQ ID NO: 1508985 - RNA, 19 nt, Artificial Sequence
  Description of Artificial Sequence: Synthetic oligonucleotide
aggucucaccaccacagcg

SEQ ID NO: 1508986 - RNA, 19 nt, Artificial Sequence
  Description of Artificial Sequence: Synthetic oligonucleotide
ugcccguggaaauuaaucu

SEQ ID NO: 1508987 - RNA, 19 nt, Artificial Sequence
  Description of Artificial Sequence: Synthetic oligonucleotide
uguguacauauaaguaagu

SEQ ID NO: 1508988 - RNA, 19 nt, Artificial Sequence
  Description of Artificial Sequence: Synthetic oligonucleotide
uacacuugcaucugucugu

SEQ ID NO: 1508989 - RNA, 19 nt, Artificial Sequence
  Description of Artificial Sequence: Synthetic oligonucleotide
caggauaacugugacuucg

SEQ ID NO: 1508990 - RNA, 19 nt, Artificial Sequence
  Description of Artificial Sequence: Synthetic oligonucleotide
acuacguccgcgaagaacu

SEQ ID NO: 1508991 - RNA, 19 nt, Artificial Sequence
  Description of Artificial Sequence: Synthetic oligonucleotide
guaccuucgauaucuaaca

SEQ ID NO: 1508992 - RNA, 19 nt, Artificial Sequence
  Description of Artificial Sequence: Synthetic oligonucleotide
cugaagaguagauguacac

SEQ ID NO: 1508993 - RNA, 19 nt, Artificial Sequence
  Description of Artificial Sequence: Synthetic oligonucleotide
augagguuguaguaugucu

SEQ ID NO: 1508994 - RNA, 19 nt, Artificial Sequence
  Description of Artificial Sequence: Synthetic oligonucleotide
aagcaaucgggguuguggu

SEQ ID NO: 1508995 - RNA, 19 nt, Artificial Sequence
  Description of Artificial Sequence: Synthetic oligonucleotide
cacagaaccgaaacuuugc

SEQ ID NO: 1508996 - RNA, 19 nt, Artificial Sequence
  Description of Artificial Sequence: Synthetic oligonucleotide
cucaguaagacuuacgagu

SEQ ID NO: 1508997 - RNA, 19 nt, Artificial Sequence
  Description of Artificial Sequence: Synthetic oligonucleotide
uguggucuuccgaucauga

SEQ ID NO: 1508998 - RNA, 19 nt, Artificial Sequence
  Description of Artificial Sequence: Synthetic oligonucleotide
caaaguggccaucaauaag

SEQ ID NO: 1508999 - RNA, 19 nt, Artificial Sequence
  Description of Artificial Sequence: Synthetic oligonucleotide
aaauaacaggucucuggau

SEQ ID NO: 1509000 - RNA, 19 nt, Artificial Sequence
  Description of Artificial Sequence: Synthetic oligonucleotide
ugccaguacacauuaucca

SEQ ID NO: 1509001 - RNA, 19 nt, Artificial Sequence
  Description of Artificial Sequence: Synthetic oligonucleotide
acuagucauuaacauauau

SEQ ID NO: 1509002 - RNA, 19 nt, Artificial Sequence
  Description of Artificial Sequence: Synthetic oligonucleotide
cugguugaacacccgaugc

SEQ ID NO: 1509003 - RNA, 19 nt, Artificial Sequence
  Description of Artificial Sequence: Synthetic oligonucleotide
ugcuguuauaaaauuuaua

SEQ ID NO: 1509004 - RNA, 19 nt, Artificial Sequence
  Description of Artificial Sequence: Synthetic oligonucleotide
augagaaaacagugcuaac

SEQ ID NO: 1509005 - RNA, 19 nt, Artificial Sequence
  Description of Artificial Sequence: Synthetic oligonucleotide
gaaauuaaucugagcacac

SEQ ID NO: 1509006 - RNA, 19 nt, Artificial Sequence
  Description of Artificial Sequence: Synthetic oligonucleotide
ugcaguuccuucuaucaaa

SEQ ID NO: 1509007 - RNA, 19 nt, Artificial Sequence
  Description of Artificial Sequence: Synthetic oligonucleotide
ucaccuaugugcccgugga

SEQ ID NO: 1509008 - RNA, 19 nt, Artificial Sequence
  Description of Artificial Sequence: Synthetic oligonucleotide
gaugcuaccacgggcucgg

SEQ ID NO: 1509009 - RNA, 19 nt, Artificial Sequence
  Description of Artificial Sequence: Synthetic oligonucleotide
uaccuucgauaucuaacag

SEQ ID NO: 1509010 - RNA, 19 nt, Artificial Sequence
  Description of Artificial Sequence: Synthetic oligonucleotide
ugcgguaacucucacucuc

SEQ ID NO: 1509011 - RNA, 19 nt, Artificial Sequence
  Description of Artificial Sequence: Synthetic oligonucleotide
auuccaguaaagaauuuga

SEQ ID NO: 1509012 - RNA, 19 nt, Artificial Sequence
  Description of Artificial Sequence: Synthetic oligonucleotide
gaauaaagcuagacauuag

SEQ ID NO: 1509013 - RNA, 19 nt, Artificial Sequence
  Description of Artificial Sequence: Synthetic oligonucleotide
ucaucgucugucagucccg

SEQ ID NO: 1509014 - RNA, 19 nt, Artificial Sequence
  Description of Artificial Sequence: Synthetic oligonucleotide
cuggauaauaauuucucaa

SEQ ID NO: 1509015 - RNA, 19 nt, Artificial Sequence
  Description of Artificial Sequence: Synthetic oligonucleotide
uggaacggccccauccagg

SEQ ID NO: 1509016 - RNA, 19 nt, Artificial Sequence
  Description of Artificial Sequence: Synthetic oligonucleotide
uuccaguaaagaauuugau

SEQ ID NO: 1509017 - RNA, 19 nt, Artificial Sequence
  Description of Artificial Sequence: Synthetic oligonucleotide
aguaagacuuacgaguuau

SEQ ID NO: 1509018 - RNA, 19 nt, Artificial Sequence
  Description of Artificial Sequence: Synthetic oligonucleotide
aacacccgaugcugucugc

SEQ ID NO: 1509019 - RNA, 19 nt, Artificial Sequence
  Description of Artificial Sequence: Synthetic oligonucleotide
uggaaugcccaaagagcag

SEQ ID NO: 1509020 - RNA, 19 nt, Artificial Sequence
  Description of Artificial Sequence: Synthetic oligonucleotide
ucuguggaaugcccaaaga

SEQ ID NO: 1509021 - RNA, 19 nt, Artificial Sequence
  Description of Artificial Sequence: Synthetic oligonucleotide
agcuguuugagcgcugugg

SEQ ID NO: 1509022 - RNA, 19 nt, Artificial Sequence
  Description of Artificial Sequence: Synthetic oligonucleotide
cauuugauuuguauuugca

SEQ ID NO: 1509023 - RNA, 19 nt, Artificial Sequence
  Description of Artificial Sequence: Synthetic oligonucleotide
uaacugugacuucggcggg

SEQ ID NO: 1509024 - RNA, 19 nt, Artificial Sequence
  Description of Artificial Sequence: Synthetic oligonucleotide
uauguugacggcagguaua

SEQ ID NO: 1509025 - RNA, 19 nt, Artificial Sequence
  Description of Artificial Sequence: Synthetic oligonucleotide
uuacgaguuauggucauau

SEQ ID NO: 1509026 - RNA, 19 nt, Artificial Sequence
  Description of Artificial Sequence: Synthetic oligonucleotide
uugcucaccuaugugcccg

SEQ ID NO: 1509027 - RNA, 19 nt, Artificial Sequence
  Description of Artificial Sequence: Synthetic oligonucleotide
ugguugaacacccgaugcu

SEQ ID NO: 1509028 - RNA, 19 nt, Artificial Sequence
  Description of Artificial Sequence: Synthetic oligonucleotide
ucaugagacaucugccagu

SEQ ID NO: 1509029 - RNA, 19 nt, Artificial Sequence
  Description of Artificial Sequence: Synthetic oligonucleotide
auuggaacggccccaucca

SEQ ID NO: 1509030 - RNA, 19 nt, Artificial Sequence
  Description of Artificial Sequence: Synthetic oligonucleotide
uccgcgaagaacucugccu

SEQ ID NO: 1509031 - RNA, 19 nt, Artificial Sequence
  Description of Artificial Sequence: Synthetic oligonucleotide
uaacaggauaacugugacu

SEQ ID NO: 1509032 - RNA, 19 nt, Artificial Sequence
  Description of Artificial Sequence: Synthetic oligonucleotide
aguacacauuauccaccac

SEQ ID NO: 1509033 - RNA, 19 nt, Artificial Sequence
  Description of Artificial Sequence: Synthetic oligonucleotide
uugacggcagguauagcuc

SEQ ID NO: 1509034 - RNA, 19 nt, Artificial Sequence
  Description of Artificial Sequence: Synthetic oligonucleotide
gucagucccgcauugccag

SEQ ID NO: 1509035 - RNA, 19 nt, Artificial Sequence
  Description of Artificial Sequence: Synthetic oligonucleotide
accgaaacuuugcucaccu

SEQ ID NO: 1509036 - RNA, 19 nt, Artificial Sequence
  Description of Artificial Sequence: Synthetic oligonucleotide
ucuacacucccugaagagu

SEQ ID NO: 1509037 - RNA, 19 nt, Artificial Sequence
  Description of Artificial Sequence: Synthetic oligonucleotide
ucacgaaagcaaucggggu

SEQ ID NO: 1509038 - RNA, 19 nt, Artificial Sequence
  Description of Artificial Sequence: Synthetic oligonucleotide
auauuacacauuagagcuc

SEQ ID NO: 1509039 - RNA, 19 nt, Artificial Sequence
  Description of Artificial Sequence: Synthetic oligonucleotide
agugcuaacacuggcgggu

SEQ ID NO: 1509040 - RNA, 19 nt, Artificial Sequence
  Description of Artificial Sequence: Synthetic oligonucleotide
ugaugagguuguaguaugu

SEQ ID NO: 1509041 - RNA, 19 nt, Artificial Sequence
  Description of Artificial Sequence: Synthetic oligonucleotide
auucucaagcuacguaaga

SEQ ID NO: 1509042 - RNA, 19 nt, Artificial Sequence
  Description of Artificial Sequence: Synthetic oligonucleotide
aguuacuuuuacaauuaga

SEQ ID NO: 1509043 - RNA, 19 nt, Artificial Sequence
  Description of Artificial Sequence: Synthetic oligonucleotide
ggaaauuaaucugagcaca

SEQ ID NO: 1509044 - RNA, 19 nt, Artificial Sequence
  Description of Artificial Sequence: Synthetic oligonucleotide
ccgaucaugagacaucugc

SEQ ID NO: 1509045 - RNA, 19 nt, Artificial Sequence
  Description of Artificial Sequence: Synthetic oligonucleotide
uacacucuggccucaguaa

SEQ ID NO: 1509046 - RNA, 19 nt, Artificial Sequence
  Description of Artificial Sequence: Synthetic oligonucleotide
guggaaugcccaaagagca

SEQ ID NO: 1509047 - RNA, 19 nt, Artificial Sequence
  Description of Artificial Sequence: Synthetic oligonucleotide
aauacacucuggccucagu

SEQ ID NO: 1509048 - RNA, 19 nt, Artificial Sequence
  Description of Artificial Sequence: Synthetic oligonucleotide
acguaagacacagaagcca

SEQ ID NO: 1509049 - RNA, 19 nt, Artificial Sequence
  Description of Artificial Sequence: Synthetic oligonucleotide
gagguggguuccucuauag

SEQ ID NO: 1509050 - RNA, 19 nt, Artificial Sequence
  Description of Artificial Sequence: Synthetic oligonucleotide
ggauaauaauuucucaaaa

SEQ ID NO: 1509051 - RNA, 19 nt, Artificial Sequence
  Description of Artificial Sequence: Synthetic oligonucleotide
aguggccaucaauaagcuc

SEQ ID NO: 1509052 - RNA, 19 nt, Artificial Sequence
  Description of Artificial Sequence: Synthetic oligonucleotide
gcuaccacgggcucggccg

SEQ ID NO: 1509053 - RNA, 19 nt, Artificial Sequence
  Description of Artificial Sequence: Synthetic oligonucleotide
gagguuguaguaugucuuc

SEQ ID NO: 1509054 - RNA, 19 nt, Artificial Sequence
  Description of Artificial Sequence: Synthetic oligonucleotide
agcacacauacauguauau

SEQ ID NO: 1509055 - RNA, 19 nt, Artificial Sequence
  Description of Artificial Sequence: Synthetic oligonucleotide
aaaccacgaccauuucccu

SEQ ID NO: 1509056 - RNA, 19 nt, Artificial Sequence
  Description of Artificial Sequence: Synthetic oligonucleotide
auguugacggcagguauag

SEQ ID NO: 1509057 - RNA, 19 nt, Artificial Sequence
  Description of Artificial Sequence: Synthetic oligonucleotide
acgccacagggauuggaac

SEQ ID NO: 1509058 - RNA, 19 nt, Artificial Sequence
  Description of Artificial Sequence: Synthetic oligonucleotide
gauaucuaacaggauaacu

SEQ ID NO: 1509059 - RNA, 19 nt, Artificial Sequence
  Description of Artificial Sequence: Synthetic oligonucleotide
uacugguugaacacccgau

SEQ ID NO: 1509060 - RNA, 19 nt, Artificial Sequence
  Description of Artificial Sequence: Synthetic oligonucleotide
ugugacuucggcgggcacc

SEQ ID NO: 1509061 - RNA, 19 nt, Artificial Sequence
  Description of Artificial Sequence: Synthetic oligonucleotide
ugggacuacguccgcgaag

SEQ ID NO: 1509062 - RNA, 19 nt, Artificial Sequence
  Description of Artificial Sequence: Synthetic oligonucleotide
acgaaagcaaucgggguug

SEQ ID NO: 1509063 - RNA, 19 nt, Artificial Sequence
  Description of Artificial Sequence: Synthetic oligonucleotide
ccuucgauaucuaacagga

SEQ ID NO: 1509064 - RNA, 19 nt, Artificial Sequence
  Description of Artificial Sequence: Synthetic oligonucleotide
ucuuuacaugaauuugauu

SEQ ID NO: 1509065 - RNA, 19 nt, Artificial Sequence
  Description of Artificial Sequence: Synthetic oligonucleotide
agcugccuuccacaugugg

SEQ ID NO: 1509066 - RNA, 19 nt, Artificial Sequence
  Description of Artificial Sequence: Synthetic oligonucleotide
ugcugucugcaaucuugcg

SEQ ID NO: 1509067 - RNA, 19 nt, Artificial Sequence
  Description of Artificial Sequence: Synthetic oligonucleotide
gaacacccgaugcugucug

SEQ ID NO: 1509068 - RNA, 19 nt, Artificial Sequence
  Description of Artificial Sequence: Synthetic oligonucleotide
uuagagcucuuugugguau

SEQ ID NO: 1509069 - RNA, 19 nt, Artificial Sequence
  Description of Artificial Sequence: Synthetic oligonucleotide
uuggaacggccccauccag

SEQ ID NO: 1509070 - RNA, 19 nt, Artificial Sequence
  Description of Artificial Sequence: Synthetic oligonucleotide
auacacucuggccucagua

SEQ ID NO: 1509071 - RNA, 19 nt, Artificial Sequence
  Description of Artificial Sequence: Synthetic oligonucleotide
ucggcgggcaccgaaacca

SEQ ID NO: 1509072 - RNA, 19 nt, Artificial Sequence
  Description of Artificial Sequence: Synthetic oligonucleotide
aaauacacucuggccucag

SEQ ID NO: 1509073 - RNA, 19 nt, Artificial Sequence
  Description of Artificial Sequence: Synthetic oligonucleotide
gguaccuucgauaucuaac

SEQ ID NO: 1509074 - RNA, 19 nt, Artificial Sequence
  Description of Artificial Sequence: Synthetic oligonucleotide
cagaaccgaaacuuugcuc

SEQ ID NO: 1509075 - RNA, 19 nt, Artificial Sequence
  Description of Artificial Sequence: Synthetic oligonucleotide
ugaaggaugugaugagguu

SEQ ID NO: 1509076 - RNA, 19 nt, Artificial Sequence
  Description of Artificial Sequence: Synthetic oligonucleotide
cugggauaaacaaugcugu

SEQ ID NO: 1509077 - RNA, 19 nt, Artificial Sequence
  Description of Artificial Sequence: Synthetic oligonucleotide
ucuauguugacggcaggua

SEQ ID NO: 1509078 - RNA, 19 nt, Artificial Sequence
  Description of Artificial Sequence: Synthetic oligonucleotide
gacuuacgaguuaugguca

SEQ ID NO: 1509079 - RNA, 19 nt, Artificial Sequence
  Description of Artificial Sequence: Synthetic oligonucleotide
cugcaggucacuuccugac

SEQ ID NO: 1509080 - RNA, 19 nt, Artificial Sequence
  Description of Artificial Sequence: Synthetic oligonucleotide
aggaaauauuacacauuag

SEQ ID NO: 1509081 - RNA, 19 nt, Artificial Sequence
  Description of Artificial Sequence: Synthetic oligonucleotide
gaaccgaaacuuugcucac

SEQ ID NO: 1509082 - RNA, 19 nt, Artificial Sequence
  Description of Artificial Sequence: Synthetic oligonucleotide
gacaucuugcugacauucc

SEQ ID NO: 1509083 - RNA, 19 nt, Artificial Sequence
  Description of Artificial Sequence: Synthetic oligonucleotide
guacaccuucauuccagcc

SEQ ID NO: 1509084 - RNA, 19 nt, Artificial Sequence
  Description of Artificial Sequence: Synthetic oligonucleotide
acccacauuugauuuguau

SEQ ID NO: 1509085 - RNA, 19 nt, Artificial Sequence
  Description of Artificial Sequence: Synthetic oligonucleotide
guuacugguugaacacccg

SEQ ID NO: 1509086 - RNA, 19 nt, Artificial Sequence
  Description of Artificial Sequence: Synthetic oligonucleotide
gugguauuacacuggcuuc

SEQ ID NO: 1509087 - RNA, 19 nt, Artificial Sequence
  Description of Artificial Sequence: Synthetic oligonucleotide
ugcaaucuugcgguaacuc

SEQ ID NO: 1509088 - RNA, 19 nt, Artificial Sequence
  Description of Artificial Sequence: Synthetic oligonucleotide
guugugguaccuucgauau

SEQ ID NO: 1509089 - RNA, 19 nt, Artificial Sequence
  Description of Artificial Sequence: Synthetic oligonucleotide
cuucaugcggccagcugug

SEQ ID NO: 1509090 - RNA, 19 nt, Artificial Sequence
  Description of Artificial Sequence: Synthetic oligonucleotide
gccaguacacauuauccac

SEQ ID NO: 1509091 - RNA, 19 nt, Artificial Sequence
  Description of Artificial Sequence: Synthetic oligonucleotide
ccaguacacauuauccacc

SEQ ID NO: 1509092 - RNA, 19 nt, Artificial Sequence
  Description of Artificial Sequence: Synthetic oligonucleotide
cagggauuggaacggcccc

SEQ ID NO: 1509093 - RNA, 19 nt, Artificial Sequence
  Description of Artificial Sequence: Synthetic oligonucleotide
gugacuucggcgggcaccg

SEQ ID NO: 1509094 - RNA, 19 nt, Artificial Sequence
  Description of Artificial Sequence: Synthetic oligonucleotide
aggauaacugugacuucgg

SEQ ID NO: 1509095 - RNA, 19 nt, Artificial Sequence
  Description of Artificial Sequence: Synthetic oligonucleotide
caguacacauuauccacca

SEQ ID NO: 1509096 - RNA, 19 nt, Artificial Sequence
  Description of Artificial Sequence: Synthetic oligonucleotide
guggguuccucuauagaug

SEQ ID NO: 1509097 - RNA, 19 nt, Artificial Sequence
  Description of Artificial Sequence: Synthetic oligonucleotide
guuucgucuuccucagaac

SEQ ID NO: 1509098 - RNA, 19 nt, Artificial Sequence
  Description of Artificial Sequence: Synthetic oligonucleotide
guaacaucugugagaaaca

SEQ ID NO: 1509099 - RNA, 19 nt, Artificial Sequence
  Description of Artificial Sequence: Synthetic oligonucleotide
cauauaaguaaguuacuuu

SEQ ID NO: 1509100 - RNA, 19 nt, Artificial Sequence
  Description of Artificial Sequence: Synthetic oligonucleotide
cagugcuaacacuggcggg

SEQ ID NO: 1509101 - RNA, 19 nt, Artificial Sequence
  Description of Artificial Sequence: Synthetic oligonucleotide
cuucuaucaaauacacucu

SEQ ID NO: 1509102 - RNA, 19 nt, Artificial Sequence
  Description of Artificial Sequence: Synthetic oligonucleotide
aguguccuucacgaaagca

SEQ ID NO: 1509103 - RNA, 19 nt, Artificial Sequence
  Description of Artificial Sequence: Synthetic oligonucleotide
cauuccagccucucuccac

SEQ ID NO: 1509104 - RNA, 19 nt, Artificial Sequence
  Description of Artificial Sequence: Synthetic oligonucleotide
gacuacguccgcgaagaac

SEQ ID NO: 1509105 - RNA, 19 nt, Artificial Sequence
  Description of Artificial Sequence: Synthetic oligonucleotide
cagaggaaauauuacacau

SEQ ID NO: 1509106 - RNA, 19 nt, Artificial Sequence
  Description of Artificial Sequence: Synthetic oligonucleotide
gccaaugagaaaacagugc

SEQ ID NO: 1509107 - RNA, 19 nt, Artificial Sequence
  Description of Artificial Sequence: Synthetic oligonucleotide
uaugugcccguggaaauua

SEQ ID NO: 1509108 - RNA, 19 nt, Artificial Sequence
  Description of Artificial Sequence: Synthetic oligonucleotide
aucuugcgguaacucucac

SEQ ID NO: 1509109 - RNA, 19 nt, Artificial Sequence
  Description of Artificial Sequence: Synthetic oligonucleotide
aagccucuuuacaugaauu

SEQ ID NO: 1509110 - RNA, 19 nt, Artificial Sequence
  Description of Artificial Sequence: Synthetic oligonucleotide
gguugaacacccgaugcug

SEQ ID NO: 1509111 - RNA, 19 nt, Artificial Sequence
  Description of Artificial Sequence: Synthetic oligonucleotide
acuuacgaguuauggucau

SEQ ID NO: 1509112 - RNA, 19 nt, Artificial Sequence
  Description of Artificial Sequence: Synthetic oligonucleotide
gcaggucacuuccugacgc

SEQ ID NO: 1509113 - RNA, 19 nt, Artificial Sequence
  Description of Artificial Sequence: Synthetic oligonucleotide
cauguauauacacuugcau

SEQ ID NO: 1509114 - RNA, 19 nt, Artificial Sequence
  Description of Artificial Sequence: Synthetic oligonucleotide
gcugguaaagaggacaaca

SEQ ID NO: 1509115 - RNA, 19 nt, Artificial Sequence
  Description of Artificial Sequence: Synthetic oligonucleotide
accgaaaccacgaccauuu

SEQ ID NO: 1509116 - RNA, 19 nt, Artificial Sequence
  Description of Artificial Sequence: Synthetic oligonucleotide
uucggcgggcaccgaaacc

SEQ ID NO: 1509117 - RNA, 19 nt, Artificial Sequence
  Description of Artificial Sequence: Synthetic oligonucleotide
caauaagcucaagaauauc

SEQ ID NO: 1509118 - RNA, 19 nt, Artificial Sequence
  Description of Artificial Sequence: Synthetic oligonucleotide
ugcuaccacgggcucggcc

SEQ ID NO: 1509119 - RNA, 19 nt, Artificial Sequence
  Description of Artificial Sequence: Synthetic oligonucleotide
ccucaguaagacuuacgag

SEQ ID NO: 1509120 - RNA, 19 nt, Artificial Sequence
  Description of Artificial Sequence: Synthetic oligonucleotide
accuaugugcccguggaaa

SEQ ID NO: 1509121 - RNA, 19 nt, Artificial Sequence
  Description of Artificial Sequence: Synthetic oligonucleotide
acacuugcaucugucugug

SEQ ID NO: 1509122 - RNA, 19 nt, Artificial Sequence
  Description of Artificial Sequence: Synthetic oligonucleotide
cuuccugacgccacaggga

SEQ ID NO: 1509123 - RNA, 19 nt, Artificial Sequence
  Description of Artificial Sequence: Synthetic oligonucleotide
ggauaacugugacuucggc

SEQ ID NO: 1509124 - RNA, 19 nt, Artificial Sequence
  Description of Artificial Sequence: Synthetic oligonucleotide
ucgggguugugguaccuuc

SEQ ID NO: 1509125 - RNA, 19 nt, Artificial Sequence
  Description of Artificial Sequence: Synthetic oligonucleotide
caggucacuuccugacgcc

SEQ ID NO: 1509126 - RNA, 19 nt, Artificial Sequence
  Description of Artificial Sequence: Synthetic oligonucleotide
gauaaacaaugcuguuaua

SEQ ID NO: 1509127 - RNA, 19 nt, Artificial Sequence
  Description of Artificial Sequence: Synthetic oligonucleotide
guaagacuuacgaguuaug

SEQ ID NO: 1509128 - RNA, 19 nt, Artificial Sequence
  Description of Artificial Sequence: Synthetic oligonucleotide
uugagcgcuguggucuucc

SEQ ID NO: 1509129 - RNA, 19 nt, Artificial Sequence
  Description of Artificial Sequence: Synthetic oligonucleotide
caaucgggguugugguacc

SEQ ID NO: 1509130 - RNA, 19 nt, Artificial Sequence
  Description of Artificial Sequence: Synthetic oligonucleotide
ugugcccguggaaauuaau

SEQ ID NO: 1509131 - RNA, 19 nt, Artificial Sequence
  Description of Artificial Sequence: Synthetic oligonucleotide
gcuacguaagacacagaag

SEQ ID NO: 1509132 - RNA, 19 nt, Artificial Sequence
  Description of Artificial Sequence: Synthetic oligonucleotide
auaucuccuucuguggaau

SEQ ID NO: 1509133 - RNA, 19 nt, Artificial Sequence
  Description of Artificial Sequence: Synthetic oligonucleotide
gguuguaguaugucuucuc

SEQ ID NO: 1509134 - RNA, 19 nt, Artificial Sequence
  Description of Artificial Sequence: Synthetic oligonucleotide
agguggguuccucuauaga

SEQ ID NO: 1509135 - RNA, 19 nt, Artificial Sequence
  Description of Artificial Sequence: Synthetic oligonucleotide
uccgaucaugagacaucug

SEQ ID NO: 1509136 - RNA, 19 nt, Artificial Sequence
  Description of Artificial Sequence: Synthetic oligonucleotide
gcccguggaaauuaaucug

SEQ ID NO: 1509137 - RNA, 19 nt, Artificial Sequence
  Description of Artificial Sequence: Synthetic oligonucleotide
ucccgcauugccaggucuc

SEQ ID NO: 1509138 - RNA, 19 nt, Artificial Sequence
  Description of Artificial Sequence: Synthetic oligonucleotide
agguuguaguaugucuucu

SEQ ID NO: 1509139 - RNA, 19 nt, Artificial Sequence
  Description of Artificial Sequence: Synthetic oligonucleotide
gccucuuuacaugaauuug

SEQ ID NO: 1509140 - RNA, 19 nt, Artificial Sequence
  Description of Artificial Sequence: Synthetic oligonucleotide
ggaugugaugagguuguag

SEQ ID NO: 1509141 - RNA, 19 nt, Artificial Sequence
  Description of Artificial Sequence: Synthetic oligonucleotide
augcuguuauaaaauuuau

SEQ ID NO: 1509142 - RNA, 19 nt, Artificial Sequence
  Description of Artificial Sequence: Synthetic oligonucleotide
ggcaccgaaaccacgacca

SEQ ID NO: 1509143 - RNA, 19 nt, Artificial Sequence
  Description of Artificial Sequence: Synthetic oligonucleotide
auagcucgcugaaggaugu

SEQ ID NO: 1509144 - RNA, 19 nt, Artificial Sequence
  Description of Artificial Sequence: Synthetic oligonucleotide
guccgcgaagaacucugcc

SEQ ID NO: 1509145 - RNA, 19 nt, Artificial Sequence
  Description of Artificial Sequence: Synthetic oligonucleotide
gguugugguaccuucgaua

SEQ ID NO: 1509146 - RNA, 19 nt, Artificial Sequence
  Description of Artificial Sequence: Synthetic oligonucleotide
gcucuuugugguauuacac

SEQ ID NO: 1509147 - RNA, 19 nt, Artificial Sequence
  Description of Artificial Sequence: Synthetic oligonucleotide
uacgaguuauggucauaua

SEQ ID NO: 1509148 - RNA, 19 nt, Artificial Sequence
  Description of Artificial Sequence: Synthetic oligonucleotide
ccuucacgaaagcaaucgg

SEQ ID NO: 1509149 - RNA, 19 nt, Artificial Sequence
  Description of Artificial Sequence: Synthetic oligonucleotide
agucccgcauugccagguc

SEQ ID NO: 1509150 - RNA, 19 nt, Artificial Sequence
  Description of Artificial Sequence: Synthetic oligonucleotide
uugugguaccuucgauauc

SEQ ID NO: 1509151 - RNA, 19 nt, Artificial Sequence
  Description of Artificial Sequence: Synthetic oligonucleotide
gguggguuccucuauagau

SEQ ID NO: 1509152 - RNA, 19 nt, Artificial Sequence
  Description of Artificial Sequence: Synthetic oligonucleotide
gccacagggauuggaacgg

SEQ ID NO: 1509153 - RNA, 19 nt, Artificial Sequence
  Description of Artificial Sequence: Synthetic oligonucleotide
ccaaugagaaaacagugcu

SEQ ID NO: 1509154 - RNA, 19 nt, Artificial Sequence
  Description of Artificial Sequence: Synthetic oligonucleotide
agcucgcugaaggauguga

SEQ ID NO: 1509155 - RNA, 19 nt, Artificial Sequence
  Description of Artificial Sequence: Synthetic oligonucleotide
gagcucuuugugguauuac

SEQ ID NO: 1509156 - RNA, 19 nt, Artificial Sequence
  Description of Artificial Sequence: Synthetic oligonucleotide
ggcgggucaguggaggugg

SEQ ID NO: 1509157 - RNA, 19 nt, Artificial Sequence
  Description of Artificial Sequence: Synthetic oligonucleotide
cgaaaccacgaccauuucc

SEQ ID NO: 1509158 - RNA, 19 nt, Artificial Sequence
  Description of Artificial Sequence: Synthetic oligonucleotide
cacuggccucuaaaguaac

SEQ ID NO: 1509159 - RNA, 19 nt, Artificial Sequence
  Description of Artificial Sequence: Synthetic oligonucleotide
aacuagucauuaacauaua

SEQ ID NO: 1509160 - RNA, 19 nt, Artificial Sequence
  Description of Artificial Sequence: Synthetic oligonucleotide
gaaagcaaucgggguugug

SEQ ID NO: 1509161 - RNA, 19 nt, Artificial Sequence
  Description of Artificial Sequence: Synthetic oligonucleotide
cuucggcgggcaccgaaac

SEQ ID NO: 1509162 - RNA, 19 nt, Artificial Sequence
  Description of Artificial Sequence: Synthetic oligonucleotide
aaucgggguugugguaccu

SEQ ID NO: 1509163 - RNA, 19 nt, Artificial Sequence
  Description of Artificial Sequence: Synthetic oligonucleotide
cacagcgacgugcacaucu

SEQ ID NO: 1509164 - RNA, 19 nt, Artificial Sequence
  Description of Artificial Sequence: Synthetic oligonucleotide
gacgccacagggauuggaa

SEQ ID NO: 1509165 - RNA, 19 nt, Artificial Sequence
  Description of Artificial Sequence: Synthetic oligonucleotide
cagguauagcucgcugaag

SEQ ID NO: 1509166 - RNA, 19 nt, Artificial Sequence
  Description of Artificial Sequence: Synthetic oligonucleotide
gggacuacguccgcgaaga

SEQ ID NO: 1509167 - RNA, 19 nt, Artificial Sequence
  Description of Artificial Sequence: Synthetic oligonucleotide
caucgucugucagucccgc

SEQ ID NO: 1509168 - RNA, 19 nt, Artificial Sequence
  Description of Artificial Sequence: Synthetic oligonucleotide
agcgacgugcacaucugcu

SEQ ID NO: 1509169 - RNA, 19 nt, Artificial Sequence
  Description of Artificial Sequence: Synthetic oligonucleotide
gggauaaacaaugcuguua

SEQ ID NO: 1509170 - RNA, 19 nt, Artificial Sequence
  Description of Artificial Sequence: Synthetic oligonucleotide
ccauuucccugccggaugc

SEQ ID NO: 1509171 - RNA, 19 nt, Artificial Sequence
  Description of Artificial Sequence: Synthetic oligonucleotide
cccguggaaauuaaucuga

SEQ ID NO: 1509172 - RNA, 19 nt, Artificial Sequence
  Description of Artificial Sequence: Synthetic oligonucleotide
ccguggaaauuaaucugag

SEQ ID NO: 1509173 - RNA, 19 nt, Artificial Sequence
  Description of Artificial Sequence: Synthetic oligonucleotide
cgaguuauggucauauaaa

SEQ ID NO: 1509174 - RNA, 19 nt, Artificial Sequence
  Description of Artificial Sequence: Synthetic oligonucleotide
cuauguugacggcagguau

SEQ ID NO: 1509175 - RNA, 19 nt, Artificial Sequence
  Description of Artificial Sequence: Synthetic oligonucleotide
ggaugcuaccacgggcucg

SEQ ID NO: 1509176 - RNA, 19 nt, Artificial Sequence
  Description of Artificial Sequence: Synthetic oligonucleotide
ugacgccacagggauugga

SEQ ID NO: 1509177 - RNA, 19 nt, Artificial Sequence
  Description of Artificial Sequence: Synthetic oligonucleotide
cagcgacgugcacaucugc

SEQ ID NO: 1509178 - RNA, 19 nt, Artificial Sequence
  Description of Artificial Sequence: Synthetic oligonucleotide
agccacuucagaggaaaua

SEQ ID NO: 1509179 - RNA, 19 nt, Artificial Sequence
  Description of Artificial Sequence: Synthetic oligonucleotide
cuaccacgggcucggccgc

SEQ ID NO: 1509180 - RNA, 19 nt, Artificial Sequence
  Description of Artificial Sequence: Synthetic oligonucleotide
agcaaucgggguuguggua

SEQ ID NO: 1509181 - RNA, 19 nt, Artificial Sequence
  Description of Artificial Sequence: Synthetic oligonucleotide
cuguggucuuccgaucaug

SEQ ID NO: 1509182 - RNA, 19 nt, Artificial Sequence
  Description of Artificial Sequence: Synthetic oligonucleotide
acagcgacgugcacaucug

SEQ ID NO: 1509183 - RNA, 19 nt, Artificial Sequence
  Description of Artificial Sequence: Synthetic oligonucleotide
gcagguauagcucgcugaa

SEQ ID NO: 1509184 - RNA, 19 nt, Artificial Sequence
  Description of Artificial Sequence: Synthetic oligonucleotide
cacgaccauuucccugccg

SEQ ID NO: 1509185 - RNA, 19 nt, Artificial Sequence
  Description of Artificial Sequence: Synthetic oligonucleotide
gccggaugcuaccacgggc

SEQ ID NO: 1509186 - RNA, 19 nt, Artificial Sequence
  Description of Artificial Sequence: Synthetic oligonucleotide
gcaaucuugcgguaacucu

SEQ ID NO: 1509187 - RNA, 19 nt, Artificial Sequence
  Description of Artificial Sequence: Synthetic oligonucleotide
gccucuaaaguaacaucug

SEQ ID NO: 1509188 - RNA, 19 nt, Artificial Sequence
  Description of Artificial Sequence: Synthetic oligonucleotide
cuacguccgcgaagaacuc

SEQ ID NO: 1509189 - RNA, 19 nt, Artificial Sequence
  Description of Artificial Sequence: Synthetic oligonucleotide
agaugccucugaagcacug

SEQ ID NO: 1509190 - RNA, 19 nt, Artificial Sequence
  Description of Artificial Sequence: Synthetic oligonucleotide
ugcggccagcugugaaagc

SEQ ID NO: 1509191 - RNA, 19 nt, Artificial Sequence
  Description of Artificial Sequence: Synthetic oligonucleotide
ggucucaccaccacagcga

SEQ ID NO: 1509192 - RNA, 19 nt, Artificial Sequence
  Description of Artificial Sequence: Synthetic oligonucleotide
uggcgggucaguggaggug

SEQ ID NO: 1509193 - RNA, 19 nt, Artificial Sequence
  Description of Artificial Sequence: Synthetic oligonucleotide
gacuucggcgggcaccgaa

SEQ ID NO: 1509194 - RNA, 19 nt, Artificial Sequence
  Description of Artificial Sequence: Synthetic oligonucleotide
cacugggauaaacaaugcu

SEQ ID NO: 1509195 - RNA, 19 nt, Artificial Sequence
  Description of Artificial Sequence: Synthetic oligonucleotide
ugcucaccuaugugcccgu

SEQ ID NO: 1509196 - RNA, 19 nt, Artificial Sequence
  Description of Artificial Sequence: Synthetic oligonucleotide
gaacggccccauccaggug

SEQ ID NO: 1509197 - RNA, 19 nt, Artificial Sequence
  Description of Artificial Sequence: Synthetic oligonucleotide
guaugucuucucaucgucu

SEQ ID NO: 1509198 - RNA, 19 nt, Artificial Sequence
  Description of Artificial Sequence: Synthetic oligonucleotide
cugcucuauguugacggca

SEQ ID NO: 1509199 - RNA, 19 nt, Artificial Sequence
  Description of Artificial Sequence: Synthetic oligonucleotide
cugagcacacauacaugua

SEQ ID NO: 1509200 - RNA, 19 nt, Artificial Sequence
  Description of Artificial Sequence: Synthetic oligonucleotide
cacgaaagcaaucgggguu

SEQ ID NO: 1509201 - RNA, 19 nt, Artificial Sequence
  Description of Artificial Sequence: Synthetic oligonucleotide
guauagcucgcugaaggau

SEQ ID NO: 1509202 - RNA, 19 nt, Artificial Sequence
  Description of Artificial Sequence: Synthetic oligonucleotide
aucgucugucagucccgca

SEQ ID NO: 1509203 - RNA, 19 nt, Artificial Sequence
  Description of Artificial Sequence: Synthetic oligonucleotide
gcuguuugagcgcuguggu

SEQ ID NO: 1509204 - RNA, 19 nt, Artificial Sequence
  Description of Artificial Sequence: Synthetic oligonucleotide
cgcauugccaggucucacc

SEQ ID NO: 1509205 - RNA, 19 nt, Artificial Sequence
  Description of Artificial Sequence: Synthetic oligonucleotide
caaauacacucuggccuca

SEQ ID NO: 1509206 - RNA, 19 nt, Artificial Sequence
  Description of Artificial Sequence: Synthetic oligonucleotide
ggccgcgcugguaaagagg

SEQ ID NO: 1509207 - RNA, 19 nt, Artificial Sequence
  Description of Artificial Sequence: Synthetic oligonucleotide
gcugggacuacguccgcga

SEQ ID NO: 1509208 - RNA, 19 nt, Artificial Sequence
  Description of Artificial Sequence: Synthetic oligonucleotide
guccuucacgaaagcaauc

SEQ ID NO: 1509209 - RNA, 19 nt, Artificial Sequence
  Description of Artificial Sequence: Synthetic oligonucleotide
gggguugugguaccuucga

SEQ ID NO: 1509210 - RNA, 19 nt, Artificial Sequence
  Description of Artificial Sequence: Synthetic oligonucleotide
gcacugggauaaacaaugc

SEQ ID NO: 1509211 - RNA, 19 nt, Artificial Sequence
  Description of Artificial Sequence: Synthetic oligonucleotide
gccgcgcugguaaagagga

SEQ ID NO: 1509212 - RNA, 19 nt, Artificial Sequence
  Description of Artificial Sequence: Synthetic oligonucleotide
aagcuacguaagacacaga

SEQ ID NO: 1509213 - RNA, 19 nt, Artificial Sequence
  Description of Artificial Sequence: Synthetic oligonucleotide
ggaaugcccaaagagcagu

SEQ ID NO: 1509214 - RNA, 19 nt, Artificial Sequence
  Description of Artificial Sequence: Synthetic oligonucleotide
ucccugccggaugcuacca

SEQ ID NO: 1509215 - RNA, 19 nt, Artificial Sequence
  Description of Artificial Sequence: Synthetic oligonucleotide
acggcagguauagcucgcu

SEQ ID NO: 1509216 - RNA, 19 nt, Artificial Sequence
  Description of Artificial Sequence: Synthetic oligonucleotide
ggaacggccccauccaggu

SEQ ID NO: 1509217 - RNA, 19 nt, Artificial Sequence
  Description of Artificial Sequence: Synthetic oligonucleotide
caguaagacuuacgaguua

SEQ ID NO: 1509218 - RNA, 19 nt, Artificial Sequence
  Description of Artificial Sequence: Synthetic oligonucleotide
uuugagcgcuguggucuuc

SEQ ID NO: 1509219 - RNA, 19 nt, Artificial Sequence
  Description of Artificial Sequence: Synthetic oligonucleotide
uaccacgggcucggccgcg

SEQ ID NO: 1509220 - RNA, 19 nt, Artificial Sequence
  Description of Artificial Sequence: Synthetic oligonucleotide
gcgguaacucucacucucc

SEQ ID NO: 1509221 - RNA, 19 nt, Artificial Sequence
  Description of Artificial Sequence: Synthetic oligonucleotide
acuucggcgggcaccgaaa

SEQ ID NO: 1509222 - RNA, 19 nt, Artificial Sequence
  Description of Artificial Sequence: Synthetic oligonucleotide
gguauuacacuggcuucaa

SEQ ID NO: 1509223 - RNA, 19 nt, Artificial Sequence
  Description of Artificial Sequence: Synthetic oligonucleotide
gucuuccgaucaugagaca

SEQ ID NO: 1509224 - RNA, 19 nt, Artificial Sequence
  Description of Artificial Sequence: Synthetic oligonucleotide
ccucuaaaguaacaucugu

SEQ ID NO: 1509225 - RNA, 19 nt, Artificial Sequence
  Description of Artificial Sequence: Synthetic oligonucleotide
ggcucggccgcgcugguaa

SEQ ID NO: 1509226 - RNA, 19 nt, Artificial Sequence
  Description of Artificial Sequence: Synthetic oligonucleotide
gcacugccaguuuugaaau

SEQ ID NO: 1509227 - RNA, 19 nt, Artificial Sequence
  Description of Artificial Sequence: Synthetic oligonucleotide
cccacauuugauuuguauu

SEQ ID NO: 1509228 - RNA, 19 nt, Artificial Sequence
  Description of Artificial Sequence: Synthetic oligonucleotide
gcgaagaacucugccuuca

SEQ ID NO: 1509229 - RNA, 19 nt, Artificial Sequence
  Description of Artificial Sequence: Synthetic oligonucleotide
cgggguugugguaccuucg

SEQ ID NO: 1509230 - RNA, 19 nt, Artificial Sequence
  Description of Artificial Sequence: Synthetic oligonucleotide
cuucgauaucuaacaggau

SEQ ID NO: 1509231 - RNA, 19 nt, Artificial Sequence
  Description of Artificial Sequence: Synthetic oligonucleotide
gcacuggccucuaaaguaa

SEQ ID NO: 1509232 - RNA, 19 nt, Artificial Sequence
  Description of Artificial Sequence: Synthetic oligonucleotide
ggagguggguuccucuaua

SEQ ID NO: 1509233 - RNA, 19 nt, Artificial Sequence
  Description of Artificial Sequence: Synthetic oligonucleotide
augcuaccacgggcucggc

SEQ ID NO: 1509234 - RNA, 19 nt, Artificial Sequence
  Description of Artificial Sequence: Synthetic oligonucleotide
cuuacgaguuauggucaua

SEQ ID NO: 1509235 - RNA, 19 nt, Artificial Sequence
  Description of Artificial Sequence: Synthetic oligonucleotide
cgauaucuaacaggauaac

SEQ ID NO: 1509236 - RNA, 19 nt, Artificial Sequence
  Description of Artificial Sequence: Synthetic oligonucleotide
cacccgaugcugucugcaa

SEQ ID NO: 1509237 - RNA, 19 nt, Artificial Sequence
  Description of Artificial Sequence: Synthetic oligonucleotide
cugacgccacagggauugg

SEQ ID NO: 1509238 - RNA, 19 nt, Artificial Sequence
  Description of Artificial Sequence: Synthetic oligonucleotide
cgaaacuuugcucaccuau

SEQ ID NO: 1509239 - RNA, 19 nt, Artificial Sequence
  Description of Artificial Sequence: Synthetic oligonucleotide
gaaugcccaaagagcaguu

SEQ ID NO: 1509240 - RNA, 19 nt, Artificial Sequence
  Description of Artificial Sequence: Synthetic oligonucleotide
cacugccaguuuugaaaua

SEQ ID NO: 1509241 - RNA, 19 nt, Artificial Sequence
  Description of Artificial Sequence: Synthetic oligonucleotide
aucgggguugugguaccuu

SEQ ID NO: 1509242 - RNA, 19 nt, Artificial Sequence
  Description of Artificial Sequence: Synthetic oligonucleotide
gucccgcauugccaggucu

SEQ ID NO: 1509243 - RNA, 19 nt, Artificial Sequence
  Description of Artificial Sequence: Synthetic oligonucleotide
caccuaugugcccguggaa

SEQ ID NO: 1509244 - RNA, 19 nt, Artificial Sequence
  Description of Artificial Sequence: Synthetic oligonucleotide
cugggacuacguccgcgaa

SEQ ID NO: 1509245 - RNA, 19 nt, Artificial Sequence
  Description of Artificial Sequence: Synthetic oligonucleotide
guuugagcgcuguggucuu

SEQ ID NO: 1509246 - RNA, 19 nt, Artificial Sequence
  Description of Artificial Sequence: Synthetic oligonucleotide
cacagccacuucagaggaa

SEQ ID NO: 1509247 - RNA, 19 nt, Artificial Sequence
  Description of Artificial Sequence: Synthetic oligonucleotide
ggauuggaacggccccauc

SEQ ID NO: 1509248 - RNA, 19 nt, Artificial Sequence
  Description of Artificial Sequence: Synthetic oligonucleotide
gcgcugguaaagaggacaa

SEQ ID NO: 1509249 - RNA, 19 nt, Artificial Sequence
  Description of Artificial Sequence: Synthetic oligonucleotide
caguuucgucuuccucaga

SEQ ID NO: 1509250 - RNA, 19 nt, Artificial Sequence
  Description of Artificial Sequence: Synthetic oligonucleotide
aggaugugaugagguugua

SEQ ID NO: 1509251 - RNA, 19 nt, Artificial Sequence
  Description of Artificial Sequence: Synthetic oligonucleotide
cgcgcugguaaagaggaca

SEQ ID NO: 1509252 - RNA, 19 nt, Artificial Sequence
  Description of Artificial Sequence: Synthetic oligonucleotide
cugagccucuacacucccu

SEQ ID NO: 1509253 - RNA, 19 nt, Artificial Sequence
  Description of Artificial Sequence: Synthetic oligonucleotide
gcggccagcugugaaagcu

SEQ ID NO: 1509254 - RNA, 19 nt, Artificial Sequence
  Description of Artificial Sequence: Synthetic oligonucleotide
cguccgcgaagaacucugc

SEQ ID NO: 1509255 - RNA, 19 nt, Artificial Sequence
  Description of Artificial Sequence: Synthetic oligonucleotide
ugacuucggcgggcaccga

SEQ ID NO: 1509256 - RNA, 19 nt, Artificial Sequence
  Description of Artificial Sequence: Synthetic oligonucleotide
ccuaugugcccguggaaau

SEQ ID NO: 1509257 - RNA, 19 nt, Artificial Sequence
  Description of Artificial Sequence: Synthetic oligonucleotide
cgcgaagaacucugccuuc

SEQ ID NO: 1509258 - RNA, 19 nt, Artificial Sequence
  Description of Artificial Sequence: Synthetic oligonucleotide
cacccacauuugauuugua

SEQ ID NO: 1509259 - RNA, 19 nt, Artificial Sequence
  Description of Artificial Sequence: Synthetic oligonucleotide
ccgaaaccacgaccauuuc

SEQ ID NO: 1509260 - RNA, 19 nt, Artificial Sequence
  Description of Artificial Sequence: Synthetic oligonucleotide
gcgcuguggucuuccgauc

SEQ ID NO: 1509261 - RNA, 19 nt, Artificial Sequence
  Description of Artificial Sequence: Synthetic oligonucleotide
gcgacgugcacaucugcuu

SEQ ID NO: 1509262 - RNA, 19 nt, Artificial Sequence
  Description of Artificial Sequence: Synthetic oligonucleotide
gcagcuguuugagcgcugu

SEQ ID NO: 1509263 - RNA, 19 nt, Artificial Sequence
  Description of Artificial Sequence: Synthetic oligonucleotide
ggguugugguaccuucgau

SEQ ID NO: 1509264 - RNA, 19 nt, Artificial Sequence
  Description of Artificial Sequence: Synthetic oligonucleotide
caccgaaaccacgaccauu

SEQ ID NO: 1509265 - RNA, 19 nt, Artificial Sequence
  Description of Artificial Sequence: Synthetic oligonucleotide
gcucaccuaugugcccgug

SEQ ID NO: 1509266 - RNA, 19 nt, Artificial Sequence
  Description of Artificial Sequence: Synthetic oligonucleotide
cgguaacucucacucucca

SEQ ID NO: 1509267 - RNA, 19 nt, Artificial Sequence
  Description of Artificial Sequence: Synthetic oligonucleotide
cggcagguauagcucgcug

SEQ ID NO: 1509268 - RNA, 19 nt, Artificial Sequence
  Description of Artificial Sequence: Synthetic oligonucleotide
cucagcaggcugacaucuu

SEQ ID NO: 1509269 - RNA, 19 nt, Artificial Sequence
  Description of Artificial Sequence: Synthetic oligonucleotide
cacuugcaucugucugugu

SEQ ID NO: 1509270 - RNA, 19 nt, Artificial Sequence
  Description of Artificial Sequence: Synthetic oligonucleotide
cggccgcgcugguaaagag

SEQ ID NO: 1509271 - RNA, 19 nt, Artificial Sequence
  Description of Artificial Sequence: Synthetic oligonucleotide
ccgcgaagaacucugccuu

SEQ ID NO: 1509272 - RNA, 19 nt, Artificial Sequence
  Description of Artificial Sequence: Synthetic oligonucleotide
ggacuacguccgcgaagaa

SEQ ID NO: 1509273 - RNA, 19 nt, Artificial Sequence
  Description of Artificial Sequence: Synthetic oligonucleotide
cgggcaccgaaaccacgac

SEQ ID NO: 1509274 - RNA, 19 nt, Artificial Sequence
  Description of Artificial Sequence: Synthetic oligonucleotide
ccgcauugccaggucucac

SEQ ID NO: 1509275 - RNA, 19 nt, Artificial Sequence
  Description of Artificial Sequence: Synthetic oligonucleotide
ccgcgcugguaaagaggac

SEQ ID NO: 1509276 - RNA, 19 nt, Artificial Sequence
  Description of Artificial Sequence: Synthetic oligonucleotide
cgcugguaaagaggacaac

SEQ ID NO: 1509277 - RNA, 19 nt, Artificial Sequence
  Description of Artificial Sequence: Synthetic oligonucleotide
cccgcauugccaggucuca

SEQ ID NO: 1509278 - RNA, 19 nt, Artificial Sequence
  Description of Artificial Sequence: Synthetic oligonucleotide
gggauuggaacggccccau

SEQ ID NO: 1509279 - RNA, 19 nt, Artificial Sequence
  Description of Artificial Sequence: Synthetic oligonucleotide
ccgaaacuuugcucaccua

SEQ ID NO: 1509280 - RNA, 19 nt, Artificial Sequence
  Description of Artificial Sequence: Synthetic oligonucleotide
gcaccgaaaccacgaccau

SEQ ID NO: 1509281 - RNA, 19 nt, Artificial Sequence
  Description of Artificial Sequence: Synthetic oligonucleotide
ccacagcgacgugcacauc

SEQ ID NO: 1509282 - RNA, 19 nt, Artificial Sequence
  Description of Artificial Sequence: Synthetic oligonucleotide
cgaaagcaaucgggguugu

SEQ ID NO: 1509283 - RNA, 19 nt, Artificial Sequence
  Description of Artificial Sequence: Synthetic oligonucleotide
uauaaaacaguauagagcc

SEQ ID NO: 1509284 - RNA, 19 nt, Artificial Sequence
  Description of Artificial Sequence: Synthetic oligonucleotide
aaauguuacuacuaaauac

SEQ ID NO: 1509285 - RNA, 19 nt, Artificial Sequence
  Description of Artificial Sequence: Synthetic oligonucleotide
aaugcaaacacguuguugg

SEQ ID NO: 1509286 - RNA, 19 nt, Artificial Sequence
  Description of Artificial Sequence: Synthetic oligonucleotide
uuaguugcaaaccugaagg

SEQ ID NO: 1509287 - RNA, 19 nt, Artificial Sequence
  Description of Artificial Sequence: Synthetic oligonucleotide
aauuguaauauuuuaguug

SEQ ID NO: 1509288 - RNA, 19 nt, Artificial Sequence
  Description of Artificial Sequence: Synthetic oligonucleotide
auauugguaagguaaaugc

SEQ ID NO: 1509289 - RNA, 19 nt, Artificial Sequence
  Description of Artificial Sequence: Synthetic oligonucleotide
cuuaagaugacaaaucugg

SEQ ID NO: 1509290 - RNA, 19 nt, Artificial Sequence
  Description of Artificial Sequence: Synthetic oligonucleotide
aauucuaccacucucguga

SEQ ID NO: 1509291 - RNA, 19 nt, Artificial Sequence
  Description of Artificial Sequence: Synthetic oligonucleotide
aauuaaauuaacagaauag

SEQ ID NO: 1509292 - RNA, 19 nt, Artificial Sequence
  Description of Artificial Sequence: Synthetic oligonucleotide
uaagguaaucauuugacag

SEQ ID NO: 1509293 - RNA, 19 nt, Artificial Sequence
  Description of Artificial Sequence: Synthetic oligonucleotide
aguguaaacaacuccauag

SEQ ID NO: 1509294 - RNA, 19 nt, Artificial Sequence
  Description of Artificial Sequence: Synthetic oligonucleotide
ugauucaacaacaaauugc

SEQ ID NO: 1509295 - RNA, 19 nt, Artificial Sequence
  Description of Artificial Sequence: Synthetic oligonucleotide
aacacaauggacugguagg

SEQ ID NO: 1509296 - RNA, 19 nt, Artificial Sequence
  Description of Artificial Sequence: Synthetic oligonucleotide
uuacaaaauguuaucgggg

SEQ ID NO: 1509297 - RNA, 19 nt, Artificial Sequence
  Description of Artificial Sequence: Synthetic oligonucleotide
uaagguaaaugcaaacacg

SEQ ID NO: 1509298 - RNA, 19 nt, Artificial Sequence
  Description of Artificial Sequence: Synthetic oligonucleotide
uguuacaaaauguuaucgg

SEQ ID NO: 1509299 - RNA, 19 nt, Artificial Sequence
  Description of Artificial Sequence: Synthetic oligonucleotide
guuacaaaauguuaucggg

SEQ ID NO: 1509300 - RNA, 19 nt, Artificial Sequence
  Description of Artificial Sequence: Synthetic oligonucleotide
uacuacuaaauacugguag

SEQ ID NO: 1509301 - RNA, 19 nt, Artificial Sequence
  Description of Artificial Sequence: Synthetic oligonucleotide
auguuuauaacauaggcaa

SEQ ID NO: 1509302 - RNA, 19 nt, Artificial Sequence
  Description of Artificial Sequence: Synthetic oligonucleotide
auaacauaggcaaaggugg

SEQ ID NO: 1509303 - RNA, 19 nt, Artificial Sequence
  Description of Artificial Sequence: Synthetic oligonucleotide
aaauccucagaacacaaca

SEQ ID NO: 1509304 - RNA, 19 nt, Artificial Sequence
  Description of Artificial Sequence: Synthetic oligonucleotide
aauguuacuacuaaauacu

SEQ ID NO: 1509305 - RNA, 19 nt, Artificial Sequence
  Description of Artificial Sequence: Synthetic oligonucleotide
aaugaugcacuauagugga

SEQ ID NO: 1509306 - RNA, 19 nt, Artificial Sequence
  Description of Artificial Sequence: Synthetic oligonucleotide
aagaauaccucuucauauc

SEQ ID NO: 1509307 - RNA, 19 nt, Artificial Sequence
  Description of Artificial Sequence: Synthetic oligonucleotide
aaacacuuacgacuggcac

SEQ ID NO: 1509308 - RNA, 19 nt, Artificial Sequence
  Description of Artificial Sequence: Synthetic oligonucleotide
ucuucagucaugcuuagug

SEQ ID NO: 1509309 - RNA, 19 nt, Artificial Sequence
  Description of Artificial Sequence: Synthetic oligonucleotide
uguaagaagucuucagugg

SEQ ID NO: 1509310 - RNA, 19 nt, Artificial Sequence
  Description of Artificial Sequence: Synthetic oligonucleotide
cagaauagagacuagaauc

SEQ ID NO: 1509311 - RNA, 19 nt, Artificial Sequence
  Description of Artificial Sequence: Synthetic oligonucleotide
uggaauagaaguuuugaug

SEQ ID NO: 1509312 - RNA, 19 nt, Artificial Sequence
  Description of Artificial Sequence: Synthetic oligonucleotide
aacucuuaaguguucugac

SEQ ID NO: 1509313 - RNA, 19 nt, Artificial Sequence
  Description of Artificial Sequence: Synthetic oligonucleotide
uacacauccacaauacaag

SEQ ID NO: 1509314 - RNA, 19 nt, Artificial Sequence
  Description of Artificial Sequence: Synthetic oligonucleotide
uuuaguugcaaaccugaag

SEQ ID NO: 1509315 - RNA, 19 nt, Artificial Sequence
  Description of Artificial Sequence: Synthetic oligonucleotide
uguuacuacuaaauacugg

SEQ ID NO: 1509316 - RNA, 19 nt, Artificial Sequence
  Description of Artificial Sequence: Synthetic oligonucleotide
uauuuagaacucuuaagug

SEQ ID NO: 1509317 - RNA, 19 nt, Artificial Sequence
  Description of Artificial Sequence: Synthetic oligonucleotide
auuuagaacucuuaagugu

SEQ ID NO: 1509318 - RNA, 19 nt, Artificial Sequence
  Description of Artificial Sequence: Synthetic oligonucleotide
uuuacaagauaucuauaca

SEQ ID NO: 1509319 - RNA, 19 nt, Artificial Sequence
  Description of Artificial Sequence: Synthetic oligonucleotide
accuaaauaaauccuaaug

SEQ ID NO: 1509320 - RNA, 19 nt, Artificial Sequence
  Description of Artificial Sequence: Synthetic oligonucleotide
auacugauagaacucacag

SEQ ID NO: 1509321 - RNA, 19 nt, Artificial Sequence
  Description of Artificial Sequence: Synthetic oligonucleotide
ccuaaauaaauccuaaugg

SEQ ID NO: 1509322 - RNA, 19 nt, Artificial Sequence
  Description of Artificial Sequence: Synthetic oligonucleotide
auaucuauacauguuaaag

SEQ ID NO: 1509323 - RNA, 19 nt, Artificial Sequence
  Description of Artificial Sequence: Synthetic oligonucleotide
uucuuaagaugacaaaucu

SEQ ID NO: 1509324 - RNA, 19 nt, Artificial Sequence
  Description of Artificial Sequence: Synthetic oligonucleotide
uauuuugacuuuacaugcg

SEQ ID NO: 1509325 - RNA, 19 nt, Artificial Sequence
  Description of Artificial Sequence: Synthetic oligonucleotide
aguggguuaaccaaagucg

SEQ ID NO: 1509326 - RNA, 19 nt, Artificial Sequence
  Description of Artificial Sequence: Synthetic oligonucleotide
uguuagaaaauucaacaua

SEQ ID NO: 1509327 - RNA, 19 nt, Artificial Sequence
  Description of Artificial Sequence: Synthetic oligonucleotide
aagauaucuauacauguua

SEQ ID NO: 1509328 - RNA, 19 nt, Artificial Sequence
  Description of Artificial Sequence: Synthetic oligonucleotide
ugauuaaauuguaauauuu

SEQ ID NO: 1509329 - RNA, 19 nt, Artificial Sequence
  Description of Artificial Sequence: Synthetic oligonucleotide
aaccaaagucgucaguagg

SEQ ID NO: 1509330 - RNA, 19 nt, Artificial Sequence
  Description of Artificial Sequence: Synthetic oligonucleotide
auuuugacuuuacaugcgg

SEQ ID NO: 1509331 - RNA, 19 nt, Artificial Sequence
  Description of Artificial Sequence: Synthetic oligonucleotide
aagguaaucauuugacagu

SEQ ID NO: 1509332 - RNA, 19 nt, Artificial Sequence
  Description of Artificial Sequence: Synthetic oligonucleotide
acuuggauauuuuauuuug

SEQ ID NO: 1509333 - RNA, 19 nt, Artificial Sequence
  Description of Artificial Sequence: Synthetic oligonucleotide
acaagauaucuauacaugu

SEQ ID NO: 1509334 - RNA, 19 nt, Artificial Sequence
  Description of Artificial Sequence: Synthetic oligonucleotide
auaguggaaacacucaaca

SEQ ID NO: 1509335 - RNA, 19 nt, Artificial Sequence
  Description of Artificial Sequence: Synthetic oligonucleotide
uauuuuaguugcaaaccug

SEQ ID NO: 1509336 - RNA, 19 nt, Artificial Sequence
  Description of Artificial Sequence: Synthetic oligonucleotide
aaaugacugggugauguac

SEQ ID NO: 1509337 - RNA, 19 nt, Artificial Sequence
  Description of Artificial Sequence: Synthetic oligonucleotide
uguuaucggggucacacag

SEQ ID NO: 1509338 - RNA, 19 nt, Artificial Sequence
  Description of Artificial Sequence: Synthetic oligonucleotide
uccggguaaacucacaugu

SEQ ID NO: 1509339 - RNA, 19 nt, Artificial Sequence
  Description of Artificial Sequence: Synthetic oligonucleotide
aauguuggguaaaugacug

SEQ ID NO: 1509340 - RNA, 19 nt, Artificial Sequence
  Description of Artificial Sequence: Synthetic oligonucleotide
uuaauugauuaaauuguaa

SEQ ID NO: 1509341 - RNA, 19 nt, Artificial Sequence
  Description of Artificial Sequence: Synthetic oligonucleotide
ucgugaauaaggcacaaaa

SEQ ID NO: 1509342 - RNA, 19 nt, Artificial Sequence
  Description of Artificial Sequence: Synthetic oligonucleotide
uuauaacauaggcaaaggu

SEQ ID NO: 1509343 - RNA, 19 nt, Artificial Sequence
  Description of Artificial Sequence: Synthetic oligonucleotide
uaauguuggguaaaugacu

SEQ ID NO: 1509344 - RNA, 19 nt, Artificial Sequence
  Description of Artificial Sequence: Synthetic oligonucleotide
gaacacaauggacugguag

SEQ ID NO: 1509345 - RNA, 19 nt, Artificial Sequence
  Description of Artificial Sequence: Synthetic oligonucleotide
ugacaaaucuggaauagaa

SEQ ID NO: 1509346 - RNA, 19 nt, Artificial Sequence
  Description of Artificial Sequence: Synthetic oligonucleotide
uauugguaagguaaaugca

SEQ ID NO: 1509347 - RNA, 19 nt, Artificial Sequence
  Description of Artificial Sequence: Synthetic oligonucleotide
uguuggguaaaugacuggg

SEQ ID NO: 1509348 - RNA, 19 nt, Artificial Sequence
  Description of Artificial Sequence: Synthetic oligonucleotide
uuaauauugguaagguaaa

SEQ ID NO: 1509349 - RNA, 19 nt, Artificial Sequence
  Description of Artificial Sequence: Synthetic oligonucleotide
uuuagaacucuuaaguguu

SEQ ID NO: 1509350 - RNA, 19 nt, Artificial Sequence
  Description of Artificial Sequence: Synthetic oligonucleotide
uuugacagucaaaggagcc

SEQ ID NO: 1509351 - RNA, 19 nt, Artificial Sequence
  Description of Artificial Sequence: Synthetic oligonucleotide
uuaucagaagagcaggggu

SEQ ID NO: 1509352 - RNA, 19 nt, Artificial Sequence
  Description of Artificial Sequence: Synthetic oligonucleotide
uuaucggggucacacagag

SEQ ID NO: 1509353 - RNA, 19 nt, Artificial Sequence
  Description of Artificial Sequence: Synthetic oligonucleotide
uacaaaauguuaucggggu

SEQ ID NO: 1509354 - RNA, 19 nt, Artificial Sequence
  Description of Artificial Sequence: Synthetic oligonucleotide
uuaagguaaucauuugaca

SEQ ID NO: 1509355 - RNA, 19 nt, Artificial Sequence
  Description of Artificial Sequence: Synthetic oligonucleotide
cacgcugggauuaauauug

SEQ ID NO: 1509356 - RNA, 19 nt, Artificial Sequence
  Description of Artificial Sequence: Synthetic oligonucleotide
aacacuuacgacuggcaca

SEQ ID NO: 1509357 - RNA, 19 nt, Artificial Sequence
  Description of Artificial Sequence: Synthetic oligonucleotide
uuacagucgacugucauug

SEQ ID NO: 1509358 - RNA, 19 nt, Artificial Sequence
  Description of Artificial Sequence: Synthetic oligonucleotide
uuaaguagcgugccucagg

SEQ ID NO: 1509359 - RNA, 19 nt, Artificial Sequence
  Description of Artificial Sequence: Synthetic oligonucleotide
gaaacacucaacauacugc

SEQ ID NO: 1509360 - RNA, 19 nt, Artificial Sequence
  Description of Artificial Sequence: Synthetic oligonucleotide
acucacaugugguauuuac

SEQ ID NO: 1509361 - RNA, 19 nt, Artificial Sequence
  Description of Artificial Sequence: Synthetic oligonucleotide
acuuacgacuggcacaugg

SEQ ID NO: 1509362 - RNA, 19 nt, Artificial Sequence
  Description of Artificial Sequence: Synthetic oligonucleotide
gguaaaugcaaacacguug

SEQ ID NO: 1509363 - RNA, 19 nt, Artificial Sequence
  Description of Artificial Sequence: Synthetic oligonucleotide
uggauaaagcauuuaaaau

SEQ ID NO: 1509364 - RNA, 19 nt, Artificial Sequence
  Description of Artificial Sequence: Synthetic oligonucleotide
acucucgugaauaaggcac

SEQ ID NO: 1509365 - RNA, 19 nt, Artificial Sequence
  Description of Artificial Sequence: Synthetic oligonucleotide
ugggcaccuaaauaaaucc

SEQ ID NO: 1509366 - RNA, 19 nt, Artificial Sequence
  Description of Artificial Sequence: Synthetic oligonucleotide
uaacuucuuaagaugacaa

SEQ ID NO: 1509367 - RNA, 19 nt, Artificial Sequence
  Description of Artificial Sequence: Synthetic oligonucleotide
uuggguaaaugacugggug

SEQ ID NO: 1509368 - RNA, 19 nt, Artificial Sequence
  Description of Artificial Sequence: Synthetic oligonucleotide
uaacauaggcaaagguggg

SEQ ID NO: 1509369 - RNA, 19 nt, Artificial Sequence
  Description of Artificial Sequence: Synthetic oligonucleotide
ugcacuauaguggaaacac

SEQ ID NO: 1509370 - RNA, 19 nt, Artificial Sequence
  Description of Artificial Sequence: Synthetic oligonucleotide
acagucgacugucauugcc

SEQ ID NO: 1509371 - RNA, 19 nt, Artificial Sequence
  Description of Artificial Sequence: Synthetic oligonucleotide
agaguuaccacgcugggau

SEQ ID NO: 1509372 - RNA, 19 nt, Artificial Sequence
  Description of Artificial Sequence: Synthetic oligonucleotide
uaagaugacaaaucuggaa

SEQ ID NO: 1509373 - RNA, 19 nt, Artificial Sequence
  Description of Artificial Sequence: Synthetic oligonucleotide
caggcuucgauucacagug

SEQ ID NO: 1509374 - RNA, 19 nt, Artificial Sequence
  Description of Artificial Sequence: Synthetic oligonucleotide
cacagaguuaccacgcugg

SEQ ID NO: 1509375 - RNA, 19 nt, Artificial Sequence
  Description of Artificial Sequence: Synthetic oligonucleotide
uauaguggaaacacucaac

SEQ ID NO: 1509376 - RNA, 19 nt, Artificial Sequence
  Description of Artificial Sequence: Synthetic oligonucleotide
aaagguggguacuucuucu

SEQ ID NO: 1509377 - RNA, 19 nt, Artificial Sequence
  Description of Artificial Sequence: Synthetic oligonucleotide
uuaagaugacaaaucugga

SEQ ID NO: 1509378 - RNA, 19 nt, Artificial Sequence
  Description of Artificial Sequence: Synthetic oligonucleotide
aguggaaacacucaacaua

SEQ ID NO: 1509379 - RNA, 19 nt, Artificial Sequence
  Description of Artificial Sequence: Synthetic oligonucleotide
gagacuagaauccauguua

SEQ ID NO: 1509380 - RNA, 19 nt, Artificial Sequence
  Description of Artificial Sequence: Synthetic oligonucleotide
ugguauuuacagucgacug

SEQ ID NO: 1509381 - RNA, 19 nt, Artificial Sequence
  Description of Artificial Sequence: Synthetic oligonucleotide
cauuaucagaagagcaggg

SEQ ID NO: 1509382 - RNA, 19 nt, Artificial Sequence
  Description of Artificial Sequence: Synthetic oligonucleotide
aaaauccucagaacacaac

SEQ ID NO: 1509383 - RNA, 19 nt, Artificial Sequence
  Description of Artificial Sequence: Synthetic oligonucleotide
ucugacauuggguaccaca

SEQ ID NO: 1509384 - RNA, 19 nt, Artificial Sequence
  Description of Artificial Sequence: Synthetic oligonucleotide
aaaauguuaucggggucac

SEQ ID NO: 1509385 - RNA, 19 nt, Artificial Sequence
  Description of Artificial Sequence: Synthetic oligonucleotide
uuuacaugcgguguuaaaa

SEQ ID NO: 1509386 - RNA, 19 nt, Artificial Sequence
  Description of Artificial Sequence: Synthetic oligonucleotide
uaugacuuuguaagaaguc

SEQ ID NO: 1509387 - RNA, 19 nt, Artificial Sequence
  Description of Artificial Sequence: Synthetic oligonucleotide
guuacuacuaaauacuggu

SEQ ID NO: 1509388 - RNA, 19 nt, Artificial Sequence
  Description of Artificial Sequence: Synthetic oligonucleotide
acaauggacugguagggag

SEQ ID NO: 1509389 - RNA, 19 nt, Artificial Sequence
  Description of Artificial Sequence: Synthetic oligonucleotide
guuaagguaaucauuugac

SEQ ID NO: 1509390 - RNA, 19 nt, Artificial Sequence
  Description of Artificial Sequence: Synthetic oligonucleotide
uucgauucacaguggacag

SEQ ID NO: 1509391 - RNA, 19 nt, Artificial Sequence
  Description of Artificial Sequence: Synthetic oligonucleotide
ucuggaauagaaguuuuga

SEQ ID NO: 1509392 - RNA, 19 nt, Artificial Sequence
  Description of Artificial Sequence: Synthetic oligonucleotide
auuaucagaagagcagggg

SEQ ID NO: 1509393 - RNA, 19 nt, Artificial Sequence
  Description of Artificial Sequence: Synthetic oligonucleotide
acugucauugccugcauga

SEQ ID NO: 1509394 - RNA, 19 nt, Artificial Sequence
  Description of Artificial Sequence: Synthetic oligonucleotide
aaaaugcacagauccgggu

SEQ ID NO: 1509395 - RNA, 19 nt, Artificial Sequence
  Description of Artificial Sequence: Synthetic oligonucleotide
ugcguagugcuuauuguug

SEQ ID NO: 1509396 - RNA, 19 nt, Artificial Sequence
  Description of Artificial Sequence: Synthetic oligonucleotide
gguaauguuggguaaauga

SEQ ID NO: 1509397 - RNA, 19 nt, Artificial Sequence
  Description of Artificial Sequence: Synthetic oligonucleotide
uccaggguuaaguagcgug

SEQ ID NO: 1509398 - RNA, 19 nt, Artificial Sequence
  Description of Artificial Sequence: Synthetic oligonucleotide
cacuauaguggaaacacuc

SEQ ID NO: 1509399 - RNA, 19 nt, Artificial Sequence
  Description of Artificial Sequence: Synthetic oligonucleotide
caugcuuaguguaaacaac

SEQ ID NO: 1509400 - RNA, 19 nt, Artificial Sequence
  Description of Artificial Sequence: Synthetic oligonucleotide
cucacacacacacacacac

SEQ ID NO: 1509401 - RNA, 19 nt, Artificial Sequence
  Description of Artificial Sequence: Synthetic oligonucleotide
acauccacaauacaaguuu

SEQ ID NO: 1509402 - RNA, 19 nt, Artificial Sequence
  Description of Artificial Sequence: Synthetic oligonucleotide
acacucaacauacugcaga

SEQ ID NO: 1509403 - RNA, 19 nt, Artificial Sequence
  Description of Artificial Sequence: Synthetic oligonucleotide
aguuaguugucuucaguca

SEQ ID NO: 1509404 - RNA, 19 nt, Artificial Sequence
  Description of Artificial Sequence: Synthetic oligonucleotide
ugggauuaauauugguaag

SEQ ID NO: 1509405 - RNA, 19 nt, Artificial Sequence
  Description of Artificial Sequence: Synthetic oligonucleotide
uuaguugucuucagucaug

SEQ ID NO: 1509406 - RNA, 19 nt, Artificial Sequence
  Description of Artificial Sequence: Synthetic oligonucleotide
uacaguggguuaaccaaag

SEQ ID NO: 1509407 - RNA, 19 nt, Artificial Sequence
  Description of Artificial Sequence: Synthetic oligonucleotide
uuuuaugccguaccauuaa

SEQ ID NO: 1509408 - RNA, 19 nt, Artificial Sequence
  Description of Artificial Sequence: Synthetic oligonucleotide
cacacacacacacacacac

SEQ ID NO: 1509409 - RNA, 19 nt, Artificial Sequence
  Description of Artificial Sequence: Synthetic oligonucleotide
acuagaauccauguuagaa

SEQ ID NO: 1509410 - RNA, 19 nt, Artificial Sequence
  Description of Artificial Sequence: Synthetic oligonucleotide
cuuacgacuggcacauggg

SEQ ID NO: 1509411 - RNA, 19 nt, Artificial Sequence
  Description of Artificial Sequence: Synthetic oligonucleotide
ucuaacuucuuaagaugac

SEQ ID NO: 1509412 - RNA, 19 nt, Artificial Sequence
  Description of Artificial Sequence: Synthetic oligonucleotide
cacacacacacacacacug

SEQ ID NO: 1509413 - RNA, 19 nt, Artificial Sequence
  Description of Artificial Sequence: Synthetic oligonucleotide
uaaccaaagucgucaguag

SEQ ID NO: 1509414 - RNA, 19 nt, Artificial Sequence
  Description of Artificial Sequence: Synthetic oligonucleotide
uguucugacauuggguacc

SEQ ID NO: 1509415 - RNA, 19 nt, Artificial Sequence
  Description of Artificial Sequence: Synthetic oligonucleotide
uugauuaaauuguaauauu

SEQ ID NO: 1509416 - RNA, 19 nt, Artificial Sequence
  Description of Artificial Sequence: Synthetic oligonucleotide
uguguuuaccuuugcacaa

SEQ ID NO: 1509417 - RNA, 19 nt, Artificial Sequence
  Description of Artificial Sequence: Synthetic oligonucleotide
cucucucacacacacacac

SEQ ID NO: 1509418 - RNA, 19 nt, Artificial Sequence
  Description of Artificial Sequence: Synthetic oligonucleotide
guaauguuggguaaaugac

SEQ ID NO: 1509419 - RNA, 19 nt, Artificial Sequence
  Description of Artificial Sequence: Synthetic oligonucleotide
cugauucaacaacaaauug

SEQ ID NO: 1509420 - RNA, 19 nt, Artificial Sequence
  Description of Artificial Sequence: Synthetic oligonucleotide
uagaacucacaguacacuc

SEQ ID NO: 1509421 - RNA, 19 nt, Artificial Sequence
  Description of Artificial Sequence: Synthetic oligonucleotide
ggaaacacucaacauacug

SEQ ID NO: 1509422 - RNA, 19 nt, Artificial Sequence
  Description of Artificial Sequence: Synthetic oligonucleotide
uuuugacuuuacaugcggu

SEQ ID NO: 1509423 - RNA, 19 nt, Artificial Sequence
  Description of Artificial Sequence: Synthetic oligonucleotide
gacugcguagugcuuauug

SEQ ID NO: 1509424 - RNA, 19 nt, Artificial Sequence
  Description of Artificial Sequence: Synthetic oligonucleotide
cugggauuaauauugguaa

SEQ ID NO: 1509425 - RNA, 19 nt, Artificial Sequence
  Description of Artificial Sequence: Synthetic oligonucleotide
aacacguuguugguggcag

SEQ ID NO: 1509426 - RNA, 19 nt, Artificial Sequence
  Description of Artificial Sequence: Synthetic oligonucleotide
aacagaauagagacuagaa

SEQ ID NO: 1509427 - RNA, 19 nt, Artificial Sequence
  Description of Artificial Sequence: Synthetic oligonucleotide
uucacuuuaggguuauuuu

SEQ ID NO: 1509428 - RNA, 19 nt, Artificial Sequence
  Description of Artificial Sequence: Synthetic oligonucleotide
uugguaagguaaaugcaaa

SEQ ID NO: 1509429 - RNA, 19 nt, Artificial Sequence
  Description of Artificial Sequence: Synthetic oligonucleotide
acucuaaggcagcacaaug

SEQ ID NO: 1509430 - RNA, 19 nt, Artificial Sequence
  Description of Artificial Sequence: Synthetic oligonucleotide
uuaugccguaccauuaaaa

SEQ ID NO: 1509431 - RNA, 19 nt, Artificial Sequence
  Description of Artificial Sequence: Synthetic oligonucleotide
uggguaaaugacuggguga

SEQ ID NO: 1509432 - RNA, 19 nt, Artificial Sequence
  Description of Artificial Sequence: Synthetic oligonucleotide
aguauagagccacuucacu

SEQ ID NO: 1509433 - RNA, 19 nt, Artificial Sequence
  Description of Artificial Sequence: Synthetic oligonucleotide
cucucacacacacacacac

SEQ ID NO: 1509434 - RNA, 19 nt, Artificial Sequence
  Description of Artificial Sequence: Synthetic oligonucleotide
agauacaaucuguguuuac

SEQ ID NO: 1509435 - RNA, 19 nt, Artificial Sequence
  Description of Artificial Sequence: Synthetic oligonucleotide
auucacaguggacagguaa

SEQ ID NO: 1509436 - RNA, 19 nt, Artificial Sequence
  Description of Artificial Sequence: Synthetic oligonucleotide
uaacagaauagagacuaga

SEQ ID NO: 1509437 - RNA, 19 nt, Artificial Sequence
  Description of Artificial Sequence: Synthetic oligonucleotide
cugggugauguacaguggg

SEQ ID NO: 1509438 - RNA, 19 nt, Artificial Sequence
  Description of Artificial Sequence: Synthetic oligonucleotide
uuacgacuggcacauggga

SEQ ID NO: 1509439 - RNA, 19 nt, Artificial Sequence
  Description of Artificial Sequence: Synthetic oligonucleotide
accacucucgugaauaagg

SEQ ID NO: 1509440 - RNA, 19 nt, Artificial Sequence
  Description of Artificial Sequence: Synthetic oligonucleotide
gguagauacaucaagaaua

SEQ ID NO: 1509441 - RNA, 19 nt, Artificial Sequence
  Description of Artificial Sequence: Synthetic oligonucleotide
ugugguauuuacagucgac

SEQ ID NO: 1509442 - RNA, 19 nt, Artificial Sequence
  Description of Artificial Sequence: Synthetic oligonucleotide
agcugaacacaauggacug

SEQ ID NO: 1509443 - RNA, 19 nt, Artificial Sequence
  Description of Artificial Sequence: Synthetic oligonucleotide
acaucucucucucucucuc

SEQ ID NO: 1509444 - RNA, 19 nt, Artificial Sequence
  Description of Artificial Sequence: Synthetic oligonucleotide
ugguugguuuaauugauua

SEQ ID NO: 1509445 - RNA, 19 nt, Artificial Sequence
  Description of Artificial Sequence: Synthetic oligonucleotide
auacauguuaaaguacucu

SEQ ID NO: 1509446 - RNA, 19 nt, Artificial Sequence
  Description of Artificial Sequence: Synthetic oligonucleotide
ugacuuggauauuuuauuu

SEQ ID NO: 1509447 - RNA, 19 nt, Artificial Sequence
  Description of Artificial Sequence: Synthetic oligonucleotide
acacaauggacugguaggg

SEQ ID NO: 1509448 - RNA, 19 nt, Artificial Sequence
  Description of Artificial Sequence: Synthetic oligonucleotide
uacaucaagaauaccucuu

SEQ ID NO: 1509449 - RNA, 19 nt, Artificial Sequence
  Description of Artificial Sequence: Synthetic oligonucleotide
auugguaagguaaaugcaa

SEQ ID NO: 1509450 - RNA, 19 nt, Artificial Sequence
  Description of Artificial Sequence: Synthetic oligonucleotide
cacacacacacacacuggc

SEQ ID NO: 1509451 - RNA, 19 nt, Artificial Sequence
  Description of Artificial Sequence: Synthetic oligonucleotide
uuuuaguugcaaaccugaa

SEQ ID NO: 1509452 - RNA, 19 nt, Artificial Sequence
  Description of Artificial Sequence: Synthetic oligonucleotide
uacugauagaacucacagu

SEQ ID NO: 1509453 - RNA, 19 nt, Artificial Sequence
  Description of Artificial Sequence: Synthetic oligonucleotide
ugucauugccugcaugacu

SEQ ID NO: 1509454 - RNA, 19 nt, Artificial Sequence
  Description of Artificial Sequence: Synthetic oligonucleotide
ugaugcacuauaguggaaa

SEQ ID NO: 1509455 - RNA, 19 nt, Artificial Sequence
  Description of Artificial Sequence: Synthetic oligonucleotide
aaauccuaauggguacauc

SEQ ID NO: 1509456 - RNA, 19 nt, Artificial Sequence
  Description of Artificial Sequence: Synthetic oligonucleotide
agacugacugcguagugcu

SEQ ID NO: 1509457 - RNA, 19 nt, Artificial Sequence
  Description of Artificial Sequence: Synthetic oligonucleotide
cuagaauccauguuagaaa

SEQ ID NO: 1509458 - RNA, 19 nt, Artificial Sequence
  Description of Artificial Sequence: Synthetic oligonucleotide
ugguaagguaaaugcaaac

SEQ ID NO: 1509459 - RNA, 19 nt, Artificial Sequence
  Description of Artificial Sequence: Synthetic oligonucleotide
uucagucaugcuuagugua

SEQ ID NO: 1509460 - RNA, 19 nt, Artificial Sequence
  Description of Artificial Sequence: Synthetic oligonucleotide
ugaagguaauguuggguaa

SEQ ID NO: 1509461 - RNA, 19 nt, Artificial Sequence
  Description of Artificial Sequence: Synthetic oligonucleotide
acacauccacaauacaagu

SEQ ID NO: 1509462 - RNA, 19 nt, Artificial Sequence
  Description of Artificial Sequence: Synthetic oligonucleotide
cucucucucucucacacac

SEQ ID NO: 1509463 - RNA, 19 nt, Artificial Sequence
  Description of Artificial Sequence: Synthetic oligonucleotide
aagguggguacuucuucug

SEQ ID NO: 1509464 - RNA, 19 nt, Artificial Sequence
  Description of Artificial Sequence: Synthetic oligonucleotide
uuuacagucgacugucauu

SEQ ID NO: 1509465 - RNA, 19 nt, Artificial Sequence
  Description of Artificial Sequence: Synthetic oligonucleotide
ucuaccacucucgugaaua

SEQ ID NO: 1509466 - RNA, 19 nt, Artificial Sequence
  Description of Artificial Sequence: Synthetic oligonucleotide
gaauucuaccacucucgug

SEQ ID NO: 1509467 - RNA, 19 nt, Artificial Sequence
  Description of Artificial Sequence: Synthetic oligonucleotide
uuacuacuaaauacuggua

SEQ ID NO: 1509468 - RNA, 19 nt, Artificial Sequence
  Description of Artificial Sequence: Synthetic oligonucleotide
acucuuaaguguucugaca

SEQ ID NO: 1509469 - RNA, 19 nt, Artificial Sequence
  Description of Artificial Sequence: Synthetic oligonucleotide
gauuaauauugguaaggua

SEQ ID NO: 1509470 - RNA, 19 nt, Artificial Sequence
  Description of Artificial Sequence: Synthetic oligonucleotide
aucucucucucucucucuc

SEQ ID NO: 1509471 - RNA, 19 nt, Artificial Sequence
  Description of Artificial Sequence: Synthetic oligonucleotide
uuuaugccguaccauuaaa

SEQ ID NO: 1509472 - RNA, 19 nt, Artificial Sequence
  Description of Artificial Sequence: Synthetic oligonucleotide
acugguagauacaucaaga

SEQ ID NO: 1509473 - RNA, 19 nt, Artificial Sequence
  Description of Artificial Sequence: Synthetic oligonucleotide
aaugcaaugggcaccuaaa

SEQ ID NO: 1509474 - RNA, 19 nt, Artificial Sequence
  Description of Artificial Sequence: Synthetic oligonucleotide
agaauucuaccacucucgu

SEQ ID NO: 1509475 - RNA, 19 nt, Artificial Sequence
  Description of Artificial Sequence: Synthetic oligonucleotide
ggcacaugggaaaugaugc

SEQ ID NO: 1509476 - RNA, 19 nt, Artificial Sequence
  Description of Artificial Sequence: Synthetic oligonucleotide
augacugggugauguacag

SEQ ID NO: 1509477 - RNA, 19 nt, Artificial Sequence
  Description of Artificial Sequence: Synthetic oligonucleotide
acaaucuguguuuaccuuu

SEQ ID NO: 1509478 - RNA, 19 nt, Artificial Sequence
  Description of Artificial Sequence: Synthetic oligonucleotide
acagaguuaccacgcuggg

SEQ ID NO: 1509479 - RNA, 19 nt, Artificial Sequence
  Description of Artificial Sequence: Synthetic oligonucleotide
augggcaccuaaauaaauc

SEQ ID NO: 1509480 - RNA, 19 nt, Artificial Sequence
  Description of Artificial Sequence: Synthetic oligonucleotide
aauagagacuagaauccau

SEQ ID NO: 1509481 - RNA, 19 nt, Artificial Sequence
  Description of Artificial Sequence: Synthetic oligonucleotide
ggaauguuuauaacauagg

SEQ ID NO: 1509482 - RNA, 19 nt, Artificial Sequence
  Description of Artificial Sequence: Synthetic oligonucleotide
gaacucuuaaguguucuga

SEQ ID NO: 1509483 - RNA, 19 nt, Artificial Sequence
  Description of Artificial Sequence: Synthetic oligonucleotide
caaaauguuaucgggguca

SEQ ID NO: 1509484 - RNA, 19 nt, Artificial Sequence
  Description of Artificial Sequence: Synthetic oligonucleotide
auguuggguaaaugacugg

SEQ ID NO: 1509485 - RNA, 19 nt, Artificial Sequence
  Description of Artificial Sequence: Synthetic oligonucleotide
uaguugucuucagucaugc

SEQ ID NO: 1509486 - RNA, 19 nt, Artificial Sequence
  Description of Artificial Sequence: Synthetic oligonucleotide
gcuuaguguaaacaacucc

SEQ ID NO: 1509487 - RNA, 19 nt, Artificial Sequence
  Description of Artificial Sequence: Synthetic oligonucleotide
auccauguuagaaaauuca

SEQ ID NO: 1509488 - RNA, 19 nt, Artificial Sequence
  Description of Artificial Sequence: Synthetic oligonucleotide
uuagaacucuuaaguguuc

SEQ ID NO: 1509489 - RNA, 19 nt, Artificial Sequence
  Description of Artificial Sequence: Synthetic oligonucleotide
agaacucuuaaguguucug

SEQ ID NO: 1509490 - RNA, 19 nt, Artificial Sequence
  Description of Artificial Sequence: Synthetic oligonucleotide
cuucgauucacaguggaca

SEQ ID NO: 1509491 - RNA, 19 nt, Artificial Sequence
  Description of Artificial Sequence: Synthetic oligonucleotide
acugcguagugcuuauugu

SEQ ID NO: 1509492 - RNA, 19 nt, Artificial Sequence
  Description of Artificial Sequence: Synthetic oligonucleotide
cuuggauauuuuauuuuga

SEQ ID NO: 1509493 - RNA, 19 nt, Artificial Sequence
  Description of Artificial Sequence: Synthetic oligonucleotide
acauggguuaagguaauca

SEQ ID NO: 1509494 - RNA, 19 nt, Artificial Sequence
  Description of Artificial Sequence: Synthetic oligonucleotide
uauuuacagucgacuguca

SEQ ID NO: 1509495 - RNA, 19 nt, Artificial Sequence
  Description of Artificial Sequence: Synthetic oligonucleotide
cucucucucucucucacac

SEQ ID NO: 1509496 - RNA, 19 nt, Artificial Sequence
  Description of Artificial Sequence: Synthetic oligonucleotide
uacgacuggcacaugggaa

SEQ ID NO: 1509497 - RNA, 19 nt, Artificial Sequence
  Description of Artificial Sequence: Synthetic oligonucleotide
uaguugcaaaccugaaggu

SEQ ID NO: 1509498 - RNA, 19 nt, Artificial Sequence
  Description of Artificial Sequence: Synthetic oligonucleotide
uuccgcaggugccacgucc

SEQ ID NO: 1509499 - RNA, 19 nt, Artificial Sequence
  Description of Artificial Sequence: Synthetic oligonucleotide
cugauagaacucacaguac

SEQ ID NO: 1509500 - RNA, 19 nt, Artificial Sequence
  Description of Artificial Sequence: Synthetic oligonucleotide
caguauagagccacuucac

SEQ ID NO: 1509501 - RNA, 19 nt, Artificial Sequence
  Description of Artificial Sequence: Synthetic oligonucleotide
ucgacugucauugccugca

SEQ ID NO: 1509502 - RNA, 19 nt, Artificial Sequence
  Description of Artificial Sequence: Synthetic oligonucleotide
ucucacacacacacacaca

SEQ ID NO: 1509503 - RNA, 19 nt, Artificial Sequence
  Description of Artificial Sequence: Synthetic oligonucleotide
cugaagguaauguugggua

SEQ ID NO: 1509504 - RNA, 19 nt, Artificial Sequence
  Description of Artificial Sequence: Synthetic oligonucleotide
gaauagaaguuuugaugaa

SEQ ID NO: 1509505 - RNA, 19 nt, Artificial Sequence
  Description of Artificial Sequence: Synthetic oligonucleotide
acuauaguggaaacacuca

SEQ ID NO: 1509506 - RNA, 19 nt, Artificial Sequence
  Description of Artificial Sequence: Synthetic oligonucleotide
uaaacucacaugugguauu

SEQ ID NO: 1509507 - RNA, 19 nt, Artificial Sequence
  Description of Artificial Sequence: Synthetic oligonucleotide
aaaacaguauagagccacu

SEQ ID NO: 1509508 - RNA, 19 nt, Artificial Sequence
  Description of Artificial Sequence: Synthetic oligonucleotide
ucacacacacacacacaca

SEQ ID NO: 1509509 - RNA, 19 nt, Artificial Sequence
  Description of Artificial Sequence: Synthetic oligonucleotide
acacacacacacacuggcc

SEQ ID NO: 1509510 - RNA, 19 nt, Artificial Sequence
  Description of Artificial Sequence: Synthetic oligonucleotide
agucgacugucauugccug

SEQ ID NO: 1509511 - RNA, 19 nt, Artificial Sequence
  Description of Artificial Sequence: Synthetic oligonucleotide
accacgcugggauuaauau

SEQ ID NO: 1509512 - RNA, 19 nt, Artificial Sequence
  Description of Artificial Sequence: Synthetic oligonucleotide
cuuuaugacuuuguaagaa

SEQ ID NO: 1509513 - RNA, 19 nt, Artificial Sequence
  Description of Artificial Sequence: Synthetic oligonucleotide
ucucucacacacacacaca

SEQ ID NO: 1509514 - RNA, 19 nt, Artificial Sequence
  Description of Artificial Sequence: Synthetic oligonucleotide
gaauagagacuagaaucca

SEQ ID NO: 1509515 - RNA, 19 nt, Artificial Sequence
  Description of Artificial Sequence: Synthetic oligonucleotide
gaggacaggauaguguguc

SEQ ID NO: 1509516 - RNA, 19 nt, Artificial Sequence
  Description of Artificial Sequence: Synthetic oligonucleotide
cacaugggaaaugaugcac

SEQ ID NO: 1509517 - RNA, 19 nt, Artificial Sequence
  Description of Artificial Sequence: Synthetic oligonucleotide
ggguggaauguuuauaaca

SEQ ID NO: 1509518 - RNA, 19 nt, Artificial Sequence
  Description of Artificial Sequence: Synthetic oligonucleotide
agagacuagaauccauguu

SEQ ID NO: 1509519 - RNA, 19 nt, Artificial Sequence
  Description of Artificial Sequence: Synthetic oligonucleotide
cuccagguugcuuuaugac

SEQ ID NO: 1509520 - RNA, 19 nt, Artificial Sequence
  Description of Artificial Sequence: Synthetic oligonucleotide
cuaacuucuuaagaugaca

SEQ ID NO: 1509521 - RNA, 19 nt, Artificial Sequence
  Description of Artificial Sequence: Synthetic oligonucleotide
cuauaguggaaacacucaa

SEQ ID NO: 1509522 - RNA, 19 nt, Artificial Sequence
  Description of Artificial Sequence: Synthetic oligonucleotide
agauaucuauacauguuaa

SEQ ID NO: 1509523 - RNA, 19 nt, Artificial Sequence
  Description of Artificial Sequence: Synthetic oligonucleotide
uggacagguaaauguuacu

SEQ ID NO: 1509524 - RNA, 19 nt, Artificial Sequence
  Description of Artificial Sequence: Synthetic oligonucleotide
uggcagacugacugcguag

SEQ ID NO: 1509525 - RNA, 19 nt, Artificial Sequence
  Description of Artificial Sequence: Synthetic oligonucleotide
aaacaguauagagccacuu

SEQ ID NO: 1509526 - RNA, 19 nt, Artificial Sequence
  Description of Artificial Sequence: Synthetic oligonucleotide
ugggugauguacagugggu

SEQ ID NO: 1509527 - RNA, 19 nt, Artificial Sequence
  Description of Artificial Sequence: Synthetic oligonucleotide
uuagugggcucugccaagc

SEQ ID NO: 1509528 - RNA, 19 nt, Artificial Sequence
  Description of Artificial Sequence: Synthetic oligonucleotide
ucgauucacaguggacagg

SEQ ID NO: 1509529 - RNA, 19 nt, Artificial Sequence
  Description of Artificial Sequence: Synthetic oligonucleotide
gaacucacaguacacucua

SEQ ID NO: 1509530 - RNA, 19 nt, Artificial Sequence
  Description of Artificial Sequence: Synthetic oligonucleotide
ugucuucagucaugcuuag

SEQ ID NO: 1509531 - RNA, 19 nt, Artificial Sequence
  Description of Artificial Sequence: Synthetic oligonucleotide
uacaucucucucucucucu

SEQ ID NO: 1509532 - RNA, 19 nt, Artificial Sequence
  Description of Artificial Sequence: Synthetic oligonucleotide
gauaguguguccaggguua

SEQ ID NO: 1509533 - RNA, 19 nt, Artificial Sequence
  Description of Artificial Sequence: Synthetic oligonucleotide
acacuuacgacuggcacau

SEQ ID NO: 1509534 - RNA, 19 nt, Artificial Sequence
  Description of Artificial Sequence: Synthetic oligonucleotide
auccggguaaacucacaug

SEQ ID NO: 1509535 - RNA, 19 nt, Artificial Sequence
  Description of Artificial Sequence: Synthetic oligonucleotide
cugguagauacaucaagaa

SEQ ID NO: 1509536 - RNA, 19 nt, Artificial Sequence
  Description of Artificial Sequence: Synthetic oligonucleotide
aggauaguguguccagggu

SEQ ID NO: 1509537 - RNA, 19 nt, Artificial Sequence
  Description of Artificial Sequence: Synthetic oligonucleotide
agaacucacaguacacucu

SEQ ID NO: 1509538 - RNA, 19 nt, Artificial Sequence
  Description of Artificial Sequence: Synthetic oligonucleotide
uggguuaaccaaagucguc

SEQ ID NO: 1509539 - RNA, 19 nt, Artificial Sequence
  Description of Artificial Sequence: Synthetic oligonucleotide
ucucucucacacacacaca

SEQ ID NO: 1509540 - RNA, 19 nt, Artificial Sequence
  Description of Artificial Sequence: Synthetic oligonucleotide
gagcugaacacaauggacu

SEQ ID NO: 1509541 - RNA, 19 nt, Artificial Sequence
  Description of Artificial Sequence: Synthetic oligonucleotide
caacauaaauacugauaga

SEQ ID NO: 1509542 - RNA, 19 nt, Artificial Sequence
  Description of Artificial Sequence: Synthetic oligonucleotide
gguaaauguuacuacuaaa

SEQ ID NO: 1509543 - RNA, 19 nt, Artificial Sequence
  Description of Artificial Sequence: Synthetic oligonucleotide
caaaggagccuugacuuuc

SEQ ID NO: 1509544 - RNA, 19 nt, Artificial Sequence
  Description of Artificial Sequence: Synthetic oligonucleotide
cacaauguuacaaaauguu

SEQ ID NO: 1509545 - RNA, 19 nt, Artificial Sequence
  Description of Artificial Sequence: Synthetic oligonucleotide
gucaugcuuaguguaaaca

SEQ ID NO: 1509546 - RNA, 19 nt, Artificial Sequence
  Description of Artificial Sequence: Synthetic oligonucleotide
gccugcaugacucaggaaa

SEQ ID NO: 1509547 - RNA, 19 nt, Artificial Sequence
  Description of Artificial Sequence: Synthetic oligonucleotide
acacacacacacacacugg

SEQ ID NO: 1509548 - RNA, 19 nt, Artificial Sequence
  Description of Artificial Sequence: Synthetic oligonucleotide
ucucucucucucucucuca

SEQ ID NO: 1509549 - RNA, 19 nt, Artificial Sequence
  Description of Artificial Sequence: Synthetic oligonucleotide
guguaaacaacuccauagu

SEQ ID NO: 1509550 - RNA, 19 nt, Artificial Sequence
  Description of Artificial Sequence: Synthetic oligonucleotide
agguggguacuucuucuga

SEQ ID NO: 1509551 - RNA, 19 nt, Artificial Sequence
  Description of Artificial Sequence: Synthetic oligonucleotide
gggaaaugaugcacuauag

SEQ ID NO: 1509552 - RNA, 19 nt, Artificial Sequence
  Description of Artificial Sequence: Synthetic oligonucleotide
gaauaccucuucauaucuc

SEQ ID NO: 1509553 - RNA, 19 nt, Artificial Sequence
  Description of Artificial Sequence: Synthetic oligonucleotide
cucucucucucucucucac

SEQ ID NO: 1509554 - RNA, 19 nt, Artificial Sequence
  Description of Artificial Sequence: Synthetic oligonucleotide
aguugcaaaccugaaggua

SEQ ID NO: 1509555 - RNA, 19 nt, Artificial Sequence
  Description of Artificial Sequence: Synthetic oligonucleotide
guuaaguagcgugccucag

SEQ ID NO: 1509556 - RNA, 19 nt, Artificial Sequence
  Description of Artificial Sequence: Synthetic oligonucleotide
guguucugacauuggguac

SEQ ID NO: 1509557 - RNA, 19 nt, Artificial Sequence
  Description of Artificial Sequence: Synthetic oligonucleotide
guacaucucucucucucuc

SEQ ID NO: 1509558 - RNA, 19 nt, Artificial Sequence
  Description of Artificial Sequence: Synthetic oligonucleotide
augcaaacacguuguuggu

SEQ ID NO: 1509559 - RNA, 19 nt, Artificial Sequence
  Description of Artificial Sequence: Synthetic oligonucleotide
auguuaucggggucacaca

SEQ ID NO: 1509560 - RNA, 19 nt, Artificial Sequence
  Description of Artificial Sequence: Synthetic oligonucleotide
ccaggguuaaguagcgugc

SEQ ID NO: 1509561 - RNA, 19 nt, Artificial Sequence
  Description of Artificial Sequence: Synthetic oligonucleotide
ucucucucucucacacaca

SEQ ID NO: 1509562 - RNA, 19 nt, Artificial Sequence
  Description of Artificial Sequence: Synthetic oligonucleotide
uaccacucucgugaauaag

SEQ ID NO: 1509563 - RNA, 19 nt, Artificial Sequence
  Description of Artificial Sequence: Synthetic oligonucleotide
ugauguacaguggguuaac

SEQ ID NO: 1509564 - RNA, 19 nt, Artificial Sequence
  Description of Artificial Sequence: Synthetic oligonucleotide
caggguuaaguagcgugcc

SEQ ID NO: 1509565 - RNA, 19 nt, Artificial Sequence
  Description of Artificial Sequence: Synthetic oligonucleotide
ccaagcuacacagaaauga

SEQ ID NO: 1509566 - RNA, 19 nt, Artificial Sequence
  Description of Artificial Sequence: Synthetic oligonucleotide
ucucucucucucucucucu

SEQ ID NO: 1509567 - RNA, 19 nt, Artificial Sequence
  Description of Artificial Sequence: Synthetic oligonucleotide
guauagagccacuucacuu

SEQ ID NO: 1509568 - RNA, 19 nt, Artificial Sequence
  Description of Artificial Sequence: Synthetic oligonucleotide
uaccacgcugggauuaaua

SEQ ID NO: 1509569 - RNA, 19 nt, Artificial Sequence
  Description of Artificial Sequence: Synthetic oligonucleotide
ggguuaaccaaagucguca

SEQ ID NO: 1509570 - RNA, 19 nt, Artificial Sequence
  Description of Artificial Sequence: Synthetic oligonucleotide
cacucaacauacugcagaa

SEQ ID NO: 1509571 - RNA, 19 nt, Artificial Sequence
  Description of Artificial Sequence: Synthetic oligonucleotide
ucucucucucucucucaca

SEQ ID NO: 1509572 - RNA, 19 nt, Artificial Sequence
  Description of Artificial Sequence: Synthetic oligonucleotide
ucucucucucucucacaca

SEQ ID NO: 1509573 - RNA, 19 nt, Artificial Sequence
  Description of Artificial Sequence: Synthetic oligonucleotide
ucacaguggacagguaaau

SEQ ID NO: 1509574 - RNA, 19 nt, Artificial Sequence
  Description of Artificial Sequence: Synthetic oligonucleotide
acugguagggaggaaguua

SEQ ID NO: 1509575 - RNA, 19 nt, Artificial Sequence
  Description of Artificial Sequence: Synthetic oligonucleotide
ggagcugaacacaauggac

SEQ ID NO: 1509576 - RNA, 19 nt, Artificial Sequence
  Description of Artificial Sequence: Synthetic oligonucleotide
aggguuaaguagcgugccu

SEQ ID NO: 1509577 - RNA, 19 nt, Artificial Sequence
  Description of Artificial Sequence: Synthetic oligonucleotide
uacagucgacugucauugc

SEQ ID NO: 1509578 - RNA, 19 nt, Artificial Sequence
  Description of Artificial Sequence: Synthetic oligonucleotide
cucucgugaauaaggcaca

SEQ ID NO: 1509579 - RNA, 19 nt, Artificial Sequence
  Description of Artificial Sequence: Synthetic oligonucleotide
cucucucucucucucucuc

SEQ ID NO: 1509580 - RNA, 19 nt, Artificial Sequence
  Description of Artificial Sequence: Synthetic oligonucleotide
ucaguaggcugcacaucau

SEQ ID NO: 1509581 - RNA, 19 nt, Artificial Sequence
  Description of Artificial Sequence: Synthetic oligonucleotide
caguaggcugcacaucauc

SEQ ID NO: 1509582 - RNA, 19 nt, Artificial Sequence
  Description of Artificial Sequence: Synthetic oligonucleotide
ccacucucgugaauaaggc

SEQ ID NO: 1509583 - RNA, 19 nt, Artificial Sequence
  Description of Artificial Sequence: Synthetic oligonucleotide
gauccggguaaacucacau

SEQ ID NO: 1509584 - RNA, 19 nt, Artificial Sequence
  Description of Artificial Sequence: Synthetic oligonucleotide
gguuaaguagcgugccuca

SEQ ID NO: 1509585 - RNA, 19 nt, Artificial Sequence
  Description of Artificial Sequence: Synthetic oligonucleotide
guaaacucacaugugguau

SEQ ID NO: 1509586 - RNA, 19 nt, Artificial Sequence
  Description of Artificial Sequence: Synthetic oligonucleotide
caaugggcaccuaaauaaa

SEQ ID NO: 1509587 - RNA, 19 nt, Artificial Sequence
  Description of Artificial Sequence: Synthetic oligonucleotide
cacguuguugguggcagac

SEQ ID NO: 1509588 - RNA, 19 nt, Artificial Sequence
  Description of Artificial Sequence: Synthetic oligonucleotide
cauggguuaagguaaucau

SEQ ID NO: 1509589 - RNA, 19 nt, Artificial Sequence
  Description of Artificial Sequence: Synthetic oligonucleotide
ggguacaucucucucucuc

SEQ ID NO: 1509590 - RNA, 19 nt, Artificial Sequence
  Description of Artificial Sequence: Synthetic oligonucleotide
ugaacacaauggacuggua

SEQ ID NO: 1509591 - RNA, 19 nt, Artificial Sequence
  Description of Artificial Sequence: Synthetic oligonucleotide
cuaauggguacaucucucu

SEQ ID NO: 1509592 - RNA, 19 nt, Artificial Sequence
  Description of Artificial Sequence: Synthetic oligonucleotide
aguugucuucagucaugcu

SEQ ID NO: 1509593 - RNA, 19 nt, Artificial Sequence
  Description of Artificial Sequence: Synthetic oligonucleotide
cauccacaauacaaguuua

SEQ ID NO: 1509594 - RNA, 19 nt, Artificial Sequence
  Description of Artificial Sequence: Synthetic oligonucleotide
auucuaccacucucgugaa

SEQ ID NO: 1509595 - RNA, 19 nt, Artificial Sequence
  Description of Artificial Sequence: Synthetic oligonucleotide
caagauaucuauacauguu

SEQ ID NO: 1509596 - RNA, 19 nt, Artificial Sequence
  Description of Artificial Sequence: Synthetic oligonucleotide
cacucucgugaauaaggca

SEQ ID NO: 1509597 - RNA, 19 nt, Artificial Sequence
  Description of Artificial Sequence: Synthetic oligonucleotide
gugguauuuacagucgacu

SEQ ID NO: 1509598 - RNA, 19 nt, Artificial Sequence
  Description of Artificial Sequence: Synthetic oligonucleotide
aagucgucaguaggcugca

SEQ ID NO: 1509599 - RNA, 19 nt, Artificial Sequence
  Description of Artificial Sequence: Synthetic oligonucleotide
cuucagucaugcuuagugu

SEQ ID NO: 1509600 - RNA, 19 nt, Artificial Sequence
  Description of Artificial Sequence: Synthetic oligonucleotide
aguuuacaagauaucuaua

SEQ ID NO: 1509601 - RNA, 19 nt, Artificial Sequence
  Description of Artificial Sequence: Synthetic oligonucleotide
cuggaauagaaguuuugau

SEQ ID NO: 1509602 - RNA, 19 nt, Artificial Sequence
  Description of Artificial Sequence: Synthetic oligonucleotide
aguuaccacgcugggauua

SEQ ID NO: 1509603 - RNA, 19 nt, Artificial Sequence
  Description of Artificial Sequence: Synthetic oligonucleotide
gccauuagugggcucugcc

SEQ ID NO: 1509604 - RNA, 19 nt, Artificial Sequence
  Description of Artificial Sequence: Synthetic oligonucleotide
aaaugacuuuagacauggu

SEQ ID NO: 1509605 - RNA, 19 nt, Artificial Sequence
  Description of Artificial Sequence: Synthetic oligonucleotide
ucucgugaauaaggcacaa

SEQ ID NO: 1509606 - RNA, 19 nt, Artificial Sequence
  Description of Artificial Sequence: Synthetic oligonucleotide
cuuuacaugcgguguuaaa

SEQ ID NO: 1509607 - RNA, 19 nt, Artificial Sequence
  Description of Artificial Sequence: Synthetic oligonucleotide
gucgacugucauugccugc

SEQ ID NO: 1509608 - RNA, 19 nt, Artificial Sequence
  Description of Artificial Sequence: Synthetic oligonucleotide
ugggcucugccaagcuaca

SEQ ID NO: 1509609 - RNA, 19 nt, Artificial Sequence
  Description of Artificial Sequence: Synthetic oligonucleotide
gugauguacaguggguuaa

SEQ ID NO: 1509610 - RNA, 19 nt, Artificial Sequence
  Description of Artificial Sequence: Synthetic oligonucleotide
ggacagguaaauguuacua

SEQ ID NO: 1509611 - RNA, 19 nt, Artificial Sequence
  Description of Artificial Sequence: Synthetic oligonucleotide
uaucggggucacacagagu

SEQ ID NO: 1509612 - RNA, 19 nt, Artificial Sequence
  Description of Artificial Sequence: Synthetic oligonucleotide
uaguguguccaggguuaag

SEQ ID NO: 1509613 - RNA, 19 nt, Artificial Sequence
  Description of Artificial Sequence: Synthetic oligonucleotide
uucuaccacucucgugaau

SEQ ID NO: 1509614 - RNA, 19 nt, Artificial Sequence
  Description of Artificial Sequence: Synthetic oligonucleotide
cuuugcacaaauggauaaa

SEQ ID NO: 1509615 - RNA, 19 nt, Artificial Sequence
  Description of Artificial Sequence: Synthetic oligonucleotide
acgcugggauuaauauugg

SEQ ID NO: 1509616 - RNA, 19 nt, Artificial Sequence
  Description of Artificial Sequence: Synthetic oligonucleotide
ggugauguacaguggguua

SEQ ID NO: 1509617 - RNA, 19 nt, Artificial Sequence
  Description of Artificial Sequence: Synthetic oligonucleotide
guuaaccaaagucgucagu

SEQ ID NO: 1509618 - RNA, 19 nt, Artificial Sequence
  Description of Artificial Sequence: Synthetic oligonucleotide
guggguuaaccaaagucgu

SEQ ID NO: 1509619 - RNA, 19 nt, Artificial Sequence
  Description of Artificial Sequence: Synthetic oligonucleotide
acacacacacacacacaca

SEQ ID NO: 1509620 - RNA, 19 nt, Artificial Sequence
  Description of Artificial Sequence: Synthetic oligonucleotide
acacacacacacacacacu

SEQ ID NO: 1509621 - RNA, 19 nt, Artificial Sequence
  Description of Artificial Sequence: Synthetic oligonucleotide
cuaccacucucgugaauaa

SEQ ID NO: 1509622 - RNA, 19 nt, Artificial Sequence
  Description of Artificial Sequence: Synthetic oligonucleotide
gguuuccgcaggugccacg

SEQ ID NO: 1509623 - RNA, 19 nt, Artificial Sequence
  Description of Artificial Sequence: Synthetic oligonucleotide
guggcagacugacugcgua

SEQ ID NO: 1509624 - RNA, 19 nt, Artificial Sequence
  Description of Artificial Sequence: Synthetic oligonucleotide
gccacuucacuuuaggguu

SEQ ID NO: 1509625 - RNA, 19 nt, Artificial Sequence
  Description of Artificial Sequence: Synthetic oligonucleotide
gguacaucucucucucucu

SEQ ID NO: 1509626 - RNA, 19 nt, Artificial Sequence
  Description of Artificial Sequence: Synthetic oligonucleotide
caacaaauugcuccagguu

SEQ ID NO: 1509627 - RNA, 19 nt, Artificial Sequence
  Description of Artificial Sequence: Synthetic oligonucleotide
guuggguaaaugacugggu

SEQ ID NO: 1509628 - RNA, 19 nt, Artificial Sequence
  Description of Artificial Sequence: Synthetic oligonucleotide
aggcuucgauucacagugg

SEQ ID NO: 1509629 - RNA, 19 nt, Artificial Sequence
  Description of Artificial Sequence: Synthetic oligonucleotide
auaguguguccaggguuaa

SEQ ID NO: 1509630 - RNA, 19 nt, Artificial Sequence
  Description of Artificial Sequence: Synthetic oligonucleotide
gcaccuaaauaaauccuaa

SEQ ID NO: 1509631 - RNA, 19 nt, Artificial Sequence
  Description of Artificial Sequence: Synthetic oligonucleotide
acguuguugguggcagacu

SEQ ID NO: 1509632 - RNA, 19 nt, Artificial Sequence
  Description of Artificial Sequence: Synthetic oligonucleotide
cacauccacaauacaaguu

SEQ ID NO: 1509633 - RNA, 19 nt, Artificial Sequence
  Description of Artificial Sequence: Synthetic oligonucleotide
gcagacugacugcguagug

SEQ ID NO: 1509634 - RNA, 19 nt, Artificial Sequence
  Description of Artificial Sequence: Synthetic oligonucleotide
caccuaaauaaauccuaau

SEQ ID NO: 1509635 - RNA, 19 nt, Artificial Sequence
  Description of Artificial Sequence: Synthetic oligonucleotide
guacucuauaaaacaguau

SEQ ID NO: 1509636 - RNA, 19 nt, Artificial Sequence
  Description of Artificial Sequence: Synthetic oligonucleotide
ccugggaauccucaucuga

SEQ ID NO: 1509637 - RNA, 19 nt, Artificial Sequence
  Description of Artificial Sequence: Synthetic oligonucleotide
agcagggguggaauguuua

SEQ ID NO: 1509638 - RNA, 19 nt, Artificial Sequence
  Description of Artificial Sequence: Synthetic oligonucleotide
cacauggguuaagguaauc

SEQ ID NO: 1509639 - RNA, 19 nt, Artificial Sequence
  Description of Artificial Sequence: Synthetic oligonucleotide
gcuucgauucacaguggac

SEQ ID NO: 1509640 - RNA, 19 nt, Artificial Sequence
  Description of Artificial Sequence: Synthetic oligonucleotide
cagaguuaccacgcuggga

SEQ ID NO: 1509641 - RNA, 19 nt, Artificial Sequence
  Description of Artificial Sequence: Synthetic oligonucleotide
cugcguagugcuuauuguu

SEQ ID NO: 1509642 - RNA, 19 nt, Artificial Sequence
  Description of Artificial Sequence: Synthetic oligonucleotide
ccggguaaacucacaugug

SEQ ID NO: 1509643 - RNA, 19 nt, Artificial Sequence
  Description of Artificial Sequence: Synthetic oligonucleotide
aaaaugcaaugggcaccua

SEQ ID NO: 1509644 - RNA, 19 nt, Artificial Sequence
  Description of Artificial Sequence: Synthetic oligonucleotide
guuaccacgcugggauuaa

SEQ ID NO: 1509645 - RNA, 19 nt, Artificial Sequence
  Description of Artificial Sequence: Synthetic oligonucleotide
ggguaaaugacugggugau

SEQ ID NO: 1509646 - RNA, 19 nt, Artificial Sequence
  Description of Artificial Sequence: Synthetic oligonucleotide
uuaccacgcugggauuaau

SEQ ID NO: 1509647 - RNA, 19 nt, Artificial Sequence
  Description of Artificial Sequence: Synthetic oligonucleotide
gcuuauuguugguugguuu

SEQ ID NO: 1509648 - RNA, 19 nt, Artificial Sequence
  Description of Artificial Sequence: Synthetic oligonucleotide
ggguaaacucacauguggu

SEQ ID NO: 1509649 - RNA, 19 nt, Artificial Sequence
  Description of Artificial Sequence: Synthetic oligonucleotide
uucugacauuggguaccac

SEQ ID NO: 1509650 - RNA, 19 nt, Artificial Sequence
  Description of Artificial Sequence: Synthetic oligonucleotide
guagugcuuauuguugguu

SEQ ID NO: 1509651 - RNA, 19 nt, Artificial Sequence
  Description of Artificial Sequence: Synthetic oligonucleotide
augaugcacuauaguggaa

SEQ ID NO: 1509652 - RNA, 19 nt, Artificial Sequence
  Description of Artificial Sequence: Synthetic oligonucleotide
ccagguugcuuuaugacuu

SEQ ID NO: 1509653 - RNA, 19 nt, Artificial Sequence
  Description of Artificial Sequence: Synthetic oligonucleotide
caucucucucucucucucu

SEQ ID NO: 1509654 - RNA, 19 nt, Artificial Sequence
  Description of Artificial Sequence: Synthetic oligonucleotide
cucgugaauaaggcacaaa

SEQ ID NO: 1509655 - RNA, 19 nt, Artificial Sequence
  Description of Artificial Sequence: Synthetic oligonucleotide
gguagggaggaaguuaguu

SEQ ID NO: 1509656 - RNA, 19 nt, Artificial Sequence
  Description of Artificial Sequence: Synthetic oligonucleotide
cggggucacacagaguuac

SEQ ID NO: 1509657 - RNA, 19 nt, Artificial Sequence
  Description of Artificial Sequence: Synthetic oligonucleotide
gggcaccuaaauaaauccu

SEQ ID NO: 1509658 - RNA, 19 nt, Artificial Sequence
  Description of Artificial Sequence: Synthetic oligonucleotide
cacucuaaggcagcacaau

SEQ ID NO: 1509659 - RNA, 19 nt, Artificial Sequence
  Description of Artificial Sequence: Synthetic oligonucleotide
ggcagacugacugcguagu

SEQ ID NO: 1509660 - RNA, 19 nt, Artificial Sequence
  Description of Artificial Sequence: Synthetic oligonucleotide
ggacugguagggaggaagu

SEQ ID NO: 1509661 - RNA, 19 nt, Artificial Sequence
  Description of Artificial Sequence: Synthetic oligonucleotide
gcacuauaguggaaacacu

SEQ ID NO: 1509662 - RNA, 19 nt, Artificial Sequence
  Description of Artificial Sequence: Synthetic oligonucleotide
gggugauguacaguggguu

SEQ ID NO: 1509663 - RNA, 19 nt, Artificial Sequence
  Description of Artificial Sequence: Synthetic oligonucleotide
gcagggguggaauguuuau

SEQ ID NO: 1509664 - RNA, 19 nt, Artificial Sequence
  Description of Artificial Sequence: Synthetic oligonucleotide
cacuuacgacuggcacaug

SEQ ID NO: 1509665 - RNA, 19 nt, Artificial Sequence
  Description of Artificial Sequence: Synthetic oligonucleotide
guccaggguuaaguagcgu

SEQ ID NO: 1509666 - RNA, 19 nt, Artificial Sequence
  Description of Artificial Sequence: Synthetic oligonucleotide
cgucaguaggcugcacauc

SEQ ID NO: 1509667 - RNA, 19 nt, Artificial Sequence
  Description of Artificial Sequence: Synthetic oligonucleotide
ccacgcugggauuaauauu

SEQ ID NO: 1509668 - RNA, 19 nt, Artificial Sequence
  Description of Artificial Sequence: Synthetic oligonucleotide
gguggcagacugacugcgu

SEQ ID NO: 1509669 - RNA, 19 nt, Artificial Sequence
  Description of Artificial Sequence: Synthetic oligonucleotide
cgugccucaggcuucgauu

SEQ ID NO: 1509670 - RNA, 19 nt, Artificial Sequence
  Description of Artificial Sequence: Synthetic oligonucleotide
agcgugccucaggcuucga

SEQ ID NO: 1509671 - RNA, 19 nt, Artificial Sequence
  Description of Artificial Sequence: Synthetic oligonucleotide
gcgugccucaggcuucgau

SEQ ID NO: 1509672 - RNA, 19 nt, Artificial Sequence
  Description of Artificial Sequence: Synthetic oligonucleotide
uuuaacaucaucaaguucg

SEQ ID NO: 1509673 - RNA, 19 nt, Artificial Sequence
  Description of Artificial Sequence: Synthetic oligonucleotide
aaugcugugauccagaaga

SEQ ID NO: 1509674 - RNA, 19 nt, Artificial Sequence
  Description of Artificial Sequence: Synthetic oligonucleotide
uacaagaagagccagaucc

SEQ ID NO: 1509675 - RNA, 19 nt, Artificial Sequence
  Description of Artificial Sequence: Synthetic oligonucleotide
aauuaguugugugugaacc

SEQ ID NO: 1509676 - RNA, 19 nt, Artificial Sequence
  Description of Artificial Sequence: Synthetic oligonucleotide
auagcuauaacauugggcu

SEQ ID NO: 1509677 - RNA, 19 nt, Artificial Sequence
  Description of Artificial Sequence: Synthetic oligonucleotide
aacauugggcuuuaucucc

SEQ ID NO: 1509678 - RNA, 19 nt, Artificial Sequence
  Description of Artificial Sequence: Synthetic oligonucleotide
auaacauugggcuuuaucu

SEQ ID NO: 1509679 - RNA, 19 nt, Artificial Sequence
  Description of Artificial Sequence: Synthetic oligonucleotide
agaguugugauacugaaug

SEQ ID NO: 1509680 - RNA, 19 nt, Artificial Sequence
  Description of Artificial Sequence: Synthetic oligonucleotide
uuuaucuccauacugccgc

SEQ ID NO: 1509681 - RNA, 19 nt, Artificial Sequence
  Description of Artificial Sequence: Synthetic oligonucleotide
ucugcuuaaggacacgugg

SEQ ID NO: 1509682 - RNA, 19 nt, Artificial Sequence
  Description of Artificial Sequence: Synthetic oligonucleotide
uaugccagaauuuccauag

SEQ ID NO: 1509683 - RNA, 19 nt, Artificial Sequence
  Description of Artificial Sequence: Synthetic oligonucleotide
agucucgaaauuuggaagc

SEQ ID NO: 1509684 - RNA, 19 nt, Artificial Sequence
  Description of Artificial Sequence: Synthetic oligonucleotide
ugauacugaaugaagguug

SEQ ID NO: 1509685 - RNA, 19 nt, Artificial Sequence
  Description of Artificial Sequence: Synthetic oligonucleotide
uuuagaagucuucuaagcu

SEQ ID NO: 1509686 - RNA, 19 nt, Artificial Sequence
  Description of Artificial Sequence: Synthetic oligonucleotide
uugugaauggggaaagagg

SEQ ID NO: 1509687 - RNA, 19 nt, Artificial Sequence
  Description of Artificial Sequence: Synthetic oligonucleotide
uaacagguuaauuaguugu

SEQ ID NO: 1509688 - RNA, 19 nt, Artificial Sequence
  Description of Artificial Sequence: Synthetic oligonucleotide
cuuaaggacacguggaggc

SEQ ID NO: 1509689 - RNA, 19 nt, Artificial Sequence
  Description of Artificial Sequence: Synthetic oligonucleotide
uggucgauagaguugauca

SEQ ID NO: 1509690 - RNA, 19 nt, Artificial Sequence
  Description of Artificial Sequence: Synthetic oligonucleotide
cauagcuauaacauugggc

SEQ ID NO: 1509691 - RNA, 19 nt, Artificial Sequence
  Description of Artificial Sequence: Synthetic oligonucleotide
ugcuaaauaugccagaauu

SEQ ID NO: 1509692 - RNA, 19 nt, Artificial Sequence
  Description of Artificial Sequence: Synthetic oligonucleotide
cauaugcuaaauaugccag

SEQ ID NO: 1509693 - RNA, 19 nt, Artificial Sequence
  Description of Artificial Sequence: Synthetic oligonucleotide
aguauuauucaucucugcu

SEQ ID NO: 1509694 - RNA, 19 nt, Artificial Sequence
  Description of Artificial Sequence: Synthetic oligonucleotide
ggaagaaugaccucggugc

SEQ ID NO: 1509695 - RNA, 19 nt, Artificial Sequence
  Description of Artificial Sequence: Synthetic oligonucleotide
augaagguugcagaaaugg

SEQ ID NO: 1509696 - RNA, 19 nt, Artificial Sequence
  Description of Artificial Sequence: Synthetic oligonucleotide
agucuuguccuguacuccc

SEQ ID NO: 1509697 - RNA, 19 nt, Artificial Sequence
  Description of Artificial Sequence: Synthetic oligonucleotide
uccauagcuauaacauugg

SEQ ID NO: 1509698 - RNA, 19 nt, Artificial Sequence
  Description of Artificial Sequence: Synthetic oligonucleotide
gagcugaauccauaguucg

SEQ ID NO: 1509699 - RNA, 19 nt, Artificial Sequence
  Description of Artificial Sequence: Synthetic oligonucleotide
agagggccaaucuuguggc

SEQ ID NO: 1509700 - RNA, 19 nt, Artificial Sequence
  Description of Artificial Sequence: Synthetic oligonucleotide
uuagcugucggcuuucaca

SEQ ID NO: 1509701 - RNA, 19 nt, Artificial Sequence
  Description of Artificial Sequence: Synthetic oligonucleotide
uguaacagguuaauuaguu

SEQ ID NO: 1509702 - RNA, 19 nt, Artificial Sequence
  Description of Artificial Sequence: Synthetic oligonucleotide
gaaaaggugacugggcuag

SEQ ID NO: 1509703 - RNA, 19 nt, Artificial Sequence
  Description of Artificial Sequence: Synthetic oligonucleotide
agaauucugcauauugagc

SEQ ID NO: 1509704 - RNA, 19 nt, Artificial Sequence
  Description of Artificial Sequence: Synthetic oligonucleotide
ugucuuacaagaagagcca

SEQ ID NO: 1509705 - RNA, 19 nt, Artificial Sequence
  Description of Artificial Sequence: Synthetic oligonucleotide
ugccuuggauaccauaucc

SEQ ID NO: 1509706 - RNA, 19 nt, Artificial Sequence
  Description of Artificial Sequence: Synthetic oligonucleotide
ucucggauaaacauguauu

SEQ ID NO: 1509707 - RNA, 19 nt, Artificial Sequence
  Description of Artificial Sequence: Synthetic oligonucleotide
augaucuuugacuuguagu

SEQ ID NO: 1509708 - RNA, 19 nt, Artificial Sequence
  Description of Artificial Sequence: Synthetic oligonucleotide
agaaugaccucggugcacc

SEQ ID NO: 1509709 - RNA, 19 nt, Artificial Sequence
  Description of Artificial Sequence: Synthetic oligonucleotide
uguacucccauuccccaag

SEQ ID NO: 1509710 - RNA, 19 nt, Artificial Sequence
  Description of Artificial Sequence: Synthetic oligonucleotide
gcuguaacagguuaauuag

SEQ ID NO: 1509711 - RNA, 19 nt, Artificial Sequence
  Description of Artificial Sequence: Synthetic oligonucleotide
ugcuuaaggacacguggag

SEQ ID NO: 1509712 - RNA, 19 nt, Artificial Sequence
  Description of Artificial Sequence: Synthetic oligonucleotide
uagcugucggcuuucacag

SEQ ID NO: 1509713 - RNA, 19 nt, Artificial Sequence
  Description of Artificial Sequence: Synthetic oligonucleotide
uugggcuuuaucuccauac

SEQ ID NO: 1509714 - RNA, 19 nt, Artificial Sequence
  Description of Artificial Sequence: Synthetic oligonucleotide
aauccauaguucgagucug

SEQ ID NO: 1509715 - RNA, 19 nt, Artificial Sequence
  Description of Artificial Sequence: Synthetic oligonucleotide
ucauggagaggccuccuag

SEQ ID NO: 1509716 - RNA, 19 nt, Artificial Sequence
  Description of Artificial Sequence: Synthetic oligonucleotide
cuuuaucuccauacugccg

SEQ ID NO: 1509717 - RNA, 19 nt, Artificial Sequence
  Description of Artificial Sequence: Synthetic oligonucleotide
agguuaauuaguugugugu

SEQ ID NO: 1509718 - RNA, 19 nt, Artificial Sequence
  Description of Artificial Sequence: Synthetic oligonucleotide
aucaccuaaagaaaacauc

SEQ ID NO: 1509719 - RNA, 19 nt, Artificial Sequence
  Description of Artificial Sequence: Synthetic oligonucleotide
ucggcuuucacagaauucu

SEQ ID NO: 1509720 - RNA, 19 nt, Artificial Sequence
  Description of Artificial Sequence: Synthetic oligonucleotide
uugacuuguagucucggau

SEQ ID NO: 1509721 - RNA, 19 nt, Artificial Sequence
  Description of Artificial Sequence: Synthetic oligonucleotide
ugcagcuugcuguaacagg

SEQ ID NO: 1509722 - RNA, 19 nt, Artificial Sequence
  Description of Artificial Sequence: Synthetic oligonucleotide
agaauuuccauagcuauaa

SEQ ID NO: 1509723 - RNA, 19 nt, Artificial Sequence
  Description of Artificial Sequence: Synthetic oligonucleotide
uuaauuaguugugugugaa

SEQ ID NO: 1509724 - RNA, 19 nt, Artificial Sequence
  Description of Artificial Sequence: Synthetic oligonucleotide
guaacagguuaauuaguug

SEQ ID NO: 1509725 - RNA, 19 nt, Artificial Sequence
  Description of Artificial Sequence: Synthetic oligonucleotide
cugcauauugagcugaauc

SEQ ID NO: 1509726 - RNA, 19 nt, Artificial Sequence
  Description of Artificial Sequence: Synthetic oligonucleotide
uaacauugggcuuuaucuc

SEQ ID NO: 1509727 - RNA, 19 nt, Artificial Sequence
  Description of Artificial Sequence: Synthetic oligonucleotide
cagucucgaaauuuggaag

SEQ ID NO: 1509728 - RNA, 19 nt, Artificial Sequence
  Description of Artificial Sequence: Synthetic oligonucleotide
aaucuuguggccguagcgu

SEQ ID NO: 1509729 - RNA, 19 nt, Artificial Sequence
  Description of Artificial Sequence: Synthetic oligonucleotide
uuauucaucucugcuuaag

SEQ ID NO: 1509730 - RNA, 19 nt, Artificial Sequence
  Description of Artificial Sequence: Synthetic oligonucleotide
cucagcagaguugugauac

SEQ ID NO: 1509731 - RNA, 19 nt, Artificial Sequence
  Description of Artificial Sequence: Synthetic oligonucleotide
aacagguuaauuaguugug

SEQ ID NO: 1509732 - RNA, 19 nt, Artificial Sequence
  Description of Artificial Sequence: Synthetic oligonucleotide
auugccagaagcucuccug

SEQ ID NO: 1509733 - RNA, 19 nt, Artificial Sequence
  Description of Artificial Sequence: Synthetic oligonucleotide
cuuguagucucggauaaac

SEQ ID NO: 1509734 - RNA, 19 nt, Artificial Sequence
  Description of Artificial Sequence: Synthetic oligonucleotide
caaucuuguggccguagcg

SEQ ID NO: 1509735 - RNA, 19 nt, Artificial Sequence
  Description of Artificial Sequence: Synthetic oligonucleotide
guagacaucgggcuagcug

SEQ ID NO: 1509736 - RNA, 19 nt, Artificial Sequence
  Description of Artificial Sequence: Synthetic oligonucleotide
uuaguugugugugaaccac

SEQ ID NO: 1509737 - RNA, 19 nt, Artificial Sequence
  Description of Artificial Sequence: Synthetic oligonucleotide
uccuguuuaacaucaucaa

SEQ ID NO: 1509738 - RNA, 19 nt, Artificial Sequence
  Description of Artificial Sequence: Synthetic oligonucleotide
ccuagcaucaccuaaagaa

SEQ ID NO: 1509739 - RNA, 19 nt, Artificial Sequence
  Description of Artificial Sequence: Synthetic oligonucleotide
aaagagggccaaucuugug

SEQ ID NO: 1509740 - RNA, 19 nt, Artificial Sequence
  Description of Artificial Sequence: Synthetic oligonucleotide
gguuaauuaguugugugug

SEQ ID NO: 1509741 - RNA, 19 nt, Artificial Sequence
  Description of Artificial Sequence: Synthetic oligonucleotide
accauauccugucuuacaa

SEQ ID NO: 1509742 - RNA, 19 nt, Artificial Sequence
  Description of Artificial Sequence: Synthetic oligonucleotide
cuucccuguauuucuuccg

SEQ ID NO: 1509743 - RNA, 19 nt, Artificial Sequence
  Description of Artificial Sequence: Synthetic oligonucleotide
aucuuguggccguagcguc

SEQ ID NO: 1509744 - RNA, 19 nt, Artificial Sequence
  Description of Artificial Sequence: Synthetic oligonucleotide
cagguuaauuaguugugug

SEQ ID NO: 1509745 - RNA, 19 nt, Artificial Sequence
  Description of Artificial Sequence: Synthetic oligonucleotide
auaugcuaaauaugccaga

SEQ ID NO: 1509746 - RNA, 19 nt, Artificial Sequence
  Description of Artificial Sequence: Synthetic oligonucleotide
uuugacuuguagucucgga

SEQ ID NO: 1509747 - RNA, 19 nt, Artificial Sequence
  Description of Artificial Sequence: Synthetic oligonucleotide
ugaucaaauccugagcgau

SEQ ID NO: 1509748 - RNA, 19 nt, Artificial Sequence
  Description of Artificial Sequence: Synthetic oligonucleotide
guuaauuaguuguguguga

SEQ ID NO: 1509749 - RNA, 19 nt, Artificial Sequence
  Description of Artificial Sequence: Synthetic oligonucleotide
acaucaugcucugcaauuc

SEQ ID NO: 1509750 - RNA, 19 nt, Artificial Sequence
  Description of Artificial Sequence: Synthetic oligonucleotide
ugacuuguagucucggaua

SEQ ID NO: 1509751 - RNA, 19 nt, Artificial Sequence
  Description of Artificial Sequence: Synthetic oligonucleotide
accucggugcaccauuuuc

SEQ ID NO: 1509752 - RNA, 19 nt, Artificial Sequence
  Description of Artificial Sequence: Synthetic oligonucleotide
agaagcuuagcugucggcu

SEQ ID NO: 1509753 - RNA, 19 nt, Artificial Sequence
  Description of Artificial Sequence: Synthetic oligonucleotide
aagguugcagaaauggcau

SEQ ID NO: 1509754 - RNA, 19 nt, Artificial Sequence
  Description of Artificial Sequence: Synthetic oligonucleotide
gauaccauauccugucuua

SEQ ID NO: 1509755 - RNA, 19 nt, Artificial Sequence
  Description of Artificial Sequence: Synthetic oligonucleotide
gauccacuaacugugccac

SEQ ID NO: 1509756 - RNA, 19 nt, Artificial Sequence
  Description of Artificial Sequence: Synthetic oligonucleotide
guagucucggauaaacaug

SEQ ID NO: 1509757 - RNA, 19 nt, Artificial Sequence
  Description of Artificial Sequence: Synthetic oligonucleotide
cauacugccgcaguccagc

SEQ ID NO: 1509758 - RNA, 19 nt, Artificial Sequence
  Description of Artificial Sequence: Synthetic oligonucleotide
uuuccauagcuauaacauu

SEQ ID NO: 1509759 - RNA, 19 nt, Artificial Sequence
  Description of Artificial Sequence: Synthetic oligonucleotide
auugagcugaauccauagu

SEQ ID NO: 1509760 - RNA, 19 nt, Artificial Sequence
  Description of Artificial Sequence: Synthetic oligonucleotide
caucccacuccuucgguag

SEQ ID NO: 1509761 - RNA, 19 nt, Artificial Sequence
  Description of Artificial Sequence: Synthetic oligonucleotide
uggagaagcuuagcugucg

SEQ ID NO: 1509762 - RNA, 19 nt, Artificial Sequence
  Description of Artificial Sequence: Synthetic oligonucleotide
gagagcgccacuguaugag

SEQ ID NO: 1509763 - RNA, 19 nt, Artificial Sequence
  Description of Artificial Sequence: Synthetic oligonucleotide
ugagcgauuuucugucucu

SEQ ID NO: 1509764 - RNA, 19 nt, Artificial Sequence
  Description of Artificial Sequence: Synthetic oligonucleotide
gugccacuguuucauaugc

SEQ ID NO: 1509765 - RNA, 19 nt, Artificial Sequence
  Description of Artificial Sequence: Synthetic oligonucleotide
cuagcaucaccuaaagaaa

SEQ ID NO: 1509766 - RNA, 19 nt, Artificial Sequence
  Description of Artificial Sequence: Synthetic oligonucleotide
cccgcgaggagaaugaggg

SEQ ID NO: 1509767 - RNA, 19 nt, Artificial Sequence
  Description of Artificial Sequence: Synthetic oligonucleotide
ucccgcgaggagaaugagg

SEQ ID NO: 1509768 - RNA, 19 nt, Artificial Sequence
  Description of Artificial Sequence: Synthetic oligonucleotide
aguccagccagucucgaaa

SEQ ID NO: 1509769 - RNA, 19 nt, Artificial Sequence
  Description of Artificial Sequence: Synthetic oligonucleotide
ucucgaggaaugcugugau

SEQ ID NO: 1509770 - RNA, 19 nt, Artificial Sequence
  Description of Artificial Sequence: Synthetic oligonucleotide
gauggcgcggugucugcgg

SEQ ID NO: 1509771 - RNA, 19 nt, Artificial Sequence
  Description of Artificial Sequence: Synthetic oligonucleotide
uaguugugugugaaccaca

SEQ ID NO: 1509772 - RNA, 19 nt, Artificial Sequence
  Description of Artificial Sequence: Synthetic oligonucleotide
agagcgccacuguaugagg

SEQ ID NO: 1509773 - RNA, 19 nt, Artificial Sequence
  Description of Artificial Sequence: Synthetic oligonucleotide
agcgccacuguaugagggg

SEQ ID NO: 1509774 - RNA, 19 nt, Artificial Sequence
  Description of Artificial Sequence: Synthetic oligonucleotide
agcugcaguauuauucauc

SEQ ID NO: 1509775 - RNA, 19 nt, Artificial Sequence
  Description of Artificial Sequence: Synthetic oligonucleotide
gagaagcuuagcugucggc

SEQ ID NO: 1509776 - RNA, 19 nt, Artificial Sequence
  Description of Artificial Sequence: Synthetic oligonucleotide
uauuuucagccagggcagg

SEQ ID NO: 1509777 - RNA, 19 nt, Artificial Sequence
  Description of Artificial Sequence: Synthetic oligonucleotide
agaguguagaaagggaaaa

SEQ ID NO: 1509778 - RNA, 19 nt, Artificial Sequence
  Description of Artificial Sequence: Synthetic oligonucleotide
guggccguagcgucgaaug

SEQ ID NO: 1509779 - RNA, 19 nt, Artificial Sequence
  Description of Artificial Sequence: Synthetic oligonucleotide
guggaggcacgucugcgcg

SEQ ID NO: 1509780 - RNA, 19 nt, Artificial Sequence
  Description of Artificial Sequence: Synthetic oligonucleotide
caaagcuuauagccuuccc

SEQ ID NO: 1509781 - RNA, 19 nt, Artificial Sequence
  Description of Artificial Sequence: Synthetic oligonucleotide
acagguuaauuaguugugu

SEQ ID NO: 1509782 - RNA, 19 nt, Artificial Sequence
  Description of Artificial Sequence: Synthetic oligonucleotide
caucucugcuuaaggacac

SEQ ID NO: 1509783 - RNA, 19 nt, Artificial Sequence
  Description of Artificial Sequence: Synthetic oligonucleotide
agggccaaucuuguggccg

SEQ ID NO: 1509784 - RNA, 19 nt, Artificial Sequence
  Description of Artificial Sequence: Synthetic oligonucleotide
uccuagcaucaccuaaaga

SEQ ID NO: 1509785 - RNA, 19 nt, Artificial Sequence
  Description of Artificial Sequence: Synthetic oligonucleotide
gauggcgagagcgccacug

SEQ ID NO: 1509786 - RNA, 19 nt, Artificial Sequence
  Description of Artificial Sequence: Synthetic oligonucleotide
ucgaaauuuggaagcuuuu

SEQ ID NO: 1509787 - RNA, 19 nt, Artificial Sequence
  Description of Artificial Sequence: Synthetic oligonucleotide
agcgauuuucugucucuug

SEQ ID NO: 1509788 - RNA, 19 nt, Artificial Sequence
  Description of Artificial Sequence: Synthetic oligonucleotide
ugucggcuuucacagaauu

SEQ ID NO: 1509789 - RNA, 19 nt, Artificial Sequence
  Description of Artificial Sequence: Synthetic oligonucleotide
ugcuccccgcagcugagag

SEQ ID NO: 1509790 - RNA, 19 nt, Artificial Sequence
  Description of Artificial Sequence: Synthetic oligonucleotide
agaucacccuugcuccccg

SEQ ID NO: 1509791 - RNA, 19 nt, Artificial Sequence
  Description of Artificial Sequence: Synthetic oligonucleotide
uuuucagccagggcaggga

SEQ ID NO: 1509792 - RNA, 19 nt, Artificial Sequence
  Description of Artificial Sequence: Synthetic oligonucleotide
ggagaagcuuagcugucgg

SEQ ID NO: 1509793 - RNA, 19 nt, Artificial Sequence
  Description of Artificial Sequence: Synthetic oligonucleotide
agcuauaacauugggcuuu

SEQ ID NO: 1509794 - RNA, 19 nt, Artificial Sequence
  Description of Artificial Sequence: Synthetic oligonucleotide
uccuucgguaggcacuugu

SEQ ID NO: 1509795 - RNA, 19 nt, Artificial Sequence
  Description of Artificial Sequence: Synthetic oligonucleotide
gggaagaaugaccucggug

SEQ ID NO: 1509796 - RNA, 19 nt, Artificial Sequence
  Description of Artificial Sequence: Synthetic oligonucleotide
uuaucuccauacugccgca

SEQ ID NO: 1509797 - RNA, 19 nt, Artificial Sequence
  Description of Artificial Sequence: Synthetic oligonucleotide
uggauaccauauccugucu

SEQ ID NO: 1509798 - RNA, 19 nt, Artificial Sequence
  Description of Artificial Sequence: Synthetic oligonucleotide
uuaaggacacguggaggca

SEQ ID NO: 1509799 - RNA, 19 nt, Artificial Sequence
  Description of Artificial Sequence: Synthetic oligonucleotide
auccugucuuacaagaaga

SEQ ID NO: 1509800 - RNA, 19 nt, Artificial Sequence
  Description of Artificial Sequence: Synthetic oligonucleotide
guauuauucaucucugcuu

SEQ ID NO: 1509801 - RNA, 19 nt, Artificial Sequence
  Description of Artificial Sequence: Synthetic oligonucleotide
ucggauaaacauguauuuu

SEQ ID NO: 1509802 - RNA, 19 nt, Artificial Sequence
  Description of Artificial Sequence: Synthetic oligonucleotide
gagcgccacuguaugaggg

SEQ ID NO: 1509803 - RNA, 19 nt, Artificial Sequence
  Description of Artificial Sequence: Synthetic oligonucleotide
uaaggacacguggaggcac

SEQ ID NO: 1509804 - RNA, 19 nt, Artificial Sequence
  Description of Artificial Sequence: Synthetic oligonucleotide
aagcuuagcugucggcuuu

SEQ ID NO: 1509805 - RNA, 19 nt, Artificial Sequence
  Description of Artificial Sequence: Synthetic oligonucleotide
ggggaacggggucagagag

SEQ ID NO: 1509806 - RNA, 19 nt, Artificial Sequence
  Description of Artificial Sequence: Synthetic oligonucleotide
agagauggcgcggugucug

SEQ ID NO: 1509807 - RNA, 19 nt, Artificial Sequence
  Description of Artificial Sequence: Synthetic oligonucleotide
cuccuagcaucaccuaaag

SEQ ID NO: 1509808 - RNA, 19 nt, Artificial Sequence
  Description of Artificial Sequence: Synthetic oligonucleotide
gugugugaaccacaucuuc

SEQ ID NO: 1509809 - RNA, 19 nt, Artificial Sequence
  Description of Artificial Sequence: Synthetic oligonucleotide
cuccccgcagcugagagac

SEQ ID NO: 1509810 - RNA, 19 nt, Artificial Sequence
  Description of Artificial Sequence: Synthetic oligonucleotide
ucgguaggcacuugugaau

SEQ ID NO: 1509811 - RNA, 19 nt, Artificial Sequence
  Description of Artificial Sequence: Synthetic oligonucleotide
cacuugugaauggggaaag

SEQ ID NO: 1509812 - RNA, 19 nt, Artificial Sequence
  Description of Artificial Sequence: Synthetic oligonucleotide
ggaacggggucagagagug

SEQ ID NO: 1509813 - RNA, 19 nt, Artificial Sequence
  Description of Artificial Sequence: Synthetic oligonucleotide
ucgcugugagccucaacac

SEQ ID NO: 1509814 - RNA, 19 nt, Artificial Sequence
  Description of Artificial Sequence: Synthetic oligonucleotide
gacacguggaggcacgucu

SEQ ID NO: 1509815 - RNA, 19 nt, Artificial Sequence
  Description of Artificial Sequence: Synthetic oligonucleotide
cugcuuaaggacacgugga

SEQ ID NO: 1509816 - RNA, 19 nt, Artificial Sequence
  Description of Artificial Sequence: Synthetic oligonucleotide
cauaguucgagucugucuu

SEQ ID NO: 1509817 - RNA, 19 nt, Artificial Sequence
  Description of Artificial Sequence: Synthetic oligonucleotide
guacucccauuccccaagg

SEQ ID NO: 1509818 - RNA, 19 nt, Artificial Sequence
  Description of Artificial Sequence: Synthetic oligonucleotide
gcuuaaggacacguggagg

SEQ ID NO: 1509819 - RNA, 19 nt, Artificial Sequence
  Description of Artificial Sequence: Synthetic oligonucleotide
agcuugcuguaacagguua

SEQ ID NO: 1509820 - RNA, 19 nt, Artificial Sequence
  Description of Artificial Sequence: Synthetic oligonucleotide
aguagagucuuguccugua

SEQ ID NO: 1509821 - RNA, 19 nt, Artificial Sequence
  Description of Artificial Sequence: Synthetic oligonucleotide
gagaucacccuugcucccc

SEQ ID NO: 1509822 - RNA, 19 nt, Artificial Sequence
  Description of Artificial Sequence: Synthetic oligonucleotide
ggagaggccuccuagcauc

SEQ ID NO: 1509823 - RNA, 19 nt, Artificial Sequence
  Description of Artificial Sequence: Synthetic oligonucleotide
cuuggauaccauauccugu

SEQ ID NO: 1509824 - RNA, 19 nt, Artificial Sequence
  Description of Artificial Sequence: Synthetic oligonucleotide
uaucuccauacugccgcag

SEQ ID NO: 1509825 - RNA, 19 nt, Artificial Sequence
  Description of Artificial Sequence: Synthetic oligonucleotide
uggagaggccuccuagcau

SEQ ID NO: 1509826 - RNA, 19 nt, Artificial Sequence
  Description of Artificial Sequence: Synthetic oligonucleotide
uaguagagucuuguccugu

SEQ ID NO: 1509827 - RNA, 19 nt, Artificial Sequence
  Description of Artificial Sequence: Synthetic oligonucleotide
cugagcgauuuucugucuc

SEQ ID NO: 1509828 - RNA, 19 nt, Artificial Sequence
  Description of Artificial Sequence: Synthetic oligonucleotide
uguaggaggcgguguguuc

SEQ ID NO: 1509829 - RNA, 19 nt, Artificial Sequence
  Description of Artificial Sequence: Synthetic oligonucleotide
cuucucugauguggcaggg

SEQ ID NO: 1509830 - RNA, 19 nt, Artificial Sequence
  Description of Artificial Sequence: Synthetic oligonucleotide
cucucuuguagcaggcaca

SEQ ID NO: 1509831 - RNA, 19 nt, Artificial Sequence
  Description of Artificial Sequence: Synthetic oligonucleotide
uggggaaagagggccaauc

SEQ ID NO: 1509832 - RNA, 19 nt, Artificial Sequence
  Description of Artificial Sequence: Synthetic oligonucleotide
uacucccauuccccaagga

SEQ ID NO: 1509833 - RNA, 19 nt, Artificial Sequence
  Description of Artificial Sequence: Synthetic oligonucleotide
uguggcucucgaggaaugc

SEQ ID NO: 1509834 - RNA, 19 nt, Artificial Sequence
  Description of Artificial Sequence: Synthetic oligonucleotide
agccagucucgaaauuugg

SEQ ID NO: 1509835 - RNA, 19 nt, Artificial Sequence
  Description of Artificial Sequence: Synthetic oligonucleotide
uucauggagaggccuccua

SEQ ID NO: 1509836 - RNA, 19 nt, Artificial Sequence
  Description of Artificial Sequence: Synthetic oligonucleotide
uccccugccuuggauacca

SEQ ID NO: 1509837 - RNA, 19 nt, Artificial Sequence
  Description of Artificial Sequence: Synthetic oligonucleotide
gugugaaccacaucuucua

SEQ ID NO: 1509838 - RNA, 19 nt, Artificial Sequence
  Description of Artificial Sequence: Synthetic oligonucleotide
ugaagggguccccugccuu

SEQ ID NO: 1509839 - RNA, 19 nt, Artificial Sequence
  Description of Artificial Sequence: Synthetic oligonucleotide
ccauagcuauaacauuggg

SEQ ID NO: 1509840 - RNA, 19 nt, Artificial Sequence
  Description of Artificial Sequence: Synthetic oligonucleotide
augaccucggugcaccauu

SEQ ID NO: 1509841 - RNA, 19 nt, Artificial Sequence
  Description of Artificial Sequence: Synthetic oligonucleotide
cuuagcugucggcuuucac

SEQ ID NO: 1509842 - RNA, 19 nt, Artificial Sequence
  Description of Artificial Sequence: Synthetic oligonucleotide
caucaccuaaagaaaacau

SEQ ID NO: 1509843 - RNA, 19 nt, Artificial Sequence
  Description of Artificial Sequence: Synthetic oligonucleotide
cuuacaagaagagccagau

SEQ ID NO: 1509844 - RNA, 19 nt, Artificial Sequence
  Description of Artificial Sequence: Synthetic oligonucleotide
ugcgcgucccgcgaggaga

SEQ ID NO: 1509845 - RNA, 19 nt, Artificial Sequence
  Description of Artificial Sequence: Synthetic oligonucleotide
uccauaguucgagucuguc

SEQ ID NO: 1509846 - RNA, 19 nt, Artificial Sequence
  Description of Artificial Sequence: Synthetic oligonucleotide
uaguucgagucugucuuuc

SEQ ID NO: 1509847 - RNA, 19 nt, Artificial Sequence
  Description of Artificial Sequence: Synthetic oligonucleotide
gcaguagacaucgggcuag

SEQ ID NO: 1509848 - RNA, 19 nt, Artificial Sequence
  Description of Artificial Sequence: Synthetic oligonucleotide
cacgucugcgcgucccgcg

SEQ ID NO: 1509849 - RNA, 19 nt, Artificial Sequence
  Description of Artificial Sequence: Synthetic oligonucleotide
uacugccgcaguccagcca

SEQ ID NO: 1509850 - RNA, 19 nt, Artificial Sequence
  Description of Artificial Sequence: Synthetic oligonucleotide
auaguucgagucugucuuu

SEQ ID NO: 1509851 - RNA, 19 nt, Artificial Sequence
  Description of Artificial Sequence: Synthetic oligonucleotide
ccauauccugucuuacaag

SEQ ID NO: 1509852 - RNA, 19 nt, Artificial Sequence
  Description of Artificial Sequence: Synthetic oligonucleotide
gaaagagggccaaucuugu

SEQ ID NO: 1509853 - RNA, 19 nt, Artificial Sequence
  Description of Artificial Sequence: Synthetic oligonucleotide
agcgucgaauggcuucucu

SEQ ID NO: 1509854 - RNA, 19 nt, Artificial Sequence
  Description of Artificial Sequence: Synthetic oligonucleotide
cucggauaaacauguauuu

SEQ ID NO: 1509855 - RNA, 19 nt, Artificial Sequence
  Description of Artificial Sequence: Synthetic oligonucleotide
gagauggcgcggugucugc

SEQ ID NO: 1509856 - RNA, 19 nt, Artificial Sequence
  Description of Artificial Sequence: Synthetic oligonucleotide
aggcacuugugaaugggga

SEQ ID NO: 1509857 - RNA, 19 nt, Artificial Sequence
  Description of Artificial Sequence: Synthetic oligonucleotide
aucucugcuuaaggacacg

SEQ ID NO: 1509858 - RNA, 19 nt, Artificial Sequence
  Description of Artificial Sequence: Synthetic oligonucleotide
gucucggauaaacauguau

SEQ ID NO: 1509859 - RNA, 19 nt, Artificial Sequence
  Description of Artificial Sequence: Synthetic oligonucleotide
gagggccaaucuuguggcc

SEQ ID NO: 1509860 - RNA, 19 nt, Artificial Sequence
  Description of Artificial Sequence: Synthetic oligonucleotide
agggaagaaugaccucggu

SEQ ID NO: 1509861 - RNA, 19 nt, Artificial Sequence
  Description of Artificial Sequence: Synthetic oligonucleotide
cauauugagcugaauccau

SEQ ID NO: 1509862 - RNA, 19 nt, Artificial Sequence
  Description of Artificial Sequence: Synthetic oligonucleotide
ucgggcuagcugcaguauu

SEQ ID NO: 1509863 - RNA, 19 nt, Artificial Sequence
  Description of Artificial Sequence: Synthetic oligonucleotide
cucgaaauuuggaagcuuu

SEQ ID NO: 1509864 - RNA, 19 nt, Artificial Sequence
  Description of Artificial Sequence: Synthetic oligonucleotide
cuggucgauagaguugauc

SEQ ID NO: 1509865 - RNA, 19 nt, Artificial Sequence
  Description of Artificial Sequence: Synthetic oligonucleotide
auggcgagagcgccacugu

SEQ ID NO: 1509866 - RNA, 19 nt, Artificial Sequence
  Description of Artificial Sequence: Synthetic oligonucleotide
cacccuugcuccccgcagc

SEQ ID NO: 1509867 - RNA, 19 nt, Artificial Sequence
  Description of Artificial Sequence: Synthetic oligonucleotide
auauugagcugaauccaua

SEQ ID NO: 1509868 - RNA, 19 nt, Artificial Sequence
  Description of Artificial Sequence: Synthetic oligonucleotide
agauggcgcggugucugcg

SEQ ID NO: 1509869 - RNA, 19 nt, Artificial Sequence
  Description of Artificial Sequence: Synthetic oligonucleotide
acuaacugugccacuguuu

SEQ ID NO: 1509870 - RNA, 19 nt, Artificial Sequence
  Description of Artificial Sequence: Synthetic oligonucleotide
auggcaucgcugugagccu

SEQ ID NO: 1509871 - RNA, 19 nt, Artificial Sequence
  Description of Artificial Sequence: Synthetic oligonucleotide
ucugcauauugagcugaau

SEQ ID NO: 1509872 - RNA, 19 nt, Artificial Sequence
  Description of Artificial Sequence: Synthetic oligonucleotide
agcuuagcugucggcuuuc

SEQ ID NO: 1509873 - RNA, 19 nt, Artificial Sequence
  Description of Artificial Sequence: Synthetic oligonucleotide
agcugaauccauaguucga

SEQ ID NO: 1509874 - RNA, 19 nt, Artificial Sequence
  Description of Artificial Sequence: Synthetic oligonucleotide
gcaagauggcgagagcgcc

SEQ ID NO: 1509875 - RNA, 19 nt, Artificial Sequence
  Description of Artificial Sequence: Synthetic oligonucleotide
caagauggcgagagcgcca

SEQ ID NO: 1509876 - RNA, 19 nt, Artificial Sequence
  Description of Artificial Sequence: Synthetic oligonucleotide
uggcugaagggguccccug

SEQ ID NO: 1509877 - RNA, 19 nt, Artificial Sequence
  Description of Artificial Sequence: Synthetic oligonucleotide
ugaccucggugcaccauuu

SEQ ID NO: 1509878 - RNA, 19 nt, Artificial Sequence
  Description of Artificial Sequence: Synthetic oligonucleotide
ccaaaacugcuguuucaug

SEQ ID NO: 1509879 - RNA, 19 nt, Artificial Sequence
  Description of Artificial Sequence: Synthetic oligonucleotide
gaagcuuagcugucggcuu

SEQ ID NO: 1509880 - RNA, 19 nt, Artificial Sequence
  Description of Artificial Sequence: Synthetic oligonucleotide
gguccccugccuuggauac

SEQ ID NO: 1509881 - RNA, 19 nt, Artificial Sequence
  Description of Artificial Sequence: Synthetic oligonucleotide
aggccuccuagcaucaccu

SEQ ID NO: 1509882 - RNA, 19 nt, Artificial Sequence
  Description of Artificial Sequence: Synthetic oligonucleotide
gacaucgggcuagcugcag

SEQ ID NO: 1509883 - RNA, 19 nt, Artificial Sequence
  Description of Artificial Sequence: Synthetic oligonucleotide
ccagucucgaaauuuggaa

SEQ ID NO: 1509884 - RNA, 19 nt, Artificial Sequence
  Description of Artificial Sequence: Synthetic oligonucleotide
gcgucgaauggcuucucug

SEQ ID NO: 1509885 - RNA, 19 nt, Artificial Sequence
  Description of Artificial Sequence: Synthetic oligonucleotide
gcugucggcuuucacagaa

SEQ ID NO: 1509886 - RNA, 19 nt, Artificial Sequence
  Description of Artificial Sequence: Synthetic oligonucleotide
cccuguauuucuuccgcug

SEQ ID NO: 1509887 - RNA, 19 nt, Artificial Sequence
  Description of Artificial Sequence: Synthetic oligonucleotide
gaucacccuugcuccccgc

SEQ ID NO: 1509888 - RNA, 19 nt, Artificial Sequence
  Description of Artificial Sequence: Synthetic oligonucleotide
augguccccucagcaggcc

SEQ ID NO: 1509889 - RNA, 19 nt, Artificial Sequence
  Description of Artificial Sequence: Synthetic oligonucleotide
ccaaucuuguggccguagc

SEQ ID NO: 1509890 - RNA, 19 nt, Artificial Sequence
  Description of Artificial Sequence: Synthetic oligonucleotide
gucugcgcgucccgcgagg

SEQ ID NO: 1509891 - RNA, 19 nt, Artificial Sequence
  Description of Artificial Sequence: Synthetic oligonucleotide
gucggcuuucacagaauuc

SEQ ID NO: 1509892 - RNA, 19 nt, Artificial Sequence
  Description of Artificial Sequence: Synthetic oligonucleotide
uccagccagucucgaaauu

SEQ ID NO: 1509893 - RNA, 19 nt, Artificial Sequence
  Description of Artificial Sequence: Synthetic oligonucleotide
gcgagagcgccacuguaug

SEQ ID NO: 1509894 - RNA, 19 nt, Artificial Sequence
  Description of Artificial Sequence: Synthetic oligonucleotide
ggaaaaggugacugggcua

SEQ ID NO: 1509895 - RNA, 19 nt, Artificial Sequence
  Description of Artificial Sequence: Synthetic oligonucleotide
gcaaagcuuauagccuucc

SEQ ID NO: 1509896 - RNA, 19 nt, Artificial Sequence
  Description of Artificial Sequence: Synthetic oligonucleotide
uggcgagagcgccacugua

SEQ ID NO: 1509897 - RNA, 19 nt, Artificial Sequence
  Description of Artificial Sequence: Synthetic oligonucleotide
gggcaggacuucaaacagg

SEQ ID NO: 1509898 - RNA, 19 nt, Artificial Sequence
  Description of Artificial Sequence: Synthetic oligonucleotide
gcugaagggguccccugcc

SEQ ID NO: 1509899 - RNA, 19 nt, Artificial Sequence
  Description of Artificial Sequence: Synthetic oligonucleotide
auccacuaacugugccacu

SEQ ID NO: 1509900 - RNA, 19 nt, Artificial Sequence
  Description of Artificial Sequence: Synthetic oligonucleotide
gccacuguaugaggggcgg

SEQ ID NO: 1509901 - RNA, 19 nt, Artificial Sequence
  Description of Artificial Sequence: Synthetic oligonucleotide
cugucuggucgauagaguu

SEQ ID NO: 1509902 - RNA, 19 nt, Artificial Sequence
  Description of Artificial Sequence: Synthetic oligonucleotide
uggaggcacgucugcgcgu

SEQ ID NO: 1509903 - RNA, 19 nt, Artificial Sequence
  Description of Artificial Sequence: Synthetic oligonucleotide
ggcacuugugaauggggaa

SEQ ID NO: 1509904 - RNA, 19 nt, Artificial Sequence
  Description of Artificial Sequence: Synthetic oligonucleotide
ggucgauagaguugaucaa

SEQ ID NO: 1509905 - RNA, 19 nt, Artificial Sequence
  Description of Artificial Sequence: Synthetic oligonucleotide
guaggaggcgguguguucu

SEQ ID NO: 1509906 - RNA, 19 nt, Artificial Sequence
  Description of Artificial Sequence: Synthetic oligonucleotide
ugcugcugccacucaguuu

SEQ ID NO: 1509907 - RNA, 19 nt, Artificial Sequence
  Description of Artificial Sequence: Synthetic oligonucleotide
acacguggaggcacgucug

SEQ ID NO: 1509908 - RNA, 19 nt, Artificial Sequence
  Description of Artificial Sequence: Synthetic oligonucleotide
acgucugcgcgucccgcga

SEQ ID NO: 1509909 - RNA, 19 nt, Artificial Sequence
  Description of Artificial Sequence: Synthetic oligonucleotide
ccuucgguaggcacuugug

SEQ ID NO: 1509910 - RNA, 19 nt, Artificial Sequence
  Description of Artificial Sequence: Synthetic oligonucleotide
ucuggucgauagaguugau

SEQ ID NO: 1509911 - RNA, 19 nt, Artificial Sequence
  Description of Artificial Sequence: Synthetic oligonucleotide
gcuuuuaguagagucuugu

SEQ ID NO: 1509912 - RNA, 19 nt, Artificial Sequence
  Description of Artificial Sequence: Synthetic oligonucleotide
cugaauccauaguucgagu

SEQ ID NO: 1509913 - RNA, 19 nt, Artificial Sequence
  Description of Artificial Sequence: Synthetic oligonucleotide
caucaugcucugcaauucu

SEQ ID NO: 1509914 - RNA, 19 nt, Artificial Sequence
  Description of Artificial Sequence: Synthetic oligonucleotide
uguggccguagcgucgaau

SEQ ID NO: 1509915 - RNA, 19 nt, Artificial Sequence
  Description of Artificial Sequence: Synthetic oligonucleotide
gacagagauggcgcggugu

SEQ ID NO: 1509916 - RNA, 19 nt, Artificial Sequence
  Description of Artificial Sequence: Synthetic oligonucleotide
cguagcgucgaauggcuuc

SEQ ID NO: 1509917 - RNA, 19 nt, Artificial Sequence
  Description of Artificial Sequence: Synthetic oligonucleotide
agcugucggcuuucacaga

SEQ ID NO: 1509918 - RNA, 19 nt, Artificial Sequence
  Description of Artificial Sequence: Synthetic oligonucleotide
acuuguagucucggauaaa

SEQ ID NO: 1509919 - RNA, 19 nt, Artificial Sequence
  Description of Artificial Sequence: Synthetic oligonucleotide
acggggucagagaguguag

SEQ ID NO: 1509920 - RNA, 19 nt, Artificial Sequence
  Description of Artificial Sequence: Synthetic oligonucleotide
cuguacucccauuccccaa

SEQ ID NO: 1509921 - RNA, 19 nt, Artificial Sequence
  Description of Artificial Sequence: Synthetic oligonucleotide
cgauagaguugaucaaauc

SEQ ID NO: 1509922 - RNA, 19 nt, Artificial Sequence
  Description of Artificial Sequence: Synthetic oligonucleotide
guagcgucgaauggcuucu

SEQ ID NO: 1509923 - RNA, 19 nt, Artificial Sequence
  Description of Artificial Sequence: Synthetic oligonucleotide
ggcacgucugcgcgucccg

SEQ ID NO: 1509924 - RNA, 19 nt, Artificial Sequence
  Description of Artificial Sequence: Synthetic oligonucleotide
ggcauggcugaaggggucc

SEQ ID NO: 1509925 - RNA, 19 nt, Artificial Sequence
  Description of Artificial Sequence: Synthetic oligonucleotide
gcggggaacggggucagag

SEQ ID NO: 1509926 - RNA, 19 nt, Artificial Sequence
  Description of Artificial Sequence: Synthetic oligonucleotide
gcacuugugaauggggaaa

SEQ ID NO: 1509927 - RNA, 19 nt, Artificial Sequence
  Description of Artificial Sequence: Synthetic oligonucleotide
gggucagagaguguagaaa

SEQ ID NO: 1509928 - RNA, 19 nt, Artificial Sequence
  Description of Artificial Sequence: Synthetic oligonucleotide
gcuuauagccuucccugua

SEQ ID NO: 1509929 - RNA, 19 nt, Artificial Sequence
  Description of Artificial Sequence: Synthetic oligonucleotide
caucgcugugagccucaac

SEQ ID NO: 1509930 - RNA, 19 nt, Artificial Sequence
  Description of Artificial Sequence: Synthetic oligonucleotide
cagaguugugauacugaau

SEQ ID NO: 1509931 - RNA, 19 nt, Artificial Sequence
  Description of Artificial Sequence: Synthetic oligonucleotide
ggggucagagaguguagaa

SEQ ID NO: 1509932 - RNA, 19 nt, Artificial Sequence
  Description of Artificial Sequence: Synthetic oligonucleotide
ggcaguagacaucgggcua

SEQ ID NO: 1509933 - RNA, 19 nt, Artificial Sequence
  Description of Artificial Sequence: Synthetic oligonucleotide
ccuccuagcaucaccuaaa

SEQ ID NO: 1509934 - RNA, 19 nt, Artificial Sequence
  Description of Artificial Sequence: Synthetic oligonucleotide
gccuccuagcaucaccuaa

SEQ ID NO: 1509935 - RNA, 19 nt, Artificial Sequence
  Description of Artificial Sequence: Synthetic oligonucleotide
aucgggcuagcugcaguau

SEQ ID NO: 1509936 - RNA, 19 nt, Artificial Sequence
  Description of Artificial Sequence: Synthetic oligonucleotide
cauugccagaagcucuccu

SEQ ID NO: 1509937 - RNA, 19 nt, Artificial Sequence
  Description of Artificial Sequence: Synthetic oligonucleotide
ccugccuuggauaccauau

SEQ ID NO: 1509938 - RNA, 19 nt, Artificial Sequence
  Description of Artificial Sequence: Synthetic oligonucleotide
gccaaucuuguggccguag

SEQ ID NO: 1509939 - RNA, 19 nt, Artificial Sequence
  Description of Artificial Sequence: Synthetic oligonucleotide
ccauacugccgcaguccag

SEQ ID NO: 1509940 - RNA, 19 nt, Artificial Sequence
  Description of Artificial Sequence: Synthetic oligonucleotide
cuguuucauggagaggccu

SEQ ID NO: 1509941 - RNA, 19 nt, Artificial Sequence
  Description of Artificial Sequence: Synthetic oligonucleotide
agauggcgagagcgccacu

SEQ ID NO: 1509942 - RNA, 19 nt, Artificial Sequence
  Description of Artificial Sequence: Synthetic oligonucleotide
gucccgcgaggagaaugag

SEQ ID NO: 1509943 - RNA, 19 nt, Artificial Sequence
  Description of Artificial Sequence: Synthetic oligonucleotide
gcgccacuguaugaggggc

SEQ ID NO: 1509944 - RNA, 19 nt, Artificial Sequence
  Description of Artificial Sequence: Synthetic oligonucleotide
aggacacguggaggcacgu

SEQ ID NO: 1509945 - RNA, 19 nt, Artificial Sequence
  Description of Artificial Sequence: Synthetic oligonucleotide
ccauaguucgagucugucu

SEQ ID NO: 1509946 - RNA, 19 nt, Artificial Sequence
  Description of Artificial Sequence: Synthetic oligonucleotide
cugcgcgucccgcgaggag

SEQ ID NO: 1509947 - RNA, 19 nt, Artificial Sequence
  Description of Artificial Sequence: Synthetic oligonucleotide
ccauuccccaaggacccag

SEQ ID NO: 1509948 - RNA, 19 nt, Artificial Sequence
  Description of Artificial Sequence: Synthetic oligonucleotide
ggaggcacgucugcgcguc

SEQ ID NO: 1509949 - RNA, 19 nt, Artificial Sequence
  Description of Artificial Sequence: Synthetic oligonucleotide
cgccacuguaugaggggcg

SEQ ID NO: 1509950 - RNA, 19 nt, Artificial Sequence
  Description of Artificial Sequence: Synthetic oligonucleotide
ccgcgaggagaaugagggg

SEQ ID NO: 1509951 - RNA, 19 nt, Artificial Sequence
  Description of Artificial Sequence: Synthetic oligonucleotide
guggcucucgaggaaugcu

SEQ ID NO: 1509952 - RNA, 19 nt, Artificial Sequence
  Description of Artificial Sequence: Synthetic oligonucleotide
cggcuuucacagaauucug

SEQ ID NO: 1509953 - RNA, 19 nt, Artificial Sequence
  Description of Artificial Sequence: Synthetic oligonucleotide
ccucggugcaccauuuucu

SEQ ID NO: 1509954 - RNA, 19 nt, Artificial Sequence
  Description of Artificial Sequence: Synthetic oligonucleotide
ugcggcggcggcggcggcc

SEQ ID NO: 1509955 - RNA, 19 nt, Artificial Sequence
  Description of Artificial Sequence: Synthetic oligonucleotide
uuguggccguagcgucgaa

SEQ ID NO: 1509956 - RNA, 19 nt, Artificial Sequence
  Description of Artificial Sequence: Synthetic oligonucleotide
uccccgcagcugagagacu

SEQ ID NO: 1509957 - RNA, 19 nt, Artificial Sequence
  Description of Artificial Sequence: Synthetic oligonucleotide
gcuauaacauugggcuuua

SEQ ID NO: 1509958 - RNA, 19 nt, Artificial Sequence
  Description of Artificial Sequence: Synthetic oligonucleotide
cacuaacugugccacuguu

SEQ ID NO: 1509959 - RNA, 19 nt, Artificial Sequence
  Description of Artificial Sequence: Synthetic oligonucleotide
gagcgauuuucugucucuu

SEQ ID NO: 1509960 - RNA, 19 nt, Artificial Sequence
  Description of Artificial Sequence: Synthetic oligonucleotide
cugaagggguccccugccu

SEQ ID NO: 1509961 - RNA, 19 nt, Artificial Sequence
  Description of Artificial Sequence: Synthetic oligonucleotide
acaggccgcagugcucuuu

SEQ ID NO: 1509962 - RNA, 19 nt, Artificial Sequence
  Description of Artificial Sequence: Synthetic oligonucleotide
ggggcggggaacgggguca

SEQ ID NO: 1509963 - RNA, 19 nt, Artificial Sequence
  Description of Artificial Sequence: Synthetic oligonucleotide
guguaggaggcgguguguu

SEQ ID NO: 1509964 - RNA, 19 nt, Artificial Sequence
  Description of Artificial Sequence: Synthetic oligonucleotide
ccgggacacgaugggcugg

SEQ ID NO: 1509965 - RNA, 19 nt, Artificial Sequence
  Description of Artificial Sequence: Synthetic oligonucleotide
cgucccgcgaggagaauga

SEQ ID NO: 1509966 - RNA, 19 nt, Artificial Sequence
  Description of Artificial Sequence: Synthetic oligonucleotide
gcuccccgcagcugagaga

SEQ ID NO: 1509967 - RNA, 19 nt, Artificial Sequence
  Description of Artificial Sequence: Synthetic oligonucleotide
ggacacguggaggcacguc

SEQ ID NO: 1509968 - RNA, 19 nt, Artificial Sequence
  Description of Artificial Sequence: Synthetic oligonucleotide
cuccuucgguaggcacuug

SEQ ID NO: 1509969 - RNA, 19 nt, Artificial Sequence
  Description of Artificial Sequence: Synthetic oligonucleotide
cagcuugcuguaacagguu

SEQ ID NO: 1509970 - RNA, 19 nt, Artificial Sequence
  Description of Artificial Sequence: Synthetic oligonucleotide
gcacgucugcgcgucccgc

SEQ ID NO: 1509971 - RNA, 19 nt, Artificial Sequence
  Description of Artificial Sequence: Synthetic oligonucleotide
gaccucggugcaccauuuu

SEQ ID NO: 1509972 - RNA, 19 nt, Artificial Sequence
  Description of Artificial Sequence: Synthetic oligonucleotide
cccgcagcugagagacuuc

SEQ ID NO: 1509973 - RNA, 19 nt, Artificial Sequence
  Description of Artificial Sequence: Synthetic oligonucleotide
gccccgggacacgaugggc

SEQ ID NO: 1509974 - RNA, 19 nt, Artificial Sequence
  Description of Artificial Sequence: Synthetic oligonucleotide
ggcgagagcgccacuguau

SEQ ID NO: 1509975 - RNA, 19 nt, Artificial Sequence
  Description of Artificial Sequence: Synthetic oligonucleotide
gccguagcgucgaauggcu

SEQ ID NO: 1509976 - RNA, 19 nt, Artificial Sequence
  Description of Artificial Sequence: Synthetic oligonucleotide
gcuuagcugucggcuuuca

SEQ ID NO: 1509977 - RNA, 19 nt, Artificial Sequence
  Description of Artificial Sequence: Synthetic oligonucleotide
gaacggggucagagagugu

SEQ ID NO: 1509978 - RNA, 19 nt, Artificial Sequence
  Description of Artificial Sequence: Synthetic oligonucleotide
gggaacggggucagagagu

SEQ ID NO: 1509979 - RNA, 19 nt, Artificial Sequence
  Description of Artificial Sequence: Synthetic oligonucleotide
cggggaacggggucagaga

SEQ ID NO: 1509980 - RNA, 19 nt, Artificial Sequence
  Description of Artificial Sequence: Synthetic oligonucleotide
cuauaacauugggcuuuau

SEQ ID NO: 1509981 - RNA, 19 nt, Artificial Sequence
  Description of Artificial Sequence: Synthetic oligonucleotide
cgucugcgcgucccgcgag

SEQ ID NO: 1509982 - RNA, 19 nt, Artificial Sequence
  Description of Artificial Sequence: Synthetic oligonucleotide
cccugccuuggauaccaua

SEQ ID NO: 1509983 - RNA, 19 nt, Artificial Sequence
  Description of Artificial Sequence: Synthetic oligonucleotide
gcggcggcggcggcggccc

SEQ ID NO: 1509984 - RNA, 19 nt, Artificial Sequence
  Description of Artificial Sequence: Synthetic oligonucleotide
cggggucagagaguguaga

SEQ ID NO: 1509985 - RNA, 19 nt, Artificial Sequence
  Description of Artificial Sequence: Synthetic oligonucleotide
cugcggcggcggcggcggc

SEQ ID NO: 1509986 - RNA, 19 nt, Artificial Sequence
  Description of Artificial Sequence: Synthetic oligonucleotide
ggggcgcaagauggcgaga

SEQ ID NO: 1509987 - RNA, 19 nt, Artificial Sequence
  Description of Artificial Sequence: Synthetic oligonucleotide
gcggcggccccgggacacg

SEQ ID NO: 1509988 - RNA, 19 nt, Artificial Sequence
  Description of Artificial Sequence: Synthetic oligonucleotide
ggccaaucuuguggccgua

SEQ ID NO: 1509989 - RNA, 19 nt, Artificial Sequence
  Description of Artificial Sequence: Synthetic oligonucleotide
ggcggggaacggggucaga

SEQ ID NO: 1509990 - RNA, 19 nt, Artificial Sequence
  Description of Artificial Sequence: Synthetic oligonucleotide
ccguagcgucgaauggcuu

SEQ ID NO: 1509991 - RNA, 19 nt, Artificial Sequence
  Description of Artificial Sequence: Synthetic oligonucleotide
gcucuccugucuggucgau

SEQ ID NO: 1509992 - RNA, 19 nt, Artificial Sequence
  Description of Artificial Sequence: Synthetic oligonucleotide
cggcggccccgggacacga

SEQ ID NO: 1509993 - RNA, 19 nt, Artificial Sequence
  Description of Artificial Sequence: Synthetic oligonucleotide
aaagaaaggaccgaggcag

SEQ ID NO: 1509994 - RNA, 19 nt, Artificial Sequence
  Description of Artificial Sequence: Synthetic oligonucleotide
aauugugacaucggcaccc

SEQ ID NO: 1509995 - RNA, 19 nt, Artificial Sequence
  Description of Artificial Sequence: Synthetic oligonucleotide
uuaauugugacaucggcac

SEQ ID NO: 1509996 - RNA, 19 nt, Artificial Sequence
  Description of Artificial Sequence: Synthetic oligonucleotide
auaauaguccagcuguccc

SEQ ID NO: 1509997 - RNA, 19 nt, Artificial Sequence
  Description of Artificial Sequence: Synthetic oligonucleotide
aguugcuucggcuacuugc

SEQ ID NO: 1509998 - RNA, 19 nt, Artificial Sequence
  Description of Artificial Sequence: Synthetic oligonucleotide
auaguccgaagucacagcc

SEQ ID NO: 1509999 - RNA, 19 nt, Artificial Sequence
  Description of Artificial Sequence: Synthetic oligonucleotide
uucguuacgggcauucacg

SEQ ID NO: 1510000 - RNA, 19 nt, Artificial Sequence
  Description of Artificial Sequence: Synthetic oligonucleotide
aaugggaguucacugggag

SEQ ID NO: 1510001 - RNA, 19 nt, Artificial Sequence
  Description of Artificial Sequence: Synthetic oligonucleotide
uggaagaauaggcacaccu

SEQ ID NO: 1510002 - RNA, 19 nt, Artificial Sequence
  Description of Artificial Sequence: Synthetic oligonucleotide
guuacgggcauucacgucc

SEQ ID NO: 1510003 - RNA, 19 nt, Artificial Sequence
  Description of Artificial Sequence: Synthetic oligonucleotide
ucaugucgaauccugagac

SEQ ID NO: 1510004 - RNA, 19 nt, Artificial Sequence
  Description of Artificial Sequence: Synthetic oligonucleotide
cagcaugaaagaaaggacc

SEQ ID NO: 1510005 - RNA, 19 nt, Artificial Sequence
  Description of Artificial Sequence: Synthetic oligonucleotide
aaggcugcgaaccuccgag

SEQ ID NO: 1510006 - RNA, 19 nt, Artificial Sequence
  Description of Artificial Sequence: Synthetic oligonucleotide
aagaguugauucuggaaga

SEQ ID NO: 1510007 - RNA, 19 nt, Artificial Sequence
  Description of Artificial Sequence: Synthetic oligonucleotide
caguaugccaucuugcagc

SEQ ID NO: 1510008 - RNA, 19 nt, Artificial Sequence
  Description of Artificial Sequence: Synthetic oligonucleotide
agaugcauaguccgaaguc

SEQ ID NO: 1510009 - RNA, 19 nt, Artificial Sequence
  Description of Artificial Sequence: Synthetic oligonucleotide
acaguugacaaugaucagg

SEQ ID NO: 1510010 - RNA, 19 nt, Artificial Sequence
  Description of Artificial Sequence: Synthetic oligonucleotide
caguugacaaugaucaggc

SEQ ID NO: 1510011 - RNA, 19 nt, Artificial Sequence
  Description of Artificial Sequence: Synthetic oligonucleotide
ugcauggauagguaccugg

SEQ ID NO: 1510012 - RNA, 19 nt, Artificial Sequence
  Description of Artificial Sequence: Synthetic oligonucleotide
aaccaaugggaguucacug

SEQ ID NO: 1510013 - RNA, 19 nt, Artificial Sequence
  Description of Artificial Sequence: Synthetic oligonucleotide
agcacauagggacaguuug

SEQ ID NO: 1510014 - RNA, 19 nt, Artificial Sequence
  Description of Artificial Sequence: Synthetic oligonucleotide
gacaguuugggccagggca

SEQ ID NO: 1510015 - RNA, 19 nt, Artificial Sequence
  Description of Artificial Sequence: Synthetic oligonucleotide
ucacuauccgcccuggaug

SEQ ID NO: 1510016 - RNA, 19 nt, Artificial Sequence
  Description of Artificial Sequence: Synthetic oligonucleotide
guuggccuagcacauaggg

SEQ ID NO: 1510017 - RNA, 19 nt, Artificial Sequence
  Description of Artificial Sequence: Synthetic oligonucleotide
uacccugcgacccaguaug

SEQ ID NO: 1510018 - RNA, 19 nt, Artificial Sequence
  Description of Artificial Sequence: Synthetic oligonucleotide
uccgaugucaugucgaauc

SEQ ID NO: 1510019 - RNA, 19 nt, Artificial Sequence
  Description of Artificial Sequence: Synthetic oligonucleotide
augccagaugcauaguccg

SEQ ID NO: 1510020 - RNA, 19 nt, Artificial Sequence
  Description of Artificial Sequence: Synthetic oligonucleotide
agccaugcuacccugcgac

SEQ ID NO: 1510021 - RNA, 19 nt, Artificial Sequence
  Description of Artificial Sequence: Synthetic oligonucleotide
uugauucuggaagaauagg

SEQ ID NO: 1510022 - RNA, 19 nt, Artificial Sequence
  Description of Artificial Sequence: Synthetic oligonucleotide
accgcuacaguccuucagg

SEQ ID NO: 1510023 - RNA, 19 nt, Artificial Sequence
  Description of Artificial Sequence: Synthetic oligonucleotide
agcaugaaagaaaggaccg

SEQ ID NO: 1510024 - RNA, 19 nt, Artificial Sequence
  Description of Artificial Sequence: Synthetic oligonucleotide
caugccagaugcauagucc

SEQ ID NO: 1510025 - RNA, 19 nt, Artificial Sequence
  Description of Artificial Sequence: Synthetic oligonucleotide
aguaugccaucuugcagcg

SEQ ID NO: 1510026 - RNA, 19 nt, Artificial Sequence
  Description of Artificial Sequence: Synthetic oligonucleotide
acauagggacaguuugggc

SEQ ID NO: 1510027 - RNA, 19 nt, Artificial Sequence
  Description of Artificial Sequence: Synthetic oligonucleotide
uagguaucaggacauccug

SEQ ID NO: 1510028 - RNA, 19 nt, Artificial Sequence
  Description of Artificial Sequence: Synthetic oligonucleotide
aggaaugauguacuggcca

SEQ ID NO: 1510029 - RNA, 19 nt, Artificial Sequence
  Description of Artificial Sequence: Synthetic oligonucleotide
auggauagguaccugggca

SEQ ID NO: 1510030 - RNA, 19 nt, Artificial Sequence
  Description of Artificial Sequence: Synthetic oligonucleotide
aaaccaaugggaguucacu

SEQ ID NO: 1510031 - RNA, 19 nt, Artificial Sequence
  Description of Artificial Sequence: Synthetic oligonucleotide
ugguuggccuagcacauag

SEQ ID NO: 1510032 - RNA, 19 nt, Artificial Sequence
  Description of Artificial Sequence: Synthetic oligonucleotide
gaguaucuaggucaccagc

SEQ ID NO: 1510033 - RNA, 19 nt, Artificial Sequence
  Description of Artificial Sequence: Synthetic oligonucleotide
gauucuggaagaauaggca

SEQ ID NO: 1510034 - RNA, 19 nt, Artificial Sequence
  Description of Artificial Sequence: Synthetic oligonucleotide
accaguucgcgguuaauug

SEQ ID NO: 1510035 - RNA, 19 nt, Artificial Sequence
  Description of Artificial Sequence: Synthetic oligonucleotide
cuucugaaccaguucgcgg

SEQ ID NO: 1510036 - RNA, 19 nt, Artificial Sequence
  Description of Artificial Sequence: Synthetic oligonucleotide
auagggacaguuugggcca

SEQ ID NO: 1510037 - RNA, 19 nt, Artificial Sequence
  Description of Artificial Sequence: Synthetic oligonucleotide
uaauugugacaucggcacc

SEQ ID NO: 1510038 - RNA, 19 nt, Artificial Sequence
  Description of Artificial Sequence: Synthetic oligonucleotide
gguuaauugugacaucggc

SEQ ID NO: 1510039 - RNA, 19 nt, Artificial Sequence
  Description of Artificial Sequence: Synthetic oligonucleotide
gaugcauaguccgaaguca

SEQ ID NO: 1510040 - RNA, 19 nt, Artificial Sequence
  Description of Artificial Sequence: Synthetic oligonucleotide
aagaauaggcacaccucag

SEQ ID NO: 1510041 - RNA, 19 nt, Artificial Sequence
  Description of Artificial Sequence: Synthetic oligonucleotide
uucacuauccgcccuggau

SEQ ID NO: 1510042 - RNA, 19 nt, Artificial Sequence
  Description of Artificial Sequence: Synthetic oligonucleotide
agguuuaggucucugccca

SEQ ID NO: 1510043 - RNA, 19 nt, Artificial Sequence
  Description of Artificial Sequence: Synthetic oligonucleotide
acacccugaugccugcccc

SEQ ID NO: 1510044 - RNA, 19 nt, Artificial Sequence
  Description of Artificial Sequence: Synthetic oligonucleotide
ucgaauccugagacaaugc

SEQ ID NO: 1510045 - RNA, 19 nt, Artificial Sequence
  Description of Artificial Sequence: Synthetic oligonucleotide
aagaaaggaccgaggcagc

SEQ ID NO: 1510046 - RNA, 19 nt, Artificial Sequence
  Description of Artificial Sequence: Synthetic oligonucleotide
uucgcgguuaauugugaca

SEQ ID NO: 1510047 - RNA, 19 nt, Artificial Sequence
  Description of Artificial Sequence: Synthetic oligonucleotide
cagugcauggauagguacc

SEQ ID NO: 1510048 - RNA, 19 nt, Artificial Sequence
  Description of Artificial Sequence: Synthetic oligonucleotide
caaugaucaggccuuguuc

SEQ ID NO: 1510049 - RNA, 19 nt, Artificial Sequence
  Description of Artificial Sequence: Synthetic oligonucleotide
ugcagaguaucuaggucac

SEQ ID NO: 1510050 - RNA, 19 nt, Artificial Sequence
  Description of Artificial Sequence: Synthetic oligonucleotide
cacauagggacaguuuggg

SEQ ID NO: 1510051 - RNA, 19 nt, Artificial Sequence
  Description of Artificial Sequence: Synthetic oligonucleotide
ugggcccauucccagagcc

SEQ ID NO: 1510052 - RNA, 19 nt, Artificial Sequence
  Description of Artificial Sequence: Synthetic oligonucleotide
augaaagaaaggaccgagg

SEQ ID NO: 1510053 - RNA, 19 nt, Artificial Sequence
  Description of Artificial Sequence: Synthetic oligonucleotide
ugccauuccgacugagaag

SEQ ID NO: 1510054 - RNA, 19 nt, Artificial Sequence
  Description of Artificial Sequence: Synthetic oligonucleotide
agugggguuugaccgcuac

SEQ ID NO: 1510055 - RNA, 19 nt, Artificial Sequence
  Description of Artificial Sequence: Synthetic oligonucleotide
aguaucuaggucaccagca

SEQ ID NO: 1510056 - RNA, 19 nt, Artificial Sequence
  Description of Artificial Sequence: Synthetic oligonucleotide
agcuucaaaccaaugggag

SEQ ID NO: 1510057 - RNA, 19 nt, Artificial Sequence
  Description of Artificial Sequence: Synthetic oligonucleotide
cauggauagguaccugggc

SEQ ID NO: 1510058 - RNA, 19 nt, Artificial Sequence
  Description of Artificial Sequence: Synthetic oligonucleotide
ugcugugcaccaccagacg

SEQ ID NO: 1510059 - RNA, 19 nt, Artificial Sequence
  Description of Artificial Sequence: Synthetic oligonucleotide
gaauccugagacaaugcca

SEQ ID NO: 1510060 - RNA, 19 nt, Artificial Sequence
  Description of Artificial Sequence: Synthetic oligonucleotide
aguucacugggagacacug

SEQ ID NO: 1510061 - RNA, 19 nt, Artificial Sequence
  Description of Artificial Sequence: Synthetic oligonucleotide
agguaucaggacauccugc

SEQ ID NO: 1510062 - RNA, 19 nt, Artificial Sequence
  Description of Artificial Sequence: Synthetic oligonucleotide
guguccauaauaguccagc

SEQ ID NO: 1510063 - RNA, 19 nt, Artificial Sequence
  Description of Artificial Sequence: Synthetic oligonucleotide
cugagacaaugccagcucc

SEQ ID NO: 1510064 - RNA, 19 nt, Artificial Sequence
  Description of Artificial Sequence: Synthetic oligonucleotide
caucguuccacagugcaug

SEQ ID NO: 1510065 - RNA, 19 nt, Artificial Sequence
  Description of Artificial Sequence: Synthetic oligonucleotide
acgaagcaggucuggauug

SEQ ID NO: 1510066 - RNA, 19 nt, Artificial Sequence
  Description of Artificial Sequence: Synthetic oligonucleotide
ugguuguccgauugccccg

SEQ ID NO: 1510067 - RNA, 19 nt, Artificial Sequence
  Description of Artificial Sequence: Synthetic oligonucleotide
cauaguccgaagucacagc

SEQ ID NO: 1510068 - RNA, 19 nt, Artificial Sequence
  Description of Artificial Sequence: Synthetic oligonucleotide
ugaccacaccuuucagugg

SEQ ID NO: 1510069 - RNA, 19 nt, Artificial Sequence
  Description of Artificial Sequence: Synthetic oligonucleotide
cacuauccgcccuggaugc

SEQ ID NO: 1510070 - RNA, 19 nt, Artificial Sequence
  Description of Artificial Sequence: Synthetic oligonucleotide
gauagguaccugggcaccg

SEQ ID NO: 1510071 - RNA, 19 nt, Artificial Sequence
  Description of Artificial Sequence: Synthetic oligonucleotide
gcgguuaauugugacaucg

SEQ ID NO: 1510072 - RNA, 19 nt, Artificial Sequence
  Description of Artificial Sequence: Synthetic oligonucleotide
aucuaggucaccagcauga

SEQ ID NO: 1510073 - RNA, 19 nt, Artificial Sequence
  Description of Artificial Sequence: Synthetic oligonucleotide
uaguccgaagucacagccc

SEQ ID NO: 1510074 - RNA, 19 nt, Artificial Sequence
  Description of Artificial Sequence: Synthetic oligonucleotide
ucgcgguuaauugugacau

SEQ ID NO: 1510075 - RNA, 19 nt, Artificial Sequence
  Description of Artificial Sequence: Synthetic oligonucleotide
gucgaauccugagacaaug

SEQ ID NO: 1510076 - RNA, 19 nt, Artificial Sequence
  Description of Artificial Sequence: Synthetic oligonucleotide
aucguuccacagugcaugg

SEQ ID NO: 1510077 - RNA, 19 nt, Artificial Sequence
  Description of Artificial Sequence: Synthetic oligonucleotide
guccgaaccagggaggcgg

SEQ ID NO: 1510078 - RNA, 19 nt, Artificial Sequence
  Description of Artificial Sequence: Synthetic oligonucleotide
acaaugaucaggccuuguu

SEQ ID NO: 1510079 - RNA, 19 nt, Artificial Sequence
  Description of Artificial Sequence: Synthetic oligonucleotide
agaaaggaccgaggcagcg

SEQ ID NO: 1510080 - RNA, 19 nt, Artificial Sequence
  Description of Artificial Sequence: Synthetic oligonucleotide
cuucguuacgggcauucac

SEQ ID NO: 1510081 - RNA, 19 nt, Artificial Sequence
  Description of Artificial Sequence: Synthetic oligonucleotide
caguucgcgguuaauugug

SEQ ID NO: 1510082 - RNA, 19 nt, Artificial Sequence
  Description of Artificial Sequence: Synthetic oligonucleotide
uaggcacaccucaggaaug

SEQ ID NO: 1510083 - RNA, 19 nt, Artificial Sequence
  Description of Artificial Sequence: Synthetic oligonucleotide
ugcauaguccgaagucaca

SEQ ID NO: 1510084 - RNA, 19 nt, Artificial Sequence
  Description of Artificial Sequence: Synthetic oligonucleotide
ucguuacgggcauucacgu

SEQ ID NO: 1510085 - RNA, 19 nt, Artificial Sequence
  Description of Artificial Sequence: Synthetic oligonucleotide
agcgaaggccaaucguguc

SEQ ID NO: 1510086 - RNA, 19 nt, Artificial Sequence
  Description of Artificial Sequence: Synthetic oligonucleotide
gccauuccgacugagaagc

SEQ ID NO: 1510087 - RNA, 19 nt, Artificial Sequence
  Description of Artificial Sequence: Synthetic oligonucleotide
augucgaauccugagacaa

SEQ ID NO: 1510088 - RNA, 19 nt, Artificial Sequence
  Description of Artificial Sequence: Synthetic oligonucleotide
agugcauggauagguaccu

SEQ ID NO: 1510089 - RNA, 19 nt, Artificial Sequence
  Description of Artificial Sequence: Synthetic oligonucleotide
caggaaugauguacuggcc

SEQ ID NO: 1510090 - RNA, 19 nt, Artificial Sequence
  Description of Artificial Sequence: Synthetic oligonucleotide
gcugugcaccaccagacgg

SEQ ID NO: 1510091 - RNA, 19 nt, Artificial Sequence
  Description of Artificial Sequence: Synthetic oligonucleotide
cagguucucacggccaucg

SEQ ID NO: 1510092 - RNA, 19 nt, Artificial Sequence
  Description of Artificial Sequence: Synthetic oligonucleotide
gguacaguugacaaugauc

SEQ ID NO: 1510093 - RNA, 19 nt, Artificial Sequence
  Description of Artificial Sequence: Synthetic oligonucleotide
gucaugucgaauccugaga

SEQ ID NO: 1510094 - RNA, 19 nt, Artificial Sequence
  Description of Artificial Sequence: Synthetic oligonucleotide
cacaccucaggaaugaugu

SEQ ID NO: 1510095 - RNA, 19 nt, Artificial Sequence
  Description of Artificial Sequence: Synthetic oligonucleotide
uccccgcgaagauucuugg

SEQ ID NO: 1510096 - RNA, 19 nt, Artificial Sequence
  Description of Artificial Sequence: Synthetic oligonucleotide
gaugccugccccucacggc

SEQ ID NO: 1510097 - RNA, 19 nt, Artificial Sequence
  Description of Artificial Sequence: Synthetic oligonucleotide
cuaggucaccagcaugagc

SEQ ID NO: 1510098 - RNA, 19 nt, Artificial Sequence
  Description of Artificial Sequence: Synthetic oligonucleotide
aaccaguucgcgguuaauu

SEQ ID NO: 1510099 - RNA, 19 nt, Artificial Sequence
  Description of Artificial Sequence: Synthetic oligonucleotide
ugaaccaguucgcgguuaa

SEQ ID NO: 1510100 - RNA, 19 nt, Artificial Sequence
  Description of Artificial Sequence: Synthetic oligonucleotide
ugaucaggccuuguucagc

SEQ ID NO: 1510101 - RNA, 19 nt, Artificial Sequence
  Description of Artificial Sequence: Synthetic oligonucleotide
gaccgcuacaguccuucag

SEQ ID NO: 1510102 - RNA, 19 nt, Artificial Sequence
  Description of Artificial Sequence: Synthetic oligonucleotide
uccgacugagaagccaugc

SEQ ID NO: 1510103 - RNA, 19 nt, Artificial Sequence
  Description of Artificial Sequence: Synthetic oligonucleotide
uuacgggcauucacgucca

SEQ ID NO: 1510104 - RNA, 19 nt, Artificial Sequence
  Description of Artificial Sequence: Synthetic oligonucleotide
acgucacgcuccauggugc

SEQ ID NO: 1510105 - RNA, 19 nt, Artificial Sequence
  Description of Artificial Sequence: Synthetic oligonucleotide
aaggccaaucgugucugug

SEQ ID NO: 1510106 - RNA, 19 nt, Artificial Sequence
  Description of Artificial Sequence: Synthetic oligonucleotide
gguuugaccgcuacagucc

SEQ ID NO: 1510107 - RNA, 19 nt, Artificial Sequence
  Description of Artificial Sequence: Synthetic oligonucleotide
agguccgaaccagggaggc

SEQ ID NO: 1510108 - RNA, 19 nt, Artificial Sequence
  Description of Artificial Sequence: Synthetic oligonucleotide
gacacccugaugccugccc

SEQ ID NO: 1510109 - RNA, 19 nt, Artificial Sequence
  Description of Artificial Sequence: Synthetic oligonucleotide
guucucacggccaucguuc

SEQ ID NO: 1510110 - RNA, 19 nt, Artificial Sequence
  Description of Artificial Sequence: Synthetic oligonucleotide
uccgauugccccggaagag

SEQ ID NO: 1510111 - RNA, 19 nt, Artificial Sequence
  Description of Artificial Sequence: Synthetic oligonucleotide
uggauuggugggcccauuc

SEQ ID NO: 1510112 - RNA, 19 nt, Artificial Sequence
  Description of Artificial Sequence: Synthetic oligonucleotide
gacaggcaagccccagcgg

SEQ ID NO: 1510113 - RNA, 19 nt, Artificial Sequence
  Description of Artificial Sequence: Synthetic oligonucleotide
ucuaggucaccagcaugag

SEQ ID NO: 1510114 - RNA, 19 nt, Artificial Sequence
  Description of Artificial Sequence: Synthetic oligonucleotide
cagaguaucuaggucacca

SEQ ID NO: 1510115 - RNA, 19 nt, Artificial Sequence
  Description of Artificial Sequence: Synthetic oligonucleotide
agaagccaugcuacccugc

SEQ ID NO: 1510116 - RNA, 19 nt, Artificial Sequence
  Description of Artificial Sequence: Synthetic oligonucleotide
uugaccgcuacaguccuuc

SEQ ID NO: 1510117 - RNA, 19 nt, Artificial Sequence
  Description of Artificial Sequence: Synthetic oligonucleotide
ccaaugggaguucacuggg

SEQ ID NO: 1510118 - RNA, 19 nt, Artificial Sequence
  Description of Artificial Sequence: Synthetic oligonucleotide
ggcauucacguccacgccc

SEQ ID NO: 1510119 - RNA, 19 nt, Artificial Sequence
  Description of Artificial Sequence: Synthetic oligonucleotide
gcauaguccgaagucacag

SEQ ID NO: 1510120 - RNA, 19 nt, Artificial Sequence
  Description of Artificial Sequence: Synthetic oligonucleotide
ggguuugaccgcuacaguc

SEQ ID NO: 1510121 - RNA, 19 nt, Artificial Sequence
  Description of Artificial Sequence: Synthetic oligonucleotide
cauccugcguggcaucagc

SEQ ID NO: 1510122 - RNA, 19 nt, Artificial Sequence
  Description of Artificial Sequence: Synthetic oligonucleotide
cuggaauacuaggugccag

SEQ ID NO: 1510123 - RNA, 19 nt, Artificial Sequence
  Description of Artificial Sequence: Synthetic oligonucleotide
agccuccgaugucaugucg

SEQ ID NO: 1510124 - RNA, 19 nt, Artificial Sequence
  Description of Artificial Sequence: Synthetic oligonucleotide
uauccgcccuggaugccag

SEQ ID NO: 1510125 - RNA, 19 nt, Artificial Sequence
  Description of Artificial Sequence: Synthetic oligonucleotide
uccgaaccagggaggcggg

SEQ ID NO: 1510126 - RNA, 19 nt, Artificial Sequence
  Description of Artificial Sequence: Synthetic oligonucleotide
gauguacuggccagccaug

SEQ ID NO: 1510127 - RNA, 19 nt, Artificial Sequence
  Description of Artificial Sequence: Synthetic oligonucleotide
gaucaggccuuguucagcu

SEQ ID NO: 1510128 - RNA, 19 nt, Artificial Sequence
  Description of Artificial Sequence: Synthetic oligonucleotide
augggaguucacugggaga

SEQ ID NO: 1510129 - RNA, 19 nt, Artificial Sequence
  Description of Artificial Sequence: Synthetic oligonucleotide
aucggcacccacaguggcc

SEQ ID NO: 1510130 - RNA, 19 nt, Artificial Sequence
  Description of Artificial Sequence: Synthetic oligonucleotide
auugccccggaagaguuga

SEQ ID NO: 1510131 - RNA, 19 nt, Artificial Sequence
  Description of Artificial Sequence: Synthetic oligonucleotide
auagguaccugggcaccgg

SEQ ID NO: 1510132 - RNA, 19 nt, Artificial Sequence
  Description of Artificial Sequence: Synthetic oligonucleotide
ucgugucugugccauggau

SEQ ID NO: 1510133 - RNA, 19 nt, Artificial Sequence
  Description of Artificial Sequence: Synthetic oligonucleotide
uccaccuugguuguccgau

SEQ ID NO: 1510134 - RNA, 19 nt, Artificial Sequence
  Description of Artificial Sequence: Synthetic oligonucleotide
cuagguaucaggacauccu

SEQ ID NO: 1510135 - RNA, 19 nt, Artificial Sequence
  Description of Artificial Sequence: Synthetic oligonucleotide
uagcacauagggacaguuu

SEQ ID NO: 1510136 - RNA, 19 nt, Artificial Sequence
  Description of Artificial Sequence: Synthetic oligonucleotide
cugcguggcaucagccucc

SEQ ID NO: 1510137 - RNA, 19 nt, Artificial Sequence
  Description of Artificial Sequence: Synthetic oligonucleotide
ugcgaaccuccgagcaucc

SEQ ID NO: 1510138 - RNA, 19 nt, Artificial Sequence
  Description of Artificial Sequence: Synthetic oligonucleotide
gcaccggugaggaugacag

SEQ ID NO: 1510139 - RNA, 19 nt, Artificial Sequence
  Description of Artificial Sequence: Synthetic oligonucleotide
ugucgaauccugagacaau

SEQ ID NO: 1510140 - RNA, 19 nt, Artificial Sequence
  Description of Artificial Sequence: Synthetic oligonucleotide
uuccgacugagaagccaug

SEQ ID NO: 1510141 - RNA, 19 nt, Artificial Sequence
  Description of Artificial Sequence: Synthetic oligonucleotide
cucacggccaucguuccac

SEQ ID NO: 1510142 - RNA, 19 nt, Artificial Sequence
  Description of Artificial Sequence: Synthetic oligonucleotide
cugccauuccgacugagaa

SEQ ID NO: 1510143 - RNA, 19 nt, Artificial Sequence
  Description of Artificial Sequence: Synthetic oligonucleotide
uccacgcccuucuguagca

SEQ ID NO: 1510144 - RNA, 19 nt, Artificial Sequence
  Description of Artificial Sequence: Synthetic oligonucleotide
guucgcgguuaauugugac

SEQ ID NO: 1510145 - RNA, 19 nt, Artificial Sequence
  Description of Artificial Sequence: Synthetic oligonucleotide
acgggcauucacguccacg

SEQ ID NO: 1510146 - RNA, 19 nt, Artificial Sequence
  Description of Artificial Sequence: Synthetic oligonucleotide
uacuugcagggcacagugu

SEQ ID NO: 1510147 - RNA, 19 nt, Artificial Sequence
  Description of Artificial Sequence: Synthetic oligonucleotide
acuaggugccaggauccag

SEQ ID NO: 1510148 - RNA, 19 nt, Artificial Sequence
  Description of Artificial Sequence: Synthetic oligonucleotide
ggauuggugggcccauucc

SEQ ID NO: 1510149 - RNA, 19 nt, Artificial Sequence
  Description of Artificial Sequence: Synthetic oligonucleotide
gcauggauagguaccuggg

SEQ ID NO: 1510150 - RNA, 19 nt, Artificial Sequence
  Description of Artificial Sequence: Synthetic oligonucleotide
ucugaaccaguucgcgguu

SEQ ID NO: 1510151 - RNA, 19 nt, Artificial Sequence
  Description of Artificial Sequence: Synthetic oligonucleotide
augauguacuggccagcca

SEQ ID NO: 1510152 - RNA, 19 nt, Artificial Sequence
  Description of Artificial Sequence: Synthetic oligonucleotide
auuccgacugagaagccau

SEQ ID NO: 1510153 - RNA, 19 nt, Artificial Sequence
  Description of Artificial Sequence: Synthetic oligonucleotide
gcagcgaaggccaaucgug

SEQ ID NO: 1510154 - RNA, 19 nt, Artificial Sequence
  Description of Artificial Sequence: Synthetic oligonucleotide
ucuucguuacgggcauuca

SEQ ID NO: 1510155 - RNA, 19 nt, Artificial Sequence
  Description of Artificial Sequence: Synthetic oligonucleotide
cagcauggccccuccgugc

SEQ ID NO: 1510156 - RNA, 19 nt, Artificial Sequence
  Description of Artificial Sequence: Synthetic oligonucleotide
aggcaagccccagcggccc

SEQ ID NO: 1510157 - RNA, 19 nt, Artificial Sequence
  Description of Artificial Sequence: Synthetic oligonucleotide
caugucgaauccugagaca

SEQ ID NO: 1510158 - RNA, 19 nt, Artificial Sequence
  Description of Artificial Sequence: Synthetic oligonucleotide
guccgauugccccggaaga

SEQ ID NO: 1510159 - RNA, 19 nt, Artificial Sequence
  Description of Artificial Sequence: Synthetic oligonucleotide
cagcgugcugaccacagca

SEQ ID NO: 1510160 - RNA, 19 nt, Artificial Sequence
  Description of Artificial Sequence: Synthetic oligonucleotide
ggaagaauaggcacaccuc

SEQ ID NO: 1510161 - RNA, 19 nt, Artificial Sequence
  Description of Artificial Sequence: Synthetic oligonucleotide
gaaaggaccgaggcagcga

SEQ ID NO: 1510162 - RNA, 19 nt, Artificial Sequence
  Description of Artificial Sequence: Synthetic oligonucleotide
acuauccgcccuggaugcc

SEQ ID NO: 1510163 - RNA, 19 nt, Artificial Sequence
  Description of Artificial Sequence: Synthetic oligonucleotide
cugggagacacuggcccgg

SEQ ID NO: 1510164 - RNA, 19 nt, Artificial Sequence
  Description of Artificial Sequence: Synthetic oligonucleotide
gaaggcugcgaaccuccga

SEQ ID NO: 1510165 - RNA, 19 nt, Artificial Sequence
  Description of Artificial Sequence: Synthetic oligonucleotide
ucucacggccaucguucca

SEQ ID NO: 1510166 - RNA, 19 nt, Artificial Sequence
  Description of Artificial Sequence: Synthetic oligonucleotide
ccuccgagcauccaccuug

SEQ ID NO: 1510167 - RNA, 19 nt, Artificial Sequence
  Description of Artificial Sequence: Synthetic oligonucleotide
ccuccgugcagcgacaugc

SEQ ID NO: 1510168 - RNA, 19 nt, Artificial Sequence
  Description of Artificial Sequence: Synthetic oligonucleotide
agggucagcccugguuggc

SEQ ID NO: 1510169 - RNA, 19 nt, Artificial Sequence
  Description of Artificial Sequence: Synthetic oligonucleotide
ugugcaccaccagacgguc

SEQ ID NO: 1510170 - RNA, 19 nt, Artificial Sequence
  Description of Artificial Sequence: Synthetic oligonucleotide
uucccgcuggccuucugaa

SEQ ID NO: 1510171 - RNA, 19 nt, Artificial Sequence
  Description of Artificial Sequence: Synthetic oligonucleotide
gaggcagcgaaggccaauc

SEQ ID NO: 1510172 - RNA, 19 nt, Artificial Sequence
  Description of Artificial Sequence: Synthetic oligonucleotide
cugcgaaccuccgagcauc

SEQ ID NO: 1510173 - RNA, 19 nt, Artificial Sequence
  Description of Artificial Sequence: Synthetic oligonucleotide
acaaaagccugcagaguau

SEQ ID NO: 1510174 - RNA, 19 nt, Artificial Sequence
  Description of Artificial Sequence: Synthetic oligonucleotide
cuccugacugccauuccga

SEQ ID NO: 1510175 - RNA, 19 nt, Artificial Sequence
  Description of Artificial Sequence: Synthetic oligonucleotide
cagacgguccuucccgcug

SEQ ID NO: 1510176 - RNA, 19 nt, Artificial Sequence
  Description of Artificial Sequence: Synthetic oligonucleotide
ugcacaguucugucccaau

SEQ ID NO: 1510177 - RNA, 19 nt, Artificial Sequence
  Description of Artificial Sequence: Synthetic oligonucleotide
gauugccccggaagaguug

SEQ ID NO: 1510178 - RNA, 19 nt, Artificial Sequence
  Description of Artificial Sequence: Synthetic oligonucleotide
agcgugcugaccacagcag

SEQ ID NO: 1510179 - RNA, 19 nt, Artificial Sequence
  Description of Artificial Sequence: Synthetic oligonucleotide
auugugacaucggcaccca

SEQ ID NO: 1510180 - RNA, 19 nt, Artificial Sequence
  Description of Artificial Sequence: Synthetic oligonucleotide
ccgaugucaugucgaaucc

SEQ ID NO: 1510181 - RNA, 19 nt, Artificial Sequence
  Description of Artificial Sequence: Synthetic oligonucleotide
auggccccuccgugcagcg

SEQ ID NO: 1510182 - RNA, 19 nt, Artificial Sequence
  Description of Artificial Sequence: Synthetic oligonucleotide
gaauacuaggugccaggau

SEQ ID NO: 1510183 - RNA, 19 nt, Artificial Sequence
  Description of Artificial Sequence: Synthetic oligonucleotide
cauuccgacugagaagcca

SEQ ID NO: 1510184 - RNA, 19 nt, Artificial Sequence
  Description of Artificial Sequence: Synthetic oligonucleotide
gccaucguuccacagugca

SEQ ID NO: 1510185 - RNA, 19 nt, Artificial Sequence
  Description of Artificial Sequence: Synthetic oligonucleotide
aucaggccuuguucagcug

SEQ ID NO: 1510186 - RNA, 19 nt, Artificial Sequence
  Description of Artificial Sequence: Synthetic oligonucleotide
ggaauacuaggugccagga

SEQ ID NO: 1510187 - RNA, 19 nt, Artificial Sequence
  Description of Artificial Sequence: Synthetic oligonucleotide
gacugccauuccgacugag

SEQ ID NO: 1510188 - RNA, 19 nt, Artificial Sequence
  Description of Artificial Sequence: Synthetic oligonucleotide
ugaccgcuacaguccuuca

SEQ ID NO: 1510189 - RNA, 19 nt, Artificial Sequence
  Description of Artificial Sequence: Synthetic oligonucleotide
guuugaccgcuacaguccu

SEQ ID NO: 1510190 - RNA, 19 nt, Artificial Sequence
  Description of Artificial Sequence: Synthetic oligonucleotide
acugccauuccgacugaga

SEQ ID NO: 1510191 - RNA, 19 nt, Artificial Sequence
  Description of Artificial Sequence: Synthetic oligonucleotide
aggcacaccucaggaauga

SEQ ID NO: 1510192 - RNA, 19 nt, Artificial Sequence
  Description of Artificial Sequence: Synthetic oligonucleotide
caccggugaggaugacagg

SEQ ID NO: 1510193 - RNA, 19 nt, Artificial Sequence
  Description of Artificial Sequence: Synthetic oligonucleotide
cauggccccuccgugcagc

SEQ ID NO: 1510194 - RNA, 19 nt, Artificial Sequence
  Description of Artificial Sequence: Synthetic oligonucleotide
aaggaccgaggcagcgaag

SEQ ID NO: 1510195 - RNA, 19 nt, Artificial Sequence
  Description of Artificial Sequence: Synthetic oligonucleotide
gguuguccgauugccccgg

SEQ ID NO: 1510196 - RNA, 19 nt, Artificial Sequence
  Description of Artificial Sequence: Synthetic oligonucleotide
aguucgcgguuaauuguga

SEQ ID NO: 1510197 - RNA, 19 nt, Artificial Sequence
  Description of Artificial Sequence: Synthetic oligonucleotide
guaucuaggucaccagcau

SEQ ID NO: 1510198 - RNA, 19 nt, Artificial Sequence
  Description of Artificial Sequence: Synthetic oligonucleotide
cugggcagacaggcaagcc

SEQ ID NO: 1510199 - RNA, 19 nt, Artificial Sequence
  Description of Artificial Sequence: Synthetic oligonucleotide
cuacaguccuucagguuua

SEQ ID NO: 1510200 - RNA, 19 nt, Artificial Sequence
  Description of Artificial Sequence: Synthetic oligonucleotide
auccgcccuggaugccagc

SEQ ID NO: 1510201 - RNA, 19 nt, Artificial Sequence
  Description of Artificial Sequence: Synthetic oligonucleotide
ccaugcuacccugcgaccc

SEQ ID NO: 1510202 - RNA, 19 nt, Artificial Sequence
  Description of Artificial Sequence: Synthetic oligonucleotide
uuugaccgcuacaguccuu

SEQ ID NO: 1510203 - RNA, 19 nt, Artificial Sequence
  Description of Artificial Sequence: Synthetic oligonucleotide
gggagcagaaggcugcgaa

SEQ ID NO: 1510204 - RNA, 19 nt, Artificial Sequence
  Description of Artificial Sequence: Synthetic oligonucleotide
cgguuaauugugacaucgg

SEQ ID NO: 1510205 - RNA, 19 nt, Artificial Sequence
  Description of Artificial Sequence: Synthetic oligonucleotide
agggccaggcuagguauca

SEQ ID NO: 1510206 - RNA, 19 nt, Artificial Sequence
  Description of Artificial Sequence: Synthetic oligonucleotide
accacaccuuucagugggg

SEQ ID NO: 1510207 - RNA, 19 nt, Artificial Sequence
  Description of Artificial Sequence: Synthetic oligonucleotide
gcgugcugaccacagcagc

SEQ ID NO: 1510208 - RNA, 19 nt, Artificial Sequence
  Description of Artificial Sequence: Synthetic oligonucleotide
acccugcgacccaguaugc

SEQ ID NO: 1510209 - RNA, 19 nt, Artificial Sequence
  Description of Artificial Sequence: Synthetic oligonucleotide
ccaggcuagguaucaggac

SEQ ID NO: 1510210 - RNA, 19 nt, Artificial Sequence
  Description of Artificial Sequence: Synthetic oligonucleotide
ggcugcgaaccuccgagca

SEQ ID NO: 1510211 - RNA, 19 nt, Artificial Sequence
  Description of Artificial Sequence: Synthetic oligonucleotide
gacgguccuucccgcuggc

SEQ ID NO: 1510212 - RNA, 19 nt, Artificial Sequence
  Description of Artificial Sequence: Synthetic oligonucleotide
ugucugugccauggaugac

SEQ ID NO: 1510213 - RNA, 19 nt, Artificial Sequence
  Description of Artificial Sequence: Synthetic oligonucleotide
ugacacccugaugccugcc

SEQ ID NO: 1510214 - RNA, 19 nt, Artificial Sequence
  Description of Artificial Sequence: Synthetic oligonucleotide
gcccacgucacgcuccaug

SEQ ID NO: 1510215 - RNA, 19 nt, Artificial Sequence
  Description of Artificial Sequence: Synthetic oligonucleotide
agcccugguuggccuagca

SEQ ID NO: 1510216 - RNA, 19 nt, Artificial Sequence
  Description of Artificial Sequence: Synthetic oligonucleotide
guaucaggacauccugcgu

SEQ ID NO: 1510217 - RNA, 19 nt, Artificial Sequence
  Description of Artificial Sequence: Synthetic oligonucleotide
gccauggccaugccagaug

SEQ ID NO: 1510218 - RNA, 19 nt, Artificial Sequence
  Description of Artificial Sequence: Synthetic oligonucleotide
gguuggccuagcacauagg

SEQ ID NO: 1510219 - RNA, 19 nt, Artificial Sequence
  Description of Artificial Sequence: Synthetic oligonucleotide
cagccaugagcagggcccc

SEQ ID NO: 1510220 - RNA, 19 nt, Artificial Sequence
  Description of Artificial Sequence: Synthetic oligonucleotide
ugcgacccaguaugccauc

SEQ ID NO: 1510221 - RNA, 19 nt, Artificial Sequence
  Description of Artificial Sequence: Synthetic oligonucleotide
gaguugauucuggaagaau

SEQ ID NO: 1510222 - RNA, 19 nt, Artificial Sequence
  Description of Artificial Sequence: Synthetic oligonucleotide
cuauccgcccuggaugcca

SEQ ID NO: 1510223 - RNA, 19 nt, Artificial Sequence
  Description of Artificial Sequence: Synthetic oligonucleotide
gucuggauuggugggccca

SEQ ID NO: 1510224 - RNA, 19 nt, Artificial Sequence
  Description of Artificial Sequence: Synthetic oligonucleotide
gggcauucacguccacgcc

SEQ ID NO: 1510225 - RNA, 19 nt, Artificial Sequence
  Description of Artificial Sequence: Synthetic oligonucleotide
ggcgggaaucccaggguag

SEQ ID NO: 1510226 - RNA, 19 nt, Artificial Sequence
  Description of Artificial Sequence: Synthetic oligonucleotide
cuucggcuacuugcagggc

SEQ ID NO: 1510227 - RNA, 19 nt, Artificial Sequence
  Description of Artificial Sequence: Synthetic oligonucleotide
gcaugaaagaaaggaccga

SEQ ID NO: 1510228 - RNA, 19 nt, Artificial Sequence
  Description of Artificial Sequence: Synthetic oligonucleotide
ccugcguggcaucagccuc

SEQ ID NO: 1510229 - RNA, 19 nt, Artificial Sequence
  Description of Artificial Sequence: Synthetic oligonucleotide
ucccaggguagaggcgcag

SEQ ID NO: 1510230 - RNA, 19 nt, Artificial Sequence
  Description of Artificial Sequence: Synthetic oligonucleotide
gugcauggauagguaccug

SEQ ID NO: 1510231 - RNA, 19 nt, Artificial Sequence
  Description of Artificial Sequence: Synthetic oligonucleotide
ggucuggauuggugggccc

SEQ ID NO: 1510232 - RNA, 19 nt, Artificial Sequence
  Description of Artificial Sequence: Synthetic oligonucleotide
cacgcccucaggccuucac

SEQ ID NO: 1510233 - RNA, 19 nt, Artificial Sequence
  Description of Artificial Sequence: Synthetic oligonucleotide
ugccccggaagaguugauu

SEQ ID NO: 1510234 - RNA, 19 nt, Artificial Sequence
  Description of Artificial Sequence: Synthetic oligonucleotide
ggccccuccgugcagcgac

SEQ ID NO: 1510235 - RNA, 19 nt, Artificial Sequence
  Description of Artificial Sequence: Synthetic oligonucleotide
agggacaguuugggccagg

SEQ ID NO: 1510236 - RNA, 19 nt, Artificial Sequence
  Description of Artificial Sequence: Synthetic oligonucleotide
cuccgugcagcgacaugca

SEQ ID NO: 1510237 - RNA, 19 nt, Artificial Sequence
  Description of Artificial Sequence: Synthetic oligonucleotide
uagcgggcuguggccaucu

SEQ ID NO: 1510238 - RNA, 19 nt, Artificial Sequence
  Description of Artificial Sequence: Synthetic oligonucleotide
gcccgcagcagcccaauga

SEQ ID NO: 1510239 - RNA, 19 nt, Artificial Sequence
  Description of Artificial Sequence: Synthetic oligonucleotide
ugcguggcaucagccuccu

SEQ ID NO: 1510240 - RNA, 19 nt, Artificial Sequence
  Description of Artificial Sequence: Synthetic oligonucleotide
uacgggcauucacguccac

SEQ ID NO: 1510241 - RNA, 19 nt, Artificial Sequence
  Description of Artificial Sequence: Synthetic oligonucleotide
gguccgaaccagggaggcg

SEQ ID NO: 1510242 - RNA, 19 nt, Artificial Sequence
  Description of Artificial Sequence: Synthetic oligonucleotide
cggccaucguuccacagug

SEQ ID NO: 1510243 - RNA, 19 nt, Artificial Sequence
  Description of Artificial Sequence: Synthetic oligonucleotide
gucacgcuccauggugcug

SEQ ID NO: 1510244 - RNA, 19 nt, Artificial Sequence
  Description of Artificial Sequence: Synthetic oligonucleotide
cacgcuccauggugcugug

SEQ ID NO: 1510245 - RNA, 19 nt, Artificial Sequence
  Description of Artificial Sequence: Synthetic oligonucleotide
ucuccccgcgaagauucuu

SEQ ID NO: 1510246 - RNA, 19 nt, Artificial Sequence
  Description of Artificial Sequence: Synthetic oligonucleotide
gcggcagcgucaucucccc

SEQ ID NO: 1510247 - RNA, 19 nt, Artificial Sequence
  Description of Artificial Sequence: Synthetic oligonucleotide
gcgaaggccaaucgugucu

SEQ ID NO: 1510248 - RNA, 19 nt, Artificial Sequence
  Description of Artificial Sequence: Synthetic oligonucleotide
cauugggccuguccuucaa

SEQ ID NO: 1510249 - RNA, 19 nt, Artificial Sequence
  Description of Artificial Sequence: Synthetic oligonucleotide
cuagcacauagggacaguu

SEQ ID NO: 1510250 - RNA, 19 nt, Artificial Sequence
  Description of Artificial Sequence: Synthetic oligonucleotide
gcccaaugacacccugaug

SEQ ID NO: 1510251 - RNA, 19 nt, Artificial Sequence
  Description of Artificial Sequence: Synthetic oligonucleotide
gugcagcgacaugcagugg

SEQ ID NO: 1510252 - RNA, 19 nt, Artificial Sequence
  Description of Artificial Sequence: Synthetic oligonucleotide
gugcaccaccagacggucc

SEQ ID NO: 1510253 - RNA, 19 nt, Artificial Sequence
  Description of Artificial Sequence: Synthetic oligonucleotide
accuccgagcauccaccuu

SEQ ID NO: 1510254 - RNA, 19 nt, Artificial Sequence
  Description of Artificial Sequence: Synthetic oligonucleotide
uugccccggaagaguugau

SEQ ID NO: 1510255 - RNA, 19 nt, Artificial Sequence
  Description of Artificial Sequence: Synthetic oligonucleotide
ccauuccgacugagaagcc

SEQ ID NO: 1510256 - RNA, 19 nt, Artificial Sequence
  Description of Artificial Sequence: Synthetic oligonucleotide
ggcagcgaaggccaaucgu

SEQ ID NO: 1510257 - RNA, 19 nt, Artificial Sequence
  Description of Artificial Sequence: Synthetic oligonucleotide
gaaggccaaucgugucugu

SEQ ID NO: 1510258 - RNA, 19 nt, Artificial Sequence
  Description of Artificial Sequence: Synthetic oligonucleotide
ggcccauucccagagccaa

SEQ ID NO: 1510259 - RNA, 19 nt, Artificial Sequence
  Description of Artificial Sequence: Synthetic oligonucleotide
cugcgacccaguaugccau

SEQ ID NO: 1510260 - RNA, 19 nt, Artificial Sequence
  Description of Artificial Sequence: Synthetic oligonucleotide
ccccgcgaagauucuuggc

SEQ ID NO: 1510261 - RNA, 19 nt, Artificial Sequence
  Description of Artificial Sequence: Synthetic oligonucleotide
ccaguucgcgguuaauugu

SEQ ID NO: 1510262 - RNA, 19 nt, Artificial Sequence
  Description of Artificial Sequence: Synthetic oligonucleotide
guuguccgauugccccgga

SEQ ID NO: 1510263 - RNA, 19 nt, Artificial Sequence
  Description of Artificial Sequence: Synthetic oligonucleotide
cuacccugcgacccaguau

SEQ ID NO: 1510264 - RNA, 19 nt, Artificial Sequence
  Description of Artificial Sequence: Synthetic oligonucleotide
ggcaccggugaggaugaca

SEQ ID NO: 1510265 - RNA, 19 nt, Artificial Sequence
  Description of Artificial Sequence: Synthetic oligonucleotide
ggguacaguugacaaugau

SEQ ID NO: 1510266 - RNA, 19 nt, Artificial Sequence
  Description of Artificial Sequence: Synthetic oligonucleotide
gucagcccugguuggccua

SEQ ID NO: 1510267 - RNA, 19 nt, Artificial Sequence
  Description of Artificial Sequence: Synthetic oligonucleotide
gcuacccugcgacccagua

SEQ ID NO: 1510268 - RNA, 19 nt, Artificial Sequence
  Description of Artificial Sequence: Synthetic oligonucleotide
cugaaccaguucgcgguua

SEQ ID NO: 1510269 - RNA, 19 nt, Artificial Sequence
  Description of Artificial Sequence: Synthetic oligonucleotide
cggaagaguugauucugga

SEQ ID NO: 1510270 - RNA, 19 nt, Artificial Sequence
  Description of Artificial Sequence: Synthetic oligonucleotide
gggguuugaccgcuacagu

SEQ ID NO: 1510271 - RNA, 19 nt, Artificial Sequence
  Description of Artificial Sequence: Synthetic oligonucleotide
aucuccccgcgaagauucu

SEQ ID NO: 1510272 - RNA, 19 nt, Artificial Sequence
  Description of Artificial Sequence: Synthetic oligonucleotide
cguuacgggcauucacguc

SEQ ID NO: 1510273 - RNA, 19 nt, Artificial Sequence
  Description of Artificial Sequence: Synthetic oligonucleotide
guagcgggcuguggccauc

SEQ ID NO: 1510274 - RNA, 19 nt, Artificial Sequence
  Description of Artificial Sequence: Synthetic oligonucleotide
ccuccgaugucaugucgaa

SEQ ID NO: 1510275 - RNA, 19 nt, Artificial Sequence
  Description of Artificial Sequence: Synthetic oligonucleotide
ggccaucguuccacagugc

SEQ ID NO: 1510276 - RNA, 19 nt, Artificial Sequence
  Description of Artificial Sequence: Synthetic oligonucleotide
cacccugaugccugccccu

SEQ ID NO: 1510277 - RNA, 19 nt, Artificial Sequence
  Description of Artificial Sequence: Synthetic oligonucleotide
ggcuagguaucaggacauc

SEQ ID NO: 1510278 - RNA, 19 nt, Artificial Sequence
  Description of Artificial Sequence: Synthetic oligonucleotide
uggccccuccgugcagcga

SEQ ID NO: 1510279 - RNA, 19 nt, Artificial Sequence
  Description of Artificial Sequence: Synthetic oligonucleotide
ggucagcccugguuggccu

SEQ ID NO: 1510280 - RNA, 19 nt, Artificial Sequence
  Description of Artificial Sequence: Synthetic oligonucleotide
caucuugcagcggcagcgu

SEQ ID NO: 1510281 - RNA, 19 nt, Artificial Sequence
  Description of Artificial Sequence: Synthetic oligonucleotide
gaaccaguucgcgguuaau

SEQ ID NO: 1510282 - RNA, 19 nt, Artificial Sequence
  Description of Artificial Sequence: Synthetic oligonucleotide
ccgugcagcgacaugcagu

SEQ ID NO: 1510283 - RNA, 19 nt, Artificial Sequence
  Description of Artificial Sequence: Synthetic oligonucleotide
gggcccauucccagagcca

SEQ ID NO: 1510284 - RNA, 19 nt, Artificial Sequence
  Description of Artificial Sequence: Synthetic oligonucleotide
ccaaucgugucugugccau

SEQ ID NO: 1510285 - RNA, 19 nt, Artificial Sequence
  Description of Artificial Sequence: Synthetic oligonucleotide
gcugcgaaccuccgagcau

SEQ ID NO: 1510286 - RNA, 19 nt, Artificial Sequence
  Description of Artificial Sequence: Synthetic oligonucleotide
cgcgguuaauugugacauc

SEQ ID NO: 1510287 - RNA, 19 nt, Artificial Sequence
  Description of Artificial Sequence: Synthetic oligonucleotide
ccgacugagaagccaugcu

SEQ ID NO: 1510288 - RNA, 19 nt, Artificial Sequence
  Description of Artificial Sequence: Synthetic oligonucleotide
ggcccgcagcagcccaaug

SEQ ID NO: 1510289 - RNA, 19 nt, Artificial Sequence
  Description of Artificial Sequence: Synthetic oligonucleotide
cugguuggccuagcacaua

SEQ ID NO: 1510290 - RNA, 19 nt, Artificial Sequence
  Description of Artificial Sequence: Synthetic oligonucleotide
agcgggcuguggccaucuu

SEQ ID NO: 1510291 - RNA, 19 nt, Artificial Sequence
  Description of Artificial Sequence: Synthetic oligonucleotide
gcagugggguuugaccgcu

SEQ ID NO: 1510292 - RNA, 19 nt, Artificial Sequence
  Description of Artificial Sequence: Synthetic oligonucleotide
ccaucuucguuacgggcau

SEQ ID NO: 1510293 - RNA, 19 nt, Artificial Sequence
  Description of Artificial Sequence: Synthetic oligonucleotide
ccgcuacaguccuucaggu

SEQ ID NO: 1510294 - RNA, 19 nt, Artificial Sequence
  Description of Artificial Sequence: Synthetic oligonucleotide
ccgagcauccaccuugguu

SEQ ID NO: 1510295 - RNA, 19 nt, Artificial Sequence
  Description of Artificial Sequence: Synthetic oligonucleotide
gccagcaguagcgggcugu

SEQ ID NO: 1510296 - RNA, 19 nt, Artificial Sequence
  Description of Artificial Sequence: Synthetic oligonucleotide
cuccgaugucaugucgaau

SEQ ID NO: 1510297 - RNA, 19 nt, Artificial Sequence
  Description of Artificial Sequence: Synthetic oligonucleotide
cagugggguuugaccgcua

SEQ ID NO: 1510298 - RNA, 19 nt, Artificial Sequence
  Description of Artificial Sequence: Synthetic oligonucleotide
ccgauugccccggaagagu

SEQ ID NO: 1510299 - RNA, 19 nt, Artificial Sequence
  Description of Artificial Sequence: Synthetic oligonucleotide
gcgaaccuccgagcaucca

SEQ ID NO: 1510300 - RNA, 19 nt, Artificial Sequence
  Description of Artificial Sequence: Synthetic oligonucleotide
caccacgcccucaggccuu

SEQ ID NO: 1510301 - RNA, 19 nt, Artificial Sequence
  Description of Artificial Sequence: Synthetic oligonucleotide
cgauugccccggaagaguu

SEQ ID NO: 1510302 - RNA, 19 nt, Artificial Sequence
  Description of Artificial Sequence: Synthetic oligonucleotide
gcguggcaucagccuccug

SEQ ID NO: 1510303 - RNA, 19 nt, Artificial Sequence
  Description of Artificial Sequence: Synthetic oligonucleotide
ggcacaccucaggaaugau

SEQ ID NO: 1510304 - RNA, 19 nt, Artificial Sequence
  Description of Artificial Sequence: Synthetic oligonucleotide
ccacgucacgcuccauggu

SEQ ID NO: 1510305 - RNA, 19 nt, Artificial Sequence
  Description of Artificial Sequence: Synthetic oligonucleotide
caucuucguuacgggcauu

SEQ ID NO: 1510306 - RNA, 19 nt, Artificial Sequence
  Description of Artificial Sequence: Synthetic oligonucleotide
cgucacgcuccauggugcu

SEQ ID NO: 1510307 - RNA, 19 nt, Artificial Sequence
  Description of Artificial Sequence: Synthetic oligonucleotide
ccaccuugguuguccgauu

SEQ ID NO: 1510308 - RNA, 19 nt, Artificial Sequence
  Description of Artificial Sequence: Synthetic oligonucleotide
gccccuccgugcagcgaca

SEQ ID NO: 1510309 - RNA, 19 nt, Artificial Sequence
  Description of Artificial Sequence: Synthetic oligonucleotide
ccgaggcagcgaaggccaa

SEQ ID NO: 1510310 - RNA, 19 nt, Artificial Sequence
  Description of Artificial Sequence: Synthetic oligonucleotide
ccgaaccagggaggcggga

SEQ ID NO: 1510311 - RNA, 19 nt, Artificial Sequence
  Description of Artificial Sequence: Synthetic oligonucleotide
gcugggcauugggccuguc

SEQ ID NO: 1510312 - RNA, 19 nt, Artificial Sequence
  Description of Artificial Sequence: Synthetic oligonucleotide
gggcaccggugaggaugac

SEQ ID NO: 1510313 - RNA, 19 nt, Artificial Sequence
  Description of Artificial Sequence: Synthetic oligonucleotide
ccgcccuggaugccagccu

SEQ ID NO: 1510314 - RNA, 19 nt, Artificial Sequence
  Description of Artificial Sequence: Synthetic oligonucleotide
cgacccaguaugccaucuu

SEQ ID NO: 1510315 - RNA, 19 nt, Artificial Sequence
  Description of Artificial Sequence: Synthetic oligonucleotide
ccugggcaccggugaggau

SEQ ID NO: 1510316 - RNA, 19 nt, Artificial Sequence
  Description of Artificial Sequence: Synthetic oligonucleotide
ccacgcccucaggccuuca

SEQ ID NO: 1510317 - RNA, 19 nt, Artificial Sequence
  Description of Artificial Sequence: Synthetic oligonucleotide
aacaagauuaaccugaccg

SEQ ID NO: 1510318 - RNA, 19 nt, Artificial Sequence
  Description of Artificial Sequence: Synthetic oligonucleotide
aaguucuuuacuuugagag

SEQ ID NO: 1510319 - RNA, 19 nt, Artificial Sequence
  Description of Artificial Sequence: Synthetic oligonucleotide
ugauguaucagaaacaagu

SEQ ID NO: 1510320 - RNA, 19 nt, Artificial Sequence
  Description of Artificial Sequence: Synthetic oligonucleotide
ucuaacaagauuaaccuga

SEQ ID NO: 1510321 - RNA, 19 nt, Artificial Sequence
  Description of Artificial Sequence: Synthetic oligonucleotide
ugugaaucuaacaagauua

SEQ ID NO: 1510322 - RNA, 19 nt, Artificial Sequence
  Description of Artificial Sequence: Synthetic oligonucleotide
aauuauauguggaaggguc

SEQ ID NO: 1510323 - RNA, 19 nt, Artificial Sequence
  Description of Artificial Sequence: Synthetic oligonucleotide
aaauuaucagaagcaaagc

SEQ ID NO: 1510324 - RNA, 19 nt, Artificial Sequence
  Description of Artificial Sequence: Synthetic oligonucleotide
aauaguaugccuuccguga

SEQ ID NO: 1510325 - RNA, 19 nt, Artificial Sequence
  Description of Artificial Sequence: Synthetic oligonucleotide
aaguguaacuaauaguaug

SEQ ID NO: 1510326 - RNA, 19 nt, Artificial Sequence
  Description of Artificial Sequence: Synthetic oligonucleotide
aguguaacuaauaguaugc

SEQ ID NO: 1510327 - RNA, 19 nt, Artificial Sequence
  Description of Artificial Sequence: Synthetic oligonucleotide
uacaguugcagauuccucg

SEQ ID NO: 1510328 - RNA, 19 nt, Artificial Sequence
  Description of Artificial Sequence: Synthetic oligonucleotide
aacuucauauaucugacau

SEQ ID NO: 1510329 - RNA, 19 nt, Artificial Sequence
  Description of Artificial Sequence: Synthetic oligonucleotide
uucauggcuacccugagug

SEQ ID NO: 1510330 - RNA, 19 nt, Artificial Sequence
  Description of Artificial Sequence: Synthetic oligonucleotide
uaucaagaacaaaagggcc

SEQ ID NO: 1510331 - RNA, 19 nt, Artificial Sequence
  Description of Artificial Sequence: Synthetic oligonucleotide
uccgugauguaucagaaac

SEQ ID NO: 1510332 - RNA, 19 nt, Artificial Sequence
  Description of Artificial Sequence: Synthetic oligonucleotide
aaguggaacccagugaucg

SEQ ID NO: 1510333 - RNA, 19 nt, Artificial Sequence
  Description of Artificial Sequence: Synthetic oligonucleotide
guaucaaugguuuucuggc

SEQ ID NO: 1510334 - RNA, 19 nt, Artificial Sequence
  Description of Artificial Sequence: Synthetic oligonucleotide
aucuucggagaccacaagc

SEQ ID NO: 1510335 - RNA, 19 nt, Artificial Sequence
  Description of Artificial Sequence: Synthetic oligonucleotide
aaugggaaucauuugcaga

SEQ ID NO: 1510336 - RNA, 19 nt, Artificial Sequence
  Description of Artificial Sequence: Synthetic oligonucleotide
aggcggagaaucuucaggc

SEQ ID NO: 1510337 - RNA, 19 nt, Artificial Sequence
  Description of Artificial Sequence: Synthetic oligonucleotide
aacuacauguagcucaagu

SEQ ID NO: 1510338 - RNA, 19 nt, Artificial Sequence
  Description of Artificial Sequence: Synthetic oligonucleotide
uucuagguggcuuugaauc

SEQ ID NO: 1510339 - RNA, 19 nt, Artificial Sequence
  Description of Artificial Sequence: Synthetic oligonucleotide
acuaauaguaugccuuccg

SEQ ID NO: 1510340 - RNA, 19 nt, Artificial Sequence
  Description of Artificial Sequence: Synthetic oligonucleotide
uacugggcgaauuauaugu

SEQ ID NO: 1510341 - RNA, 19 nt, Artificial Sequence
  Description of Artificial Sequence: Synthetic oligonucleotide
uuugagagccuuuugccgc

SEQ ID NO: 1510342 - RNA, 19 nt, Artificial Sequence
  Description of Artificial Sequence: Synthetic oligonucleotide
augugcgucuucuaggugg

SEQ ID NO: 1510343 - RNA, 19 nt, Artificial Sequence
  Description of Artificial Sequence: Synthetic oligonucleotide
ugaccucuucaccauagcg

SEQ ID NO: 1510344 - RNA, 19 nt, Artificial Sequence
  Description of Artificial Sequence: Synthetic oligonucleotide
uuucuggcgacacugguga

SEQ ID NO: 1510345 - RNA, 19 nt, Artificial Sequence
  Description of Artificial Sequence: Synthetic oligonucleotide
ugcagauuccucgacaggg

SEQ ID NO: 1510346 - RNA, 19 nt, Artificial Sequence
  Description of Artificial Sequence: Synthetic oligonucleotide
acuacauguagcucaagug

SEQ ID NO: 1510347 - RNA, 19 nt, Artificial Sequence
  Description of Artificial Sequence: Synthetic oligonucleotide
gauacuuggcuaaauacac

SEQ ID NO: 1510348 - RNA, 19 nt, Artificial Sequence
  Description of Artificial Sequence: Synthetic oligonucleotide
uugggaaacuacauguagc

SEQ ID NO: 1510349 - RNA, 19 nt, Artificial Sequence
  Description of Artificial Sequence: Synthetic oligonucleotide
aacuaauaguaugccuucc

SEQ ID NO: 1510350 - RNA, 19 nt, Artificial Sequence
  Description of Artificial Sequence: Synthetic oligonucleotide
uguaacuaauaguaugccu

SEQ ID NO: 1510351 - RNA, 19 nt, Artificial Sequence
  Description of Artificial Sequence: Synthetic oligonucleotide
ucuucggagaccacaagca

SEQ ID NO: 1510352 - RNA, 19 nt, Artificial Sequence
  Description of Artificial Sequence: Synthetic oligonucleotide
cuuugagagccuuuugccg

SEQ ID NO: 1510353 - RNA, 19 nt, Artificial Sequence
  Description of Artificial Sequence: Synthetic oligonucleotide
ucgucauucauguagccgu

SEQ ID NO: 1510354 - RNA, 19 nt, Artificial Sequence
  Description of Artificial Sequence: Synthetic oligonucleotide
aaauuccugcuucagacuu

SEQ ID NO: 1510355 - RNA, 19 nt, Artificial Sequence
  Description of Artificial Sequence: Synthetic oligonucleotide
uuggcuaaauacaccagga

SEQ ID NO: 1510356 - RNA, 19 nt, Artificial Sequence
  Description of Artificial Sequence: Synthetic oligonucleotide
agggcgacgacuucugggc

SEQ ID NO: 1510357 - RNA, 19 nt, Artificial Sequence
  Description of Artificial Sequence: Synthetic oligonucleotide
aaauacaccaggacucccg

SEQ ID NO: 1510358 - RNA, 19 nt, Artificial Sequence
  Description of Artificial Sequence: Synthetic oligonucleotide
agacuuuucaaguaagcau

SEQ ID NO: 1510359 - RNA, 19 nt, Artificial Sequence
  Description of Artificial Sequence: Synthetic oligonucleotide
aguucuaagacagacugcu

SEQ ID NO: 1510360 - RNA, 19 nt, Artificial Sequence
  Description of Artificial Sequence: Synthetic oligonucleotide
ugggaaacuacauguagcu

SEQ ID NO: 1510361 - RNA, 19 nt, Artificial Sequence
  Description of Artificial Sequence: Synthetic oligonucleotide
agugaucgguuguagaucu

SEQ ID NO: 1510362 - RNA, 19 nt, Artificial Sequence
  Description of Artificial Sequence: Synthetic oligonucleotide
auauaucugacauucuuua

SEQ ID NO: 1510363 - RNA, 19 nt, Artificial Sequence
  Description of Artificial Sequence: Synthetic oligonucleotide
aagugugaaucuaacaaga

SEQ ID NO: 1510364 - RNA, 19 nt, Artificial Sequence
  Description of Artificial Sequence: Synthetic oligonucleotide
agugacggcacugacuucg

SEQ ID NO: 1510365 - RNA, 19 nt, Artificial Sequence
  Description of Artificial Sequence: Synthetic oligonucleotide
acaagauuaaccugaccga

SEQ ID NO: 1510366 - RNA, 19 nt, Artificial Sequence
  Description of Artificial Sequence: Synthetic oligonucleotide
aaaagggccuugagaagcc

SEQ ID NO: 1510367 - RNA, 19 nt, Artificial Sequence
  Description of Artificial Sequence: Synthetic oligonucleotide
cauguacuuauccucuucc

SEQ ID NO: 1510368 - RNA, 19 nt, Artificial Sequence
  Description of Artificial Sequence: Synthetic oligonucleotide
gaccucuucaccauagcgg

SEQ ID NO: 1510369 - RNA, 19 nt, Artificial Sequence
  Description of Artificial Sequence: Synthetic oligonucleotide
ucgguuguagaucuucucu

SEQ ID NO: 1510370 - RNA, 19 nt, Artificial Sequence
  Description of Artificial Sequence: Synthetic oligonucleotide
auguaucagaaacaagugu

SEQ ID NO: 1510371 - RNA, 19 nt, Artificial Sequence
  Description of Artificial Sequence: Synthetic oligonucleotide
uacccaggcacgaggaacg

SEQ ID NO: 1510372 - RNA, 19 nt, Artificial Sequence
  Description of Artificial Sequence: Synthetic oligonucleotide
aacggggacagaucuucgg

SEQ ID NO: 1510373 - RNA, 19 nt, Artificial Sequence
  Description of Artificial Sequence: Synthetic oligonucleotide
aaccugaccgaguucuaag

SEQ ID NO: 1510374 - RNA, 19 nt, Artificial Sequence
  Description of Artificial Sequence: Synthetic oligonucleotide
uuucgugcuggaaacuuca

SEQ ID NO: 1510375 - RNA, 19 nt, Artificial Sequence
  Description of Artificial Sequence: Synthetic oligonucleotide
ggaaacuacauguagcuca

SEQ ID NO: 1510376 - RNA, 19 nt, Artificial Sequence
  Description of Artificial Sequence: Synthetic oligonucleotide
acaagguagggccagggca

SEQ ID NO: 1510377 - RNA, 19 nt, Artificial Sequence
  Description of Artificial Sequence: Synthetic oligonucleotide
aaguaagcaugcacauucc

SEQ ID NO: 1510378 - RNA, 19 nt, Artificial Sequence
  Description of Artificial Sequence: Synthetic oligonucleotide
accuugaucugguaaucgg

SEQ ID NO: 1510379 - RNA, 19 nt, Artificial Sequence
  Description of Artificial Sequence: Synthetic oligonucleotide
aauacaccaggacucccgu

SEQ ID NO: 1510380 - RNA, 19 nt, Artificial Sequence
  Description of Artificial Sequence: Synthetic oligonucleotide
ucuucuucuucucuucuuc

SEQ ID NO: 1510381 - RNA, 19 nt, Artificial Sequence
  Description of Artificial Sequence: Synthetic oligonucleotide
gcgaauuauauguggaagg

SEQ ID NO: 1510382 - RNA, 19 nt, Artificial Sequence
  Description of Artificial Sequence: Synthetic oligonucleotide
agaagcuacaguugcagau

SEQ ID NO: 1510383 - RNA, 19 nt, Artificial Sequence
  Description of Artificial Sequence: Synthetic oligonucleotide
ucaccaagauucuuacuca

SEQ ID NO: 1510384 - RNA, 19 nt, Artificial Sequence
  Description of Artificial Sequence: Synthetic oligonucleotide
aucuaacaagauuaaccug

SEQ ID NO: 1510385 - RNA, 19 nt, Artificial Sequence
  Description of Artificial Sequence: Synthetic oligonucleotide
caugcacauucccaaagcc

SEQ ID NO: 1510386 - RNA, 19 nt, Artificial Sequence
  Description of Artificial Sequence: Synthetic oligonucleotide
uguagcucaaguguaacua

SEQ ID NO: 1510387 - RNA, 19 nt, Artificial Sequence
  Description of Artificial Sequence: Synthetic oligonucleotide
ucuucuucucuucuucuuc

SEQ ID NO: 1510388 - RNA, 19 nt, Artificial Sequence
  Description of Artificial Sequence: Synthetic oligonucleotide
uacauguagcucaagugua

SEQ ID NO: 1510389 - RNA, 19 nt, Artificial Sequence
  Description of Artificial Sequence: Synthetic oligonucleotide
gauuccucgacaggguggg

SEQ ID NO: 1510390 - RNA, 19 nt, Artificial Sequence
  Description of Artificial Sequence: Synthetic oligonucleotide
aucaaugguuuucuggcga

SEQ ID NO: 1510391 - RNA, 19 nt, Artificial Sequence
  Description of Artificial Sequence: Synthetic oligonucleotide
cugggcgaauuauaugugg

SEQ ID NO: 1510392 - RNA, 19 nt, Artificial Sequence
  Description of Artificial Sequence: Synthetic oligonucleotide
auagcgguuucuaaggcag

SEQ ID NO: 1510393 - RNA, 19 nt, Artificial Sequence
  Description of Artificial Sequence: Synthetic oligonucleotide
uggcgcaccguccaucacg

SEQ ID NO: 1510394 - RNA, 19 nt, Artificial Sequence
  Description of Artificial Sequence: Synthetic oligonucleotide
ugggcgaauuauaugugga

SEQ ID NO: 1510395 - RNA, 19 nt, Artificial Sequence
  Description of Artificial Sequence: Synthetic oligonucleotide
ucuagguggcuuugaaucu

SEQ ID NO: 1510396 - RNA, 19 nt, Artificial Sequence
  Description of Artificial Sequence: Synthetic oligonucleotide
caagauuaaccugaccgag

SEQ ID NO: 1510397 - RNA, 19 nt, Artificial Sequence
  Description of Artificial Sequence: Synthetic oligonucleotide
ggaaugugcgucuucuagg

SEQ ID NO: 1510398 - RNA, 19 nt, Artificial Sequence
  Description of Artificial Sequence: Synthetic oligonucleotide
gagugguccggagugacgg

SEQ ID NO: 1510399 - RNA, 19 nt, Artificial Sequence
  Description of Artificial Sequence: Synthetic oligonucleotide
acggcacugacuucggguc

SEQ ID NO: 1510400 - RNA, 19 nt, Artificial Sequence
  Description of Artificial Sequence: Synthetic oligonucleotide
caccauagcgguuucuaag

SEQ ID NO: 1510401 - RNA, 19 nt, Artificial Sequence
  Description of Artificial Sequence: Synthetic oligonucleotide
agauuaaccugaccgaguu

SEQ ID NO: 1510402 - RNA, 19 nt, Artificial Sequence
  Description of Artificial Sequence: Synthetic oligonucleotide
ugaaucuaacaagauuaac

SEQ ID NO: 1510403 - RNA, 19 nt, Artificial Sequence
  Description of Artificial Sequence: Synthetic oligonucleotide
uuacuuugagagccuuuug

SEQ ID NO: 1510404 - RNA, 19 nt, Artificial Sequence
  Description of Artificial Sequence: Synthetic oligonucleotide
aucaagaacaaaagggccu

SEQ ID NO: 1510405 - RNA, 19 nt, Artificial Sequence
  Description of Artificial Sequence: Synthetic oligonucleotide
gcucaaguguaacuaauag

SEQ ID NO: 1510406 - RNA, 19 nt, Artificial Sequence
  Description of Artificial Sequence: Synthetic oligonucleotide
ucuucuacugggcgaauua

SEQ ID NO: 1510407 - RNA, 19 nt, Artificial Sequence
  Description of Artificial Sequence: Synthetic oligonucleotide
aaucauuugcagaguucuc

SEQ ID NO: 1510408 - RNA, 19 nt, Artificial Sequence
  Description of Artificial Sequence: Synthetic oligonucleotide
cugcaaauguucuugaucu

SEQ ID NO: 1510409 - RNA, 19 nt, Artificial Sequence
  Description of Artificial Sequence: Synthetic oligonucleotide
aucgguuguagaucuucuc

SEQ ID NO: 1510410 - RNA, 19 nt, Artificial Sequence
  Description of Artificial Sequence: Synthetic oligonucleotide
gaaucauuugcagaguucu

SEQ ID NO: 1510411 - RNA, 19 nt, Artificial Sequence
  Description of Artificial Sequence: Synthetic oligonucleotide
uggcuaaauacaccaggac

SEQ ID NO: 1510412 - RNA, 19 nt, Artificial Sequence
  Description of Artificial Sequence: Synthetic oligonucleotide
cuccauaaaguucaugcca

SEQ ID NO: 1510413 - RNA, 19 nt, Artificial Sequence
  Description of Artificial Sequence: Synthetic oligonucleotide
caagcauugcuuuguuuug

SEQ ID NO: 1510414 - RNA, 19 nt, Artificial Sequence
  Description of Artificial Sequence: Synthetic oligonucleotide
uugcagauuccucgacagg

SEQ ID NO: 1510415 - RNA, 19 nt, Artificial Sequence
  Description of Artificial Sequence: Synthetic oligonucleotide
accaagauucuuacucagc

SEQ ID NO: 1510416 - RNA, 19 nt, Artificial Sequence
  Description of Artificial Sequence: Synthetic oligonucleotide
auaaaguucaugccaucuu

SEQ ID NO: 1510417 - RNA, 19 nt, Artificial Sequence
  Description of Artificial Sequence: Synthetic oligonucleotide
ucuucuucuucuucucuuc

SEQ ID NO: 1510418 - RNA, 19 nt, Artificial Sequence
  Description of Artificial Sequence: Synthetic oligonucleotide
uugguaucaaugguuuucu

SEQ ID NO: 1510419 - RNA, 19 nt, Artificial Sequence
  Description of Artificial Sequence: Synthetic oligonucleotide
gaagcgacaccugggaaug

SEQ ID NO: 1510420 - RNA, 19 nt, Artificial Sequence
  Description of Artificial Sequence: Synthetic oligonucleotide
cuugagaagccgaaaggca

SEQ ID NO: 1510421 - RNA, 19 nt, Artificial Sequence
  Description of Artificial Sequence: Synthetic oligonucleotide
aguugcagauuccucgaca

SEQ ID NO: 1510422 - RNA, 19 nt, Artificial Sequence
  Description of Artificial Sequence: Synthetic oligonucleotide
ucgugcuggaaacuucaug

SEQ ID NO: 1510423 - RNA, 19 nt, Artificial Sequence
  Description of Artificial Sequence: Synthetic oligonucleotide
ucaaugguuuucuggcgac

SEQ ID NO: 1510424 - RNA, 19 nt, Artificial Sequence
  Description of Artificial Sequence: Synthetic oligonucleotide
gaaacaagugugaaucuaa

SEQ ID NO: 1510425 - RNA, 19 nt, Artificial Sequence
  Description of Artificial Sequence: Synthetic oligonucleotide
ucacgcuggcggcagaagc

SEQ ID NO: 1510426 - RNA, 19 nt, Artificial Sequence
  Description of Artificial Sequence: Synthetic oligonucleotide
caggcggagaaucuucagg

SEQ ID NO: 1510427 - RNA, 19 nt, Artificial Sequence
  Description of Artificial Sequence: Synthetic oligonucleotide
cacuagcauguacuuaucc

SEQ ID NO: 1510428 - RNA, 19 nt, Artificial Sequence
  Description of Artificial Sequence: Synthetic oligonucleotide
acgacuucugggcauguca

SEQ ID NO: 1510429 - RNA, 19 nt, Artificial Sequence
  Description of Artificial Sequence: Synthetic oligonucleotide
ucuucucuucuucuucuuc

SEQ ID NO: 1510430 - RNA, 19 nt, Artificial Sequence
  Description of Artificial Sequence: Synthetic oligonucleotide
aguggaacccagugaucgg

SEQ ID NO: 1510431 - RNA, 19 nt, Artificial Sequence
  Description of Artificial Sequence: Synthetic oligonucleotide
uucauauaucugacauucu

SEQ ID NO: 1510432 - RNA, 19 nt, Artificial Sequence
  Description of Artificial Sequence: Synthetic oligonucleotide
aggaugacgauguuuccau

SEQ ID NO: 1510433 - RNA, 19 nt, Artificial Sequence
  Description of Artificial Sequence: Synthetic oligonucleotide
uaugccuuccgugauguau

SEQ ID NO: 1510434 - RNA, 19 nt, Artificial Sequence
  Description of Artificial Sequence: Synthetic oligonucleotide
agauucuuacucagcuccc

SEQ ID NO: 1510435 - RNA, 19 nt, Artificial Sequence
  Description of Artificial Sequence: Synthetic oligonucleotide
ugagugguccggagugacg

SEQ ID NO: 1510436 - RNA, 19 nt, Artificial Sequence
  Description of Artificial Sequence: Synthetic oligonucleotide
gaucugguaaucggucggg

SEQ ID NO: 1510437 - RNA, 19 nt, Artificial Sequence
  Description of Artificial Sequence: Synthetic oligonucleotide
ucuuacucagcuccccauc

SEQ ID NO: 1510438 - RNA, 19 nt, Artificial Sequence
  Description of Artificial Sequence: Synthetic oligonucleotide
auuauauguggaaggguca

SEQ ID NO: 1510439 - RNA, 19 nt, Artificial Sequence
  Description of Artificial Sequence: Synthetic oligonucleotide
caccaagauucuuacucag

SEQ ID NO: 1510440 - RNA, 19 nt, Artificial Sequence
  Description of Artificial Sequence: Synthetic oligonucleotide
acaguugcagauuccucga

SEQ ID NO: 1510441 - RNA, 19 nt, Artificial Sequence
  Description of Artificial Sequence: Synthetic oligonucleotide
ucgagaguugcugcaaaug

SEQ ID NO: 1510442 - RNA, 19 nt, Artificial Sequence
  Description of Artificial Sequence: Synthetic oligonucleotide
aagauuaaccugaccgagu

SEQ ID NO: 1510443 - RNA, 19 nt, Artificial Sequence
  Description of Artificial Sequence: Synthetic oligonucleotide
uaguaugccuuccgugaug

SEQ ID NO: 1510444 - RNA, 19 nt, Artificial Sequence
  Description of Artificial Sequence: Synthetic oligonucleotide
auguagcucaaguguaacu

SEQ ID NO: 1510445 - RNA, 19 nt, Artificial Sequence
  Description of Artificial Sequence: Synthetic oligonucleotide
uuauauguggaagggucau

SEQ ID NO: 1510446 - RNA, 19 nt, Artificial Sequence
  Description of Artificial Sequence: Synthetic oligonucleotide
cuggugacaaguggaaccc

SEQ ID NO: 1510447 - RNA, 19 nt, Artificial Sequence
  Description of Artificial Sequence: Synthetic oligonucleotide
gggaaugugcgucuucuag

SEQ ID NO: 1510448 - RNA, 19 nt, Artificial Sequence
  Description of Artificial Sequence: Synthetic oligonucleotide
guacuuauccucuuccucu

SEQ ID NO: 1510449 - RNA, 19 nt, Artificial Sequence
  Description of Artificial Sequence: Synthetic oligonucleotide
auucuuacucagcucccca

SEQ ID NO: 1510450 - RNA, 19 nt, Artificial Sequence
  Description of Artificial Sequence: Synthetic oligonucleotide
uaaauacaccaggacuccc

SEQ ID NO: 1510451 - RNA, 19 nt, Artificial Sequence
  Description of Artificial Sequence: Synthetic oligonucleotide
guguaacuaauaguaugcc

SEQ ID NO: 1510452 - RNA, 19 nt, Artificial Sequence
  Description of Artificial Sequence: Synthetic oligonucleotide
aauaagccagggaagcuuu

SEQ ID NO: 1510453 - RNA, 19 nt, Artificial Sequence
  Description of Artificial Sequence: Synthetic oligonucleotide
aaucggucgggcucuucgu

SEQ ID NO: 1510454 - RNA, 19 nt, Artificial Sequence
  Description of Artificial Sequence: Synthetic oligonucleotide
gguguuucgugcuggaaac

SEQ ID NO: 1510455 - RNA, 19 nt, Artificial Sequence
  Description of Artificial Sequence: Synthetic oligonucleotide
ucaagaacaaaagggccuu

SEQ ID NO: 1510456 - RNA, 19 nt, Artificial Sequence
  Description of Artificial Sequence: Synthetic oligonucleotide
uucuacugggcgaauuaua

SEQ ID NO: 1510457 - RNA, 19 nt, Artificial Sequence
  Description of Artificial Sequence: Synthetic oligonucleotide
uagcucaaguguaacuaau

SEQ ID NO: 1510458 - RNA, 19 nt, Artificial Sequence
  Description of Artificial Sequence: Synthetic oligonucleotide
uugaccucuucaccauagc

SEQ ID NO: 1510459 - RNA, 19 nt, Artificial Sequence
  Description of Artificial Sequence: Synthetic oligonucleotide
aaagggccuugagaagccg

SEQ ID NO: 1510460 - RNA, 19 nt, Artificial Sequence
  Description of Artificial Sequence: Synthetic oligonucleotide
gaggguuuagaggggacug

SEQ ID NO: 1510461 - RNA, 19 nt, Artificial Sequence
  Description of Artificial Sequence: Synthetic oligonucleotide
cugguaaucggucgggcuc

SEQ ID NO: 1510462 - RNA, 19 nt, Artificial Sequence
  Description of Artificial Sequence: Synthetic oligonucleotide
acuucauauaucugacauu

SEQ ID NO: 1510463 - RNA, 19 nt, Artificial Sequence
  Description of Artificial Sequence: Synthetic oligonucleotide
agcgguuucuaaggcaggg

SEQ ID NO: 1510464 - RNA, 19 nt, Artificial Sequence
  Description of Artificial Sequence: Synthetic oligonucleotide
ggcgaauuauauguggaag

SEQ ID NO: 1510465 - RNA, 19 nt, Artificial Sequence
  Description of Artificial Sequence: Synthetic oligonucleotide
cagggcgacgacuucuggg

SEQ ID NO: 1510466 - RNA, 19 nt, Artificial Sequence
  Description of Artificial Sequence: Synthetic oligonucleotide
agauuccucgacagggugg

SEQ ID NO: 1510467 - RNA, 19 nt, Artificial Sequence
  Description of Artificial Sequence: Synthetic oligonucleotide
gaagggucauggauccagg

SEQ ID NO: 1510468 - RNA, 19 nt, Artificial Sequence
  Description of Artificial Sequence: Synthetic oligonucleotide
guaacuaauaguaugccuu

SEQ ID NO: 1510469 - RNA, 19 nt, Artificial Sequence
  Description of Artificial Sequence: Synthetic oligonucleotide
auaguaugccuuccgugau

SEQ ID NO: 1510470 - RNA, 19 nt, Artificial Sequence
  Description of Artificial Sequence: Synthetic oligonucleotide
gacuucggguccugcagcc

SEQ ID NO: 1510471 - RNA, 19 nt, Artificial Sequence
  Description of Artificial Sequence: Synthetic oligonucleotide
aucugguaaucggucgggc

SEQ ID NO: 1510472 - RNA, 19 nt, Artificial Sequence
  Description of Artificial Sequence: Synthetic oligonucleotide
agugguccggagugacggc

SEQ ID NO: 1510473 - RNA, 19 nt, Artificial Sequence
  Description of Artificial Sequence: Synthetic oligonucleotide
cgaguucuaagacagacug

SEQ ID NO: 1510474 - RNA, 19 nt, Artificial Sequence
  Description of Artificial Sequence: Synthetic oligonucleotide
cuacugggcgaauuauaug

SEQ ID NO: 1510475 - RNA, 19 nt, Artificial Sequence
  Description of Artificial Sequence: Synthetic oligonucleotide
uagcgguuucuaaggcagg

SEQ ID NO: 1510476 - RNA, 19 nt, Artificial Sequence
  Description of Artificial Sequence: Synthetic oligonucleotide
gagccuuuugccgcgcgcg

SEQ ID NO: 1510477 - RNA, 19 nt, Artificial Sequence
  Description of Artificial Sequence: Synthetic oligonucleotide
cuucguuccggguuccuuc

SEQ ID NO: 1510478 - RNA, 19 nt, Artificial Sequence
  Description of Artificial Sequence: Synthetic oligonucleotide
cuucggagaccacaagcac

SEQ ID NO: 1510479 - RNA, 19 nt, Artificial Sequence
  Description of Artificial Sequence: Synthetic oligonucleotide
aucuucuucuucuucucuu

SEQ ID NO: 1510480 - RNA, 19 nt, Artificial Sequence
  Description of Artificial Sequence: Synthetic oligonucleotide
cuuccuccuucucacuagc

SEQ ID NO: 1510481 - RNA, 19 nt, Artificial Sequence
  Description of Artificial Sequence: Synthetic oligonucleotide
ucauggauccagggcgacg

SEQ ID NO: 1510482 - RNA, 19 nt, Artificial Sequence
  Description of Artificial Sequence: Synthetic oligonucleotide
aggauccgggaccuugauc

SEQ ID NO: 1510483 - RNA, 19 nt, Artificial Sequence
  Description of Artificial Sequence: Synthetic oligonucleotide
accugaccgaguucuaaga

SEQ ID NO: 1510484 - RNA, 19 nt, Artificial Sequence
  Description of Artificial Sequence: Synthetic oligonucleotide
cauagcgguuucuaaggca

SEQ ID NO: 1510485 - RNA, 19 nt, Artificial Sequence
  Description of Artificial Sequence: Synthetic oligonucleotide
gccuugagaagccgaaagg

SEQ ID NO: 1510486 - RNA, 19 nt, Artificial Sequence
  Description of Artificial Sequence: Synthetic oligonucleotide
gaggaacggggacagaucu

SEQ ID NO: 1510487 - RNA, 19 nt, Artificial Sequence
  Description of Artificial Sequence: Synthetic oligonucleotide
gaggaugacgauguuucca

SEQ ID NO: 1510488 - RNA, 19 nt, Artificial Sequence
  Description of Artificial Sequence: Synthetic oligonucleotide
gauuaaccugaccgaguuc

SEQ ID NO: 1510489 - RNA, 19 nt, Artificial Sequence
  Description of Artificial Sequence: Synthetic oligonucleotide
ucaccauagcgguuucuaa

SEQ ID NO: 1510490 - RNA, 19 nt, Artificial Sequence
  Description of Artificial Sequence: Synthetic oligonucleotide
uucucacuagcauguacuu

SEQ ID NO: 1510491 - RNA, 19 nt, Artificial Sequence
  Description of Artificial Sequence: Synthetic oligonucleotide
caaagccaugauacuuggc

SEQ ID NO: 1510492 - RNA, 19 nt, Artificial Sequence
  Description of Artificial Sequence: Synthetic oligonucleotide
ugguaucaaugguuuucug

SEQ ID NO: 1510493 - RNA, 19 nt, Artificial Sequence
  Description of Artificial Sequence: Synthetic oligonucleotide
ggccuugagaagccgaaag

SEQ ID NO: 1510494 - RNA, 19 nt, Artificial Sequence
  Description of Artificial Sequence: Synthetic oligonucleotide
ucucgagaguugcugcaaa

SEQ ID NO: 1510495 - RNA, 19 nt, Artificial Sequence
  Description of Artificial Sequence: Synthetic oligonucleotide
cucaaguguaacuaauagu

SEQ ID NO: 1510496 - RNA, 19 nt, Artificial Sequence
  Description of Artificial Sequence: Synthetic oligonucleotide
uccagggcgacgacuucug

SEQ ID NO: 1510497 - RNA, 19 nt, Artificial Sequence
  Description of Artificial Sequence: Synthetic oligonucleotide
cuacaguugcagauuccuc

SEQ ID NO: 1510498 - RNA, 19 nt, Artificial Sequence
  Description of Artificial Sequence: Synthetic oligonucleotide
ugcaaauguucuugaucuc

SEQ ID NO: 1510499 - RNA, 19 nt, Artificial Sequence
  Description of Artificial Sequence: Synthetic oligonucleotide
cuuuggaucuguggccggg

SEQ ID NO: 1510500 - RNA, 19 nt, Artificial Sequence
  Description of Artificial Sequence: Synthetic oligonucleotide
uucuucuucucuucuucuu

SEQ ID NO: 1510501 - RNA, 19 nt, Artificial Sequence
  Description of Artificial Sequence: Synthetic oligonucleotide
cgaauuauauguggaaggg

SEQ ID NO: 1510502 - RNA, 19 nt, Artificial Sequence
  Description of Artificial Sequence: Synthetic oligonucleotide
ucgggcucuucguuccggg

SEQ ID NO: 1510503 - RNA, 19 nt, Artificial Sequence
  Description of Artificial Sequence: Synthetic oligonucleotide
ggaagggucauggauccag

SEQ ID NO: 1510504 - RNA, 19 nt, Artificial Sequence
  Description of Artificial Sequence: Synthetic oligonucleotide
uucguuccggguuccuucu

SEQ ID NO: 1510505 - RNA, 19 nt, Artificial Sequence
  Description of Artificial Sequence: Synthetic oligonucleotide
agcuacaguugcagauucc

SEQ ID NO: 1510506 - RNA, 19 nt, Artificial Sequence
  Description of Artificial Sequence: Synthetic oligonucleotide
uuccucgacagggugggca

SEQ ID NO: 1510507 - RNA, 19 nt, Artificial Sequence
  Description of Artificial Sequence: Synthetic oligonucleotide
ucacuagcauguacuuauc

SEQ ID NO: 1510508 - RNA, 19 nt, Artificial Sequence
  Description of Artificial Sequence: Synthetic oligonucleotide
gaauuauauguggaagggu

SEQ ID NO: 1510509 - RNA, 19 nt, Artificial Sequence
  Description of Artificial Sequence: Synthetic oligonucleotide
uuuuguuggcugggccccg

SEQ ID NO: 1510510 - RNA, 19 nt, Artificial Sequence
  Description of Artificial Sequence: Synthetic oligonucleotide
uggaagcgacaccugggaa

SEQ ID NO: 1510511 - RNA, 19 nt, Artificial Sequence
  Description of Artificial Sequence: Synthetic oligonucleotide
cagagucagaaugggaauc

SEQ ID NO: 1510512 - RNA, 19 nt, Artificial Sequence
  Description of Artificial Sequence: Synthetic oligonucleotide
uucggguccagcagagcau

SEQ ID NO: 1510513 - RNA, 19 nt, Artificial Sequence
  Description of Artificial Sequence: Synthetic oligonucleotide
uucuucuucuucucuucuu

SEQ ID NO: 1510514 - RNA, 19 nt, Artificial Sequence
  Description of Artificial Sequence: Synthetic oligonucleotide
uccgggaccuugaucuggu

SEQ ID NO: 1510515 - RNA, 19 nt, Artificial Sequence
  Description of Artificial Sequence: Synthetic oligonucleotide
ugguaaucggucgggcucu

SEQ ID NO: 1510516 - RNA, 19 nt, Artificial Sequence
  Description of Artificial Sequence: Synthetic oligonucleotide
ucaaguaagcaugcacauu

SEQ ID NO: 1510517 - RNA, 19 nt, Artificial Sequence
  Description of Artificial Sequence: Synthetic oligonucleotide
uuuguuggcugggccccgg

SEQ ID NO: 1510518 - RNA, 19 nt, Artificial Sequence
  Description of Artificial Sequence: Synthetic oligonucleotide
agccuuuugccgcgcgcgg

SEQ ID NO: 1510519 - RNA, 19 nt, Artificial Sequence
  Description of Artificial Sequence: Synthetic oligonucleotide
uaaccugaccgaguucuaa

SEQ ID NO: 1510520 - RNA, 19 nt, Artificial Sequence
  Description of Artificial Sequence: Synthetic oligonucleotide
ggugacaaguggaacccag

SEQ ID NO: 1510521 - RNA, 19 nt, Artificial Sequence
  Description of Artificial Sequence: Synthetic oligonucleotide
agaucuucggagaccacaa

SEQ ID NO: 1510522 - RNA, 19 nt, Artificial Sequence
  Description of Artificial Sequence: Synthetic oligonucleotide
uacccugagugguccggag

SEQ ID NO: 1510523 - RNA, 19 nt, Artificial Sequence
  Description of Artificial Sequence: Synthetic oligonucleotide
uuuugccgcgcgcggcgag

SEQ ID NO: 1510524 - RNA, 19 nt, Artificial Sequence
  Description of Artificial Sequence: Synthetic oligonucleotide
ugccuuccgugauguauca

SEQ ID NO: 1510525 - RNA, 19 nt, Artificial Sequence
  Description of Artificial Sequence: Synthetic oligonucleotide
acgaggaacggggacagau

SEQ ID NO: 1510526 - RNA, 19 nt, Artificial Sequence
  Description of Artificial Sequence: Synthetic oligonucleotide
cauggauccagggcgacga

SEQ ID NO: 1510527 - RNA, 19 nt, Artificial Sequence
  Description of Artificial Sequence: Synthetic oligonucleotide
uuaaccugaccgaguucua

SEQ ID NO: 1510528 - RNA, 19 nt, Artificial Sequence
  Description of Artificial Sequence: Synthetic oligonucleotide
auacaccaggacucccgug

SEQ ID NO: 1510529 - RNA, 19 nt, Artificial Sequence
  Description of Artificial Sequence: Synthetic oligonucleotide
caaguggaacccagugauc

SEQ ID NO: 1510530 - RNA, 19 nt, Artificial Sequence
  Description of Artificial Sequence: Synthetic oligonucleotide
ucuuuacuuugagagccuu

SEQ ID NO: 1510531 - RNA, 19 nt, Artificial Sequence
  Description of Artificial Sequence: Synthetic oligonucleotide
ugggaaucauuugcagagu

SEQ ID NO: 1510532 - RNA, 19 nt, Artificial Sequence
  Description of Artificial Sequence: Synthetic oligonucleotide
gacggcacugacuucgggu

SEQ ID NO: 1510533 - RNA, 19 nt, Artificial Sequence
  Description of Artificial Sequence: Synthetic oligonucleotide
acugggcgaauuauaugug

SEQ ID NO: 1510534 - RNA, 19 nt, Artificial Sequence
  Description of Artificial Sequence: Synthetic oligonucleotide
cauaaaguucaugccaucu

SEQ ID NO: 1510535 - RNA, 19 nt, Artificial Sequence
  Description of Artificial Sequence: Synthetic oligonucleotide
caaagaccccaggauccgg

SEQ ID NO: 1510536 - RNA, 19 nt, Artificial Sequence
  Description of Artificial Sequence: Synthetic oligonucleotide
cagugaucgguuguagauc

SEQ ID NO: 1510537 - RNA, 19 nt, Artificial Sequence
  Description of Artificial Sequence: Synthetic oligonucleotide
cuggaagcgacaccuggga

SEQ ID NO: 1510538 - RNA, 19 nt, Artificial Sequence
  Description of Artificial Sequence: Synthetic oligonucleotide
ucggucgggcucuucguuc

SEQ ID NO: 1510539 - RNA, 19 nt, Artificial Sequence
  Description of Artificial Sequence: Synthetic oligonucleotide
ucccguggcgcaccgucca

SEQ ID NO: 1510540 - RNA, 19 nt, Artificial Sequence
  Description of Artificial Sequence: Synthetic oligonucleotide
uccggagugacggcacuga

SEQ ID NO: 1510541 - RNA, 19 nt, Artificial Sequence
  Description of Artificial Sequence: Synthetic oligonucleotide
cagucuuguguuugcaaaa

SEQ ID NO: 1510542 - RNA, 19 nt, Artificial Sequence
  Description of Artificial Sequence: Synthetic oligonucleotide
gcaccguccaucacgcugg

SEQ ID NO: 1510543 - RNA, 19 nt, Artificial Sequence
  Description of Artificial Sequence: Synthetic oligonucleotide
gaguucucagaggguuuag

SEQ ID NO: 1510544 - RNA, 19 nt, Artificial Sequence
  Description of Artificial Sequence: Synthetic oligonucleotide
gucauucauguagccgucc

SEQ ID NO: 1510545 - RNA, 19 nt, Artificial Sequence
  Description of Artificial Sequence: Synthetic oligonucleotide
uucuucucuucuucuucuu

SEQ ID NO: 1510546 - RNA, 19 nt, Artificial Sequence
  Description of Artificial Sequence: Synthetic oligonucleotide
gcaagcauugcuuuguuuu

SEQ ID NO: 1510547 - RNA, 19 nt, Artificial Sequence
  Description of Artificial Sequence: Synthetic oligonucleotide
aauuccugcuucagacuuu

SEQ ID NO: 1510548 - RNA, 19 nt, Artificial Sequence
  Description of Artificial Sequence: Synthetic oligonucleotide
uucgugcuggaaacuucau

SEQ ID NO: 1510549 - RNA, 19 nt, Artificial Sequence
  Description of Artificial Sequence: Synthetic oligonucleotide
ggaacggggacagaucuuc

SEQ ID NO: 1510550 - RNA, 19 nt, Artificial Sequence
  Description of Artificial Sequence: Synthetic oligonucleotide
cuucuucucuucuucuucu

SEQ ID NO: 1510551 - RNA, 19 nt, Artificial Sequence
  Description of Artificial Sequence: Synthetic oligonucleotide
gaauaagccagggaagcuu

SEQ ID NO: 1510552 - RNA, 19 nt, Artificial Sequence
  Description of Artificial Sequence: Synthetic oligonucleotide
aacccagugaucgguugua

SEQ ID NO: 1510553 - RNA, 19 nt, Artificial Sequence
  Description of Artificial Sequence: Synthetic oligonucleotide
gcuuucuaauucugacaug

SEQ ID NO: 1510554 - RNA, 19 nt, Artificial Sequence
  Description of Artificial Sequence: Synthetic oligonucleotide
ccuuccgugauguaucaga

SEQ ID NO: 1510555 - RNA, 19 nt, Artificial Sequence
  Description of Artificial Sequence: Synthetic oligonucleotide
ggaaucauuugcagaguuc

SEQ ID NO: 1510556 - RNA, 19 nt, Artificial Sequence
  Description of Artificial Sequence: Synthetic oligonucleotide
ggagugacggcacugacuu

SEQ ID NO: 1510557 - RNA, 19 nt, Artificial Sequence
  Description of Artificial Sequence: Synthetic oligonucleotide
gaacccagugaucgguugu

SEQ ID NO: 1510558 - RNA, 19 nt, Artificial Sequence
  Description of Artificial Sequence: Synthetic oligonucleotide
cugagugguccggagugac

SEQ ID NO: 1510559 - RNA, 19 nt, Artificial Sequence
  Description of Artificial Sequence: Synthetic oligonucleotide
acccugagugguccggagu

SEQ ID NO: 1510560 - RNA, 19 nt, Artificial Sequence
  Description of Artificial Sequence: Synthetic oligonucleotide
caguugcagauuccucgac

SEQ ID NO: 1510561 - RNA, 19 nt, Artificial Sequence
  Description of Artificial Sequence: Synthetic oligonucleotide
uucuucuacugggcgaauu

SEQ ID NO: 1510562 - RNA, 19 nt, Artificial Sequence
  Description of Artificial Sequence: Synthetic oligonucleotide
gccaguucggguccagcag

SEQ ID NO: 1510563 - RNA, 19 nt, Artificial Sequence
  Description of Artificial Sequence: Synthetic oligonucleotide
agcucaaguguaacuaaua

SEQ ID NO: 1510564 - RNA, 19 nt, Artificial Sequence
  Description of Artificial Sequence: Synthetic oligonucleotide
cacuggugacaaguggaac

SEQ ID NO: 1510565 - RNA, 19 nt, Artificial Sequence
  Description of Artificial Sequence: Synthetic oligonucleotide
ucggguccagcagagcauc

SEQ ID NO: 1510566 - RNA, 19 nt, Artificial Sequence
  Description of Artificial Sequence: Synthetic oligonucleotide
ccugaccgaguucuaagac

SEQ ID NO: 1510567 - RNA, 19 nt, Artificial Sequence
  Description of Artificial Sequence: Synthetic oligonucleotide
agucagaaugggaaucauu

SEQ ID NO: 1510568 - RNA, 19 nt, Artificial Sequence
  Description of Artificial Sequence: Synthetic oligonucleotide
gaagcuacaguugcagauu

SEQ ID NO: 1510569 - RNA, 19 nt, Artificial Sequence
  Description of Artificial Sequence: Synthetic oligonucleotide
ugggaaugugcgucuucua

SEQ ID NO: 1510570 - RNA, 19 nt, Artificial Sequence
  Description of Artificial Sequence: Synthetic oligonucleotide
agccgaaaggcaggcggag

SEQ ID NO: 1510571 - RNA, 19 nt, Artificial Sequence
  Description of Artificial Sequence: Synthetic oligonucleotide
uguggccggggagggaaug

SEQ ID NO: 1510572 - RNA, 19 nt, Artificial Sequence
  Description of Artificial Sequence: Synthetic oligonucleotide
cuucuucuucucuucuucu

SEQ ID NO: 1510573 - RNA, 19 nt, Artificial Sequence
  Description of Artificial Sequence: Synthetic oligonucleotide
ucguuccggguuccuucug

SEQ ID NO: 1510574 - RNA, 19 nt, Artificial Sequence
  Description of Artificial Sequence: Synthetic oligonucleotide
cucgacagggugggcagug

SEQ ID NO: 1510575 - RNA, 19 nt, Artificial Sequence
  Description of Artificial Sequence: Synthetic oligonucleotide
auuccucgacagggugggc

SEQ ID NO: 1510576 - RNA, 19 nt, Artificial Sequence
  Description of Artificial Sequence: Synthetic oligonucleotide
uuugccgcgcgcggcgagc

SEQ ID NO: 1510577 - RNA, 19 nt, Artificial Sequence
  Description of Artificial Sequence: Synthetic oligonucleotide
ucuucguuccggguuccuu

SEQ ID NO: 1510578 - RNA, 19 nt, Artificial Sequence
  Description of Artificial Sequence: Synthetic oligonucleotide
aucggucgggcucuucguu

SEQ ID NO: 1510579 - RNA, 19 nt, Artificial Sequence
  Description of Artificial Sequence: Synthetic oligonucleotide
ccuuuugccgcgcgcggcg

SEQ ID NO: 1510580 - RNA, 19 nt, Artificial Sequence
  Description of Artificial Sequence: Synthetic oligonucleotide
aucacgcuggcggcagaag

SEQ ID NO: 1510581 - RNA, 19 nt, Artificial Sequence
  Description of Artificial Sequence: Synthetic oligonucleotide
ggcggcagaagcuacaguu

SEQ ID NO: 1510582 - RNA, 19 nt, Artificial Sequence
  Description of Artificial Sequence: Synthetic oligonucleotide
cgguuucuaaggcagggac

SEQ ID NO: 1510583 - RNA, 19 nt, Artificial Sequence
  Description of Artificial Sequence: Synthetic oligonucleotide
guagccguccacagacuuc

SEQ ID NO: 1510584 - RNA, 19 nt, Artificial Sequence
  Description of Artificial Sequence: Synthetic oligonucleotide
ggaagcgacaccugggaau

SEQ ID NO: 1510585 - RNA, 19 nt, Artificial Sequence
  Description of Artificial Sequence: Synthetic oligonucleotide
gucgggcucuucguuccgg

SEQ ID NO: 1510586 - RNA, 19 nt, Artificial Sequence
  Description of Artificial Sequence: Synthetic oligonucleotide
cuucuucuucuucucuucu

SEQ ID NO: 1510587 - RNA, 19 nt, Artificial Sequence
  Description of Artificial Sequence: Synthetic oligonucleotide
gcuacccugagugguccgg

SEQ ID NO: 1510588 - RNA, 19 nt, Artificial Sequence
  Description of Artificial Sequence: Synthetic oligonucleotide
ggcaugucaucgucauuca

SEQ ID NO: 1510589 - RNA, 19 nt, Artificial Sequence
  Description of Artificial Sequence: Synthetic oligonucleotide
ggcuugcauuucaaauucc

SEQ ID NO: 1510590 - RNA, 19 nt, Artificial Sequence
  Description of Artificial Sequence: Synthetic oligonucleotide
gcaguuuguuuugguauca

SEQ ID NO: 1510591 - RNA, 19 nt, Artificial Sequence
  Description of Artificial Sequence: Synthetic oligonucleotide
cugggccccggguguuucg

SEQ ID NO: 1510592 - RNA, 19 nt, Artificial Sequence
  Description of Artificial Sequence: Synthetic oligonucleotide
ggcgcaccguccaucacgc

SEQ ID NO: 1510593 - RNA, 19 nt, Artificial Sequence
  Description of Artificial Sequence: Synthetic oligonucleotide
ggcacgaggaacggggaca

SEQ ID NO: 1510594 - RNA, 19 nt, Artificial Sequence
  Description of Artificial Sequence: Synthetic oligonucleotide
cgugauguaucagaaacaa

SEQ ID NO: 1510595 - RNA, 19 nt, Artificial Sequence
  Description of Artificial Sequence: Synthetic oligonucleotide
gacgacuucugggcauguc

SEQ ID NO: 1510596 - RNA, 19 nt, Artificial Sequence
  Description of Artificial Sequence: Synthetic oligonucleotide
gggaaacuacauguagcuc

SEQ ID NO: 1510597 - RNA, 19 nt, Artificial Sequence
  Description of Artificial Sequence: Synthetic oligonucleotide
gagugacggcacugacuuc

SEQ ID NO: 1510598 - RNA, 19 nt, Artificial Sequence
  Description of Artificial Sequence: Synthetic oligonucleotide
gugguccggagugacggca

SEQ ID NO: 1510599 - RNA, 19 nt, Artificial Sequence
  Description of Artificial Sequence: Synthetic oligonucleotide
ccgugauguaucagaaaca

SEQ ID NO: 1510600 - RNA, 19 nt, Artificial Sequence
  Description of Artificial Sequence: Synthetic oligonucleotide
ggccccggguguuucgugc

SEQ ID NO: 1510601 - RNA, 19 nt, Artificial Sequence
  Description of Artificial Sequence: Synthetic oligonucleotide
ggcuacccugagugguccg

SEQ ID NO: 1510602 - RNA, 19 nt, Artificial Sequence
  Description of Artificial Sequence: Synthetic oligonucleotide
accccaggauccgggaccu

SEQ ID NO: 1510603 - RNA, 19 nt, Artificial Sequence
  Description of Artificial Sequence: Synthetic oligonucleotide
ggcgacacuggugacaagu

SEQ ID NO: 1510604 - RNA, 19 nt, Artificial Sequence
  Description of Artificial Sequence: Synthetic oligonucleotide
gucauggauccagggcgac

SEQ ID NO: 1510605 - RNA, 19 nt, Artificial Sequence
  Description of Artificial Sequence: Synthetic oligonucleotide
cacgcuggcggcagaagcu

SEQ ID NO: 1510606 - RNA, 19 nt, Artificial Sequence
  Description of Artificial Sequence: Synthetic oligonucleotide
cacugacuucggguccugc

SEQ ID NO: 1510607 - RNA, 19 nt, Artificial Sequence
  Description of Artificial Sequence: Synthetic oligonucleotide
cuucauggcuacccugagu

SEQ ID NO: 1510608 - RNA, 19 nt, Artificial Sequence
  Description of Artificial Sequence: Synthetic oligonucleotide
caggcacgaggaacgggga

SEQ ID NO: 1510609 - RNA, 19 nt, Artificial Sequence
  Description of Artificial Sequence: Synthetic oligonucleotide
gggaaucauuugcagaguu

SEQ ID NO: 1510610 - RNA, 19 nt, Artificial Sequence
  Description of Artificial Sequence: Synthetic oligonucleotide
gcgacaccugggaaugugc

SEQ ID NO: 1510611 - RNA, 19 nt, Artificial Sequence
  Description of Artificial Sequence: Synthetic oligonucleotide
ggucauggauccagggcga

SEQ ID NO: 1510612 - RNA, 19 nt, Artificial Sequence
  Description of Artificial Sequence: Synthetic oligonucleotide
accguccaucacgcuggcg

SEQ ID NO: 1510613 - RNA, 19 nt, Artificial Sequence
  Description of Artificial Sequence: Synthetic oligonucleotide
auguagccguccacagacu

SEQ ID NO: 1510614 - RNA, 19 nt, Artificial Sequence
  Description of Artificial Sequence: Synthetic oligonucleotide
gaccgaguucuaagacaga

SEQ ID NO: 1510615 - RNA, 19 nt, Artificial Sequence
  Description of Artificial Sequence: Synthetic oligonucleotide
ccaguucggguccagcaga

SEQ ID NO: 1510616 - RNA, 19 nt, Artificial Sequence
  Description of Artificial Sequence: Synthetic oligonucleotide
agagcauccuugaccucuu

SEQ ID NO: 1510617 - RNA, 19 nt, Artificial Sequence
  Description of Artificial Sequence: Synthetic oligonucleotide
caguuuguuuugguaucaa

SEQ ID NO: 1510618 - RNA, 19 nt, Artificial Sequence
  Description of Artificial Sequence: Synthetic oligonucleotide
ugggccccggguguuucgu

SEQ ID NO: 1510619 - RNA, 19 nt, Artificial Sequence
  Description of Artificial Sequence: Synthetic oligonucleotide
cucgagaguugcugcaaau

SEQ ID NO: 1510620 - RNA, 19 nt, Artificial Sequence
  Description of Artificial Sequence: Synthetic oligonucleotide
caccguccaucacgcuggc

SEQ ID NO: 1510621 - RNA, 19 nt, Artificial Sequence
  Description of Artificial Sequence: Synthetic oligonucleotide
gugacaaguggaacccagu

SEQ ID NO: 1510622 - RNA, 19 nt, Artificial Sequence
  Description of Artificial Sequence: Synthetic oligonucleotide
gagucagaaugggaaucau

SEQ ID NO: 1510623 - RNA, 19 nt, Artificial Sequence
  Description of Artificial Sequence: Synthetic oligonucleotide
ccgaaaggcaggcggagaa

SEQ ID NO: 1510624 - RNA, 19 nt, Artificial Sequence
  Description of Artificial Sequence: Synthetic oligonucleotide
guaaucggucgggcucuuc

SEQ ID NO: 1510625 - RNA, 19 nt, Artificial Sequence
  Description of Artificial Sequence: Synthetic oligonucleotide
gcgacgacuucugggcaug

SEQ ID NO: 1510626 - RNA, 19 nt, Artificial Sequence
  Description of Artificial Sequence: Synthetic oligonucleotide
guccaucacgcuggcggca

SEQ ID NO: 1510627 - RNA, 19 nt, Artificial Sequence
  Description of Artificial Sequence: Synthetic oligonucleotide
ccagggcgacgacuucugg

SEQ ID NO: 1510628 - RNA, 19 nt, Artificial Sequence
  Description of Artificial Sequence: Synthetic oligonucleotide
aggaacggggacagaucuu

SEQ ID NO: 1510629 - RNA, 19 nt, Artificial Sequence
  Description of Artificial Sequence: Synthetic oligonucleotide
cccggaugccccagcaguc

SEQ ID NO: 1510630 - RNA, 19 nt, Artificial Sequence
  Description of Artificial Sequence: Synthetic oligonucleotide
caucacgcuggcggcagaa

SEQ ID NO: 1510631 - RNA, 19 nt, Artificial Sequence
  Description of Artificial Sequence: Synthetic oligonucleotide
ggguuuagaggggacugcu

SEQ ID NO: 1510632 - RNA, 19 nt, Artificial Sequence
  Description of Artificial Sequence: Synthetic oligonucleotide
guggcgcaccguccaucac

SEQ ID NO: 1510633 - RNA, 19 nt, Artificial Sequence
  Description of Artificial Sequence: Synthetic oligonucleotide
cagaguucucagaggguuu

SEQ ID NO: 1510634 - RNA, 19 nt, Artificial Sequence
  Description of Artificial Sequence: Synthetic oligonucleotide
guguuucgugcuggaaacu

SEQ ID NO: 1510635 - RNA, 19 nt, Artificial Sequence
  Description of Artificial Sequence: Synthetic oligonucleotide
cuuuugccgcgcgcggcga

SEQ ID NO: 1510636 - RNA, 19 nt, Artificial Sequence
  Description of Artificial Sequence: Synthetic oligonucleotide
gcgguuucuaaggcaggga

SEQ ID NO: 1510637 - RNA, 19 nt, Artificial Sequence
  Description of Artificial Sequence: Synthetic oligonucleotide
gggcgacgacuucugggca

SEQ ID NO: 1510638 - RNA, 19 nt, Artificial Sequence
  Description of Artificial Sequence: Synthetic oligonucleotide
ccaugcugguggcggguac

SEQ ID NO: 1510639 - RNA, 19 nt, Artificial Sequence
  Description of Artificial Sequence: Synthetic oligonucleotide
guaugccuuccgugaugua

SEQ ID NO: 1510640 - RNA, 19 nt, Artificial Sequence
  Description of Artificial Sequence: Synthetic oligonucleotide
gccccggaugccccagcag

SEQ ID NO: 1510641 - RNA, 19 nt, Artificial Sequence
  Description of Artificial Sequence: Synthetic oligonucleotide
ccggagugacggcacugac

SEQ ID NO: 1510642 - RNA, 19 nt, Artificial Sequence
  Description of Artificial Sequence: Synthetic oligonucleotide
gccaugauacuuggcuaaa

SEQ ID NO: 1510643 - RNA, 19 nt, Artificial Sequence
  Description of Artificial Sequence: Synthetic oligonucleotide
cccaggcacgaggaacggg

SEQ ID NO: 1510644 - RNA, 19 nt, Artificial Sequence
  Description of Artificial Sequence: Synthetic oligonucleotide
ugccgcgcgcggcgagccu

SEQ ID NO: 1510645 - RNA, 19 nt, Artificial Sequence
  Description of Artificial Sequence: Synthetic oligonucleotide
gccuuccgugauguaucag

SEQ ID NO: 1510646 - RNA, 19 nt, Artificial Sequence
  Description of Artificial Sequence: Synthetic oligonucleotide
cgcgcggcgagccuccaug

SEQ ID NO: 1510647 - RNA, 19 nt, Artificial Sequence
  Description of Artificial Sequence: Synthetic oligonucleotide
gccgaaaggcaggcggaga

SEQ ID NO: 1510648 - RNA, 19 nt, Artificial Sequence
  Description of Artificial Sequence: Synthetic oligonucleotide
cguggcgcaccguccauca

SEQ ID NO: 1510649 - RNA, 19 nt, Artificial Sequence
  Description of Artificial Sequence: Synthetic oligonucleotide
ggcgacgacuucugggcau

SEQ ID NO: 1510650 - RNA, 19 nt, Artificial Sequence
  Description of Artificial Sequence: Synthetic oligonucleotide
gggccccggguguuucgug

SEQ ID NO: 1510651 - RNA, 19 nt, Artificial Sequence
  Description of Artificial Sequence: Synthetic oligonucleotide
ggcggguacccaggcacga

SEQ ID NO: 1510652 - RNA, 19 nt, Artificial Sequence
  Description of Artificial Sequence: Synthetic oligonucleotide
cggaugccccagcagucug

SEQ ID NO: 1510653 - RNA, 19 nt, Artificial Sequence
  Description of Artificial Sequence: Synthetic oligonucleotide
ccauggaaaucaacuucau

SEQ ID NO: 1510654 - RNA, 19 nt, Artificial Sequence
  Description of Artificial Sequence: Synthetic oligonucleotide
gguuuagaggggacugcuu

SEQ ID NO: 1510655 - RNA, 19 nt, Artificial Sequence
  Description of Artificial Sequence: Synthetic oligonucleotide
ccuugaccucuucaccaua

SEQ ID NO: 1510656 - RNA, 19 nt, Artificial Sequence
  Description of Artificial Sequence: Synthetic oligonucleotide
caggauccgggaccuugau

SEQ ID NO: 1510657 - RNA, 19 nt, Artificial Sequence
  Description of Artificial Sequence: Synthetic oligonucleotide
ccccggaugccccagcagu

SEQ ID NO: 1510658 - RNA, 19 nt, Artificial Sequence
  Description of Artificial Sequence: Synthetic oligonucleotide
ccccggguguuucgugcug

SEQ ID NO: 1510659 - RNA, 19 nt, Artificial Sequence
  Description of Artificial Sequence: Synthetic oligonucleotide
cacgaggaacggggacaga

SEQ ID NO: 1510660 - RNA, 19 nt, Artificial Sequence
  Description of Artificial Sequence: Synthetic oligonucleotide
cgacuucugggcaugucau

SEQ ID NO: 1510661 - RNA, 19 nt, Artificial Sequence
  Description of Artificial Sequence: Synthetic oligonucleotide
gcugggccccggguguuuc

SEQ ID NO: 1510662 - RNA, 19 nt, Artificial Sequence
  Description of Artificial Sequence: Synthetic oligonucleotide
ccgcgcgcggcgagccucc

SEQ ID NO: 1510663 - RNA, 19 nt, Artificial Sequence
  Description of Artificial Sequence: Synthetic oligonucleotide
ggccggggagggaaugucu

SEQ ID NO: 1510664 - RNA, 19 nt, Artificial Sequence
  Description of Artificial Sequence: Synthetic oligonucleotide
cuucuucuacugggcgaau

SEQ ID NO: 1510665 - RNA, 19 nt, Artificial Sequence
  Description of Artificial Sequence: Synthetic oligonucleotide
gccccggguguuucgugcu

SEQ ID NO: 1510666 - RNA, 19 nt, Artificial Sequence
  Description of Artificial Sequence: Synthetic oligonucleotide
gugaucgguuguagaucuu

SEQ ID NO: 1510667 - RNA, 19 nt, Artificial Sequence
  Description of Artificial Sequence: Synthetic oligonucleotide
ccguggcgcaccguccauc

SEQ ID NO: 1510668 - RNA, 19 nt, Artificial Sequence
  Description of Artificial Sequence: Synthetic oligonucleotide
cucuucguuccggguuccu

SEQ ID NO: 1510669 - RNA, 19 nt, Artificial Sequence
  Description of Artificial Sequence: Synthetic oligonucleotide
gccgcgcgcggcgagccuc

SEQ ID NO: 1510670 - RNA, 19 nt, Artificial Sequence
  Description of Artificial Sequence: Synthetic oligonucleotide
cccuguccaacugcagucu

SEQ ID NO: 1510671 - RNA, 19 nt, Artificial Sequence
  Description of Artificial Sequence: Synthetic oligonucleotide
gacucccguggcgcaccgu

SEQ ID NO: 1510672 - RNA, 19 nt, Artificial Sequence
  Description of Artificial Sequence: Synthetic oligonucleotide
cggguccugcagccuuccc

SEQ ID NO: 1510673 - RNA, 19 nt, Artificial Sequence
  Description of Artificial Sequence: Synthetic oligonucleotide
ccuguccaacugcagucuu

SEQ ID NO: 1510674 - RNA, 19 nt, Artificial Sequence
  Description of Artificial Sequence: Synthetic oligonucleotide
ccggaugccccagcagucu

SEQ ID NO: 1510675 - RNA, 19 nt, Artificial Sequence
  Description of Artificial Sequence: Synthetic oligonucleotide
ccucuucaccauagcgguu

SEQ ID NO: 1510676 - RNA, 19 nt, Artificial Sequence
  Description of Artificial Sequence: Synthetic oligonucleotide
gguaaucggucgggcucuu

SEQ ID NO: 1510677 - RNA, 19 nt, Artificial Sequence
  Description of Artificial Sequence: Synthetic oligonucleotide
ccgggaccuugaucuggua

SEQ ID NO: 1510678 - RNA, 19 nt, Artificial Sequence
  Description of Artificial Sequence: Synthetic oligonucleotide
cgaaaggcaggcggagaau

SEQ ID NO: 1510679 - RNA, 19 nt, Artificial Sequence
  Description of Artificial Sequence: Synthetic oligonucleotide
gcgcaccguccaucacgcu

SEQ ID NO: 1510680 - RNA, 19 nt, Artificial Sequence
  Description of Artificial Sequence: Synthetic oligonucleotide
ccucgacagggugggcagu

SEQ ID NO: 1510681 - RNA, 19 nt, Artificial Sequence
  Description of Artificial Sequence: Synthetic oligonucleotide
ggcugggccccggguguuu

SEQ ID NO: 1510682 - RNA, 19 nt, Artificial Sequence
  Description of Artificial Sequence: Synthetic oligonucleotide
cccguggcgcaccguccau

SEQ ID NO: 1510683 - RNA, 19 nt, Artificial Sequence
  Description of Artificial Sequence: Synthetic oligonucleotide
gcgcgcggcgagccuccau

SEQ ID NO: 1510684 - RNA, 19 nt, Artificial Sequence
  Description of Artificial Sequence: Synthetic oligonucleotide
cgacgacuucugggcaugu

SEQ ID NO: 1510685 - RNA, 19 nt, Artificial Sequence
  Description of Artificial Sequence: Synthetic oligonucleotide
cgcgcgcggcgagccucca

SEQ ID NO: 1510686 - RNA, 19 nt, Artificial Sequence
  Description of Artificial Sequence: Synthetic oligonucleotide
ccccaggauccgggaccuu

SEQ ID NO: 1510687 - RNA, 19 nt, Artificial Sequence
  Description of Artificial Sequence: Synthetic oligonucleotide
auauuguagagauaaagcc

SEQ ID NO: 1510688 - RNA, 19 nt, Artificial Sequence
  Description of Artificial Sequence: Synthetic oligonucleotide
ucauguauaauacaaacca

SEQ ID NO: 1510689 - RNA, 19 nt, Artificial Sequence
  Description of Artificial Sequence: Synthetic oligonucleotide
aauaagauauuguagagau

SEQ ID NO: 1510690 - RNA, 19 nt, Artificial Sequence
  Description of Artificial Sequence: Synthetic oligonucleotide
agucuuuuagucuuaaggc

SEQ ID NO: 1510691 - RNA, 19 nt, Artificial Sequence
  Description of Artificial Sequence: Synthetic oligonucleotide
aguaccuaaauaucaaacc

SEQ ID NO: 1510692 - RNA, 19 nt, Artificial Sequence
  Description of Artificial Sequence: Synthetic oligonucleotide
uuuguaaacauuuugguaa

SEQ ID NO: 1510693 - RNA, 19 nt, Artificial Sequence
  Description of Artificial Sequence: Synthetic oligonucleotide
aauaaaagaguacaccuca

SEQ ID NO: 1510694 - RNA, 19 nt, Artificial Sequence
  Description of Artificial Sequence: Synthetic oligonucleotide
uuaauaaaagaguacaccu

SEQ ID NO: 1510695 - RNA, 19 nt, Artificial Sequence
  Description of Artificial Sequence: Synthetic oligonucleotide
guauaaauuauguacugcg

SEQ ID NO: 1510696 - RNA, 19 nt, Artificial Sequence
  Description of Artificial Sequence: Synthetic oligonucleotide
aaguuuuaguuccuggugg

SEQ ID NO: 1510697 - RNA, 19 nt, Artificial Sequence
  Description of Artificial Sequence: Synthetic oligonucleotide
ugucacauuguucaaaugc

SEQ ID NO: 1510698 - RNA, 19 nt, Artificial Sequence
  Description of Artificial Sequence: Synthetic oligonucleotide
ucuaaguaccuaaauauca

SEQ ID NO: 1510699 - RNA, 19 nt, Artificial Sequence
  Description of Artificial Sequence: Synthetic oligonucleotide
aagaguacaccucaccaac

SEQ ID NO: 1510700 - RNA, 19 nt, Artificial Sequence
  Description of Artificial Sequence: Synthetic oligonucleotide
acuugcgauguauagaggc

SEQ ID NO: 1510701 - RNA, 19 nt, Artificial Sequence
  Description of Artificial Sequence: Synthetic oligonucleotide
uaagauauuguagagauaa

SEQ ID NO: 1510702 - RNA, 19 nt, Artificial Sequence
  Description of Artificial Sequence: Synthetic oligonucleotide
uauuguagagauaaagcca

SEQ ID NO: 1510703 - RNA, 19 nt, Artificial Sequence
  Description of Artificial Sequence: Synthetic oligonucleotide
gaugagaccaaacagguca

SEQ ID NO: 1510704 - RNA, 19 nt, Artificial Sequence
  Description of Artificial Sequence: Synthetic oligonucleotide
ugaauuuugaaugaccagc

SEQ ID NO: 1510705 - RNA, 19 nt, Artificial Sequence
  Description of Artificial Sequence: Synthetic oligonucleotide
cagaguaccaauuuaaaug

SEQ ID NO: 1510706 - RNA, 19 nt, Artificial Sequence
  Description of Artificial Sequence: Synthetic oligonucleotide
aagccaauaugacuaaauc

SEQ ID NO: 1510707 - RNA, 19 nt, Artificial Sequence
  Description of Artificial Sequence: Synthetic oligonucleotide
gauguauagaggcuuuugg

SEQ ID NO: 1510708 - RNA, 19 nt, Artificial Sequence
  Description of Artificial Sequence: Synthetic oligonucleotide
accaauaagauauuguaga

SEQ ID NO: 1510709 - RNA, 19 nt, Artificial Sequence
  Description of Artificial Sequence: Synthetic oligonucleotide
aacauuuugguaaaggcca

SEQ ID NO: 1510710 - RNA, 19 nt, Artificial Sequence
  Description of Artificial Sequence: Synthetic oligonucleotide
aaguaccuaaauaucaaac

SEQ ID NO: 1510711 - RNA, 19 nt, Artificial Sequence
  Description of Artificial Sequence: Synthetic oligonucleotide
agagauaaagccaauauga

SEQ ID NO: 1510712 - RNA, 19 nt, Artificial Sequence
  Description of Artificial Sequence: Synthetic oligonucleotide
uauacaaggguaaagcuuu

SEQ ID NO: 1510713 - RNA, 19 nt, Artificial Sequence
  Description of Artificial Sequence: Synthetic oligonucleotide
uugugaugagaccaaacag

SEQ ID NO: 1510714 - RNA, 19 nt, Artificial Sequence
  Description of Artificial Sequence: Synthetic oligonucleotide
uauaaauuauguacugcga

SEQ ID NO: 1510715 - RNA, 19 nt, Artificial Sequence
  Description of Artificial Sequence: Synthetic oligonucleotide
agcccuuucaaaugggacc

SEQ ID NO: 1510716 - RNA, 19 nt, Artificial Sequence
  Description of Artificial Sequence: Synthetic oligonucleotide
uuuguagccaucuugccgu

SEQ ID NO: 1510717 - RNA, 19 nt, Artificial Sequence
  Description of Artificial Sequence: Synthetic oligonucleotide
uucuaaaagggacaguccu

SEQ ID NO: 1510718 - RNA, 19 nt, Artificial Sequence
  Description of Artificial Sequence: Synthetic oligonucleotide
uguucauacacuugagacc

SEQ ID NO: 1510719 - RNA, 19 nt, Artificial Sequence
  Description of Artificial Sequence: Synthetic oligonucleotide
uuuauacaaggguaaagcu

SEQ ID NO: 1510720 - RNA, 19 nt, Artificial Sequence
  Description of Artificial Sequence: Synthetic oligonucleotide
uuugcuucuaaaagggaca

SEQ ID NO: 1510721 - RNA, 19 nt, Artificial Sequence
  Description of Artificial Sequence: Synthetic oligonucleotide
gucacauaaaaccaauaag

SEQ ID NO: 1510722 - RNA, 19 nt, Artificial Sequence
  Description of Artificial Sequence: Synthetic oligonucleotide
aaggguaaagcuuugucau

SEQ ID NO: 1510723 - RNA, 19 nt, Artificial Sequence
  Description of Artificial Sequence: Synthetic oligonucleotide
uucaaaugcccaaugucag

SEQ ID NO: 1510724 - RNA, 19 nt, Artificial Sequence
  Description of Artificial Sequence: Synthetic oligonucleotide
gauaaagccaauaugacua

SEQ ID NO: 1510725 - RNA, 19 nt, Artificial Sequence
  Description of Artificial Sequence: Synthetic oligonucleotide
ugucuguucauacacuuga

SEQ ID NO: 1510726 - RNA, 19 nt, Artificial Sequence
  Description of Artificial Sequence: Synthetic oligonucleotide
acuaaauccaaagcagagc

SEQ ID NO: 1510727 - RNA, 19 nt, Artificial Sequence
  Description of Artificial Sequence: Synthetic oligonucleotide
agugcugaaugguuguagc

SEQ ID NO: 1510728 - RNA, 19 nt, Artificial Sequence
  Description of Artificial Sequence: Synthetic oligonucleotide
caacuugcgauguauagag

SEQ ID NO: 1510729 - RNA, 19 nt, Artificial Sequence
  Description of Artificial Sequence: Synthetic oligonucleotide
uauuugucaccaaugggug

SEQ ID NO: 1510730 - RNA, 19 nt, Artificial Sequence
  Description of Artificial Sequence: Synthetic oligonucleotide
uaaaagaguacaccucacc

SEQ ID NO: 1510731 - RNA, 19 nt, Artificial Sequence
  Description of Artificial Sequence: Synthetic oligonucleotide
cucauguauaauacaaacc

SEQ ID NO: 1510732 - RNA, 19 nt, Artificial Sequence
  Description of Artificial Sequence: Synthetic oligonucleotide
ucuuuuagucuuaaggcuc

SEQ ID NO: 1510733 - RNA, 19 nt, Artificial Sequence
  Description of Artificial Sequence: Synthetic oligonucleotide
uaauaaaagaguacaccuc

SEQ ID NO: 1510734 - RNA, 19 nt, Artificial Sequence
  Description of Artificial Sequence: Synthetic oligonucleotide
aauggugcggccaugaagu

SEQ ID NO: 1510735 - RNA, 19 nt, Artificial Sequence
  Description of Artificial Sequence: Synthetic oligonucleotide
cuugagaccaguuuaauaa

SEQ ID NO: 1510736 - RNA, 19 nt, Artificial Sequence
  Description of Artificial Sequence: Synthetic oligonucleotide
uuguauaaauuauguacug

SEQ ID NO: 1510737 - RNA, 19 nt, Artificial Sequence
  Description of Artificial Sequence: Synthetic oligonucleotide
ucaucuaaguaccuaaaua

SEQ ID NO: 1510738 - RNA, 19 nt, Artificial Sequence
  Description of Artificial Sequence: Synthetic oligonucleotide
uguauagaggcuuuugguc

SEQ ID NO: 1510739 - RNA, 19 nt, Artificial Sequence
  Description of Artificial Sequence: Synthetic oligonucleotide
auaaauuauguacugcgaa

SEQ ID NO: 1510740 - RNA, 19 nt, Artificial Sequence
  Description of Artificial Sequence: Synthetic oligonucleotide
gaaguuuuaguuccuggug

SEQ ID NO: 1510741 - RNA, 19 nt, Artificial Sequence
  Description of Artificial Sequence: Synthetic oligonucleotide
guaucucaguguuaaaucc

SEQ ID NO: 1510742 - RNA, 19 nt, Artificial Sequence
  Description of Artificial Sequence: Synthetic oligonucleotide
auauuugucaccaaugggu

SEQ ID NO: 1510743 - RNA, 19 nt, Artificial Sequence
  Description of Artificial Sequence: Synthetic oligonucleotide
cuuugcuucuaaaagggac

SEQ ID NO: 1510744 - RNA, 19 nt, Artificial Sequence
  Description of Artificial Sequence: Synthetic oligonucleotide
aaggccauaggacacuugu

SEQ ID NO: 1510745 - RNA, 19 nt, Artificial Sequence
  Description of Artificial Sequence: Synthetic oligonucleotide
cuuuuagucuuaaggcucg

SEQ ID NO: 1510746 - RNA, 19 nt, Artificial Sequence
  Description of Artificial Sequence: Synthetic oligonucleotide
uguucaaaugcccaauguc

SEQ ID NO: 1510747 - RNA, 19 nt, Artificial Sequence
  Description of Artificial Sequence: Synthetic oligonucleotide
uccagaguaagcuuguggu

SEQ ID NO: 1510748 - RNA, 19 nt, Artificial Sequence
  Description of Artificial Sequence: Synthetic oligonucleotide
guacuaaugccacagugcc

SEQ ID NO: 1510749 - RNA, 19 nt, Artificial Sequence
  Description of Artificial Sequence: Synthetic oligonucleotide
aaccaauaagauauuguag

SEQ ID NO: 1510750 - RNA, 19 nt, Artificial Sequence
  Description of Artificial Sequence: Synthetic oligonucleotide
ugacuaaauccaaagcaga

SEQ ID NO: 1510751 - RNA, 19 nt, Artificial Sequence
  Description of Artificial Sequence: Synthetic oligonucleotide
ugaccagccacuaugccug

SEQ ID NO: 1510752 - RNA, 19 nt, Artificial Sequence
  Description of Artificial Sequence: Synthetic oligonucleotide
cauauuugucaccaauggg

SEQ ID NO: 1510753 - RNA, 19 nt, Artificial Sequence
  Description of Artificial Sequence: Synthetic oligonucleotide
gaauuuugaaugaccagcc

SEQ ID NO: 1510754 - RNA, 19 nt, Artificial Sequence
  Description of Artificial Sequence: Synthetic oligonucleotide
uugaauuuugaaugaccag

SEQ ID NO: 1510755 - RNA, 19 nt, Artificial Sequence
  Description of Artificial Sequence: Synthetic oligonucleotide
ucaguguuaaauccuggac

SEQ ID NO: 1510756 - RNA, 19 nt, Artificial Sequence
  Description of Artificial Sequence: Synthetic oligonucleotide
caucuugccguacuaaugc

SEQ ID NO: 1510757 - RNA, 19 nt, Artificial Sequence
  Description of Artificial Sequence: Synthetic oligonucleotide
aaagaguacaccucaccaa

SEQ ID NO: 1510758 - RNA, 19 nt, Artificial Sequence
  Description of Artificial Sequence: Synthetic oligonucleotide
uacacuugagaccaguuua

SEQ ID NO: 1510759 - RNA, 19 nt, Artificial Sequence
  Description of Artificial Sequence: Synthetic oligonucleotide
auucagucaucagaguacc

SEQ ID NO: 1510760 - RNA, 19 nt, Artificial Sequence
  Description of Artificial Sequence: Synthetic oligonucleotide
uaauggugcggccaugaag

SEQ ID NO: 1510761 - RNA, 19 nt, Artificial Sequence
  Description of Artificial Sequence: Synthetic oligonucleotide
uccccuccgacccacagcg

SEQ ID NO: 1510762 - RNA, 19 nt, Artificial Sequence
  Description of Artificial Sequence: Synthetic oligonucleotide
aguuaagggauuuuggauu

SEQ ID NO: 1510763 - RNA, 19 nt, Artificial Sequence
  Description of Artificial Sequence: Synthetic oligonucleotide
ucauaaccuucucugagac

SEQ ID NO: 1510764 - RNA, 19 nt, Artificial Sequence
  Description of Artificial Sequence: Synthetic oligonucleotide
uuuagcccuuucaaauggg

SEQ ID NO: 1510765 - RNA, 19 nt, Artificial Sequence
  Description of Artificial Sequence: Synthetic oligonucleotide
uggaaguuuuaguuccugg

SEQ ID NO: 1510766 - RNA, 19 nt, Artificial Sequence
  Description of Artificial Sequence: Synthetic oligonucleotide
ucuuaaggcucguucagca

SEQ ID NO: 1510767 - RNA, 19 nt, Artificial Sequence
  Description of Artificial Sequence: Synthetic oligonucleotide
uccaacuugcgauguauag

SEQ ID NO: 1510768 - RNA, 19 nt, Artificial Sequence
  Description of Artificial Sequence: Synthetic oligonucleotide
accaaguacaucaggaggg

SEQ ID NO: 1510769 - RNA, 19 nt, Artificial Sequence
  Description of Artificial Sequence: Synthetic oligonucleotide
aaugcccaaugucaggacu

SEQ ID NO: 1510770 - RNA, 19 nt, Artificial Sequence
  Description of Artificial Sequence: Synthetic oligonucleotide
uaaggcucguucagcaagg

SEQ ID NO: 1510771 - RNA, 19 nt, Artificial Sequence
  Description of Artificial Sequence: Synthetic oligonucleotide
caugcaagggagauggcag

SEQ ID NO: 1510772 - RNA, 19 nt, Artificial Sequence
  Description of Artificial Sequence: Synthetic oligonucleotide
uaucucaguguuaaauccu

SEQ ID NO: 1510773 - RNA, 19 nt, Artificial Sequence
  Description of Artificial Sequence: Synthetic oligonucleotide
aguguuaaauccuggacuu

SEQ ID NO: 1510774 - RNA, 19 nt, Artificial Sequence
  Description of Artificial Sequence: Synthetic oligonucleotide
aaagccugacucuccaacu

SEQ ID NO: 1510775 - RNA, 19 nt, Artificial Sequence
  Description of Artificial Sequence: Synthetic oligonucleotide
cauucugagugcaugcaag

SEQ ID NO: 1510776 - RNA, 19 nt, Artificial Sequence
  Description of Artificial Sequence: Synthetic oligonucleotide
gaccaaacaggucacauaa

SEQ ID NO: 1510777 - RNA, 19 nt, Artificial Sequence
  Description of Artificial Sequence: Synthetic oligonucleotide
ucagaguaccaauuuaaau

SEQ ID NO: 1510778 - RNA, 19 nt, Artificial Sequence
  Description of Artificial Sequence: Synthetic oligonucleotide
gaaaggggugcccaaauga

SEQ ID NO: 1510779 - RNA, 19 nt, Artificial Sequence
  Description of Artificial Sequence: Synthetic oligonucleotide
uuucaaaugggaccagaaa

SEQ ID NO: 1510780 - RNA, 19 nt, Artificial Sequence
  Description of Artificial Sequence: Synthetic oligonucleotide
uaagcuugugguccucggg

SEQ ID NO: 1510781 - RNA, 19 nt, Artificial Sequence
  Description of Artificial Sequence: Synthetic oligonucleotide
cugagugcaugcaagggag

SEQ ID NO: 1510782 - RNA, 19 nt, Artificial Sequence
  Description of Artificial Sequence: Synthetic oligonucleotide
uguuaaauccuggacuucu

SEQ ID NO: 1510783 - RNA, 19 nt, Artificial Sequence
  Description of Artificial Sequence: Synthetic oligonucleotide
ugggcaagucuaauggugc

SEQ ID NO: 1510784 - RNA, 19 nt, Artificial Sequence
  Description of Artificial Sequence: Synthetic oligonucleotide
gauucagucaucagaguac

SEQ ID NO: 1510785 - RNA, 19 nt, Artificial Sequence
  Description of Artificial Sequence: Synthetic oligonucleotide
ucugguaucucaguguuaa

SEQ ID NO: 1510786 - RNA, 19 nt, Artificial Sequence
  Description of Artificial Sequence: Synthetic oligonucleotide
cccauaaaauacaagacac

SEQ ID NO: 1510787 - RNA, 19 nt, Artificial Sequence
  Description of Artificial Sequence: Synthetic oligonucleotide
aucagcgacagcucucugg

SEQ ID NO: 1510788 - RNA, 19 nt, Artificial Sequence
  Description of Artificial Sequence: Synthetic oligonucleotide
aggaccucauguauaauac

SEQ ID NO: 1510789 - RNA, 19 nt, Artificial Sequence
  Description of Artificial Sequence: Synthetic oligonucleotide
aaaugggaccagaaagggg

SEQ ID NO: 1510790 - RNA, 19 nt, Artificial Sequence
  Description of Artificial Sequence: Synthetic oligonucleotide
aucuaaguaccuaaauauc

SEQ ID NO: 1510791 - RNA, 19 nt, Artificial Sequence
  Description of Artificial Sequence: Synthetic oligonucleotide
uaaguaccuaaauaucaaa

SEQ ID NO: 1510792 - RNA, 19 nt, Artificial Sequence
  Description of Artificial Sequence: Synthetic oligonucleotide
ugaaaagcacucagcaguc

SEQ ID NO: 1510793 - RNA, 19 nt, Artificial Sequence
  Description of Artificial Sequence: Synthetic oligonucleotide
aucuugccguacuaaugcc

SEQ ID NO: 1510794 - RNA, 19 nt, Artificial Sequence
  Description of Artificial Sequence: Synthetic oligonucleotide
ucugagacuccacugccac

SEQ ID NO: 1510795 - RNA, 19 nt, Artificial Sequence
  Description of Artificial Sequence: Synthetic oligonucleotide
guuaagggauuuuggauuc

SEQ ID NO: 1510796 - RNA, 19 nt, Artificial Sequence
  Description of Artificial Sequence: Synthetic oligonucleotide
ugguggcuugcucauaacc

SEQ ID NO: 1510797 - RNA, 19 nt, Artificial Sequence
  Description of Artificial Sequence: Synthetic oligonucleotide
auuguagagauaaagccaa

SEQ ID NO: 1510798 - RNA, 19 nt, Artificial Sequence
  Description of Artificial Sequence: Synthetic oligonucleotide
ugacucuccaacuugcgau

SEQ ID NO: 1510799 - RNA, 19 nt, Artificial Sequence
  Description of Artificial Sequence: Synthetic oligonucleotide
augcaagggagauggcagc

SEQ ID NO: 1510800 - RNA, 19 nt, Artificial Sequence
  Description of Artificial Sequence: Synthetic oligonucleotide
agucuuaaggcucguucag

SEQ ID NO: 1510801 - RNA, 19 nt, Artificial Sequence
  Description of Artificial Sequence: Synthetic oligonucleotide
gucacauuguucaaaugcc

SEQ ID NO: 1510802 - RNA, 19 nt, Artificial Sequence
  Description of Artificial Sequence: Synthetic oligonucleotide
aggacuugugaugagacca

SEQ ID NO: 1510803 - RNA, 19 nt, Artificial Sequence
  Description of Artificial Sequence: Synthetic oligonucleotide
uuuuccagaguaagcuugu

SEQ ID NO: 1510804 - RNA, 19 nt, Artificial Sequence
  Description of Artificial Sequence: Synthetic oligonucleotide
guucauucugagugcaugc

SEQ ID NO: 1510805 - RNA, 19 nt, Artificial Sequence
  Description of Artificial Sequence: Synthetic oligonucleotide
aacaccugcuggcauguga

SEQ ID NO: 1510806 - RNA, 19 nt, Artificial Sequence
  Description of Artificial Sequence: Synthetic oligonucleotide
uuagcccuuucaaauggga

SEQ ID NO: 1510807 - RNA, 19 nt, Artificial Sequence
  Description of Artificial Sequence: Synthetic oligonucleotide
aaagccaauaugacuaaau

SEQ ID NO: 1510808 - RNA, 19 nt, Artificial Sequence
  Description of Artificial Sequence: Synthetic oligonucleotide
gagauaaagccaauaugac

SEQ ID NO: 1510809 - RNA, 19 nt, Artificial Sequence
  Description of Artificial Sequence: Synthetic oligonucleotide
uuuucacaaucagcgacag

SEQ ID NO: 1510810 - RNA, 19 nt, Artificial Sequence
  Description of Artificial Sequence: Synthetic oligonucleotide
uuucucuuaggauggccca

SEQ ID NO: 1510811 - RNA, 19 nt, Artificial Sequence
  Description of Artificial Sequence: Synthetic oligonucleotide
uucugagugcaugcaaggg

SEQ ID NO: 1510812 - RNA, 19 nt, Artificial Sequence
  Description of Artificial Sequence: Synthetic oligonucleotide
ugcccaaaugauuuaaauu

SEQ ID NO: 1510813 - RNA, 19 nt, Artificial Sequence
  Description of Artificial Sequence: Synthetic oligonucleotide
uugucuguucauacacuug

SEQ ID NO: 1510814 - RNA, 19 nt, Artificial Sequence
  Description of Artificial Sequence: Synthetic oligonucleotide
ucagucaucagaguaccaa

SEQ ID NO: 1510815 - RNA, 19 nt, Artificial Sequence
  Description of Artificial Sequence: Synthetic oligonucleotide
caucuaaguaccuaaauau

SEQ ID NO: 1510816 - RNA, 19 nt, Artificial Sequence
  Description of Artificial Sequence: Synthetic oligonucleotide
ggugucauuuucucuaggc

SEQ ID NO: 1510817 - RNA, 19 nt, Artificial Sequence
  Description of Artificial Sequence: Synthetic oligonucleotide
uugcuucuaaaagggacag

SEQ ID NO: 1510818 - RNA, 19 nt, Artificial Sequence
  Description of Artificial Sequence: Synthetic oligonucleotide
aguucauucugagugcaug

SEQ ID NO: 1510819 - RNA, 19 nt, Artificial Sequence
  Description of Artificial Sequence: Synthetic oligonucleotide
guagccauccccuccgacc

SEQ ID NO: 1510820 - RNA, 19 nt, Artificial Sequence
  Description of Artificial Sequence: Synthetic oligonucleotide
augggugucauuuucucua

SEQ ID NO: 1510821 - RNA, 19 nt, Artificial Sequence
  Description of Artificial Sequence: Synthetic oligonucleotide
uaagggauuuuggauucag

SEQ ID NO: 1510822 - RNA, 19 nt, Artificial Sequence
  Description of Artificial Sequence: Synthetic oligonucleotide
ucauucugagugcaugcaa

SEQ ID NO: 1510823 - RNA, 19 nt, Artificial Sequence
  Description of Artificial Sequence: Synthetic oligonucleotide
uggcaugugacagaugagu

SEQ ID NO: 1510824 - RNA, 19 nt, Artificial Sequence
  Description of Artificial Sequence: Synthetic oligonucleotide
cuaaguaccuaaauaucaa

SEQ ID NO: 1510825 - RNA, 19 nt, Artificial Sequence
  Description of Artificial Sequence: Synthetic oligonucleotide
ucucugguaucucaguguu

SEQ ID NO: 1510826 - RNA, 19 nt, Artificial Sequence
  Description of Artificial Sequence: Synthetic oligonucleotide
cuuuugaauuuugaaugac

SEQ ID NO: 1510827 - RNA, 19 nt, Artificial Sequence
  Description of Artificial Sequence: Synthetic oligonucleotide
gguaucucaguguuaaauc

SEQ ID NO: 1510828 - RNA, 19 nt, Artificial Sequence
  Description of Artificial Sequence: Synthetic oligonucleotide
uugagaccaguuuaauaaa

SEQ ID NO: 1510829 - RNA, 19 nt, Artificial Sequence
  Description of Artificial Sequence: Synthetic oligonucleotide
ugguaucucaguguuaaau

SEQ ID NO: 1510830 - RNA, 19 nt, Artificial Sequence
  Description of Artificial Sequence: Synthetic oligonucleotide
ugccguacuaaugccacag

SEQ ID NO: 1510831 - RNA, 19 nt, Artificial Sequence
  Description of Artificial Sequence: Synthetic oligonucleotide
augcuuggcaaacacacuu

SEQ ID NO: 1510832 - RNA, 19 nt, Artificial Sequence
  Description of Artificial Sequence: Synthetic oligonucleotide
ucuaauggugcggccauga

SEQ ID NO: 1510833 - RNA, 19 nt, Artificial Sequence
  Description of Artificial Sequence: Synthetic oligonucleotide
caucagaguaccaauuuaa

SEQ ID NO: 1510834 - RNA, 19 nt, Artificial Sequence
  Description of Artificial Sequence: Synthetic oligonucleotide
uagcccuuucaaaugggac

SEQ ID NO: 1510835 - RNA, 19 nt, Artificial Sequence
  Description of Artificial Sequence: Synthetic oligonucleotide
aaaaugucugccaccucca

SEQ ID NO: 1510836 - RNA, 19 nt, Artificial Sequence
  Description of Artificial Sequence: Synthetic oligonucleotide
gacucuccaacuugcgaug

SEQ ID NO: 1510837 - RNA, 19 nt, Artificial Sequence
  Description of Artificial Sequence: Synthetic oligonucleotide
agcgacagcucucugguau

SEQ ID NO: 1510838 - RNA, 19 nt, Artificial Sequence
  Description of Artificial Sequence: Synthetic oligonucleotide
cacauuguucaaaugccca

SEQ ID NO: 1510839 - RNA, 19 nt, Artificial Sequence
  Description of Artificial Sequence: Synthetic oligonucleotide
acuugagaccaguuuaaua

SEQ ID NO: 1510840 - RNA, 19 nt, Artificial Sequence
  Description of Artificial Sequence: Synthetic oligonucleotide
uccaaauaucuuggcaucu

SEQ ID NO: 1510841 - RNA, 19 nt, Artificial Sequence
  Description of Artificial Sequence: Synthetic oligonucleotide
acaugaaggaccucaugua

SEQ ID NO: 1510842 - RNA, 19 nt, Artificial Sequence
  Description of Artificial Sequence: Synthetic oligonucleotide
aguaagcuugugguccucg

SEQ ID NO: 1510843 - RNA, 19 nt, Artificial Sequence
  Description of Artificial Sequence: Synthetic oligonucleotide
uucauucugagugcaugca

SEQ ID NO: 1510844 - RNA, 19 nt, Artificial Sequence
  Description of Artificial Sequence: Synthetic oligonucleotide
gucuuuuagucuuaaggcu

SEQ ID NO: 1510845 - RNA, 19 nt, Artificial Sequence
  Description of Artificial Sequence: Synthetic oligonucleotide
ucuggguucgucuccuuau

SEQ ID NO: 1510846 - RNA, 19 nt, Artificial Sequence
  Description of Artificial Sequence: Synthetic oligonucleotide
uccuuacagaagcucugga

SEQ ID NO: 1510847 - RNA, 19 nt, Artificial Sequence
  Description of Artificial Sequence: Synthetic oligonucleotide
gcucauaaccuucucugag

SEQ ID NO: 1510848 - RNA, 19 nt, Artificial Sequence
  Description of Artificial Sequence: Synthetic oligonucleotide
gaaugguuguagccauccc

SEQ ID NO: 1510849 - RNA, 19 nt, Artificial Sequence
  Description of Artificial Sequence: Synthetic oligonucleotide
guuuucacaaucagcgaca

SEQ ID NO: 1510850 - RNA, 19 nt, Artificial Sequence
  Description of Artificial Sequence: Synthetic oligonucleotide
caaugggugucauuuucuc

SEQ ID NO: 1510851 - RNA, 19 nt, Artificial Sequence
  Description of Artificial Sequence: Synthetic oligonucleotide
acggaagacuggccugacc

SEQ ID NO: 1510852 - RNA, 19 nt, Artificial Sequence
  Description of Artificial Sequence: Synthetic oligonucleotide
uccacuugggcaagucuaa

SEQ ID NO: 1510853 - RNA, 19 nt, Artificial Sequence
  Description of Artificial Sequence: Synthetic oligonucleotide
accuaaauaucaaaccaau

SEQ ID NO: 1510854 - RNA, 19 nt, Artificial Sequence
  Description of Artificial Sequence: Synthetic oligonucleotide
aacuugcgauguauagagg

SEQ ID NO: 1510855 - RNA, 19 nt, Artificial Sequence
  Description of Artificial Sequence: Synthetic oligonucleotide
cucaguguuaaauccugga

SEQ ID NO: 1510856 - RNA, 19 nt, Artificial Sequence
  Description of Artificial Sequence: Synthetic oligonucleotide
uaaccuucucugagacucc

SEQ ID NO: 1510857 - RNA, 19 nt, Artificial Sequence
  Description of Artificial Sequence: Synthetic oligonucleotide
aucccuaccaucuccuuuu

SEQ ID NO: 1510858 - RNA, 19 nt, Artificial Sequence
  Description of Artificial Sequence: Synthetic oligonucleotide
ugaugagaccaaacagguc

SEQ ID NO: 1510859 - RNA, 19 nt, Artificial Sequence
  Description of Artificial Sequence: Synthetic oligonucleotide
uuuuaguuccugguggcuu

SEQ ID NO: 1510860 - RNA, 19 nt, Artificial Sequence
  Description of Artificial Sequence: Synthetic oligonucleotide
cacuugggcaagucuaaug

SEQ ID NO: 1510861 - RNA, 19 nt, Artificial Sequence
  Description of Artificial Sequence: Synthetic oligonucleotide
caauaugacuaaauccaaa

SEQ ID NO: 1510862 - RNA, 19 nt, Artificial Sequence
  Description of Artificial Sequence: Synthetic oligonucleotide
augagaccaaacaggucac

SEQ ID NO: 1510863 - RNA, 19 nt, Artificial Sequence
  Description of Artificial Sequence: Synthetic oligonucleotide
uggguucgucuccuuaugu

SEQ ID NO: 1510864 - RNA, 19 nt, Artificial Sequence
  Description of Artificial Sequence: Synthetic oligonucleotide
cguacuaaugccacagugc

SEQ ID NO: 1510865 - RNA, 19 nt, Artificial Sequence
  Description of Artificial Sequence: Synthetic oligonucleotide
gacacaagaugcuguacua

SEQ ID NO: 1510866 - RNA, 19 nt, Artificial Sequence
  Description of Artificial Sequence: Synthetic oligonucleotide
agucuuccccagcaguucu

SEQ ID NO: 1510867 - RNA, 19 nt, Artificial Sequence
  Description of Artificial Sequence: Synthetic oligonucleotide
augcucaugagggucauau

SEQ ID NO: 1510868 - RNA, 19 nt, Artificial Sequence
  Description of Artificial Sequence: Synthetic oligonucleotide
uugaaugaccagccacuau

SEQ ID NO: 1510869 - RNA, 19 nt, Artificial Sequence
  Description of Artificial Sequence: Synthetic oligonucleotide
uguguuguggaggcagcca

SEQ ID NO: 1510870 - RNA, 19 nt, Artificial Sequence
  Description of Artificial Sequence: Synthetic oligonucleotide
guccuuacagaagcucugg

SEQ ID NO: 1510871 - RNA, 19 nt, Artificial Sequence
  Description of Artificial Sequence: Synthetic oligonucleotide
ucuccaacuugcgauguau

SEQ ID NO: 1510872 - RNA, 19 nt, Artificial Sequence
  Description of Artificial Sequence: Synthetic oligonucleotide
ugagugcaugcaagggaga

SEQ ID NO: 1510873 - RNA, 19 nt, Artificial Sequence
  Description of Artificial Sequence: Synthetic oligonucleotide
caagucuaauggugcggcc

SEQ ID NO: 1510874 - RNA, 19 nt, Artificial Sequence
  Description of Artificial Sequence: Synthetic oligonucleotide
caguguuaaauccuggacu

SEQ ID NO: 1510875 - RNA, 19 nt, Artificial Sequence
  Description of Artificial Sequence: Synthetic oligonucleotide
agucuaauggugcggccau

SEQ ID NO: 1510876 - RNA, 19 nt, Artificial Sequence
  Description of Artificial Sequence: Synthetic oligonucleotide
aacggaagacuggccugac

SEQ ID NO: 1510877 - RNA, 19 nt, Artificial Sequence
  Description of Artificial Sequence: Synthetic oligonucleotide
aaggcucguucagcaaggg

SEQ ID NO: 1510878 - RNA, 19 nt, Artificial Sequence
  Description of Artificial Sequence: Synthetic oligonucleotide
uggauucagucaucagagu

SEQ ID NO: 1510879 - RNA, 19 nt, Artificial Sequence
  Description of Artificial Sequence: Synthetic oligonucleotide
ggauucagucaucagagua

SEQ ID NO: 1510880 - RNA, 19 nt, Artificial Sequence
  Description of Artificial Sequence: Synthetic oligonucleotide
auaauacaaaccagcuuaa

SEQ ID NO: 1510881 - RNA, 19 nt, Artificial Sequence
  Description of Artificial Sequence: Synthetic oligonucleotide
ccuaaauaucaaaccaauc

SEQ ID NO: 1510882 - RNA, 19 nt, Artificial Sequence
  Description of Artificial Sequence: Synthetic oligonucleotide
uguagccauccccuccgac

SEQ ID NO: 1510883 - RNA, 19 nt, Artificial Sequence
  Description of Artificial Sequence: Synthetic oligonucleotide
ugcgauguauagaggcuuu

SEQ ID NO: 1510884 - RNA, 19 nt, Artificial Sequence
  Description of Artificial Sequence: Synthetic oligonucleotide
gaccgcgccgccauguucc

SEQ ID NO: 1510885 - RNA, 19 nt, Artificial Sequence
  Description of Artificial Sequence: Synthetic oligonucleotide
uuaagggauuuuggauuca

SEQ ID NO: 1510886 - RNA, 19 nt, Artificial Sequence
  Description of Artificial Sequence: Synthetic oligonucleotide
uacaaggguaaagcuuugu

SEQ ID NO: 1510887 - RNA, 19 nt, Artificial Sequence
  Description of Artificial Sequence: Synthetic oligonucleotide
aguccuuacagaagcucug

SEQ ID NO: 1510888 - RNA, 19 nt, Artificial Sequence
  Description of Artificial Sequence: Synthetic oligonucleotide
uuguagagauaaagccaau

SEQ ID NO: 1510889 - RNA, 19 nt, Artificial Sequence
  Description of Artificial Sequence: Synthetic oligonucleotide
gggcaagucuaauggugcg

SEQ ID NO: 1510890 - RNA, 19 nt, Artificial Sequence
  Description of Artificial Sequence: Synthetic oligonucleotide
gucuuaaggcucguucagc

SEQ ID NO: 1510891 - RNA, 19 nt, Artificial Sequence
  Description of Artificial Sequence: Synthetic oligonucleotide
ucucuuaggauggcccagu

SEQ ID NO: 1510892 - RNA, 19 nt, Artificial Sequence
  Description of Artificial Sequence: Synthetic oligonucleotide
aucagaguaccaauuuaaa

SEQ ID NO: 1510893 - RNA, 19 nt, Artificial Sequence
  Description of Artificial Sequence: Synthetic oligonucleotide
cagugcugaaugguuguag

SEQ ID NO: 1510894 - RNA, 19 nt, Artificial Sequence
  Description of Artificial Sequence: Synthetic oligonucleotide
uugcgauguauagaggcuu

SEQ ID NO: 1510895 - RNA, 19 nt, Artificial Sequence
  Description of Artificial Sequence: Synthetic oligonucleotide
agugcaugcaagggagaug

SEQ ID NO: 1510896 - RNA, 19 nt, Artificial Sequence
  Description of Artificial Sequence: Synthetic oligonucleotide
aggacccuggaaguuuuag

SEQ ID NO: 1510897 - RNA, 19 nt, Artificial Sequence
  Description of Artificial Sequence: Synthetic oligonucleotide
ggaaguuuuaguuccuggu

SEQ ID NO: 1510898 - RNA, 19 nt, Artificial Sequence
  Description of Artificial Sequence: Synthetic oligonucleotide
cuccgacccacagcgaccg

SEQ ID NO: 1510899 - RNA, 19 nt, Artificial Sequence
  Description of Artificial Sequence: Synthetic oligonucleotide
cagccacuaugccuggccc

SEQ ID NO: 1510900 - RNA, 19 nt, Artificial Sequence
  Description of Artificial Sequence: Synthetic oligonucleotide
gcaagucuaauggugcggc

SEQ ID NO: 1510901 - RNA, 19 nt, Artificial Sequence
  Description of Artificial Sequence: Synthetic oligonucleotide
aaaggccauaggacacuug

SEQ ID NO: 1510902 - RNA, 19 nt, Artificial Sequence
  Description of Artificial Sequence: Synthetic oligonucleotide
ggcaagucuaauggugcgg

SEQ ID NO: 1510903 - RNA, 19 nt, Artificial Sequence
  Description of Artificial Sequence: Synthetic oligonucleotide
uuuuagucuuaaggcucgu

SEQ ID NO: 1510904 - RNA, 19 nt, Artificial Sequence
  Description of Artificial Sequence: Synthetic oligonucleotide
ugcccaaugucaggacuug

SEQ ID NO: 1510905 - RNA, 19 nt, Artificial Sequence
  Description of Artificial Sequence: Synthetic oligonucleotide
uuuagucuuaaggcucguu

SEQ ID NO: 1510906 - RNA, 19 nt, Artificial Sequence
  Description of Artificial Sequence: Synthetic oligonucleotide
cuugcgauguauagaggcu

SEQ ID NO: 1510907 - RNA, 19 nt, Artificial Sequence
  Description of Artificial Sequence: Synthetic oligonucleotide
ccaucuugccguacuaaug

SEQ ID NO: 1510908 - RNA, 19 nt, Artificial Sequence
  Description of Artificial Sequence: Synthetic oligonucleotide
accucauguauaauacaaa

SEQ ID NO: 1510909 - RNA, 19 nt, Artificial Sequence
  Description of Artificial Sequence: Synthetic oligonucleotide
ugcaugcaagggagauggc

SEQ ID NO: 1510910 - RNA, 19 nt, Artificial Sequence
  Description of Artificial Sequence: Synthetic oligonucleotide
ccguacuaaugccacagug

SEQ ID NO: 1510911 - RNA, 19 nt, Artificial Sequence
  Description of Artificial Sequence: Synthetic oligonucleotide
agaguacaccucaccaaca

SEQ ID NO: 1510912 - RNA, 19 nt, Artificial Sequence
  Description of Artificial Sequence: Synthetic oligonucleotide
uaaaggccauaggacacuu

SEQ ID NO: 1510913 - RNA, 19 nt, Artificial Sequence
  Description of Artificial Sequence: Synthetic oligonucleotide
gucaggacuugugaugaga

SEQ ID NO: 1510914 - RNA, 19 nt, Artificial Sequence
  Description of Artificial Sequence: Synthetic oligonucleotide
caugaaggaccucauguau

SEQ ID NO: 1510915 - RNA, 19 nt, Artificial Sequence
  Description of Artificial Sequence: Synthetic oligonucleotide
uugucaccaauggguguca

SEQ ID NO: 1510916 - RNA, 19 nt, Artificial Sequence
  Description of Artificial Sequence: Synthetic oligonucleotide
gacuggccugacccuuuag

SEQ ID NO: 1510917 - RNA, 19 nt, Artificial Sequence
  Description of Artificial Sequence: Synthetic oligonucleotide
ggaccucauguauaauaca

SEQ ID NO: 1510918 - RNA, 19 nt, Artificial Sequence
  Description of Artificial Sequence: Synthetic oligonucleotide
guagccaucuugccguacu

SEQ ID NO: 1510919 - RNA, 19 nt, Artificial Sequence
  Description of Artificial Sequence: Synthetic oligonucleotide
cucugagacuccacugcca

SEQ ID NO: 1510920 - RNA, 19 nt, Artificial Sequence
  Description of Artificial Sequence: Synthetic oligonucleotide
gugcccaaaugauuuaaau

SEQ ID NO: 1510921 - RNA, 19 nt, Artificial Sequence
  Description of Artificial Sequence: Synthetic oligonucleotide
caaugucaggacuugugau

SEQ ID NO: 1510922 - RNA, 19 nt, Artificial Sequence
  Description of Artificial Sequence: Synthetic oligonucleotide
ccagaguaagcuugugguc

SEQ ID NO: 1510923 - RNA, 19 nt, Artificial Sequence
  Description of Artificial Sequence: Synthetic oligonucleotide
cucucugguaucucagugu

SEQ ID NO: 1510924 - RNA, 19 nt, Artificial Sequence
  Description of Artificial Sequence: Synthetic oligonucleotide
cauaggacacuugucacau

SEQ ID NO: 1510925 - RNA, 19 nt, Artificial Sequence
  Description of Artificial Sequence: Synthetic oligonucleotide
accuucucugagacuccac

SEQ ID NO: 1510926 - RNA, 19 nt, Artificial Sequence
  Description of Artificial Sequence: Synthetic oligonucleotide
uguagccaucuugccguac

SEQ ID NO: 1510927 - RNA, 19 nt, Artificial Sequence
  Description of Artificial Sequence: Synthetic oligonucleotide
ugcucaugagggucauauu

SEQ ID NO: 1510928 - RNA, 19 nt, Artificial Sequence
  Description of Artificial Sequence: Synthetic oligonucleotide
ccagccacuaugccuggcc

SEQ ID NO: 1510929 - RNA, 19 nt, Artificial Sequence
  Description of Artificial Sequence: Synthetic oligonucleotide
cacaucucuggguucgucu

SEQ ID NO: 1510930 - RNA, 19 nt, Artificial Sequence
  Description of Artificial Sequence: Synthetic oligonucleotide
agagcacaugaaggaccuc

SEQ ID NO: 1510931 - RNA, 19 nt, Artificial Sequence
  Description of Artificial Sequence: Synthetic oligonucleotide
cugguggcuugcucauaac

SEQ ID NO: 1510932 - RNA, 19 nt, Artificial Sequence
  Description of Artificial Sequence: Synthetic oligonucleotide
ucccuaccaucuccuuuuc

SEQ ID NO: 1510933 - RNA, 19 nt, Artificial Sequence
  Description of Artificial Sequence: Synthetic oligonucleotide
guguuaaauccuggacuuc

SEQ ID NO: 1510934 - RNA, 19 nt, Artificial Sequence
  Description of Artificial Sequence: Synthetic oligonucleotide
gacuugugaugagaccaaa

SEQ ID NO: 1510935 - RNA, 19 nt, Artificial Sequence
  Description of Artificial Sequence: Synthetic oligonucleotide
augcccaaugucaggacuu

SEQ ID NO: 1510936 - RNA, 19 nt, Artificial Sequence
  Description of Artificial Sequence: Synthetic oligonucleotide
gguggcuugcucauaaccu

SEQ ID NO: 1510937 - RNA, 19 nt, Artificial Sequence
  Description of Artificial Sequence: Synthetic oligonucleotide
gguucgucuccuuauguuu

SEQ ID NO: 1510938 - RNA, 19 nt, Artificial Sequence
  Description of Artificial Sequence: Synthetic oligonucleotide
uggugcggccaugaaguuu

SEQ ID NO: 1510939 - RNA, 19 nt, Artificial Sequence
  Description of Artificial Sequence: Synthetic oligonucleotide
cuccaacuugcgauguaua

SEQ ID NO: 1510940 - RNA, 19 nt, Artificial Sequence
  Description of Artificial Sequence: Synthetic oligonucleotide
cauacacuugagaccaguu

SEQ ID NO: 1510941 - RNA, 19 nt, Artificial Sequence
  Description of Artificial Sequence: Synthetic oligonucleotide
ccaacuugcgauguauaga

SEQ ID NO: 1510942 - RNA, 19 nt, Artificial Sequence
  Description of Artificial Sequence: Synthetic oligonucleotide
ggccugacccuuuagcccu

SEQ ID NO: 1510943 - RNA, 19 nt, Artificial Sequence
  Description of Artificial Sequence: Synthetic oligonucleotide
ccuccgacccacagcgacc

SEQ ID NO: 1510944 - RNA, 19 nt, Artificial Sequence
  Description of Artificial Sequence: Synthetic oligonucleotide
gaguaccaauuuaaaugau

SEQ ID NO: 1510945 - RNA, 19 nt, Artificial Sequence
  Description of Artificial Sequence: Synthetic oligonucleotide
auggugcggccaugaaguu

SEQ ID NO: 1510946 - RNA, 19 nt, Artificial Sequence
  Description of Artificial Sequence: Synthetic oligonucleotide
cgauguauagaggcuuuug

SEQ ID NO: 1510947 - RNA, 19 nt, Artificial Sequence
  Description of Artificial Sequence: Synthetic oligonucleotide
gcuuugcuucuaaaaggga

SEQ ID NO: 1510948 - RNA, 19 nt, Artificial Sequence
  Description of Artificial Sequence: Synthetic oligonucleotide
cucggguuuggcuccuucu

SEQ ID NO: 1510949 - RNA, 19 nt, Artificial Sequence
  Description of Artificial Sequence: Synthetic oligonucleotide
uccgacccacagcgaccgc

SEQ ID NO: 1510950 - RNA, 19 nt, Artificial Sequence
  Description of Artificial Sequence: Synthetic oligonucleotide
guucgucuccuuauguuuu

SEQ ID NO: 1510951 - RNA, 19 nt, Artificial Sequence
  Description of Artificial Sequence: Synthetic oligonucleotide
gcuuuuggucucccuggga

SEQ ID NO: 1510952 - RNA, 19 nt, Artificial Sequence
  Description of Artificial Sequence: Synthetic oligonucleotide
gggaguggguuguguugug

SEQ ID NO: 1510953 - RNA, 19 nt, Artificial Sequence
  Description of Artificial Sequence: Synthetic oligonucleotide
cccuaccaucuccuuuucc

SEQ ID NO: 1510954 - RNA, 19 nt, Artificial Sequence
  Description of Artificial Sequence: Synthetic oligonucleotide
ggacuugugaugagaccaa

SEQ ID NO: 1510955 - RNA, 19 nt, Artificial Sequence
  Description of Artificial Sequence: Synthetic oligonucleotide
gcgacagcucucugguauc

SEQ ID NO: 1510956 - RNA, 19 nt, Artificial Sequence
  Description of Artificial Sequence: Synthetic oligonucleotide
gggugcccaaaugauuuaa

SEQ ID NO: 1510957 - RNA, 19 nt, Artificial Sequence
  Description of Artificial Sequence: Synthetic oligonucleotide
ccuuucaaaugggaccaga

SEQ ID NO: 1510958 - RNA, 19 nt, Artificial Sequence
  Description of Artificial Sequence: Synthetic oligonucleotide
ggguucgucuccuuauguu

SEQ ID NO: 1510959 - RNA, 19 nt, Artificial Sequence
  Description of Artificial Sequence: Synthetic oligonucleotide
ggcaugugacagaugaguu

SEQ ID NO: 1510960 - RNA, 19 nt, Artificial Sequence
  Description of Artificial Sequence: Synthetic oligonucleotide
cccuuucaaaugggaccag

SEQ ID NO: 1510961 - RNA, 19 nt, Artificial Sequence
  Description of Artificial Sequence: Synthetic oligonucleotide
ccucggguuuggcuccuuc

SEQ ID NO: 1510962 - RNA, 19 nt, Artificial Sequence
  Description of Artificial Sequence: Synthetic oligonucleotide
cucuuaggauggcccaguu

SEQ ID NO: 1510963 - RNA, 19 nt, Artificial Sequence
  Description of Artificial Sequence: Synthetic oligonucleotide
ccaaagccugacucuccaa

SEQ ID NO: 1510964 - RNA, 19 nt, Artificial Sequence
  Description of Artificial Sequence: Synthetic oligonucleotide
gccguacuaaugccacagu

SEQ ID NO: 1510965 - RNA, 19 nt, Artificial Sequence
  Description of Artificial Sequence: Synthetic oligonucleotide
cagcgacagcucucuggua

SEQ ID NO: 1510966 - RNA, 19 nt, Artificial Sequence
  Description of Artificial Sequence: Synthetic oligonucleotide
ccacagugccaggcuguac

SEQ ID NO: 1510967 - RNA, 19 nt, Artificial Sequence
  Description of Artificial Sequence: Synthetic oligonucleotide
uccucggguuuggcuccuu

SEQ ID NO: 1510968 - RNA, 19 nt, Artificial Sequence
  Description of Artificial Sequence: Synthetic oligonucleotide
ccaacaccugcuggcaugu

SEQ ID NO: 1510969 - RNA, 19 nt, Artificial Sequence
  Description of Artificial Sequence: Synthetic oligonucleotide
cacacaucucuggguucgu

SEQ ID NO: 1510970 - RNA, 19 nt, Artificial Sequence
  Description of Artificial Sequence: Synthetic oligonucleotide
cgaccgcgccgccauguuc

SEQ ID NO: 1510971 - RNA, 19 nt, Artificial Sequence
  Description of Artificial Sequence: Synthetic oligonucleotide
gcgauguauagaggcuuuu

SEQ ID NO: 1510972 - RNA, 19 nt, Artificial Sequence
  Description of Artificial Sequence: Synthetic oligonucleotide
ccacagcgaccgcgccgcc

SEQ ID NO: 1510973 - RNA, 19 nt, Artificial Sequence
  Description of Artificial Sequence: Synthetic oligonucleotide
ccauccccuccgacccaca

SEQ ID NO: 1510974 - RNA, 19 nt, Artificial Sequence
  Description of Artificial Sequence: Synthetic oligonucleotide
ccacuugggcaagucuaau

SEQ ID NO: 1510975 - RNA, 19 nt, Artificial Sequence
  Description of Artificial Sequence: Synthetic oligonucleotide
cccugggaguggguugugu

SEQ ID NO: 1510976 - RNA, 19 nt, Artificial Sequence
  Description of Artificial Sequence: Synthetic oligonucleotide
gcgaccgcgccgccauguu

SEQ ID NO: 1510977 - RNA, 19 nt, Artificial Sequence
  Description of Artificial Sequence: Synthetic oligonucleotide
aacagauuuacuuauauac

SEQ ID NO: 1510978 - RNA, 19 nt, Artificial Sequence
  Description of Artificial Sequence: Synthetic oligonucleotide
aaaauaagcccauacugcc

SEQ ID NO: 1510979 - RNA, 19 nt, Artificial Sequence
  Description of Artificial Sequence: Synthetic oligonucleotide
aaggaauuaaacaugaacg

SEQ ID NO: 1510980 - RNA, 19 nt, Artificial Sequence
  Description of Artificial Sequence: Synthetic oligonucleotide
aaggcuuucacucacggag

SEQ ID NO: 1510981 - RNA, 19 nt, Artificial Sequence
  Description of Artificial Sequence: Synthetic oligonucleotide
ugauguuucagaacgagag

SEQ ID NO: 1510982 - RNA, 19 nt, Artificial Sequence
  Description of Artificial Sequence: Synthetic oligonucleotide
cuagugauguuucagaacg

SEQ ID NO: 1510983 - RNA, 19 nt, Artificial Sequence
  Description of Artificial Sequence: Synthetic oligonucleotide
aacggcuugauuuaacagg

SEQ ID NO: 1510984 - RNA, 19 nt, Artificial Sequence
  Description of Artificial Sequence: Synthetic oligonucleotide
aagucuuugcauuaauccg

SEQ ID NO: 1510985 - RNA, 19 nt, Artificial Sequence
  Description of Artificial Sequence: Synthetic oligonucleotide
ucugucauuucuaucauag

SEQ ID NO: 1510986 - RNA, 19 nt, Artificial Sequence
  Description of Artificial Sequence: Synthetic oligonucleotide
cuuaaagcaaguuccaggg

SEQ ID NO: 1510987 - RNA, 19 nt, Artificial Sequence
  Description of Artificial Sequence: Synthetic oligonucleotide
ucgaguauauaaaacaucu

SEQ ID NO: 1510988 - RNA, 19 nt, Artificial Sequence
  Description of Artificial Sequence: Synthetic oligonucleotide
uuaguaacuugcaaaauac

SEQ ID NO: 1510989 - RNA, 19 nt, Artificial Sequence
  Description of Artificial Sequence: Synthetic oligonucleotide
uacuuauauaccaacuuag

SEQ ID NO: 1510990 - RNA, 19 nt, Artificial Sequence
  Description of Artificial Sequence: Synthetic oligonucleotide
uguucgaguauauaaaaca

SEQ ID NO: 1510991 - RNA, 19 nt, Artificial Sequence
  Description of Artificial Sequence: Synthetic oligonucleotide
uuaagaaacacccuccagu

SEQ ID NO: 1510992 - RNA, 19 nt, Artificial Sequence
  Description of Artificial Sequence: Synthetic oligonucleotide
uaaacaugaacgaaauuac

SEQ ID NO: 1510993 - RNA, 19 nt, Artificial Sequence
  Description of Artificial Sequence: Synthetic oligonucleotide
acucuuuucaauccugggc

SEQ ID NO: 1510994 - RNA, 19 nt, Artificial Sequence
  Description of Artificial Sequence: Synthetic oligonucleotide
agaaacacccuccagucac

SEQ ID NO: 1510995 - RNA, 19 nt, Artificial Sequence
  Description of Artificial Sequence: Synthetic oligonucleotide
caaaauaagcccauacugc

SEQ ID NO: 1510996 - RNA, 19 nt, Artificial Sequence
  Description of Artificial Sequence: Synthetic oligonucleotide
uuauauaagcagauguuac

SEQ ID NO: 1510997 - RNA, 19 nt, Artificial Sequence
  Description of Artificial Sequence: Synthetic oligonucleotide
uguucacaaacccaguugc

SEQ ID NO: 1510998 - RNA, 19 nt, Artificial Sequence
  Description of Artificial Sequence: Synthetic oligonucleotide
acuaagaucuuucugcuug

SEQ ID NO: 1510999 - RNA, 19 nt, Artificial Sequence
  Description of Artificial Sequence: Synthetic oligonucleotide
auuucuaucauagaugcug

SEQ ID NO: 1511000 - RNA, 19 nt, Artificial Sequence
  Description of Artificial Sequence: Synthetic oligonucleotide
uuuguuggaucuuuccugg

SEQ ID NO: 1511001 - RNA, 19 nt, Artificial Sequence
  Description of Artificial Sequence: Synthetic oligonucleotide
uuuaagccaaguauggugu

SEQ ID NO: 1511002 - RNA, 19 nt, Artificial Sequence
  Description of Artificial Sequence: Synthetic oligonucleotide
ucuguaaucuccaguuugg

SEQ ID NO: 1511003 - RNA, 19 nt, Artificial Sequence
  Description of Artificial Sequence: Synthetic oligonucleotide
aauaagcccauacugccug

SEQ ID NO: 1511004 - RNA, 19 nt, Artificial Sequence
  Description of Artificial Sequence: Synthetic oligonucleotide
uaugcuuccaaggaacucg

SEQ ID NO: 1511005 - RNA, 19 nt, Artificial Sequence
  Description of Artificial Sequence: Synthetic oligonucleotide
ugaacgaaauuacugacuc

SEQ ID NO: 1511006 - RNA, 19 nt, Artificial Sequence
  Description of Artificial Sequence: Synthetic oligonucleotide
aauaaagugacaucuucua

SEQ ID NO: 1511007 - RNA, 19 nt, Artificial Sequence
  Description of Artificial Sequence: Synthetic oligonucleotide
aguggaaucuucugcaagg

SEQ ID NO: 1511008 - RNA, 19 nt, Artificial Sequence
  Description of Artificial Sequence: Synthetic oligonucleotide
aacuuaguaacuugcaaaa

SEQ ID NO: 1511009 - RNA, 19 nt, Artificial Sequence
  Description of Artificial Sequence: Synthetic oligonucleotide
auuaauccgcgccaucugc

SEQ ID NO: 1511010 - RNA, 19 nt, Artificial Sequence
  Description of Artificial Sequence: Synthetic oligonucleotide
cauucccaaauacugaugg

SEQ ID NO: 1511011 - RNA, 19 nt, Artificial Sequence
  Description of Artificial Sequence: Synthetic oligonucleotide
uuuuauuccaguccuggcu

SEQ ID NO: 1511012 - RNA, 19 nt, Artificial Sequence
  Description of Artificial Sequence: Synthetic oligonucleotide
uuaagcacugacuuuugag

SEQ ID NO: 1511013 - RNA, 19 nt, Artificial Sequence
  Description of Artificial Sequence: Synthetic oligonucleotide
uauuacugagccuuguccc

SEQ ID NO: 1511014 - RNA, 19 nt, Artificial Sequence
  Description of Artificial Sequence: Synthetic oligonucleotide
uguucuaugcuuccaagga

SEQ ID NO: 1511015 - RNA, 19 nt, Artificial Sequence
  Description of Artificial Sequence: Synthetic oligonucleotide
aacaugaacgaaauuacug

SEQ ID NO: 1511016 - RNA, 19 nt, Artificial Sequence
  Description of Artificial Sequence: Synthetic oligonucleotide
cuggucaagaaacucaucc

SEQ ID NO: 1511017 - RNA, 19 nt, Artificial Sequence
  Description of Artificial Sequence: Synthetic oligonucleotide
aauaaaguaaaagguaaau

SEQ ID NO: 1511018 - RNA, 19 nt, Artificial Sequence
  Description of Artificial Sequence: Synthetic oligonucleotide
agaaacucauccuuugguc

SEQ ID NO: 1511019 - RNA, 19 nt, Artificial Sequence
  Description of Artificial Sequence: Synthetic oligonucleotide
uuuugcaaaacucggugca

SEQ ID NO: 1511020 - RNA, 19 nt, Artificial Sequence
  Description of Artificial Sequence: Synthetic oligonucleotide
uaaagugacaucuucuaaa

SEQ ID NO: 1511021 - RNA, 19 nt, Artificial Sequence
  Description of Artificial Sequence: Synthetic oligonucleotide
uucuguaaucuccaguuug

SEQ ID NO: 1511022 - RNA, 19 nt, Artificial Sequence
  Description of Artificial Sequence: Synthetic oligonucleotide
uacaucacuaucuuuauuu

SEQ ID NO: 1511023 - RNA, 19 nt, Artificial Sequence
  Description of Artificial Sequence: Synthetic oligonucleotide
uuagacaagagcucuauua

SEQ ID NO: 1511024 - RNA, 19 nt, Artificial Sequence
  Description of Artificial Sequence: Synthetic oligonucleotide
agucuuugcauuaauccgc

SEQ ID NO: 1511025 - RNA, 19 nt, Artificial Sequence
  Description of Artificial Sequence: Synthetic oligonucleotide
aggaauuaaacaugaacga

SEQ ID NO: 1511026 - RNA, 19 nt, Artificial Sequence
  Description of Artificial Sequence: Synthetic oligonucleotide
uuuaagaaacacccuccag

SEQ ID NO: 1511027 - RNA, 19 nt, Artificial Sequence
  Description of Artificial Sequence: Synthetic oligonucleotide
acagguuucagucuccuug

SEQ ID NO: 1511028 - RNA, 19 nt, Artificial Sequence
  Description of Artificial Sequence: Synthetic oligonucleotide
aucauagaugcugucauac

SEQ ID NO: 1511029 - RNA, 19 nt, Artificial Sequence
  Description of Artificial Sequence: Synthetic oligonucleotide
auguuucagaacgagaggg

SEQ ID NO: 1511030 - RNA, 19 nt, Artificial Sequence
  Description of Artificial Sequence: Synthetic oligonucleotide
uuuggucuagaucuugggc

SEQ ID NO: 1511031 - RNA, 19 nt, Artificial Sequence
  Description of Artificial Sequence: Synthetic oligonucleotide
uguccucugaauuugcuca

SEQ ID NO: 1511032 - RNA, 19 nt, Artificial Sequence
  Description of Artificial Sequence: Synthetic oligonucleotide
uuacuuauauaccaacuua

SEQ ID NO: 1511033 - RNA, 19 nt, Artificial Sequence
  Description of Artificial Sequence: Synthetic oligonucleotide
gauguuucagaacgagagg

SEQ ID NO: 1511034 - RNA, 19 nt, Artificial Sequence
  Description of Artificial Sequence: Synthetic oligonucleotide
auacacuuuaagaaacacc

SEQ ID NO: 1511035 - RNA, 19 nt, Artificial Sequence
  Description of Artificial Sequence: Synthetic oligonucleotide
uuggucuagaucuugggcu

SEQ ID NO: 1511036 - RNA, 19 nt, Artificial Sequence
  Description of Artificial Sequence: Synthetic oligonucleotide
agguaaauuaaaugcagga

SEQ ID NO: 1511037 - RNA, 19 nt, Artificial Sequence
  Description of Artificial Sequence: Synthetic oligonucleotide
aaauaaagugacaucuucu

SEQ ID NO: 1511038 - RNA, 19 nt, Artificial Sequence
  Description of Artificial Sequence: Synthetic oligonucleotide
cuuugcauuaauccgcgcc

SEQ ID NO: 1511039 - RNA, 19 nt, Artificial Sequence
  Description of Artificial Sequence: Synthetic oligonucleotide
cuauuacugagccuugucc

SEQ ID NO: 1511040 - RNA, 19 nt, Artificial Sequence
  Description of Artificial Sequence: Synthetic oligonucleotide
aacaaggaauuaaacauga

SEQ ID NO: 1511041 - RNA, 19 nt, Artificial Sequence
  Description of Artificial Sequence: Synthetic oligonucleotide
uuugacagguuucagucuc

SEQ ID NO: 1511042 - RNA, 19 nt, Artificial Sequence
  Description of Artificial Sequence: Synthetic oligonucleotide
ugacucuuuucaauccugg

SEQ ID NO: 1511043 - RNA, 19 nt, Artificial Sequence
  Description of Artificial Sequence: Synthetic oligonucleotide
gaacucgagauccuggcag

SEQ ID NO: 1511044 - RNA, 19 nt, Artificial Sequence
  Description of Artificial Sequence: Synthetic oligonucleotide
ugaaggcuuucacucacgg

SEQ ID NO: 1511045 - RNA, 19 nt, Artificial Sequence
  Description of Artificial Sequence: Synthetic oligonucleotide
ucagccaacagauuuacuu

SEQ ID NO: 1511046 - RNA, 19 nt, Artificial Sequence
  Description of Artificial Sequence: Synthetic oligonucleotide
acucauacacaguggaauc

SEQ ID NO: 1511047 - RNA, 19 nt, Artificial Sequence
  Description of Artificial Sequence: Synthetic oligonucleotide
guaaauuaaaugcaggagu

SEQ ID NO: 1511048 - RNA, 19 nt, Artificial Sequence
  Description of Artificial Sequence: Synthetic oligonucleotide
ucaagaaacucauccuuug

SEQ ID NO: 1511049 - RNA, 19 nt, Artificial Sequence
  Description of Artificial Sequence: Synthetic oligonucleotide
cuuuguuggaucuuuccug

SEQ ID NO: 1511050 - RNA, 19 nt, Artificial Sequence
  Description of Artificial Sequence: Synthetic oligonucleotide
uguuuuguugcuagugaug

SEQ ID NO: 1511051 - RNA, 19 nt, Artificial Sequence
  Description of Artificial Sequence: Synthetic oligonucleotide
uccuuguucgaguauauaa

SEQ ID NO: 1511052 - RNA, 19 nt, Artificial Sequence
  Description of Artificial Sequence: Synthetic oligonucleotide
uugaguucacaaauuuuga

SEQ ID NO: 1511053 - RNA, 19 nt, Artificial Sequence
  Description of Artificial Sequence: Synthetic oligonucleotide
ugacaucuucuaaacaaca

SEQ ID NO: 1511054 - RNA, 19 nt, Artificial Sequence
  Description of Artificial Sequence: Synthetic oligonucleotide
ucuaucauagaugcuguca

SEQ ID NO: 1511055 - RNA, 19 nt, Artificial Sequence
  Description of Artificial Sequence: Synthetic oligonucleotide
uaccaacuuaguaacuugc

SEQ ID NO: 1511056 - RNA, 19 nt, Artificial Sequence
  Description of Artificial Sequence: Synthetic oligonucleotide
uggacuuaggaacugcuuc

SEQ ID NO: 1511057 - RNA, 19 nt, Artificial Sequence
  Description of Artificial Sequence: Synthetic oligonucleotide
gacaagagcucuauuacug

SEQ ID NO: 1511058 - RNA, 19 nt, Artificial Sequence
  Description of Artificial Sequence: Synthetic oligonucleotide
aacgaaauuacugacucuu

SEQ ID NO: 1511059 - RNA, 19 nt, Artificial Sequence
  Description of Artificial Sequence: Synthetic oligonucleotide
aauccacuaagaucuuucu

SEQ ID NO: 1511060 - RNA, 19 nt, Artificial Sequence
  Description of Artificial Sequence: Synthetic oligonucleotide
cagauuuacuuauauacca

SEQ ID NO: 1511061 - RNA, 19 nt, Artificial Sequence
  Description of Artificial Sequence: Synthetic oligonucleotide
uuucuaucauagaugcugu

SEQ ID NO: 1511062 - RNA, 19 nt, Artificial Sequence
  Description of Artificial Sequence: Synthetic oligonucleotide
auuacugacucuuuucaau

SEQ ID NO: 1511063 - RNA, 19 nt, Artificial Sequence
  Description of Artificial Sequence: Synthetic oligonucleotide
ugcaaaacucggugcaacg

SEQ ID NO: 1511064 - RNA, 19 nt, Artificial Sequence
  Description of Artificial Sequence: Synthetic oligonucleotide
ucucucgcugacaucacag

SEQ ID NO: 1511065 - RNA, 19 nt, Artificial Sequence
  Description of Artificial Sequence: Synthetic oligonucleotide
caugaacgaaauuacugac

SEQ ID NO: 1511066 - RNA, 19 nt, Artificial Sequence
  Description of Artificial Sequence: Synthetic oligonucleotide
uuguucgaguauauaaaac

SEQ ID NO: 1511067 - RNA, 19 nt, Artificial Sequence
  Description of Artificial Sequence: Synthetic oligonucleotide
uuuaacaggugccuauaaa

SEQ ID NO: 1511068 - RNA, 19 nt, Artificial Sequence
  Description of Artificial Sequence: Synthetic oligonucleotide
uguuucagaacgagagggc

SEQ ID NO: 1511069 - RNA, 19 nt, Artificial Sequence
  Description of Artificial Sequence: Synthetic oligonucleotide
gaauuugcucaucagagua

SEQ ID NO: 1511070 - RNA, 19 nt, Artificial Sequence
  Description of Artificial Sequence: Synthetic oligonucleotide
ugacaucacaguuuccuca

SEQ ID NO: 1511071 - RNA, 19 nt, Artificial Sequence
  Description of Artificial Sequence: Synthetic oligonucleotide
auuugcucaucagaguaac

SEQ ID NO: 1511072 - RNA, 19 nt, Artificial Sequence
  Description of Artificial Sequence: Synthetic oligonucleotide
aagggcuuucuguaaucuc

SEQ ID NO: 1511073 - RNA, 19 nt, Artificial Sequence
  Description of Artificial Sequence: Synthetic oligonucleotide
cacuuuaagaaacacccuc

SEQ ID NO: 1511074 - RNA, 19 nt, Artificial Sequence
  Description of Artificial Sequence: Synthetic oligonucleotide
agauguuacaaaugccucu

SEQ ID NO: 1511075 - RNA, 19 nt, Artificial Sequence
  Description of Artificial Sequence: Synthetic oligonucleotide
uuacugacucuuuucaauc

SEQ ID NO: 1511076 - RNA, 19 nt, Artificial Sequence
  Description of Artificial Sequence: Synthetic oligonucleotide
cuucgauugcucauugccc

SEQ ID NO: 1511077 - RNA, 19 nt, Artificial Sequence
  Description of Artificial Sequence: Synthetic oligonucleotide
aaguuaagcacugacuuuu

SEQ ID NO: 1511078 - RNA, 19 nt, Artificial Sequence
  Description of Artificial Sequence: Synthetic oligonucleotide
uucgauugcucauugcccu

SEQ ID NO: 1511079 - RNA, 19 nt, Artificial Sequence
  Description of Artificial Sequence: Synthetic oligonucleotide
cucgauuucuuucugucug

SEQ ID NO: 1511080 - RNA, 19 nt, Artificial Sequence
  Description of Artificial Sequence: Synthetic oligonucleotide
guguucuaugcuuccaagg

SEQ ID NO: 1511081 - RNA, 19 nt, Artificial Sequence
  Description of Artificial Sequence: Synthetic oligonucleotide
gucauuucuaucauagaug

SEQ ID NO: 1511082 - RNA, 19 nt, Artificial Sequence
  Description of Artificial Sequence: Synthetic oligonucleotide
uggaaauuacuuuuacaau

SEQ ID NO: 1511083 - RNA, 19 nt, Artificial Sequence
  Description of Artificial Sequence: Synthetic oligonucleotide
accuggaaauuacuuuuac

SEQ ID NO: 1511084 - RNA, 19 nt, Artificial Sequence
  Description of Artificial Sequence: Synthetic oligonucleotide
aagcccauacugccugccc

SEQ ID NO: 1511085 - RNA, 19 nt, Artificial Sequence
  Description of Artificial Sequence: Synthetic oligonucleotide
gguaaauuaaaugcaggag

SEQ ID NO: 1511086 - RNA, 19 nt, Artificial Sequence
  Description of Artificial Sequence: Synthetic oligonucleotide
aguaaaagguaaauuaaau

SEQ ID NO: 1511087 - RNA, 19 nt, Artificial Sequence
  Description of Artificial Sequence: Synthetic oligonucleotide
uuaauccgcgccaucugcc

SEQ ID NO: 1511088 - RNA, 19 nt, Artificial Sequence
  Description of Artificial Sequence: Synthetic oligonucleotide
auaccaacuuaguaacuug

SEQ ID NO: 1511089 - RNA, 19 nt, Artificial Sequence
  Description of Artificial Sequence: Synthetic oligonucleotide
uggcaaaauaagcccauac

SEQ ID NO: 1511090 - RNA, 19 nt, Artificial Sequence
  Description of Artificial Sequence: Synthetic oligonucleotide
aguaacuugcaaaauacaa

SEQ ID NO: 1511091 - RNA, 19 nt, Artificial Sequence
  Description of Artificial Sequence: Synthetic oligonucleotide
ugugcauguuagacaagag

SEQ ID NO: 1511092 - RNA, 19 nt, Artificial Sequence
  Description of Artificial Sequence: Synthetic oligonucleotide
cuaagaucuuucugcuugg

SEQ ID NO: 1511093 - RNA, 19 nt, Artificial Sequence
  Description of Artificial Sequence: Synthetic oligonucleotide
cucuuuucaauccugggca

SEQ ID NO: 1511094 - RNA, 19 nt, Artificial Sequence
  Description of Artificial Sequence: Synthetic oligonucleotide
aaucauucccaaauacuga

SEQ ID NO: 1511095 - RNA, 19 nt, Artificial Sequence
  Description of Artificial Sequence: Synthetic oligonucleotide
uacugacucuuuucaaucc

SEQ ID NO: 1511096 - RNA, 19 nt, Artificial Sequence
  Description of Artificial Sequence: Synthetic oligonucleotide
ggaaauuacuuuuacaaua

SEQ ID NO: 1511097 - RNA, 19 nt, Artificial Sequence
  Description of Artificial Sequence: Synthetic oligonucleotide
caaaacucggugcaacggc

SEQ ID NO: 1511098 - RNA, 19 nt, Artificial Sequence
  Description of Artificial Sequence: Synthetic oligonucleotide
aguguucuaugcuuccaag

SEQ ID NO: 1511099 - RNA, 19 nt, Artificial Sequence
  Description of Artificial Sequence: Synthetic oligonucleotide
aacccaguugcuuucuuaa

SEQ ID NO: 1511100 - RNA, 19 nt, Artificial Sequence
  Description of Artificial Sequence: Synthetic oligonucleotide
agaucuugggcugcuuucc

SEQ ID NO: 1511101 - RNA, 19 nt, Artificial Sequence
  Description of Artificial Sequence: Synthetic oligonucleotide
uuuucagccaacagauuua

SEQ ID NO: 1511102 - RNA, 19 nt, Artificial Sequence
  Description of Artificial Sequence: Synthetic oligonucleotide
cuuuuauuccaguccuggc

SEQ ID NO: 1511103 - RNA, 19 nt, Artificial Sequence
  Description of Artificial Sequence: Synthetic oligonucleotide
aaacaugaacgaaauuacu

SEQ ID NO: 1511104 - RNA, 19 nt, Artificial Sequence
  Description of Artificial Sequence: Synthetic oligonucleotide
uauaccaacuuaguaacuu

SEQ ID NO: 1511105 - RNA, 19 nt, Artificial Sequence
  Description of Artificial Sequence: Synthetic oligonucleotide
uacucauacacaguggaau

SEQ ID NO: 1511106 - RNA, 19 nt, Artificial Sequence
  Description of Artificial Sequence: Synthetic oligonucleotide
ucuauuacugagccuuguc

SEQ ID NO: 1511107 - RNA, 19 nt, Artificial Sequence
  Description of Artificial Sequence: Synthetic oligonucleotide
gaucuuucugcuuggucac

SEQ ID NO: 1511108 - RNA, 19 nt, Artificial Sequence
  Description of Artificial Sequence: Synthetic oligonucleotide
ucuaugcuuccaaggaacu

SEQ ID NO: 1511109 - RNA, 19 nt, Artificial Sequence
  Description of Artificial Sequence: Synthetic oligonucleotide
aagaaacacccuccaguca

SEQ ID NO: 1511110 - RNA, 19 nt, Artificial Sequence
  Description of Artificial Sequence: Synthetic oligonucleotide
ucaauccugggcaucaauu

SEQ ID NO: 1511111 - RNA, 19 nt, Artificial Sequence
  Description of Artificial Sequence: Synthetic oligonucleotide
cuuauauaccaacuuagua

SEQ ID NO: 1511112 - RNA, 19 nt, Artificial Sequence
  Description of Artificial Sequence: Synthetic oligonucleotide
uccagucgugcuuccaggg

SEQ ID NO: 1511113 - RNA, 19 nt, Artificial Sequence
  Description of Artificial Sequence: Synthetic oligonucleotide
uggucuagaucuugggcug

SEQ ID NO: 1511114 - RNA, 19 nt, Artificial Sequence
  Description of Artificial Sequence: Synthetic oligonucleotide
agacaagagcucuauuacu

SEQ ID NO: 1511115 - RNA, 19 nt, Artificial Sequence
  Description of Artificial Sequence: Synthetic oligonucleotide
cuugcucaaggccucgggg

SEQ ID NO: 1511116 - RNA, 19 nt, Artificial Sequence
  Description of Artificial Sequence: Synthetic oligonucleotide
caacuuaguaacuugcaaa

SEQ ID NO: 1511117 - RNA, 19 nt, Artificial Sequence
  Description of Artificial Sequence: Synthetic oligonucleotide
ugucauacucauacacagu

SEQ ID NO: 1511118 - RNA, 19 nt, Artificial Sequence
  Description of Artificial Sequence: Synthetic oligonucleotide
gaaacucauccuuuggucu

SEQ ID NO: 1511119 - RNA, 19 nt, Artificial Sequence
  Description of Artificial Sequence: Synthetic oligonucleotide
cucaucagaguaacccuag

SEQ ID NO: 1511120 - RNA, 19 nt, Artificial Sequence
  Description of Artificial Sequence: Synthetic oligonucleotide
gcuucgauugcucauugcc

SEQ ID NO: 1511121 - RNA, 19 nt, Artificial Sequence
  Description of Artificial Sequence: Synthetic oligonucleotide
agaacgagagggcuucucu

SEQ ID NO: 1511122 - RNA, 19 nt, Artificial Sequence
  Description of Artificial Sequence: Synthetic oligonucleotide
cuguucacaaacccaguug

SEQ ID NO: 1511123 - RNA, 19 nt, Artificial Sequence
  Description of Artificial Sequence: Synthetic oligonucleotide
agcucuauuacugagccuu

SEQ ID NO: 1511124 - RNA, 19 nt, Artificial Sequence
  Description of Artificial Sequence: Synthetic oligonucleotide
cagauguuacaaaugccuc

SEQ ID NO: 1511125 - RNA, 19 nt, Artificial Sequence
  Description of Artificial Sequence: Synthetic oligonucleotide
aacucgagauccuggcagu

SEQ ID NO: 1511126 - RNA, 19 nt, Artificial Sequence
  Description of Artificial Sequence: Synthetic oligonucleotide
uuugcucaucagaguaacc

SEQ ID NO: 1511127 - RNA, 19 nt, Artificial Sequence
  Description of Artificial Sequence: Synthetic oligonucleotide
ugccucuuugucaucaaau

SEQ ID NO: 1511128 - RNA, 19 nt, Artificial Sequence
  Description of Artificial Sequence: Synthetic oligonucleotide
cuccgcuuugcaaacuugc

SEQ ID NO: 1511129 - RNA, 19 nt, Artificial Sequence
  Description of Artificial Sequence: Synthetic oligonucleotide
aaauaagcccauacugccu

SEQ ID NO: 1511130 - RNA, 19 nt, Artificial Sequence
  Description of Artificial Sequence: Synthetic oligonucleotide
uugucccuaaccuggaaau

SEQ ID NO: 1511131 - RNA, 19 nt, Artificial Sequence
  Description of Artificial Sequence: Synthetic oligonucleotide
uucuuuuauuccaguccug

SEQ ID NO: 1511132 - RNA, 19 nt, Artificial Sequence
  Description of Artificial Sequence: Synthetic oligonucleotide
caacggcuugauuuaacag

SEQ ID NO: 1511133 - RNA, 19 nt, Artificial Sequence
  Description of Artificial Sequence: Synthetic oligonucleotide
cuuguucgaguauauaaaa

SEQ ID NO: 1511134 - RNA, 19 nt, Artificial Sequence
  Description of Artificial Sequence: Synthetic oligonucleotide
aguuuccucauugcuccgc

SEQ ID NO: 1511135 - RNA, 19 nt, Artificial Sequence
  Description of Artificial Sequence: Synthetic oligonucleotide
ucucgauuucuuucugucu

SEQ ID NO: 1511136 - RNA, 19 nt, Artificial Sequence
  Description of Artificial Sequence: Synthetic oligonucleotide
aaaacucggugcaacggcu

SEQ ID NO: 1511137 - RNA, 19 nt, Artificial Sequence
  Description of Artificial Sequence: Synthetic oligonucleotide
auguuuuguugcuagugau

SEQ ID NO: 1511138 - RNA, 19 nt, Artificial Sequence
  Description of Artificial Sequence: Synthetic oligonucleotide
uuagcagcuucccucugaa

SEQ ID NO: 1511139 - RNA, 19 nt, Artificial Sequence
  Description of Artificial Sequence: Synthetic oligonucleotide
ucccuaaccuggaaauuac

SEQ ID NO: 1511140 - RNA, 19 nt, Artificial Sequence
  Description of Artificial Sequence: Synthetic oligonucleotide
uccuggucaagaaacucau

SEQ ID NO: 1511141 - RNA, 19 nt, Artificial Sequence
  Description of Artificial Sequence: Synthetic oligonucleotide
uucccuucugucucgauuu

SEQ ID NO: 1511142 - RNA, 19 nt, Artificial Sequence
  Description of Artificial Sequence: Synthetic oligonucleotide
auuaaaugcaggaguacau

SEQ ID NO: 1511143 - RNA, 19 nt, Artificial Sequence
  Description of Artificial Sequence: Synthetic oligonucleotide
cagaguaacccuaggcuuc

SEQ ID NO: 1511144 - RNA, 19 nt, Artificial Sequence
  Description of Artificial Sequence: Synthetic oligonucleotide
acuuauauaccaacuuagu

SEQ ID NO: 1511145 - RNA, 19 nt, Artificial Sequence
  Description of Artificial Sequence: Synthetic oligonucleotide
gucuuugcauuaauccgcg

SEQ ID NO: 1511146 - RNA, 19 nt, Artificial Sequence
  Description of Artificial Sequence: Synthetic oligonucleotide
cuuuaagaaacacccucca

SEQ ID NO: 1511147 - RNA, 19 nt, Artificial Sequence
  Description of Artificial Sequence: Synthetic oligonucleotide
agccuugucccuaaccugg

SEQ ID NO: 1511148 - RNA, 19 nt, Artificial Sequence
  Description of Artificial Sequence: Synthetic oligonucleotide
auccagucgugcuuccagg

SEQ ID NO: 1511149 - RNA, 19 nt, Artificial Sequence
  Description of Artificial Sequence: Synthetic oligonucleotide
acggaagcuggacuuagga

SEQ ID NO: 1511150 - RNA, 19 nt, Artificial Sequence
  Description of Artificial Sequence: Synthetic oligonucleotide
uccucugccagucuauguu

SEQ ID NO: 1511151 - RNA, 19 nt, Artificial Sequence
  Description of Artificial Sequence: Synthetic oligonucleotide
uuguugcuagugauguuuc

SEQ ID NO: 1511152 - RNA, 19 nt, Artificial Sequence
  Description of Artificial Sequence: Synthetic oligonucleotide
cucugaauuugcucaucag

SEQ ID NO: 1511153 - RNA, 19 nt, Artificial Sequence
  Description of Artificial Sequence: Synthetic oligonucleotide
ucuguccucugaauuugcu

SEQ ID NO: 1511154 - RNA, 19 nt, Artificial Sequence
  Description of Artificial Sequence: Synthetic oligonucleotide
aacucauccuuuggucuag

SEQ ID NO: 1511155 - RNA, 19 nt, Artificial Sequence
  Description of Artificial Sequence: Synthetic oligonucleotide
uucagaacgagagggcuuc

SEQ ID NO: 1511156 - RNA, 19 nt, Artificial Sequence
  Description of Artificial Sequence: Synthetic oligonucleotide
uugacagguuucagucucc

SEQ ID NO: 1511157 - RNA, 19 nt, Artificial Sequence
  Description of Artificial Sequence: Synthetic oligonucleotide
agccaacagauuuacuuau

SEQ ID NO: 1511158 - RNA, 19 nt, Artificial Sequence
  Description of Artificial Sequence: Synthetic oligonucleotide
uccgcuuugcaaacuugcu

SEQ ID NO: 1511159 - RNA, 19 nt, Artificial Sequence
  Description of Artificial Sequence: Synthetic oligonucleotide
cacaguguucuaugcuucc

SEQ ID NO: 1511160 - RNA, 19 nt, Artificial Sequence
  Description of Artificial Sequence: Synthetic oligonucleotide
aacucggugcaacggcugu

SEQ ID NO: 1511161 - RNA, 19 nt, Artificial Sequence
  Description of Artificial Sequence: Synthetic oligonucleotide
cagucacuguucacaaacc

SEQ ID NO: 1511162 - RNA, 19 nt, Artificial Sequence
  Description of Artificial Sequence: Synthetic oligonucleotide
uguugcuagugauguuuca

SEQ ID NO: 1511163 - RNA, 19 nt, Artificial Sequence
  Description of Artificial Sequence: Synthetic oligonucleotide
ucucgcugacaucacaguu

SEQ ID NO: 1511164 - RNA, 19 nt, Artificial Sequence
  Description of Artificial Sequence: Synthetic oligonucleotide
auccuggcagucauuaguc

SEQ ID NO: 1511165 - RNA, 19 nt, Artificial Sequence
  Description of Artificial Sequence: Synthetic oligonucleotide
uuucagaacgagagggcuu

SEQ ID NO: 1511166 - RNA, 19 nt, Artificial Sequence
  Description of Artificial Sequence: Synthetic oligonucleotide
ugcuuucccuucugucucg

SEQ ID NO: 1511167 - RNA, 19 nt, Artificial Sequence
  Description of Artificial Sequence: Synthetic oligonucleotide
uucucuugguccccauugu

SEQ ID NO: 1511168 - RNA, 19 nt, Artificial Sequence
  Description of Artificial Sequence: Synthetic oligonucleotide
ucgauuucuuucugucugu

SEQ ID NO: 1511169 - RNA, 19 nt, Artificial Sequence
  Description of Artificial Sequence: Synthetic oligonucleotide
augaacgaaauuacugacu

SEQ ID NO: 1511170 - RNA, 19 nt, Artificial Sequence
  Description of Artificial Sequence: Synthetic oligonucleotide
uaacccuaggcuucucuuc

SEQ ID NO: 1511171 - RNA, 19 nt, Artificial Sequence
  Description of Artificial Sequence: Synthetic oligonucleotide
aauccgcgccaucugccug

SEQ ID NO: 1511172 - RNA, 19 nt, Artificial Sequence
  Description of Artificial Sequence: Synthetic oligonucleotide
caguggaaucuucugcaag

SEQ ID NO: 1511173 - RNA, 19 nt, Artificial Sequence
  Description of Artificial Sequence: Synthetic oligonucleotide
cauccagucgugcuuccag

SEQ ID NO: 1511174 - RNA, 19 nt, Artificial Sequence
  Description of Artificial Sequence: Synthetic oligonucleotide
cauugcuccgcuuugcaaa

SEQ ID NO: 1511175 - RNA, 19 nt, Artificial Sequence
  Description of Artificial Sequence: Synthetic oligonucleotide
ccaaguaugguguggauca

SEQ ID NO: 1511176 - RNA, 19 nt, Artificial Sequence
  Description of Artificial Sequence: Synthetic oligonucleotide
ucgagauccuggcagucau

SEQ ID NO: 1511177 - RNA, 19 nt, Artificial Sequence
  Description of Artificial Sequence: Synthetic oligonucleotide
ucaccaacggcuugauuua

SEQ ID NO: 1511178 - RNA, 19 nt, Artificial Sequence
  Description of Artificial Sequence: Synthetic oligonucleotide
gagccuugucccuaaccug

SEQ ID NO: 1511179 - RNA, 19 nt, Artificial Sequence
  Description of Artificial Sequence: Synthetic oligonucleotide
acggcuugauuuaacaggu

SEQ ID NO: 1511180 - RNA, 19 nt, Artificial Sequence
  Description of Artificial Sequence: Synthetic oligonucleotide
gaucuuuccuggucaagaa

SEQ ID NO: 1511181 - RNA, 19 nt, Artificial Sequence
  Description of Artificial Sequence: Synthetic oligonucleotide
ucacggaggucucaucauc

SEQ ID NO: 1511182 - RNA, 19 nt, Artificial Sequence
  Description of Artificial Sequence: Synthetic oligonucleotide
cauuaauccgcgccaucug

SEQ ID NO: 1511183 - RNA, 19 nt, Artificial Sequence
  Description of Artificial Sequence: Synthetic oligonucleotide
agauuuacuuauauaccaa

SEQ ID NO: 1511184 - RNA, 19 nt, Artificial Sequence
  Description of Artificial Sequence: Synthetic oligonucleotide
cuggcagucauuaguccuc

SEQ ID NO: 1511185 - RNA, 19 nt, Artificial Sequence
  Description of Artificial Sequence: Synthetic oligonucleotide
uugcaaaacucggugcaac

SEQ ID NO: 1511186 - RNA, 19 nt, Artificial Sequence
  Description of Artificial Sequence: Synthetic oligonucleotide
caucuuguucccguccccg

SEQ ID NO: 1511187 - RNA, 19 nt, Artificial Sequence
  Description of Artificial Sequence: Synthetic oligonucleotide
uccuggcagucauuagucc

SEQ ID NO: 1511188 - RNA, 19 nt, Artificial Sequence
  Description of Artificial Sequence: Synthetic oligonucleotide
uucaauccugggcaucaau

SEQ ID NO: 1511189 - RNA, 19 nt, Artificial Sequence
  Description of Artificial Sequence: Synthetic oligonucleotide
aacuugcucaaggccucgg

SEQ ID NO: 1511190 - RNA, 19 nt, Artificial Sequence
  Description of Artificial Sequence: Synthetic oligonucleotide
auccgcgccaucugccugg

SEQ ID NO: 1511191 - RNA, 19 nt, Artificial Sequence
  Description of Artificial Sequence: Synthetic oligonucleotide
cuguccucugaauuugcuc

SEQ ID NO: 1511192 - RNA, 19 nt, Artificial Sequence
  Description of Artificial Sequence: Synthetic oligonucleotide
uuugcaaaacucggugcaa

SEQ ID NO: 1511193 - RNA, 19 nt, Artificial Sequence
  Description of Artificial Sequence: Synthetic oligonucleotide
aguaugguguggaucaaaa

SEQ ID NO: 1511194 - RNA, 19 nt, Artificial Sequence
  Description of Artificial Sequence: Synthetic oligonucleotide
uaauccgcgccaucugccu

SEQ ID NO: 1511195 - RNA, 19 nt, Artificial Sequence
  Description of Artificial Sequence: Synthetic oligonucleotide
ucuccuuguucgaguauau

SEQ ID NO: 1511196 - RNA, 19 nt, Artificial Sequence
  Description of Artificial Sequence: Synthetic oligonucleotide
gcuugauuuaacaggugcc

SEQ ID NO: 1511197 - RNA, 19 nt, Artificial Sequence
  Description of Artificial Sequence: Synthetic oligonucleotide
guuaagcacugacuuuuga

SEQ ID NO: 1511198 - RNA, 19 nt, Artificial Sequence
  Description of Artificial Sequence: Synthetic oligonucleotide
cugagccuugucccuaacc

SEQ ID NO: 1511199 - RNA, 19 nt, Artificial Sequence
  Description of Artificial Sequence: Synthetic oligonucleotide
uucuaucauagaugcuguc

SEQ ID NO: 1511200 - RNA, 19 nt, Artificial Sequence
  Description of Artificial Sequence: Synthetic oligonucleotide
ucuuugcauuaauccgcgc

SEQ ID NO: 1511201 - RNA, 19 nt, Artificial Sequence
  Description of Artificial Sequence: Synthetic oligonucleotide
aaacucggugcaacggcug

SEQ ID NO: 1511202 - RNA, 19 nt, Artificial Sequence
  Description of Artificial Sequence: Synthetic oligonucleotide
ggaauuaaacaugaacgaa

SEQ ID NO: 1511203 - RNA, 19 nt, Artificial Sequence
  Description of Artificial Sequence: Synthetic oligonucleotide
gaacugcuucuucaccaac

SEQ ID NO: 1511204 - RNA, 19 nt, Artificial Sequence
  Description of Artificial Sequence: Synthetic oligonucleotide
caggaguacaucacuaucu

SEQ ID NO: 1511205 - RNA, 19 nt, Artificial Sequence
  Description of Artificial Sequence: Synthetic oligonucleotide
ucuaaacaacaaggaauua

SEQ ID NO: 1511206 - RNA, 19 nt, Artificial Sequence
  Description of Artificial Sequence: Synthetic oligonucleotide
gcaaaacucggugcaacgg

SEQ ID NO: 1511207 - RNA, 19 nt, Artificial Sequence
  Description of Artificial Sequence: Synthetic oligonucleotide
agguaccugucucucgcug

SEQ ID NO: 1511208 - RNA, 19 nt, Artificial Sequence
  Description of Artificial Sequence: Synthetic oligonucleotide
aaguaugguguggaucaaa

SEQ ID NO: 1511209 - RNA, 19 nt, Artificial Sequence
  Description of Artificial Sequence: Synthetic oligonucleotide
ugcauuaauccgcgccauc

SEQ ID NO: 1511210 - RNA, 19 nt, Artificial Sequence
  Description of Artificial Sequence: Synthetic oligonucleotide
caauguaagucuuugcauu

SEQ ID NO: 1511211 - RNA, 19 nt, Artificial Sequence
  Description of Artificial Sequence: Synthetic oligonucleotide
ucccucugaaggcuuucac

SEQ ID NO: 1511212 - RNA, 19 nt, Artificial Sequence
  Description of Artificial Sequence: Synthetic oligonucleotide
gcuagugauguuucagaac

SEQ ID NO: 1511213 - RNA, 19 nt, Artificial Sequence
  Description of Artificial Sequence: Synthetic oligonucleotide
cuuggucacauccagucgu

SEQ ID NO: 1511214 - RNA, 19 nt, Artificial Sequence
  Description of Artificial Sequence: Synthetic oligonucleotide
ugcuuccaaggaacucgag

SEQ ID NO: 1511215 - RNA, 19 nt, Artificial Sequence
  Description of Artificial Sequence: Synthetic oligonucleotide
ucauggccuguuucuuagc

SEQ ID NO: 1511216 - RNA, 19 nt, Artificial Sequence
  Description of Artificial Sequence: Synthetic oligonucleotide
cuaucauagaugcugucau

SEQ ID NO: 1511217 - RNA, 19 nt, Artificial Sequence
  Description of Artificial Sequence: Synthetic oligonucleotide
gauuuaacaggugccuaua

SEQ ID NO: 1511218 - RNA, 19 nt, Artificial Sequence
  Description of Artificial Sequence: Synthetic oligonucleotide
uggaucuuuccuggucaag

SEQ ID NO: 1511219 - RNA, 19 nt, Artificial Sequence
  Description of Artificial Sequence: Synthetic oligonucleotide
cuugauuuaacaggugccu

SEQ ID NO: 1511220 - RNA, 19 nt, Artificial Sequence
  Description of Artificial Sequence: Synthetic oligonucleotide
cauguuagacaagagcucu

SEQ ID NO: 1511221 - RNA, 19 nt, Artificial Sequence
  Description of Artificial Sequence: Synthetic oligonucleotide
cuuuugaguucacaaauuu

SEQ ID NO: 1511222 - RNA, 19 nt, Artificial Sequence
  Description of Artificial Sequence: Synthetic oligonucleotide
cuugucccuaaccuggaaa

SEQ ID NO: 1511223 - RNA, 19 nt, Artificial Sequence
  Description of Artificial Sequence: Synthetic oligonucleotide
accaacggcuugauuuaac

SEQ ID NO: 1511224 - RNA, 19 nt, Artificial Sequence
  Description of Artificial Sequence: Synthetic oligonucleotide
ugcaacggcuguguuuucu

SEQ ID NO: 1511225 - RNA, 19 nt, Artificial Sequence
  Description of Artificial Sequence: Synthetic oligonucleotide
acugagccuugucccuaac

SEQ ID NO: 1511226 - RNA, 19 nt, Artificial Sequence
  Description of Artificial Sequence: Synthetic oligonucleotide
ggcaaaauaagcccauacu

SEQ ID NO: 1511227 - RNA, 19 nt, Artificial Sequence
  Description of Artificial Sequence: Synthetic oligonucleotide
guucgaguauauaaaacau

SEQ ID NO: 1511228 - RNA, 19 nt, Artificial Sequence
  Description of Artificial Sequence: Synthetic oligonucleotide
cacggaggucucaucauca

SEQ ID NO: 1511229 - RNA, 19 nt, Artificial Sequence
  Description of Artificial Sequence: Synthetic oligonucleotide
ugcuccgcuuugcaaacuu

SEQ ID NO: 1511230 - RNA, 19 nt, Artificial Sequence
  Description of Artificial Sequence: Synthetic oligonucleotide
uggcagucauuaguccucc

SEQ ID NO: 1511231 - RNA, 19 nt, Artificial Sequence
  Description of Artificial Sequence: Synthetic oligonucleotide
gguuucagucuccuuguuc

SEQ ID NO: 1511232 - RNA, 19 nt, Artificial Sequence
  Description of Artificial Sequence: Synthetic oligonucleotide
aguuaagcacugacuuuug

SEQ ID NO: 1511233 - RNA, 19 nt, Artificial Sequence
  Description of Artificial Sequence: Synthetic oligonucleotide
acacuuuaagaaacacccu

SEQ ID NO: 1511234 - RNA, 19 nt, Artificial Sequence
  Description of Artificial Sequence: Synthetic oligonucleotide
cagccaacagauuuacuua

SEQ ID NO: 1511235 - RNA, 19 nt, Artificial Sequence
  Description of Artificial Sequence: Synthetic oligonucleotide
ugacagguuucagucuccu

SEQ ID NO: 1511236 - RNA, 19 nt, Artificial Sequence
  Description of Artificial Sequence: Synthetic oligonucleotide
cuuuucaauccugggcauc

SEQ ID NO: 1511237 - RNA, 19 nt, Artificial Sequence
  Description of Artificial Sequence: Synthetic oligonucleotide
gagauccuggcagucauua

SEQ ID NO: 1511238 - RNA, 19 nt, Artificial Sequence
  Description of Artificial Sequence: Synthetic oligonucleotide
gugauguuucagaacgaga

SEQ ID NO: 1511239 - RNA, 19 nt, Artificial Sequence
  Description of Artificial Sequence: Synthetic oligonucleotide
ggaucuuuccuggucaaga

SEQ ID NO: 1511240 - RNA, 19 nt, Artificial Sequence
  Description of Artificial Sequence: Synthetic oligonucleotide
guucacaguguucuaugcu

SEQ ID NO: 1511241 - RNA, 19 nt, Artificial Sequence
  Description of Artificial Sequence: Synthetic oligonucleotide
ccagguaccugucucucgc

SEQ ID NO: 1511242 - RNA, 19 nt, Artificial Sequence
  Description of Artificial Sequence: Synthetic oligonucleotide
acucgagauccuggcaguc

SEQ ID NO: 1511243 - RNA, 19 nt, Artificial Sequence
  Description of Artificial Sequence: Synthetic oligonucleotide
acaguguucuaugcuucca

SEQ ID NO: 1511244 - RNA, 19 nt, Artificial Sequence
  Description of Artificial Sequence: Synthetic oligonucleotide
guuucagaacgagagggcu

SEQ ID NO: 1511245 - RNA, 19 nt, Artificial Sequence
  Description of Artificial Sequence: Synthetic oligonucleotide
ugucucucgcugacaucac

SEQ ID NO: 1511246 - RNA, 19 nt, Artificial Sequence
  Description of Artificial Sequence: Synthetic oligonucleotide
gcaggaguacaucacuauc

SEQ ID NO: 1511247 - RNA, 19 nt, Artificial Sequence
  Description of Artificial Sequence: Synthetic oligonucleotide
cugucucgauuucuuucug

SEQ ID NO: 1511248 - RNA, 19 nt, Artificial Sequence
  Description of Artificial Sequence: Synthetic oligonucleotide
auugcccuucuccugccuu

SEQ ID NO: 1511249 - RNA, 19 nt, Artificial Sequence
  Description of Artificial Sequence: Synthetic oligonucleotide
uucacucacggaggucuca

SEQ ID NO: 1511250 - RNA, 19 nt, Artificial Sequence
  Description of Artificial Sequence: Synthetic oligonucleotide
ccuuguucgaguauauaaa

SEQ ID NO: 1511251 - RNA, 19 nt, Artificial Sequence
  Description of Artificial Sequence: Synthetic oligonucleotide
acaaacccaguugcuuucu

SEQ ID NO: 1511252 - RNA, 19 nt, Artificial Sequence
  Description of Artificial Sequence: Synthetic oligonucleotide
uacugagccuugucccuaa

SEQ ID NO: 1511253 - RNA, 19 nt, Artificial Sequence
  Description of Artificial Sequence: Synthetic oligonucleotide
auacucauacacaguggaa

SEQ ID NO: 1511254 - RNA, 19 nt, Artificial Sequence
  Description of Artificial Sequence: Synthetic oligonucleotide
cucauugcuccgcuuugca

SEQ ID NO: 1511255 - RNA, 19 nt, Artificial Sequence
  Description of Artificial Sequence: Synthetic oligonucleotide
aggguucacaguguucuau

SEQ ID NO: 1511256 - RNA, 19 nt, Artificial Sequence
  Description of Artificial Sequence: Synthetic oligonucleotide
uuacugagccuugucccua

SEQ ID NO: 1511257 - RNA, 19 nt, Artificial Sequence
  Description of Artificial Sequence: Synthetic oligonucleotide
cauuaguccuccucuuucu

SEQ ID NO: 1511258 - RNA, 19 nt, Artificial Sequence
  Description of Artificial Sequence: Synthetic oligonucleotide
agucgugcuuccagggcag

SEQ ID NO: 1511259 - RNA, 19 nt, Artificial Sequence
  Description of Artificial Sequence: Synthetic oligonucleotide
gucccuaaccuggaaauua

SEQ ID NO: 1511260 - RNA, 19 nt, Artificial Sequence
  Description of Artificial Sequence: Synthetic oligonucleotide
ccuggaaauuacuuuuaca

SEQ ID NO: 1511261 - RNA, 19 nt, Artificial Sequence
  Description of Artificial Sequence: Synthetic oligonucleotide
cagucuauguuuuguugcu

SEQ ID NO: 1511262 - RNA, 19 nt, Artificial Sequence
  Description of Artificial Sequence: Synthetic oligonucleotide
cacauccagucgugcuucc

SEQ ID NO: 1511263 - RNA, 19 nt, Artificial Sequence
  Description of Artificial Sequence: Synthetic oligonucleotide
acggaggucucaucaucau

SEQ ID NO: 1511264 - RNA, 19 nt, Artificial Sequence
  Description of Artificial Sequence: Synthetic oligonucleotide
ucccuucugucucgauuuc

SEQ ID NO: 1511265 - RNA, 19 nt, Artificial Sequence
  Description of Artificial Sequence: Synthetic oligonucleotide
acaaggaauuaaacaugaa

SEQ ID NO: 1511266 - RNA, 19 nt, Artificial Sequence
  Description of Artificial Sequence: Synthetic oligonucleotide
uucacggaagcuggacuua

SEQ ID NO: 1511267 - RNA, 19 nt, Artificial Sequence
  Description of Artificial Sequence: Synthetic oligonucleotide
gguaccugucucucgcuga

SEQ ID NO: 1511268 - RNA, 19 nt, Artificial Sequence
  Description of Artificial Sequence: Synthetic oligonucleotide
ucgauugcucauugcccuu

SEQ ID NO: 1511269 - RNA, 19 nt, Artificial Sequence
  Description of Artificial Sequence: Synthetic oligonucleotide
caguguucuaugcuuccaa

SEQ ID NO: 1511270 - RNA, 19 nt, Artificial Sequence
  Description of Artificial Sequence: Synthetic oligonucleotide
gccuugugcauguuagaca

SEQ ID NO: 1511271 - RNA, 19 nt, Artificial Sequence
  Description of Artificial Sequence: Synthetic oligonucleotide
ugucccuaaccuggaaauu

SEQ ID NO: 1511272 - RNA, 19 nt, Artificial Sequence
  Description of Artificial Sequence: Synthetic oligonucleotide
ccaacggcuugauuuaaca

SEQ ID NO: 1511273 - RNA, 19 nt, Artificial Sequence
  Description of Artificial Sequence: Synthetic oligonucleotide
gcauguuagacaagagcuc

SEQ ID NO: 1511274 - RNA, 19 nt, Artificial Sequence
  Description of Artificial Sequence: Synthetic oligonucleotide
uccucugaauuugcucauc

SEQ ID NO: 1511275 - RNA, 19 nt, Artificial Sequence
  Description of Artificial Sequence: Synthetic oligonucleotide
gccagguaccugucucucg

SEQ ID NO: 1511276 - RNA, 19 nt, Artificial Sequence
  Description of Artificial Sequence: Synthetic oligonucleotide
ggaacucgagauccuggca

SEQ ID NO: 1511277 - RNA, 19 nt, Artificial Sequence
  Description of Artificial Sequence: Synthetic oligonucleotide
gucucucgcugacaucaca

SEQ ID NO: 1511278 - RNA, 19 nt, Artificial Sequence
  Description of Artificial Sequence: Synthetic oligonucleotide
agucuauguuuuguugcua

SEQ ID NO: 1511279 - RNA, 19 nt, Artificial Sequence
  Description of Artificial Sequence: Synthetic oligonucleotide
cagguuucagucuccuugu

SEQ ID NO: 1511280 - RNA, 19 nt, Artificial Sequence
  Description of Artificial Sequence: Synthetic oligonucleotide
ccaacuuaguaacuugcaa

SEQ ID NO: 1511281 - RNA, 19 nt, Artificial Sequence
  Description of Artificial Sequence: Synthetic oligonucleotide
cuucacggaagcuggacuu

SEQ ID NO: 1511282 - RNA, 19 nt, Artificial Sequence
  Description of Artificial Sequence: Synthetic oligonucleotide
acgaaauuacugacucuuu

SEQ ID NO: 1511283 - RNA, 19 nt, Artificial Sequence
  Description of Artificial Sequence: Synthetic oligonucleotide
cucgcugacaucacaguuu

SEQ ID NO: 1511284 - RNA, 19 nt, Artificial Sequence
  Description of Artificial Sequence: Synthetic oligonucleotide
guaacccuaggcuucucuu

SEQ ID NO: 1511285 - RNA, 19 nt, Artificial Sequence
  Description of Artificial Sequence: Synthetic oligonucleotide
gcaagggcuuucuguaauc

SEQ ID NO: 1511286 - RNA, 19 nt, Artificial Sequence
  Description of Artificial Sequence: Synthetic oligonucleotide
ggcuucgauugcucauugc

SEQ ID NO: 1511287 - RNA, 19 nt, Artificial Sequence
  Description of Artificial Sequence: Synthetic oligonucleotide
acucggugcaacggcugug

SEQ ID NO: 1511288 - RNA, 19 nt, Artificial Sequence
  Description of Artificial Sequence: Synthetic oligonucleotide
cauuucuaucauagaugcu

SEQ ID NO: 1511289 - RNA, 19 nt, Artificial Sequence
  Description of Artificial Sequence: Synthetic oligonucleotide
ucagaacgagagggcuucu

SEQ ID NO: 1511290 - RNA, 19 nt, Artificial Sequence
  Description of Artificial Sequence: Synthetic oligonucleotide
ucuagaucuugggcugcuu

SEQ ID NO: 1511291 - RNA, 19 nt, Artificial Sequence
  Description of Artificial Sequence: Synthetic oligonucleotide
agguuucagucuccuuguu

SEQ ID NO: 1511292 - RNA, 19 nt, Artificial Sequence
  Description of Artificial Sequence: Synthetic oligonucleotide
gggcuucgauugcucauug

SEQ ID NO: 1511293 - RNA, 19 nt, Artificial Sequence
  Description of Artificial Sequence: Synthetic oligonucleotide
cagaacgagagggcuucuc

SEQ ID NO: 1511294 - RNA, 19 nt, Artificial Sequence
  Description of Artificial Sequence: Synthetic oligonucleotide
cacucacggaggucucauc

SEQ ID NO: 1511295 - RNA, 19 nt, Artificial Sequence
  Description of Artificial Sequence: Synthetic oligonucleotide
gcauuaauccgcgccaucu

SEQ ID NO: 1511296 - RNA, 19 nt, Artificial Sequence
  Description of Artificial Sequence: Synthetic oligonucleotide
auguuagacaagagcucua

SEQ ID NO: 1511297 - RNA, 19 nt, Artificial Sequence
  Description of Artificial Sequence: Synthetic oligonucleotide
ggugcaacggcuguguuuu

SEQ ID NO: 1511298 - RNA, 19 nt, Artificial Sequence
  Description of Artificial Sequence: Synthetic oligonucleotide
gucauuaguccuccucuuu

SEQ ID NO: 1511299 - RNA, 19 nt, Artificial Sequence
  Description of Artificial Sequence: Synthetic oligonucleotide
ggucuagaucuugggcugc

SEQ ID NO: 1511300 - RNA, 19 nt, Artificial Sequence
  Description of Artificial Sequence: Synthetic oligonucleotide
guuagacaagagcucuauu

SEQ ID NO: 1511301 - RNA, 19 nt, Artificial Sequence
  Description of Artificial Sequence: Synthetic oligonucleotide
cuagaucuugggcugcuuu

SEQ ID NO: 1511302 - RNA, 19 nt, Artificial Sequence
  Description of Artificial Sequence: Synthetic oligonucleotide
gaaacacccuccagucacu

SEQ ID NO: 1511303 - RNA, 19 nt, Artificial Sequence
  Description of Artificial Sequence: Synthetic oligonucleotide
guucacaaacccaguugcu

SEQ ID NO: 1511304 - RNA, 19 nt, Artificial Sequence
  Description of Artificial Sequence: Synthetic oligonucleotide
ucggugcaacggcuguguu

SEQ ID NO: 1511305 - RNA, 19 nt, Artificial Sequence
  Description of Artificial Sequence: Synthetic oligonucleotide
guacaucacuaucuuuauu

SEQ ID NO: 1511306 - RNA, 19 nt, Artificial Sequence
  Description of Artificial Sequence: Synthetic oligonucleotide
ccaacagauuuacuuauau

SEQ ID NO: 1511307 - RNA, 19 nt, Artificial Sequence
  Description of Artificial Sequence: Synthetic oligonucleotide
gcuucacggaagcuggacu

SEQ ID NO: 1511308 - RNA, 19 nt, Artificial Sequence
  Description of Artificial Sequence: Synthetic oligonucleotide
ccucauugcuccgcuuugc

SEQ ID NO: 1511309 - RNA, 19 nt, Artificial Sequence
  Description of Artificial Sequence: Synthetic oligonucleotide
ggcuucacggaagcuggac

SEQ ID NO: 1511310 - RNA, 19 nt, Artificial Sequence
  Description of Artificial Sequence: Synthetic oligonucleotide
cucucgcugacaucacagu

SEQ ID NO: 1511311 - RNA, 19 nt, Artificial Sequence
  Description of Artificial Sequence: Synthetic oligonucleotide
ccuggucaagaaacucauc

SEQ ID NO: 1511312 - RNA, 19 nt, Artificial Sequence
  Description of Artificial Sequence: Synthetic oligonucleotide
gcucaucagaguaacccua

SEQ ID NO: 1511313 - RNA, 19 nt, Artificial Sequence
  Description of Artificial Sequence: Synthetic oligonucleotide
gccucuuugucaucaaauu

SEQ ID NO: 1511314 - RNA, 19 nt, Artificial Sequence
  Description of Artificial Sequence: Synthetic oligonucleotide
cuggacuuaggaacugcuu

SEQ ID NO: 1511315 - RNA, 19 nt, Artificial Sequence
  Description of Artificial Sequence: Synthetic oligonucleotide
ccuaaccuggaaauuacuu

SEQ ID NO: 1511316 - RNA, 19 nt, Artificial Sequence
  Description of Artificial Sequence: Synthetic oligonucleotide
ccacuaagaucuuucugcu

SEQ ID NO: 1511317 - RNA, 19 nt, Artificial Sequence
  Description of Artificial Sequence: Synthetic oligonucleotide
ggaccgccaucuuguuccc

SEQ ID NO: 1511318 - RNA, 19 nt, Artificial Sequence
  Description of Artificial Sequence: Synthetic oligonucleotide
cucuauuacugagccuugu

SEQ ID NO: 1511319 - RNA, 19 nt, Artificial Sequence
  Description of Artificial Sequence: Synthetic oligonucleotide
gcuccgcuuugcaaacuug

SEQ ID NO: 1511320 - RNA, 19 nt, Artificial Sequence
  Description of Artificial Sequence: Synthetic oligonucleotide
agaugcugucauacucaua

SEQ ID NO: 1511321 - RNA, 19 nt, Artificial Sequence
  Description of Artificial Sequence: Synthetic oligonucleotide
caaguaugguguggaucaa

SEQ ID NO: 1511322 - RNA, 19 nt, Artificial Sequence
  Description of Artificial Sequence: Synthetic oligonucleotide
cacuaagaucuuucugcuu

SEQ ID NO: 1511323 - RNA, 19 nt, Artificial Sequence
  Description of Artificial Sequence: Synthetic oligonucleotide
cucugccagucuauguuuu

SEQ ID NO: 1511324 - RNA, 19 nt, Artificial Sequence
  Description of Artificial Sequence: Synthetic oligonucleotide
ggcaucaauuccagggccu

SEQ ID NO: 1511325 - RNA, 19 nt, Artificial Sequence
  Description of Artificial Sequence: Synthetic oligonucleotide
cucggugcaacggcugugu

SEQ ID NO: 1511326 - RNA, 19 nt, Artificial Sequence
  Description of Artificial Sequence: Synthetic oligonucleotide
cuccuuguucgaguauaua

SEQ ID NO: 1511327 - RNA, 19 nt, Artificial Sequence
  Description of Artificial Sequence: Synthetic oligonucleotide
cgcgccaucugccuggcca

SEQ ID NO: 1511328 - RNA, 19 nt, Artificial Sequence
  Description of Artificial Sequence: Synthetic oligonucleotide
gcuuucacucacggagguc

SEQ ID NO: 1511329 - RNA, 19 nt, Artificial Sequence
  Description of Artificial Sequence: Synthetic oligonucleotide
gcuggacuuaggaacugcu

SEQ ID NO: 1511330 - RNA, 19 nt, Artificial Sequence
  Description of Artificial Sequence: Synthetic oligonucleotide
caccaacggcuugauuuaa

SEQ ID NO: 1511331 - RNA, 19 nt, Artificial Sequence
  Description of Artificial Sequence: Synthetic oligonucleotide
gugcaacggcuguguuuuc

SEQ ID NO: 1511332 - RNA, 19 nt, Artificial Sequence
  Description of Artificial Sequence: Synthetic oligonucleotide
cugccugccccgggaccgc

SEQ ID NO: 1511333 - RNA, 19 nt, Artificial Sequence
  Description of Artificial Sequence: Synthetic oligonucleotide
cgauugcucauugcccuuc

SEQ ID NO: 1511334 - RNA, 19 nt, Artificial Sequence
  Description of Artificial Sequence: Synthetic oligonucleotide
cggcuugauuuaacaggug

SEQ ID NO: 1511335 - RNA, 19 nt, Artificial Sequence
  Description of Artificial Sequence: Synthetic oligonucleotide
gcaacggcuguguuuucuu

SEQ ID NO: 1511336 - RNA, 19 nt, Artificial Sequence
  Description of Artificial Sequence: Synthetic oligonucleotide
cauugcccuucuccugccu

SEQ ID NO: 1511337 - RNA, 19 nt, Artificial Sequence
  Description of Artificial Sequence: Synthetic oligonucleotide
cccuaaccuggaaauuacu

SEQ ID NO: 1511338 - RNA, 19 nt, Artificial Sequence
  Description of Artificial Sequence: Synthetic oligonucleotide
ccaaggaacucgagauccu

SEQ ID NO: 1511339 - RNA, 19 nt, Artificial Sequence
  Description of Artificial Sequence: Synthetic oligonucleotide
cuucaccaacggcuugauu

SEQ ID NO: 1511340 - RNA, 19 nt, Artificial Sequence
  Description of Artificial Sequence: Synthetic oligonucleotide
cugccccgggaccgccauc

SEQ ID NO: 1511341 - RNA, 19 nt, Artificial Sequence
  Description of Artificial Sequence: Synthetic oligonucleotide
gcaucaauuccagggccuu

SEQ ID NO: 1511342 - RNA, 19 nt, Artificial Sequence
  Description of Artificial Sequence: Synthetic oligonucleotide
ccaucugccuggccaggua

SEQ ID NO: 1511343 - RNA, 19 nt, Artificial Sequence
  Description of Artificial Sequence: Synthetic oligonucleotide
gccuguuucuuagcagcuu

SEQ ID NO: 1511344 - RNA, 19 nt, Artificial Sequence
  Description of Artificial Sequence: Synthetic oligonucleotide
gccaucugccuggccaggu

SEQ ID NO: 1511345 - RNA, 19 nt, Artificial Sequence
  Description of Artificial Sequence: Synthetic oligonucleotide
cggugcaacggcuguguuu

SEQ ID NO: 1511346 - RNA, 19 nt, Artificial Sequence
  Description of Artificial Sequence: Synthetic oligonucleotide
ccgcgccaucugccuggcc

SEQ ID NO: 1511347 - RNA, 19 nt, Artificial Sequence
  Description of Artificial Sequence: Synthetic oligonucleotide
ccugccccgggaccgccau

SEQ ID NO: 1511348 - RNA, 19 nt, Artificial Sequence
  Description of Artificial Sequence: Synthetic oligonucleotide
ccgggaccgccaucuuguu

SEQ ID NO: 1511349 - RNA, 19 nt, Artificial Sequence
  Description of Artificial Sequence: Synthetic oligonucleotide
gccccgggaccgccaucuu

SEQ ID NO: 1511350 - RNA, 19 nt, Artificial Sequence
  Description of Artificial Sequence: Synthetic oligonucleotide
aguaucugaagcccgaugg

SEQ ID NO: 1511351 - RNA, 19 nt, Artificial Sequence
  Description of Artificial Sequence: Synthetic oligonucleotide
uuaggcacaggcaauagca

SEQ ID NO: 1511352 - RNA, 19 nt, Artificial Sequence
  Description of Artificial Sequence: Synthetic oligonucleotide
auagagcugaaggagagcc

SEQ ID NO: 1511353 - RNA, 19 nt, Artificial Sequence
  Description of Artificial Sequence: Synthetic oligonucleotide
agagggaguaucugaagcc

SEQ ID NO: 1511354 - RNA, 19 nt, Artificial Sequence
  Description of Artificial Sequence: Synthetic oligonucleotide
aauguggacggagugcacc

SEQ ID NO: 1511355 - RNA, 19 nt, Artificial Sequence
  Description of Artificial Sequence: Synthetic oligonucleotide
aacuauugacaugagccac

SEQ ID NO: 1511356 - RNA, 19 nt, Artificial Sequence
  Description of Artificial Sequence: Synthetic oligonucleotide
ugaaacuauugacaugagc

SEQ ID NO: 1511357 - RNA, 19 nt, Artificial Sequence
  Description of Artificial Sequence: Synthetic oligonucleotide
ucugcaacauauucuuccg

SEQ ID NO: 1511358 - RNA, 19 nt, Artificial Sequence
  Description of Artificial Sequence: Synthetic oligonucleotide
agaggucaggaaaagacgc

SEQ ID NO: 1511359 - RNA, 19 nt, Artificial Sequence
  Description of Artificial Sequence: Synthetic oligonucleotide
uguuuucugcaacauauuc

SEQ ID NO: 1511360 - RNA, 19 nt, Artificial Sequence
  Description of Artificial Sequence: Synthetic oligonucleotide
caaugagccaaguagcagc

SEQ ID NO: 1511361 - RNA, 19 nt, Artificial Sequence
  Description of Artificial Sequence: Synthetic oligonucleotide
ucuguguagcacuccaacg

SEQ ID NO: 1511362 - RNA, 19 nt, Artificial Sequence
  Description of Artificial Sequence: Synthetic oligonucleotide
guagagauguaucaauggc

SEQ ID NO: 1511363 - RNA, 19 nt, Artificial Sequence
  Description of Artificial Sequence: Synthetic oligonucleotide
aagucagcugcuucuggac

SEQ ID NO: 1511364 - RNA, 19 nt, Artificial Sequence
  Description of Artificial Sequence: Synthetic oligonucleotide
ugcauuuuccggcaggaac

SEQ ID NO: 1511365 - RNA, 19 nt, Artificial Sequence
  Description of Artificial Sequence: Synthetic oligonucleotide
gaacaaugagccaaguagc

SEQ ID NO: 1511366 - RNA, 19 nt, Artificial Sequence
  Description of Artificial Sequence: Synthetic oligonucleotide
uugaacuuaggagagcccc

SEQ ID NO: 1511367 - RNA, 19 nt, Artificial Sequence
  Description of Artificial Sequence: Synthetic oligonucleotide
ucgcaagacucccacaugc

SEQ ID NO: 1511368 - RNA, 19 nt, Artificial Sequence
  Description of Artificial Sequence: Synthetic oligonucleotide
ugcucuaagaagcuggcau

SEQ ID NO: 1511369 - RNA, 19 nt, Artificial Sequence
  Description of Artificial Sequence: Synthetic oligonucleotide
gacagagccgcgcuaaaag

SEQ ID NO: 1511370 - RNA, 19 nt, Artificial Sequence
  Description of Artificial Sequence: Synthetic oligonucleotide
ugacaugagccacagcuac

SEQ ID NO: 1511371 - RNA, 19 nt, Artificial Sequence
  Description of Artificial Sequence: Synthetic oligonucleotide
ugagacucucaguagcucc

SEQ ID NO: 1511372 - RNA, 19 nt, Artificial Sequence
  Description of Artificial Sequence: Synthetic oligonucleotide
uguguagcacuccaacggc

SEQ ID NO: 1511373 - RNA, 19 nt, Artificial Sequence
  Description of Artificial Sequence: Synthetic oligonucleotide
aagacgccaggccagggag

SEQ ID NO: 1511374 - RNA, 19 nt, Artificial Sequence
  Description of Artificial Sequence: Synthetic oligonucleotide
aucaauggcuggaagggcc

SEQ ID NO: 1511375 - RNA, 19 nt, Artificial Sequence
  Description of Artificial Sequence: Synthetic oligonucleotide
aauagcucgcuguccacca

SEQ ID NO: 1511376 - RNA, 19 nt, Artificial Sequence
  Description of Artificial Sequence: Synthetic oligonucleotide
cacaagguacugcaggugg

SEQ ID NO: 1511377 - RNA, 19 nt, Artificial Sequence
  Description of Artificial Sequence: Synthetic oligonucleotide
uguaggacccgcacggcag

SEQ ID NO: 1511378 - RNA, 19 nt, Artificial Sequence
  Description of Artificial Sequence: Synthetic oligonucleotide
cacacaugagccuugccag

SEQ ID NO: 1511379 - RNA, 19 nt, Artificial Sequence
  Description of Artificial Sequence: Synthetic oligonucleotide
agugguccccaaaagagac

SEQ ID NO: 1511380 - RNA, 19 nt, Artificial Sequence
  Description of Artificial Sequence: Synthetic oligonucleotide
cuaacgauaguccaucaga

SEQ ID NO: 1511381 - RNA, 19 nt, Artificial Sequence
  Description of Artificial Sequence: Synthetic oligonucleotide
ugggagaagaugaaacuau

SEQ ID NO: 1511382 - RNA, 19 nt, Artificial Sequence
  Description of Artificial Sequence: Synthetic oligonucleotide
aacuuaggagagccccucg

SEQ ID NO: 1511383 - RNA, 19 nt, Artificial Sequence
  Description of Artificial Sequence: Synthetic oligonucleotide
uuaggagagccccucgucu

SEQ ID NO: 1511384 - RNA, 19 nt, Artificial Sequence
  Description of Artificial Sequence: Synthetic oligonucleotide
aggcacaagguacugcagg

SEQ ID NO: 1511385 - RNA, 19 nt, Artificial Sequence
  Description of Artificial Sequence: Synthetic oligonucleotide
agaacuagcgcccacugua

SEQ ID NO: 1511386 - RNA, 19 nt, Artificial Sequence
  Description of Artificial Sequence: Synthetic oligonucleotide
cacuguaggacccgcacgg

SEQ ID NO: 1511387 - RNA, 19 nt, Artificial Sequence
  Description of Artificial Sequence: Synthetic oligonucleotide
gcaauagcaggcuugagac

SEQ ID NO: 1511388 - RNA, 19 nt, Artificial Sequence
  Description of Artificial Sequence: Synthetic oligonucleotide
ugagccacagcuaccgugu

SEQ ID NO: 1511389 - RNA, 19 nt, Artificial Sequence
  Description of Artificial Sequence: Synthetic oligonucleotide
cagagggaguaucugaagc

SEQ ID NO: 1511390 - RNA, 19 nt, Artificial Sequence
  Description of Artificial Sequence: Synthetic oligonucleotide
agccggaacacacagcuca

SEQ ID NO: 1511391 - RNA, 19 nt, Artificial Sequence
  Description of Artificial Sequence: Synthetic oligonucleotide
acaugagccacagcuaccg

SEQ ID NO: 1511392 - RNA, 19 nt, Artificial Sequence
  Description of Artificial Sequence: Synthetic oligonucleotide
accaauguggacggagugc

SEQ ID NO: 1511393 - RNA, 19 nt, Artificial Sequence
  Description of Artificial Sequence: Synthetic oligonucleotide
uguauaggagucucucgga

SEQ ID NO: 1511394 - RNA, 19 nt, Artificial Sequence
  Description of Artificial Sequence: Synthetic oligonucleotide
agugccaagggcucuacgu

SEQ ID NO: 1511395 - RNA, 19 nt, Artificial Sequence
  Description of Artificial Sequence: Synthetic oligonucleotide
cucaucugggcucuuuggg

SEQ ID NO: 1511396 - RNA, 19 nt, Artificial Sequence
  Description of Artificial Sequence: Synthetic oligonucleotide
uguagcacuccaacggcac

SEQ ID NO: 1511397 - RNA, 19 nt, Artificial Sequence
  Description of Artificial Sequence: Synthetic oligonucleotide
ccggaaauagagcugaagg

SEQ ID NO: 1511398 - RNA, 19 nt, Artificial Sequence
  Description of Artificial Sequence: Synthetic oligonucleotide
aaagacgccaggccaggga

SEQ ID NO: 1511399 - RNA, 19 nt, Artificial Sequence
  Description of Artificial Sequence: Synthetic oligonucleotide
aguugggcaguuuguagug

SEQ ID NO: 1511400 - RNA, 19 nt, Artificial Sequence
  Description of Artificial Sequence: Synthetic oligonucleotide
ggcucuacgucuuggaucc

SEQ ID NO: 1511401 - RNA, 19 nt, Artificial Sequence
  Description of Artificial Sequence: Synthetic oligonucleotide
uggugaacaaugagccaag

SEQ ID NO: 1511402 - RNA, 19 nt, Artificial Sequence
  Description of Artificial Sequence: Synthetic oligonucleotide
gagucaguggcagaccuag

SEQ ID NO: 1511403 - RNA, 19 nt, Artificial Sequence
  Description of Artificial Sequence: Synthetic oligonucleotide
acggagugcaccaguaacc

SEQ ID NO: 1511404 - RNA, 19 nt, Artificial Sequence
  Description of Artificial Sequence: Synthetic oligonucleotide
gaaccgacgcugcagagga

SEQ ID NO: 1511405 - RNA, 19 nt, Artificial Sequence
  Description of Artificial Sequence: Synthetic oligonucleotide
ucucggaauagcucgcugu

SEQ ID NO: 1511406 - RNA, 19 nt, Artificial Sequence
  Description of Artificial Sequence: Synthetic oligonucleotide
gacggagugcaccaguaac

SEQ ID NO: 1511407 - RNA, 19 nt, Artificial Sequence
  Description of Artificial Sequence: Synthetic oligonucleotide
gugcaagguauucacuucc

SEQ ID NO: 1511408 - RNA, 19 nt, Artificial Sequence
  Description of Artificial Sequence: Synthetic oligonucleotide
ugaaccgacgcugcagagg

SEQ ID NO: 1511409 - RNA, 19 nt, Artificial Sequence
  Description of Artificial Sequence: Synthetic oligonucleotide
ugacacugaaccgacgcug

SEQ ID NO: 1511410 - RNA, 19 nt, Artificial Sequence
  Description of Artificial Sequence: Synthetic oligonucleotide
ugaacuuaggagagccccu

SEQ ID NO: 1511411 - RNA, 19 nt, Artificial Sequence
  Description of Artificial Sequence: Synthetic oligonucleotide
aaugagccaaguagcagcu

SEQ ID NO: 1511412 - RNA, 19 nt, Artificial Sequence
  Description of Artificial Sequence: Synthetic oligonucleotide
aaaagagcugccaccagau

SEQ ID NO: 1511413 - RNA, 19 nt, Artificial Sequence
  Description of Artificial Sequence: Synthetic oligonucleotide
acgguauaaggcuugggaa

SEQ ID NO: 1511414 - RNA, 19 nt, Artificial Sequence
  Description of Artificial Sequence: Synthetic oligonucleotide
agcccgaugguagagaugu

SEQ ID NO: 1511415 - RNA, 19 nt, Artificial Sequence
  Description of Artificial Sequence: Synthetic oligonucleotide
cuuaggcacaggcaauagc

SEQ ID NO: 1511416 - RNA, 19 nt, Artificial Sequence
  Description of Artificial Sequence: Synthetic oligonucleotide
agagccgcgcuaaaagagc

SEQ ID NO: 1511417 - RNA, 19 nt, Artificial Sequence
  Description of Artificial Sequence: Synthetic oligonucleotide
auaggagucucucggaaua

SEQ ID NO: 1511418 - RNA, 19 nt, Artificial Sequence
  Description of Artificial Sequence: Synthetic oligonucleotide
cagagccgcgcuaaaagag

SEQ ID NO: 1511419 - RNA, 19 nt, Artificial Sequence
  Description of Artificial Sequence: Synthetic oligonucleotide
uuccccuaacgauagucca

SEQ ID NO: 1511420 - RNA, 19 nt, Artificial Sequence
  Description of Artificial Sequence: Synthetic oligonucleotide
agaccuagggcucgcaaga

SEQ ID NO: 1511421 - RNA, 19 nt, Artificial Sequence
  Description of Artificial Sequence: Synthetic oligonucleotide
gaugcuguauaggagucuc

SEQ ID NO: 1511422 - RNA, 19 nt, Artificial Sequence
  Description of Artificial Sequence: Synthetic oligonucleotide
uauaggagucucucggaau

SEQ ID NO: 1511423 - RNA, 19 nt, Artificial Sequence
  Description of Artificial Sequence: Synthetic oligonucleotide
uaccguguagaggacgggg

SEQ ID NO: 1511424 - RNA, 19 nt, Artificial Sequence
  Description of Artificial Sequence: Synthetic oligonucleotide
gaaaagacgccaggccagg

SEQ ID NO: 1511425 - RNA, 19 nt, Artificial Sequence
  Description of Artificial Sequence: Synthetic oligonucleotide
acugaaccgacgcugcaga

SEQ ID NO: 1511426 - RNA, 19 nt, Artificial Sequence
  Description of Artificial Sequence: Synthetic oligonucleotide
cucuguguagcacuccaac

SEQ ID NO: 1511427 - RNA, 19 nt, Artificial Sequence
  Description of Artificial Sequence: Synthetic oligonucleotide
gaauagcucgcuguccacc

SEQ ID NO: 1511428 - RNA, 19 nt, Artificial Sequence
  Description of Artificial Sequence: Synthetic oligonucleotide
uguuccccuaacgauaguc

SEQ ID NO: 1511429 - RNA, 19 nt, Artificial Sequence
  Description of Artificial Sequence: Synthetic oligonucleotide
aaccagggcccggaaauag

SEQ ID NO: 1511430 - RNA, 19 nt, Artificial Sequence
  Description of Artificial Sequence: Synthetic oligonucleotide
gaguaucugaagcccgaug

SEQ ID NO: 1511431 - RNA, 19 nt, Artificial Sequence
  Description of Artificial Sequence: Synthetic oligonucleotide
acagagccgcgcuaaaaga

SEQ ID NO: 1511432 - RNA, 19 nt, Artificial Sequence
  Description of Artificial Sequence: Synthetic oligonucleotide
uaucaauggcuggaagggc

SEQ ID NO: 1511433 - RNA, 19 nt, Artificial Sequence
  Description of Artificial Sequence: Synthetic oligonucleotide
uugacaugagccacagcua

SEQ ID NO: 1511434 - RNA, 19 nt, Artificial Sequence
  Description of Artificial Sequence: Synthetic oligonucleotide
cugcaacauauucuuccgg

SEQ ID NO: 1511435 - RNA, 19 nt, Artificial Sequence
  Description of Artificial Sequence: Synthetic oligonucleotide
cacgguauaaggcuuggga

SEQ ID NO: 1511436 - RNA, 19 nt, Artificial Sequence
  Description of Artificial Sequence: Synthetic oligonucleotide
uuguaguggaggaggugcu

SEQ ID NO: 1511437 - RNA, 19 nt, Artificial Sequence
  Description of Artificial Sequence: Synthetic oligonucleotide
cauuagccagugccaaggg

SEQ ID NO: 1511438 - RNA, 19 nt, Artificial Sequence
  Description of Artificial Sequence: Synthetic oligonucleotide
cccaaagagggcaaggcgc

SEQ ID NO: 1511439 - RNA, 19 nt, Artificial Sequence
  Description of Artificial Sequence: Synthetic oligonucleotide
cuuggggccgacagagccg

SEQ ID NO: 1511440 - RNA, 19 nt, Artificial Sequence
  Description of Artificial Sequence: Synthetic oligonucleotide
uggggaucguccugcagug

SEQ ID NO: 1511441 - RNA, 19 nt, Artificial Sequence
  Description of Artificial Sequence: Synthetic oligonucleotide
gcuguauaggagucucucg

SEQ ID NO: 1511442 - RNA, 19 nt, Artificial Sequence
  Description of Artificial Sequence: Synthetic oligonucleotide
uggauccuccauucuggag

SEQ ID NO: 1511443 - RNA, 19 nt, Artificial Sequence
  Description of Artificial Sequence: Synthetic oligonucleotide
ucgucugcacugagggucc

SEQ ID NO: 1511444 - RNA, 19 nt, Artificial Sequence
  Description of Artificial Sequence: Synthetic oligonucleotide
agguauucacuuccaggca

SEQ ID NO: 1511445 - RNA, 19 nt, Artificial Sequence
  Description of Artificial Sequence: Synthetic oligonucleotide
accguguagaggacggggc

SEQ ID NO: 1511446 - RNA, 19 nt, Artificial Sequence
  Description of Artificial Sequence: Synthetic oligonucleotide
caggacuuggggccgacag

SEQ ID NO: 1511447 - RNA, 19 nt, Artificial Sequence
  Description of Artificial Sequence: Synthetic oligonucleotide
cuaaaagagcugccaccag

SEQ ID NO: 1511448 - RNA, 19 nt, Artificial Sequence
  Description of Artificial Sequence: Synthetic oligonucleotide
gaccagagccccaaacaag

SEQ ID NO: 1511449 - RNA, 19 nt, Artificial Sequence
  Description of Artificial Sequence: Synthetic oligonucleotide
acuuaggagagccccucgu

SEQ ID NO: 1511450 - RNA, 19 nt, Artificial Sequence
  Description of Artificial Sequence: Synthetic oligonucleotide
guuccccuaacgauagucc

SEQ ID NO: 1511451 - RNA, 19 nt, Artificial Sequence
  Description of Artificial Sequence: Synthetic oligonucleotide
gaggcuuggcaggacuugg

SEQ ID NO: 1511452 - RNA, 19 nt, Artificial Sequence
  Description of Artificial Sequence: Synthetic oligonucleotide
uagaggacggggcaccaau

SEQ ID NO: 1511453 - RNA, 19 nt, Artificial Sequence
  Description of Artificial Sequence: Synthetic oligonucleotide
gaacuagcgcccacuguag

SEQ ID NO: 1511454 - RNA, 19 nt, Artificial Sequence
  Description of Artificial Sequence: Synthetic oligonucleotide
uccuccauucuggagcccc

SEQ ID NO: 1511455 - RNA, 19 nt, Artificial Sequence
  Description of Artificial Sequence: Synthetic oligonucleotide
gaggucaggaaaagacgcc

SEQ ID NO: 1511456 - RNA, 19 nt, Artificial Sequence
  Description of Artificial Sequence: Synthetic oligonucleotide
caaggugacacugaaccga

SEQ ID NO: 1511457 - RNA, 19 nt, Artificial Sequence
  Description of Artificial Sequence: Synthetic oligonucleotide
cuuaggagagccccucguc

SEQ ID NO: 1511458 - RNA, 19 nt, Artificial Sequence
  Description of Artificial Sequence: Synthetic oligonucleotide
uacgucuuggauccuccau

SEQ ID NO: 1511459 - RNA, 19 nt, Artificial Sequence
  Description of Artificial Sequence: Synthetic oligonucleotide
accagagccccaaacaagu

SEQ ID NO: 1511460 - RNA, 19 nt, Artificial Sequence
  Description of Artificial Sequence: Synthetic oligonucleotide
uggcaagcuugaacuuagg

SEQ ID NO: 1511461 - RNA, 19 nt, Artificial Sequence
  Description of Artificial Sequence: Synthetic oligonucleotide
acuauugacaugagccaca

SEQ ID NO: 1511462 - RNA, 19 nt, Artificial Sequence
  Description of Artificial Sequence: Synthetic oligonucleotide
agacucucaguagcucccc

SEQ ID NO: 1511463 - RNA, 19 nt, Artificial Sequence
  Description of Artificial Sequence: Synthetic oligonucleotide
accagaugcuguauaggag

SEQ ID NO: 1511464 - RNA, 19 nt, Artificial Sequence
  Description of Artificial Sequence: Synthetic oligonucleotide
cagaugcuguauaggaguc

SEQ ID NO: 1511465 - RNA, 19 nt, Artificial Sequence
  Description of Artificial Sequence: Synthetic oligonucleotide
auguggacggagugcacca

SEQ ID NO: 1511466 - RNA, 19 nt, Artificial Sequence
  Description of Artificial Sequence: Synthetic oligonucleotide
gugccuacagugucagcag

SEQ ID NO: 1511467 - RNA, 19 nt, Artificial Sequence
  Description of Artificial Sequence: Synthetic oligonucleotide
aggucaggaaaagacgcca

SEQ ID NO: 1511468 - RNA, 19 nt, Artificial Sequence
  Description of Artificial Sequence: Synthetic oligonucleotide
guauucacuuccaggcagc

SEQ ID NO: 1511469 - RNA, 19 nt, Artificial Sequence
  Description of Artificial Sequence: Synthetic oligonucleotide
agggaguaucugaagcccg

SEQ ID NO: 1511470 - RNA, 19 nt, Artificial Sequence
  Description of Artificial Sequence: Synthetic oligonucleotide
cucggaauagcucgcuguc

SEQ ID NO: 1511471 - RNA, 19 nt, Artificial Sequence
  Description of Artificial Sequence: Synthetic oligonucleotide
cacagcuaccguguagagg

SEQ ID NO: 1511472 - RNA, 19 nt, Artificial Sequence
  Description of Artificial Sequence: Synthetic oligonucleotide
accgacgcugcagaggaag

SEQ ID NO: 1511473 - RNA, 19 nt, Artificial Sequence
  Description of Artificial Sequence: Synthetic oligonucleotide
guauaggagucucucggaa

SEQ ID NO: 1511474 - RNA, 19 nt, Artificial Sequence
  Description of Artificial Sequence: Synthetic oligonucleotide
ucggaauagcucgcugucc

SEQ ID NO: 1511475 - RNA, 19 nt, Artificial Sequence
  Description of Artificial Sequence: Synthetic oligonucleotide
cuccagccggaacacacag

SEQ ID NO: 1511476 - RNA, 19 nt, Artificial Sequence
  Description of Artificial Sequence: Synthetic oligonucleotide
acgucuuggauccuccauu

SEQ ID NO: 1511477 - RNA, 19 nt, Artificial Sequence
  Description of Artificial Sequence: Synthetic oligonucleotide
uccccuaacgauaguccau

SEQ ID NO: 1511478 - RNA, 19 nt, Artificial Sequence
  Description of Artificial Sequence: Synthetic oligonucleotide
agcuaccguguagaggacg

SEQ ID NO: 1511479 - RNA, 19 nt, Artificial Sequence
  Description of Artificial Sequence: Synthetic oligonucleotide
aggacggggcaccaaugug

SEQ ID NO: 1511480 - RNA, 19 nt, Artificial Sequence
  Description of Artificial Sequence: Synthetic oligonucleotide
aguaaccagggcccggaaa

SEQ ID NO: 1511481 - RNA, 19 nt, Artificial Sequence
  Description of Artificial Sequence: Synthetic oligonucleotide
ugaagcccgaugguagaga

SEQ ID NO: 1511482 - RNA, 19 nt, Artificial Sequence
  Description of Artificial Sequence: Synthetic oligonucleotide
gcuaaaagagcugccacca

SEQ ID NO: 1511483 - RNA, 19 nt, Artificial Sequence
  Description of Artificial Sequence: Synthetic oligonucleotide
aggaaggguucugguacac

SEQ ID NO: 1511484 - RNA, 19 nt, Artificial Sequence
  Description of Artificial Sequence: Synthetic oligonucleotide
caccaauguggacggagug

SEQ ID NO: 1511485 - RNA, 19 nt, Artificial Sequence
  Description of Artificial Sequence: Synthetic oligonucleotide
gaacuuaggagagccccuc

SEQ ID NO: 1511486 - RNA, 19 nt, Artificial Sequence
  Description of Artificial Sequence: Synthetic oligonucleotide
gcuaccguguagaggacgg

SEQ ID NO: 1511487 - RNA, 19 nt, Artificial Sequence
  Description of Artificial Sequence: Synthetic oligonucleotide
aguuuguaguggaggaggu

SEQ ID NO: 1511488 - RNA, 19 nt, Artificial Sequence
  Description of Artificial Sequence: Synthetic oligonucleotide
uggacggagugcaccagua

SEQ ID NO: 1511489 - RNA, 19 nt, Artificial Sequence
  Description of Artificial Sequence: Synthetic oligonucleotide
ccucaggcgaggcagcugg

SEQ ID NO: 1511490 - RNA, 19 nt, Artificial Sequence
  Description of Artificial Sequence: Synthetic oligonucleotide
cgguauaaggcuugggaag

SEQ ID NO: 1511491 - RNA, 19 nt, Artificial Sequence
  Description of Artificial Sequence: Synthetic oligonucleotide
uugagacucucaguagcuc

SEQ ID NO: 1511492 - RNA, 19 nt, Artificial Sequence
  Description of Artificial Sequence: Synthetic oligonucleotide
cacugaaccgacgcugcag

SEQ ID NO: 1511493 - RNA, 19 nt, Artificial Sequence
  Description of Artificial Sequence: Synthetic oligonucleotide
ugagucaguggcagaccua

SEQ ID NO: 1511494 - RNA, 19 nt, Artificial Sequence
  Description of Artificial Sequence: Synthetic oligonucleotide
ugagccuugccaggcgggc

SEQ ID NO: 1511495 - RNA, 19 nt, Artificial Sequence
  Description of Artificial Sequence: Synthetic oligonucleotide
cugaaccgacgcugcagag

SEQ ID NO: 1511496 - RNA, 19 nt, Artificial Sequence
  Description of Artificial Sequence: Synthetic oligonucleotide
uccuuaggcacaggcaaua

SEQ ID NO: 1511497 - RNA, 19 nt, Artificial Sequence
  Description of Artificial Sequence: Synthetic oligonucleotide
ggcaagcuugaacuuagga

SEQ ID NO: 1511498 - RNA, 19 nt, Artificial Sequence
  Description of Artificial Sequence: Synthetic oligonucleotide
ucuuugggucuugggagaa

SEQ ID NO: 1511499 - RNA, 19 nt, Artificial Sequence
  Description of Artificial Sequence: Synthetic oligonucleotide
ccuaacgauaguccaucag

SEQ ID NO: 1511500 - RNA, 19 nt, Artificial Sequence
  Description of Artificial Sequence: Synthetic oligonucleotide
aguagcuccccacgguaua

SEQ ID NO: 1511501 - RNA, 19 nt, Artificial Sequence
  Description of Artificial Sequence: Synthetic oligonucleotide
aggacuuggggccgacaga

SEQ ID NO: 1511502 - RNA, 19 nt, Artificial Sequence
  Description of Artificial Sequence: Synthetic oligonucleotide
agaugcuguauaggagucu

SEQ ID NO: 1511503 - RNA, 19 nt, Artificial Sequence
  Description of Artificial Sequence: Synthetic oligonucleotide
ugccgaaggcccucaucug

SEQ ID NO: 1511504 - RNA, 19 nt, Artificial Sequence
  Description of Artificial Sequence: Synthetic oligonucleotide
augaaacuauugacaugag

SEQ ID NO: 1511505 - RNA, 19 nt, Artificial Sequence
  Description of Artificial Sequence: Synthetic oligonucleotide
uguggacggagugcaccag

SEQ ID NO: 1511506 - RNA, 19 nt, Artificial Sequence
  Description of Artificial Sequence: Synthetic oligonucleotide
cucgcaagacucccacaug

SEQ ID NO: 1511507 - RNA, 19 nt, Artificial Sequence
  Description of Artificial Sequence: Synthetic oligonucleotide
uggcggcuagcucugguuu

SEQ ID NO: 1511508 - RNA, 19 nt, Artificial Sequence
  Description of Artificial Sequence: Synthetic oligonucleotide
gcggaugcuggggagaucc

SEQ ID NO: 1511509 - RNA, 19 nt, Artificial Sequence
  Description of Artificial Sequence: Synthetic oligonucleotide
agggcucuacgucuuggau

SEQ ID NO: 1511510 - RNA, 19 nt, Artificial Sequence
  Description of Artificial Sequence: Synthetic oligonucleotide
cucucggaauagcucgcug

SEQ ID NO: 1511511 - RNA, 19 nt, Artificial Sequence
  Description of Artificial Sequence: Synthetic oligonucleotide
ggcaccaauguggacggag

SEQ ID NO: 1511512 - RNA, 19 nt, Artificial Sequence
  Description of Artificial Sequence: Synthetic oligonucleotide
cauuuuccggcaggaacuc

SEQ ID NO: 1511513 - RNA, 19 nt, Artificial Sequence
  Description of Artificial Sequence: Synthetic oligonucleotide
gccccaaacaagugguccc

SEQ ID NO: 1511514 - RNA, 19 nt, Artificial Sequence
  Description of Artificial Sequence: Synthetic oligonucleotide
agagccccucgucugcacu

SEQ ID NO: 1511515 - RNA, 19 nt, Artificial Sequence
  Description of Artificial Sequence: Synthetic oligonucleotide
cgauaguccaucagagaag

SEQ ID NO: 1511516 - RNA, 19 nt, Artificial Sequence
  Description of Artificial Sequence: Synthetic oligonucleotide
augagccuugccaggcggg

SEQ ID NO: 1511517 - RNA, 19 nt, Artificial Sequence
  Description of Artificial Sequence: Synthetic oligonucleotide
ccagggcccggaaauagag

SEQ ID NO: 1511518 - RNA, 19 nt, Artificial Sequence
  Description of Artificial Sequence: Synthetic oligonucleotide
acaagguacugcagguggu

SEQ ID NO: 1511519 - RNA, 19 nt, Artificial Sequence
  Description of Artificial Sequence: Synthetic oligonucleotide
uccccacgguauaaggcuu

SEQ ID NO: 1511520 - RNA, 19 nt, Artificial Sequence
  Description of Artificial Sequence: Synthetic oligonucleotide
ccacagguggggaucgucc

SEQ ID NO: 1511521 - RNA, 19 nt, Artificial Sequence
  Description of Artificial Sequence: Synthetic oligonucleotide
aggcucuguguagcacucc

SEQ ID NO: 1511522 - RNA, 19 nt, Artificial Sequence
  Description of Artificial Sequence: Synthetic oligonucleotide
caucauuagccagugccaa

SEQ ID NO: 1511523 - RNA, 19 nt, Artificial Sequence
  Description of Artificial Sequence: Synthetic oligonucleotide
auauucuuccgggcagccu

SEQ ID NO: 1511524 - RNA, 19 nt, Artificial Sequence
  Description of Artificial Sequence: Synthetic oligonucleotide
ugguuucaguguugccacu

SEQ ID NO: 1511525 - RNA, 19 nt, Artificial Sequence
  Description of Artificial Sequence: Synthetic oligonucleotide
guugaggcuuggcaggacu

SEQ ID NO: 1511526 - RNA, 19 nt, Artificial Sequence
  Description of Artificial Sequence: Synthetic oligonucleotide
guagcacuccaacggcaca

SEQ ID NO: 1511527 - RNA, 19 nt, Artificial Sequence
  Description of Artificial Sequence: Synthetic oligonucleotide
uagcuccccacgguauaag

SEQ ID NO: 1511528 - RNA, 19 nt, Artificial Sequence
  Description of Artificial Sequence: Synthetic oligonucleotide
cuccccacgguauaaggcu

SEQ ID NO: 1511529 - RNA, 19 nt, Artificial Sequence
  Description of Artificial Sequence: Synthetic oligonucleotide
gacucucaguagcucccca

SEQ ID NO: 1511530 - RNA, 19 nt, Artificial Sequence
  Description of Artificial Sequence: Synthetic oligonucleotide
cuaccguguagaggacggg

SEQ ID NO: 1511531 - RNA, 19 nt, Artificial Sequence
  Description of Artificial Sequence: Synthetic oligonucleotide
cagugccaagggcucuacg

SEQ ID NO: 1511532 - RNA, 19 nt, Artificial Sequence
  Description of Artificial Sequence: Synthetic oligonucleotide
cucuacgucuuggauccuc

SEQ ID NO: 1511533 - RNA, 19 nt, Artificial Sequence
  Description of Artificial Sequence: Synthetic oligonucleotide
guauaaggcuugggaaguc

SEQ ID NO: 1511534 - RNA, 19 nt, Artificial Sequence
  Description of Artificial Sequence: Synthetic oligonucleotide
ggggagauccuuggcaagc

SEQ ID NO: 1511535 - RNA, 19 nt, Artificial Sequence
  Description of Artificial Sequence: Synthetic oligonucleotide
gcgcuaaaagagcugccac

SEQ ID NO: 1511536 - RNA, 19 nt, Artificial Sequence
  Description of Artificial Sequence: Synthetic oligonucleotide
aagcccgaugguagagaug

SEQ ID NO: 1511537 - RNA, 19 nt, Artificial Sequence
  Description of Artificial Sequence: Synthetic oligonucleotide
caacggcacaggcagcuga

SEQ ID NO: 1511538 - RNA, 19 nt, Artificial Sequence
  Description of Artificial Sequence: Synthetic oligonucleotide
gccgcgcuaaaagagcugc

SEQ ID NO: 1511539 - RNA, 19 nt, Artificial Sequence
  Description of Artificial Sequence: Synthetic oligonucleotide
ucagggcgccagcuuucca

SEQ ID NO: 1511540 - RNA, 19 nt, Artificial Sequence
  Description of Artificial Sequence: Synthetic oligonucleotide
cucaggcgaggcagcuggg

SEQ ID NO: 1511541 - RNA, 19 nt, Artificial Sequence
  Description of Artificial Sequence: Synthetic oligonucleotide
ccacuguaggacccgcacg

SEQ ID NO: 1511542 - RNA, 19 nt, Artificial Sequence
  Description of Artificial Sequence: Synthetic oligonucleotide
cggggcaccaauguggacg

SEQ ID NO: 1511543 - RNA, 19 nt, Artificial Sequence
  Description of Artificial Sequence: Synthetic oligonucleotide
agaggacggggcaccaaug

SEQ ID NO: 1511544 - RNA, 19 nt, Artificial Sequence
  Description of Artificial Sequence: Synthetic oligonucleotide
acggcagugccuacagugu

SEQ ID NO: 1511545 - RNA, 19 nt, Artificial Sequence
  Description of Artificial Sequence: Synthetic oligonucleotide
ccgaaggcccucaucugcc

SEQ ID NO: 1511546 - RNA, 19 nt, Artificial Sequence
  Description of Artificial Sequence: Synthetic oligonucleotide
ggaauagcucgcuguccac

SEQ ID NO: 1511547 - RNA, 19 nt, Artificial Sequence
  Description of Artificial Sequence: Synthetic oligonucleotide
guguagcacuccaacggca

SEQ ID NO: 1511548 - RNA, 19 nt, Artificial Sequence
  Description of Artificial Sequence: Synthetic oligonucleotide
caccaguaaccagggcccg

SEQ ID NO: 1511549 - RNA, 19 nt, Artificial Sequence
  Description of Artificial Sequence: Synthetic oligonucleotide
gaccuagggcucgcaagac

SEQ ID NO: 1511550 - RNA, 19 nt, Artificial Sequence
  Description of Artificial Sequence: Synthetic oligonucleotide
caguguuggcggcuagcuc

SEQ ID NO: 1511551 - RNA, 19 nt, Artificial Sequence
  Description of Artificial Sequence: Synthetic oligonucleotide
cucagggcgccagcuuucc

SEQ ID NO: 1511552 - RNA, 19 nt, Artificial Sequence
  Description of Artificial Sequence: Synthetic oligonucleotide
aggugacacugaaccgacg

SEQ ID NO: 1511553 - RNA, 19 nt, Artificial Sequence
  Description of Artificial Sequence: Synthetic oligonucleotide
cuacgucuuggauccucca

SEQ ID NO: 1511554 - RNA, 19 nt, Artificial Sequence
  Description of Artificial Sequence: Synthetic oligonucleotide
gugacacugaaccgacgcu

SEQ ID NO: 1511555 - RNA, 19 nt, Artificial Sequence
  Description of Artificial Sequence: Synthetic oligonucleotide
ccaauguggacggagugca

SEQ ID NO: 1511556 - RNA, 19 nt, Artificial Sequence
  Description of Artificial Sequence: Synthetic oligonucleotide
ccagaacuagcgcccacug

SEQ ID NO: 1511557 - RNA, 19 nt, Artificial Sequence
  Description of Artificial Sequence: Synthetic oligonucleotide
ggcccggaaauagagcuga

SEQ ID NO: 1511558 - RNA, 19 nt, Artificial Sequence
  Description of Artificial Sequence: Synthetic oligonucleotide
cccacuguaggacccgcac

SEQ ID NO: 1511559 - RNA, 19 nt, Artificial Sequence
  Description of Artificial Sequence: Synthetic oligonucleotide
aggcaauagcaggcuugag

SEQ ID NO: 1511560 - RNA, 19 nt, Artificial Sequence
  Description of Artificial Sequence: Synthetic oligonucleotide
cugcacugaggguccccac

SEQ ID NO: 1511561 - RNA, 19 nt, Artificial Sequence
  Description of Artificial Sequence: Synthetic oligonucleotide
caauagcaggcuugagacu

SEQ ID NO: 1511562 - RNA, 19 nt, Artificial Sequence
  Description of Artificial Sequence: Synthetic oligonucleotide
ggcgcaaggugacacugaa

SEQ ID NO: 1511563 - RNA, 19 nt, Artificial Sequence
  Description of Artificial Sequence: Synthetic oligonucleotide
gcccagagggaguaucuga

SEQ ID NO: 1511564 - RNA, 19 nt, Artificial Sequence
  Description of Artificial Sequence: Synthetic oligonucleotide
ccgacgcugcagaggaagg

SEQ ID NO: 1511565 - RNA, 19 nt, Artificial Sequence
  Description of Artificial Sequence: Synthetic oligonucleotide
agcucuugugcaagguauu

SEQ ID NO: 1511566 - RNA, 19 nt, Artificial Sequence
  Description of Artificial Sequence: Synthetic oligonucleotide
guagcuccccacgguauaa

SEQ ID NO: 1511567 - RNA, 19 nt, Artificial Sequence
  Description of Artificial Sequence: Synthetic oligonucleotide
gagccgcgcuaaaagagcu

SEQ ID NO: 1511568 - RNA, 19 nt, Artificial Sequence
  Description of Artificial Sequence: Synthetic oligonucleotide
ccagccggaacacacagcu

SEQ ID NO: 1511569 - RNA, 19 nt, Artificial Sequence
  Description of Artificial Sequence: Synthetic oligonucleotide
cccggaaauagagcugaag

SEQ ID NO: 1511570 - RNA, 19 nt, Artificial Sequence
  Description of Artificial Sequence: Synthetic oligonucleotide
ccuuaggcacaggcaauag

SEQ ID NO: 1511571 - RNA, 19 nt, Artificial Sequence
  Description of Artificial Sequence: Synthetic oligonucleotide
cagcuaccguguagaggac

SEQ ID NO: 1511572 - RNA, 19 nt, Artificial Sequence
  Description of Artificial Sequence: Synthetic oligonucleotide
caggcgaggcagcugggaa

SEQ ID NO: 1511573 - RNA, 19 nt, Artificial Sequence
  Description of Artificial Sequence: Synthetic oligonucleotide
gcucgcaagacucccacau

SEQ ID NO: 1511574 - RNA, 19 nt, Artificial Sequence
  Description of Artificial Sequence: Synthetic oligonucleotide
gugcucuaagaagcuggca

SEQ ID NO: 1511575 - RNA, 19 nt, Artificial Sequence
  Description of Artificial Sequence: Synthetic oligonucleotide
gggaguaucugaagcccga

SEQ ID NO: 1511576 - RNA, 19 nt, Artificial Sequence
  Description of Artificial Sequence: Synthetic oligonucleotide
uggggccgacagagccgcg

SEQ ID NO: 1511577 - RNA, 19 nt, Artificial Sequence
  Description of Artificial Sequence: Synthetic oligonucleotide
gugguccccaaaagagaca

SEQ ID NO: 1511578 - RNA, 19 nt, Artificial Sequence
  Description of Artificial Sequence: Synthetic oligonucleotide
ccccaaacaaguggucccc

SEQ ID NO: 1511579 - RNA, 19 nt, Artificial Sequence
  Description of Artificial Sequence: Synthetic oligonucleotide
uggcagaccuagggcucgc

SEQ ID NO: 1511580 - RNA, 19 nt, Artificial Sequence
  Description of Artificial Sequence: Synthetic oligonucleotide
ggcggcuagcucugguuuc

SEQ ID NO: 1511581 - RNA, 19 nt, Artificial Sequence
  Description of Artificial Sequence: Synthetic oligonucleotide
ccacagcuaccguguagag

SEQ ID NO: 1511582 - RNA, 19 nt, Artificial Sequence
  Description of Artificial Sequence: Synthetic oligonucleotide
agccgcgcuaaaagagcug

SEQ ID NO: 1511583 - RNA, 19 nt, Artificial Sequence
  Description of Artificial Sequence: Synthetic oligonucleotide
agacagccucaaagugcuc

SEQ ID NO: 1511584 - RNA, 19 nt, Artificial Sequence
  Description of Artificial Sequence: Synthetic oligonucleotide
ccccuaacgauaguccauc

SEQ ID NO: 1511585 - RNA, 19 nt, Artificial Sequence
  Description of Artificial Sequence: Synthetic oligonucleotide
cacagguggggaucguccu

SEQ ID NO: 1511586 - RNA, 19 nt, Artificial Sequence
  Description of Artificial Sequence: Synthetic oligonucleotide
cuccauucuggagccccuc

SEQ ID NO: 1511587 - RNA, 19 nt, Artificial Sequence
  Description of Artificial Sequence: Synthetic oligonucleotide
guggacggagugcaccagu

SEQ ID NO: 1511588 - RNA, 19 nt, Artificial Sequence
  Description of Artificial Sequence: Synthetic oligonucleotide
ccccucgucugcacugagg

SEQ ID NO: 1511589 - RNA, 19 nt, Artificial Sequence
  Description of Artificial Sequence: Synthetic oligonucleotide
acccgcacggcagugccua

SEQ ID NO: 1511590 - RNA, 19 nt, Artificial Sequence
  Description of Artificial Sequence: Synthetic oligonucleotide
cggaauagcucgcugucca

SEQ ID NO: 1511591 - RNA, 19 nt, Artificial Sequence
  Description of Artificial Sequence: Synthetic oligonucleotide
aggcgcaaggugacacuga

SEQ ID NO: 1511592 - RNA, 19 nt, Artificial Sequence
  Description of Artificial Sequence: Synthetic oligonucleotide
guaggacccgcacggcagu

SEQ ID NO: 1511593 - RNA, 19 nt, Artificial Sequence
  Description of Artificial Sequence: Synthetic oligonucleotide
cuggcucgggcuggugaac

SEQ ID NO: 1511594 - RNA, 19 nt, Artificial Sequence
  Description of Artificial Sequence: Synthetic oligonucleotide
gccggaacacacagcucag

SEQ ID NO: 1511595 - RNA, 19 nt, Artificial Sequence
  Description of Artificial Sequence: Synthetic oligonucleotide
ggacggagugcaccaguaa

SEQ ID NO: 1511596 - RNA, 19 nt, Artificial Sequence
  Description of Artificial Sequence: Synthetic oligonucleotide
cagaacuagcgcccacugu

SEQ ID NO: 1511597 - RNA, 19 nt, Artificial Sequence
  Description of Artificial Sequence: Synthetic oligonucleotide
cccacgguauaaggcuugg

SEQ ID NO: 1511598 - RNA, 19 nt, Artificial Sequence
  Description of Artificial Sequence: Synthetic oligonucleotide
agccccucgucugcacuga

SEQ ID NO: 1511599 - RNA, 19 nt, Artificial Sequence
  Description of Artificial Sequence: Synthetic oligonucleotide
ggggaucguccugcagugg

SEQ ID NO: 1511600 - RNA, 19 nt, Artificial Sequence
  Description of Artificial Sequence: Synthetic oligonucleotide
ccgcgcuaaaagagcugcc

SEQ ID NO: 1511601 - RNA, 19 nt, Artificial Sequence
  Description of Artificial Sequence: Synthetic oligonucleotide
uggcaggacuuggggccga

SEQ ID NO: 1511602 - RNA, 19 nt, Artificial Sequence
  Description of Artificial Sequence: Synthetic oligonucleotide
caguagcuccccacgguau

SEQ ID NO: 1511603 - RNA, 19 nt, Artificial Sequence
  Description of Artificial Sequence: Synthetic oligonucleotide
ccacgguauaaggcuuggg

SEQ ID NO: 1511604 - RNA, 19 nt, Artificial Sequence
  Description of Artificial Sequence: Synthetic oligonucleotide
ggggccgacagagccgcgc

SEQ ID NO: 1511605 - RNA, 19 nt, Artificial Sequence
  Description of Artificial Sequence: Synthetic oligonucleotide
guagaggacggggcaccaa

SEQ ID NO: 1511606 - RNA, 19 nt, Artificial Sequence
  Description of Artificial Sequence: Synthetic oligonucleotide
gggcaaggcgcaaggugac

SEQ ID NO: 1511607 - RNA, 19 nt, Artificial Sequence
  Description of Artificial Sequence: Synthetic oligonucleotide
caaagagggcaaggcgcaa

SEQ ID NO: 1511608 - RNA, 19 nt, Artificial Sequence
  Description of Artificial Sequence: Synthetic oligonucleotide
agcugggaauacagcucaa

SEQ ID NO: 1511609 - RNA, 19 nt, Artificial Sequence
  Description of Artificial Sequence: Synthetic oligonucleotide
aaccgacgcugcagaggaa

SEQ ID NO: 1511610 - RNA, 19 nt, Artificial Sequence
  Description of Artificial Sequence: Synthetic oligonucleotide
cccuaacgauaguccauca

SEQ ID NO: 1511611 - RNA, 19 nt, Artificial Sequence
  Description of Artificial Sequence: Synthetic oligonucleotide
gguuucaguguugccacuu

SEQ ID NO: 1511612 - RNA, 19 nt, Artificial Sequence
  Description of Artificial Sequence: Synthetic oligonucleotide
gcggcuagcucugguuuca

SEQ ID NO: 1511613 - RNA, 19 nt, Artificial Sequence
  Description of Artificial Sequence: Synthetic oligonucleotide
cgcgcuaaaagagcugcca

SEQ ID NO: 1511614 - RNA, 19 nt, Artificial Sequence
  Description of Artificial Sequence: Synthetic oligonucleotide
gccacagguggggaucguc

SEQ ID NO: 1511615 - RNA, 19 nt, Artificial Sequence
  Description of Artificial Sequence: Synthetic oligonucleotide
gcgcaaggugacacugaac

SEQ ID NO: 1511616 - RNA, 19 nt, Artificial Sequence
  Description of Artificial Sequence: Synthetic oligonucleotide
gccccucgucugcacugag

SEQ ID NO: 1511617 - RNA, 19 nt, Artificial Sequence
  Description of Artificial Sequence: Synthetic oligonucleotide
gcucuguguagcacuccaa

SEQ ID NO: 1511618 - RNA, 19 nt, Artificial Sequence
  Description of Artificial Sequence: Synthetic oligonucleotide
ggaguaucugaagcccgau

SEQ ID NO: 1511619 - RNA, 19 nt, Artificial Sequence
  Description of Artificial Sequence: Synthetic oligonucleotide
ccccucugugggcaauguc

SEQ ID NO: 1511620 - RNA, 19 nt, Artificial Sequence
  Description of Artificial Sequence: Synthetic oligonucleotide
gccucagggcgccagcuuu

SEQ ID NO: 1511621 - RNA, 19 nt, Artificial Sequence
  Description of Artificial Sequence: Synthetic oligonucleotide
gggcgccagcuuuccagaa

SEQ ID NO: 1511622 - RNA, 19 nt, Artificial Sequence
  Description of Artificial Sequence: Synthetic oligonucleotide
gggccgacagagccgcgcu

SEQ ID NO: 1511623 - RNA, 19 nt, Artificial Sequence
  Description of Artificial Sequence: Synthetic oligonucleotide
ggcaggacuuggggccgac

SEQ ID NO: 1511624 - RNA, 19 nt, Artificial Sequence
  Description of Artificial Sequence: Synthetic oligonucleotide
cuguuccccuaacgauagu

SEQ ID NO: 1511625 - RNA, 19 nt, Artificial Sequence
  Description of Artificial Sequence: Synthetic oligonucleotide
gacccgcacggcagugccu

SEQ ID NO: 1511626 - RNA, 19 nt, Artificial Sequence
  Description of Artificial Sequence: Synthetic oligonucleotide
gcaggacuuggggccgaca

SEQ ID NO: 1511627 - RNA, 19 nt, Artificial Sequence
  Description of Artificial Sequence: Synthetic oligonucleotide
cgcaagacucccacaugcu

SEQ ID NO: 1511628 - RNA, 19 nt, Artificial Sequence
  Description of Artificial Sequence: Synthetic oligonucleotide
gcccacuguaggacccgca

SEQ ID NO: 1511629 - RNA, 19 nt, Artificial Sequence
  Description of Artificial Sequence: Synthetic oligonucleotide
ggccgacagagccgcgcua

SEQ ID NO: 1511630 - RNA, 19 nt, Artificial Sequence
  Description of Artificial Sequence: Synthetic oligonucleotide
cccgcacggcagugccuac

SEQ ID NO: 1511631 - RNA, 19 nt, Artificial Sequence
  Description of Artificial Sequence: Synthetic oligonucleotide
gcucgggcuggugaacaau

SEQ ID NO: 1511632 - RNA, 19 nt, Artificial Sequence
  Description of Artificial Sequence: Synthetic oligonucleotide
cgacagagccgcgcuaaaa

SEQ ID NO: 1511633 - RNA, 19 nt, Artificial Sequence
  Description of Artificial Sequence: Synthetic oligonucleotide
gcccggaaauagagcugaa

SEQ ID NO: 1511634 - RNA, 19 nt, Artificial Sequence
  Description of Artificial Sequence: Synthetic oligonucleotide
gccccucugugggcaaugu

SEQ ID NO: 1511635 - RNA, 19 nt, Artificial Sequence
  Description of Artificial Sequence: Synthetic oligonucleotide
gcucuacgucuuggauccu

SEQ ID NO: 1511636 - RNA, 19 nt, Artificial Sequence
  Description of Artificial Sequence: Synthetic oligonucleotide
ggccacagguggggaucgu

SEQ ID NO: 1511637 - RNA, 19 nt, Artificial Sequence
  Description of Artificial Sequence: Synthetic oligonucleotide
aauguaauugcucugaugu

SEQ ID NO: 1511638 - RNA, 19 nt, Artificial Sequence
  Description of Artificial Sequence: Synthetic oligonucleotide
aaaauaauguaauugcucu

SEQ ID NO: 1511639 - RNA, 19 nt, Artificial Sequence
  Description of Artificial Sequence: Synthetic oligonucleotide
aacggcgaaauucuggugc

SEQ ID NO: 1511640 - RNA, 19 nt, Artificial Sequence
  Description of Artificial Sequence: Synthetic oligonucleotide
aaaaucucgagaaggaccc

SEQ ID NO: 1511641 - RNA, 19 nt, Artificial Sequence
  Description of Artificial Sequence: Synthetic oligonucleotide
ucaaacuagaugcaagacg

SEQ ID NO: 1511642 - RNA, 19 nt, Artificial Sequence
  Description of Artificial Sequence: Synthetic oligonucleotide
ugguagucaaacuagaugc

SEQ ID NO: 1511643 - RNA, 19 nt, Artificial Sequence
  Description of Artificial Sequence: Synthetic oligonucleotide
aauuccacggguuaucuug

SEQ ID NO: 1511644 - RNA, 19 nt, Artificial Sequence
  Description of Artificial Sequence: Synthetic oligonucleotide
uaaaaucucgagaaggacc

SEQ ID NO: 1511645 - RNA, 19 nt, Artificial Sequence
  Description of Artificial Sequence: Synthetic oligonucleotide
ugagaaauuguucagcaac

SEQ ID NO: 1511646 - RNA, 19 nt, Artificial Sequence
  Description of Artificial Sequence: Synthetic oligonucleotide
uucggggcaacuuugaggg

SEQ ID NO: 1511647 - RNA, 19 nt, Artificial Sequence
  Description of Artificial Sequence: Synthetic oligonucleotide
uuaucuugaaagacgacgc

SEQ ID NO: 1511648 - RNA, 19 nt, Artificial Sequence
  Description of Artificial Sequence: Synthetic oligonucleotide
uuuacuugguuguaggcag

SEQ ID NO: 1511649 - RNA, 19 nt, Artificial Sequence
  Description of Artificial Sequence: Synthetic oligonucleotide
guuaucuugaaagacgacg

SEQ ID NO: 1511650 - RNA, 19 nt, Artificial Sequence
  Description of Artificial Sequence: Synthetic oligonucleotide
ucugauguuacuuucccca

SEQ ID NO: 1511651 - RNA, 19 nt, Artificial Sequence
  Description of Artificial Sequence: Synthetic oligonucleotide
cacuaaaugcauuugcucc

SEQ ID NO: 1511652 - RNA, 19 nt, Artificial Sequence
  Description of Artificial Sequence: Synthetic oligonucleotide
gaguaaaaucucgagaagg

SEQ ID NO: 1511653 - RNA, 19 nt, Artificial Sequence
  Description of Artificial Sequence: Synthetic oligonucleotide
cuuaauuuaccaccaauug

SEQ ID NO: 1511654 - RNA, 19 nt, Artificial Sequence
  Description of Artificial Sequence: Synthetic oligonucleotide
accaaagccauucuugcac

SEQ ID NO: 1511655 - RNA, 19 nt, Artificial Sequence
  Description of Artificial Sequence: Synthetic oligonucleotide
ucuugaaagacgacgcucc

SEQ ID NO: 1511656 - RNA, 19 nt, Artificial Sequence
  Description of Artificial Sequence: Synthetic oligonucleotide
uuuaccaccaauugcuuca

SEQ ID NO: 1511657 - RNA, 19 nt, Artificial Sequence
  Description of Artificial Sequence: Synthetic oligonucleotide
caaucuuuagcugagacug

SEQ ID NO: 1511658 - RNA, 19 nt, Artificial Sequence
  Description of Artificial Sequence: Synthetic oligonucleotide
aaagacgacgcuccuuugg

SEQ ID NO: 1511659 - RNA, 19 nt, Artificial Sequence
  Description of Artificial Sequence: Synthetic oligonucleotide
uguaagagccagcaaguag

SEQ ID NO: 1511660 - RNA, 19 nt, Artificial Sequence
  Description of Artificial Sequence: Synthetic oligonucleotide
aaucacacgagucugugaa

SEQ ID NO: 1511661 - RNA, 19 nt, Artificial Sequence
  Description of Artificial Sequence: Synthetic oligonucleotide
ugcuuuaacgaauaagcca

SEQ ID NO: 1511662 - RNA, 19 nt, Artificial Sequence
  Description of Artificial Sequence: Synthetic oligonucleotide
aagccaauucuugauaagg

SEQ ID NO: 1511663 - RNA, 19 nt, Artificial Sequence
  Description of Artificial Sequence: Synthetic oligonucleotide
aaaggauuagccaagguau

SEQ ID NO: 1511664 - RNA, 19 nt, Artificial Sequence
  Description of Artificial Sequence: Synthetic oligonucleotide
acagacaugagguauccag

SEQ ID NO: 1511665 - RNA, 19 nt, Artificial Sequence
  Description of Artificial Sequence: Synthetic oligonucleotide
auaguguaaauuccgaaga

SEQ ID NO: 1511666 - RNA, 19 nt, Artificial Sequence
  Description of Artificial Sequence: Synthetic oligonucleotide
acaauacaaaggauuagcc

SEQ ID NO: 1511667 - RNA, 19 nt, Artificial Sequence
  Description of Artificial Sequence: Synthetic oligonucleotide
aagacguaguaaaugagag

SEQ ID NO: 1511668 - RNA, 19 nt, Artificial Sequence
  Description of Artificial Sequence: Synthetic oligonucleotide
caaaaggcugauuacuucc

SEQ ID NO: 1511669 - RNA, 19 nt, Artificial Sequence
  Description of Artificial Sequence: Synthetic oligonucleotide
ugguaauuugguaaacuca

SEQ ID NO: 1511670 - RNA, 19 nt, Artificial Sequence
  Description of Artificial Sequence: Synthetic oligonucleotide
aaaugagagguuccuaagu

SEQ ID NO: 1511671 - RNA, 19 nt, Artificial Sequence
  Description of Artificial Sequence: Synthetic oligonucleotide
aacuagaugcaagacguag

SEQ ID NO: 1511672 - RNA, 19 nt, Artificial Sequence
  Description of Artificial Sequence: Synthetic oligonucleotide
acacuaaaugcauuugcuc

SEQ ID NO: 1511673 - RNA, 19 nt, Artificial Sequence
  Description of Artificial Sequence: Synthetic oligonucleotide
ugaaguacacuaaaugcau

SEQ ID NO: 1511674 - RNA, 19 nt, Artificial Sequence
  Description of Artificial Sequence: Synthetic oligonucleotide
caguagcgaagaaagaugg

SEQ ID NO: 1511675 - RNA, 19 nt, Artificial Sequence
  Description of Artificial Sequence: Synthetic oligonucleotide
gauguuacuuuccccaccc

SEQ ID NO: 1511676 - RNA, 19 nt, Artificial Sequence
  Description of Artificial Sequence: Synthetic oligonucleotide
uguaaauuccgaagagccc

SEQ ID NO: 1511677 - RNA, 19 nt, Artificial Sequence
  Description of Artificial Sequence: Synthetic oligonucleotide
aaagguguaugucccaagu

SEQ ID NO: 1511678 - RNA, 19 nt, Artificial Sequence
  Description of Artificial Sequence: Synthetic oligonucleotide
aaugagagguuccuaaguu

SEQ ID NO: 1511679 - RNA, 19 nt, Artificial Sequence
  Description of Artificial Sequence: Synthetic oligonucleotide
cauguugagaaauuguuca

SEQ ID NO: 1511680 - RNA, 19 nt, Artificial Sequence
  Description of Artificial Sequence: Synthetic oligonucleotide
aaugcauuugcuccuguau

SEQ ID NO: 1511681 - RNA, 19 nt, Artificial Sequence
  Description of Artificial Sequence: Synthetic oligonucleotide
uuacagcucgucaagaaaa

SEQ ID NO: 1511682 - RNA, 19 nt, Artificial Sequence
  Description of Artificial Sequence: Synthetic oligonucleotide
uagucaaacuagaugcaag

SEQ ID NO: 1511683 - RNA, 19 nt, Artificial Sequence
  Description of Artificial Sequence: Synthetic oligonucleotide
uaaaugagagguuccuaag

SEQ ID NO: 1511684 - RNA, 19 nt, Artificial Sequence
  Description of Artificial Sequence: Synthetic oligonucleotide
ucuugauaagggagcauag

SEQ ID NO: 1511685 - RNA, 19 nt, Artificial Sequence
  Description of Artificial Sequence: Synthetic oligonucleotide
uuagccaagguauucuugu

SEQ ID NO: 1511686 - RNA, 19 nt, Artificial Sequence
  Description of Artificial Sequence: Synthetic oligonucleotide
ugagguauccagcuuucag

SEQ ID NO: 1511687 - RNA, 19 nt, Artificial Sequence
  Description of Artificial Sequence: Synthetic oligonucleotide
agcaacuuguuucaggaca

SEQ ID NO: 1511688 - RNA, 19 nt, Artificial Sequence
  Description of Artificial Sequence: Synthetic oligonucleotide
ucaccaaaccauuugguaa

SEQ ID NO: 1511689 - RNA, 19 nt, Artificial Sequence
  Description of Artificial Sequence: Synthetic oligonucleotide
gagguuccuaaguuguugg

SEQ ID NO: 1511690 - RNA, 19 nt, Artificial Sequence
  Description of Artificial Sequence: Synthetic oligonucleotide
uugauaagggagcauaguu

SEQ ID NO: 1511691 - RNA, 19 nt, Artificial Sequence
  Description of Artificial Sequence: Synthetic oligonucleotide
ucauguugagaaauuguuc

SEQ ID NO: 1511692 - RNA, 19 nt, Artificial Sequence
  Description of Artificial Sequence: Synthetic oligonucleotide
agaugcaagacguaguaaa

SEQ ID NO: 1511693 - RNA, 19 nt, Artificial Sequence
  Description of Artificial Sequence: Synthetic oligonucleotide
gaguuuuaaccuucggggc

SEQ ID NO: 1511694 - RNA, 19 nt, Artificial Sequence
  Description of Artificial Sequence: Synthetic oligonucleotide
ggagucaauuuguugaagg

SEQ ID NO: 1511695 - RNA, 19 nt, Artificial Sequence
  Description of Artificial Sequence: Synthetic oligonucleotide
ucaaucuuuagcugagacu

SEQ ID NO: 1511696 - RNA, 19 nt, Artificial Sequence
  Description of Artificial Sequence: Synthetic oligonucleotide
acuaaaugcauuugcuccu

SEQ ID NO: 1511697 - RNA, 19 nt, Artificial Sequence
  Description of Artificial Sequence: Synthetic oligonucleotide
agucaaacuagaugcaaga

SEQ ID NO: 1511698 - RNA, 19 nt, Artificial Sequence
  Description of Artificial Sequence: Synthetic oligonucleotide
caaaccauuugguaauuug

SEQ ID NO: 1511699 - RNA, 19 nt, Artificial Sequence
  Description of Artificial Sequence: Synthetic oligonucleotide
guacacuaaaugcauuugc

SEQ ID NO: 1511700 - RNA, 19 nt, Artificial Sequence
  Description of Artificial Sequence: Synthetic oligonucleotide
uguaucuccaauggcagca

SEQ ID NO: 1511701 - RNA, 19 nt, Artificial Sequence
  Description of Artificial Sequence: Synthetic oligonucleotide
uuggaguccucauaucugc

SEQ ID NO: 1511702 - RNA, 19 nt, Artificial Sequence
  Description of Artificial Sequence: Synthetic oligonucleotide
ugaaagacgacgcuccuuu

SEQ ID NO: 1511703 - RNA, 19 nt, Artificial Sequence
  Description of Artificial Sequence: Synthetic oligonucleotide
uuugcucccgaauuucacc

SEQ ID NO: 1511704 - RNA, 19 nt, Artificial Sequence
  Description of Artificial Sequence: Synthetic oligonucleotide
uaagggagcauaguuuucc

SEQ ID NO: 1511705 - RNA, 19 nt, Artificial Sequence
  Description of Artificial Sequence: Synthetic oligonucleotide
aguuuuaaccuucggggca

SEQ ID NO: 1511706 - RNA, 19 nt, Artificial Sequence
  Description of Artificial Sequence: Synthetic oligonucleotide
ucgcaugccuucuauagug

SEQ ID NO: 1511707 - RNA, 19 nt, Artificial Sequence
  Description of Artificial Sequence: Synthetic oligonucleotide
cugcuuuaacgaauaagcc

SEQ ID NO: 1511708 - RNA, 19 nt, Artificial Sequence
  Description of Artificial Sequence: Synthetic oligonucleotide
ugauaagggagcauaguuu

SEQ ID NO: 1511709 - RNA, 19 nt, Artificial Sequence
  Description of Artificial Sequence: Synthetic oligonucleotide
gaguagcuggcauuaaaug

SEQ ID NO: 1511710 - RNA, 19 nt, Artificial Sequence
  Description of Artificial Sequence: Synthetic oligonucleotide
ugauaacaucaccagcagc

SEQ ID NO: 1511711 - RNA, 19 nt, Artificial Sequence
  Description of Artificial Sequence: Synthetic oligonucleotide
aaucucgagaaggacccgg

SEQ ID NO: 1511712 - RNA, 19 nt, Artificial Sequence
  Description of Artificial Sequence: Synthetic oligonucleotide
auaagccaauucuugauaa

SEQ ID NO: 1511713 - RNA, 19 nt, Artificial Sequence
  Description of Artificial Sequence: Synthetic oligonucleotide
ugagggaguaaaaucucga

SEQ ID NO: 1511714 - RNA, 19 nt, Artificial Sequence
  Description of Artificial Sequence: Synthetic oligonucleotide
agcgaagaaagaugguguc

SEQ ID NO: 1511715 - RNA, 19 nt, Artificial Sequence
  Description of Artificial Sequence: Synthetic oligonucleotide
ugaguagcuggcauuaaau

SEQ ID NO: 1511716 - RNA, 19 nt, Artificial Sequence
  Description of Artificial Sequence: Synthetic oligonucleotide
aguguaggccauauuuucc

SEQ ID NO: 1511717 - RNA, 19 nt, Artificial Sequence
  Description of Artificial Sequence: Synthetic oligonucleotide
uccuuugguagucaaacua

SEQ ID NO: 1511718 - RNA, 19 nt, Artificial Sequence
  Description of Artificial Sequence: Synthetic oligonucleotide
gagggaguaaaaucucgag

SEQ ID NO: 1511719 - RNA, 19 nt, Artificial Sequence
  Description of Artificial Sequence: Synthetic oligonucleotide
gacgacgcuccuuugguag

SEQ ID NO: 1511720 - RNA, 19 nt, Artificial Sequence
  Description of Artificial Sequence: Synthetic oligonucleotide
uguaauugcucugauguua

SEQ ID NO: 1511721 - RNA, 19 nt, Artificial Sequence
  Description of Artificial Sequence: Synthetic oligonucleotide
agcgugugcccuuugccgc

SEQ ID NO: 1511722 - RNA, 19 nt, Artificial Sequence
  Description of Artificial Sequence: Synthetic oligonucleotide
ugaauucugaaaggcaaca

SEQ ID NO: 1511723 - RNA, 19 nt, Artificial Sequence
  Description of Artificial Sequence: Synthetic oligonucleotide
cuucggggcaacuuugagg

SEQ ID NO: 1511724 - RNA, 19 nt, Artificial Sequence
  Description of Artificial Sequence: Synthetic oligonucleotide
uuugccgcggucaccgccg

SEQ ID NO: 1511725 - RNA, 19 nt, Artificial Sequence
  Description of Artificial Sequence: Synthetic oligonucleotide
uacagcucgucaagaaaag

SEQ ID NO: 1511726 - RNA, 19 nt, Artificial Sequence
  Description of Artificial Sequence: Synthetic oligonucleotide
aagacgacgcuccuuuggu

SEQ ID NO: 1511727 - RNA, 19 nt, Artificial Sequence
  Description of Artificial Sequence: Synthetic oligonucleotide
ugacauguaagagccagca

SEQ ID NO: 1511728 - RNA, 19 nt, Artificial Sequence
  Description of Artificial Sequence: Synthetic oligonucleotide
guaaauuccgaagagccca

SEQ ID NO: 1511729 - RNA, 19 nt, Artificial Sequence
  Description of Artificial Sequence: Synthetic oligonucleotide
ugauguuacuuuccccacc

SEQ ID NO: 1511730 - RNA, 19 nt, Artificial Sequence
  Description of Artificial Sequence: Synthetic oligonucleotide
uaucauuucgcaugccuuc

SEQ ID NO: 1511731 - RNA, 19 nt, Artificial Sequence
  Description of Artificial Sequence: Synthetic oligonucleotide
cagaauuucaauaucauuu

SEQ ID NO: 1511732 - RNA, 19 nt, Artificial Sequence
  Description of Artificial Sequence: Synthetic oligonucleotide
uucccaacggcgaaauucu

SEQ ID NO: 1511733 - RNA, 19 nt, Artificial Sequence
  Description of Artificial Sequence: Synthetic oligonucleotide
guaaaugagagguuccuaa

SEQ ID NO: 1511734 - RNA, 19 nt, Artificial Sequence
  Description of Artificial Sequence: Synthetic oligonucleotide
agggaguaaaaucucgaga

SEQ ID NO: 1511735 - RNA, 19 nt, Artificial Sequence
  Description of Artificial Sequence: Synthetic oligonucleotide
gacccaaucucacucagga

SEQ ID NO: 1511736 - RNA, 19 nt, Artificial Sequence
  Description of Artificial Sequence: Synthetic oligonucleotide
cuugauaugugguccagca

SEQ ID NO: 1511737 - RNA, 19 nt, Artificial Sequence
  Description of Artificial Sequence: Synthetic oligonucleotide
cacggagucaauuuguuga

SEQ ID NO: 1511738 - RNA, 19 nt, Artificial Sequence
  Description of Artificial Sequence: Synthetic oligonucleotide
aucuugaaagacgacgcuc

SEQ ID NO: 1511739 - RNA, 19 nt, Artificial Sequence
  Description of Artificial Sequence: Synthetic oligonucleotide
augagagguuccuaaguug

SEQ ID NO: 1511740 - RNA, 19 nt, Artificial Sequence
  Description of Artificial Sequence: Synthetic oligonucleotide
caauacaaaggauuagcca

SEQ ID NO: 1511741 - RNA, 19 nt, Artificial Sequence
  Description of Artificial Sequence: Synthetic oligonucleotide
aguaaaaucucgagaagga

SEQ ID NO: 1511742 - RNA, 19 nt, Artificial Sequence
  Description of Artificial Sequence: Synthetic oligonucleotide
uuuaugacaucagcaucag

SEQ ID NO: 1511743 - RNA, 19 nt, Artificial Sequence
  Description of Artificial Sequence: Synthetic oligonucleotide
aacuccaucagaauuucaa

SEQ ID NO: 1511744 - RNA, 19 nt, Artificial Sequence
  Description of Artificial Sequence: Synthetic oligonucleotide
uggguggugacauguaaga

SEQ ID NO: 1511745 - RNA, 19 nt, Artificial Sequence
  Description of Artificial Sequence: Synthetic oligonucleotide
ggagauaguguaaauuccg

SEQ ID NO: 1511746 - RNA, 19 nt, Artificial Sequence
  Description of Artificial Sequence: Synthetic oligonucleotide
uaguguaggccauauuuuc

SEQ ID NO: 1511747 - RNA, 19 nt, Artificial Sequence
  Description of Artificial Sequence: Synthetic oligonucleotide
aauuucaccuccacgguau

SEQ ID NO: 1511748 - RNA, 19 nt, Artificial Sequence
  Description of Artificial Sequence: Synthetic oligonucleotide
caugccuucuauaguguag

SEQ ID NO: 1511749 - RNA, 19 nt, Artificial Sequence
  Description of Artificial Sequence: Synthetic oligonucleotide
acggguuaucuugaaagac

SEQ ID NO: 1511750 - RNA, 19 nt, Artificial Sequence
  Description of Artificial Sequence: Synthetic oligonucleotide
ugauuacuuccuuuggcaa

SEQ ID NO: 1511751 - RNA, 19 nt, Artificial Sequence
  Description of Artificial Sequence: Synthetic oligonucleotide
caagacguaguaaaugaga

SEQ ID NO: 1511752 - RNA, 19 nt, Artificial Sequence
  Description of Artificial Sequence: Synthetic oligonucleotide
gaagcaaucaccaaaccau

SEQ ID NO: 1511753 - RNA, 19 nt, Artificial Sequence
  Description of Artificial Sequence: Synthetic oligonucleotide
ugcuccuguaucuccaaug

SEQ ID NO: 1511754 - RNA, 19 nt, Artificial Sequence
  Description of Artificial Sequence: Synthetic oligonucleotide
uaggccauauuuucccuug

SEQ ID NO: 1511755 - RNA, 19 nt, Artificial Sequence
  Description of Artificial Sequence: Synthetic oligonucleotide
cugauuacuuccuuuggca

SEQ ID NO: 1511756 - RNA, 19 nt, Artificial Sequence
  Description of Artificial Sequence: Synthetic oligonucleotide
uuuugcucccgaauuucac

SEQ ID NO: 1511757 - RNA, 19 nt, Artificial Sequence
  Description of Artificial Sequence: Synthetic oligonucleotide
aaggacccggccuugcuga

SEQ ID NO: 1511758 - RNA, 19 nt, Artificial Sequence
  Description of Artificial Sequence: Synthetic oligonucleotide
gucaaucuuuagcugagac

SEQ ID NO: 1511759 - RNA, 19 nt, Artificial Sequence
  Description of Artificial Sequence: Synthetic oligonucleotide
agccaauucuugauaaggg

SEQ ID NO: 1511760 - RNA, 19 nt, Artificial Sequence
  Description of Artificial Sequence: Synthetic oligonucleotide
caaguagggccugugaccc

SEQ ID NO: 1511761 - RNA, 19 nt, Artificial Sequence
  Description of Artificial Sequence: Synthetic oligonucleotide
gggaguaaaaucucgagaa

SEQ ID NO: 1511762 - RNA, 19 nt, Artificial Sequence
  Description of Artificial Sequence: Synthetic oligonucleotide
agguguaugucccaaguuu

SEQ ID NO: 1511763 - RNA, 19 nt, Artificial Sequence
  Description of Artificial Sequence: Synthetic oligonucleotide
aacgaauaagccaauucuu

SEQ ID NO: 1511764 - RNA, 19 nt, Artificial Sequence
  Description of Artificial Sequence: Synthetic oligonucleotide
ucuagcgugugcccuuugc

SEQ ID NO: 1511765 - RNA, 19 nt, Artificial Sequence
  Description of Artificial Sequence: Synthetic oligonucleotide
uucuugauaagggagcaua

SEQ ID NO: 1511766 - RNA, 19 nt, Artificial Sequence
  Description of Artificial Sequence: Synthetic oligonucleotide
agcccagaaucugaguagc

SEQ ID NO: 1511767 - RNA, 19 nt, Artificial Sequence
  Description of Artificial Sequence: Synthetic oligonucleotide
augacucacaccaagucca

SEQ ID NO: 1511768 - RNA, 19 nt, Artificial Sequence
  Description of Artificial Sequence: Synthetic oligonucleotide
ccuauagucaggacaauac

SEQ ID NO: 1511769 - RNA, 19 nt, Artificial Sequence
  Description of Artificial Sequence: Synthetic oligonucleotide
gauaagggagcauaguuuu

SEQ ID NO: 1511770 - RNA, 19 nt, Artificial Sequence
  Description of Artificial Sequence: Synthetic oligonucleotide
uccgaagagcccagaaucu

SEQ ID NO: 1511771 - RNA, 19 nt, Artificial Sequence
  Description of Artificial Sequence: Synthetic oligonucleotide
ugugacccaaucucacuca

SEQ ID NO: 1511772 - RNA, 19 nt, Artificial Sequence
  Description of Artificial Sequence: Synthetic oligonucleotide
aguacacuaaaugcauuug

SEQ ID NO: 1511773 - RNA, 19 nt, Artificial Sequence
  Description of Artificial Sequence: Synthetic oligonucleotide
aaucaccaaaccauuuggu

SEQ ID NO: 1511774 - RNA, 19 nt, Artificial Sequence
  Description of Artificial Sequence: Synthetic oligonucleotide
gccaagguauucuuguagg

SEQ ID NO: 1511775 - RNA, 19 nt, Artificial Sequence
  Description of Artificial Sequence: Synthetic oligonucleotide
cuuuccccacccuauaguc

SEQ ID NO: 1511776 - RNA, 19 nt, Artificial Sequence
  Description of Artificial Sequence: Synthetic oligonucleotide
caaaggauuagccaaggua

SEQ ID NO: 1511777 - RNA, 19 nt, Artificial Sequence
  Description of Artificial Sequence: Synthetic oligonucleotide
uuuccccacccuauaguca

SEQ ID NO: 1511778 - RNA, 19 nt, Artificial Sequence
  Description of Artificial Sequence: Synthetic oligonucleotide
uugauaugugguccagcac

SEQ ID NO: 1511779 - RNA, 19 nt, Artificial Sequence
  Description of Artificial Sequence: Synthetic oligonucleotide
cuacaauagcagcauggac

SEQ ID NO: 1511780 - RNA, 19 nt, Artificial Sequence
  Description of Artificial Sequence: Synthetic oligonucleotide
cacacuuaauuuaccacca

SEQ ID NO: 1511781 - RNA, 19 nt, Artificial Sequence
  Description of Artificial Sequence: Synthetic oligonucleotide
uaguaaaugagagguuccu

SEQ ID NO: 1511782 - RNA, 19 nt, Artificial Sequence
  Description of Artificial Sequence: Synthetic oligonucleotide
uucaccuccacgguaugug

SEQ ID NO: 1511783 - RNA, 19 nt, Artificial Sequence
  Description of Artificial Sequence: Synthetic oligonucleotide
cacgguauguggcuuuugc

SEQ ID NO: 1511784 - RNA, 19 nt, Artificial Sequence
  Description of Artificial Sequence: Synthetic oligonucleotide
uugagaaauuguucagcaa

SEQ ID NO: 1511785 - RNA, 19 nt, Artificial Sequence
  Description of Artificial Sequence: Synthetic oligonucleotide
uucgcaugccuucuauagu

SEQ ID NO: 1511786 - RNA, 19 nt, Artificial Sequence
  Description of Artificial Sequence: Synthetic oligonucleotide
guaaaaucucgagaaggac

SEQ ID NO: 1511787 - RNA, 19 nt, Artificial Sequence
  Description of Artificial Sequence: Synthetic oligonucleotide
cauggcucuagcgugugcc

SEQ ID NO: 1511788 - RNA, 19 nt, Artificial Sequence
  Description of Artificial Sequence: Synthetic oligonucleotide
uuacuugguuguaggcagc

SEQ ID NO: 1511789 - RNA, 19 nt, Artificial Sequence
  Description of Artificial Sequence: Synthetic oligonucleotide
cuagcgugugcccuuugcc

SEQ ID NO: 1511790 - RNA, 19 nt, Artificial Sequence
  Description of Artificial Sequence: Synthetic oligonucleotide
agucaauuuguugaaggaa

SEQ ID NO: 1511791 - RNA, 19 nt, Artificial Sequence
  Description of Artificial Sequence: Synthetic oligonucleotide
ccuucuauaguguaggcca

SEQ ID NO: 1511792 - RNA, 19 nt, Artificial Sequence
  Description of Artificial Sequence: Synthetic oligonucleotide
ccacggguuaucuugaaag

SEQ ID NO: 1511793 - RNA, 19 nt, Artificial Sequence
  Description of Artificial Sequence: Synthetic oligonucleotide
guaauugcucugauguuac

SEQ ID NO: 1511794 - RNA, 19 nt, Artificial Sequence
  Description of Artificial Sequence: Synthetic oligonucleotide
uccucauaucugcugccug

SEQ ID NO: 1511795 - RNA, 19 nt, Artificial Sequence
  Description of Artificial Sequence: Synthetic oligonucleotide
auaguuuuccagagaagca

SEQ ID NO: 1511796 - RNA, 19 nt, Artificial Sequence
  Description of Artificial Sequence: Synthetic oligonucleotide
ucagccacggagucaauuu

SEQ ID NO: 1511797 - RNA, 19 nt, Artificial Sequence
  Description of Artificial Sequence: Synthetic oligonucleotide
ucaauuccacggguuaucu

SEQ ID NO: 1511798 - RNA, 19 nt, Artificial Sequence
  Description of Artificial Sequence: Synthetic oligonucleotide
uguaggccauauuuucccu

SEQ ID NO: 1511799 - RNA, 19 nt, Artificial Sequence
  Description of Artificial Sequence: Synthetic oligonucleotide
agcucgucaagaaaaggug

SEQ ID NO: 1511800 - RNA, 19 nt, Artificial Sequence
  Description of Artificial Sequence: Synthetic oligonucleotide
uaaccuucggggcaacuuu

SEQ ID NO: 1511801 - RNA, 19 nt, Artificial Sequence
  Description of Artificial Sequence: Synthetic oligonucleotide
gcugauuacuuccuuuggc

SEQ ID NO: 1511802 - RNA, 19 nt, Artificial Sequence
  Description of Artificial Sequence: Synthetic oligonucleotide
gguaauuugguaaacucaa

SEQ ID NO: 1511803 - RNA, 19 nt, Artificial Sequence
  Description of Artificial Sequence: Synthetic oligonucleotide
gaaggaaagugggugguga

SEQ ID NO: 1511804 - RNA, 19 nt, Artificial Sequence
  Description of Artificial Sequence: Synthetic oligonucleotide
agggagcauaguuuuccag

SEQ ID NO: 1511805 - RNA, 19 nt, Artificial Sequence
  Description of Artificial Sequence: Synthetic oligonucleotide
agguauucuuguaggcagc

SEQ ID NO: 1511806 - RNA, 19 nt, Artificial Sequence
  Description of Artificial Sequence: Synthetic oligonucleotide
cugugacccaaucucacuc

SEQ ID NO: 1511807 - RNA, 19 nt, Artificial Sequence
  Description of Artificial Sequence: Synthetic oligonucleotide
acagcucgucaagaaaagg

SEQ ID NO: 1511808 - RNA, 19 nt, Artificial Sequence
  Description of Artificial Sequence: Synthetic oligonucleotide
gcuuuaacgaauaagccaa

SEQ ID NO: 1511809 - RNA, 19 nt, Artificial Sequence
  Description of Artificial Sequence: Synthetic oligonucleotide
uccuaaguuguuggagucc

SEQ ID NO: 1511810 - RNA, 19 nt, Artificial Sequence
  Description of Artificial Sequence: Synthetic oligonucleotide
cugauguuacuuuccccac

SEQ ID NO: 1511811 - RNA, 19 nt, Artificial Sequence
  Description of Artificial Sequence: Synthetic oligonucleotide
gagauaguguaaauuccga

SEQ ID NO: 1511812 - RNA, 19 nt, Artificial Sequence
  Description of Artificial Sequence: Synthetic oligonucleotide
uauuguugccccucuugau

SEQ ID NO: 1511813 - RNA, 19 nt, Artificial Sequence
  Description of Artificial Sequence: Synthetic oligonucleotide
uuuaacgaauaagccaauu

SEQ ID NO: 1511814 - RNA, 19 nt, Artificial Sequence
  Description of Artificial Sequence: Synthetic oligonucleotide
gcagagguacuccugcagg

SEQ ID NO: 1511815 - RNA, 19 nt, Artificial Sequence
  Description of Artificial Sequence: Synthetic oligonucleotide
aggacaauacaaaggauua

SEQ ID NO: 1511816 - RNA, 19 nt, Artificial Sequence
  Description of Artificial Sequence: Synthetic oligonucleotide
gaaggacccggccuugcug

SEQ ID NO: 1511817 - RNA, 19 nt, Artificial Sequence
  Description of Artificial Sequence: Synthetic oligonucleotide
uugcuucaauuccacgggu

SEQ ID NO: 1511818 - RNA, 19 nt, Artificial Sequence
  Description of Artificial Sequence: Synthetic oligonucleotide
guuacagcucgucaagaaa

SEQ ID NO: 1511819 - RNA, 19 nt, Artificial Sequence
  Description of Artificial Sequence: Synthetic oligonucleotide
ugaagugguucugaauaaa

SEQ ID NO: 1511820 - RNA, 19 nt, Artificial Sequence
  Description of Artificial Sequence: Synthetic oligonucleotide
gcuuugucaaucuuuagcu

SEQ ID NO: 1511821 - RNA, 19 nt, Artificial Sequence
  Description of Artificial Sequence: Synthetic oligonucleotide
cagcuacuucccaacggcg

SEQ ID NO: 1511822 - RNA, 19 nt, Artificial Sequence
  Description of Artificial Sequence: Synthetic oligonucleotide
cacccuauagucaggacaa

SEQ ID NO: 1511823 - RNA, 19 nt, Artificial Sequence
  Description of Artificial Sequence: Synthetic oligonucleotide
auuagccaagguauucuug

SEQ ID NO: 1511824 - RNA, 19 nt, Artificial Sequence
  Description of Artificial Sequence: Synthetic oligonucleotide
gccgcaguagcgaagaaag

SEQ ID NO: 1511825 - RNA, 19 nt, Artificial Sequence
  Description of Artificial Sequence: Synthetic oligonucleotide
guauguggcuuuugcacca

SEQ ID NO: 1511826 - RNA, 19 nt, Artificial Sequence
  Description of Artificial Sequence: Synthetic oligonucleotide
uucaauuccacggguuauc

SEQ ID NO: 1511827 - RNA, 19 nt, Artificial Sequence
  Description of Artificial Sequence: Synthetic oligonucleotide
acuagaugcaagacguagu

SEQ ID NO: 1511828 - RNA, 19 nt, Artificial Sequence
  Description of Artificial Sequence: Synthetic oligonucleotide
guuuccuugagcaacugcu

SEQ ID NO: 1511829 - RNA, 19 nt, Artificial Sequence
  Description of Artificial Sequence: Synthetic oligonucleotide
aucucgagaaggacccggc

SEQ ID NO: 1511830 - RNA, 19 nt, Artificial Sequence
  Description of Artificial Sequence: Synthetic oligonucleotide
gaagaaagauggugucgga

SEQ ID NO: 1511831 - RNA, 19 nt, Artificial Sequence
  Description of Artificial Sequence: Synthetic oligonucleotide
gcagcuacuucccaacggc

SEQ ID NO: 1511832 - RNA, 19 nt, Artificial Sequence
  Description of Artificial Sequence: Synthetic oligonucleotide
cuaaaugcauuugcuccug

SEQ ID NO: 1511833 - RNA, 19 nt, Artificial Sequence
  Description of Artificial Sequence: Synthetic oligonucleotide
ggaacuucauggcucuagc

SEQ ID NO: 1511834 - RNA, 19 nt, Artificial Sequence
  Description of Artificial Sequence: Synthetic oligonucleotide
aguggguggugacauguaa

SEQ ID NO: 1511835 - RNA, 19 nt, Artificial Sequence
  Description of Artificial Sequence: Synthetic oligonucleotide
cacgagucugugaauucug

SEQ ID NO: 1511836 - RNA, 19 nt, Artificial Sequence
  Description of Artificial Sequence: Synthetic oligonucleotide
ggcugauuacuuccuuugg

SEQ ID NO: 1511837 - RNA, 19 nt, Artificial Sequence
  Description of Artificial Sequence: Synthetic oligonucleotide
ucacacgagucugugaauu

SEQ ID NO: 1511838 - RNA, 19 nt, Artificial Sequence
  Description of Artificial Sequence: Synthetic oligonucleotide
uuaaccuucggggcaacuu

SEQ ID NO: 1511839 - RNA, 19 nt, Artificial Sequence
  Description of Artificial Sequence: Synthetic oligonucleotide
ugcuucaauuccacggguu

SEQ ID NO: 1511840 - RNA, 19 nt, Artificial Sequence
  Description of Artificial Sequence: Synthetic oligonucleotide
gggagauaguguaaauucc

SEQ ID NO: 1511841 - RNA, 19 nt, Artificial Sequence
  Description of Artificial Sequence: Synthetic oligonucleotide
agguugucuccauuuugcu

SEQ ID NO: 1511842 - RNA, 19 nt, Artificial Sequence
  Description of Artificial Sequence: Synthetic oligonucleotide
uuacuuuccccacccuaua

SEQ ID NO: 1511843 - RNA, 19 nt, Artificial Sequence
  Description of Artificial Sequence: Synthetic oligonucleotide
uggaguccucauaucugcu

SEQ ID NO: 1511844 - RNA, 19 nt, Artificial Sequence
  Description of Artificial Sequence: Synthetic oligonucleotide
ugccuucuauaguguaggc

SEQ ID NO: 1511845 - RNA, 19 nt, Artificial Sequence
  Description of Artificial Sequence: Synthetic oligonucleotide
ggcagcuacuucccaacgg

SEQ ID NO: 1511846 - RNA, 19 nt, Artificial Sequence
  Description of Artificial Sequence: Synthetic oligonucleotide
cauguaagagccagcaagu

SEQ ID NO: 1511847 - RNA, 19 nt, Artificial Sequence
  Description of Artificial Sequence: Synthetic oligonucleotide
uccacggguuaucuugaaa

SEQ ID NO: 1511848 - RNA, 19 nt, Artificial Sequence
  Description of Artificial Sequence: Synthetic oligonucleotide
acggagucaauuuguugaa

SEQ ID NO: 1511849 - RNA, 19 nt, Artificial Sequence
  Description of Artificial Sequence: Synthetic oligonucleotide
acuugugaagugguucuga

SEQ ID NO: 1511850 - RNA, 19 nt, Artificial Sequence
  Description of Artificial Sequence: Synthetic oligonucleotide
acuuguuucaggacagaau

SEQ ID NO: 1511851 - RNA, 19 nt, Artificial Sequence
  Description of Artificial Sequence: Synthetic oligonucleotide
acggcgaaauucuggugcu

SEQ ID NO: 1511852 - RNA, 19 nt, Artificial Sequence
  Description of Artificial Sequence: Synthetic oligonucleotide
caaucucacucaggaaacc

SEQ ID NO: 1511853 - RNA, 19 nt, Artificial Sequence
  Description of Artificial Sequence: Synthetic oligonucleotide
ucaagauccucaggcugca

SEQ ID NO: 1511854 - RNA, 19 nt, Artificial Sequence
  Description of Artificial Sequence: Synthetic oligonucleotide
acacgagucugugaauucu

SEQ ID NO: 1511855 - RNA, 19 nt, Artificial Sequence
  Description of Artificial Sequence: Synthetic oligonucleotide
caggacaauacaaaggauu

SEQ ID NO: 1511856 - RNA, 19 nt, Artificial Sequence
  Description of Artificial Sequence: Synthetic oligonucleotide
ucgucaagaaaagguguau

SEQ ID NO: 1511857 - RNA, 19 nt, Artificial Sequence
  Description of Artificial Sequence: Synthetic oligonucleotide
auuucaccuccacgguaug

SEQ ID NO: 1511858 - RNA, 19 nt, Artificial Sequence
  Description of Artificial Sequence: Synthetic oligonucleotide
aagcaaucaccaaaccauu

SEQ ID NO: 1511859 - RNA, 19 nt, Artificial Sequence
  Description of Artificial Sequence: Synthetic oligonucleotide
cucauguugagaaauuguu

SEQ ID NO: 1511860 - RNA, 19 nt, Artificial Sequence
  Description of Artificial Sequence: Synthetic oligonucleotide
ggacaauacaaaggauuag

SEQ ID NO: 1511861 - RNA, 19 nt, Artificial Sequence
  Description of Artificial Sequence: Synthetic oligonucleotide
uagaugcaagacguaguaa

SEQ ID NO: 1511862 - RNA, 19 nt, Artificial Sequence
  Description of Artificial Sequence: Synthetic oligonucleotide
ucccgaauuucaccuccac

SEQ ID NO: 1511863 - RNA, 19 nt, Artificial Sequence
  Description of Artificial Sequence: Synthetic oligonucleotide
gcuggcauuaaaugcagaa

SEQ ID NO: 1511864 - RNA, 19 nt, Artificial Sequence
  Description of Artificial Sequence: Synthetic oligonucleotide
gcaacuuugagggaguaaa

SEQ ID NO: 1511865 - RNA, 19 nt, Artificial Sequence
  Description of Artificial Sequence: Synthetic oligonucleotide
gagcauaguuuuccagaga

SEQ ID NO: 1511866 - RNA, 19 nt, Artificial Sequence
  Description of Artificial Sequence: Synthetic oligonucleotide
aguaaaugagagguuccua

SEQ ID NO: 1511867 - RNA, 19 nt, Artificial Sequence
  Description of Artificial Sequence: Synthetic oligonucleotide
aaggauuagccaagguauu

SEQ ID NO: 1511868 - RNA, 19 nt, Artificial Sequence
  Description of Artificial Sequence: Synthetic oligonucleotide
ccucauaucugcugccugc

SEQ ID NO: 1511869 - RNA, 19 nt, Artificial Sequence
  Description of Artificial Sequence: Synthetic oligonucleotide
agguuccuaaguuguugga

SEQ ID NO: 1511870 - RNA, 19 nt, Artificial Sequence
  Description of Artificial Sequence: Synthetic oligonucleotide
cacacgagucugugaauuc

SEQ ID NO: 1511871 - RNA, 19 nt, Artificial Sequence
  Description of Artificial Sequence: Synthetic oligonucleotide
ugacucacaccaaguccaa

SEQ ID NO: 1511872 - RNA, 19 nt, Artificial Sequence
  Description of Artificial Sequence: Synthetic oligonucleotide
ggaguccucauaucugcug

SEQ ID NO: 1511873 - RNA, 19 nt, Artificial Sequence
  Description of Artificial Sequence: Synthetic oligonucleotide
uuuucccuuguugcugcca

SEQ ID NO: 1511874 - RNA, 19 nt, Artificial Sequence
  Description of Artificial Sequence: Synthetic oligonucleotide
gcgaagaaagauggugucg

SEQ ID NO: 1511875 - RNA, 19 nt, Artificial Sequence
  Description of Artificial Sequence: Synthetic oligonucleotide
acacuuaauuuaccaccaa

SEQ ID NO: 1511876 - RNA, 19 nt, Artificial Sequence
  Description of Artificial Sequence: Synthetic oligonucleotide
aucucacucaggaaacccu

SEQ ID NO: 1511877 - RNA, 19 nt, Artificial Sequence
  Description of Artificial Sequence: Synthetic oligonucleotide
ugucaaucuuuagcugaga

SEQ ID NO: 1511878 - RNA, 19 nt, Artificial Sequence
  Description of Artificial Sequence: Synthetic oligonucleotide
cccaacggcgaaauucugg

SEQ ID NO: 1511879 - RNA, 19 nt, Artificial Sequence
  Description of Artificial Sequence: Synthetic oligonucleotide
uuguuggaguccucauauc

SEQ ID NO: 1511880 - RNA, 19 nt, Artificial Sequence
  Description of Artificial Sequence: Synthetic oligonucleotide
cucgucaagaaaaggugua

SEQ ID NO: 1511881 - RNA, 19 nt, Artificial Sequence
  Description of Artificial Sequence: Synthetic oligonucleotide
gaaaggcaacagcuuuguc

SEQ ID NO: 1511882 - RNA, 19 nt, Artificial Sequence
  Description of Artificial Sequence: Synthetic oligonucleotide
caucaaaaggcugauuacu

SEQ ID NO: 1511883 - RNA, 19 nt, Artificial Sequence
  Description of Artificial Sequence: Synthetic oligonucleotide
cagcucgucaagaaaaggu

SEQ ID NO: 1511884 - RNA, 19 nt, Artificial Sequence
  Description of Artificial Sequence: Synthetic oligonucleotide
ucauuucgcaugccuucua

SEQ ID NO: 1511885 - RNA, 19 nt, Artificial Sequence
  Description of Artificial Sequence: Synthetic oligonucleotide
uguugccccucuugauaug

SEQ ID NO: 1511886 - RNA, 19 nt, Artificial Sequence
  Description of Artificial Sequence: Synthetic oligonucleotide
gcugccacacuuaauuuac

SEQ ID NO: 1511887 - RNA, 19 nt, Artificial Sequence
  Description of Artificial Sequence: Synthetic oligonucleotide
cagccacggagucaauuug

SEQ ID NO: 1511888 - RNA, 19 nt, Artificial Sequence
  Description of Artificial Sequence: Synthetic oligonucleotide
ucccaacggcgaaauucug

SEQ ID NO: 1511889 - RNA, 19 nt, Artificial Sequence
  Description of Artificial Sequence: Synthetic oligonucleotide
aucugaguagcuggcauua

SEQ ID NO: 1511890 - RNA, 19 nt, Artificial Sequence
  Description of Artificial Sequence: Synthetic oligonucleotide
uuuaaccuucggggcaacu

SEQ ID NO: 1511891 - RNA, 19 nt, Artificial Sequence
  Description of Artificial Sequence: Synthetic oligonucleotide
uucauggcucuagcgugug

SEQ ID NO: 1511892 - RNA, 19 nt, Artificial Sequence
  Description of Artificial Sequence: Synthetic oligonucleotide
cucuugauaugugguccag

SEQ ID NO: 1511893 - RNA, 19 nt, Artificial Sequence
  Description of Artificial Sequence: Synthetic oligonucleotide
cccgaauuucaccuccacg

SEQ ID NO: 1511894 - RNA, 19 nt, Artificial Sequence
  Description of Artificial Sequence: Synthetic oligonucleotide
caacggcgaaauucuggug

SEQ ID NO: 1511895 - RNA, 19 nt, Artificial Sequence
  Description of Artificial Sequence: Synthetic oligonucleotide
gcucccgaauuucaccucc

SEQ ID NO: 1511896 - RNA, 19 nt, Artificial Sequence
  Description of Artificial Sequence: Synthetic oligonucleotide
ugcccuuugccgcggucac

SEQ ID NO: 1511897 - RNA, 19 nt, Artificial Sequence
  Description of Artificial Sequence: Synthetic oligonucleotide
agcuacuucccaacggcga

SEQ ID NO: 1511898 - RNA, 19 nt, Artificial Sequence
  Description of Artificial Sequence: Synthetic oligonucleotide
gauuagccaagguauucuu

SEQ ID NO: 1511899 - RNA, 19 nt, Artificial Sequence
  Description of Artificial Sequence: Synthetic oligonucleotide
cuaaguuguuggaguccuc

SEQ ID NO: 1511900 - RNA, 19 nt, Artificial Sequence
  Description of Artificial Sequence: Synthetic oligonucleotide
aguagcgaagaaagauggu

SEQ ID NO: 1511901 - RNA, 19 nt, Artificial Sequence
  Description of Artificial Sequence: Synthetic oligonucleotide
gaugcaagacguaguaaau

SEQ ID NO: 1511902 - RNA, 19 nt, Artificial Sequence
  Description of Artificial Sequence: Synthetic oligonucleotide
aucacacgagucugugaau

SEQ ID NO: 1511903 - RNA, 19 nt, Artificial Sequence
  Description of Artificial Sequence: Synthetic oligonucleotide
gcuacaauagcagcaugga

SEQ ID NO: 1511904 - RNA, 19 nt, Artificial Sequence
  Description of Artificial Sequence: Synthetic oligonucleotide
cugcuacaauagcagcaug

SEQ ID NO: 1511905 - RNA, 19 nt, Artificial Sequence
  Description of Artificial Sequence: Synthetic oligonucleotide
accccucauguugagaaau

SEQ ID NO: 1511906 - RNA, 19 nt, Artificial Sequence
  Description of Artificial Sequence: Synthetic oligonucleotide
ggcagccuugauaacauca

SEQ ID NO: 1511907 - RNA, 19 nt, Artificial Sequence
  Description of Artificial Sequence: Synthetic oligonucleotide
caaucacacgagucuguga

SEQ ID NO: 1511908 - RNA, 19 nt, Artificial Sequence
  Description of Artificial Sequence: Synthetic oligonucleotide
aaacuagaugcaagacgua

SEQ ID NO: 1511909 - RNA, 19 nt, Artificial Sequence
  Description of Artificial Sequence: Synthetic oligonucleotide
auuccacggguuaucuuga

SEQ ID NO: 1511910 - RNA, 19 nt, Artificial Sequence
  Description of Artificial Sequence: Synthetic oligonucleotide
aggccauauuuucccuugu

SEQ ID NO: 1511911 - RNA, 19 nt, Artificial Sequence
  Description of Artificial Sequence: Synthetic oligonucleotide
acgacgcuccuuugguagu

SEQ ID NO: 1511912 - RNA, 19 nt, Artificial Sequence
  Description of Artificial Sequence: Synthetic oligonucleotide
aguagggccugugacccaa

SEQ ID NO: 1511913 - RNA, 19 nt, Artificial Sequence
  Description of Artificial Sequence: Synthetic oligonucleotide
ugccugcuuuaacgaauaa

SEQ ID NO: 1511914 - RNA, 19 nt, Artificial Sequence
  Description of Artificial Sequence: Synthetic oligonucleotide
gcauaguuuuccagagaag

SEQ ID NO: 1511915 - RNA, 19 nt, Artificial Sequence
  Description of Artificial Sequence: Synthetic oligonucleotide
ucugaguagcuggcauuaa

SEQ ID NO: 1511916 - RNA, 19 nt, Artificial Sequence
  Description of Artificial Sequence: Synthetic oligonucleotide
uuuuaaccuucggggcaac

SEQ ID NO: 1511917 - RNA, 19 nt, Artificial Sequence
  Description of Artificial Sequence: Synthetic oligonucleotide
ccacccuauagucaggaca

SEQ ID NO: 1511918 - RNA, 19 nt, Artificial Sequence
  Description of Artificial Sequence: Synthetic oligonucleotide
ucaccgccgcaguagcgaa

SEQ ID NO: 1511919 - RNA, 19 nt, Artificial Sequence
  Description of Artificial Sequence: Synthetic oligonucleotide
auguaagagccagcaagua

SEQ ID NO: 1511920 - RNA, 19 nt, Artificial Sequence
  Description of Artificial Sequence: Synthetic oligonucleotide
gguauucuuguaggcagca

SEQ ID NO: 1511921 - RNA, 19 nt, Artificial Sequence
  Description of Artificial Sequence: Synthetic oligonucleotide
accgccgcaguagcgaaga

SEQ ID NO: 1511922 - RNA, 19 nt, Artificial Sequence
  Description of Artificial Sequence: Synthetic oligonucleotide
gcagccuugauaacaucac

SEQ ID NO: 1511923 - RNA, 19 nt, Artificial Sequence
  Description of Artificial Sequence: Synthetic oligonucleotide
gggcagcuacuucccaacg

SEQ ID NO: 1511924 - RNA, 19 nt, Artificial Sequence
  Description of Artificial Sequence: Synthetic oligonucleotide
agacugaagggcagcuacu

SEQ ID NO: 1511925 - RNA, 19 nt, Artificial Sequence
  Description of Artificial Sequence: Synthetic oligonucleotide
gcagccuuuaugacaucag

SEQ ID NO: 1511926 - RNA, 19 nt, Artificial Sequence
  Description of Artificial Sequence: Synthetic oligonucleotide
guuucaggacagaaugacu

SEQ ID NO: 1511927 - RNA, 19 nt, Artificial Sequence
  Description of Artificial Sequence: Synthetic oligonucleotide
gacucacaccaaguccaac

SEQ ID NO: 1511928 - RNA, 19 nt, Artificial Sequence
  Description of Artificial Sequence: Synthetic oligonucleotide
cuugauaagggagcauagu

SEQ ID NO: 1511929 - RNA, 19 nt, Artificial Sequence
  Description of Artificial Sequence: Synthetic oligonucleotide
cccuuugccgcggucaccg

SEQ ID NO: 1511930 - RNA, 19 nt, Artificial Sequence
  Description of Artificial Sequence: Synthetic oligonucleotide
cuugguuguaggcagccuu

SEQ ID NO: 1511931 - RNA, 19 nt, Artificial Sequence
  Description of Artificial Sequence: Synthetic oligonucleotide
agacgacgcuccuuuggua

SEQ ID NO: 1511932 - RNA, 19 nt, Artificial Sequence
  Description of Artificial Sequence: Synthetic oligonucleotide
gucaccgccgcaguagcga

SEQ ID NO: 1511933 - RNA, 19 nt, Artificial Sequence
  Description of Artificial Sequence: Synthetic oligonucleotide
augagguauccagcuuuca

SEQ ID NO: 1511934 - RNA, 19 nt, Artificial Sequence
  Description of Artificial Sequence: Synthetic oligonucleotide
cucgagaaggacccggccu

SEQ ID NO: 1511935 - RNA, 19 nt, Artificial Sequence
  Description of Artificial Sequence: Synthetic oligonucleotide
ggugguauuguugccccuc

SEQ ID NO: 1511936 - RNA, 19 nt, Artificial Sequence
  Description of Artificial Sequence: Synthetic oligonucleotide
cauaucugcugccugcuuu

SEQ ID NO: 1511937 - RNA, 19 nt, Artificial Sequence
  Description of Artificial Sequence: Synthetic oligonucleotide
acagaaugacucacaccaa

SEQ ID NO: 1511938 - RNA, 19 nt, Artificial Sequence
  Description of Artificial Sequence: Synthetic oligonucleotide
cugccugcuuuaacgaaua

SEQ ID NO: 1511939 - RNA, 19 nt, Artificial Sequence
  Description of Artificial Sequence: Synthetic oligonucleotide
gcacuugugaagugguucu

SEQ ID NO: 1511940 - RNA, 19 nt, Artificial Sequence
  Description of Artificial Sequence: Synthetic oligonucleotide
gcuacuucccaacggcgaa

SEQ ID NO: 1511941 - RNA, 19 nt, Artificial Sequence
  Description of Artificial Sequence: Synthetic oligonucleotide
ggauuagccaagguauucu

SEQ ID NO: 1511942 - RNA, 19 nt, Artificial Sequence
  Description of Artificial Sequence: Synthetic oligonucleotide
cagcaaguagggccuguga

SEQ ID NO: 1511943 - RNA, 19 nt, Artificial Sequence
  Description of Artificial Sequence: Synthetic oligonucleotide
gcgugugcccuuugccgcg

SEQ ID NO: 1511944 - RNA, 19 nt, Artificial Sequence
  Description of Artificial Sequence: Synthetic oligonucleotide
cuugaaagacgacgcuccu

SEQ ID NO: 1511945 - RNA, 19 nt, Artificial Sequence
  Description of Artificial Sequence: Synthetic oligonucleotide
cuuuaacgaauaagccaau

SEQ ID NO: 1511946 - RNA, 19 nt, Artificial Sequence
  Description of Artificial Sequence: Synthetic oligonucleotide
acguaguaaaugagagguu

SEQ ID NO: 1511947 - RNA, 19 nt, Artificial Sequence
  Description of Artificial Sequence: Synthetic oligonucleotide
gacgcuccuuugguaguca

SEQ ID NO: 1511948 - RNA, 19 nt, Artificial Sequence
  Description of Artificial Sequence: Synthetic oligonucleotide
cucccgaauuucaccucca

SEQ ID NO: 1511949 - RNA, 19 nt, Artificial Sequence
  Description of Artificial Sequence: Synthetic oligonucleotide
cuucuauaguguaggccau

SEQ ID NO: 1511950 - RNA, 19 nt, Artificial Sequence
  Description of Artificial Sequence: Synthetic oligonucleotide
acgcuccuuugguagucaa

SEQ ID NO: 1511951 - RNA, 19 nt, Artificial Sequence
  Description of Artificial Sequence: Synthetic oligonucleotide
ggaaaguggguggugacau

SEQ ID NO: 1511952 - RNA, 19 nt, Artificial Sequence
  Description of Artificial Sequence: Synthetic oligonucleotide
ccuucggggcaacuuugag

SEQ ID NO: 1511953 - RNA, 19 nt, Artificial Sequence
  Description of Artificial Sequence: Synthetic oligonucleotide
agcuugggagauaguguaa

SEQ ID NO: 1511954 - RNA, 19 nt, Artificial Sequence
  Description of Artificial Sequence: Synthetic oligonucleotide
uccacgguauguggcuuuu

SEQ ID NO: 1511955 - RNA, 19 nt, Artificial Sequence
  Description of Artificial Sequence: Synthetic oligonucleotide
cauuucgcaugccuucuau

SEQ ID NO: 1511956 - RNA, 19 nt, Artificial Sequence
  Description of Artificial Sequence: Synthetic oligonucleotide
uugccgcggucaccgccgc

SEQ ID NO: 1511957 - RNA, 19 nt, Artificial Sequence
  Description of Artificial Sequence: Synthetic oligonucleotide
guaggccauauuuucccuu

SEQ ID NO: 1511958 - RNA, 19 nt, Artificial Sequence
  Description of Artificial Sequence: Synthetic oligonucleotide
caccgccgcaguagcgaag

SEQ ID NO: 1511959 - RNA, 19 nt, Artificial Sequence
  Description of Artificial Sequence: Synthetic oligonucleotide
accuucggggcaacuuuga

SEQ ID NO: 1511960 - RNA, 19 nt, Artificial Sequence
  Description of Artificial Sequence: Synthetic oligonucleotide
ggcaacacucuggcucagg

SEQ ID NO: 1511961 - RNA, 19 nt, Artificial Sequence
  Description of Artificial Sequence: Synthetic oligonucleotide
ccaacggcgaaauucuggu

SEQ ID NO: 1511962 - RNA, 19 nt, Artificial Sequence
  Description of Artificial Sequence: Synthetic oligonucleotide
ggaaacccucugaagucuc

SEQ ID NO: 1511963 - RNA, 19 nt, Artificial Sequence
  Description of Artificial Sequence: Synthetic oligonucleotide
cugaaccaaggccaccccu

SEQ ID NO: 1511964 - RNA, 19 nt, Artificial Sequence
  Description of Artificial Sequence: Synthetic oligonucleotide
ccucauguugagaaauugu

SEQ ID NO: 1511965 - RNA, 19 nt, Artificial Sequence
  Description of Artificial Sequence: Synthetic oligonucleotide
gcggucaccgccgcaguag

SEQ ID NO: 1511966 - RNA, 19 nt, Artificial Sequence
  Description of Artificial Sequence: Synthetic oligonucleotide
cggggcaacuuugagggag

SEQ ID NO: 1511967 - RNA, 19 nt, Artificial Sequence
  Description of Artificial Sequence: Synthetic oligonucleotide
gcucgucaagaaaaggugu

SEQ ID NO: 1511968 - RNA, 19 nt, Artificial Sequence
  Description of Artificial Sequence: Synthetic oligonucleotide
cucuagcgugugcccuuug

SEQ ID NO: 1511969 - RNA, 19 nt, Artificial Sequence
  Description of Artificial Sequence: Synthetic oligonucleotide
gccgcggucaccgccgcag

SEQ ID NO: 1511970 - RNA, 19 nt, Artificial Sequence
  Description of Artificial Sequence: Synthetic oligonucleotide
caccccucauguugagaaa

SEQ ID NO: 1511971 - RNA, 19 nt, Artificial Sequence
  Description of Artificial Sequence: Synthetic oligonucleotide
ccuaaguuguuggaguccu

SEQ ID NO: 1511972 - RNA, 19 nt, Artificial Sequence
  Description of Artificial Sequence: Synthetic oligonucleotide
ggacccggccuugcugagg

SEQ ID NO: 1511973 - RNA, 19 nt, Artificial Sequence
  Description of Artificial Sequence: Synthetic oligonucleotide
acccuauagucaggacaau

SEQ ID NO: 1511974 - RNA, 19 nt, Artificial Sequence
  Description of Artificial Sequence: Synthetic oligonucleotide
cccggccuugcugaggaac

SEQ ID NO: 1511975 - RNA, 19 nt, Artificial Sequence
  Description of Artificial Sequence: Synthetic oligonucleotide
ggccaccccucauguugag

SEQ ID NO: 1511976 - RNA, 19 nt, Artificial Sequence
  Description of Artificial Sequence: Synthetic oligonucleotide
caauuccacggguuaucuu

SEQ ID NO: 1511977 - RNA, 19 nt, Artificial Sequence
  Description of Artificial Sequence: Synthetic oligonucleotide
gcugccugcuuuaacgaau

SEQ ID NO: 1511978 - RNA, 19 nt, Artificial Sequence
  Description of Artificial Sequence: Synthetic oligonucleotide
cccuauagucaggacaaua

SEQ ID NO: 1511979 - RNA, 19 nt, Artificial Sequence
  Description of Artificial Sequence: Synthetic oligonucleotide
ccugugacccaaucucacu

SEQ ID NO: 1511980 - RNA, 19 nt, Artificial Sequence
  Description of Artificial Sequence: Synthetic oligonucleotide
cuucagcuugggagauagu

SEQ ID NO: 1511981 - RNA, 19 nt, Artificial Sequence
  Description of Artificial Sequence: Synthetic oligonucleotide
ccgcaguagcgaagaaaga

SEQ ID NO: 1511982 - RNA, 19 nt, Artificial Sequence
  Description of Artificial Sequence: Synthetic oligonucleotide
ccuuugccgcggucaccgc

SEQ ID NO: 1511983 - RNA, 19 nt, Artificial Sequence
  Description of Artificial Sequence: Synthetic oligonucleotide
cuccacgguauguggcuuu

SEQ ID NO: 1511984 - RNA, 19 nt, Artificial Sequence
  Description of Artificial Sequence: Synthetic oligonucleotide
ggggcaacuuugagggagu

SEQ ID NO: 1511985 - RNA, 19 nt, Artificial Sequence
  Description of Artificial Sequence: Synthetic oligonucleotide
ccacgguauguggcuuuug

SEQ ID NO: 1511986 - RNA, 19 nt, Artificial Sequence
  Description of Artificial Sequence: Synthetic oligonucleotide
gccaccccucauguugaga

SEQ ID NO: 1511987 - RNA, 19 nt, Artificial Sequence
  Description of Artificial Sequence: Synthetic oligonucleotide
ggcucuagcgugugcccuu

SEQ ID NO: 1511988 - RNA, 19 nt, Artificial Sequence
  Description of Artificial Sequence: Synthetic oligonucleotide
caaggccaccccucauguu

SEQ ID NO: 1511989 - RNA, 19 nt, Artificial Sequence
  Description of Artificial Sequence: Synthetic oligonucleotide
cgugugcccuuugccgcgg

SEQ ID NO: 1511990 - RNA, 19 nt, Artificial Sequence
  Description of Artificial Sequence: Synthetic oligonucleotide
cgacgcuccuuugguaguc

SEQ ID NO: 1511991 - RNA, 19 nt, Artificial Sequence
  Description of Artificial Sequence: Synthetic oligonucleotide
gggcaacuuugagggagua

SEQ ID NO: 1511992 - RNA, 19 nt, Artificial Sequence
  Description of Artificial Sequence: Synthetic oligonucleotide
cggcgaaauucuggugcug

SEQ ID NO: 1511993 - RNA, 19 nt, Artificial Sequence
  Description of Artificial Sequence: Synthetic oligonucleotide
cgccgcaguagcgaagaaa

SEQ ID NO: 1511994 - RNA, 19 nt, Artificial Sequence
  Description of Artificial Sequence: Synthetic oligonucleotide
guagggccugugacccaau

SEQ ID NO: 1511995 - RNA, 19 nt, Artificial Sequence
  Description of Artificial Sequence: Synthetic oligonucleotide
gcucuagcgugugcccuuu

SEQ ID NO: 1511996 - RNA, 19 nt, Artificial Sequence
  Description of Artificial Sequence: Synthetic oligonucleotide
ccgccgcaguagcgaagaa

SEQ ID NO: 1511997 - RNA, 19 nt, Artificial Sequence
  Description of Artificial Sequence: Synthetic oligonucleotide
ccgcggucaccgccgcagu

SEQ ID NO: 1511998 - RNA, 19 nt, Artificial Sequence
  Description of Artificial Sequence: Synthetic oligonucleotide
cggccuugcugaggaacuu

SEQ ID NO: 1511999 - RNA, 19 nt, Artificial Sequence
  Description of Artificial Sequence: Synthetic oligonucleotide
uuauuuuccaauaacuugg

SEQ ID NO: 1512000 - RNA, 19 nt, Artificial Sequence
  Description of Artificial Sequence: Synthetic oligonucleotide
aacaucaaaugucugagac

SEQ ID NO: 1512001 - RNA, 19 nt, Artificial Sequence
  Description of Artificial Sequence: Synthetic oligonucleotide
aaugucugagacuagaaag

SEQ ID NO: 1512002 - RNA, 19 nt, Artificial Sequence
  Description of Artificial Sequence: Synthetic oligonucleotide
aagaacauaucauugagug

SEQ ID NO: 1512003 - RNA, 19 nt, Artificial Sequence
  Description of Artificial Sequence: Synthetic oligonucleotide
aaaaucauccuacauuacg

SEQ ID NO: 1512004 - RNA, 19 nt, Artificial Sequence
  Description of Artificial Sequence: Synthetic oligonucleotide
aacagguuaucauaggaac

SEQ ID NO: 1512005 - RNA, 19 nt, Artificial Sequence
  Description of Artificial Sequence: Synthetic oligonucleotide
aguucauuuaccuuuggcg

SEQ ID NO: 1512006 - RNA, 19 nt, Artificial Sequence
  Description of Artificial Sequence: Synthetic oligonucleotide
ugugauuauucguaaaagg

SEQ ID NO: 1512007 - RNA, 19 nt, Artificial Sequence
  Description of Artificial Sequence: Synthetic oligonucleotide
uuuacuuaggagaauaagu

SEQ ID NO: 1512008 - RNA, 19 nt, Artificial Sequence
  Description of Artificial Sequence: Synthetic oligonucleotide
cugaaaaucgucuugacug

SEQ ID NO: 1512009 - RNA, 19 nt, Artificial Sequence
  Description of Artificial Sequence: Synthetic oligonucleotide
uuauguauacugaaguuug

SEQ ID NO: 1512010 - RNA, 19 nt, Artificial Sequence
  Description of Artificial Sequence: Synthetic oligonucleotide
uggauuucaaaacaucuag

SEQ ID NO: 1512011 - RNA, 19 nt, Artificial Sequence
  Description of Artificial Sequence: Synthetic oligonucleotide
aauuacagacgagauaugg

SEQ ID NO: 1512012 - RNA, 19 nt, Artificial Sequence
  Description of Artificial Sequence: Synthetic oligonucleotide
uucuuauccauccauuuag

SEQ ID NO: 1512013 - RNA, 19 nt, Artificial Sequence
  Description of Artificial Sequence: Synthetic oligonucleotide
uguguggaaaagaacagag

SEQ ID NO: 1512014 - RNA, 19 nt, Artificial Sequence
  Description of Artificial Sequence: Synthetic oligonucleotide
aacagaguauauccaacac

SEQ ID NO: 1512015 - RNA, 19 nt, Artificial Sequence
  Description of Artificial Sequence: Synthetic oligonucleotide
uguaccaucuuuaauugug

SEQ ID NO: 1512016 - RNA, 19 nt, Artificial Sequence
  Description of Artificial Sequence: Synthetic oligonucleotide
uuucuaauauagcuucugg

SEQ ID NO: 1512017 - RNA, 19 nt, Artificial Sequence
  Description of Artificial Sequence: Synthetic oligonucleotide
uuauguaccaucuuuaauu

SEQ ID NO: 1512018 - RNA, 19 nt, Artificial Sequence
  Description of Artificial Sequence: Synthetic oligonucleotide
uguauacugaaguuuguag

SEQ ID NO: 1512019 - RNA, 19 nt, Artificial Sequence
  Description of Artificial Sequence: Synthetic oligonucleotide
ucuauauauaccuagucua

SEQ ID NO: 1512020 - RNA, 19 nt, Artificial Sequence
  Description of Artificial Sequence: Synthetic oligonucleotide
gaacauaucauugagugac

SEQ ID NO: 1512021 - RNA, 19 nt, Artificial Sequence
  Description of Artificial Sequence: Synthetic oligonucleotide
aaacaauccuucugagccc

SEQ ID NO: 1512022 - RNA, 19 nt, Artificial Sequence
  Description of Artificial Sequence: Synthetic oligonucleotide
uuuuauuccauacaugauu

SEQ ID NO: 1512023 - RNA, 19 nt, Artificial Sequence
  Description of Artificial Sequence: Synthetic oligonucleotide
uuaucauaggaacacuggc

SEQ ID NO: 1512024 - RNA, 19 nt, Artificial Sequence
  Description of Artificial Sequence: Synthetic oligonucleotide
uuagcauugcaacugguga

SEQ ID NO: 1512025 - RNA, 19 nt, Artificial Sequence
  Description of Artificial Sequence: Synthetic oligonucleotide
cauuuagggauuuuagugc

SEQ ID NO: 1512026 - RNA, 19 nt, Artificial Sequence
  Description of Artificial Sequence: Synthetic oligonucleotide
uauacugaaguuuguagga

SEQ ID NO: 1512027 - RNA, 19 nt, Artificial Sequence
  Description of Artificial Sequence: Synthetic oligonucleotide
ugauuauucguaaaaggaa

SEQ ID NO: 1512028 - RNA, 19 nt, Artificial Sequence
  Description of Artificial Sequence: Synthetic oligonucleotide
ugugacauagacugugggg

SEQ ID NO: 1512029 - RNA, 19 nt, Artificial Sequence
  Description of Artificial Sequence: Synthetic oligonucleotide
auaucauugagugacagca

SEQ ID NO: 1512030 - RNA, 19 nt, Artificial Sequence
  Description of Artificial Sequence: Synthetic oligonucleotide
uuacuuaggagaauaagua

SEQ ID NO: 1512031 - RNA, 19 nt, Artificial Sequence
  Description of Artificial Sequence: Synthetic oligonucleotide
uucguaaaaggaaaacuga

SEQ ID NO: 1512032 - RNA, 19 nt, Artificial Sequence
  Description of Artificial Sequence: Synthetic oligonucleotide
cuagucuauauauaccuag

SEQ ID NO: 1512033 - RNA, 19 nt, Artificial Sequence
  Description of Artificial Sequence: Synthetic oligonucleotide
ugaaaaucgucuugacugg

SEQ ID NO: 1512034 - RNA, 19 nt, Artificial Sequence
  Description of Artificial Sequence: Synthetic oligonucleotide
uuggucacgugaaugauug

SEQ ID NO: 1512035 - RNA, 19 nt, Artificial Sequence
  Description of Artificial Sequence: Synthetic oligonucleotide
uauguaccaucuuuaauug

SEQ ID NO: 1512036 - RNA, 19 nt, Artificial Sequence
  Description of Artificial Sequence: Synthetic oligonucleotide
uuuagcauugcaacuggug

SEQ ID NO: 1512037 - RNA, 19 nt, Artificial Sequence
  Description of Artificial Sequence: Synthetic oligonucleotide
guuuguaggauuauguacc

SEQ ID NO: 1512038 - RNA, 19 nt, Artificial Sequence
  Description of Artificial Sequence: Synthetic oligonucleotide
ugaguuauucaacaguuua

SEQ ID NO: 1512039 - RNA, 19 nt, Artificial Sequence
  Description of Artificial Sequence: Synthetic oligonucleotide
agaaagaacauaucauuga

SEQ ID NO: 1512040 - RNA, 19 nt, Artificial Sequence
  Description of Artificial Sequence: Synthetic oligonucleotide
uuuaauuguguggaaaaga

SEQ ID NO: 1512041 - RNA, 19 nt, Artificial Sequence
  Description of Artificial Sequence: Synthetic oligonucleotide
agucuauauauaccuaguc

SEQ ID NO: 1512042 - RNA, 19 nt, Artificial Sequence
  Description of Artificial Sequence: Synthetic oligonucleotide
aaauuaaacucugggaagu

SEQ ID NO: 1512043 - RNA, 19 nt, Artificial Sequence
  Description of Artificial Sequence: Synthetic oligonucleotide
uuaccuuuggcgcaaacaa

SEQ ID NO: 1512044 - RNA, 19 nt, Artificial Sequence
  Description of Artificial Sequence: Synthetic oligonucleotide
ucuuauccauccauuuagg

SEQ ID NO: 1512045 - RNA, 19 nt, Artificial Sequence
  Description of Artificial Sequence: Synthetic oligonucleotide
agcaagaccucuuuguuug

SEQ ID NO: 1512046 - RNA, 19 nt, Artificial Sequence
  Description of Artificial Sequence: Synthetic oligonucleotide
uguaggauuauguaccauc

SEQ ID NO: 1512047 - RNA, 19 nt, Artificial Sequence
  Description of Artificial Sequence: Synthetic oligonucleotide
aaugauugauguucagccu

SEQ ID NO: 1512048 - RNA, 19 nt, Artificial Sequence
  Description of Artificial Sequence: Synthetic oligonucleotide
uauucguaaaaggaaaacu

SEQ ID NO: 1512049 - RNA, 19 nt, Artificial Sequence
  Description of Artificial Sequence: Synthetic oligonucleotide
acgugaaugauugauguuc

SEQ ID NO: 1512050 - RNA, 19 nt, Artificial Sequence
  Description of Artificial Sequence: Synthetic oligonucleotide
aauauagcuucuggaaauc

SEQ ID NO: 1512051 - RNA, 19 nt, Artificial Sequence
  Description of Artificial Sequence: Synthetic oligonucleotide
aaauuggccacauaccauu

SEQ ID NO: 1512052 - RNA, 19 nt, Artificial Sequence
  Description of Artificial Sequence: Synthetic oligonucleotide
uaauauagcuucuggaaau

SEQ ID NO: 1512053 - RNA, 19 nt, Artificial Sequence
  Description of Artificial Sequence: Synthetic oligonucleotide
uucuaugugauuauucgua

SEQ ID NO: 1512054 - RNA, 19 nt, Artificial Sequence
  Description of Artificial Sequence: Synthetic oligonucleotide
uuuaaacgcucacugguac

SEQ ID NO: 1512055 - RNA, 19 nt, Artificial Sequence
  Description of Artificial Sequence: Synthetic oligonucleotide
ugcauagcuacuucuguag

SEQ ID NO: 1512056 - RNA, 19 nt, Artificial Sequence
  Description of Artificial Sequence: Synthetic oligonucleotide
ucucgaaacagaacaaggu

SEQ ID NO: 1512057 - RNA, 19 nt, Artificial Sequence
  Description of Artificial Sequence: Synthetic oligonucleotide
gacuagaaagugcagucag

SEQ ID NO: 1512058 - RNA, 19 nt, Artificial Sequence
  Description of Artificial Sequence: Synthetic oligonucleotide
aaaucauccuacauuacgu

SEQ ID NO: 1512059 - RNA, 19 nt, Artificial Sequence
  Description of Artificial Sequence: Synthetic oligonucleotide
aggaauucauucucccacc

SEQ ID NO: 1512060 - RNA, 19 nt, Artificial Sequence
  Description of Artificial Sequence: Synthetic oligonucleotide
aagagagcaucaaaauugg

SEQ ID NO: 1512061 - RNA, 19 nt, Artificial Sequence
  Description of Artificial Sequence: Synthetic oligonucleotide
uuacagacgagauauggau

SEQ ID NO: 1512062 - RNA, 19 nt, Artificial Sequence
  Description of Artificial Sequence: Synthetic oligonucleotide
aucauaggaacacuggccu

SEQ ID NO: 1512063 - RNA, 19 nt, Artificial Sequence
  Description of Artificial Sequence: Synthetic oligonucleotide
aacuggugauaaaauuucc

SEQ ID NO: 1512064 - RNA, 19 nt, Artificial Sequence
  Description of Artificial Sequence: Synthetic oligonucleotide
cuuauccauccauuuaggg

SEQ ID NO: 1512065 - RNA, 19 nt, Artificial Sequence
  Description of Artificial Sequence: Synthetic oligonucleotide
cucucgaaacagaacaagg

SEQ ID NO: 1512066 - RNA, 19 nt, Artificial Sequence
  Description of Artificial Sequence: Synthetic oligonucleotide
auuuagggauuuuagugca

SEQ ID NO: 1512067 - RNA, 19 nt, Artificial Sequence
  Description of Artificial Sequence: Synthetic oligonucleotide
ucacgugaaugauugaugu

SEQ ID NO: 1512068 - RNA, 19 nt, Artificial Sequence
  Description of Artificial Sequence: Synthetic oligonucleotide
uuuggcgcaaacaauggau

SEQ ID NO: 1512069 - RNA, 19 nt, Artificial Sequence
  Description of Artificial Sequence: Synthetic oligonucleotide
ugaaugauugauguucagc

SEQ ID NO: 1512070 - RNA, 19 nt, Artificial Sequence
  Description of Artificial Sequence: Synthetic oligonucleotide
agcccaugugcuuuaaacg

SEQ ID NO: 1512071 - RNA, 19 nt, Artificial Sequence
  Description of Artificial Sequence: Synthetic oligonucleotide
aguuuucgggcucuucagc

SEQ ID NO: 1512072 - RNA, 19 nt, Artificial Sequence
  Description of Artificial Sequence: Synthetic oligonucleotide
uuagggauuuuagugcagg

SEQ ID NO: 1512073 - RNA, 19 nt, Artificial Sequence
  Description of Artificial Sequence: Synthetic oligonucleotide
aagucugucagcugagaga

SEQ ID NO: 1512074 - RNA, 19 nt, Artificial Sequence
  Description of Artificial Sequence: Synthetic oligonucleotide
uugauguucagccuucaaa

SEQ ID NO: 1512075 - RNA, 19 nt, Artificial Sequence
  Description of Artificial Sequence: Synthetic oligonucleotide
ugagugggagcccugauaa

SEQ ID NO: 1512076 - RNA, 19 nt, Artificial Sequence
  Description of Artificial Sequence: Synthetic oligonucleotide
ugguauuuuauugaucaca

SEQ ID NO: 1512077 - RNA, 19 nt, Artificial Sequence
  Description of Artificial Sequence: Synthetic oligonucleotide
aauuaaacucugggaaguc

SEQ ID NO: 1512078 - RNA, 19 nt, Artificial Sequence
  Description of Artificial Sequence: Synthetic oligonucleotide
ucguaaaaggaaaacugaa

SEQ ID NO: 1512079 - RNA, 19 nt, Artificial Sequence
  Description of Artificial Sequence: Synthetic oligonucleotide
ugcuuuaaacgcucacugg

SEQ ID NO: 1512080 - RNA, 19 nt, Artificial Sequence
  Description of Artificial Sequence: Synthetic oligonucleotide
uugugacauagacuguggg

SEQ ID NO: 1512081 - RNA, 19 nt, Artificial Sequence
  Description of Artificial Sequence: Synthetic oligonucleotide
guuuuagcauugcaacugg

SEQ ID NO: 1512082 - RNA, 19 nt, Artificial Sequence
  Description of Artificial Sequence: Synthetic oligonucleotide
uguccauguaucaucuuga

SEQ ID NO: 1512083 - RNA, 19 nt, Artificial Sequence
  Description of Artificial Sequence: Synthetic oligonucleotide
uuuuagugcagguuuacuu

SEQ ID NO: 1512084 - RNA, 19 nt, Artificial Sequence
  Description of Artificial Sequence: Synthetic oligonucleotide
aaaugagcugagcuccgag

SEQ ID NO: 1512085 - RNA, 19 nt, Artificial Sequence
  Description of Artificial Sequence: Synthetic oligonucleotide
acagaguauauccaacaca

SEQ ID NO: 1512086 - RNA, 19 nt, Artificial Sequence
  Description of Artificial Sequence: Synthetic oligonucleotide
ucauugagugacagcaagc

SEQ ID NO: 1512087 - RNA, 19 nt, Artificial Sequence
  Description of Artificial Sequence: Synthetic oligonucleotide
auauauaccuagucuaaaa

SEQ ID NO: 1512088 - RNA, 19 nt, Artificial Sequence
  Description of Artificial Sequence: Synthetic oligonucleotide
aguuauucaacaguuuacu

SEQ ID NO: 1512089 - RNA, 19 nt, Artificial Sequence
  Description of Artificial Sequence: Synthetic oligonucleotide
cauguaucaucuugaaaac

SEQ ID NO: 1512090 - RNA, 19 nt, Artificial Sequence
  Description of Artificial Sequence: Synthetic oligonucleotide
caaaauuggccacauacca

SEQ ID NO: 1512091 - RNA, 19 nt, Artificial Sequence
  Description of Artificial Sequence: Synthetic oligonucleotide
cagaggagaugaaugauug

SEQ ID NO: 1512092 - RNA, 19 nt, Artificial Sequence
  Description of Artificial Sequence: Synthetic oligonucleotide
gauuauucguaaaaggaaa

SEQ ID NO: 1512093 - RNA, 19 nt, Artificial Sequence
  Description of Artificial Sequence: Synthetic oligonucleotide
accauuuuguccauguauc

SEQ ID NO: 1512094 - RNA, 19 nt, Artificial Sequence
  Description of Artificial Sequence: Synthetic oligonucleotide
aaugaagcaagaccucuuu

SEQ ID NO: 1512095 - RNA, 19 nt, Artificial Sequence
  Description of Artificial Sequence: Synthetic oligonucleotide
aguugugcuguccucagca

SEQ ID NO: 1512096 - RNA, 19 nt, Artificial Sequence
  Description of Artificial Sequence: Synthetic oligonucleotide
uacguaauuuuauuucuaa

SEQ ID NO: 1512097 - RNA, 19 nt, Artificial Sequence
  Description of Artificial Sequence: Synthetic oligonucleotide
uagaaggcgacucucgaaa

SEQ ID NO: 1512098 - RNA, 19 nt, Artificial Sequence
  Description of Artificial Sequence: Synthetic oligonucleotide
aaaacaucuaguagcuugu

SEQ ID NO: 1512099 - RNA, 19 nt, Artificial Sequence
  Description of Artificial Sequence: Synthetic oligonucleotide
ucuaugugauuauucguaa

SEQ ID NO: 1512100 - RNA, 19 nt, Artificial Sequence
  Description of Artificial Sequence: Synthetic oligonucleotide
uuuguuuggcuagugcaag

SEQ ID NO: 1512101 - RNA, 19 nt, Artificial Sequence
  Description of Artificial Sequence: Synthetic oligonucleotide
gaacagaguauauccaaca

SEQ ID NO: 1512102 - RNA, 19 nt, Artificial Sequence
  Description of Artificial Sequence: Synthetic oligonucleotide
uuauucguaaaaggaaaac

SEQ ID NO: 1512103 - RNA, 19 nt, Artificial Sequence
  Description of Artificial Sequence: Synthetic oligonucleotide
auacacaagucugaggcag

SEQ ID NO: 1512104 - RNA, 19 nt, Artificial Sequence
  Description of Artificial Sequence: Synthetic oligonucleotide
uacugauuugaguuauuca

SEQ ID NO: 1512105 - RNA, 19 nt, Artificial Sequence
  Description of Artificial Sequence: Synthetic oligonucleotide
ucauccuacauuacguaau

SEQ ID NO: 1512106 - RNA, 19 nt, Artificial Sequence
  Description of Artificial Sequence: Synthetic oligonucleotide
aaagaacagaguauaucca

SEQ ID NO: 1512107 - RNA, 19 nt, Artificial Sequence
  Description of Artificial Sequence: Synthetic oligonucleotide
guuuacuuaggagaauaag

SEQ ID NO: 1512108 - RNA, 19 nt, Artificial Sequence
  Description of Artificial Sequence: Synthetic oligonucleotide
uagucuauauauaccuagu

SEQ ID NO: 1512109 - RNA, 19 nt, Artificial Sequence
  Description of Artificial Sequence: Synthetic oligonucleotide
cuggaaaucauagcaaaug

SEQ ID NO: 1512110 - RNA, 19 nt, Artificial Sequence
  Description of Artificial Sequence: Synthetic oligonucleotide
aggauuauguaccaucuuu

SEQ ID NO: 1512111 - RNA, 19 nt, Artificial Sequence
  Description of Artificial Sequence: Synthetic oligonucleotide
uuaguucauuuaccuuugg

SEQ ID NO: 1512112 - RNA, 19 nt, Artificial Sequence
  Description of Artificial Sequence: Synthetic oligonucleotide
agaacagaguauauccaac

SEQ ID NO: 1512113 - RNA, 19 nt, Artificial Sequence
  Description of Artificial Sequence: Synthetic oligonucleotide
aaaacugagugggagcccu

SEQ ID NO: 1512114 - RNA, 19 nt, Artificial Sequence
  Description of Artificial Sequence: Synthetic oligonucleotide
uguagaaggcgacucucga

SEQ ID NO: 1512115 - RNA, 19 nt, Artificial Sequence
  Description of Artificial Sequence: Synthetic oligonucleotide
aaucauccuacauuacgua

SEQ ID NO: 1512116 - RNA, 19 nt, Artificial Sequence
  Description of Artificial Sequence: Synthetic oligonucleotide
cauaucauugagugacagc

SEQ ID NO: 1512117 - RNA, 19 nt, Artificial Sequence
  Description of Artificial Sequence: Synthetic oligonucleotide
uacuuaggagaauaaguau

SEQ ID NO: 1512118 - RNA, 19 nt, Artificial Sequence
  Description of Artificial Sequence: Synthetic oligonucleotide
aaaucauagcaaauguaaa

SEQ ID NO: 1512119 - RNA, 19 nt, Artificial Sequence
  Description of Artificial Sequence: Synthetic oligonucleotide
uacauuacguaauuuuauu

SEQ ID NO: 1512120 - RNA, 19 nt, Artificial Sequence
  Description of Artificial Sequence: Synthetic oligonucleotide
cugauaagucuuuuaguuc

SEQ ID NO: 1512121 - RNA, 19 nt, Artificial Sequence
  Description of Artificial Sequence: Synthetic oligonucleotide
gagcccaugugcuuuaaac

SEQ ID NO: 1512122 - RNA, 19 nt, Artificial Sequence
  Description of Artificial Sequence: Synthetic oligonucleotide
ccauuuagggauuuuagug

SEQ ID NO: 1512123 - RNA, 19 nt, Artificial Sequence
  Description of Artificial Sequence: Synthetic oligonucleotide
ccauguaucaucuugaaaa

SEQ ID NO: 1512124 - RNA, 19 nt, Artificial Sequence
  Description of Artificial Sequence: Synthetic oligonucleotide
acagacgagauauggauuu

SEQ ID NO: 1512125 - RNA, 19 nt, Artificial Sequence
  Description of Artificial Sequence: Synthetic oligonucleotide
ucaugcuucuaugugauua

SEQ ID NO: 1512126 - RNA, 19 nt, Artificial Sequence
  Description of Artificial Sequence: Synthetic oligonucleotide
uauguauacugaaguuugu

SEQ ID NO: 1512127 - RNA, 19 nt, Artificial Sequence
  Description of Artificial Sequence: Synthetic oligonucleotide
agagcuacagugaggaaag

SEQ ID NO: 1512128 - RNA, 19 nt, Artificial Sequence
  Description of Artificial Sequence: Synthetic oligonucleotide
agaaggcgacucucgaaac

SEQ ID NO: 1512129 - RNA, 19 nt, Artificial Sequence
  Description of Artificial Sequence: Synthetic oligonucleotide
aaaaucgucuugacuggag

SEQ ID NO: 1512130 - RNA, 19 nt, Artificial Sequence
  Description of Artificial Sequence: Synthetic oligonucleotide
uaaacgcucacugguacug

SEQ ID NO: 1512131 - RNA, 19 nt, Artificial Sequence
  Description of Artificial Sequence: Synthetic oligonucleotide
agaacauaucauugaguga

SEQ ID NO: 1512132 - RNA, 19 nt, Artificial Sequence
  Description of Artificial Sequence: Synthetic oligonucleotide
uuacguaauuuuauuucua

SEQ ID NO: 1512133 - RNA, 19 nt, Artificial Sequence
  Description of Artificial Sequence: Synthetic oligonucleotide
gagaugaaugauuggaugu

SEQ ID NO: 1512134 - RNA, 19 nt, Artificial Sequence
  Description of Artificial Sequence: Synthetic oligonucleotide
gcaaagaacaucaaacuac

SEQ ID NO: 1512135 - RNA, 19 nt, Artificial Sequence
  Description of Artificial Sequence: Synthetic oligonucleotide
ugucugagacuagaaagug

SEQ ID NO: 1512136 - RNA, 19 nt, Artificial Sequence
  Description of Artificial Sequence: Synthetic oligonucleotide
uugagccccaaacagguua

SEQ ID NO: 1512137 - RNA, 19 nt, Artificial Sequence
  Description of Artificial Sequence: Synthetic oligonucleotide
accugauuuuaaaagagca

SEQ ID NO: 1512138 - RNA, 19 nt, Artificial Sequence
  Description of Artificial Sequence: Synthetic oligonucleotide
augauugauguucagccuu

SEQ ID NO: 1512139 - RNA, 19 nt, Artificial Sequence
  Description of Artificial Sequence: Synthetic oligonucleotide
uauauauaccuagucuaaa

SEQ ID NO: 1512140 - RNA, 19 nt, Artificial Sequence
  Description of Artificial Sequence: Synthetic oligonucleotide
ggagaauaaguauuuaaaa

SEQ ID NO: 1512141 - RNA, 19 nt, Artificial Sequence
  Description of Artificial Sequence: Synthetic oligonucleotide
gaccucuuuguuuggcuag

SEQ ID NO: 1512142 - RNA, 19 nt, Artificial Sequence
  Description of Artificial Sequence: Synthetic oligonucleotide
ucuugacuggagaacccca

SEQ ID NO: 1512143 - RNA, 19 nt, Artificial Sequence
  Description of Artificial Sequence: Synthetic oligonucleotide
cagucagugucuugaagag

SEQ ID NO: 1512144 - RNA, 19 nt, Artificial Sequence
  Description of Artificial Sequence: Synthetic oligonucleotide
cauagcucaugcuucuaug

SEQ ID NO: 1512145 - RNA, 19 nt, Artificial Sequence
  Description of Artificial Sequence: Synthetic oligonucleotide
uuggcuagugcaagaacaa

SEQ ID NO: 1512146 - RNA, 19 nt, Artificial Sequence
  Description of Artificial Sequence: Synthetic oligonucleotide
aaacaucuaguagcuuguc

SEQ ID NO: 1512147 - RNA, 19 nt, Artificial Sequence
  Description of Artificial Sequence: Synthetic oligonucleotide
aacaauccuucugagccca

SEQ ID NO: 1512148 - RNA, 19 nt, Artificial Sequence
  Description of Artificial Sequence: Synthetic oligonucleotide
ggauguuuuaaguucccug

SEQ ID NO: 1512149 - RNA, 19 nt, Artificial Sequence
  Description of Artificial Sequence: Synthetic oligonucleotide
ucacugguacugauuugag

SEQ ID NO: 1512150 - RNA, 19 nt, Artificial Sequence
  Description of Artificial Sequence: Synthetic oligonucleotide
uuaaacgcucacugguacu

SEQ ID NO: 1512151 - RNA, 19 nt, Artificial Sequence
  Description of Artificial Sequence: Synthetic oligonucleotide
cagccuaguagaugaaaag

SEQ ID NO: 1512152 - RNA, 19 nt, Artificial Sequence
  Description of Artificial Sequence: Synthetic oligonucleotide
cuauauauaccuagucuaa

SEQ ID NO: 1512153 - RNA, 19 nt, Artificial Sequence
  Description of Artificial Sequence: Synthetic oligonucleotide
uuuuagcauugcaacuggu

SEQ ID NO: 1512154 - RNA, 19 nt, Artificial Sequence
  Description of Artificial Sequence: Synthetic oligonucleotide
acauaucauugagugacag

SEQ ID NO: 1512155 - RNA, 19 nt, Artificial Sequence
  Description of Artificial Sequence: Synthetic oligonucleotide
aaaauuggccacauaccau

SEQ ID NO: 1512156 - RNA, 19 nt, Artificial Sequence
  Description of Artificial Sequence: Synthetic oligonucleotide
uuucgggcucuucagcugu

SEQ ID NO: 1512157 - RNA, 19 nt, Artificial Sequence
  Description of Artificial Sequence: Synthetic oligonucleotide
aucauccuacauuacguaa

SEQ ID NO: 1512158 - RNA, 19 nt, Artificial Sequence
  Description of Artificial Sequence: Synthetic oligonucleotide
caucaaaugucugagacua

SEQ ID NO: 1512159 - RNA, 19 nt, Artificial Sequence
  Description of Artificial Sequence: Synthetic oligonucleotide
acuuaggagaauaaguauu

SEQ ID NO: 1512160 - RNA, 19 nt, Artificial Sequence
  Description of Artificial Sequence: Synthetic oligonucleotide
agugucuugaagaguuuuc

SEQ ID NO: 1512161 - RNA, 19 nt, Artificial Sequence
  Description of Artificial Sequence: Synthetic oligonucleotide
auuuaccuuuggcgcaaac

SEQ ID NO: 1512162 - RNA, 19 nt, Artificial Sequence
  Description of Artificial Sequence: Synthetic oligonucleotide
augaagcaagaccucuuug

SEQ ID NO: 1512163 - RNA, 19 nt, Artificial Sequence
  Description of Artificial Sequence: Synthetic oligonucleotide
accuuuggcgcaaacaaug

SEQ ID NO: 1512164 - RNA, 19 nt, Artificial Sequence
  Description of Artificial Sequence: Synthetic oligonucleotide
uuuucgggcucuucagcug

SEQ ID NO: 1512165 - RNA, 19 nt, Artificial Sequence
  Description of Artificial Sequence: Synthetic oligonucleotide
agccuaguagaugaaaaga

SEQ ID NO: 1512166 - RNA, 19 nt, Artificial Sequence
  Description of Artificial Sequence: Synthetic oligonucleotide
uauagacagcuuugugaca

SEQ ID NO: 1512167 - RNA, 19 nt, Artificial Sequence
  Description of Artificial Sequence: Synthetic oligonucleotide
ggaaggaauucauucuccc

SEQ ID NO: 1512168 - RNA, 19 nt, Artificial Sequence
  Description of Artificial Sequence: Synthetic oligonucleotide
acuugguauuuuauugauc

SEQ ID NO: 1512169 - RNA, 19 nt, Artificial Sequence
  Description of Artificial Sequence: Synthetic oligonucleotide
agcagugcugaaaaucguc

SEQ ID NO: 1512170 - RNA, 19 nt, Artificial Sequence
  Description of Artificial Sequence: Synthetic oligonucleotide
ucuaguagcuugucauuua

SEQ ID NO: 1512171 - RNA, 19 nt, Artificial Sequence
  Description of Artificial Sequence: Synthetic oligonucleotide
augucugagacuagaaagu

SEQ ID NO: 1512172 - RNA, 19 nt, Artificial Sequence
  Description of Artificial Sequence: Synthetic oligonucleotide
gaaaacugaaggaaggaau

SEQ ID NO: 1512173 - RNA, 19 nt, Artificial Sequence
  Description of Artificial Sequence: Synthetic oligonucleotide
uugaguuauucaacaguuu

SEQ ID NO: 1512174 - RNA, 19 nt, Artificial Sequence
  Description of Artificial Sequence: Synthetic oligonucleotide
uacagacgagauauggauu

SEQ ID NO: 1512175 - RNA, 19 nt, Artificial Sequence
  Description of Artificial Sequence: Synthetic oligonucleotide
acacauagcucaugcuucu

SEQ ID NO: 1512176 - RNA, 19 nt, Artificial Sequence
  Description of Artificial Sequence: Synthetic oligonucleotide
uacugaaguuuguaggauu

SEQ ID NO: 1512177 - RNA, 19 nt, Artificial Sequence
  Description of Artificial Sequence: Synthetic oligonucleotide
aaauuacagacgagauaug

SEQ ID NO: 1512178 - RNA, 19 nt, Artificial Sequence
  Description of Artificial Sequence: Synthetic oligonucleotide
gcccaugugcuuuaaacgc

SEQ ID NO: 1512179 - RNA, 19 nt, Artificial Sequence
  Description of Artificial Sequence: Synthetic oligonucleotide
uccugugcuagucuauaua

SEQ ID NO: 1512180 - RNA, 19 nt, Artificial Sequence
  Description of Artificial Sequence: Synthetic oligonucleotide
cauugagugacagcaagca

SEQ ID NO: 1512181 - RNA, 19 nt, Artificial Sequence
  Description of Artificial Sequence: Synthetic oligonucleotide
cuuuguuuggcuagugcaa

SEQ ID NO: 1512182 - RNA, 19 nt, Artificial Sequence
  Description of Artificial Sequence: Synthetic oligonucleotide
acauagcucaugcuucuau

SEQ ID NO: 1512183 - RNA, 19 nt, Artificial Sequence
  Description of Artificial Sequence: Synthetic oligonucleotide
accccagaccgguuuuagc

SEQ ID NO: 1512184 - RNA, 19 nt, Artificial Sequence
  Description of Artificial Sequence: Synthetic oligonucleotide
uagggauuuuagugcaggu

SEQ ID NO: 1512185 - RNA, 19 nt, Artificial Sequence
  Description of Artificial Sequence: Synthetic oligonucleotide
gucacgugaaugauugaug

SEQ ID NO: 1512186 - RNA, 19 nt, Artificial Sequence
  Description of Artificial Sequence: Synthetic oligonucleotide
guacugauuugaguuauuc

SEQ ID NO: 1512187 - RNA, 19 nt, Artificial Sequence
  Description of Artificial Sequence: Synthetic oligonucleotide
acagguuaucauaggaaca

SEQ ID NO: 1512188 - RNA, 19 nt, Artificial Sequence
  Description of Artificial Sequence: Synthetic oligonucleotide
auguaucaucuugaaaacu

SEQ ID NO: 1512189 - RNA, 19 nt, Artificial Sequence
  Description of Artificial Sequence: Synthetic oligonucleotide
gaguccccggaugacagag

SEQ ID NO: 1512190 - RNA, 19 nt, Artificial Sequence
  Description of Artificial Sequence: Synthetic oligonucleotide
auuuuagugcagguuuacu

SEQ ID NO: 1512191 - RNA, 19 nt, Artificial Sequence
  Description of Artificial Sequence: Synthetic oligonucleotide
aaaugaagcaagaccucuu

SEQ ID NO: 1512192 - RNA, 19 nt, Artificial Sequence
  Description of Artificial Sequence: Synthetic oligonucleotide
ccgguuuuagcauugcaac

SEQ ID NO: 1512193 - RNA, 19 nt, Artificial Sequence
  Description of Artificial Sequence: Synthetic oligonucleotide
auguaccaucuuuaauugu

SEQ ID NO: 1512194 - RNA, 19 nt, Artificial Sequence
  Description of Artificial Sequence: Synthetic oligonucleotide
uucuguaguugugcugucc

SEQ ID NO: 1512195 - RNA, 19 nt, Artificial Sequence
  Description of Artificial Sequence: Synthetic oligonucleotide
acgagauauggauuucuuu

SEQ ID NO: 1512196 - RNA, 19 nt, Artificial Sequence
  Description of Artificial Sequence: Synthetic oligonucleotide
ggaauucauucucccaccc

SEQ ID NO: 1512197 - RNA, 19 nt, Artificial Sequence
  Description of Artificial Sequence: Synthetic oligonucleotide
uggagaaccccagaccggu

SEQ ID NO: 1512198 - RNA, 19 nt, Artificial Sequence
  Description of Artificial Sequence: Synthetic oligonucleotide
agacuagaaagugcaguca

SEQ ID NO: 1512199 - RNA, 19 nt, Artificial Sequence
  Description of Artificial Sequence: Synthetic oligonucleotide
uuaggagaauaaguauuua

SEQ ID NO: 1512200 - RNA, 19 nt, Artificial Sequence
  Description of Artificial Sequence: Synthetic oligonucleotide
ucauaggaacacuggccuc

SEQ ID NO: 1512201 - RNA, 19 nt, Artificial Sequence
  Description of Artificial Sequence: Synthetic oligonucleotide
gugcuagucuauauauacc

SEQ ID NO: 1512202 - RNA, 19 nt, Artificial Sequence
  Description of Artificial Sequence: Synthetic oligonucleotide
gucuaauauagacagcuuu

SEQ ID NO: 1512203 - RNA, 19 nt, Artificial Sequence
  Description of Artificial Sequence: Synthetic oligonucleotide
guccucagcauacacaagu

SEQ ID NO: 1512204 - RNA, 19 nt, Artificial Sequence
  Description of Artificial Sequence: Synthetic oligonucleotide
aaagaacaucaaacuacau

SEQ ID NO: 1512205 - RNA, 19 nt, Artificial Sequence
  Description of Artificial Sequence: Synthetic oligonucleotide
ugguacugauuugaguuau

SEQ ID NO: 1512206 - RNA, 19 nt, Artificial Sequence
  Description of Artificial Sequence: Synthetic oligonucleotide
agaugaaugauuggauguu

SEQ ID NO: 1512207 - RNA, 19 nt, Artificial Sequence
  Description of Artificial Sequence: Synthetic oligonucleotide
cauaccauuuuguccaugu

SEQ ID NO: 1512208 - RNA, 19 nt, Artificial Sequence
  Description of Artificial Sequence: Synthetic oligonucleotide
acugaaguuuguaggauua

SEQ ID NO: 1512209 - RNA, 19 nt, Artificial Sequence
  Description of Artificial Sequence: Synthetic oligonucleotide
uggauguuuuaaguucccu

SEQ ID NO: 1512210 - RNA, 19 nt, Artificial Sequence
  Description of Artificial Sequence: Synthetic oligonucleotide
agugaggaaagcagugcug

SEQ ID NO: 1512211 - RNA, 19 nt, Artificial Sequence
  Description of Artificial Sequence: Synthetic oligonucleotide
cauaggaacacuggccuca

SEQ ID NO: 1512212 - RNA, 19 nt, Artificial Sequence
  Description of Artificial Sequence: Synthetic oligonucleotide
cuuuaaacgcucacuggua

SEQ ID NO: 1512213 - RNA, 19 nt, Artificial Sequence
  Description of Artificial Sequence: Synthetic oligonucleotide
acccuguagaaggcgacuc

SEQ ID NO: 1512214 - RNA, 19 nt, Artificial Sequence
  Description of Artificial Sequence: Synthetic oligonucleotide
aaccccagaccgguuuuag

SEQ ID NO: 1512215 - RNA, 19 nt, Artificial Sequence
  Description of Artificial Sequence: Synthetic oligonucleotide
auugauguucagccuucaa

SEQ ID NO: 1512216 - RNA, 19 nt, Artificial Sequence
  Description of Artificial Sequence: Synthetic oligonucleotide
gaaaaucgucuugacugga

SEQ ID NO: 1512217 - RNA, 19 nt, Artificial Sequence
  Description of Artificial Sequence: Synthetic oligonucleotide
aucuaguagcuugucauuu

SEQ ID NO: 1512218 - RNA, 19 nt, Artificial Sequence
  Description of Artificial Sequence: Synthetic oligonucleotide
cauacacaagucugaggca

SEQ ID NO: 1512219 - RNA, 19 nt, Artificial Sequence
  Description of Artificial Sequence: Synthetic oligonucleotide
cuacauuacguaauuuuau

SEQ ID NO: 1512220 - RNA, 19 nt, Artificial Sequence
  Description of Artificial Sequence: Synthetic oligonucleotide
caagaccucuuuguuuggc

SEQ ID NO: 1512221 - RNA, 19 nt, Artificial Sequence
  Description of Artificial Sequence: Synthetic oligonucleotide
gucuugacuggagaacccc

SEQ ID NO: 1512222 - RNA, 19 nt, Artificial Sequence
  Description of Artificial Sequence: Synthetic oligonucleotide
accgguuuuagcauugcaa

SEQ ID NO: 1512223 - RNA, 19 nt, Artificial Sequence
  Description of Artificial Sequence: Synthetic oligonucleotide
ccuuuggcgcaaacaaugg

SEQ ID NO: 1512224 - RNA, 19 nt, Artificial Sequence
  Description of Artificial Sequence: Synthetic oligonucleotide
gucauuuauaugcaucuuu

SEQ ID NO: 1512225 - RNA, 19 nt, Artificial Sequence
  Description of Artificial Sequence: Synthetic oligonucleotide
agaccgguuuuagcauugc

SEQ ID NO: 1512226 - RNA, 19 nt, Artificial Sequence
  Description of Artificial Sequence: Synthetic oligonucleotide
cagaccgguuuuagcauug

SEQ ID NO: 1512227 - RNA, 19 nt, Artificial Sequence
  Description of Artificial Sequence: Synthetic oligonucleotide
agaccucuuuguuuggcua

SEQ ID NO: 1512228 - RNA, 19 nt, Artificial Sequence
  Description of Artificial Sequence: Synthetic oligonucleotide
uggcgcaaacaauggauuu

SEQ ID NO: 1512229 - RNA, 19 nt, Artificial Sequence
  Description of Artificial Sequence: Synthetic oligonucleotide
gcuuuaaacgcucacuggu

SEQ ID NO: 1512230 - RNA, 19 nt, Artificial Sequence
  Description of Artificial Sequence: Synthetic oligonucleotide
cuucuuauccauccauuua

SEQ ID NO: 1512231 - RNA, 19 nt, Artificial Sequence
  Description of Artificial Sequence: Synthetic oligonucleotide
ccauuacugagagaguccc

SEQ ID NO: 1512232 - RNA, 19 nt, Artificial Sequence
  Description of Artificial Sequence: Synthetic oligonucleotide
acagaggagaugaaugauu

SEQ ID NO: 1512233 - RNA, 19 nt, Artificial Sequence
  Description of Artificial Sequence: Synthetic oligonucleotide
cuucuaugugauuauucgu

SEQ ID NO: 1512234 - RNA, 19 nt, Artificial Sequence
  Description of Artificial Sequence: Synthetic oligonucleotide
aguuuacuuaggagaauaa

SEQ ID NO: 1512235 - RNA, 19 nt, Artificial Sequence
  Description of Artificial Sequence: Synthetic oligonucleotide
agaacaaaauugagcccca

SEQ ID NO: 1512236 - RNA, 19 nt, Artificial Sequence
  Description of Artificial Sequence: Synthetic oligonucleotide
aaacgcucacugguacuga

SEQ ID NO: 1512237 - RNA, 19 nt, Artificial Sequence
  Description of Artificial Sequence: Synthetic oligonucleotide
cuuuggcgcaaacaaugga

SEQ ID NO: 1512238 - RNA, 19 nt, Artificial Sequence
  Description of Artificial Sequence: Synthetic oligonucleotide
gugaucuagauucugccuu

SEQ ID NO: 1512239 - RNA, 19 nt, Artificial Sequence
  Description of Artificial Sequence: Synthetic oligonucleotide
ccugauacagacuccucuc

SEQ ID NO: 1512240 - RNA, 19 nt, Artificial Sequence
  Description of Artificial Sequence: Synthetic oligonucleotide
guagaaggcgacucucgaa

SEQ ID NO: 1512241 - RNA, 19 nt, Artificial Sequence
  Description of Artificial Sequence: Synthetic oligonucleotide
cccauuacugagagagucc

SEQ ID NO: 1512242 - RNA, 19 nt, Artificial Sequence
  Description of Artificial Sequence: Synthetic oligonucleotide
agccccaaacagguuauca

SEQ ID NO: 1512243 - RNA, 19 nt, Artificial Sequence
  Description of Artificial Sequence: Synthetic oligonucleotide
gaccgguuuuagcauugca

SEQ ID NO: 1512244 - RNA, 19 nt, Artificial Sequence
  Description of Artificial Sequence: Synthetic oligonucleotide
ugagcccaugugcuuuaaa

SEQ ID NO: 1512245 - RNA, 19 nt, Artificial Sequence
  Description of Artificial Sequence: Synthetic oligonucleotide
ggaaaacugaaggaaggaa

SEQ ID NO: 1512246 - RNA, 19 nt, Artificial Sequence
  Description of Artificial Sequence: Synthetic oligonucleotide
cgaaacagaacaaggucuc

SEQ ID NO: 1512247 - RNA, 19 nt, Artificial Sequence
  Description of Artificial Sequence: Synthetic oligonucleotide
gauugauguucagccuuca

SEQ ID NO: 1512248 - RNA, 19 nt, Artificial Sequence
  Description of Artificial Sequence: Synthetic oligonucleotide
ucuccugugcuagucuaua

SEQ ID NO: 1512249 - RNA, 19 nt, Artificial Sequence
  Description of Artificial Sequence: Synthetic oligonucleotide
ucugagcccaugugcuuua

SEQ ID NO: 1512250 - RNA, 19 nt, Artificial Sequence
  Description of Artificial Sequence: Synthetic oligonucleotide
gggcuacaucuucuuaucc

SEQ ID NO: 1512251 - RNA, 19 nt, Artificial Sequence
  Description of Artificial Sequence: Synthetic oligonucleotide
ggauuauguaccaucuuua

SEQ ID NO: 1512252 - RNA, 19 nt, Artificial Sequence
  Description of Artificial Sequence: Synthetic oligonucleotide
uggcuagugcaagaacaaa

SEQ ID NO: 1512253 - RNA, 19 nt, Artificial Sequence
  Description of Artificial Sequence: Synthetic oligonucleotide
guccauguaucaucuugaa

SEQ ID NO: 1512254 - RNA, 19 nt, Artificial Sequence
  Description of Artificial Sequence: Synthetic oligonucleotide
cugcauagcuacuucugua

SEQ ID NO: 1512255 - RNA, 19 nt, Artificial Sequence
  Description of Artificial Sequence: Synthetic oligonucleotide
uggccucauuuuguguuca

SEQ ID NO: 1512256 - RNA, 19 nt, Artificial Sequence
  Description of Artificial Sequence: Synthetic oligonucleotide
ggcuagugcaagaacaaaa

SEQ ID NO: 1512257 - RNA, 19 nt, Artificial Sequence
  Description of Artificial Sequence: Synthetic oligonucleotide
gccuaguagaugaaaagaa

SEQ ID NO: 1512258 - RNA, 19 nt, Artificial Sequence
  Description of Artificial Sequence: Synthetic oligonucleotide
uuguaggauuauguaccau

SEQ ID NO: 1512259 - RNA, 19 nt, Artificial Sequence
  Description of Artificial Sequence: Synthetic oligonucleotide
ccugauaagucuuuuaguu

SEQ ID NO: 1512260 - RNA, 19 nt, Artificial Sequence
  Description of Artificial Sequence: Synthetic oligonucleotide
cuccuuaacacuguacccu

SEQ ID NO: 1512261 - RNA, 19 nt, Artificial Sequence
  Description of Artificial Sequence: Synthetic oligonucleotide
aguccccggaugacagagc

SEQ ID NO: 1512262 - RNA, 19 nt, Artificial Sequence
  Description of Artificial Sequence: Synthetic oligonucleotide
agcccugauaagucuuuua

SEQ ID NO: 1512263 - RNA, 19 nt, Artificial Sequence
  Description of Artificial Sequence: Synthetic oligonucleotide
uggucacgugaaugauuga

SEQ ID NO: 1512264 - RNA, 19 nt, Artificial Sequence
  Description of Artificial Sequence: Synthetic oligonucleotide
acauaccauuuuguccaug

SEQ ID NO: 1512265 - RNA, 19 nt, Artificial Sequence
  Description of Artificial Sequence: Synthetic oligonucleotide
aguucccuggucccuccaa

SEQ ID NO: 1512266 - RNA, 19 nt, Artificial Sequence
  Description of Artificial Sequence: Synthetic oligonucleotide
ccaaaaugucuaauauaga

SEQ ID NO: 1512267 - RNA, 19 nt, Artificial Sequence
  Description of Artificial Sequence: Synthetic oligonucleotide
cuacuucuguaguugugcu

SEQ ID NO: 1512268 - RNA, 19 nt, Artificial Sequence
  Description of Artificial Sequence: Synthetic oligonucleotide
gugggagcccugauaaguc

SEQ ID NO: 1512269 - RNA, 19 nt, Artificial Sequence
  Description of Artificial Sequence: Synthetic oligonucleotide
ccauuuuguccauguauca

SEQ ID NO: 1512270 - RNA, 19 nt, Artificial Sequence
  Description of Artificial Sequence: Synthetic oligonucleotide
agaguccccggaugacaga

SEQ ID NO: 1512271 - RNA, 19 nt, Artificial Sequence
  Description of Artificial Sequence: Synthetic oligonucleotide
ccccggaugacagagcuac

SEQ ID NO: 1512272 - RNA, 19 nt, Artificial Sequence
  Description of Artificial Sequence: Synthetic oligonucleotide
caugcuucuaugugauuau

SEQ ID NO: 1512273 - RNA, 19 nt, Artificial Sequence
  Description of Artificial Sequence: Synthetic oligonucleotide
ccccagaccgguuuuagca

SEQ ID NO: 1512274 - RNA, 19 nt, Artificial Sequence
  Description of Artificial Sequence: Synthetic oligonucleotide
ggcgcaaacaauggauuuc

SEQ ID NO: 1512275 - RNA, 19 nt, Artificial Sequence
  Description of Artificial Sequence: Synthetic oligonucleotide
agccugauacagacuccuc

SEQ ID NO: 1512276 - RNA, 19 nt, Artificial Sequence
  Description of Artificial Sequence: Synthetic oligonucleotide
ccccauuacugagagaguc

SEQ ID NO: 1512277 - RNA, 19 nt, Artificial Sequence
  Description of Artificial Sequence: Synthetic oligonucleotide
ccggaugacagagcuacag

SEQ ID NO: 1512278 - RNA, 19 nt, Artificial Sequence
  Description of Artificial Sequence: Synthetic oligonucleotide
gcgcaaacaauggauuuca

SEQ ID NO: 1512279 - RNA, 19 nt, Artificial Sequence
  Description of Artificial Sequence: Synthetic oligonucleotide
gcaacuggugauaaaauuu

SEQ ID NO: 1512280 - RNA, 19 nt, Artificial Sequence
  Description of Artificial Sequence: Synthetic oligonucleotide
cagacgagauauggauuuc

SEQ ID NO: 1512281 - RNA, 19 nt, Artificial Sequence
  Description of Artificial Sequence: Synthetic oligonucleotide
gccuugaaaaugagcugag

SEQ ID NO: 1512282 - RNA, 19 nt, Artificial Sequence
  Description of Artificial Sequence: Synthetic oligonucleotide
gagcuacagugaggaaagc

SEQ ID NO: 1512283 - RNA, 19 nt, Artificial Sequence
  Description of Artificial Sequence: Synthetic oligonucleotide
uucgggcucuucagcuguc

SEQ ID NO: 1512284 - RNA, 19 nt, Artificial Sequence
  Description of Artificial Sequence: Synthetic oligonucleotide
auccuacauuacguaauuu

SEQ ID NO: 1512285 - RNA, 19 nt, Artificial Sequence
  Description of Artificial Sequence: Synthetic oligonucleotide
auaggaacacuggccucau

SEQ ID NO: 1512286 - RNA, 19 nt, Artificial Sequence
  Description of Artificial Sequence: Synthetic oligonucleotide
cauuuuguccauguaucau

SEQ ID NO: 1512287 - RNA, 19 nt, Artificial Sequence
  Description of Artificial Sequence: Synthetic oligonucleotide
ucgggcucuucagcuguca

SEQ ID NO: 1512288 - RNA, 19 nt, Artificial Sequence
  Description of Artificial Sequence: Synthetic oligonucleotide
cugcccagccuaguagaug

SEQ ID NO: 1512289 - RNA, 19 nt, Artificial Sequence
  Description of Artificial Sequence: Synthetic oligonucleotide
gugcagguuuacuuucgua

SEQ ID NO: 1512290 - RNA, 19 nt, Artificial Sequence
  Description of Artificial Sequence: Synthetic oligonucleotide
cauccuacauuacguaauu

SEQ ID NO: 1512291 - RNA, 19 nt, Artificial Sequence
  Description of Artificial Sequence: Synthetic oligonucleotide
ggagccugauacagacucc

SEQ ID NO: 1512292 - RNA, 19 nt, Artificial Sequence
  Description of Artificial Sequence: Synthetic oligonucleotide
ggauuuuagugcagguuua

SEQ ID NO: 1512293 - RNA, 19 nt, Artificial Sequence
  Description of Artificial Sequence: Synthetic oligonucleotide
cgagauauggauuucuuuu

SEQ ID NO: 1512294 - RNA, 19 nt, Artificial Sequence
  Description of Artificial Sequence: Synthetic oligonucleotide
uccccggaugacagagcua

SEQ ID NO: 1512295 - RNA, 19 nt, Artificial Sequence
  Description of Artificial Sequence: Synthetic oligonucleotide
caucuaguagcuugucauu

SEQ ID NO: 1512296 - RNA, 19 nt, Artificial Sequence
  Description of Artificial Sequence: Synthetic oligonucleotide
ggucacgugaaugauugau

SEQ ID NO: 1512297 - RNA, 19 nt, Artificial Sequence
  Description of Artificial Sequence: Synthetic oligonucleotide
gccucauuuuguguucaac

SEQ ID NO: 1512298 - RNA, 19 nt, Artificial Sequence
  Description of Artificial Sequence: Synthetic oligonucleotide
gcuagucuauauauaccua

SEQ ID NO: 1512299 - RNA, 19 nt, Artificial Sequence
  Description of Artificial Sequence: Synthetic oligonucleotide
gcauagcuacuucuguagu

SEQ ID NO: 1512300 - RNA, 19 nt, Artificial Sequence
  Description of Artificial Sequence: Synthetic oligonucleotide
gcgacucucgaaacagaac

SEQ ID NO: 1512301 - RNA, 19 nt, Artificial Sequence
  Description of Artificial Sequence: Synthetic oligonucleotide
aggcgacucucgaaacaga

SEQ ID NO: 1512302 - RNA, 19 nt, Artificial Sequence
  Description of Artificial Sequence: Synthetic oligonucleotide
cacagaggagaugaaugau

SEQ ID NO: 1512303 - RNA, 19 nt, Artificial Sequence
  Description of Artificial Sequence: Synthetic oligonucleotide
cagugcugaaaaucgucuu

SEQ ID NO: 1512304 - RNA, 19 nt, Artificial Sequence
  Description of Artificial Sequence: Synthetic oligonucleotide
gagccccaaacagguuauc

SEQ ID NO: 1512305 - RNA, 19 nt, Artificial Sequence
  Description of Artificial Sequence: Synthetic oligonucleotide
cacgugaaugauugauguu

SEQ ID NO: 1512306 - RNA, 19 nt, Artificial Sequence
  Description of Artificial Sequence: Synthetic oligonucleotide
cccugauaagucuuuuagu

SEQ ID NO: 1512307 - RNA, 19 nt, Artificial Sequence
  Description of Artificial Sequence: Synthetic oligonucleotide
cacuggccucauuuugugu

SEQ ID NO: 1512308 - RNA, 19 nt, Artificial Sequence
  Description of Artificial Sequence: Synthetic oligonucleotide
cugaaguuuguaggauuau

SEQ ID NO: 1512309 - RNA, 19 nt, Artificial Sequence
  Description of Artificial Sequence: Synthetic oligonucleotide
ccucagcauacacaagucu

SEQ ID NO: 1512310 - RNA, 19 nt, Artificial Sequence
  Description of Artificial Sequence: Synthetic oligonucleotide
cucuccugugcuagucuau

SEQ ID NO: 1512311 - RNA, 19 nt, Artificial Sequence
  Description of Artificial Sequence: Synthetic oligonucleotide
ccaacacauagcucaugcu

SEQ ID NO: 1512312 - RNA, 19 nt, Artificial Sequence
  Description of Artificial Sequence: Synthetic oligonucleotide
gagcccugauaagucuuuu

SEQ ID NO: 1512313 - RNA, 19 nt, Artificial Sequence
  Description of Artificial Sequence: Synthetic oligonucleotide
cucaugcuucuaugugauu

SEQ ID NO: 1512314 - RNA, 19 nt, Artificial Sequence
  Description of Artificial Sequence: Synthetic oligonucleotide
ccuuaacacuguacccugu

SEQ ID NO: 1512315 - RNA, 19 nt, Artificial Sequence
  Description of Artificial Sequence: Synthetic oligonucleotide
cugagcccaugugcuuuaa

SEQ ID NO: 1512316 - RNA, 19 nt, Artificial Sequence
  Description of Artificial Sequence: Synthetic oligonucleotide
cccagaccgguuuuagcau

SEQ ID NO: 1512317 - RNA, 19 nt, Artificial Sequence
  Description of Artificial Sequence: Synthetic oligonucleotide
cccuguagaaggcgacucu

SEQ ID NO: 1512318 - RNA, 19 nt, Artificial Sequence
  Description of Artificial Sequence: Synthetic oligonucleotide
ggagcccugauaagucuuu

SEQ ID NO: 1512319 - RNA, 19 nt, Artificial Sequence
  Description of Artificial Sequence: Synthetic oligonucleotide
ccagaccgguuuuagcauu

SEQ ID NO: 1512320 - RNA, 19 nt, Artificial Sequence
  Description of Artificial Sequence: Synthetic oligonucleotide
cccggaugacagagcuaca

SEQ ID NO: 1512321 - RNA, 19 nt, Artificial Sequence
  Description of Artificial Sequence: Synthetic oligonucleotide
cgagggcuacaucuucuua

SEQ ID NO: 1512322 - RNA, 19 nt, Artificial Sequence
  Description of Artificial Sequence: Synthetic oligonucleotide
gcuccgagggcuacaucuu

SEQ ID NO: 1512323 - RNA, 19 nt, Artificial Sequence
  Description of Artificial Sequence: Synthetic oligonucleotide
ccgagggcuacaucuucuu

SEQ ID NO: 1512324 - RNA, 19 nt, Artificial Sequence
  Description of Artificial Sequence: Synthetic oligonucleotide
ggagaaccccagaccgguu

SEQ ID NO: 1512325 - RNA, 19 nt, Artificial Sequence
  Description of Artificial Sequence: Synthetic oligonucleotide
aaaucaacgugagagauac

SEQ ID NO: 1512326 - RNA, 19 nt, Artificial Sequence
  Description of Artificial Sequence: Synthetic oligonucleotide
acauaaauuagcuauagca

SEQ ID NO: 1512327 - RNA, 19 nt, Artificial Sequence
  Description of Artificial Sequence: Synthetic oligonucleotide
aaucagaggggacagacgg

SEQ ID NO: 1512328 - RNA, 19 nt, Artificial Sequence
  Description of Artificial Sequence: Synthetic oligonucleotide
aauccugagggcuuguugg

SEQ ID NO: 1512329 - RNA, 19 nt, Artificial Sequence
  Description of Artificial Sequence: Synthetic oligonucleotide
ugagagauacuacauuugg

SEQ ID NO: 1512330 - RNA, 19 nt, Artificial Sequence
  Description of Artificial Sequence: Synthetic oligonucleotide
acuaacacuagguaagcac

SEQ ID NO: 1512331 - RNA, 19 nt, Artificial Sequence
  Description of Artificial Sequence: Synthetic oligonucleotide
ucuccaauacauaaauuag

SEQ ID NO: 1512332 - RNA, 19 nt, Artificial Sequence
  Description of Artificial Sequence: Synthetic oligonucleotide
agagucuaaauuuauuaag

SEQ ID NO: 1512333 - RNA, 19 nt, Artificial Sequence
  Description of Artificial Sequence: Synthetic oligonucleotide
uuaaaucuccaauacauaa

SEQ ID NO: 1512334 - RNA, 19 nt, Artificial Sequence
  Description of Artificial Sequence: Synthetic oligonucleotide
uguaaaagcaggcaucaca

SEQ ID NO: 1512335 - RNA, 19 nt, Artificial Sequence
  Description of Artificial Sequence: Synthetic oligonucleotide
agagauacuacauuuggcu

SEQ ID NO: 1512336 - RNA, 19 nt, Artificial Sequence
  Description of Artificial Sequence: Synthetic oligonucleotide
guaaaucugauccucuacg

SEQ ID NO: 1512337 - RNA, 19 nt, Artificial Sequence
  Description of Artificial Sequence: Synthetic oligonucleotide
guaaacuucagauuccuug

SEQ ID NO: 1512338 - RNA, 19 nt, Artificial Sequence
  Description of Artificial Sequence: Synthetic oligonucleotide
ugaugcuaaauucaucuug

SEQ ID NO: 1512339 - RNA, 19 nt, Artificial Sequence
  Description of Artificial Sequence: Synthetic oligonucleotide
agauacuacauuuggcuuc

SEQ ID NO: 1512340 - RNA, 19 nt, Artificial Sequence
  Description of Artificial Sequence: Synthetic oligonucleotide
gaagcagccacuuugguga

SEQ ID NO: 1512341 - RNA, 19 nt, Artificial Sequence
  Description of Artificial Sequence: Synthetic oligonucleotide
cauucagagaaccagguac

SEQ ID NO: 1512342 - RNA, 19 nt, Artificial Sequence
  Description of Artificial Sequence: Synthetic oligonucleotide
ugaaggacaauuugcuggg

SEQ ID NO: 1512343 - RNA, 19 nt, Artificial Sequence
  Description of Artificial Sequence: Synthetic oligonucleotide
acuuccuaugugcaggacc

SEQ ID NO: 1512344 - RNA, 19 nt, Artificial Sequence
  Description of Artificial Sequence: Synthetic oligonucleotide
caucauagcccucaggugg

SEQ ID NO: 1512345 - RNA, 19 nt, Artificial Sequence
  Description of Artificial Sequence: Synthetic oligonucleotide
guaucuucuccaucgaugg

SEQ ID NO: 1512346 - RNA, 19 nt, Artificial Sequence
  Description of Artificial Sequence: Synthetic oligonucleotide
accaacguccauuugcagc

SEQ ID NO: 1512347 - RNA, 19 nt, Artificial Sequence
  Description of Artificial Sequence: Synthetic oligonucleotide
cuacauuuggcuucguucc

SEQ ID NO: 1512348 - RNA, 19 nt, Artificial Sequence
  Description of Artificial Sequence: Synthetic oligonucleotide
uccuugucgaugaugaggc

SEQ ID NO: 1512349 - RNA, 19 nt, Artificial Sequence
  Description of Artificial Sequence: Synthetic oligonucleotide
ugugauuaaaucuccaaua

SEQ ID NO: 1512350 - RNA, 19 nt, Artificial Sequence
  Description of Artificial Sequence: Synthetic oligonucleotide
uccucuacgaagaaauggc

SEQ ID NO: 1512351 - RNA, 19 nt, Artificial Sequence
  Description of Artificial Sequence: Synthetic oligonucleotide
uccaguaguguaaaagcag

SEQ ID NO: 1512352 - RNA, 19 nt, Artificial Sequence
  Description of Artificial Sequence: Synthetic oligonucleotide
ugguuugugaugauccggg

SEQ ID NO: 1512353 - RNA, 19 nt, Artificial Sequence
  Description of Artificial Sequence: Synthetic oligonucleotide
acagucgguacacacauag

SEQ ID NO: 1512354 - RNA, 19 nt, Artificial Sequence
  Description of Artificial Sequence: Synthetic oligonucleotide
aguaccacaucugucacac

SEQ ID NO: 1512355 - RNA, 19 nt, Artificial Sequence
  Description of Artificial Sequence: Synthetic oligonucleotide
ugauuaaaucuccaauaca

SEQ ID NO: 1512356 - RNA, 19 nt, Artificial Sequence
  Description of Artificial Sequence: Synthetic oligonucleotide
aaucacuuggggaacacag

SEQ ID NO: 1512357 - RNA, 19 nt, Artificial Sequence
  Description of Artificial Sequence: Synthetic oligonucleotide
cuccaauacauaaauuagc

SEQ ID NO: 1512358 - RNA, 19 nt, Artificial Sequence
  Description of Artificial Sequence: Synthetic oligonucleotide
agucgguacacacauagca

SEQ ID NO: 1512359 - RNA, 19 nt, Artificial Sequence
  Description of Artificial Sequence: Synthetic oligonucleotide
ucuacgaagaaauggcccu

SEQ ID NO: 1512360 - RNA, 19 nt, Artificial Sequence
  Description of Artificial Sequence: Synthetic oligonucleotide
ugucauguugucuguacag

SEQ ID NO: 1512361 - RNA, 19 nt, Artificial Sequence
  Description of Artificial Sequence: Synthetic oligonucleotide
ucacuuggggaacacagug

SEQ ID NO: 1512362 - RNA, 19 nt, Artificial Sequence
  Description of Artificial Sequence: Synthetic oligonucleotide
gauacuacauuuggcuucg

SEQ ID NO: 1512363 - RNA, 19 nt, Artificial Sequence
  Description of Artificial Sequence: Synthetic oligonucleotide
guauggaugacguuucccc

SEQ ID NO: 1512364 - RNA, 19 nt, Artificial Sequence
  Description of Artificial Sequence: Synthetic oligonucleotide
ucgcuaggcacaaucagag

SEQ ID NO: 1512365 - RNA, 19 nt, Artificial Sequence
  Description of Artificial Sequence: Synthetic oligonucleotide
uacauaaauuagcuauagc

SEQ ID NO: 1512366 - RNA, 19 nt, Artificial Sequence
  Description of Artificial Sequence: Synthetic oligonucleotide
uagagucuaaauuuauuaa

SEQ ID NO: 1512367 - RNA, 19 nt, Artificial Sequence
  Description of Artificial Sequence: Synthetic oligonucleotide
uaaaucugauccucuacga

SEQ ID NO: 1512368 - RNA, 19 nt, Artificial Sequence
  Description of Artificial Sequence: Synthetic oligonucleotide
gcuaggcacaaucagaggg

SEQ ID NO: 1512369 - RNA, 19 nt, Artificial Sequence
  Description of Artificial Sequence: Synthetic oligonucleotide
aacacucccacaaugccag

SEQ ID NO: 1512370 - RNA, 19 nt, Artificial Sequence
  Description of Artificial Sequence: Synthetic oligonucleotide
gcugguaucuucuccaucg

SEQ ID NO: 1512371 - RNA, 19 nt, Artificial Sequence
  Description of Artificial Sequence: Synthetic oligonucleotide
uuagcuauagcagccuugc

SEQ ID NO: 1512372 - RNA, 19 nt, Artificial Sequence
  Description of Artificial Sequence: Synthetic oligonucleotide
uuuaacacuucugaauccu

SEQ ID NO: 1512373 - RNA, 19 nt, Artificial Sequence
  Description of Artificial Sequence: Synthetic oligonucleotide
cucuacgaagaaauggccc

SEQ ID NO: 1512374 - RNA, 19 nt, Artificial Sequence
  Description of Artificial Sequence: Synthetic oligonucleotide
cuuuaacacuucugaaucc

SEQ ID NO: 1512375 - RNA, 19 nt, Artificial Sequence
  Description of Artificial Sequence: Synthetic oligonucleotide
gauuaaaucuccaauacau

SEQ ID NO: 1512376 - RNA, 19 nt, Artificial Sequence
  Description of Artificial Sequence: Synthetic oligonucleotide
uuuagagucuaaauuuauu

SEQ ID NO: 1512377 - RNA, 19 nt, Artificial Sequence
  Description of Artificial Sequence: Synthetic oligonucleotide
agaacugucagggaggaga

SEQ ID NO: 1512378 - RNA, 19 nt, Artificial Sequence
  Description of Artificial Sequence: Synthetic oligonucleotide
agcuuuaacacuucugaau

SEQ ID NO: 1512379 - RNA, 19 nt, Artificial Sequence
  Description of Artificial Sequence: Synthetic oligonucleotide
uacggugagugucauguug

SEQ ID NO: 1512380 - RNA, 19 nt, Artificial Sequence
  Description of Artificial Sequence: Synthetic oligonucleotide
aaccauuuccaguagugua

SEQ ID NO: 1512381 - RNA, 19 nt, Artificial Sequence
  Description of Artificial Sequence: Synthetic oligonucleotide
gaagaaauggcccuucugu

SEQ ID NO: 1512382 - RNA, 19 nt, Artificial Sequence
  Description of Artificial Sequence: Synthetic oligonucleotide
uaccacaucugucacacau

SEQ ID NO: 1512383 - RNA, 19 nt, Artificial Sequence
  Description of Artificial Sequence: Synthetic oligonucleotide
ugggagucagcacaggcga

SEQ ID NO: 1512384 - RNA, 19 nt, Artificial Sequence
  Description of Artificial Sequence: Synthetic oligonucleotide
cuaacacuagguaagcaca

SEQ ID NO: 1512385 - RNA, 19 nt, Artificial Sequence
  Description of Artificial Sequence: Synthetic oligonucleotide
uugcucgaaguccuugccg

SEQ ID NO: 1512386 - RNA, 19 nt, Artificial Sequence
  Description of Artificial Sequence: Synthetic oligonucleotide
uguacagcccuugauuuug

SEQ ID NO: 1512387 - RNA, 19 nt, Artificial Sequence
  Description of Artificial Sequence: Synthetic oligonucleotide
acugguuugugaugauccg

SEQ ID NO: 1512388 - RNA, 19 nt, Artificial Sequence
  Description of Artificial Sequence: Synthetic oligonucleotide
uaaauggcaucgcgcuucg

SEQ ID NO: 1512389 - RNA, 19 nt, Artificial Sequence
  Description of Artificial Sequence: Synthetic oligonucleotide
guccuugccgccuacgagg

SEQ ID NO: 1512390 - RNA, 19 nt, Artificial Sequence
  Description of Artificial Sequence: Synthetic oligonucleotide
ugcucgaaguccuugccgc

SEQ ID NO: 1512391 - RNA, 19 nt, Artificial Sequence
  Description of Artificial Sequence: Synthetic oligonucleotide
ucaucgcuaggcacaauca

SEQ ID NO: 1512392 - RNA, 19 nt, Artificial Sequence
  Description of Artificial Sequence: Synthetic oligonucleotide
ugauccgagugucugcucu

SEQ ID NO: 1512393 - RNA, 19 nt, Artificial Sequence
  Description of Artificial Sequence: Synthetic oligonucleotide
gaaggagguggacuguuug

SEQ ID NO: 1512394 - RNA, 19 nt, Artificial Sequence
  Description of Artificial Sequence: Synthetic oligonucleotide
gauacggugagugucaugu

SEQ ID NO: 1512395 - RNA, 19 nt, Artificial Sequence
  Description of Artificial Sequence: Synthetic oligonucleotide
aaauuagcuauagcagccu

SEQ ID NO: 1512396 - RNA, 19 nt, Artificial Sequence
  Description of Artificial Sequence: Synthetic oligonucleotide
uguaugguggugcgggaga

SEQ ID NO: 1512397 - RNA, 19 nt, Artificial Sequence
  Description of Artificial Sequence: Synthetic oligonucleotide
aguaguguaaaagcaggca

SEQ ID NO: 1512398 - RNA, 19 nt, Artificial Sequence
  Description of Artificial Sequence: Synthetic oligonucleotide
aaugccaguaccacaucug

SEQ ID NO: 1512399 - RNA, 19 nt, Artificial Sequence
  Description of Artificial Sequence: Synthetic oligonucleotide
agcagagaagacccaagug

SEQ ID NO: 1512400 - RNA, 19 nt, Artificial Sequence
  Description of Artificial Sequence: Synthetic oligonucleotide
gcuuuaacacuucugaauc

SEQ ID NO: 1512401 - RNA, 19 nt, Artificial Sequence
  Description of Artificial Sequence: Synthetic oligonucleotide
aauuagcuauagcagccuu

SEQ ID NO: 1512402 - RNA, 19 nt, Artificial Sequence
  Description of Artificial Sequence: Synthetic oligonucleotide
ugaggcugccugaaggaug

SEQ ID NO: 1512403 - RNA, 19 nt, Artificial Sequence
  Description of Artificial Sequence: Synthetic oligonucleotide
uucgguugugggcacuucc

SEQ ID NO: 1512404 - RNA, 19 nt, Artificial Sequence
  Description of Artificial Sequence: Synthetic oligonucleotide
gcugucuucgacuccacgg

SEQ ID NO: 1512405 - RNA, 19 nt, Artificial Sequence
  Description of Artificial Sequence: Synthetic oligonucleotide
gugacgggagcuuuaacac

SEQ ID NO: 1512406 - RNA, 19 nt, Artificial Sequence
  Description of Artificial Sequence: Synthetic oligonucleotide
ugcucagaccuggauacgg

SEQ ID NO: 1512407 - RNA, 19 nt, Artificial Sequence
  Description of Artificial Sequence: Synthetic oligonucleotide
uggaugacguuuccccucc

SEQ ID NO: 1512408 - RNA, 19 nt, Artificial Sequence
  Description of Artificial Sequence: Synthetic oligonucleotide
cacaugggcagcuucugag

SEQ ID NO: 1512409 - RNA, 19 nt, Artificial Sequence
  Description of Artificial Sequence: Synthetic oligonucleotide
uauagcagccuugcuuccg

SEQ ID NO: 1512410 - RNA, 19 nt, Artificial Sequence
  Description of Artificial Sequence: Synthetic oligonucleotide
aggcggaaaccccaggguc

SEQ ID NO: 1512411 - RNA, 19 nt, Artificial Sequence
  Description of Artificial Sequence: Synthetic oligonucleotide
caucuuguaaacuucagau

SEQ ID NO: 1512412 - RNA, 19 nt, Artificial Sequence
  Description of Artificial Sequence: Synthetic oligonucleotide
cugucuucgacuccacggc

SEQ ID NO: 1512413 - RNA, 19 nt, Artificial Sequence
  Description of Artificial Sequence: Synthetic oligonucleotide
uguucaccgagcaggacua

SEQ ID NO: 1512414 - RNA, 19 nt, Artificial Sequence
  Description of Artificial Sequence: Synthetic oligonucleotide
acacuagguaagcacagaa

SEQ ID NO: 1512415 - RNA, 19 nt, Artificial Sequence
  Description of Artificial Sequence: Synthetic oligonucleotide
gugauggucccucagcuuc

SEQ ID NO: 1512416 - RNA, 19 nt, Artificial Sequence
  Description of Artificial Sequence: Synthetic oligonucleotide
ggcaguaaauggcaucgcg

SEQ ID NO: 1512417 - RNA, 19 nt, Artificial Sequence
  Description of Artificial Sequence: Synthetic oligonucleotide
gggacaaaaccauuuccag

SEQ ID NO: 1512418 - RNA, 19 nt, Artificial Sequence
  Description of Artificial Sequence: Synthetic oligonucleotide
cuugucgaugaugaggcug

SEQ ID NO: 1512419 - RNA, 19 nt, Artificial Sequence
  Description of Artificial Sequence: Synthetic oligonucleotide
uggucccucagcuucacaa

SEQ ID NO: 1512420 - RNA, 19 nt, Artificial Sequence
  Description of Artificial Sequence: Synthetic oligonucleotide
gcuauagcagccuugcuuc

SEQ ID NO: 1512421 - RNA, 19 nt, Artificial Sequence
  Description of Artificial Sequence: Synthetic oligonucleotide
uccccucaaucacuugggg

SEQ ID NO: 1512422 - RNA, 19 nt, Artificial Sequence
  Description of Artificial Sequence: Synthetic oligonucleotide
cagcacaggcgaaacacag

SEQ ID NO: 1512423 - RNA, 19 nt, Artificial Sequence
  Description of Artificial Sequence: Synthetic oligonucleotide
agguggugugacccgcucc

SEQ ID NO: 1512424 - RNA, 19 nt, Artificial Sequence
  Description of Artificial Sequence: Synthetic oligonucleotide
ucgguacacacauagcauu

SEQ ID NO: 1512425 - RNA, 19 nt, Artificial Sequence
  Description of Artificial Sequence: Synthetic oligonucleotide
cuugccgccuacgaggcgg

SEQ ID NO: 1512426 - RNA, 19 nt, Artificial Sequence
  Description of Artificial Sequence: Synthetic oligonucleotide
caucgcuaggcacaaucag

SEQ ID NO: 1512427 - RNA, 19 nt, Artificial Sequence
  Description of Artificial Sequence: Synthetic oligonucleotide
agggacaaaaccauuucca

SEQ ID NO: 1512428 - RNA, 19 nt, Artificial Sequence
  Description of Artificial Sequence: Synthetic oligonucleotide
acguuuccccuccucacuc

SEQ ID NO: 1512429 - RNA, 19 nt, Artificial Sequence
  Description of Artificial Sequence: Synthetic oligonucleotide
gucaucgcuaggcacaauc

SEQ ID NO: 1512430 - RNA, 19 nt, Artificial Sequence
  Description of Artificial Sequence: Synthetic oligonucleotide
uggguggucaucgcuaggc

SEQ ID NO: 1512431 - RNA, 19 nt, Artificial Sequence
  Description of Artificial Sequence: Synthetic oligonucleotide
ggugacgggagcuuuaaca

SEQ ID NO: 1512432 - RNA, 19 nt, Artificial Sequence
  Description of Artificial Sequence: Synthetic oligonucleotide
guaaauggcaucgcgcuuc

SEQ ID NO: 1512433 - RNA, 19 nt, Artificial Sequence
  Description of Artificial Sequence: Synthetic oligonucleotide
aggcgaaacacaguguuca

SEQ ID NO: 1512434 - RNA, 19 nt, Artificial Sequence
  Description of Artificial Sequence: Synthetic oligonucleotide
uucagagaaccagguacag

SEQ ID NO: 1512435 - RNA, 19 nt, Artificial Sequence
  Description of Artificial Sequence: Synthetic oligonucleotide
ugacccgggaaauggcgag

SEQ ID NO: 1512436 - RNA, 19 nt, Artificial Sequence
  Description of Artificial Sequence: Synthetic oligonucleotide
cugguuugugaugauccgg

SEQ ID NO: 1512437 - RNA, 19 nt, Artificial Sequence
  Description of Artificial Sequence: Synthetic oligonucleotide
ugggcacuuccuaugugca

SEQ ID NO: 1512438 - RNA, 19 nt, Artificial Sequence
  Description of Artificial Sequence: Synthetic oligonucleotide
ggagauguuuucaggagag

SEQ ID NO: 1512439 - RNA, 19 nt, Artificial Sequence
  Description of Artificial Sequence: Synthetic oligonucleotide
ugucuucgacuccacggca

SEQ ID NO: 1512440 - RNA, 19 nt, Artificial Sequence
  Description of Artificial Sequence: Synthetic oligonucleotide
aguccuugccgccuacgag

SEQ ID NO: 1512441 - RNA, 19 nt, Artificial Sequence
  Description of Artificial Sequence: Synthetic oligonucleotide
agugacccgggaaauggcg

SEQ ID NO: 1512442 - RNA, 19 nt, Artificial Sequence
  Description of Artificial Sequence: Synthetic oligonucleotide
cacaucauagcccucaggu

SEQ ID NO: 1512443 - RNA, 19 nt, Artificial Sequence
  Description of Artificial Sequence: Synthetic oligonucleotide
aacacuagguaagcacaga

SEQ ID NO: 1512444 - RNA, 19 nt, Artificial Sequence
  Description of Artificial Sequence: Synthetic oligonucleotide
ggagugacccgggaaaugg

SEQ ID NO: 1512445 - RNA, 19 nt, Artificial Sequence
  Description of Artificial Sequence: Synthetic oligonucleotide
gcaucacacugcuaguggg

SEQ ID NO: 1512446 - RNA, 19 nt, Artificial Sequence
  Description of Artificial Sequence: Synthetic oligonucleotide
agcaggacuaacacuaggu

SEQ ID NO: 1512447 - RNA, 19 nt, Artificial Sequence
  Description of Artificial Sequence: Synthetic oligonucleotide
uacgaggcggaaaccccag

SEQ ID NO: 1512448 - RNA, 19 nt, Artificial Sequence
  Description of Artificial Sequence: Synthetic oligonucleotide
auugugaccaacguccauu

SEQ ID NO: 1512449 - RNA, 19 nt, Artificial Sequence
  Description of Artificial Sequence: Synthetic oligonucleotide
ugacgggagcuuuaacacu

SEQ ID NO: 1512450 - RNA, 19 nt, Artificial Sequence
  Description of Artificial Sequence: Synthetic oligonucleotide
guugcucgaaguccuugcc

SEQ ID NO: 1512451 - RNA, 19 nt, Artificial Sequence
  Description of Artificial Sequence: Synthetic oligonucleotide
ucgguugugggcacuuccu

SEQ ID NO: 1512452 - RNA, 19 nt, Artificial Sequence
  Description of Artificial Sequence: Synthetic oligonucleotide
aaauggcccuucuguuuca

SEQ ID NO: 1512453 - RNA, 19 nt, Artificial Sequence
  Description of Artificial Sequence: Synthetic oligonucleotide
uccuugccgccuacgaggc

SEQ ID NO: 1512454 - RNA, 19 nt, Artificial Sequence
  Description of Artificial Sequence: Synthetic oligonucleotide
guaguguaaaagcaggcau

SEQ ID NO: 1512455 - RNA, 19 nt, Artificial Sequence
  Description of Artificial Sequence: Synthetic oligonucleotide
uugcuuccgggagugaccc

SEQ ID NO: 1512456 - RNA, 19 nt, Artificial Sequence
  Description of Artificial Sequence: Synthetic oligonucleotide
ugauggucccucagcuuca

SEQ ID NO: 1512457 - RNA, 19 nt, Artificial Sequence
  Description of Artificial Sequence: Synthetic oligonucleotide
caucugucacacaugggca

SEQ ID NO: 1512458 - RNA, 19 nt, Artificial Sequence
  Description of Artificial Sequence: Synthetic oligonucleotide
ugugggcacuuccuaugug

SEQ ID NO: 1512459 - RNA, 19 nt, Artificial Sequence
  Description of Artificial Sequence: Synthetic oligonucleotide
gaaaccccagggucccggg

SEQ ID NO: 1512460 - RNA, 19 nt, Artificial Sequence
  Description of Artificial Sequence: Synthetic oligonucleotide
cuauagcagccuugcuucc

SEQ ID NO: 1512461 - RNA, 19 nt, Artificial Sequence
  Description of Artificial Sequence: Synthetic oligonucleotide
auuaaaucuccaauacaua

SEQ ID NO: 1512462 - RNA, 19 nt, Artificial Sequence
  Description of Artificial Sequence: Synthetic oligonucleotide
auuccuugucgaugaugag

SEQ ID NO: 1512463 - RNA, 19 nt, Artificial Sequence
  Description of Artificial Sequence: Synthetic oligonucleotide
uugggauccccuuucccau

SEQ ID NO: 1512464 - RNA, 19 nt, Artificial Sequence
  Description of Artificial Sequence: Synthetic oligonucleotide
aaauggcgagagguugcuc

SEQ ID NO: 1512465 - RNA, 19 nt, Artificial Sequence
  Description of Artificial Sequence: Synthetic oligonucleotide
ggcacggaacagcagggcg

SEQ ID NO: 1512466 - RNA, 19 nt, Artificial Sequence
  Description of Artificial Sequence: Synthetic oligonucleotide
cuuccuaugugcaggaccu

SEQ ID NO: 1512467 - RNA, 19 nt, Artificial Sequence
  Description of Artificial Sequence: Synthetic oligonucleotide
agggccgguccccucaauc

SEQ ID NO: 1512468 - RNA, 19 nt, Artificial Sequence
  Description of Artificial Sequence: Synthetic oligonucleotide
uacuacauuuggcuucguu

SEQ ID NO: 1512469 - RNA, 19 nt, Artificial Sequence
  Description of Artificial Sequence: Synthetic oligonucleotide
uggcaucgcgcuucgguug

SEQ ID NO: 1512470 - RNA, 19 nt, Artificial Sequence
  Description of Artificial Sequence: Synthetic oligonucleotide
ggacagacgggccaggcac

SEQ ID NO: 1512471 - RNA, 19 nt, Artificial Sequence
  Description of Artificial Sequence: Synthetic oligonucleotide
caucuuguauggaugacgu

SEQ ID NO: 1512472 - RNA, 19 nt, Artificial Sequence
  Description of Artificial Sequence: Synthetic oligonucleotide
uuuggugacgggagcuuua

SEQ ID NO: 1512473 - RNA, 19 nt, Artificial Sequence
  Description of Artificial Sequence: Synthetic oligonucleotide
agagguugcucgaaguccu

SEQ ID NO: 1512474 - RNA, 19 nt, Artificial Sequence
  Description of Artificial Sequence: Synthetic oligonucleotide
gauccucuacgaagaaaug

SEQ ID NO: 1512475 - RNA, 19 nt, Artificial Sequence
  Description of Artificial Sequence: Synthetic oligonucleotide
aucgcgcuucgguuguggg

SEQ ID NO: 1512476 - RNA, 19 nt, Artificial Sequence
  Description of Artificial Sequence: Synthetic oligonucleotide
gguggugugacccgcuccc

SEQ ID NO: 1512477 - RNA, 19 nt, Artificial Sequence
  Description of Artificial Sequence: Synthetic oligonucleotide
gguuugugaugauccgggg

SEQ ID NO: 1512478 - RNA, 19 nt, Artificial Sequence
  Description of Artificial Sequence: Synthetic oligonucleotide
uuuccccuccucacucacc

SEQ ID NO: 1512479 - RNA, 19 nt, Artificial Sequence
  Description of Artificial Sequence: Synthetic oligonucleotide
gaugacguuuccccuccuc

SEQ ID NO: 1512480 - RNA, 19 nt, Artificial Sequence
  Description of Artificial Sequence: Synthetic oligonucleotide
aucgcuaggcacaaucaga

SEQ ID NO: 1512481 - RNA, 19 nt, Artificial Sequence
  Description of Artificial Sequence: Synthetic oligonucleotide
caccgagcaggacuaacac

SEQ ID NO: 1512482 - RNA, 19 nt, Artificial Sequence
  Description of Artificial Sequence: Synthetic oligonucleotide
aguaaauggcaucgcgcuu

SEQ ID NO: 1512483 - RNA, 19 nt, Artificial Sequence
  Description of Artificial Sequence: Synthetic oligonucleotide
ggguucugaugcuaaauuc

SEQ ID NO: 1512484 - RNA, 19 nt, Artificial Sequence
  Description of Artificial Sequence: Synthetic oligonucleotide
accgagcaggacuaacacu

SEQ ID NO: 1512485 - RNA, 19 nt, Artificial Sequence
  Description of Artificial Sequence: Synthetic oligonucleotide
gaccaacguccauuugcag

SEQ ID NO: 1512486 - RNA, 19 nt, Artificial Sequence
  Description of Artificial Sequence: Synthetic oligonucleotide
ucaaucacuuggggaacac

SEQ ID NO: 1512487 - RNA, 19 nt, Artificial Sequence
  Description of Artificial Sequence: Synthetic oligonucleotide
uagcauucaggguggcggu

SEQ ID NO: 1512488 - RNA, 19 nt, Artificial Sequence
  Description of Artificial Sequence: Synthetic oligonucleotide
cuggauacggugaguguca

SEQ ID NO: 1512489 - RNA, 19 nt, Artificial Sequence
  Description of Artificial Sequence: Synthetic oligonucleotide
acgugagagauacuacauu

SEQ ID NO: 1512490 - RNA, 19 nt, Artificial Sequence
  Description of Artificial Sequence: Synthetic oligonucleotide
agcaucuuguaaacuucag

SEQ ID NO: 1512491 - RNA, 19 nt, Artificial Sequence
  Description of Artificial Sequence: Synthetic oligonucleotide
cacggaacagcagggcgcg

SEQ ID NO: 1512492 - RNA, 19 nt, Artificial Sequence
  Description of Artificial Sequence: Synthetic oligonucleotide
caagugugucauacugcug

SEQ ID NO: 1512493 - RNA, 19 nt, Artificial Sequence
  Description of Artificial Sequence: Synthetic oligonucleotide
cagucgguacacacauagc

SEQ ID NO: 1512494 - RNA, 19 nt, Artificial Sequence
  Description of Artificial Sequence: Synthetic oligonucleotide
guccccucaaucacuuggg

SEQ ID NO: 1512495 - RNA, 19 nt, Artificial Sequence
  Description of Artificial Sequence: Synthetic oligonucleotide
gagauacuacauuuggcuu

SEQ ID NO: 1512496 - RNA, 19 nt, Artificial Sequence
  Description of Artificial Sequence: Synthetic oligonucleotide
ccucuacgaagaaauggcc

SEQ ID NO: 1512497 - RNA, 19 nt, Artificial Sequence
  Description of Artificial Sequence: Synthetic oligonucleotide
ucgcgcuucgguugugggc

SEQ ID NO: 1512498 - RNA, 19 nt, Artificial Sequence
  Description of Artificial Sequence: Synthetic oligonucleotide
ggugugacccgcucccggg

SEQ ID NO: 1512499 - RNA, 19 nt, Artificial Sequence
  Description of Artificial Sequence: Synthetic oligonucleotide
caucacacugcuaguggga

SEQ ID NO: 1512500 - RNA, 19 nt, Artificial Sequence
  Description of Artificial Sequence: Synthetic oligonucleotide
gggaaauggcgagagguug

SEQ ID NO: 1512501 - RNA, 19 nt, Artificial Sequence
  Description of Artificial Sequence: Synthetic oligonucleotide
ccaacguccauuugcagca

SEQ ID NO: 1512502 - RNA, 19 nt, Artificial Sequence
  Description of Artificial Sequence: Synthetic oligonucleotide
aguguucaccgagcaggac

SEQ ID NO: 1512503 - RNA, 19 nt, Artificial Sequence
  Description of Artificial Sequence: Synthetic oligonucleotide
ggaaauggcgagagguugc

SEQ ID NO: 1512504 - RNA, 19 nt, Artificial Sequence
  Description of Artificial Sequence: Synthetic oligonucleotide
ugcuagugggagucagcac

SEQ ID NO: 1512505 - RNA, 19 nt, Artificial Sequence
  Description of Artificial Sequence: Synthetic oligonucleotide
auggcaucgcgcuucgguu

SEQ ID NO: 1512506 - RNA, 19 nt, Artificial Sequence
  Description of Artificial Sequence: Synthetic oligonucleotide
gucacacaugggcagcuuc

SEQ ID NO: 1512507 - RNA, 19 nt, Artificial Sequence
  Description of Artificial Sequence: Synthetic oligonucleotide
acggugagugucauguugu

SEQ ID NO: 1512508 - RNA, 19 nt, Artificial Sequence
  Description of Artificial Sequence: Synthetic oligonucleotide
uccgggagugacccgggaa

SEQ ID NO: 1512509 - RNA, 19 nt, Artificial Sequence
  Description of Artificial Sequence: Synthetic oligonucleotide
guggucaucgcuaggcaca

SEQ ID NO: 1512510 - RNA, 19 nt, Artificial Sequence
  Description of Artificial Sequence: Synthetic oligonucleotide
cagcuucugagcauuucca

SEQ ID NO: 1512511 - RNA, 19 nt, Artificial Sequence
  Description of Artificial Sequence: Synthetic oligonucleotide
ugggguucugaugcuaaau

SEQ ID NO: 1512512 - RNA, 19 nt, Artificial Sequence
  Description of Artificial Sequence: Synthetic oligonucleotide
guuggugccacagucggua

SEQ ID NO: 1512513 - RNA, 19 nt, Artificial Sequence
  Description of Artificial Sequence: Synthetic oligonucleotide
caaaaucaacgugagagau

SEQ ID NO: 1512514 - RNA, 19 nt, Artificial Sequence
  Description of Artificial Sequence: Synthetic oligonucleotide
ggcuucguuccauugugac

SEQ ID NO: 1512515 - RNA, 19 nt, Artificial Sequence
  Description of Artificial Sequence: Synthetic oligonucleotide
cuacgaggcggaaacccca

SEQ ID NO: 1512516 - RNA, 19 nt, Artificial Sequence
  Description of Artificial Sequence: Synthetic oligonucleotide
accuggauacggugagugu

SEQ ID NO: 1512517 - RNA, 19 nt, Artificial Sequence
  Description of Artificial Sequence: Synthetic oligonucleotide
uagcuauagcagccuugcu

SEQ ID NO: 1512518 - RNA, 19 nt, Artificial Sequence
  Description of Artificial Sequence: Synthetic oligonucleotide
ccugaaggacaauuugcug

SEQ ID NO: 1512519 - RNA, 19 nt, Artificial Sequence
  Description of Artificial Sequence: Synthetic oligonucleotide
acgaggcggaaaccccagg

SEQ ID NO: 1512520 - RNA, 19 nt, Artificial Sequence
  Description of Artificial Sequence: Synthetic oligonucleotide
cuuccgggagugacccggg

SEQ ID NO: 1512521 - RNA, 19 nt, Artificial Sequence
  Description of Artificial Sequence: Synthetic oligonucleotide
ccuacgaggcggaaacccc

SEQ ID NO: 1512522 - RNA, 19 nt, Artificial Sequence
  Description of Artificial Sequence: Synthetic oligonucleotide
gagugacccgggaaauggc

SEQ ID NO: 1512523 - RNA, 19 nt, Artificial Sequence
  Description of Artificial Sequence: Synthetic oligonucleotide
acccgggaaauggcgagag

SEQ ID NO: 1512524 - RNA, 19 nt, Artificial Sequence
  Description of Artificial Sequence: Synthetic oligonucleotide
gcuuccgggagugacccgg

SEQ ID NO: 1512525 - RNA, 19 nt, Artificial Sequence
  Description of Artificial Sequence: Synthetic oligonucleotide
uguugucuguacagcccuu

SEQ ID NO: 1512526 - RNA, 19 nt, Artificial Sequence
  Description of Artificial Sequence: Synthetic oligonucleotide
cccucaaucacuuggggaa

SEQ ID NO: 1512527 - RNA, 19 nt, Artificial Sequence
  Description of Artificial Sequence: Synthetic oligonucleotide
ggacaaaaccauuuccagu

SEQ ID NO: 1512528 - RNA, 19 nt, Artificial Sequence
  Description of Artificial Sequence: Synthetic oligonucleotide
cucaccaaaggagaccaaa

SEQ ID NO: 1512529 - RNA, 19 nt, Artificial Sequence
  Description of Artificial Sequence: Synthetic oligonucleotide
caguaaaucugauccucua

SEQ ID NO: 1512530 - RNA, 19 nt, Artificial Sequence
  Description of Artificial Sequence: Synthetic oligonucleotide
gcuggguggucaucgcuag

SEQ ID NO: 1512531 - RNA, 19 nt, Artificial Sequence
  Description of Artificial Sequence: Synthetic oligonucleotide
aauggcccuucuguuucaa

SEQ ID NO: 1512532 - RNA, 19 nt, Artificial Sequence
  Description of Artificial Sequence: Synthetic oligonucleotide
ccgagcaggacuaacacua

SEQ ID NO: 1512533 - RNA, 19 nt, Artificial Sequence
  Description of Artificial Sequence: Synthetic oligonucleotide
ggcgagagguugcucgaag

SEQ ID NO: 1512534 - RNA, 19 nt, Artificial Sequence
  Description of Artificial Sequence: Synthetic oligonucleotide
aggcacaaucagaggggac

SEQ ID NO: 1512535 - RNA, 19 nt, Artificial Sequence
  Description of Artificial Sequence: Synthetic oligonucleotide
agguugcucgaaguccuug

SEQ ID NO: 1512536 - RNA, 19 nt, Artificial Sequence
  Description of Artificial Sequence: Synthetic oligonucleotide
caucgcgcuucgguugugg

SEQ ID NO: 1512537 - RNA, 19 nt, Artificial Sequence
  Description of Artificial Sequence: Synthetic oligonucleotide
ggcggaaaccccagggucc

SEQ ID NO: 1512538 - RNA, 19 nt, Artificial Sequence
  Description of Artificial Sequence: Synthetic oligonucleotide
aucuuguauggaugacguu

SEQ ID NO: 1512539 - RNA, 19 nt, Artificial Sequence
  Description of Artificial Sequence: Synthetic oligonucleotide
caaaaccauuuccaguagu

SEQ ID NO: 1512540 - RNA, 19 nt, Artificial Sequence
  Description of Artificial Sequence: Synthetic oligonucleotide
aggauguggcugauccgag

SEQ ID NO: 1512541 - RNA, 19 nt, Artificial Sequence
  Description of Artificial Sequence: Synthetic oligonucleotide
ugcuuccgggagugacccg

SEQ ID NO: 1512542 - RNA, 19 nt, Artificial Sequence
  Description of Artificial Sequence: Synthetic oligonucleotide
ccuggauacggugaguguc

SEQ ID NO: 1512543 - RNA, 19 nt, Artificial Sequence
  Description of Artificial Sequence: Synthetic oligonucleotide
uggucaucgcuaggcacaa

SEQ ID NO: 1512544 - RNA, 19 nt, Artificial Sequence
  Description of Artificial Sequence: Synthetic oligonucleotide
gguggugcgggagagggga

SEQ ID NO: 1512545 - RNA, 19 nt, Artificial Sequence
  Description of Artificial Sequence: Synthetic oligonucleotide
gaaauggcgagagguugcu

SEQ ID NO: 1512546 - RNA, 19 nt, Artificial Sequence
  Description of Artificial Sequence: Synthetic oligonucleotide
guucugaugcuaaauucau

SEQ ID NO: 1512547 - RNA, 19 nt, Artificial Sequence
  Description of Artificial Sequence: Synthetic oligonucleotide
gugugacccgcucccgggc

SEQ ID NO: 1512548 - RNA, 19 nt, Artificial Sequence
  Description of Artificial Sequence: Synthetic oligonucleotide
gacgggagcuuuaacacuu

SEQ ID NO: 1512549 - RNA, 19 nt, Artificial Sequence
  Description of Artificial Sequence: Synthetic oligonucleotide
uuccgggagugacccggga

SEQ ID NO: 1512550 - RNA, 19 nt, Artificial Sequence
  Description of Artificial Sequence: Synthetic oligonucleotide
agcacaggcgaaacacagu

SEQ ID NO: 1512551 - RNA, 19 nt, Artificial Sequence
  Description of Artificial Sequence: Synthetic oligonucleotide
cucaaucacuuggggaaca

SEQ ID NO: 1512552 - RNA, 19 nt, Artificial Sequence
  Description of Artificial Sequence: Synthetic oligonucleotide
gcggugauggucccucagc

SEQ ID NO: 1512553 - RNA, 19 nt, Artificial Sequence
  Description of Artificial Sequence: Synthetic oligonucleotide
agcauucaggguggcggug

SEQ ID NO: 1512554 - RNA, 19 nt, Artificial Sequence
  Description of Artificial Sequence: Synthetic oligonucleotide
gcaggacuaacacuaggua

SEQ ID NO: 1512555 - RNA, 19 nt, Artificial Sequence
  Description of Artificial Sequence: Synthetic oligonucleotide
guguaaaagcaggcaucac

SEQ ID NO: 1512556 - RNA, 19 nt, Artificial Sequence
  Description of Artificial Sequence: Synthetic oligonucleotide
uacagcccuugauuuuguu

SEQ ID NO: 1512557 - RNA, 19 nt, Artificial Sequence
  Description of Artificial Sequence: Synthetic oligonucleotide
ccgagugucugcucuucgc

SEQ ID NO: 1512558 - RNA, 19 nt, Artificial Sequence
  Description of Artificial Sequence: Synthetic oligonucleotide
cccucagguggugugaccc

SEQ ID NO: 1512559 - RNA, 19 nt, Artificial Sequence
  Description of Artificial Sequence: Synthetic oligonucleotide
uugccgccuacgaggcgga

SEQ ID NO: 1512560 - RNA, 19 nt, Artificial Sequence
  Description of Artificial Sequence: Synthetic oligonucleotide
acgggagcuuuaacacuuc

SEQ ID NO: 1512561 - RNA, 19 nt, Artificial Sequence
  Description of Artificial Sequence: Synthetic oligonucleotide
auacggugagugucauguu

SEQ ID NO: 1512562 - RNA, 19 nt, Artificial Sequence
  Description of Artificial Sequence: Synthetic oligonucleotide
ggcgaaacacaguguucac

SEQ ID NO: 1512563 - RNA, 19 nt, Artificial Sequence
  Description of Artificial Sequence: Synthetic oligonucleotide
uggauacggugagugucau

SEQ ID NO: 1512564 - RNA, 19 nt, Artificial Sequence
  Description of Artificial Sequence: Synthetic oligonucleotide
caaucacuuggggaacaca

SEQ ID NO: 1512565 - RNA, 19 nt, Artificial Sequence
  Description of Artificial Sequence: Synthetic oligonucleotide
guggugugacccgcucccg

SEQ ID NO: 1512566 - RNA, 19 nt, Artificial Sequence
  Description of Artificial Sequence: Synthetic oligonucleotide
gccagugggguuguuguac

SEQ ID NO: 1512567 - RNA, 19 nt, Artificial Sequence
  Description of Artificial Sequence: Synthetic oligonucleotide
cugauccgagugucugcuc

SEQ ID NO: 1512568 - RNA, 19 nt, Artificial Sequence
  Description of Artificial Sequence: Synthetic oligonucleotide
ucguuccauugugaccaac

SEQ ID NO: 1512569 - RNA, 19 nt, Artificial Sequence
  Description of Artificial Sequence: Synthetic oligonucleotide
ggauacggugagugucaug

SEQ ID NO: 1512570 - RNA, 19 nt, Artificial Sequence
  Description of Artificial Sequence: Synthetic oligonucleotide
guggcggugauggucccuc

SEQ ID NO: 1512571 - RNA, 19 nt, Artificial Sequence
  Description of Artificial Sequence: Synthetic oligonucleotide
ccaucugacuccaggaucu

SEQ ID NO: 1512572 - RNA, 19 nt, Artificial Sequence
  Description of Artificial Sequence: Synthetic oligonucleotide
gucgguacacacauagcau

SEQ ID NO: 1512573 - RNA, 19 nt, Artificial Sequence
  Description of Artificial Sequence: Synthetic oligonucleotide
caacguccauuugcagcag

SEQ ID NO: 1512574 - RNA, 19 nt, Artificial Sequence
  Description of Artificial Sequence: Synthetic oligonucleotide
ccacuuuggugacgggagc

SEQ ID NO: 1512575 - RNA, 19 nt, Artificial Sequence
  Description of Artificial Sequence: Synthetic oligonucleotide
gggccgguccccucaauca

SEQ ID NO: 1512576 - RNA, 19 nt, Artificial Sequence
  Description of Artificial Sequence: Synthetic oligonucleotide
ggcucguuuaacuccugcu

SEQ ID NO: 1512577 - RNA, 19 nt, Artificial Sequence
  Description of Artificial Sequence: Synthetic oligonucleotide
uuccuaugugcaggaccuc

SEQ ID NO: 1512578 - RNA, 19 nt, Artificial Sequence
  Description of Artificial Sequence: Synthetic oligonucleotide
uggcggugauggucccuca

SEQ ID NO: 1512579 - RNA, 19 nt, Artificial Sequence
  Description of Artificial Sequence: Synthetic oligonucleotide
cgagagguugcucgaaguc

SEQ ID NO: 1512580 - RNA, 19 nt, Artificial Sequence
  Description of Artificial Sequence: Synthetic oligonucleotide
ccuugcuuccgggagugac

SEQ ID NO: 1512581 - RNA, 19 nt, Artificial Sequence
  Description of Artificial Sequence: Synthetic oligonucleotide
cugaugcuaaauucaucuu

SEQ ID NO: 1512582 - RNA, 19 nt, Artificial Sequence
  Description of Artificial Sequence: Synthetic oligonucleotide
acacucccacaaugccagu

SEQ ID NO: 1512583 - RNA, 19 nt, Artificial Sequence
  Description of Artificial Sequence: Synthetic oligonucleotide
gagugucauguugucugua

SEQ ID NO: 1512584 - RNA, 19 nt, Artificial Sequence
  Description of Artificial Sequence: Synthetic oligonucleotide
cacuuccuaugugcaggac

SEQ ID NO: 1512585 - RNA, 19 nt, Artificial Sequence
  Description of Artificial Sequence: Synthetic oligonucleotide
ggccgguccccucaaucac

SEQ ID NO: 1512586 - RNA, 19 nt, Artificial Sequence
  Description of Artificial Sequence: Synthetic oligonucleotide
gacccgggaaauggcgaga

SEQ ID NO: 1512587 - RNA, 19 nt, Artificial Sequence
  Description of Artificial Sequence: Synthetic oligonucleotide
gguugugggcacuuccuau

SEQ ID NO: 1512588 - RNA, 19 nt, Artificial Sequence
  Description of Artificial Sequence: Synthetic oligonucleotide
uggcgagagguugcucgaa

SEQ ID NO: 1512589 - RNA, 19 nt, Artificial Sequence
  Description of Artificial Sequence: Synthetic oligonucleotide
gcucguuuaacuccugcuu

SEQ ID NO: 1512590 - RNA, 19 nt, Artificial Sequence
  Description of Artificial Sequence: Synthetic oligonucleotide
ggagucagcacaggcgaaa

SEQ ID NO: 1512591 - RNA, 19 nt, Artificial Sequence
  Description of Artificial Sequence: Synthetic oligonucleotide
cuucgguugugggcacuuc

SEQ ID NO: 1512592 - RNA, 19 nt, Artificial Sequence
  Description of Artificial Sequence: Synthetic oligonucleotide
ccucaaucacuuggggaac

SEQ ID NO: 1512593 - RNA, 19 nt, Artificial Sequence
  Description of Artificial Sequence: Synthetic oligonucleotide
gaaggacaauuugcugggu

SEQ ID NO: 1512594 - RNA, 19 nt, Artificial Sequence
  Description of Artificial Sequence: Synthetic oligonucleotide
gcggaaaccccaggguccc

SEQ ID NO: 1512595 - RNA, 19 nt, Artificial Sequence
  Description of Artificial Sequence: Synthetic oligonucleotide
ccccucaaucacuugggga

SEQ ID NO: 1512596 - RNA, 19 nt, Artificial Sequence
  Description of Artificial Sequence: Synthetic oligonucleotide
gauccgagugucugcucuu

SEQ ID NO: 1512597 - RNA, 19 nt, Artificial Sequence
  Description of Artificial Sequence: Synthetic oligonucleotide
cgcuaggcacaaucagagg

SEQ ID NO: 1512598 - RNA, 19 nt, Artificial Sequence
  Description of Artificial Sequence: Synthetic oligonucleotide
cgagcaggacuaacacuag

SEQ ID NO: 1512599 - RNA, 19 nt, Artificial Sequence
  Description of Artificial Sequence: Synthetic oligonucleotide
gcauucaggguggcgguga

SEQ ID NO: 1512600 - RNA, 19 nt, Artificial Sequence
  Description of Artificial Sequence: Synthetic oligonucleotide
cacucccacaaugccagua

SEQ ID NO: 1512601 - RNA, 19 nt, Artificial Sequence
  Description of Artificial Sequence: Synthetic oligonucleotide
cauuuggcuucguuccauu

SEQ ID NO: 1512602 - RNA, 19 nt, Artificial Sequence
  Description of Artificial Sequence: Synthetic oligonucleotide
gggcgcgcagagcucccag

SEQ ID NO: 1512603 - RNA, 19 nt, Artificial Sequence
  Description of Artificial Sequence: Synthetic oligonucleotide
ggcccuucuguuucaaguu

SEQ ID NO: 1512604 - RNA, 19 nt, Artificial Sequence
  Description of Artificial Sequence: Synthetic oligonucleotide
ggugcaggcagggccgguc

SEQ ID NO: 1512605 - RNA, 19 nt, Artificial Sequence
  Description of Artificial Sequence: Synthetic oligonucleotide
gugcgggagaggggacaag

SEQ ID NO: 1512606 - RNA, 19 nt, Artificial Sequence
  Description of Artificial Sequence: Synthetic oligonucleotide
ccauuuccaguaguguaaa

SEQ ID NO: 1512607 - RNA, 19 nt, Artificial Sequence
  Description of Artificial Sequence: Synthetic oligonucleotide
ccgggagugacccgggaaa

SEQ ID NO: 1512608 - RNA, 19 nt, Artificial Sequence
  Description of Artificial Sequence: Synthetic oligonucleotide
ggcaucgcgcuucgguugu

SEQ ID NO: 1512609 - RNA, 19 nt, Artificial Sequence
  Description of Artificial Sequence: Synthetic oligonucleotide
ggcgcgcagagcucccaga

SEQ ID NO: 1512610 - RNA, 19 nt, Artificial Sequence
  Description of Artificial Sequence: Synthetic oligonucleotide
ggaccucuugggguucuga

SEQ ID NO: 1512611 - RNA, 19 nt, Artificial Sequence
  Description of Artificial Sequence: Synthetic oligonucleotide
cgcgcuucgguugugggca

SEQ ID NO: 1512612 - RNA, 19 nt, Artificial Sequence
  Description of Artificial Sequence: Synthetic oligonucleotide
ggugcgggagaggggacaa

SEQ ID NO: 1512613 - RNA, 19 nt, Artificial Sequence
  Description of Artificial Sequence: Synthetic oligonucleotide
cuacgaagaaauggcccuu

SEQ ID NO: 1512614 - RNA, 19 nt, Artificial Sequence
  Description of Artificial Sequence: Synthetic oligonucleotide
guggugcgggagaggggac

SEQ ID NO: 1512615 - RNA, 19 nt, Artificial Sequence
  Description of Artificial Sequence: Synthetic oligonucleotide
ccuugccgccuacgaggcg

SEQ ID NO: 1512616 - RNA, 19 nt, Artificial Sequence
  Description of Artificial Sequence: Synthetic oligonucleotide
guucaccgagcaggacuaa

SEQ ID NO: 1512617 - RNA, 19 nt, Artificial Sequence
  Description of Artificial Sequence: Synthetic oligonucleotide
cggugagugucauguuguc

SEQ ID NO: 1512618 - RNA, 19 nt, Artificial Sequence
  Description of Artificial Sequence: Synthetic oligonucleotide
cauucaggguggcggugau

SEQ ID NO: 1512619 - RNA, 19 nt, Artificial Sequence
  Description of Artificial Sequence: Synthetic oligonucleotide
gggagucagcacaggcgaa

SEQ ID NO: 1512620 - RNA, 19 nt, Artificial Sequence
  Description of Artificial Sequence: Synthetic oligonucleotide
gagguugcucgaaguccuu

SEQ ID NO: 1512621 - RNA, 19 nt, Artificial Sequence
  Description of Artificial Sequence: Synthetic oligonucleotide
gcgcuucgguugugggcac

SEQ ID NO: 1512622 - RNA, 19 nt, Artificial Sequence
  Description of Artificial Sequence: Synthetic oligonucleotide
cagggucccgggcccugaa

SEQ ID NO: 1512623 - RNA, 19 nt, Artificial Sequence
  Description of Artificial Sequence: Synthetic oligonucleotide
ggaugacguuuccccuccu

SEQ ID NO: 1512624 - RNA, 19 nt, Artificial Sequence
  Description of Artificial Sequence: Synthetic oligonucleotide
gcaucgcgcuucgguugug

SEQ ID NO: 1512625 - RNA, 19 nt, Artificial Sequence
  Description of Artificial Sequence: Synthetic oligonucleotide
gcagggccgguccccucaa

SEQ ID NO: 1512626 - RNA, 19 nt, Artificial Sequence
  Description of Artificial Sequence: Synthetic oligonucleotide
ccuugucgaugaugaggcu

SEQ ID NO: 1512627 - RNA, 19 nt, Artificial Sequence
  Description of Artificial Sequence: Synthetic oligonucleotide
cgguugugggcacuuccua

SEQ ID NO: 1512628 - RNA, 19 nt, Artificial Sequence
  Description of Artificial Sequence: Synthetic oligonucleotide
gcuucgguugugggcacuu

SEQ ID NO: 1512629 - RNA, 19 nt, Artificial Sequence
  Description of Artificial Sequence: Synthetic oligonucleotide
cgggaaauggcgagagguu

SEQ ID NO: 1512630 - RNA, 19 nt, Artificial Sequence
  Description of Artificial Sequence: Synthetic oligonucleotide
cccgggcccugaaggacaa

SEQ ID NO: 1512631 - RNA, 19 nt, Artificial Sequence
  Description of Artificial Sequence: Synthetic oligonucleotide
cagggccgguccccucaau

SEQ ID NO: 1512632 - RNA, 19 nt, Artificial Sequence
  Description of Artificial Sequence: Synthetic oligonucleotide
ggucaucgcuaggcacaau

SEQ ID NO: 1512633 - RNA, 19 nt, Artificial Sequence
  Description of Artificial Sequence: Synthetic oligonucleotide
cgcuucgguugugggcacu

SEQ ID NO: 1512634 - RNA, 19 nt, Artificial Sequence
  Description of Artificial Sequence: Synthetic oligonucleotide
ccgggcccugaaggacaau

SEQ ID NO: 1512635 - RNA, 19 nt, Artificial Sequence
  Description of Artificial Sequence: Synthetic oligonucleotide
agcaauaugauauaaaacc

SEQ ID NO: 1512636 - RNA, 19 nt, Artificial Sequence
  Description of Artificial Sequence: Synthetic oligonucleotide
ugauauaaaaccuauuugg

SEQ ID NO: 1512637 - RNA, 19 nt, Artificial Sequence
  Description of Artificial Sequence: Synthetic oligonucleotide
auauaaaaccuauuuggcc

SEQ ID NO: 1512638 - RNA, 19 nt, Artificial Sequence
  Description of Artificial Sequence: Synthetic oligonucleotide
gauaacuugaaucaaugcc

SEQ ID NO: 1512639 - RNA, 19 nt, Artificial Sequence
  Description of Artificial Sequence: Synthetic oligonucleotide
uauaaaaccuauuuggcca

SEQ ID NO: 1512640 - RNA, 19 nt, Artificial Sequence
  Description of Artificial Sequence: Synthetic oligonucleotide
uaugauauaaaaccuauuu

SEQ ID NO: 1512641 - RNA, 19 nt, Artificial Sequence
  Description of Artificial Sequence: Synthetic oligonucleotide
cuaauugauuuccagaugc

SEQ ID NO: 1512642 - RNA, 19 nt, Artificial Sequence
  Description of Artificial Sequence: Synthetic oligonucleotide
uaaucuuuaaagcaauaug

SEQ ID NO: 1512643 - RNA, 19 nt, Artificial Sequence
  Description of Artificial Sequence: Synthetic oligonucleotide
guuaccagaaccuaguuug

SEQ ID NO: 1512644 - RNA, 19 nt, Artificial Sequence
  Description of Artificial Sequence: Synthetic oligonucleotide
aaugccccgagccaaagac

SEQ ID NO: 1512645 - RNA, 19 nt, Artificial Sequence
  Description of Artificial Sequence: Synthetic oligonucleotide
uuuaaugguacagaugggg

SEQ ID NO: 1512646 - RNA, 19 nt, Artificial Sequence
  Description of Artificial Sequence: Synthetic oligonucleotide
cuuuaagcgacgcugaggg

SEQ ID NO: 1512647 - RNA, 19 nt, Artificial Sequence
  Description of Artificial Sequence: Synthetic oligonucleotide
aaucuuuacucuuggagug

SEQ ID NO: 1512648 - RNA, 19 nt, Artificial Sequence
  Description of Artificial Sequence: Synthetic oligonucleotide
gaaguuggcccuuuaagcg

SEQ ID NO: 1512649 - RNA, 19 nt, Artificial Sequence
  Description of Artificial Sequence: Synthetic oligonucleotide
agugcuuuuagcuuuucgg

SEQ ID NO: 1512650 - RNA, 19 nt, Artificial Sequence
  Description of Artificial Sequence: Synthetic oligonucleotide
uaucacaacuaaccgagcg

SEQ ID NO: 1512651 - RNA, 19 nt, Artificial Sequence
  Description of Artificial Sequence: Synthetic oligonucleotide
acuagucaaucccacaggc

SEQ ID NO: 1512652 - RNA, 19 nt, Artificial Sequence
  Description of Artificial Sequence: Synthetic oligonucleotide
ugaaucaaugccccgagcc

SEQ ID NO: 1512653 - RNA, 19 nt, Artificial Sequence
  Description of Artificial Sequence: Synthetic oligonucleotide
uggacgauaacuugaauca

SEQ ID NO: 1512654 - RNA, 19 nt, Artificial Sequence
  Description of Artificial Sequence: Synthetic oligonucleotide
auuaucacaacuaaccgag

SEQ ID NO: 1512655 - RNA, 19 nt, Artificial Sequence
  Description of Artificial Sequence: Synthetic oligonucleotide
aucuguaaucgcuucaugg

SEQ ID NO: 1512656 - RNA, 19 nt, Artificial Sequence
  Description of Artificial Sequence: Synthetic oligonucleotide
augauauaaaaccuauuug

SEQ ID NO: 1512657 - RNA, 19 nt, Artificial Sequence
  Description of Artificial Sequence: Synthetic oligonucleotide
aacuaauggauccuugaca

SEQ ID NO: 1512658 - RNA, 19 nt, Artificial Sequence
  Description of Artificial Sequence: Synthetic oligonucleotide
auucuacuaauugauuucc

SEQ ID NO: 1512659 - RNA, 19 nt, Artificial Sequence
  Description of Artificial Sequence: Synthetic oligonucleotide
uuaucuuuucaguugcgag

SEQ ID NO: 1512660 - RNA, 19 nt, Artificial Sequence
  Description of Artificial Sequence: Synthetic oligonucleotide
ucugguuagcugaugaggc

SEQ ID NO: 1512661 - RNA, 19 nt, Artificial Sequence
  Description of Artificial Sequence: Synthetic oligonucleotide
caguaaugggagaagaccg

SEQ ID NO: 1512662 - RNA, 19 nt, Artificial Sequence
  Description of Artificial Sequence: Synthetic oligonucleotide
aauccuugcugguuuggac

SEQ ID NO: 1512663 - RNA, 19 nt, Artificial Sequence
  Description of Artificial Sequence: Synthetic oligonucleotide
auaaaaccuauuuggccac

SEQ ID NO: 1512664 - RNA, 19 nt, Artificial Sequence
  Description of Artificial Sequence: Synthetic oligonucleotide
aauaugauauaaaaccuau

SEQ ID NO: 1512665 - RNA, 19 nt, Artificial Sequence
  Description of Artificial Sequence: Synthetic oligonucleotide
uacuaauugauuuccagau

SEQ ID NO: 1512666 - RNA, 19 nt, Artificial Sequence
  Description of Artificial Sequence: Synthetic oligonucleotide
gauguuuuggcugcaaaag

SEQ ID NO: 1512667 - RNA, 19 nt, Artificial Sequence
  Description of Artificial Sequence: Synthetic oligonucleotide
aagaggacacguuguuacc

SEQ ID NO: 1512668 - RNA, 19 nt, Artificial Sequence
  Description of Artificial Sequence: Synthetic oligonucleotide
gaagaggacacguuguuac

SEQ ID NO: 1512669 - RNA, 19 nt, Artificial Sequence
  Description of Artificial Sequence: Synthetic oligonucleotide
uuaacuaauggauccuuga

SEQ ID NO: 1512670 - RNA, 19 nt, Artificial Sequence
  Description of Artificial Sequence: Synthetic oligonucleotide
uuaaugguacagaugggga

SEQ ID NO: 1512671 - RNA, 19 nt, Artificial Sequence
  Description of Artificial Sequence: Synthetic oligonucleotide
gacucgaugaugcuuuggg

SEQ ID NO: 1512672 - RNA, 19 nt, Artificial Sequence
  Description of Artificial Sequence: Synthetic oligonucleotide
ucauuugucuagugcaccg

SEQ ID NO: 1512673 - RNA, 19 nt, Artificial Sequence
  Description of Artificial Sequence: Synthetic oligonucleotide
ucauuuuaucagcaggucu

SEQ ID NO: 1512674 - RNA, 19 nt, Artificial Sequence
  Description of Artificial Sequence: Synthetic oligonucleotide
agacuagucaaucccacag

SEQ ID NO: 1512675 - RNA, 19 nt, Artificial Sequence
  Description of Artificial Sequence: Synthetic oligonucleotide
uauuaaucuuuaaagcaau

SEQ ID NO: 1512676 - RNA, 19 nt, Artificial Sequence
  Description of Artificial Sequence: Synthetic oligonucleotide
uuuuaaugguacagauggg

SEQ ID NO: 1512677 - RNA, 19 nt, Artificial Sequence
  Description of Artificial Sequence: Synthetic oligonucleotide
auuacuacugccggaaggg

SEQ ID NO: 1512678 - RNA, 19 nt, Artificial Sequence
  Description of Artificial Sequence: Synthetic oligonucleotide
uguuaccagaagaauuucc

SEQ ID NO: 1512679 - RNA, 19 nt, Artificial Sequence
  Description of Artificial Sequence: Synthetic oligonucleotide
ugcuugaaauuuugggugg

SEQ ID NO: 1512680 - RNA, 19 nt, Artificial Sequence
  Description of Artificial Sequence: Synthetic oligonucleotide
aaccgagcgacucaggcca

SEQ ID NO: 1512681 - RNA, 19 nt, Artificial Sequence
  Description of Artificial Sequence: Synthetic oligonucleotide
uaccagaagaauuuccuga

SEQ ID NO: 1512682 - RNA, 19 nt, Artificial Sequence
  Description of Artificial Sequence: Synthetic oligonucleotide
aaauuuugggugguuccac

SEQ ID NO: 1512683 - RNA, 19 nt, Artificial Sequence
  Description of Artificial Sequence: Synthetic oligonucleotide
cugguuuggacaguaaugg

SEQ ID NO: 1512684 - RNA, 19 nt, Artificial Sequence
  Description of Artificial Sequence: Synthetic oligonucleotide
uugccauuacuacugccgg

SEQ ID NO: 1512685 - RNA, 19 nt, Artificial Sequence
  Description of Artificial Sequence: Synthetic oligonucleotide
uuaagcgacgcugaggggc

SEQ ID NO: 1512686 - RNA, 19 nt, Artificial Sequence
  Description of Artificial Sequence: Synthetic oligonucleotide
uucugguuagcugaugagg

SEQ ID NO: 1512687 - RNA, 19 nt, Artificial Sequence
  Description of Artificial Sequence: Synthetic oligonucleotide
uucggcagaaucuuuacuc

SEQ ID NO: 1512688 - RNA, 19 nt, Artificial Sequence
  Description of Artificial Sequence: Synthetic oligonucleotide
cauagcuaaauccuugcug

SEQ ID NO: 1512689 - RNA, 19 nt, Artificial Sequence
  Description of Artificial Sequence: Synthetic oligonucleotide
aaucccacaggcuucuggu

SEQ ID NO: 1512690 - RNA, 19 nt, Artificial Sequence
  Description of Artificial Sequence: Synthetic oligonucleotide
uuaaucuuuaaagcaauau

SEQ ID NO: 1512691 - RNA, 19 nt, Artificial Sequence
  Description of Artificial Sequence: Synthetic oligonucleotide
uccggugugguuuugcuug

SEQ ID NO: 1512692 - RNA, 19 nt, Artificial Sequence
  Description of Artificial Sequence: Synthetic oligonucleotide
cacaguaccacaccaggcg

SEQ ID NO: 1512693 - RNA, 19 nt, Artificial Sequence
  Description of Artificial Sequence: Synthetic oligonucleotide
cauccuuuugagcuggacg

SEQ ID NO: 1512694 - RNA, 19 nt, Artificial Sequence
  Description of Artificial Sequence: Synthetic oligonucleotide
ucauuugccuacaaacaac

SEQ ID NO: 1512695 - RNA, 19 nt, Artificial Sequence
  Description of Artificial Sequence: Synthetic oligonucleotide
gugcuugaaauuuugggug

SEQ ID NO: 1512696 - RNA, 19 nt, Artificial Sequence
  Description of Artificial Sequence: Synthetic oligonucleotide
uguuuugugcuguugaauu

SEQ ID NO: 1512697 - RNA, 19 nt, Artificial Sequence
  Description of Artificial Sequence: Synthetic oligonucleotide
cuggacgauaacuugaauc

SEQ ID NO: 1512698 - RNA, 19 nt, Artificial Sequence
  Description of Artificial Sequence: Synthetic oligonucleotide
auuugucuagugcaccggg

SEQ ID NO: 1512699 - RNA, 19 nt, Artificial Sequence
  Description of Artificial Sequence: Synthetic oligonucleotide
uaauugauuuccagaugcc

SEQ ID NO: 1512700 - RNA, 19 nt, Artificial Sequence
  Description of Artificial Sequence: Synthetic oligonucleotide
uaacuaauggauccuugac

SEQ ID NO: 1512701 - RNA, 19 nt, Artificial Sequence
  Description of Artificial Sequence: Synthetic oligonucleotide
acauucuacuaauugauuu

SEQ ID NO: 1512702 - RNA, 19 nt, Artificial Sequence
  Description of Artificial Sequence: Synthetic oligonucleotide
acucgaugaugcuuugggc

SEQ ID NO: 1512703 - RNA, 19 nt, Artificial Sequence
  Description of Artificial Sequence: Synthetic oligonucleotide
ucuugaccaucuguaaucg

SEQ ID NO: 1512704 - RNA, 19 nt, Artificial Sequence
  Description of Artificial Sequence: Synthetic oligonucleotide
cauucuacuaauugauuuc

SEQ ID NO: 1512705 - RNA, 19 nt, Artificial Sequence
  Description of Artificial Sequence: Synthetic oligonucleotide
cuguaaucgcuucauggcg

SEQ ID NO: 1512706 - RNA, 19 nt, Artificial Sequence
  Description of Artificial Sequence: Synthetic oligonucleotide
uuuaaagcaauaugauaua

SEQ ID NO: 1512707 - RNA, 19 nt, Artificial Sequence
  Description of Artificial Sequence: Synthetic oligonucleotide
uguaaucgcuucauggcgu

SEQ ID NO: 1512708 - RNA, 19 nt, Artificial Sequence
  Description of Artificial Sequence: Synthetic oligonucleotide
acaacuaaccgagcgacuc

SEQ ID NO: 1512709 - RNA, 19 nt, Artificial Sequence
  Description of Artificial Sequence: Synthetic oligonucleotide
ugccagacuagucaauccc

SEQ ID NO: 1512710 - RNA, 19 nt, Artificial Sequence
  Description of Artificial Sequence: Synthetic oligonucleotide
aauuuugggugguuccaca

SEQ ID NO: 1512711 - RNA, 19 nt, Artificial Sequence
  Description of Artificial Sequence: Synthetic oligonucleotide
aagaccgugucucugguuu

SEQ ID NO: 1512712 - RNA, 19 nt, Artificial Sequence
  Description of Artificial Sequence: Synthetic oligonucleotide
ugcuuuuagcuuuucggca

SEQ ID NO: 1512713 - RNA, 19 nt, Artificial Sequence
  Description of Artificial Sequence: Synthetic oligonucleotide
acuaauugauuuccagaug

SEQ ID NO: 1512714 - RNA, 19 nt, Artificial Sequence
  Description of Artificial Sequence: Synthetic oligonucleotide
uuuaucuuuucaguugcga

SEQ ID NO: 1512715 - RNA, 19 nt, Artificial Sequence
  Description of Artificial Sequence: Synthetic oligonucleotide
cagaaccuaguuuggaacc

SEQ ID NO: 1512716 - RNA, 19 nt, Artificial Sequence
  Description of Artificial Sequence: Synthetic oligonucleotide
aaguuggcccuuuaagcga

SEQ ID NO: 1512717 - RNA, 19 nt, Artificial Sequence
  Description of Artificial Sequence: Synthetic oligonucleotide
gugcuuuuagcuuuucggc

SEQ ID NO: 1512718 - RNA, 19 nt, Artificial Sequence
  Description of Artificial Sequence: Synthetic oligonucleotide
uuugagcuggacgauaacu

SEQ ID NO: 1512719 - RNA, 19 nt, Artificial Sequence
  Description of Artificial Sequence: Synthetic oligonucleotide
ugaaauaaccguggguggc

SEQ ID NO: 1512720 - RNA, 19 nt, Artificial Sequence
  Description of Artificial Sequence: Synthetic oligonucleotide
uacuacugccggaagggag

SEQ ID NO: 1512721 - RNA, 19 nt, Artificial Sequence
  Description of Artificial Sequence: Synthetic oligonucleotide
uaggguuagagguggaagu

SEQ ID NO: 1512722 - RNA, 19 nt, Artificial Sequence
  Description of Artificial Sequence: Synthetic oligonucleotide
cuaaccgagcgacucaggc

SEQ ID NO: 1512723 - RNA, 19 nt, Artificial Sequence
  Description of Artificial Sequence: Synthetic oligonucleotide
ugccauagcuaaauccuug

SEQ ID NO: 1512724 - RNA, 19 nt, Artificial Sequence
  Description of Artificial Sequence: Synthetic oligonucleotide
ugguuuggacaguaauggg

SEQ ID NO: 1512725 - RNA, 19 nt, Artificial Sequence
  Description of Artificial Sequence: Synthetic oligonucleotide
ggaauaucaacuccuucag

SEQ ID NO: 1512726 - RNA, 19 nt, Artificial Sequence
  Description of Artificial Sequence: Synthetic oligonucleotide
cauuaucacaacuaaccga

SEQ ID NO: 1512727 - RNA, 19 nt, Artificial Sequence
  Description of Artificial Sequence: Synthetic oligonucleotide
aaagacucaucaagcagug

SEQ ID NO: 1512728 - RNA, 19 nt, Artificial Sequence
  Description of Artificial Sequence: Synthetic oligonucleotide
uacucuuggaguguaagaa

SEQ ID NO: 1512729 - RNA, 19 nt, Artificial Sequence
  Description of Artificial Sequence: Synthetic oligonucleotide
ugcuugauagaaauagauu

SEQ ID NO: 1512730 - RNA, 19 nt, Artificial Sequence
  Description of Artificial Sequence: Synthetic oligonucleotide
ucuagguuucuuuggaaua

SEQ ID NO: 1512731 - RNA, 19 nt, Artificial Sequence
  Description of Artificial Sequence: Synthetic oligonucleotide
uuacucuuggaguguaaga

SEQ ID NO: 1512732 - RNA, 19 nt, Artificial Sequence
  Description of Artificial Sequence: Synthetic oligonucleotide
aaucuagguuucuuuggaa

SEQ ID NO: 1512733 - RNA, 19 nt, Artificial Sequence
  Description of Artificial Sequence: Synthetic oligonucleotide
ugauuuccagaugccacgg

SEQ ID NO: 1512734 - RNA, 19 nt, Artificial Sequence
  Description of Artificial Sequence: Synthetic oligonucleotide
cuacuaauugauuuccaga

SEQ ID NO: 1512735 - RNA, 19 nt, Artificial Sequence
  Description of Artificial Sequence: Synthetic oligonucleotide
aacuaaccgagcgacucag

SEQ ID NO: 1512736 - RNA, 19 nt, Artificial Sequence
  Description of Artificial Sequence: Synthetic oligonucleotide
aucacaacuaaccgagcga

SEQ ID NO: 1512737 - RNA, 19 nt, Artificial Sequence
  Description of Artificial Sequence: Synthetic oligonucleotide
ucacaacuaaccgagcgac

SEQ ID NO: 1512738 - RNA, 19 nt, Artificial Sequence
  Description of Artificial Sequence: Synthetic oligonucleotide
cugguuucuccaaucuagg

SEQ ID NO: 1512739 - RNA, 19 nt, Artificial Sequence
  Description of Artificial Sequence: Synthetic oligonucleotide
uucuacuaauugauuucca

SEQ ID NO: 1512740 - RNA, 19 nt, Artificial Sequence
  Description of Artificial Sequence: Synthetic oligonucleotide
aaccuauuuggccaccuua

SEQ ID NO: 1512741 - RNA, 19 nt, Artificial Sequence
  Description of Artificial Sequence: Synthetic oligonucleotide
uggaagugguuuuaauggu

SEQ ID NO: 1512742 - RNA, 19 nt, Artificial Sequence
  Description of Artificial Sequence: Synthetic oligonucleotide
gauggggaagagcuguuac

SEQ ID NO: 1512743 - RNA, 19 nt, Artificial Sequence
  Description of Artificial Sequence: Synthetic oligonucleotide
cauuugccuacaaacaaca

SEQ ID NO: 1512744 - RNA, 19 nt, Artificial Sequence
  Description of Artificial Sequence: Synthetic oligonucleotide
uguuaccagaaccuaguuu

SEQ ID NO: 1512745 - RNA, 19 nt, Artificial Sequence
  Description of Artificial Sequence: Synthetic oligonucleotide
gacuacugggacugggaag

SEQ ID NO: 1512746 - RNA, 19 nt, Artificial Sequence
  Description of Artificial Sequence: Synthetic oligonucleotide
cuaguuacugaagaggaca

SEQ ID NO: 1512747 - RNA, 19 nt, Artificial Sequence
  Description of Artificial Sequence: Synthetic oligonucleotide
gacacguuguuaccagaag

SEQ ID NO: 1512748 - RNA, 19 nt, Artificial Sequence
  Description of Artificial Sequence: Synthetic oligonucleotide
accuauuuggccaccuuac

SEQ ID NO: 1512749 - RNA, 19 nt, Artificial Sequence
  Description of Artificial Sequence: Synthetic oligonucleotide
gucaccugggguuuguggc

SEQ ID NO: 1512750 - RNA, 19 nt, Artificial Sequence
  Description of Artificial Sequence: Synthetic oligonucleotide
uaaugggagaagaccgugu

SEQ ID NO: 1512751 - RNA, 19 nt, Artificial Sequence
  Description of Artificial Sequence: Synthetic oligonucleotide
ggaacuagacuacugggac

SEQ ID NO: 1512752 - RNA, 19 nt, Artificial Sequence
  Description of Artificial Sequence: Synthetic oligonucleotide
ugaaagcuaggaaggcugu

SEQ ID NO: 1512753 - RNA, 19 nt, Artificial Sequence
  Description of Artificial Sequence: Synthetic oligonucleotide
uggggaagagcuguuacca

SEQ ID NO: 1512754 - RNA, 19 nt, Artificial Sequence
  Description of Artificial Sequence: Synthetic oligonucleotide
ugugaaguuggcccuuuaa

SEQ ID NO: 1512755 - RNA, 19 nt, Artificial Sequence
  Description of Artificial Sequence: Synthetic oligonucleotide
uaaccgagcgacucaggcc

SEQ ID NO: 1512756 - RNA, 19 nt, Artificial Sequence
  Description of Artificial Sequence: Synthetic oligonucleotide
uagacuacugggacuggga

SEQ ID NO: 1512757 - RNA, 19 nt, Artificial Sequence
  Description of Artificial Sequence: Synthetic oligonucleotide
gaggacacguuguuaccag

SEQ ID NO: 1512758 - RNA, 19 nt, Artificial Sequence
  Description of Artificial Sequence: Synthetic oligonucleotide
gaaucaaugccccgagcca

SEQ ID NO: 1512759 - RNA, 19 nt, Artificial Sequence
  Description of Artificial Sequence: Synthetic oligonucleotide
ucggcagaaucuuuacucu

SEQ ID NO: 1512760 - RNA, 19 nt, Artificial Sequence
  Description of Artificial Sequence: Synthetic oligonucleotide
uaagcgacgcugaggggcc

SEQ ID NO: 1512761 - RNA, 19 nt, Artificial Sequence
  Description of Artificial Sequence: Synthetic oligonucleotide
uuaucacaacuaaccgagc

SEQ ID NO: 1512762 - RNA, 19 nt, Artificial Sequence
  Description of Artificial Sequence: Synthetic oligonucleotide
uuuaagcgacgcugagggg

SEQ ID NO: 1512763 - RNA, 19 nt, Artificial Sequence
  Description of Artificial Sequence: Synthetic oligonucleotide
uugaaauuuugggugguuc

SEQ ID NO: 1512764 - RNA, 19 nt, Artificial Sequence
  Description of Artificial Sequence: Synthetic oligonucleotide
gguuauggcacucuugaca

SEQ ID NO: 1512765 - RNA, 19 nt, Artificial Sequence
  Description of Artificial Sequence: Synthetic oligonucleotide
acgauaacuugaaucaaug

SEQ ID NO: 1512766 - RNA, 19 nt, Artificial Sequence
  Description of Artificial Sequence: Synthetic oligonucleotide
aaucgcuucauggcguuga

SEQ ID NO: 1512767 - RNA, 19 nt, Artificial Sequence
  Description of Artificial Sequence: Synthetic oligonucleotide
acucaggccagucuugccu

SEQ ID NO: 1512768 - RNA, 19 nt, Artificial Sequence
  Description of Artificial Sequence: Synthetic oligonucleotide
uuuccacuauuguuuugug

SEQ ID NO: 1512769 - RNA, 19 nt, Artificial Sequence
  Description of Artificial Sequence: Synthetic oligonucleotide
uugccagacuagucaaucc

SEQ ID NO: 1512770 - RNA, 19 nt, Artificial Sequence
  Description of Artificial Sequence: Synthetic oligonucleotide
uugccuaggguuagaggug

SEQ ID NO: 1512771 - RNA, 19 nt, Artificial Sequence
  Description of Artificial Sequence: Synthetic oligonucleotide
caguuaggccgcuaguuac

SEQ ID NO: 1512772 - RNA, 19 nt, Artificial Sequence
  Description of Artificial Sequence: Synthetic oligonucleotide
cuaggguuagagguggaag

SEQ ID NO: 1512773 - RNA, 19 nt, Artificial Sequence
  Description of Artificial Sequence: Synthetic oligonucleotide
auuuggccaccuuacuucu

SEQ ID NO: 1512774 - RNA, 19 nt, Artificial Sequence
  Description of Artificial Sequence: Synthetic oligonucleotide
uuggacaguaaugggagaa

SEQ ID NO: 1512775 - RNA, 19 nt, Artificial Sequence
  Description of Artificial Sequence: Synthetic oligonucleotide
aaagcuaggaaggcuguuu

SEQ ID NO: 1512776 - RNA, 19 nt, Artificial Sequence
  Description of Artificial Sequence: Synthetic oligonucleotide
gaaauuuugggugguucca

SEQ ID NO: 1512777 - RNA, 19 nt, Artificial Sequence
  Description of Artificial Sequence: Synthetic oligonucleotide
uugaaucaaugccccgagc

SEQ ID NO: 1512778 - RNA, 19 nt, Artificial Sequence
  Description of Artificial Sequence: Synthetic oligonucleotide
aaaaccuauuuggccaccu

SEQ ID NO: 1512779 - RNA, 19 nt, Artificial Sequence
  Description of Artificial Sequence: Synthetic oligonucleotide
agguuauggcacucuugac

SEQ ID NO: 1512780 - RNA, 19 nt, Artificial Sequence
  Description of Artificial Sequence: Synthetic oligonucleotide
cuuugccauuacuacugcc

SEQ ID NO: 1512781 - RNA, 19 nt, Artificial Sequence
  Description of Artificial Sequence: Synthetic oligonucleotide
ucaaagcuggagaggucug

SEQ ID NO: 1512782 - RNA, 19 nt, Artificial Sequence
  Description of Artificial Sequence: Synthetic oligonucleotide
uuuugggugguuccacauc

SEQ ID NO: 1512783 - RNA, 19 nt, Artificial Sequence
  Description of Artificial Sequence: Synthetic oligonucleotide
uaggccgcuaguuacugaa

SEQ ID NO: 1512784 - RNA, 19 nt, Artificial Sequence
  Description of Artificial Sequence: Synthetic oligonucleotide
uucuuaacuaauggauccu

SEQ ID NO: 1512785 - RNA, 19 nt, Artificial Sequence
  Description of Artificial Sequence: Synthetic oligonucleotide
gacaguaaugggagaagac

SEQ ID NO: 1512786 - RNA, 19 nt, Artificial Sequence
  Description of Artificial Sequence: Synthetic oligonucleotide
aaccuaguuuggaaccuag

SEQ ID NO: 1512787 - RNA, 19 nt, Artificial Sequence
  Description of Artificial Sequence: Synthetic oligonucleotide
uuuggacaguaaugggaga

SEQ ID NO: 1512788 - RNA, 19 nt, Artificial Sequence
  Description of Artificial Sequence: Synthetic oligonucleotide
guuucuccaaucuagguuu

SEQ ID NO: 1512789 - RNA, 19 nt, Artificial Sequence
  Description of Artificial Sequence: Synthetic oligonucleotide
cauccaguuaggccgcuag

SEQ ID NO: 1512790 - RNA, 19 nt, Artificial Sequence
  Description of Artificial Sequence: Synthetic oligonucleotide
cugacauuaucacaacuaa

SEQ ID NO: 1512791 - RNA, 19 nt, Artificial Sequence
  Description of Artificial Sequence: Synthetic oligonucleotide
ugguuucuccaaucuaggu

SEQ ID NO: 1512792 - RNA, 19 nt, Artificial Sequence
  Description of Artificial Sequence: Synthetic oligonucleotide
uggcguugagcugugauuc

SEQ ID NO: 1512793 - RNA, 19 nt, Artificial Sequence
  Description of Artificial Sequence: Synthetic oligonucleotide
ccaggaacuagacuacugg

SEQ ID NO: 1512794 - RNA, 19 nt, Artificial Sequence
  Description of Artificial Sequence: Synthetic oligonucleotide
guuauggcacucuugacau

SEQ ID NO: 1512795 - RNA, 19 nt, Artificial Sequence
  Description of Artificial Sequence: Synthetic oligonucleotide
cuaggaaggcuguuuccug

SEQ ID NO: 1512796 - RNA, 19 nt, Artificial Sequence
  Description of Artificial Sequence: Synthetic oligonucleotide
accagaaccuaguuuggaa

SEQ ID NO: 1512797 - RNA, 19 nt, Artificial Sequence
  Description of Artificial Sequence: Synthetic oligonucleotide
caaucuagguuucuuugga

SEQ ID NO: 1512798 - RNA, 19 nt, Artificial Sequence
  Description of Artificial Sequence: Synthetic oligonucleotide
aguuggcccuuuaagcgac

SEQ ID NO: 1512799 - RNA, 19 nt, Artificial Sequence
  Description of Artificial Sequence: Synthetic oligonucleotide
uuuugagcuggacgauaac

SEQ ID NO: 1512800 - RNA, 19 nt, Artificial Sequence
  Description of Artificial Sequence: Synthetic oligonucleotide
cuagacuacugggacuggg

SEQ ID NO: 1512801 - RNA, 19 nt, Artificial Sequence
  Description of Artificial Sequence: Synthetic oligonucleotide
ugaccaucuguaaucgcuu

SEQ ID NO: 1512802 - RNA, 19 nt, Artificial Sequence
  Description of Artificial Sequence: Synthetic oligonucleotide
uggaaccuaguccaccuuu

SEQ ID NO: 1512803 - RNA, 19 nt, Artificial Sequence
  Description of Artificial Sequence: Synthetic oligonucleotide
cauuugucuagugcaccgg

SEQ ID NO: 1512804 - RNA, 19 nt, Artificial Sequence
  Description of Artificial Sequence: Synthetic oligonucleotide
ucaucaagcagugcuuuua

SEQ ID NO: 1512805 - RNA, 19 nt, Artificial Sequence
  Description of Artificial Sequence: Synthetic oligonucleotide
cuugaccaucuguaaucgc

SEQ ID NO: 1512806 - RNA, 19 nt, Artificial Sequence
  Description of Artificial Sequence: Synthetic oligonucleotide
caaucuuggugguagaggu

SEQ ID NO: 1512807 - RNA, 19 nt, Artificial Sequence
  Description of Artificial Sequence: Synthetic oligonucleotide
guaaugggagaagaccgug

SEQ ID NO: 1512808 - RNA, 19 nt, Artificial Sequence
  Description of Artificial Sequence: Synthetic oligonucleotide
ucaguugcgagggcuuugc

SEQ ID NO: 1512809 - RNA, 19 nt, Artificial Sequence
  Description of Artificial Sequence: Synthetic oligonucleotide
aggaacuagacuacuggga

SEQ ID NO: 1512810 - RNA, 19 nt, Artificial Sequence
  Description of Artificial Sequence: Synthetic oligonucleotide
agugggagcugguuucugu

SEQ ID NO: 1512811 - RNA, 19 nt, Artificial Sequence
  Description of Artificial Sequence: Synthetic oligonucleotide
agaggacacguuguuacca

SEQ ID NO: 1512812 - RNA, 19 nt, Artificial Sequence
  Description of Artificial Sequence: Synthetic oligonucleotide
ucuuuucaguugcgagggc

SEQ ID NO: 1512813 - RNA, 19 nt, Artificial Sequence
  Description of Artificial Sequence: Synthetic oligonucleotide
ccuaguuuggaaccuaguc

SEQ ID NO: 1512814 - RNA, 19 nt, Artificial Sequence
  Description of Artificial Sequence: Synthetic oligonucleotide
agaaccuaguuuggaaccu

SEQ ID NO: 1512815 - RNA, 19 nt, Artificial Sequence
  Description of Artificial Sequence: Synthetic oligonucleotide
guuaccagaagaauuuccu

SEQ ID NO: 1512816 - RNA, 19 nt, Artificial Sequence
  Description of Artificial Sequence: Synthetic oligonucleotide
cucgaugaugcuuugggcu

SEQ ID NO: 1512817 - RNA, 19 nt, Artificial Sequence
  Description of Artificial Sequence: Synthetic oligonucleotide
ucagcacuagucucuucaa

SEQ ID NO: 1512818 - RNA, 19 nt, Artificial Sequence
  Description of Artificial Sequence: Synthetic oligonucleotide
aguaaugggagaagaccgu

SEQ ID NO: 1512819 - RNA, 19 nt, Artificial Sequence
  Description of Artificial Sequence: Synthetic oligonucleotide
agaccgugucucugguuuc

SEQ ID NO: 1512820 - RNA, 19 nt, Artificial Sequence
  Description of Artificial Sequence: Synthetic oligonucleotide
gguuuggacaguaauggga

SEQ ID NO: 1512821 - RNA, 19 nt, Artificial Sequence
  Description of Artificial Sequence: Synthetic oligonucleotide
aucuuggugguagagguua

SEQ ID NO: 1512822 - RNA, 19 nt, Artificial Sequence
  Description of Artificial Sequence: Synthetic oligonucleotide
agcgacucaggccagucuu

SEQ ID NO: 1512823 - RNA, 19 nt, Artificial Sequence
  Description of Artificial Sequence: Synthetic oligonucleotide
uagagguuauggcacucuu

SEQ ID NO: 1512824 - RNA, 19 nt, Artificial Sequence
  Description of Artificial Sequence: Synthetic oligonucleotide
agaagaccgugucucuggu

SEQ ID NO: 1512825 - RNA, 19 nt, Artificial Sequence
  Description of Artificial Sequence: Synthetic oligonucleotide
caguaccacaccaggcgag

SEQ ID NO: 1512826 - RNA, 19 nt, Artificial Sequence
  Description of Artificial Sequence: Synthetic oligonucleotide
ugccauuacuacugccgga

SEQ ID NO: 1512827 - RNA, 19 nt, Artificial Sequence
  Description of Artificial Sequence: Synthetic oligonucleotide
acuacugccggaagggaga

SEQ ID NO: 1512828 - RNA, 19 nt, Artificial Sequence
  Description of Artificial Sequence: Synthetic oligonucleotide
ugaagaggacacguuguua

SEQ ID NO: 1512829 - RNA, 19 nt, Artificial Sequence
  Description of Artificial Sequence: Synthetic oligonucleotide
cuaguccaccuuuggauga

SEQ ID NO: 1512830 - RNA, 19 nt, Artificial Sequence
  Description of Artificial Sequence: Synthetic oligonucleotide
uuguuaccagaagaauuuc

SEQ ID NO: 1512831 - RNA, 19 nt, Artificial Sequence
  Description of Artificial Sequence: Synthetic oligonucleotide
uuccagaugccacggucau

SEQ ID NO: 1512832 - RNA, 19 nt, Artificial Sequence
  Description of Artificial Sequence: Synthetic oligonucleotide
gccauagcuaaauccuugc

SEQ ID NO: 1512833 - RNA, 19 nt, Artificial Sequence
  Description of Artificial Sequence: Synthetic oligonucleotide
uccaguuaggccgcuaguu

SEQ ID NO: 1512834 - RNA, 19 nt, Artificial Sequence
  Description of Artificial Sequence: Synthetic oligonucleotide
aaccguggguggcuugacu

SEQ ID NO: 1512835 - RNA, 19 nt, Artificial Sequence
  Description of Artificial Sequence: Synthetic oligonucleotide
guugauggaccagcugaag

SEQ ID NO: 1512836 - RNA, 19 nt, Artificial Sequence
  Description of Artificial Sequence: Synthetic oligonucleotide
uggcugcaaaagcugccca

SEQ ID NO: 1512837 - RNA, 19 nt, Artificial Sequence
  Description of Artificial Sequence: Synthetic oligonucleotide
cacucaccugcccacugcc

SEQ ID NO: 1512838 - RNA, 19 nt, Artificial Sequence
  Description of Artificial Sequence: Synthetic oligonucleotide
uaccagaaccuaguuugga

SEQ ID NO: 1512839 - RNA, 19 nt, Artificial Sequence
  Description of Artificial Sequence: Synthetic oligonucleotide
cucucuugaaagcuaggaa

SEQ ID NO: 1512840 - RNA, 19 nt, Artificial Sequence
  Description of Artificial Sequence: Synthetic oligonucleotide
agagguuauggcacucuug

SEQ ID NO: 1512841 - RNA, 19 nt, Artificial Sequence
  Description of Artificial Sequence: Synthetic oligonucleotide
auuaaucuuuaaagcaaua

SEQ ID NO: 1512842 - RNA, 19 nt, Artificial Sequence
  Description of Artificial Sequence: Synthetic oligonucleotide
uuacuacugccggaaggga

SEQ ID NO: 1512843 - RNA, 19 nt, Artificial Sequence
  Description of Artificial Sequence: Synthetic oligonucleotide
ucaaugccccgagccaaag

SEQ ID NO: 1512844 - RNA, 19 nt, Artificial Sequence
  Description of Artificial Sequence: Synthetic oligonucleotide
ccuaguccaccuuuggaug

SEQ ID NO: 1512845 - RNA, 19 nt, Artificial Sequence
  Description of Artificial Sequence: Synthetic oligonucleotide
uuaggccgcuaguuacuga

SEQ ID NO: 1512846 - RNA, 19 nt, Artificial Sequence
  Description of Artificial Sequence: Synthetic oligonucleotide
auaaccguggguggcuuga

SEQ ID NO: 1512847 - RNA, 19 nt, Artificial Sequence
  Description of Artificial Sequence: Synthetic oligonucleotide
ugggcucuugcuugauaga

SEQ ID NO: 1512848 - RNA, 19 nt, Artificial Sequence
  Description of Artificial Sequence: Synthetic oligonucleotide
acggucauuugccuacaaa

SEQ ID NO: 1512849 - RNA, 19 nt, Artificial Sequence
  Description of Artificial Sequence: Synthetic oligonucleotide
auaugauauaaaaccuauu

SEQ ID NO: 1512850 - RNA, 19 nt, Artificial Sequence
  Description of Artificial Sequence: Synthetic oligonucleotide
gcaauaugauauaaaaccu

SEQ ID NO: 1512851 - RNA, 19 nt, Artificial Sequence
  Description of Artificial Sequence: Synthetic oligonucleotide
guuaggccgcuaguuacug

SEQ ID NO: 1512852 - RNA, 19 nt, Artificial Sequence
  Description of Artificial Sequence: Synthetic oligonucleotide
agacccgcuuugcugacau

SEQ ID NO: 1512853 - RNA, 19 nt, Artificial Sequence
  Description of Artificial Sequence: Synthetic oligonucleotide
aaauaaccguggguggcuu

SEQ ID NO: 1512854 - RNA, 19 nt, Artificial Sequence
  Description of Artificial Sequence: Synthetic oligonucleotide
ggcccuuuaagcgacgcug

SEQ ID NO: 1512855 - RNA, 19 nt, Artificial Sequence
  Description of Artificial Sequence: Synthetic oligonucleotide
aggacacguuguuaccaga

SEQ ID NO: 1512856 - RNA, 19 nt, Artificial Sequence
  Description of Artificial Sequence: Synthetic oligonucleotide
gccgcuaguuacugaagag

SEQ ID NO: 1512857 - RNA, 19 nt, Artificial Sequence
  Description of Artificial Sequence: Synthetic oligonucleotide
cuuuuagcuuuucggcaga

SEQ ID NO: 1512858 - RNA, 19 nt, Artificial Sequence
  Description of Artificial Sequence: Synthetic oligonucleotide
gaaauaaccguggguggcu

SEQ ID NO: 1512859 - RNA, 19 nt, Artificial Sequence
  Description of Artificial Sequence: Synthetic oligonucleotide
uuggcccuuuaagcgacgc

SEQ ID NO: 1512860 - RNA, 19 nt, Artificial Sequence
  Description of Artificial Sequence: Synthetic oligonucleotide
gucuugccuaggguuagag

SEQ ID NO: 1512861 - RNA, 19 nt, Artificial Sequence
  Description of Artificial Sequence: Synthetic oligonucleotide
aguuaggccgcuaguuacu

SEQ ID NO: 1512862 - RNA, 19 nt, Artificial Sequence
  Description of Artificial Sequence: Synthetic oligonucleotide
acguuguuaccagaagaau

SEQ ID NO: 1512863 - RNA, 19 nt, Artificial Sequence
  Description of Artificial Sequence: Synthetic oligonucleotide
ccgcuaguuacugaagagg

SEQ ID NO: 1512864 - RNA, 19 nt, Artificial Sequence
  Description of Artificial Sequence: Synthetic oligonucleotide
gcugacauuaucacaacua

SEQ ID NO: 1512865 - RNA, 19 nt, Artificial Sequence
  Description of Artificial Sequence: Synthetic oligonucleotide
uggcccuuuaagcgacgcu

SEQ ID NO: 1512866 - RNA, 19 nt, Artificial Sequence
  Description of Artificial Sequence: Synthetic oligonucleotide
aggcuguuuccuguuuaag

SEQ ID NO: 1512867 - RNA, 19 nt, Artificial Sequence
  Description of Artificial Sequence: Synthetic oligonucleotide
gccacggucauuugccuac

SEQ ID NO: 1512868 - RNA, 19 nt, Artificial Sequence
  Description of Artificial Sequence: Synthetic oligonucleotide
acccgcuuugcugacauua

SEQ ID NO: 1512869 - RNA, 19 nt, Artificial Sequence
  Description of Artificial Sequence: Synthetic oligonucleotide
acucaucaagcagugcuuu

SEQ ID NO: 1512870 - RNA, 19 nt, Artificial Sequence
  Description of Artificial Sequence: Synthetic oligonucleotide
ccuuuaagcgacgcugagg

SEQ ID NO: 1512871 - RNA, 19 nt, Artificial Sequence
  Description of Artificial Sequence: Synthetic oligonucleotide
uaaucgcuucauggcguug

SEQ ID NO: 1512872 - RNA, 19 nt, Artificial Sequence
  Description of Artificial Sequence: Synthetic oligonucleotide
acuaaccgagcgacucagg

SEQ ID NO: 1512873 - RNA, 19 nt, Artificial Sequence
  Description of Artificial Sequence: Synthetic oligonucleotide
agggagacucgaugaugcu

SEQ ID NO: 1512874 - RNA, 19 nt, Artificial Sequence
  Description of Artificial Sequence: Synthetic oligonucleotide
uggcaaucuuggugguaga

SEQ ID NO: 1512875 - RNA, 19 nt, Artificial Sequence
  Description of Artificial Sequence: Synthetic oligonucleotide
caacuaaccgagcgacuca

SEQ ID NO: 1512876 - RNA, 19 nt, Artificial Sequence
  Description of Artificial Sequence: Synthetic oligonucleotide
cagucuugccuaggguuag

SEQ ID NO: 1512877 - RNA, 19 nt, Artificial Sequence
  Description of Artificial Sequence: Synthetic oligonucleotide
aggcgagggucauucacuu

SEQ ID NO: 1512878 - RNA, 19 nt, Artificial Sequence
  Description of Artificial Sequence: Synthetic oligonucleotide
guuagcugaugaggcagca

SEQ ID NO: 1512879 - RNA, 19 nt, Artificial Sequence
  Description of Artificial Sequence: Synthetic oligonucleotide
uuucaguugcgagggcuuu

SEQ ID NO: 1512880 - RNA, 19 nt, Artificial Sequence
  Description of Artificial Sequence: Synthetic oligonucleotide
guugagcugugauuccugu

SEQ ID NO: 1512881 - RNA, 19 nt, Artificial Sequence
  Description of Artificial Sequence: Synthetic oligonucleotide
gcacucuugacauucuacu

SEQ ID NO: 1512882 - RNA, 19 nt, Artificial Sequence
  Description of Artificial Sequence: Synthetic oligonucleotide
gguuucuccaaucuagguu

SEQ ID NO: 1512883 - RNA, 19 nt, Artificial Sequence
  Description of Artificial Sequence: Synthetic oligonucleotide
cuuuucaguugcgagggcu

SEQ ID NO: 1512884 - RNA, 19 nt, Artificial Sequence
  Description of Artificial Sequence: Synthetic oligonucleotide
cuauuuggccaccuuacuu

SEQ ID NO: 1512885 - RNA, 19 nt, Artificial Sequence
  Description of Artificial Sequence: Synthetic oligonucleotide
uccuuuugagcuggacgau

SEQ ID NO: 1512886 - RNA, 19 nt, Artificial Sequence
  Description of Artificial Sequence: Synthetic oligonucleotide
ucgcuucauggcguugagc

SEQ ID NO: 1512887 - RNA, 19 nt, Artificial Sequence
  Description of Artificial Sequence: Synthetic oligonucleotide
uuuggccaccuuacuucuu

SEQ ID NO: 1512888 - RNA, 19 nt, Artificial Sequence
  Description of Artificial Sequence: Synthetic oligonucleotide
gcuuugccauuacuacugc

SEQ ID NO: 1512889 - RNA, 19 nt, Artificial Sequence
  Description of Artificial Sequence: Synthetic oligonucleotide
gguuagcugaugaggcagc

SEQ ID NO: 1512890 - RNA, 19 nt, Artificial Sequence
  Description of Artificial Sequence: Synthetic oligonucleotide
ggccgcuaguuacugaaga

SEQ ID NO: 1512891 - RNA, 19 nt, Artificial Sequence
  Description of Artificial Sequence: Synthetic oligonucleotide
agcuggacgauaacuugaa

SEQ ID NO: 1512892 - RNA, 19 nt, Artificial Sequence
  Description of Artificial Sequence: Synthetic oligonucleotide
gcucucuugaaagcuagga

SEQ ID NO: 1512893 - RNA, 19 nt, Artificial Sequence
  Description of Artificial Sequence: Synthetic oligonucleotide
agagguggaagugguuuua

SEQ ID NO: 1512894 - RNA, 19 nt, Artificial Sequence
  Description of Artificial Sequence: Synthetic oligonucleotide
gcucuugcuugauagaaau

SEQ ID NO: 1512895 - RNA, 19 nt, Artificial Sequence
  Description of Artificial Sequence: Synthetic oligonucleotide
aagacccgcuuugcugaca

SEQ ID NO: 1512896 - RNA, 19 nt, Artificial Sequence
  Description of Artificial Sequence: Synthetic oligonucleotide
uguggcaaucuugguggua

SEQ ID NO: 1512897 - RNA, 19 nt, Artificial Sequence
  Description of Artificial Sequence: Synthetic oligonucleotide
cgcuaguuacugaagagga

SEQ ID NO: 1512898 - RNA, 19 nt, Artificial Sequence
  Description of Artificial Sequence: Synthetic oligonucleotide
gcuaguuacugaagaggac

SEQ ID NO: 1512899 - RNA, 19 nt, Artificial Sequence
  Description of Artificial Sequence: Synthetic oligonucleotide
cuacugccggaagggagac

SEQ ID NO: 1512900 - RNA, 19 nt, Artificial Sequence
  Description of Artificial Sequence: Synthetic oligonucleotide
accuaguuuggaaccuagu

SEQ ID NO: 1512901 - RNA, 19 nt, Artificial Sequence
  Description of Artificial Sequence: Synthetic oligonucleotide
gaaccuaguuuggaaccua

SEQ ID NO: 1512902 - RNA, 19 nt, Artificial Sequence
  Description of Artificial Sequence: Synthetic oligonucleotide
caguugcgagggcuuugcc

SEQ ID NO: 1512903 - RNA, 19 nt, Artificial Sequence
  Description of Artificial Sequence: Synthetic oligonucleotide
guuggcccuuuaagcgacg

SEQ ID NO: 1512904 - RNA, 19 nt, Artificial Sequence
  Description of Artificial Sequence: Synthetic oligonucleotide
agcccaucuccauggcaaa

SEQ ID NO: 1512905 - RNA, 19 nt, Artificial Sequence
  Description of Artificial Sequence: Synthetic oligonucleotide
aguccaccuuuggaugaug

SEQ ID NO: 1512906 - RNA, 19 nt, Artificial Sequence
  Description of Artificial Sequence: Synthetic oligonucleotide
ccggaagggagacucgaug

SEQ ID NO: 1512907 - RNA, 19 nt, Artificial Sequence
  Description of Artificial Sequence: Synthetic oligonucleotide
ggugguuccacauccuuuu

SEQ ID NO: 1512908 - RNA, 19 nt, Artificial Sequence
  Description of Artificial Sequence: Synthetic oligonucleotide
cucaggccagucuugccua

SEQ ID NO: 1512909 - RNA, 19 nt, Artificial Sequence
  Description of Artificial Sequence: Synthetic oligonucleotide
cagcacuagucucuucaaa

SEQ ID NO: 1512910 - RNA, 19 nt, Artificial Sequence
  Description of Artificial Sequence: Synthetic oligonucleotide
uaaccguggguggcuugac

SEQ ID NO: 1512911 - RNA, 19 nt, Artificial Sequence
  Description of Artificial Sequence: Synthetic oligonucleotide
guagagguuauggcacucu

SEQ ID NO: 1512912 - RNA, 19 nt, Artificial Sequence
  Description of Artificial Sequence: Synthetic oligonucleotide
ugggcuccggugugguuuu

SEQ ID NO: 1512913 - RNA, 19 nt, Artificial Sequence
  Description of Artificial Sequence: Synthetic oligonucleotide
ggacacguuguuaccagaa

SEQ ID NO: 1512914 - RNA, 19 nt, Artificial Sequence
  Description of Artificial Sequence: Synthetic oligonucleotide
caaugccccgagccaaaga

SEQ ID NO: 1512915 - RNA, 19 nt, Artificial Sequence
  Description of Artificial Sequence: Synthetic oligonucleotide
aggccgcuaguuacugaag

SEQ ID NO: 1512916 - RNA, 19 nt, Artificial Sequence
  Description of Artificial Sequence: Synthetic oligonucleotide
ccgagccaaagacucauca

SEQ ID NO: 1512917 - RNA, 19 nt, Artificial Sequence
  Description of Artificial Sequence: Synthetic oligonucleotide
gguuuuccacuauuguuuu

SEQ ID NO: 1512918 - RNA, 19 nt, Artificial Sequence
  Description of Artificial Sequence: Synthetic oligonucleotide
gccagacuagucaauccca

SEQ ID NO: 1512919 - RNA, 19 nt, Artificial Sequence
  Description of Artificial Sequence: Synthetic oligonucleotide
gguuagagguggaaguggu

SEQ ID NO: 1512920 - RNA, 19 nt, Artificial Sequence
  Description of Artificial Sequence: Synthetic oligonucleotide
aucaaugccccgagccaaa

SEQ ID NO: 1512921 - RNA, 19 nt, Artificial Sequence
  Description of Artificial Sequence: Synthetic oligonucleotide
gguagagguuauggcacuc

SEQ ID NO: 1512922 - RNA, 19 nt, Artificial Sequence
  Description of Artificial Sequence: Synthetic oligonucleotide
guaaucgcuucauggcguu

SEQ ID NO: 1512923 - RNA, 19 nt, Artificial Sequence
  Description of Artificial Sequence: Synthetic oligonucleotide
cccuuuaagcgacgcugag

SEQ ID NO: 1512924 - RNA, 19 nt, Artificial Sequence
  Description of Artificial Sequence: Synthetic oligonucleotide
agucuugccuaggguuaga

SEQ ID NO: 1512925 - RNA, 19 nt, Artificial Sequence
  Description of Artificial Sequence: Synthetic oligonucleotide
gucaaucccacaggcuucu

SEQ ID NO: 1512926 - RNA, 19 nt, Artificial Sequence
  Description of Artificial Sequence: Synthetic oligonucleotide
ccaccuuacuucuugaguu

SEQ ID NO: 1512927 - RNA, 19 nt, Artificial Sequence
  Description of Artificial Sequence: Synthetic oligonucleotide
ggacgauaacuugaaucaa

SEQ ID NO: 1512928 - RNA, 19 nt, Artificial Sequence
  Description of Artificial Sequence: Synthetic oligonucleotide
guuuugcuuguggcacuuc

SEQ ID NO: 1512929 - RNA, 19 nt, Artificial Sequence
  Description of Artificial Sequence: Synthetic oligonucleotide
cacaacuaaccgagcgacu

SEQ ID NO: 1512930 - RNA, 19 nt, Artificial Sequence
  Description of Artificial Sequence: Synthetic oligonucleotide
gagcgacucaggccagucu

SEQ ID NO: 1512931 - RNA, 19 nt, Artificial Sequence
  Description of Artificial Sequence: Synthetic oligonucleotide
ccagucuugccuaggguua

SEQ ID NO: 1512932 - RNA, 19 nt, Artificial Sequence
  Description of Artificial Sequence: Synthetic oligonucleotide
ccgggcacaguaccacacc

SEQ ID NO: 1512933 - RNA, 19 nt, Artificial Sequence
  Description of Artificial Sequence: Synthetic oligonucleotide
gaggcagcacugcuuccau

SEQ ID NO: 1512934 - RNA, 19 nt, Artificial Sequence
  Description of Artificial Sequence: Synthetic oligonucleotide
gaaagcuaggaaggcuguu

SEQ ID NO: 1512935 - RNA, 19 nt, Artificial Sequence
  Description of Artificial Sequence: Synthetic oligonucleotide
gaagaccgugucucugguu

SEQ ID NO: 1512936 - RNA, 19 nt, Artificial Sequence
  Description of Artificial Sequence: Synthetic oligonucleotide
guccaccuuuggaugaugu

SEQ ID NO: 1512937 - RNA, 19 nt, Artificial Sequence
  Description of Artificial Sequence: Synthetic oligonucleotide
gaccgugucucugguuucu

SEQ ID NO: 1512938 - RNA, 19 nt, Artificial Sequence
  Description of Artificial Sequence: Synthetic oligonucleotide
ccgcuuugcugacauuauc

SEQ ID NO: 1512939 - RNA, 19 nt, Artificial Sequence
  Description of Artificial Sequence: Synthetic oligonucleotide
ccaguuaggccgcuaguua

SEQ ID NO: 1512940 - RNA, 19 nt, Artificial Sequence
  Description of Artificial Sequence: Synthetic oligonucleotide
cucaucaagcagugcuuuu

SEQ ID NO: 1512941 - RNA, 19 nt, Artificial Sequence
  Description of Artificial Sequence: Synthetic oligonucleotide
ggcgagggucauucacuuc

SEQ ID NO: 1512942 - RNA, 19 nt, Artificial Sequence
  Description of Artificial Sequence: Synthetic oligonucleotide
gcccuuuaagcgacgcuga

SEQ ID NO: 1512943 - RNA, 19 nt, Artificial Sequence
  Description of Artificial Sequence: Synthetic oligonucleotide
gcgacucaggccagucuug

SEQ ID NO: 1512944 - RNA, 19 nt, Artificial Sequence
  Description of Artificial Sequence: Synthetic oligonucleotide
aggcuucugguuagcugau

SEQ ID NO: 1512945 - RNA, 19 nt, Artificial Sequence
  Description of Artificial Sequence: Synthetic oligonucleotide
ggcuccggugugguuuugc

SEQ ID NO: 1512946 - RNA, 19 nt, Artificial Sequence
  Description of Artificial Sequence: Synthetic oligonucleotide
cuguuaccagaaccuaguu

SEQ ID NO: 1512947 - RNA, 19 nt, Artificial Sequence
  Description of Artificial Sequence: Synthetic oligonucleotide
accgagcgacucaggccag

SEQ ID NO: 1512948 - RNA, 19 nt, Artificial Sequence
  Description of Artificial Sequence: Synthetic oligonucleotide
ccuauuuggccaccuuacu

SEQ ID NO: 1512949 - RNA, 19 nt, Artificial Sequence
  Description of Artificial Sequence: Synthetic oligonucleotide
ggguggcuugacuucugcu

SEQ ID NO: 1512950 - RNA, 19 nt, Artificial Sequence
  Description of Artificial Sequence: Synthetic oligonucleotide
caacacaggccaagcccau

SEQ ID NO: 1512951 - RNA, 19 nt, Artificial Sequence
  Description of Artificial Sequence: Synthetic oligonucleotide
ccugggguuuguggcaauc

SEQ ID NO: 1512952 - RNA, 19 nt, Artificial Sequence
  Description of Artificial Sequence: Synthetic oligonucleotide
gcuccggugugguuuugcu

SEQ ID NO: 1512953 - RNA, 19 nt, Artificial Sequence
  Description of Artificial Sequence: Synthetic oligonucleotide
cccgagccaaagacucauc

SEQ ID NO: 1512954 - RNA, 19 nt, Artificial Sequence
  Description of Artificial Sequence: Synthetic oligonucleotide
ccuuuugagcuggacgaua

SEQ ID NO: 1512955 - RNA, 19 nt, Artificial Sequence
  Description of Artificial Sequence: Synthetic oligonucleotide
gcgagggcuuugccauuac

SEQ ID NO: 1512956 - RNA, 19 nt, Artificial Sequence
  Description of Artificial Sequence: Synthetic oligonucleotide
ccuaggguuagagguggaa

SEQ ID NO: 1512957 - RNA, 19 nt, Artificial Sequence
  Description of Artificial Sequence: Synthetic oligonucleotide
gggagacucgaugaugcuu

SEQ ID NO: 1512958 - RNA, 19 nt, Artificial Sequence
  Description of Artificial Sequence: Synthetic oligonucleotide
gcuggacgauaacuugaau

SEQ ID NO: 1512959 - RNA, 19 nt, Artificial Sequence
  Description of Artificial Sequence: Synthetic oligonucleotide
cgagcgacucaggccaguc

SEQ ID NO: 1512960 - RNA, 19 nt, Artificial Sequence
  Description of Artificial Sequence: Synthetic oligonucleotide
gccgcugcugggcuccggu

SEQ ID NO: 1512961 - RNA, 19 nt, Artificial Sequence
  Description of Artificial Sequence: Synthetic oligonucleotide
gccccgagccaaagacuca

SEQ ID NO: 1512962 - RNA, 19 nt, Artificial Sequence
  Description of Artificial Sequence: Synthetic oligonucleotide
cccgcuuugcugacauuau

SEQ ID NO: 1512963 - RNA, 19 nt, Artificial Sequence
  Description of Artificial Sequence: Synthetic oligonucleotide
gccuaggguuagaggugga

SEQ ID NO: 1512964 - RNA, 19 nt, Artificial Sequence
  Description of Artificial Sequence: Synthetic oligonucleotide
ccacggucauuugccuaca

SEQ ID NO: 1512965 - RNA, 19 nt, Artificial Sequence
  Description of Artificial Sequence: Synthetic oligonucleotide
cgaugaugcuuugggcucu

SEQ ID NO: 1512966 - RNA, 19 nt, Artificial Sequence
  Description of Artificial Sequence: Synthetic oligonucleotide
gggcuccggugugguuuug

SEQ ID NO: 1512967 - RNA, 19 nt, Artificial Sequence
  Description of Artificial Sequence: Synthetic oligonucleotide
ccccaggaacuagacuacu

SEQ ID NO: 1512968 - RNA, 19 nt, Artificial Sequence
  Description of Artificial Sequence: Synthetic oligonucleotide
ccgagcgacucaggccagu

SEQ ID NO: 1512969 - RNA, 19 nt, Artificial Sequence
  Description of Artificial Sequence: Synthetic oligonucleotide
uauaauugggcuaauauug

SEQ ID NO: 1512970 - RNA, 19 nt, Artificial Sequence
  Description of Artificial Sequence: Synthetic oligonucleotide
cuuacuauauaucucaugg

SEQ ID NO: 1512971 - RNA, 19 nt, Artificial Sequence
  Description of Artificial Sequence: Synthetic oligonucleotide
auuaauaaagguuacauau

SEQ ID NO: 1512972 - RNA, 19 nt, Artificial Sequence
  Description of Artificial Sequence: Synthetic oligonucleotide
aaagguuacauauuauaag

SEQ ID NO: 1512973 - RNA, 19 nt, Artificial Sequence
  Description of Artificial Sequence: Synthetic oligonucleotide
aagguuacauauuauaagu

SEQ ID NO: 1512974 - RNA, 19 nt, Artificial Sequence
  Description of Artificial Sequence: Synthetic oligonucleotide
aauguaagcgcaaagaugu

SEQ ID NO: 1512975 - RNA, 19 nt, Artificial Sequence
  Description of Artificial Sequence: Synthetic oligonucleotide
auaaguauauauuucucuc

SEQ ID NO: 1512976 - RNA, 19 nt, Artificial Sequence
  Description of Artificial Sequence: Synthetic oligonucleotide
aacacugugcuccucuucc

SEQ ID NO: 1512977 - RNA, 19 nt, Artificial Sequence
  Description of Artificial Sequence: Synthetic oligonucleotide
ugucaguugauuuuaauug

SEQ ID NO: 1512978 - RNA, 19 nt, Artificial Sequence
  Description of Artificial Sequence: Synthetic oligonucleotide
uaauauaagugucaguuga

SEQ ID NO: 1512979 - RNA, 19 nt, Artificial Sequence
  Description of Artificial Sequence: Synthetic oligonucleotide
aauuucuuauaauugggcu

SEQ ID NO: 1512980 - RNA, 19 nt, Artificial Sequence
  Description of Artificial Sequence: Synthetic oligonucleotide
uacuauauaucucauggug

SEQ ID NO: 1512981 - RNA, 19 nt, Artificial Sequence
  Description of Artificial Sequence: Synthetic oligonucleotide
aagugggucaggcaugucc

SEQ ID NO: 1512982 - RNA, 19 nt, Artificial Sequence
  Description of Artificial Sequence: Synthetic oligonucleotide
aucaugaacacugugcucc

SEQ ID NO: 1512983 - RNA, 19 nt, Artificial Sequence
  Description of Artificial Sequence: Synthetic oligonucleotide
uauucugagccucagcagg

SEQ ID NO: 1512984 - RNA, 19 nt, Artificial Sequence
  Description of Artificial Sequence: Synthetic oligonucleotide
guaaauaggauucaggcuc

SEQ ID NO: 1512985 - RNA, 19 nt, Artificial Sequence
  Description of Artificial Sequence: Synthetic oligonucleotide
cuguaaauaggauucaggc

SEQ ID NO: 1512986 - RNA, 19 nt, Artificial Sequence
  Description of Artificial Sequence: Synthetic oligonucleotide
aauccacugacauggcacc

SEQ ID NO: 1512987 - RNA, 19 nt, Artificial Sequence
  Description of Artificial Sequence: Synthetic oligonucleotide
uguaauauaagugucaguu

SEQ ID NO: 1512988 - RNA, 19 nt, Artificial Sequence
  Description of Artificial Sequence: Synthetic oligonucleotide
uauaaguauauauuucucu

SEQ ID NO: 1512989 - RNA, 19 nt, Artificial Sequence
  Description of Artificial Sequence: Synthetic oligonucleotide
cuaauauugauaacagggc

SEQ ID NO: 1512990 - RNA, 19 nt, Artificial Sequence
  Description of Artificial Sequence: Synthetic oligonucleotide
uugugcauauucuagaaca

SEQ ID NO: 1512991 - RNA, 19 nt, Artificial Sequence
  Description of Artificial Sequence: Synthetic oligonucleotide
gcuaauauugauaacaggg

SEQ ID NO: 1512992 - RNA, 19 nt, Artificial Sequence
  Description of Artificial Sequence: Synthetic oligonucleotide
aaucccacggucaauuucc

SEQ ID NO: 1512993 - RNA, 19 nt, Artificial Sequence
  Description of Artificial Sequence: Synthetic oligonucleotide
uauuauaaguauauauuuc

SEQ ID NO: 1512994 - RNA, 19 nt, Artificial Sequence
  Description of Artificial Sequence: Synthetic oligonucleotide
aauuugaauguguauuuga

SEQ ID NO: 1512995 - RNA, 19 nt, Artificial Sequence
  Description of Artificial Sequence: Synthetic oligonucleotide
uaaaacuuguucacuauga

SEQ ID NO: 1512996 - RNA, 19 nt, Artificial Sequence
  Description of Artificial Sequence: Synthetic oligonucleotide
auauauuucucucauuuga

SEQ ID NO: 1512997 - RNA, 19 nt, Artificial Sequence
  Description of Artificial Sequence: Synthetic oligonucleotide
aguuuuguuggccuggccg

SEQ ID NO: 1512998 - RNA, 19 nt, Artificial Sequence
  Description of Artificial Sequence: Synthetic oligonucleotide
ucuuugagcuuccaacucg

SEQ ID NO: 1512999 - RNA, 19 nt, Artificial Sequence
  Description of Artificial Sequence: Synthetic oligonucleotide
uuuggcacaauguaagcgc

SEQ ID NO: 1513000 - RNA, 19 nt, Artificial Sequence
  Description of Artificial Sequence: Synthetic oligonucleotide
ugccacaucaugaacacug

SEQ ID NO: 1513001 - RNA, 19 nt, Artificial Sequence
  Description of Artificial Sequence: Synthetic oligonucleotide
gauaacagggcagagggag

SEQ ID NO: 1513002 - RNA, 19 nt, Artificial Sequence
  Description of Artificial Sequence: Synthetic oligonucleotide
agaguuguaaagcuucuag

SEQ ID NO: 1513003 - RNA, 19 nt, Artificial Sequence
  Description of Artificial Sequence: Synthetic oligonucleotide
ucauucagugacuauaacu

SEQ ID NO: 1513004 - RNA, 19 nt, Artificial Sequence
  Description of Artificial Sequence: Synthetic oligonucleotide
aguuguaaagcuucuagga

SEQ ID NO: 1513005 - RNA, 19 nt, Artificial Sequence
  Description of Artificial Sequence: Synthetic oligonucleotide
uuggauuccaguuuguagu

SEQ ID NO: 1513006 - RNA, 19 nt, Artificial Sequence
  Description of Artificial Sequence: Synthetic oligonucleotide
ugcauauucuagaacauuc

SEQ ID NO: 1513007 - RNA, 19 nt, Artificial Sequence
  Description of Artificial Sequence: Synthetic oligonucleotide
gaguuguaaagcuucuagg

SEQ ID NO: 1513008 - RNA, 19 nt, Artificial Sequence
  Description of Artificial Sequence: Synthetic oligonucleotide
uccaacucgaaauaucccc

SEQ ID NO: 1513009 - RNA, 19 nt, Artificial Sequence
  Description of Artificial Sequence: Synthetic oligonucleotide
uugcuuacuauauaucuca

SEQ ID NO: 1513010 - RNA, 19 nt, Artificial Sequence
  Description of Artificial Sequence: Synthetic oligonucleotide
uguauaauuugaaugugua

SEQ ID NO: 1513011 - RNA, 19 nt, Artificial Sequence
  Description of Artificial Sequence: Synthetic oligonucleotide
augcuguauaauuugaaug

SEQ ID NO: 1513012 - RNA, 19 nt, Artificial Sequence
  Description of Artificial Sequence: Synthetic oligonucleotide
ugagcuuccaacucgaaau

SEQ ID NO: 1513013 - RNA, 19 nt, Artificial Sequence
  Description of Artificial Sequence: Synthetic oligonucleotide
uguaaauaggauucaggcu

SEQ ID NO: 1513014 - RNA, 19 nt, Artificial Sequence
  Description of Artificial Sequence: Synthetic oligonucleotide
ugggcuaauauugauaaca

SEQ ID NO: 1513015 - RNA, 19 nt, Artificial Sequence
  Description of Artificial Sequence: Synthetic oligonucleotide
uuuauaguuggauuccagu

SEQ ID NO: 1513016 - RNA, 19 nt, Artificial Sequence
  Description of Artificial Sequence: Synthetic oligonucleotide
auugggcuaauauugauaa

SEQ ID NO: 1513017 - RNA, 19 nt, Artificial Sequence
  Description of Artificial Sequence: Synthetic oligonucleotide
uuuuauaguuggauuccag

SEQ ID NO: 1513018 - RNA, 19 nt, Artificial Sequence
  Description of Artificial Sequence: Synthetic oligonucleotide
uaggauuuuccuuagguau

SEQ ID NO: 1513019 - RNA, 19 nt, Artificial Sequence
  Description of Artificial Sequence: Synthetic oligonucleotide
ugaugaaugcuguguauag

SEQ ID NO: 1513020 - RNA, 19 nt, Artificial Sequence
  Description of Artificial Sequence: Synthetic oligonucleotide
uaggagucgagacugguug

SEQ ID NO: 1513021 - RNA, 19 nt, Artificial Sequence
  Description of Artificial Sequence: Synthetic oligonucleotide
uuauaauugggcuaauauu

SEQ ID NO: 1513022 - RNA, 19 nt, Artificial Sequence
  Description of Artificial Sequence: Synthetic oligonucleotide
ugagaagugggucaggcau

SEQ ID NO: 1513023 - RNA, 19 nt, Artificial Sequence
  Description of Artificial Sequence: Synthetic oligonucleotide
auaguuggauuccaguuug

SEQ ID NO: 1513024 - RNA, 19 nt, Artificial Sequence
  Description of Artificial Sequence: Synthetic oligonucleotide
agcgcaaagauguagcugu

SEQ ID NO: 1513025 - RNA, 19 nt, Artificial Sequence
  Description of Artificial Sequence: Synthetic oligonucleotide
uacaaggaauuucuuauaa

SEQ ID NO: 1513026 - RNA, 19 nt, Artificial Sequence
  Description of Artificial Sequence: Synthetic oligonucleotide
uuugcuuacuauauaucuc

SEQ ID NO: 1513027 - RNA, 19 nt, Artificial Sequence
  Description of Artificial Sequence: Synthetic oligonucleotide
aaauauccccacugucugg

SEQ ID NO: 1513028 - RNA, 19 nt, Artificial Sequence
  Description of Artificial Sequence: Synthetic oligonucleotide
aaaucauucagugacuaua

SEQ ID NO: 1513029 - RNA, 19 nt, Artificial Sequence
  Description of Artificial Sequence: Synthetic oligonucleotide
aggauucaggcucagcuuc

SEQ ID NO: 1513030 - RNA, 19 nt, Artificial Sequence
  Description of Artificial Sequence: Synthetic oligonucleotide
gaauuucuuauaauugggc

SEQ ID NO: 1513031 - RNA, 19 nt, Artificial Sequence
  Description of Artificial Sequence: Synthetic oligonucleotide
gucucugguacacagacug

SEQ ID NO: 1513032 - RNA, 19 nt, Artificial Sequence
  Description of Artificial Sequence: Synthetic oligonucleotide
uuucguuugguuaggauuu

SEQ ID NO: 1513033 - RNA, 19 nt, Artificial Sequence
  Description of Artificial Sequence: Synthetic oligonucleotide
agagaguguugaugaaugc

SEQ ID NO: 1513034 - RNA, 19 nt, Artificial Sequence
  Description of Artificial Sequence: Synthetic oligonucleotide
ugccagucgagccaucugg

SEQ ID NO: 1513035 - RNA, 19 nt, Artificial Sequence
  Description of Artificial Sequence: Synthetic oligonucleotide
aagagaguguugaugaaug

SEQ ID NO: 1513036 - RNA, 19 nt, Artificial Sequence
  Description of Artificial Sequence: Synthetic oligonucleotide
caauguaagcgcaaagaug

SEQ ID NO: 1513037 - RNA, 19 nt, Artificial Sequence
  Description of Artificial Sequence: Synthetic oligonucleotide
uuucuuauaauugggcuaa

SEQ ID NO: 1513038 - RNA, 19 nt, Artificial Sequence
  Description of Artificial Sequence: Synthetic oligonucleotide
uuauaguuggauuccaguu

SEQ ID NO: 1513039 - RNA, 19 nt, Artificial Sequence
  Description of Artificial Sequence: Synthetic oligonucleotide
uauaguuggauuccaguuu

SEQ ID NO: 1513040 - RNA, 19 nt, Artificial Sequence
  Description of Artificial Sequence: Synthetic oligonucleotide
acaauguaagcgcaaagau

SEQ ID NO: 1513041 - RNA, 19 nt, Artificial Sequence
  Description of Artificial Sequence: Synthetic oligonucleotide
ugucuuacucucuucuuug

SEQ ID NO: 1513042 - RNA, 19 nt, Artificial Sequence
  Description of Artificial Sequence: Synthetic oligonucleotide
guaauauaagugucaguug

SEQ ID NO: 1513043 - RNA, 19 nt, Artificial Sequence
  Description of Artificial Sequence: Synthetic oligonucleotide
uauaagugucaguugauuu

SEQ ID NO: 1513044 - RNA, 19 nt, Artificial Sequence
  Description of Artificial Sequence: Synthetic oligonucleotide
auucucuuauucuguuucg

SEQ ID NO: 1513045 - RNA, 19 nt, Artificial Sequence
  Description of Artificial Sequence: Synthetic oligonucleotide
uguaagcgcaaagauguag

SEQ ID NO: 1513046 - RNA, 19 nt, Artificial Sequence
  Description of Artificial Sequence: Synthetic oligonucleotide
ugguguaauauaaguguca

SEQ ID NO: 1513047 - RNA, 19 nt, Artificial Sequence
  Description of Artificial Sequence: Synthetic oligonucleotide
uuugaauguguauuugaau

SEQ ID NO: 1513048 - RNA, 19 nt, Artificial Sequence
  Description of Artificial Sequence: Synthetic oligonucleotide
uugucaguugacaggagcu

SEQ ID NO: 1513049 - RNA, 19 nt, Artificial Sequence
  Description of Artificial Sequence: Synthetic oligonucleotide
uauuugaauuuaaaauuuu

SEQ ID NO: 1513050 - RNA, 19 nt, Artificial Sequence
  Description of Artificial Sequence: Synthetic oligonucleotide
ugaggucucugguacacag

SEQ ID NO: 1513051 - RNA, 19 nt, Artificial Sequence
  Description of Artificial Sequence: Synthetic oligonucleotide
ugauggaauccacugacau

SEQ ID NO: 1513052 - RNA, 19 nt, Artificial Sequence
  Description of Artificial Sequence: Synthetic oligonucleotide
auuucuuauaauugggcua

SEQ ID NO: 1513053 - RNA, 19 nt, Artificial Sequence
  Description of Artificial Sequence: Synthetic oligonucleotide
uuuuauucugagccucagc

SEQ ID NO: 1513054 - RNA, 19 nt, Artificial Sequence
  Description of Artificial Sequence: Synthetic oligonucleotide
acgcaauugucuuacucuc

SEQ ID NO: 1513055 - RNA, 19 nt, Artificial Sequence
  Description of Artificial Sequence: Synthetic oligonucleotide
gauggaauccacugacaug

SEQ ID NO: 1513056 - RNA, 19 nt, Artificial Sequence
  Description of Artificial Sequence: Synthetic oligonucleotide
uuacuauauaucucauggu

SEQ ID NO: 1513057 - RNA, 19 nt, Artificial Sequence
  Description of Artificial Sequence: Synthetic oligonucleotide
auaagugucaguugauuuu

SEQ ID NO: 1513058 - RNA, 19 nt, Artificial Sequence
  Description of Artificial Sequence: Synthetic oligonucleotide
guugucaguugacaggagc

SEQ ID NO: 1513059 - RNA, 19 nt, Artificial Sequence
  Description of Artificial Sequence: Synthetic oligonucleotide
gaauccacugacauggcac

SEQ ID NO: 1513060 - RNA, 19 nt, Artificial Sequence
  Description of Artificial Sequence: Synthetic oligonucleotide
agugggucaggcauguccc

SEQ ID NO: 1513061 - RNA, 19 nt, Artificial Sequence
  Description of Artificial Sequence: Synthetic oligonucleotide
gacuauaacuuucauuucu

SEQ ID NO: 1513062 - RNA, 19 nt, Artificial Sequence
  Description of Artificial Sequence: Synthetic oligonucleotide
aauauccccacugucugga

SEQ ID NO: 1513063 - RNA, 19 nt, Artificial Sequence
  Description of Artificial Sequence: Synthetic oligonucleotide
cuuagguauugaagggagg

SEQ ID NO: 1513064 - RNA, 19 nt, Artificial Sequence
  Description of Artificial Sequence: Synthetic oligonucleotide
aucauucagugacuauaac

SEQ ID NO: 1513065 - RNA, 19 nt, Artificial Sequence
  Description of Artificial Sequence: Synthetic oligonucleotide
aaaugaugcuguauaauuu

SEQ ID NO: 1513066 - RNA, 19 nt, Artificial Sequence
  Description of Artificial Sequence: Synthetic oligonucleotide
uguguauagcucccuggug

SEQ ID NO: 1513067 - RNA, 19 nt, Artificial Sequence
  Description of Artificial Sequence: Synthetic oligonucleotide
agacaucaaucccacgguc

SEQ ID NO: 1513068 - RNA, 19 nt, Artificial Sequence
  Description of Artificial Sequence: Synthetic oligonucleotide
ucaauuuccucacgcaauu

SEQ ID NO: 1513069 - RNA, 19 nt, Artificial Sequence
  Description of Artificial Sequence: Synthetic oligonucleotide
uucauuucucaauacugua

SEQ ID NO: 1513070 - RNA, 19 nt, Artificial Sequence
  Description of Artificial Sequence: Synthetic oligonucleotide
gaaaugaugcuguauaauu

SEQ ID NO: 1513071 - RNA, 19 nt, Artificial Sequence
  Description of Artificial Sequence: Synthetic oligonucleotide
uuccaacucgaaauauccc

SEQ ID NO: 1513072 - RNA, 19 nt, Artificial Sequence
  Description of Artificial Sequence: Synthetic oligonucleotide
agaguguugaugaaugcug

SEQ ID NO: 1513073 - RNA, 19 nt, Artificial Sequence
  Description of Artificial Sequence: Synthetic oligonucleotide
aaucauucagugacuauaa

SEQ ID NO: 1513074 - RNA, 19 nt, Artificial Sequence
  Description of Artificial Sequence: Synthetic oligonucleotide
ucugguacacagacugggc

SEQ ID NO: 1513075 - RNA, 19 nt, Artificial Sequence
  Description of Artificial Sequence: Synthetic oligonucleotide
ucgaaauauccccacuguc

SEQ ID NO: 1513076 - RNA, 19 nt, Artificial Sequence
  Description of Artificial Sequence: Synthetic oligonucleotide
agagggagaaaugaugcug

SEQ ID NO: 1513077 - RNA, 19 nt, Artificial Sequence
  Description of Artificial Sequence: Synthetic oligonucleotide
agaucugccaccgcucucg

SEQ ID NO: 1513078 - RNA, 19 nt, Artificial Sequence
  Description of Artificial Sequence: Synthetic oligonucleotide
cuucuaggagucgagacug

SEQ ID NO: 1513079 - RNA, 19 nt, Artificial Sequence
  Description of Artificial Sequence: Synthetic oligonucleotide
guaagcgcaaagauguagc

SEQ ID NO: 1513080 - RNA, 19 nt, Artificial Sequence
  Description of Artificial Sequence: Synthetic oligonucleotide
agucgagccaucuggccuc

SEQ ID NO: 1513081 - RNA, 19 nt, Artificial Sequence
  Description of Artificial Sequence: Synthetic oligonucleotide
aacucgaaauauccccacu

SEQ ID NO: 1513082 - RNA, 19 nt, Artificial Sequence
  Description of Artificial Sequence: Synthetic oligonucleotide
uuggcacaauguaagcgca

SEQ ID NO: 1513083 - RNA, 19 nt, Artificial Sequence
  Description of Artificial Sequence: Synthetic oligonucleotide
cugaccccggguaaggagg

SEQ ID NO: 1513084 - RNA, 19 nt, Artificial Sequence
  Description of Artificial Sequence: Synthetic oligonucleotide
aaaagcacagaaacccgcu

SEQ ID NO: 1513085 - RNA, 19 nt, Artificial Sequence
  Description of Artificial Sequence: Synthetic oligonucleotide
gaugaaugcuguguauagc

SEQ ID NO: 1513086 - RNA, 19 nt, Artificial Sequence
  Description of Artificial Sequence: Synthetic oligonucleotide
gguguaauauaagugucag

SEQ ID NO: 1513087 - RNA, 19 nt, Artificial Sequence
  Description of Artificial Sequence: Synthetic oligonucleotide
uucuuugagcuuccaacuc

SEQ ID NO: 1513088 - RNA, 19 nt, Artificial Sequence
  Description of Artificial Sequence: Synthetic oligonucleotide
uugagcuuccaacucgaaa

SEQ ID NO: 1513089 - RNA, 19 nt, Artificial Sequence
  Description of Artificial Sequence: Synthetic oligonucleotide
uauucuguuucguuugguu

SEQ ID NO: 1513090 - RNA, 19 nt, Artificial Sequence
  Description of Artificial Sequence: Synthetic oligonucleotide
ucacgcaauugucuuacuc

SEQ ID NO: 1513091 - RNA, 19 nt, Artificial Sequence
  Description of Artificial Sequence: Synthetic oligonucleotide
auauucuagaacauucuau

SEQ ID NO: 1513092 - RNA, 19 nt, Artificial Sequence
  Description of Artificial Sequence: Synthetic oligonucleotide
ugagccucagcaggcaagg

SEQ ID NO: 1513093 - RNA, 19 nt, Artificial Sequence
  Description of Artificial Sequence: Synthetic oligonucleotide
uccaguuuguaguuuugaa

SEQ ID NO: 1513094 - RNA, 19 nt, Artificial Sequence
  Description of Artificial Sequence: Synthetic oligonucleotide
ucuguuucguuugguuagg

SEQ ID NO: 1513095 - RNA, 19 nt, Artificial Sequence
  Description of Artificial Sequence: Synthetic oligonucleotide
ccuguaaauaggauucagg

SEQ ID NO: 1513096 - RNA, 19 nt, Artificial Sequence
  Description of Artificial Sequence: Synthetic oligonucleotide
auauuucucucauuugauu

SEQ ID NO: 1513097 - RNA, 19 nt, Artificial Sequence
  Description of Artificial Sequence: Synthetic oligonucleotide
ugaaugcuguguauagcuc

SEQ ID NO: 1513098 - RNA, 19 nt, Artificial Sequence
  Description of Artificial Sequence: Synthetic oligonucleotide
cuuauaauugggcuaauau

SEQ ID NO: 1513099 - RNA, 19 nt, Artificial Sequence
  Description of Artificial Sequence: Synthetic oligonucleotide
uggcaggcuucccugaccc

SEQ ID NO: 1513100 - RNA, 19 nt, Artificial Sequence
  Description of Artificial Sequence: Synthetic oligonucleotide
uaauugggcuaauauugau

SEQ ID NO: 1513101 - RNA, 19 nt, Artificial Sequence
  Description of Artificial Sequence: Synthetic oligonucleotide
aguguugaugaaugcugug

SEQ ID NO: 1513102 - RNA, 19 nt, Artificial Sequence
  Description of Artificial Sequence: Synthetic oligonucleotide
ggcaaggagaguuguaaag

SEQ ID NO: 1513103 - RNA, 19 nt, Artificial Sequence
  Description of Artificial Sequence: Synthetic oligonucleotide
aauugggcuaauauugaua

SEQ ID NO: 1513104 - RNA, 19 nt, Artificial Sequence
  Description of Artificial Sequence: Synthetic oligonucleotide
auuuuccuuagguauugaa

SEQ ID NO: 1513105 - RNA, 19 nt, Artificial Sequence
  Description of Artificial Sequence: Synthetic oligonucleotide
uucaacaaggcugccacau

SEQ ID NO: 1513106 - RNA, 19 nt, Artificial Sequence
  Description of Artificial Sequence: Synthetic oligonucleotide
uaagugucaguugauuuua

SEQ ID NO: 1513107 - RNA, 19 nt, Artificial Sequence
  Description of Artificial Sequence: Synthetic oligonucleotide
ugguugucauccagauccg

SEQ ID NO: 1513108 - RNA, 19 nt, Artificial Sequence
  Description of Artificial Sequence: Synthetic oligonucleotide
auuugaauguguauuugaa

SEQ ID NO: 1513109 - RNA, 19 nt, Artificial Sequence
  Description of Artificial Sequence: Synthetic oligonucleotide
agguauugaagggagggcu

SEQ ID NO: 1513110 - RNA, 19 nt, Artificial Sequence
  Description of Artificial Sequence: Synthetic oligonucleotide
uugaugaaugcuguguaua

SEQ ID NO: 1513111 - RNA, 19 nt, Artificial Sequence
  Description of Artificial Sequence: Synthetic oligonucleotide
aagcgcaaagauguagcug

SEQ ID NO: 1513112 - RNA, 19 nt, Artificial Sequence
  Description of Artificial Sequence: Synthetic oligonucleotide
ugguuaggauuuuccuuag

SEQ ID NO: 1513113 - RNA, 19 nt, Artificial Sequence
  Description of Artificial Sequence: Synthetic oligonucleotide
auaauugggcuaauauuga

SEQ ID NO: 1513114 - RNA, 19 nt, Artificial Sequence
  Description of Artificial Sequence: Synthetic oligonucleotide
ugacuauaacuuucauuuc

SEQ ID NO: 1513115 - RNA, 19 nt, Artificial Sequence
  Description of Artificial Sequence: Synthetic oligonucleotide
agaaaugaugcuguauaau

SEQ ID NO: 1513116 - RNA, 19 nt, Artificial Sequence
  Description of Artificial Sequence: Synthetic oligonucleotide
ugcuguguauagcucccug

SEQ ID NO: 1513117 - RNA, 19 nt, Artificial Sequence
  Description of Artificial Sequence: Synthetic oligonucleotide
acaucaaucccacggucaa

SEQ ID NO: 1513118 - RNA, 19 nt, Artificial Sequence
  Description of Artificial Sequence: Synthetic oligonucleotide
ucucuuauucuguuucguu

SEQ ID NO: 1513119 - RNA, 19 nt, Artificial Sequence
  Description of Artificial Sequence: Synthetic oligonucleotide
gcugagagggaguaggcgc

SEQ ID NO: 1513120 - RNA, 19 nt, Artificial Sequence
  Description of Artificial Sequence: Synthetic oligonucleotide
uguuggccuggccggaugc

SEQ ID NO: 1513121 - RNA, 19 nt, Artificial Sequence
  Description of Artificial Sequence: Synthetic oligonucleotide
cacaauguaagcgcaaaga

SEQ ID NO: 1513122 - RNA, 19 nt, Artificial Sequence
  Description of Artificial Sequence: Synthetic oligonucleotide
gggguugucaguugacagg

SEQ ID NO: 1513123 - RNA, 19 nt, Artificial Sequence
  Description of Artificial Sequence: Synthetic oligonucleotide
ugacauggcaccccuucuc

SEQ ID NO: 1513124 - RNA, 19 nt, Artificial Sequence
  Description of Artificial Sequence: Synthetic oligonucleotide
ugauaacagggcagaggga

SEQ ID NO: 1513125 - RNA, 19 nt, Artificial Sequence
  Description of Artificial Sequence: Synthetic oligonucleotide
gggaccugccuguaaauag

SEQ ID NO: 1513126 - RNA, 19 nt, Artificial Sequence
  Description of Artificial Sequence: Synthetic oligonucleotide
aucucaugguguaauauaa

SEQ ID NO: 1513127 - RNA, 19 nt, Artificial Sequence
  Description of Artificial Sequence: Synthetic oligonucleotide
ccuuagguauugaagggag

SEQ ID NO: 1513128 - RNA, 19 nt, Artificial Sequence
  Description of Artificial Sequence: Synthetic oligonucleotide
uggauccuccacaggggag

SEQ ID NO: 1513129 - RNA, 19 nt, Artificial Sequence
  Description of Artificial Sequence: Synthetic oligonucleotide
guugucauccagauccgug

SEQ ID NO: 1513130 - RNA, 19 nt, Artificial Sequence
  Description of Artificial Sequence: Synthetic oligonucleotide
uuuccagaugcuggcagca

SEQ ID NO: 1513131 - RNA, 19 nt, Artificial Sequence
  Description of Artificial Sequence: Synthetic oligonucleotide
uguuucguuugguuaggau

SEQ ID NO: 1513132 - RNA, 19 nt, Artificial Sequence
  Description of Artificial Sequence: Synthetic oligonucleotide
caacaaggcugccacauca

SEQ ID NO: 1513133 - RNA, 19 nt, Artificial Sequence
  Description of Artificial Sequence: Synthetic oligonucleotide
gcuguguauagcucccugg

SEQ ID NO: 1513134 - RNA, 19 nt, Artificial Sequence
  Description of Artificial Sequence: Synthetic oligonucleotide
uucuccuggcccgaggagc

SEQ ID NO: 1513135 - RNA, 19 nt, Artificial Sequence
  Description of Artificial Sequence: Synthetic oligonucleotide
agugucaguugauuuuaau

SEQ ID NO: 1513136 - RNA, 19 nt, Artificial Sequence
  Description of Artificial Sequence: Synthetic oligonucleotide
auggcaccccuucuccugg

SEQ ID NO: 1513137 - RNA, 19 nt, Artificial Sequence
  Description of Artificial Sequence: Synthetic oligonucleotide
ucaugccucuggauccucc

SEQ ID NO: 1513138 - RNA, 19 nt, Artificial Sequence
  Description of Artificial Sequence: Synthetic oligonucleotide
aaauaggauucaggcucag

SEQ ID NO: 1513139 - RNA, 19 nt, Artificial Sequence
  Description of Artificial Sequence: Synthetic oligonucleotide
ugcuuacuauauaucucau

SEQ ID NO: 1513140 - RNA, 19 nt, Artificial Sequence
  Description of Artificial Sequence: Synthetic oligonucleotide
caacucgaaauauccccac

SEQ ID NO: 1513141 - RNA, 19 nt, Artificial Sequence
  Description of Artificial Sequence: Synthetic oligonucleotide
guuucguuugguuaggauu

SEQ ID NO: 1513142 - RNA, 19 nt, Artificial Sequence
  Description of Artificial Sequence: Synthetic oligonucleotide
ucuuauaauugggcuaaua

SEQ ID NO: 1513143 - RNA, 19 nt, Artificial Sequence
  Description of Artificial Sequence: Synthetic oligonucleotide
aggcacaagagaguguuga

SEQ ID NO: 1513144 - RNA, 19 nt, Artificial Sequence
  Description of Artificial Sequence: Synthetic oligonucleotide
cuuugagcuuccaacucga

SEQ ID NO: 1513145 - RNA, 19 nt, Artificial Sequence
  Description of Artificial Sequence: Synthetic oligonucleotide
auugucuuacucucuucuu

SEQ ID NO: 1513146 - RNA, 19 nt, Artificial Sequence
  Description of Artificial Sequence: Synthetic oligonucleotide
agggcuguccccaugaaaa

SEQ ID NO: 1513147 - RNA, 19 nt, Artificial Sequence
  Description of Artificial Sequence: Synthetic oligonucleotide
ugucauccagauccgugau

SEQ ID NO: 1513148 - RNA, 19 nt, Artificial Sequence
  Description of Artificial Sequence: Synthetic oligonucleotide
gcuuacuauauaucucaug

SEQ ID NO: 1513149 - RNA, 19 nt, Artificial Sequence
  Description of Artificial Sequence: Synthetic oligonucleotide
cugagccucagcaggcaag

SEQ ID NO: 1513150 - RNA, 19 nt, Artificial Sequence
  Description of Artificial Sequence: Synthetic oligonucleotide
cauggcaccccuucuccug

SEQ ID NO: 1513151 - RNA, 19 nt, Artificial Sequence
  Description of Artificial Sequence: Synthetic oligonucleotide
gggcuaauauugauaacag

SEQ ID NO: 1513152 - RNA, 19 nt, Artificial Sequence
  Description of Artificial Sequence: Synthetic oligonucleotide
uaacagggcagagggagaa

SEQ ID NO: 1513153 - RNA, 19 nt, Artificial Sequence
  Description of Artificial Sequence: Synthetic oligonucleotide
uggcugagagggaguaggc

SEQ ID NO: 1513154 - RNA, 19 nt, Artificial Sequence
  Description of Artificial Sequence: Synthetic oligonucleotide
uuccucacgcaauugucuu

SEQ ID NO: 1513155 - RNA, 19 nt, Artificial Sequence
  Description of Artificial Sequence: Synthetic oligonucleotide
caucaugaacacugugcuc

SEQ ID NO: 1513156 - RNA, 19 nt, Artificial Sequence
  Description of Artificial Sequence: Synthetic oligonucleotide
ucuaggagucgagacuggu

SEQ ID NO: 1513157 - RNA, 19 nt, Artificial Sequence
  Description of Artificial Sequence: Synthetic oligonucleotide
guauaauuugaauguguau

SEQ ID NO: 1513158 - RNA, 19 nt, Artificial Sequence
  Description of Artificial Sequence: Synthetic oligonucleotide
ggcgggcucaguuaccagg

SEQ ID NO: 1513159 - RNA, 19 nt, Artificial Sequence
  Description of Artificial Sequence: Synthetic oligonucleotide
ugucaguugacaggagcuc

SEQ ID NO: 1513160 - RNA, 19 nt, Artificial Sequence
  Description of Artificial Sequence: Synthetic oligonucleotide
uugggcuaauauugauaac

SEQ ID NO: 1513161 - RNA, 19 nt, Artificial Sequence
  Description of Artificial Sequence: Synthetic oligonucleotide
cacgcaauugucuuacucu

SEQ ID NO: 1513162 - RNA, 19 nt, Artificial Sequence
  Description of Artificial Sequence: Synthetic oligonucleotide
caccccuucuccuggcccg

SEQ ID NO: 1513163 - RNA, 19 nt, Artificial Sequence
  Description of Artificial Sequence: Synthetic oligonucleotide
cacaggggaggcucugggg

SEQ ID NO: 1513164 - RNA, 19 nt, Artificial Sequence
  Description of Artificial Sequence: Synthetic oligonucleotide
aagcuucuaggagucgaga

SEQ ID NO: 1513165 - RNA, 19 nt, Artificial Sequence
  Description of Artificial Sequence: Synthetic oligonucleotide
gguuaggauuuuccuuagg

SEQ ID NO: 1513166 - RNA, 19 nt, Artificial Sequence
  Description of Artificial Sequence: Synthetic oligonucleotide
ggauccuccacaggggagg

SEQ ID NO: 1513167 - RNA, 19 nt, Artificial Sequence
  Description of Artificial Sequence: Synthetic oligonucleotide
gauuccaguuuguaguuuu

SEQ ID NO: 1513168 - RNA, 19 nt, Artificial Sequence
  Description of Artificial Sequence: Synthetic oligonucleotide
caaggagaguuguaaagcu

SEQ ID NO: 1513169 - RNA, 19 nt, Artificial Sequence
  Description of Artificial Sequence: Synthetic oligonucleotide
uuugagcuuccaacucgaa

SEQ ID NO: 1513170 - RNA, 19 nt, Artificial Sequence
  Description of Artificial Sequence: Synthetic oligonucleotide
acaacauaucaaauucaau

SEQ ID NO: 1513171 - RNA, 19 nt, Artificial Sequence
  Description of Artificial Sequence: Synthetic oligonucleotide
ggaccugccuguaaauagg

SEQ ID NO: 1513172 - RNA, 19 nt, Artificial Sequence
  Description of Artificial Sequence: Synthetic oligonucleotide
ucuuccagacagacaucaa

SEQ ID NO: 1513173 - RNA, 19 nt, Artificial Sequence
  Description of Artificial Sequence: Synthetic oligonucleotide
gcuguauaauuugaaugug

SEQ ID NO: 1513174 - RNA, 19 nt, Artificial Sequence
  Description of Artificial Sequence: Synthetic oligonucleotide
ggauuuuccuuagguauug

SEQ ID NO: 1513175 - RNA, 19 nt, Artificial Sequence
  Description of Artificial Sequence: Synthetic oligonucleotide
gagaguguugaugaaugcu

SEQ ID NO: 1513176 - RNA, 19 nt, Artificial Sequence
  Description of Artificial Sequence: Synthetic oligonucleotide
agaagugggucaggcaugu

SEQ ID NO: 1513177 - RNA, 19 nt, Artificial Sequence
  Description of Artificial Sequence: Synthetic oligonucleotide
uaguuggauuccaguuugu

SEQ ID NO: 1513178 - RNA, 19 nt, Artificial Sequence
  Description of Artificial Sequence: Synthetic oligonucleotide
auagcucccuggugagaag

SEQ ID NO: 1513179 - RNA, 19 nt, Artificial Sequence
  Description of Artificial Sequence: Synthetic oligonucleotide
uuguuggccuggccggaug

SEQ ID NO: 1513180 - RNA, 19 nt, Artificial Sequence
  Description of Artificial Sequence: Synthetic oligonucleotide
gugucaguugauuuuaauu

SEQ ID NO: 1513181 - RNA, 19 nt, Artificial Sequence
  Description of Artificial Sequence: Synthetic oligonucleotide
agucgagacugguugucau

SEQ ID NO: 1513182 - RNA, 19 nt, Artificial Sequence
  Description of Artificial Sequence: Synthetic oligonucleotide
agguuacauauuauaagua

SEQ ID NO: 1513183 - RNA, 19 nt, Artificial Sequence
  Description of Artificial Sequence: Synthetic oligonucleotide
ucgggguugucaguugaca

SEQ ID NO: 1513184 - RNA, 19 nt, Artificial Sequence
  Description of Artificial Sequence: Synthetic oligonucleotide
uuucccgggaggggcgucg

SEQ ID NO: 1513185 - RNA, 19 nt, Artificial Sequence
  Description of Artificial Sequence: Synthetic oligonucleotide
auauccccacugucuggag

SEQ ID NO: 1513186 - RNA, 19 nt, Artificial Sequence
  Description of Artificial Sequence: Synthetic oligonucleotide
uuuuguuggccuggccgga

SEQ ID NO: 1513187 - RNA, 19 nt, Artificial Sequence
  Description of Artificial Sequence: Synthetic oligonucleotide
gcacaauguaagcgcaaag

SEQ ID NO: 1513188 - RNA, 19 nt, Artificial Sequence
  Description of Artificial Sequence: Synthetic oligonucleotide
ggucaauuuccucacgcaa

SEQ ID NO: 1513189 - RNA, 19 nt, Artificial Sequence
  Description of Artificial Sequence: Synthetic oligonucleotide
auccagauccgugauggaa

SEQ ID NO: 1513190 - RNA, 19 nt, Artificial Sequence
  Description of Artificial Sequence: Synthetic oligonucleotide
gcugccacaucaugaacac

SEQ ID NO: 1513191 - RNA, 19 nt, Artificial Sequence
  Description of Artificial Sequence: Synthetic oligonucleotide
cgugauggaauccacugac

SEQ ID NO: 1513192 - RNA, 19 nt, Artificial Sequence
  Description of Artificial Sequence: Synthetic oligonucleotide
uggcacaauguaagcgcaa

SEQ ID NO: 1513193 - RNA, 19 nt, Artificial Sequence
  Description of Artificial Sequence: Synthetic oligonucleotide
gguauugaagggagggcug

SEQ ID NO: 1513194 - RNA, 19 nt, Artificial Sequence
  Description of Artificial Sequence: Synthetic oligonucleotide
cgcugcucaguuuuguugg

SEQ ID NO: 1513195 - RNA, 19 nt, Artificial Sequence
  Description of Artificial Sequence: Synthetic oligonucleotide
caauuuccucacgcaauug

SEQ ID NO: 1513196 - RNA, 19 nt, Artificial Sequence
  Description of Artificial Sequence: Synthetic oligonucleotide
ucaaucccacggucaauuu

SEQ ID NO: 1513197 - RNA, 19 nt, Artificial Sequence
  Description of Artificial Sequence: Synthetic oligonucleotide
cucuccugaggccugcuga

SEQ ID NO: 1513198 - RNA, 19 nt, Artificial Sequence
  Description of Artificial Sequence: Synthetic oligonucleotide
gcacaagagaguguugaug

SEQ ID NO: 1513199 - RNA, 19 nt, Artificial Sequence
  Description of Artificial Sequence: Synthetic oligonucleotide
ccuuuggcacaauguaagc

SEQ ID NO: 1513200 - RNA, 19 nt, Artificial Sequence
  Description of Artificial Sequence: Synthetic oligonucleotide
gauccgugauggaauccac

SEQ ID NO: 1513201 - RNA, 19 nt, Artificial Sequence
  Description of Artificial Sequence: Synthetic oligonucleotide
cauggcaggcuucccugac

SEQ ID NO: 1513202 - RNA, 19 nt, Artificial Sequence
  Description of Artificial Sequence: Synthetic oligonucleotide
uggcggcgggcucaguuac

SEQ ID NO: 1513203 - RNA, 19 nt, Artificial Sequence
  Description of Artificial Sequence: Synthetic oligonucleotide
cugcucaguuuuguuggcc

SEQ ID NO: 1513204 - RNA, 19 nt, Artificial Sequence
  Description of Artificial Sequence: Synthetic oligonucleotide
cccacggucaauuuccuca

SEQ ID NO: 1513205 - RNA, 19 nt, Artificial Sequence
  Description of Artificial Sequence: Synthetic oligonucleotide
uucccugaccccggguaag

SEQ ID NO: 1513206 - RNA, 19 nt, Artificial Sequence
  Description of Artificial Sequence: Synthetic oligonucleotide
agagggaguaggcgcugcu

SEQ ID NO: 1513207 - RNA, 19 nt, Artificial Sequence
  Description of Artificial Sequence: Synthetic oligonucleotide
aguuggauuccaguuugua

SEQ ID NO: 1513208 - RNA, 19 nt, Artificial Sequence
  Description of Artificial Sequence: Synthetic oligonucleotide
uaggcgcugcucaguuuug

SEQ ID NO: 1513209 - RNA, 19 nt, Artificial Sequence
  Description of Artificial Sequence: Synthetic oligonucleotide
uccucacgcaauugucuua

SEQ ID NO: 1513210 - RNA, 19 nt, Artificial Sequence
  Description of Artificial Sequence: Synthetic oligonucleotide
gaccugccuguaaauagga

SEQ ID NO: 1513211 - RNA, 19 nt, Artificial Sequence
  Description of Artificial Sequence: Synthetic oligonucleotide
ugagagggaguaggcgcug

SEQ ID NO: 1513212 - RNA, 19 nt, Artificial Sequence
  Description of Artificial Sequence: Synthetic oligonucleotide
gaguucuuucuaaacaguu

SEQ ID NO: 1513213 - RNA, 19 nt, Artificial Sequence
  Description of Artificial Sequence: Synthetic oligonucleotide
gaguguugaugaaugcugu

SEQ ID NO: 1513214 - RNA, 19 nt, Artificial Sequence
  Description of Artificial Sequence: Synthetic oligonucleotide
cuggauccuccacagggga

SEQ ID NO: 1513215 - RNA, 19 nt, Artificial Sequence
  Description of Artificial Sequence: Synthetic oligonucleotide
ggcugagagggaguaggcg

SEQ ID NO: 1513216 - RNA, 19 nt, Artificial Sequence
  Description of Artificial Sequence: Synthetic oligonucleotide
agcuuccaacucgaaauau

SEQ ID NO: 1513217 - RNA, 19 nt, Artificial Sequence
  Description of Artificial Sequence: Synthetic oligonucleotide
aagugucaguugauuuuaa

SEQ ID NO: 1513218 - RNA, 19 nt, Artificial Sequence
  Description of Artificial Sequence: Synthetic oligonucleotide
cuuccagacagacaucaau

SEQ ID NO: 1513219 - RNA, 19 nt, Artificial Sequence
  Description of Artificial Sequence: Synthetic oligonucleotide
cucgaaauauccccacugu

SEQ ID NO: 1513220 - RNA, 19 nt, Artificial Sequence
  Description of Artificial Sequence: Synthetic oligonucleotide
ggcccgaggagcugguucc

SEQ ID NO: 1513221 - RNA, 19 nt, Artificial Sequence
  Description of Artificial Sequence: Synthetic oligonucleotide
cucgcugccagucgagcca

SEQ ID NO: 1513222 - RNA, 19 nt, Artificial Sequence
  Description of Artificial Sequence: Synthetic oligonucleotide
ccgcuugugcauauucuag

SEQ ID NO: 1513223 - RNA, 19 nt, Artificial Sequence
  Description of Artificial Sequence: Synthetic oligonucleotide
ccaacucgaaauaucccca

SEQ ID NO: 1513224 - RNA, 19 nt, Artificial Sequence
  Description of Artificial Sequence: Synthetic oligonucleotide
cuguguauagcucccuggu

SEQ ID NO: 1513225 - RNA, 19 nt, Artificial Sequence
  Description of Artificial Sequence: Synthetic oligonucleotide
guguaauauaagugucagu

SEQ ID NO: 1513226 - RNA, 19 nt, Artificial Sequence
  Description of Artificial Sequence: Synthetic oligonucleotide
uggggaccugccuguaaau

SEQ ID NO: 1513227 - RNA, 19 nt, Artificial Sequence
  Description of Artificial Sequence: Synthetic oligonucleotide
gagagggaguaggcgcugc

SEQ ID NO: 1513228 - RNA, 19 nt, Artificial Sequence
  Description of Artificial Sequence: Synthetic oligonucleotide
guaggcgcugcucaguuuu

SEQ ID NO: 1513229 - RNA, 19 nt, Artificial Sequence
  Description of Artificial Sequence: Synthetic oligonucleotide
ggcccggcuuugcagacag

SEQ ID NO: 1513230 - RNA, 19 nt, Artificial Sequence
  Description of Artificial Sequence: Synthetic oligonucleotide
caggcacaagagaguguug

SEQ ID NO: 1513231 - RNA, 19 nt, Artificial Sequence
  Description of Artificial Sequence: Synthetic oligonucleotide
gucaauuuccucacgcaau

SEQ ID NO: 1513232 - RNA, 19 nt, Artificial Sequence
  Description of Artificial Sequence: Synthetic oligonucleotide
gccauggcaggcuucccug

SEQ ID NO: 1513233 - RNA, 19 nt, Artificial Sequence
  Description of Artificial Sequence: Synthetic oligonucleotide
cagacaucaaucccacggu

SEQ ID NO: 1513234 - RNA, 19 nt, Artificial Sequence
  Description of Artificial Sequence: Synthetic oligonucleotide
gagaguuguaaagcuucua

SEQ ID NO: 1513235 - RNA, 19 nt, Artificial Sequence
  Description of Artificial Sequence: Synthetic oligonucleotide
gcuuccaacucgaaauauc

SEQ ID NO: 1513236 - RNA, 19 nt, Artificial Sequence
  Description of Artificial Sequence: Synthetic oligonucleotide
auccgugauggaauccacu

SEQ ID NO: 1513237 - RNA, 19 nt, Artificial Sequence
  Description of Artificial Sequence: Synthetic oligonucleotide
agacugggcccggcuuugc

SEQ ID NO: 1513238 - RNA, 19 nt, Artificial Sequence
  Description of Artificial Sequence: Synthetic oligonucleotide
uuuguuggccuggccggau

SEQ ID NO: 1513239 - RNA, 19 nt, Artificial Sequence
  Description of Artificial Sequence: Synthetic oligonucleotide
caguugauuuuaauuguuu

SEQ ID NO: 1513240 - RNA, 19 nt, Artificial Sequence
  Description of Artificial Sequence: Synthetic oligonucleotide
ccccggguaaggaggaggg

SEQ ID NO: 1513241 - RNA, 19 nt, Artificial Sequence
  Description of Artificial Sequence: Synthetic oligonucleotide
aagggagggcuguccccau

SEQ ID NO: 1513242 - RNA, 19 nt, Artificial Sequence
  Description of Artificial Sequence: Synthetic oligonucleotide
agaaacccgcuugugcaua

SEQ ID NO: 1513243 - RNA, 19 nt, Artificial Sequence
  Description of Artificial Sequence: Synthetic oligonucleotide
cucucgcugccagucgagc

SEQ ID NO: 1513244 - RNA, 19 nt, Artificial Sequence
  Description of Artificial Sequence: Synthetic oligonucleotide
gagggaguaggcgcugcuc

SEQ ID NO: 1513245 - RNA, 19 nt, Artificial Sequence
  Description of Artificial Sequence: Synthetic oligonucleotide
cuggggaccugccuguaaa

SEQ ID NO: 1513246 - RNA, 19 nt, Artificial Sequence
  Description of Artificial Sequence: Synthetic oligonucleotide
gcuucuaggagucgagacu

SEQ ID NO: 1513247 - RNA, 19 nt, Artificial Sequence
  Description of Artificial Sequence: Synthetic oligonucleotide
cugccagucgagccaucug

SEQ ID NO: 1513248 - RNA, 19 nt, Artificial Sequence
  Description of Artificial Sequence: Synthetic oligonucleotide
ccucacgcaauugucuuac

SEQ ID NO: 1513249 - RNA, 19 nt, Artificial Sequence
  Description of Artificial Sequence: Synthetic oligonucleotide
ccugaccccggguaaggag

SEQ ID NO: 1513250 - RNA, 19 nt, Artificial Sequence
  Description of Artificial Sequence: Synthetic oligonucleotide
cugagagggaguaggcgcu

SEQ ID NO: 1513251 - RNA, 19 nt, Artificial Sequence
  Description of Artificial Sequence: Synthetic oligonucleotide
acccgcuugugcauauucu

SEQ ID NO: 1513252 - RNA, 19 nt, Artificial Sequence
  Description of Artificial Sequence: Synthetic oligonucleotide
ccagucgagccaucuggcc

SEQ ID NO: 1513253 - RNA, 19 nt, Artificial Sequence
  Description of Artificial Sequence: Synthetic oligonucleotide
gaggucucugguacacaga

SEQ ID NO: 1513254 - RNA, 19 nt, Artificial Sequence
  Description of Artificial Sequence: Synthetic oligonucleotide
cggcuuugcagacaggcac

SEQ ID NO: 1513255 - RNA, 19 nt, Artificial Sequence
  Description of Artificial Sequence: Synthetic oligonucleotide
uucguuugguuaggauuuu

SEQ ID NO: 1513256 - RNA, 19 nt, Artificial Sequence
  Description of Artificial Sequence: Synthetic oligonucleotide
gacugggcccggcuuugca

SEQ ID NO: 1513257 - RNA, 19 nt, Artificial Sequence
  Description of Artificial Sequence: Synthetic oligonucleotide
gcgccugucaucucugcca

SEQ ID NO: 1513258 - RNA, 19 nt, Artificial Sequence
  Description of Artificial Sequence: Synthetic oligonucleotide
aggggcgucgggguuguca

SEQ ID NO: 1513259 - RNA, 19 nt, Artificial Sequence
  Description of Artificial Sequence: Synthetic oligonucleotide
uccccagaucugccaccgc

SEQ ID NO: 1513260 - RNA, 19 nt, Artificial Sequence
  Description of Artificial Sequence: Synthetic oligonucleotide
ugggcccggcuuugcagac

SEQ ID NO: 1513261 - RNA, 19 nt, Artificial Sequence
  Description of Artificial Sequence: Synthetic oligonucleotide
ucccgggaggggcgucggg

SEQ ID NO: 1513262 - RNA, 19 nt, Artificial Sequence
  Description of Artificial Sequence: Synthetic oligonucleotide
guacacagacugggcccgg

SEQ ID NO: 1513263 - RNA, 19 nt, Artificial Sequence
  Description of Artificial Sequence: Synthetic oligonucleotide
cagucgagccaucuggccu

SEQ ID NO: 1513264 - RNA, 19 nt, Artificial Sequence
  Description of Artificial Sequence: Synthetic oligonucleotide
cugaggccugcugaccuuc

SEQ ID NO: 1513265 - RNA, 19 nt, Artificial Sequence
  Description of Artificial Sequence: Synthetic oligonucleotide
uggcaccccuucuccuggc

SEQ ID NO: 1513266 - RNA, 19 nt, Artificial Sequence
  Description of Artificial Sequence: Synthetic oligonucleotide
uucccgggaggggcgucgg

SEQ ID NO: 1513267 - RNA, 19 nt, Artificial Sequence
  Description of Artificial Sequence: Synthetic oligonucleotide
gaaacccgcuugugcauau

SEQ ID NO: 1513268 - RNA, 19 nt, Artificial Sequence
  Description of Artificial Sequence: Synthetic oligonucleotide
cuucccugaccccggguaa

SEQ ID NO: 1513269 - RNA, 19 nt, Artificial Sequence
  Description of Artificial Sequence: Synthetic oligonucleotide
gaguaggcgcugcucaguu

SEQ ID NO: 1513270 - RNA, 19 nt, Artificial Sequence
  Description of Artificial Sequence: Synthetic oligonucleotide
gcaccccuucuccuggccc

SEQ ID NO: 1513271 - RNA, 19 nt, Artificial Sequence
  Description of Artificial Sequence: Synthetic oligonucleotide
gucgggguugucaguugac

SEQ ID NO: 1513272 - RNA, 19 nt, Artificial Sequence
  Description of Artificial Sequence: Synthetic oligonucleotide
cauccagauccgugaugga

SEQ ID NO: 1513273 - RNA, 19 nt, Artificial Sequence
  Description of Artificial Sequence: Synthetic oligonucleotide
ccgaguucugccuguccug

SEQ ID NO: 1513274 - RNA, 19 nt, Artificial Sequence
  Description of Artificial Sequence: Synthetic oligonucleotide
ggagcuccccagaucugcc

SEQ ID NO: 1513275 - RNA, 19 nt, Artificial Sequence
  Description of Artificial Sequence: Synthetic oligonucleotide
cuaggagucgagacugguu

SEQ ID NO: 1513276 - RNA, 19 nt, Artificial Sequence
  Description of Artificial Sequence: Synthetic oligonucleotide
gccagucgagccaucuggc

SEQ ID NO: 1513277 - RNA, 19 nt, Artificial Sequence
  Description of Artificial Sequence: Synthetic oligonucleotide
cuguuucguuugguuagga

SEQ ID NO: 1513278 - RNA, 19 nt, Artificial Sequence
  Description of Artificial Sequence: Synthetic oligonucleotide
gcuucccugaccccgggua

SEQ ID NO: 1513279 - RNA, 19 nt, Artificial Sequence
  Description of Artificial Sequence: Synthetic oligonucleotide
auguaagcgcaaagaugua

SEQ ID NO: 1513280 - RNA, 19 nt, Artificial Sequence
  Description of Artificial Sequence: Synthetic oligonucleotide
aucccacggucaauuuccu

SEQ ID NO: 1513281 - RNA, 19 nt, Artificial Sequence
  Description of Artificial Sequence: Synthetic oligonucleotide
cuucuucaugccucuggau

SEQ ID NO: 1513282 - RNA, 19 nt, Artificial Sequence
  Description of Artificial Sequence: Synthetic oligonucleotide
gcacagaaacccgcuugug

SEQ ID NO: 1513283 - RNA, 19 nt, Artificial Sequence
  Description of Artificial Sequence: Synthetic oligonucleotide
cgcuugugcauauucuaga

SEQ ID NO: 1513284 - RNA, 19 nt, Artificial Sequence
  Description of Artificial Sequence: Synthetic oligonucleotide
ggcaccccuucuccuggcc

SEQ ID NO: 1513285 - RNA, 19 nt, Artificial Sequence
  Description of Artificial Sequence: Synthetic oligonucleotide
gucgagccaucuggccucc

SEQ ID NO: 1513286 - RNA, 19 nt, Artificial Sequence
  Description of Artificial Sequence: Synthetic oligonucleotide
cuggcggcgggcucaguua

SEQ ID NO: 1513287 - RNA, 19 nt, Artificial Sequence
  Description of Artificial Sequence: Synthetic oligonucleotide
gaagugggucaggcauguc

SEQ ID NO: 1513288 - RNA, 19 nt, Artificial Sequence
  Description of Artificial Sequence: Synthetic oligonucleotide
ggcaggcuucccugacccc

SEQ ID NO: 1513289 - RNA, 19 nt, Artificial Sequence
  Description of Artificial Sequence: Synthetic oligonucleotide
ccgugauggaauccacuga

SEQ ID NO: 1513290 - RNA, 19 nt, Artificial Sequence
  Description of Artificial Sequence: Synthetic oligonucleotide
cccgcuugugcauauucua

SEQ ID NO: 1513291 - RNA, 19 nt, Artificial Sequence
  Description of Artificial Sequence: Synthetic oligonucleotide
gggaggggcgucgggguug

SEQ ID NO: 1513292 - RNA, 19 nt, Artificial Sequence
  Description of Artificial Sequence: Synthetic oligonucleotide
ggcacaagagaguguugau

SEQ ID NO: 1513293 - RNA, 19 nt, Artificial Sequence
  Description of Artificial Sequence: Synthetic oligonucleotide
gcucucgcugccagucgag

SEQ ID NO: 1513294 - RNA, 19 nt, Artificial Sequence
  Description of Artificial Sequence: Synthetic oligonucleotide
cccgggaggggcgucgggg

SEQ ID NO: 1513295 - RNA, 19 nt, Artificial Sequence
  Description of Artificial Sequence: Synthetic oligonucleotide
gggagaaaugaugcuguau

SEQ ID NO: 1513296 - RNA, 19 nt, Artificial Sequence
  Description of Artificial Sequence: Synthetic oligonucleotide
gugggucaggcaugucccu

SEQ ID NO: 1513297 - RNA, 19 nt, Artificial Sequence
  Description of Artificial Sequence: Synthetic oligonucleotide
gggcgccugucaucucugc

SEQ ID NO: 1513298 - RNA, 19 nt, Artificial Sequence
  Description of Artificial Sequence: Synthetic oligonucleotide
ucgagccaucuggccuccc

SEQ ID NO: 1513299 - RNA, 19 nt, Artificial Sequence
  Description of Artificial Sequence: Synthetic oligonucleotide
ggcucaguuaccagggguu

SEQ ID NO: 1513300 - RNA, 19 nt, Artificial Sequence
  Description of Artificial Sequence: Synthetic oligonucleotide
ggggaccugccuguaaaua

SEQ ID NO: 1513301 - RNA, 19 nt, Artificial Sequence
  Description of Artificial Sequence: Synthetic oligonucleotide
cucacgcaauugucuuacu

SEQ ID NO: 1513302 - RNA, 19 nt, Artificial Sequence
  Description of Artificial Sequence: Synthetic oligonucleotide
cacugucuggaggccaugu

SEQ ID NO: 1513303 - RNA, 19 nt, Artificial Sequence
  Description of Artificial Sequence: Synthetic oligonucleotide
ccccgaguucugccugucc

SEQ ID NO: 1513304 - RNA, 19 nt, Artificial Sequence
  Description of Artificial Sequence: Synthetic oligonucleotide
gcggcgggcucaguuacca

SEQ ID NO: 1513305 - RNA, 19 nt, Artificial Sequence
  Description of Artificial Sequence: Synthetic oligonucleotide
cccggguaaggaggagggg

SEQ ID NO: 1513306 - RNA, 19 nt, Artificial Sequence
  Description of Artificial Sequence: Synthetic oligonucleotide
cugcuggcggcgggcucag

SEQ ID NO: 1513307 - RNA, 19 nt, Artificial Sequence
  Description of Artificial Sequence: Synthetic oligonucleotide
cccugaggaacuccuucaa

SEQ ID NO: 1513308 - RNA, 19 nt, Artificial Sequence
  Description of Artificial Sequence: Synthetic oligonucleotide
gccacaucaugaacacugu

SEQ ID NO: 1513309 - RNA, 19 nt, Artificial Sequence
  Description of Artificial Sequence: Synthetic oligonucleotide
cucaguuaccagggguuuu

SEQ ID NO: 1513310 - RNA, 19 nt, Artificial Sequence
  Description of Artificial Sequence: Synthetic oligonucleotide
ggccuggccggaugcucuc

SEQ ID NO: 1513311 - RNA, 19 nt, Artificial Sequence
  Description of Artificial Sequence: Synthetic oligonucleotide
gcugccagucgagccaucu

SEQ ID NO: 1513312 - RNA, 19 nt, Artificial Sequence
  Description of Artificial Sequence: Synthetic oligonucleotide
cgucgggguugucaguuga

SEQ ID NO: 1513313 - RNA, 19 nt, Artificial Sequence
  Description of Artificial Sequence: Synthetic oligonucleotide
ggauuccaguuuguaguuu

SEQ ID NO: 1513314 - RNA, 19 nt, Artificial Sequence
  Description of Artificial Sequence: Synthetic oligonucleotide
cgcaauugucuuacucucu

SEQ ID NO: 1513315 - RNA, 19 nt, Artificial Sequence
  Description of Artificial Sequence: Synthetic oligonucleotide
cugccacaucaugaacacu

SEQ ID NO: 1513316 - RNA, 19 nt, Artificial Sequence
  Description of Artificial Sequence: Synthetic oligonucleotide
gcuggcggcgggcucaguu

SEQ ID NO: 1513317 - RNA, 19 nt, Artificial Sequence
  Description of Artificial Sequence: Synthetic oligonucleotide
ggcgucgggguugucaguu

SEQ ID NO: 1513318 - RNA, 19 nt, Artificial Sequence
  Description of Artificial Sequence: Synthetic oligonucleotide
gccuggccggaugcucucc

SEQ ID NO: 1513319 - RNA, 19 nt, Artificial Sequence
  Description of Artificial Sequence: Synthetic oligonucleotide
gcucacuggcugagaggga

SEQ ID NO: 1513320 - RNA, 19 nt, Artificial Sequence
  Description of Artificial Sequence: Synthetic oligonucleotide
cgcucucgcugccagucga

SEQ ID NO: 1513321 - RNA, 19 nt, Artificial Sequence
  Description of Artificial Sequence: Synthetic oligonucleotide
ccuguccugcucacuggcu

SEQ ID NO: 1513322 - RNA, 19 nt, Artificial Sequence
  Description of Artificial Sequence: Synthetic oligonucleotide
cacugacauggcaccccuu

SEQ ID NO: 1513323 - RNA, 19 nt, Artificial Sequence
  Description of Artificial Sequence: Synthetic oligonucleotide
gcccggcuuugcagacagg

SEQ ID NO: 1513324 - RNA, 19 nt, Artificial Sequence
  Description of Artificial Sequence: Synthetic oligonucleotide
ggcuucccugaccccgggu

SEQ ID NO: 1513325 - RNA, 19 nt, Artificial Sequence
  Description of Artificial Sequence: Synthetic oligonucleotide
cggcgggcucaguuaccag

SEQ ID NO: 1513326 - RNA, 19 nt, Artificial Sequence
  Description of Artificial Sequence: Synthetic oligonucleotide
gggcccggcuuugcagaca

SEQ ID NO: 1513327 - RNA, 19 nt, Artificial Sequence
  Description of Artificial Sequence: Synthetic oligonucleotide
cccugaccccggguaagga

SEQ ID NO: 1513328 - RNA, 19 nt, Artificial Sequence
  Description of Artificial Sequence: Synthetic oligonucleotide
gggcgucgggguugucagu

SEQ ID NO: 1513329 - RNA, 19 nt, Artificial Sequence
  Description of Artificial Sequence: Synthetic oligonucleotide
gaggggcgucgggguuguc

SEQ ID NO: 1513330 - RNA, 19 nt, Artificial Sequence
  Description of Artificial Sequence: Synthetic oligonucleotide
ccugaggccugcugaccuu

SEQ ID NO: 1513331 - RNA, 19 nt, Artificial Sequence
  Description of Artificial Sequence: Synthetic oligonucleotide
gcgcaaagauguagcuguu

SEQ ID NO: 1513332 - RNA, 19 nt, Artificial Sequence
  Description of Artificial Sequence: Synthetic oligonucleotide
ccuggcccgaggagcuggu

SEQ ID NO: 1513333 - RNA, 19 nt, Artificial Sequence
  Description of Artificial Sequence: Synthetic oligonucleotide
cuggcccgaggagcugguu

SEQ ID NO: 1513334 - RNA, 19 nt, Artificial Sequence
  Description of Artificial Sequence: Synthetic oligonucleotide
aaauaucucauguaagugc

SEQ ID NO: 1513335 - RNA, 19 nt, Artificial Sequence
  Description of Artificial Sequence: Synthetic oligonucleotide
aauauagucauuuauuugu

SEQ ID NO: 1513336 - RNA, 19 nt, Artificial Sequence
  Description of Artificial Sequence: Synthetic oligonucleotide
uguuauauuaaaacugugg

SEQ ID NO: 1513337 - RNA, 19 nt, Artificial Sequence
  Description of Artificial Sequence: Synthetic oligonucleotide
aauuuuaaguccuaggacu

SEQ ID NO: 1513338 - RNA, 19 nt, Artificial Sequence
  Description of Artificial Sequence: Synthetic oligonucleotide
gauguguuaagccagacag

SEQ ID NO: 1513339 - RNA, 19 nt, Artificial Sequence
  Description of Artificial Sequence: Synthetic oligonucleotide
ugucuaauuggcaaugucg

SEQ ID NO: 1513340 - RNA, 19 nt, Artificial Sequence
  Description of Artificial Sequence: Synthetic oligonucleotide
auuuccaguagauugcacc

SEQ ID NO: 1513341 - RNA, 19 nt, Artificial Sequence
  Description of Artificial Sequence: Synthetic oligonucleotide
auuucuagcaauuugcucu

SEQ ID NO: 1513342 - RNA, 19 nt, Artificial Sequence
  Description of Artificial Sequence: Synthetic oligonucleotide
ucuucuuucaauaaaguau

SEQ ID NO: 1513343 - RNA, 19 nt, Artificial Sequence
  Description of Artificial Sequence: Synthetic oligonucleotide
acaauagauauauacauca

SEQ ID NO: 1513344 - RNA, 19 nt, Artificial Sequence
  Description of Artificial Sequence: Synthetic oligonucleotide
aacggcauuucccagguac

SEQ ID NO: 1513345 - RNA, 19 nt, Artificial Sequence
  Description of Artificial Sequence: Synthetic oligonucleotide
cacaauaaucuuuaguugg

SEQ ID NO: 1513346 - RNA, 19 nt, Artificial Sequence
  Description of Artificial Sequence: Synthetic oligonucleotide
aaacaaauaucucauguaa

SEQ ID NO: 1513347 - RNA, 19 nt, Artificial Sequence
  Description of Artificial Sequence: Synthetic oligonucleotide
aguugggaaacuuauuugg

SEQ ID NO: 1513348 - RNA, 19 nt, Artificial Sequence
  Description of Artificial Sequence: Synthetic oligonucleotide
ugguuugugacuuugguga

SEQ ID NO: 1513349 - RNA, 19 nt, Artificial Sequence
  Description of Artificial Sequence: Synthetic oligonucleotide
acuaauuuuaaguccuagg

SEQ ID NO: 1513350 - RNA, 19 nt, Artificial Sequence
  Description of Artificial Sequence: Synthetic oligonucleotide
uaggacucaaaauaaaugu

SEQ ID NO: 1513351 - RNA, 19 nt, Artificial Sequence
  Description of Artificial Sequence: Synthetic oligonucleotide
aaauugaugcaguuugucu

SEQ ID NO: 1513352 - RNA, 19 nt, Artificial Sequence
  Description of Artificial Sequence: Synthetic oligonucleotide
cuaggcaucaucuugccag

SEQ ID NO: 1513353 - RNA, 19 nt, Artificial Sequence
  Description of Artificial Sequence: Synthetic oligonucleotide
uaauuuuaaguccuaggac

SEQ ID NO: 1513354 - RNA, 19 nt, Artificial Sequence
  Description of Artificial Sequence: Synthetic oligonucleotide
aauacaucuagaaaggcau

SEQ ID NO: 1513355 - RNA, 19 nt, Artificial Sequence
  Description of Artificial Sequence: Synthetic oligonucleotide
ugcuugauauuauaaaaga

SEQ ID NO: 1513356 - RNA, 19 nt, Artificial Sequence
  Description of Artificial Sequence: Synthetic oligonucleotide
aaaauugaugcaguuuguc

SEQ ID NO: 1513357 - RNA, 19 nt, Artificial Sequence
  Description of Artificial Sequence: Synthetic oligonucleotide
ugcaguuugucuaauuggc

SEQ ID NO: 1513358 - RNA, 19 nt, Artificial Sequence
  Description of Artificial Sequence: Synthetic oligonucleotide
agauagaagggucucauca

SEQ ID NO: 1513359 - RNA, 19 nt, Artificial Sequence
  Description of Artificial Sequence: Synthetic oligonucleotide
ucuguaauuuacuaggcau

SEQ ID NO: 1513360 - RNA, 19 nt, Artificial Sequence
  Description of Artificial Sequence: Synthetic oligonucleotide
ugucauuuggaacaauaga

SEQ ID NO: 1513361 - RNA, 19 nt, Artificial Sequence
  Description of Artificial Sequence: Synthetic oligonucleotide
uugagauguguuaagccag

SEQ ID NO: 1513362 - RNA, 19 nt, Artificial Sequence
  Description of Artificial Sequence: Synthetic oligonucleotide
ucugguuuacccuuguucu

SEQ ID NO: 1513363 - RNA, 19 nt, Artificial Sequence
  Description of Artificial Sequence: Synthetic oligonucleotide
aaguaguagacaucgcucu

SEQ ID NO: 1513364 - RNA, 19 nt, Artificial Sequence
  Description of Artificial Sequence: Synthetic oligonucleotide
ugcgguuuacuucugaacu

SEQ ID NO: 1513365 - RNA, 19 nt, Artificial Sequence
  Description of Artificial Sequence: Synthetic oligonucleotide
aggaccgacuccuugaagg

SEQ ID NO: 1513366 - RNA, 19 nt, Artificial Sequence
  Description of Artificial Sequence: Synthetic oligonucleotide
uuacuaggcaucaucuugc

SEQ ID NO: 1513367 - RNA, 19 nt, Artificial Sequence
  Description of Artificial Sequence: Synthetic oligonucleotide
uaauuuacuaggcaucauc

SEQ ID NO: 1513368 - RNA, 19 nt, Artificial Sequence
  Description of Artificial Sequence: Synthetic oligonucleotide
aauuuacuaggcaucaucu

SEQ ID NO: 1513369 - RNA, 19 nt, Artificial Sequence
  Description of Artificial Sequence: Synthetic oligonucleotide
uguguuaagccagacagca

SEQ ID NO: 1513370 - RNA, 19 nt, Artificial Sequence
  Description of Artificial Sequence: Synthetic oligonucleotide
caucauuacucccaggacc

SEQ ID NO: 1513371 - RNA, 19 nt, Artificial Sequence
  Description of Artificial Sequence: Synthetic oligonucleotide
uugguuagugcuauuaaaa

SEQ ID NO: 1513372 - RNA, 19 nt, Artificial Sequence
  Description of Artificial Sequence: Synthetic oligonucleotide
cuaggacucaaaauaaaug

SEQ ID NO: 1513373 - RNA, 19 nt, Artificial Sequence
  Description of Artificial Sequence: Synthetic oligonucleotide
aagacuaauuuuaaguccu

SEQ ID NO: 1513374 - RNA, 19 nt, Artificial Sequence
  Description of Artificial Sequence: Synthetic oligonucleotide
aagggucucaucauuacuc

SEQ ID NO: 1513375 - RNA, 19 nt, Artificial Sequence
  Description of Artificial Sequence: Synthetic oligonucleotide
ugauggaagaauguacagg

SEQ ID NO: 1513376 - RNA, 19 nt, Artificial Sequence
  Description of Artificial Sequence: Synthetic oligonucleotide
gaagucaaaacugcugagg

SEQ ID NO: 1513377 - RNA, 19 nt, Artificial Sequence
  Description of Artificial Sequence: Synthetic oligonucleotide
uccaguagauugcaccugg

SEQ ID NO: 1513378 - RNA, 19 nt, Artificial Sequence
  Description of Artificial Sequence: Synthetic oligonucleotide
cuugauauuauaaaagacu

SEQ ID NO: 1513379 - RNA, 19 nt, Artificial Sequence
  Description of Artificial Sequence: Synthetic oligonucleotide
uaaucuuuaguugggaaac

SEQ ID NO: 1513380 - RNA, 19 nt, Artificial Sequence
  Description of Artificial Sequence: Synthetic oligonucleotide
uggaagaauguacagguau

SEQ ID NO: 1513381 - RNA, 19 nt, Artificial Sequence
  Description of Artificial Sequence: Synthetic oligonucleotide
augcaguuugucuaauugg

SEQ ID NO: 1513382 - RNA, 19 nt, Artificial Sequence
  Description of Artificial Sequence: Synthetic oligonucleotide
cauccgaugcacuaagucc

SEQ ID NO: 1513383 - RNA, 19 nt, Artificial Sequence
  Description of Artificial Sequence: Synthetic oligonucleotide
aaugucuaccuccucugug

SEQ ID NO: 1513384 - RNA, 19 nt, Artificial Sequence
  Description of Artificial Sequence: Synthetic oligonucleotide
uguaauuuacuaggcauca

SEQ ID NO: 1513385 - RNA, 19 nt, Artificial Sequence
  Description of Artificial Sequence: Synthetic oligonucleotide
acuaaguccuugcagucuc

SEQ ID NO: 1513386 - RNA, 19 nt, Artificial Sequence
  Description of Artificial Sequence: Synthetic oligonucleotide
ugcacuaaguccuugcagu

SEQ ID NO: 1513387 - RNA, 19 nt, Artificial Sequence
  Description of Artificial Sequence: Synthetic oligonucleotide
uuauuauuggggugguuug

SEQ ID NO: 1513388 - RNA, 19 nt, Artificial Sequence
  Description of Artificial Sequence: Synthetic oligonucleotide
uccacuucauuuuaagggu

SEQ ID NO: 1513389 - RNA, 19 nt, Artificial Sequence
  Description of Artificial Sequence: Synthetic oligonucleotide
auaaucuuuaguugggaaa

SEQ ID NO: 1513390 - RNA, 19 nt, Artificial Sequence
  Description of Artificial Sequence: Synthetic oligonucleotide
aaugucguguucaagucug

SEQ ID NO: 1513391 - RNA, 19 nt, Artificial Sequence
  Description of Artificial Sequence: Synthetic oligonucleotide
ucauuuggaacaauagaua

SEQ ID NO: 1513392 - RNA, 19 nt, Artificial Sequence
  Description of Artificial Sequence: Synthetic oligonucleotide
uucuguaauuuacuaggca

SEQ ID NO: 1513393 - RNA, 19 nt, Artificial Sequence
  Description of Artificial Sequence: Synthetic oligonucleotide
guugagauguguuaagcca

SEQ ID NO: 1513394 - RNA, 19 nt, Artificial Sequence
  Description of Artificial Sequence: Synthetic oligonucleotide
uuacauccgaugcacuaag

SEQ ID NO: 1513395 - RNA, 19 nt, Artificial Sequence
  Description of Artificial Sequence: Synthetic oligonucleotide
aagcugacguggcuguucg

SEQ ID NO: 1513396 - RNA, 19 nt, Artificial Sequence
  Description of Artificial Sequence: Synthetic oligonucleotide
accacuuggacugaaguag

SEQ ID NO: 1513397 - RNA, 19 nt, Artificial Sequence
  Description of Artificial Sequence: Synthetic oligonucleotide
uaaggguccugcuugauau

SEQ ID NO: 1513398 - RNA, 19 nt, Artificial Sequence
  Description of Artificial Sequence: Synthetic oligonucleotide
uguucguucauccguugug

SEQ ID NO: 1513399 - RNA, 19 nt, Artificial Sequence
  Description of Artificial Sequence: Synthetic oligonucleotide
guucaagucugguuuaccc

SEQ ID NO: 1513400 - RNA, 19 nt, Artificial Sequence
  Description of Artificial Sequence: Synthetic oligonucleotide
agucacaauaaucuuuagu

SEQ ID NO: 1513401 - RNA, 19 nt, Artificial Sequence
  Description of Artificial Sequence: Synthetic oligonucleotide
ugacaaugaaagcuuugca

SEQ ID NO: 1513402 - RNA, 19 nt, Artificial Sequence
  Description of Artificial Sequence: Synthetic oligonucleotide
cuagcaauuugcucuuggg

SEQ ID NO: 1513403 - RNA, 19 nt, Artificial Sequence
  Description of Artificial Sequence: Synthetic oligonucleotide
uuacuuuauuauuggggug

SEQ ID NO: 1513404 - RNA, 19 nt, Artificial Sequence
  Description of Artificial Sequence: Synthetic oligonucleotide
uaguugggaaacuuauuug

SEQ ID NO: 1513405 - RNA, 19 nt, Artificial Sequence
  Description of Artificial Sequence: Synthetic oligonucleotide
aagugcuacauuuccagua

SEQ ID NO: 1513406 - RNA, 19 nt, Artificial Sequence
  Description of Artificial Sequence: Synthetic oligonucleotide
uuaccacuuggacugaagu

SEQ ID NO: 1513407 - RNA, 19 nt, Artificial Sequence
  Description of Artificial Sequence: Synthetic oligonucleotide
uucuuacaggcgaaacccg

SEQ ID NO: 1513408 - RNA, 19 nt, Artificial Sequence
  Description of Artificial Sequence: Synthetic oligonucleotide
guagacaucgcucuugcca

SEQ ID NO: 1513409 - RNA, 19 nt, Artificial Sequence
  Description of Artificial Sequence: Synthetic oligonucleotide
ucguguucaagucugguuu

SEQ ID NO: 1513410 - RNA, 19 nt, Artificial Sequence
  Description of Artificial Sequence: Synthetic oligonucleotide
uuaauuccauuucuagcaa

SEQ ID NO: 1513411 - RNA, 19 nt, Artificial Sequence
  Description of Artificial Sequence: Synthetic oligonucleotide
ugguuuacccuuguucugg

SEQ ID NO: 1513412 - RNA, 19 nt, Artificial Sequence
  Description of Artificial Sequence: Synthetic oligonucleotide
uacuucugaacuucuuacc

SEQ ID NO: 1513413 - RNA, 19 nt, Artificial Sequence
  Description of Artificial Sequence: Synthetic oligonucleotide
uccguugugggucugacuu

SEQ ID NO: 1513414 - RNA, 19 nt, Artificial Sequence
  Description of Artificial Sequence: Synthetic oligonucleotide
ucuaccuccucugugucag

SEQ ID NO: 1513415 - RNA, 19 nt, Artificial Sequence
  Description of Artificial Sequence: Synthetic oligonucleotide
aaaguuaccugaucauauu

SEQ ID NO: 1513416 - RNA, 19 nt, Artificial Sequence
  Description of Artificial Sequence: Synthetic oligonucleotide
aaguccuaggacucaaaau

SEQ ID NO: 1513417 - RNA, 19 nt, Artificial Sequence
  Description of Artificial Sequence: Synthetic oligonucleotide
auugguuagugcuauuaaa

SEQ ID NO: 1513418 - RNA, 19 nt, Artificial Sequence
  Description of Artificial Sequence: Synthetic oligonucleotide
uuucguacuuguuggacuc

SEQ ID NO: 1513419 - RNA, 19 nt, Artificial Sequence
  Description of Artificial Sequence: Synthetic oligonucleotide
gaaacuuauuugguacucc

SEQ ID NO: 1513420 - RNA, 19 nt, Artificial Sequence
  Description of Artificial Sequence: Synthetic oligonucleotide
uacuuguuggacucgcucu

SEQ ID NO: 1513421 - RNA, 19 nt, Artificial Sequence
  Description of Artificial Sequence: Synthetic oligonucleotide
auauagucauuuauuuguc

SEQ ID NO: 1513422 - RNA, 19 nt, Artificial Sequence
  Description of Artificial Sequence: Synthetic oligonucleotide
aaagcugacguggcuguuc

SEQ ID NO: 1513423 - RNA, 19 nt, Artificial Sequence
  Description of Artificial Sequence: Synthetic oligonucleotide
ucaucauuacucccaggac

SEQ ID NO: 1513424 - RNA, 19 nt, Artificial Sequence
  Description of Artificial Sequence: Synthetic oligonucleotide
auuuucggaucacuuccuc

SEQ ID NO: 1513425 - RNA, 19 nt, Artificial Sequence
  Description of Artificial Sequence: Synthetic oligonucleotide
uaucucauguaagugcuac

SEQ ID NO: 1513426 - RNA, 19 nt, Artificial Sequence
  Description of Artificial Sequence: Synthetic oligonucleotide
guagauugcaccuggcauc

SEQ ID NO: 1513427 - RNA, 19 nt, Artificial Sequence
  Description of Artificial Sequence: Synthetic oligonucleotide
agggucauuccgcagucuc

SEQ ID NO: 1513428 - RNA, 19 nt, Artificial Sequence
  Description of Artificial Sequence: Synthetic oligonucleotide
ucaacggcauuucccaggu

SEQ ID NO: 1513429 - RNA, 19 nt, Artificial Sequence
  Description of Artificial Sequence: Synthetic oligonucleotide
uguuacauccgaugcacua

SEQ ID NO: 1513430 - RNA, 19 nt, Artificial Sequence
  Description of Artificial Sequence: Synthetic oligonucleotide
auuucccagguaccuugcc

SEQ ID NO: 1513431 - RNA, 19 nt, Artificial Sequence
  Description of Artificial Sequence: Synthetic oligonucleotide
uuacaggcgaaacccggug

SEQ ID NO: 1513432 - RNA, 19 nt, Artificial Sequence
  Description of Artificial Sequence: Synthetic oligonucleotide
aagcucuaugugcucaggu

SEQ ID NO: 1513433 - RNA, 19 nt, Artificial Sequence
  Description of Artificial Sequence: Synthetic oligonucleotide
ugagauguguuaagccaga

SEQ ID NO: 1513434 - RNA, 19 nt, Artificial Sequence
  Description of Artificial Sequence: Synthetic oligonucleotide
auugaugcaguuugucuaa

SEQ ID NO: 1513435 - RNA, 19 nt, Artificial Sequence
  Description of Artificial Sequence: Synthetic oligonucleotide
aggucaacggcauuuccca

SEQ ID NO: 1513436 - RNA, 19 nt, Artificial Sequence
  Description of Artificial Sequence: Synthetic oligonucleotide
uuuuaaggguccugcuuga

SEQ ID NO: 1513437 - RNA, 19 nt, Artificial Sequence
  Description of Artificial Sequence: Synthetic oligonucleotide
ucucauguaagugcuacau

SEQ ID NO: 1513438 - RNA, 19 nt, Artificial Sequence
  Description of Artificial Sequence: Synthetic oligonucleotide
augcacuaaguccuugcag

SEQ ID NO: 1513439 - RNA, 19 nt, Artificial Sequence
  Description of Artificial Sequence: Synthetic oligonucleotide
cauguaagugcuacauuuc

SEQ ID NO: 1513440 - RNA, 19 nt, Artificial Sequence
  Description of Artificial Sequence: Synthetic oligonucleotide
uuuaguugggaaacuuauu

SEQ ID NO: 1513441 - RNA, 19 nt, Artificial Sequence
  Description of Artificial Sequence: Synthetic oligonucleotide
augucauuuggaacaauag

SEQ ID NO: 1513442 - RNA, 19 nt, Artificial Sequence
  Description of Artificial Sequence: Synthetic oligonucleotide
cuuggacugaaguaguaga

SEQ ID NO: 1513443 - RNA, 19 nt, Artificial Sequence
  Description of Artificial Sequence: Synthetic oligonucleotide
gagacuuguccggugauug

SEQ ID NO: 1513444 - RNA, 19 nt, Artificial Sequence
  Description of Artificial Sequence: Synthetic oligonucleotide
gguugagauguguuaagcc

SEQ ID NO: 1513445 - RNA, 19 nt, Artificial Sequence
  Description of Artificial Sequence: Synthetic oligonucleotide
aguuugucuaauuggcaau

SEQ ID NO: 1513446 - RNA, 19 nt, Artificial Sequence
  Description of Artificial Sequence: Synthetic oligonucleotide
ugagcccugauuuucggau

SEQ ID NO: 1513447 - RNA, 19 nt, Artificial Sequence
  Description of Artificial Sequence: Synthetic oligonucleotide
guucguucauccguugugg

SEQ ID NO: 1513448 - RNA, 19 nt, Artificial Sequence
  Description of Artificial Sequence: Synthetic oligonucleotide
aaagcucuaugugcucagg

SEQ ID NO: 1513449 - RNA, 19 nt, Artificial Sequence
  Description of Artificial Sequence: Synthetic oligonucleotide
agauguguuaagccagaca

SEQ ID NO: 1513450 - RNA, 19 nt, Artificial Sequence
  Description of Artificial Sequence: Synthetic oligonucleotide
uccccgacgggaaagggac

SEQ ID NO: 1513451 - RNA, 19 nt, Artificial Sequence
  Description of Artificial Sequence: Synthetic oligonucleotide
uagaagggucucaucauua

SEQ ID NO: 1513452 - RNA, 19 nt, Artificial Sequence
  Description of Artificial Sequence: Synthetic oligonucleotide
uggacugaaguaguagaca

SEQ ID NO: 1513453 - RNA, 19 nt, Artificial Sequence
  Description of Artificial Sequence: Synthetic oligonucleotide
aacuuauuugguacuccug

SEQ ID NO: 1513454 - RNA, 19 nt, Artificial Sequence
  Description of Artificial Sequence: Synthetic oligonucleotide
guuaagccagacagcaggg

SEQ ID NO: 1513455 - RNA, 19 nt, Artificial Sequence
  Description of Artificial Sequence: Synthetic oligonucleotide
uuguuggacucgcucuucc

SEQ ID NO: 1513456 - RNA, 19 nt, Artificial Sequence
  Description of Artificial Sequence: Synthetic oligonucleotide
gaggucaacggcauuuccc

SEQ ID NO: 1513457 - RNA, 19 nt, Artificial Sequence
  Description of Artificial Sequence: Synthetic oligonucleotide
cuuggggaaguucaguuga

SEQ ID NO: 1513458 - RNA, 19 nt, Artificial Sequence
  Description of Artificial Sequence: Synthetic oligonucleotide
gaugcacuaaguccuugca

SEQ ID NO: 1513459 - RNA, 19 nt, Artificial Sequence
  Description of Artificial Sequence: Synthetic oligonucleotide
guuugucuaauuggcaaug

SEQ ID NO: 1513460 - RNA, 19 nt, Artificial Sequence
  Description of Artificial Sequence: Synthetic oligonucleotide
auguguuaagccagacagc

SEQ ID NO: 1513461 - RNA, 19 nt, Artificial Sequence
  Description of Artificial Sequence: Synthetic oligonucleotide
auuggggugguuugugacu

SEQ ID NO: 1513462 - RNA, 19 nt, Artificial Sequence
  Description of Artificial Sequence: Synthetic oligonucleotide
guugagagggucauuccgc

SEQ ID NO: 1513463 - RNA, 19 nt, Artificial Sequence
  Description of Artificial Sequence: Synthetic oligonucleotide
uaagcgucaucuccacugu

SEQ ID NO: 1513464 - RNA, 19 nt, Artificial Sequence
  Description of Artificial Sequence: Synthetic oligonucleotide
uccuaggacucaaaauaaa

SEQ ID NO: 1513465 - RNA, 19 nt, Artificial Sequence
  Description of Artificial Sequence: Synthetic oligonucleotide
ggaaacaaauaucucaugu

SEQ ID NO: 1513466 - RNA, 19 nt, Artificial Sequence
  Description of Artificial Sequence: Synthetic oligonucleotide
uagauugcaccuggcauca

SEQ ID NO: 1513467 - RNA, 19 nt, Artificial Sequence
  Description of Artificial Sequence: Synthetic oligonucleotide
cuuaccacuuggacugaag

SEQ ID NO: 1513468 - RNA, 19 nt, Artificial Sequence
  Description of Artificial Sequence: Synthetic oligonucleotide
uuaaggguccugcuugaua

SEQ ID NO: 1513469 - RNA, 19 nt, Artificial Sequence
  Description of Artificial Sequence: Synthetic oligonucleotide
agacuuguccggugauugg

SEQ ID NO: 1513470 - RNA, 19 nt, Artificial Sequence
  Description of Artificial Sequence: Synthetic oligonucleotide
uaauuccauuucuagcaau

SEQ ID NO: 1513471 - RNA, 19 nt, Artificial Sequence
  Description of Artificial Sequence: Synthetic oligonucleotide
auuauuggggugguuugug

SEQ ID NO: 1513472 - RNA, 19 nt, Artificial Sequence
  Description of Artificial Sequence: Synthetic oligonucleotide
uuuaaguccuaggacucaa

SEQ ID NO: 1513473 - RNA, 19 nt, Artificial Sequence
  Description of Artificial Sequence: Synthetic oligonucleotide
uuugucuaauuggcaaugu

SEQ ID NO: 1513474 - RNA, 19 nt, Artificial Sequence
  Description of Artificial Sequence: Synthetic oligonucleotide
gucauuuggaacaauagau

SEQ ID NO: 1513475 - RNA, 19 nt, Artificial Sequence
  Description of Artificial Sequence: Synthetic oligonucleotide
ucucaucauuacucccagg

SEQ ID NO: 1513476 - RNA, 19 nt, Artificial Sequence
  Description of Artificial Sequence: Synthetic oligonucleotide
uaauuggcaaugucguguu

SEQ ID NO: 1513477 - RNA, 19 nt, Artificial Sequence
  Description of Artificial Sequence: Synthetic oligonucleotide
uauuauuggggugguuugu

SEQ ID NO: 1513478 - RNA, 19 nt, Artificial Sequence
  Description of Artificial Sequence: Synthetic oligonucleotide
gugauuggugcagagcuug

SEQ ID NO: 1513479 - RNA, 19 nt, Artificial Sequence
  Description of Artificial Sequence: Synthetic oligonucleotide
uacuaggcaucaucuugcc

SEQ ID NO: 1513480 - RNA, 19 nt, Artificial Sequence
  Description of Artificial Sequence: Synthetic oligonucleotide
cacugagcccugauuuucg

SEQ ID NO: 1513481 - RNA, 19 nt, Artificial Sequence
  Description of Artificial Sequence: Synthetic oligonucleotide
auccgaugcacuaaguccu

SEQ ID NO: 1513482 - RNA, 19 nt, Artificial Sequence
  Description of Artificial Sequence: Synthetic oligonucleotide
auuuacuaggcaucaucuu

SEQ ID NO: 1513483 - RNA, 19 nt, Artificial Sequence
  Description of Artificial Sequence: Synthetic oligonucleotide
ugacugguugcuugaaaau

SEQ ID NO: 1513484 - RNA, 19 nt, Artificial Sequence
  Description of Artificial Sequence: Synthetic oligonucleotide
guaguagacaucgcucuug

SEQ ID NO: 1513485 - RNA, 19 nt, Artificial Sequence
  Description of Artificial Sequence: Synthetic oligonucleotide
gaaaguuaccugaucauau

SEQ ID NO: 1513486 - RNA, 19 nt, Artificial Sequence
  Description of Artificial Sequence: Synthetic oligonucleotide
caguuugucuaauuggcaa

SEQ ID NO: 1513487 - RNA, 19 nt, Artificial Sequence
  Description of Artificial Sequence: Synthetic oligonucleotide
ugacguggcuguucguuca

SEQ ID NO: 1513488 - RNA, 19 nt, Artificial Sequence
  Description of Artificial Sequence: Synthetic oligonucleotide
cugguugagagggucauuc

SEQ ID NO: 1513489 - RNA, 19 nt, Artificial Sequence
  Description of Artificial Sequence: Synthetic oligonucleotide
ugagagggucauuccgcag

SEQ ID NO: 1513490 - RNA, 19 nt, Artificial Sequence
  Description of Artificial Sequence: Synthetic oligonucleotide
gaagaauguacagguaucu

SEQ ID NO: 1513491 - RNA, 19 nt, Artificial Sequence
  Description of Artificial Sequence: Synthetic oligonucleotide
cugcgguuuacuucugaac

SEQ ID NO: 1513492 - RNA, 19 nt, Artificial Sequence
  Description of Artificial Sequence: Synthetic oligonucleotide
agguaucuucuuucaauaa

SEQ ID NO: 1513493 - RNA, 19 nt, Artificial Sequence
  Description of Artificial Sequence: Synthetic oligonucleotide
acggcauuucccagguacc

SEQ ID NO: 1513494 - RNA, 19 nt, Artificial Sequence
  Description of Artificial Sequence: Synthetic oligonucleotide
cuuuaguugggaaacuuau

SEQ ID NO: 1513495 - RNA, 19 nt, Artificial Sequence
  Description of Artificial Sequence: Synthetic oligonucleotide
uucguacuuguuggacucg

SEQ ID NO: 1513496 - RNA, 19 nt, Artificial Sequence
  Description of Artificial Sequence: Synthetic oligonucleotide
uugcagagggguugagaug

SEQ ID NO: 1513497 - RNA, 19 nt, Artificial Sequence
  Description of Artificial Sequence: Synthetic oligonucleotide
ucagcagcccgggacagga

SEQ ID NO: 1513498 - RNA, 19 nt, Artificial Sequence
  Description of Artificial Sequence: Synthetic oligonucleotide
cuuuccguggcccgggguc

SEQ ID NO: 1513499 - RNA, 19 nt, Artificial Sequence
  Description of Artificial Sequence: Synthetic oligonucleotide
agcucuaugugcucaggua

SEQ ID NO: 1513500 - RNA, 19 nt, Artificial Sequence
  Description of Artificial Sequence: Synthetic oligonucleotide
uuacucccaggaccgacuc

SEQ ID NO: 1513501 - RNA, 19 nt, Artificial Sequence
  Description of Artificial Sequence: Synthetic oligonucleotide
cuaauuggcaaugucgugu

SEQ ID NO: 1513502 - RNA, 19 nt, Artificial Sequence
  Description of Artificial Sequence: Synthetic oligonucleotide
aucucauguaagugcuaca

SEQ ID NO: 1513503 - RNA, 19 nt, Artificial Sequence
  Description of Artificial Sequence: Synthetic oligonucleotide
gucucuucucccagaaaag

SEQ ID NO: 1513504 - RNA, 19 nt, Artificial Sequence
  Description of Artificial Sequence: Synthetic oligonucleotide
ucguacuuguuggacucgc

SEQ ID NO: 1513505 - RNA, 19 nt, Artificial Sequence
  Description of Artificial Sequence: Synthetic oligonucleotide
uuguccggugauuggugca

SEQ ID NO: 1513506 - RNA, 19 nt, Artificial Sequence
  Description of Artificial Sequence: Synthetic oligonucleotide
ucuuuacagugaugaugga

SEQ ID NO: 1513507 - RNA, 19 nt, Artificial Sequence
  Description of Artificial Sequence: Synthetic oligonucleotide
acuaggcaucaucuugcca

SEQ ID NO: 1513508 - RNA, 19 nt, Artificial Sequence
  Description of Artificial Sequence: Synthetic oligonucleotide
auuuggaacaauagauaua

SEQ ID NO: 1513509 - RNA, 19 nt, Artificial Sequence
  Description of Artificial Sequence: Synthetic oligonucleotide
aacccgguggaaauguuuu

SEQ ID NO: 1513510 - RNA, 19 nt, Artificial Sequence
  Description of Artificial Sequence: Synthetic oligonucleotide
gucuaauuggcaaugucgu

SEQ ID NO: 1513511 - RNA, 19 nt, Artificial Sequence
  Description of Artificial Sequence: Synthetic oligonucleotide
cagguaccuugccagcugc

SEQ ID NO: 1513512 - RNA, 19 nt, Artificial Sequence
  Description of Artificial Sequence: Synthetic oligonucleotide
cuuucguacuuguuggacu

SEQ ID NO: 1513513 - RNA, 19 nt, Artificial Sequence
  Description of Artificial Sequence: Synthetic oligonucleotide
ccugcuugauauuauaaaa

SEQ ID NO: 1513514 - RNA, 19 nt, Artificial Sequence
  Description of Artificial Sequence: Synthetic oligonucleotide
ugaugcaguuugucuaauu

SEQ ID NO: 1513515 - RNA, 19 nt, Artificial Sequence
  Description of Artificial Sequence: Synthetic oligonucleotide
acuuuauuauugggguggu

SEQ ID NO: 1513516 - RNA, 19 nt, Artificial Sequence
  Description of Artificial Sequence: Synthetic oligonucleotide
auuacucccaggaccgacu

SEQ ID NO: 1513517 - RNA, 19 nt, Artificial Sequence
  Description of Artificial Sequence: Synthetic oligonucleotide
cugacguggcuguucguuc

SEQ ID NO: 1513518 - RNA, 19 nt, Artificial Sequence
  Description of Artificial Sequence: Synthetic oligonucleotide
uuggaacaauagauauaua

SEQ ID NO: 1513519 - RNA, 19 nt, Artificial Sequence
  Description of Artificial Sequence: Synthetic oligonucleotide
guuacauccgaugcacuaa

SEQ ID NO: 1513520 - RNA, 19 nt, Artificial Sequence
  Description of Artificial Sequence: Synthetic oligonucleotide
agggguugagauguguuaa

SEQ ID NO: 1513521 - RNA, 19 nt, Artificial Sequence
  Description of Artificial Sequence: Synthetic oligonucleotide
cauuacucccaggaccgac

SEQ ID NO: 1513522 - RNA, 19 nt, Artificial Sequence
  Description of Artificial Sequence: Synthetic oligonucleotide
ugucguguucaagucuggu

SEQ ID NO: 1513523 - RNA, 19 nt, Artificial Sequence
  Description of Artificial Sequence: Synthetic oligonucleotide
aaacccgguggaaauguuu

SEQ ID NO: 1513524 - RNA, 19 nt, Artificial Sequence
  Description of Artificial Sequence: Synthetic oligonucleotide
auugcaccuggcaucagaa

SEQ ID NO: 1513525 - RNA, 19 nt, Artificial Sequence
  Description of Artificial Sequence: Synthetic oligonucleotide
caguagauugcaccuggca

SEQ ID NO: 1513526 - RNA, 19 nt, Artificial Sequence
  Description of Artificial Sequence: Synthetic oligonucleotide
agcuugugugcagagcacu

SEQ ID NO: 1513527 - RNA, 19 nt, Artificial Sequence
  Description of Artificial Sequence: Synthetic oligonucleotide
gagauguguuaagccagac

SEQ ID NO: 1513528 - RNA, 19 nt, Artificial Sequence
  Description of Artificial Sequence: Synthetic oligonucleotide
uuuccguggcccggggucc

SEQ ID NO: 1513529 - RNA, 19 nt, Artificial Sequence
  Description of Artificial Sequence: Synthetic oligonucleotide
gccgcagagacuuguccgg

SEQ ID NO: 1513530 - RNA, 19 nt, Artificial Sequence
  Description of Artificial Sequence: Synthetic oligonucleotide
ggaccgacuccuugaaggc

SEQ ID NO: 1513531 - RNA, 19 nt, Artificial Sequence
  Description of Artificial Sequence: Synthetic oligonucleotide
gaaguucaguugaaaguua

SEQ ID NO: 1513532 - RNA, 19 nt, Artificial Sequence
  Description of Artificial Sequence: Synthetic oligonucleotide
gguaccuugccagcugcgg

SEQ ID NO: 1513533 - RNA, 19 nt, Artificial Sequence
  Description of Artificial Sequence: Synthetic oligonucleotide
gaccgacuccuugaaggcc

SEQ ID NO: 1513534 - RNA, 19 nt, Artificial Sequence
  Description of Artificial Sequence: Synthetic oligonucleotide
accuggcaucagaagcucc

SEQ ID NO: 1513535 - RNA, 19 nt, Artificial Sequence
  Description of Artificial Sequence: Synthetic oligonucleotide
gagcccugauuuucggauc

SEQ ID NO: 1513536 - RNA, 19 nt, Artificial Sequence
  Description of Artificial Sequence: Synthetic oligonucleotide
accgacuccuugaaggccu

SEQ ID NO: 1513537 - RNA, 19 nt, Artificial Sequence
  Description of Artificial Sequence: Synthetic oligonucleotide
ggucauuccgcagucucug

SEQ ID NO: 1513538 - RNA, 19 nt, Artificial Sequence
  Description of Artificial Sequence: Synthetic oligonucleotide
gcaauuugcucuuggggaa

SEQ ID NO: 1513539 - RNA, 19 nt, Artificial Sequence
  Description of Artificial Sequence: Synthetic oligonucleotide
guccuaggacucaaaauaa

SEQ ID NO: 1513540 - RNA, 19 nt, Artificial Sequence
  Description of Artificial Sequence: Synthetic oligonucleotide
aucgcucuugccagcacug

SEQ ID NO: 1513541 - RNA, 19 nt, Artificial Sequence
  Description of Artificial Sequence: Synthetic oligonucleotide
ggacugaaguaguagacau

SEQ ID NO: 1513542 - RNA, 19 nt, Artificial Sequence
  Description of Artificial Sequence: Synthetic oligonucleotide
gacaucgcucuugccagca

SEQ ID NO: 1513543 - RNA, 19 nt, Artificial Sequence
  Description of Artificial Sequence: Synthetic oligonucleotide
ucuuaccacuuggacugaa

SEQ ID NO: 1513544 - RNA, 19 nt, Artificial Sequence
  Description of Artificial Sequence: Synthetic oligonucleotide
auccguugugggucugacu

SEQ ID NO: 1513545 - RNA, 19 nt, Artificial Sequence
  Description of Artificial Sequence: Synthetic oligonucleotide
ucauccguugugggucuga

SEQ ID NO: 1513546 - RNA, 19 nt, Artificial Sequence
  Description of Artificial Sequence: Synthetic oligonucleotide
uccgaugcacuaaguccuu

SEQ ID NO: 1513547 - RNA, 19 nt, Artificial Sequence
  Description of Artificial Sequence: Synthetic oligonucleotide
acagccgcagagacuuguc

SEQ ID NO: 1513548 - RNA, 19 nt, Artificial Sequence
  Description of Artificial Sequence: Synthetic oligonucleotide
aggcauugguuagugcuau

SEQ ID NO: 1513549 - RNA, 19 nt, Artificial Sequence
  Description of Artificial Sequence: Synthetic oligonucleotide
ucauuacucccaggaccga

SEQ ID NO: 1513550 - RNA, 19 nt, Artificial Sequence
  Description of Artificial Sequence: Synthetic oligonucleotide
gugggucugacuuuacuuu

SEQ ID NO: 1513551 - RNA, 19 nt, Artificial Sequence
  Description of Artificial Sequence: Synthetic oligonucleotide
cuugccagcugcgguuuac

SEQ ID NO: 1513552 - RNA, 19 nt, Artificial Sequence
  Description of Artificial Sequence: Synthetic oligonucleotide
cuuacaggcgaaacccggu

SEQ ID NO: 1513553 - RNA, 19 nt, Artificial Sequence
  Description of Artificial Sequence: Synthetic oligonucleotide
gacugguugcuugaaaauu

SEQ ID NO: 1513554 - RNA, 19 nt, Artificial Sequence
  Description of Artificial Sequence: Synthetic oligonucleotide
caggaccgacuccuugaag

SEQ ID NO: 1513555 - RNA, 19 nt, Artificial Sequence
  Description of Artificial Sequence: Synthetic oligonucleotide
cauuuuaaggguccugcuu

SEQ ID NO: 1513556 - RNA, 19 nt, Artificial Sequence
  Description of Artificial Sequence: Synthetic oligonucleotide
gacuuguccggugauuggu

SEQ ID NO: 1513557 - RNA, 19 nt, Artificial Sequence
  Description of Artificial Sequence: Synthetic oligonucleotide
gcagagacuuguccgguga

SEQ ID NO: 1513558 - RNA, 19 nt, Artificial Sequence
  Description of Artificial Sequence: Synthetic oligonucleotide
gcacuaaguccuugcaguc

SEQ ID NO: 1513559 - RNA, 19 nt, Artificial Sequence
  Description of Artificial Sequence: Synthetic oligonucleotide
agagggguugagauguguu

SEQ ID NO: 1513560 - RNA, 19 nt, Artificial Sequence
  Description of Artificial Sequence: Synthetic oligonucleotide
gacgccggagccgcccgcg

SEQ ID NO: 1513561 - RNA, 19 nt, Artificial Sequence
  Description of Artificial Sequence: Synthetic oligonucleotide
agguaccuugccagcugcg

SEQ ID NO: 1513562 - RNA, 19 nt, Artificial Sequence
  Description of Artificial Sequence: Synthetic oligonucleotide
cauccguugugggucugac

SEQ ID NO: 1513563 - RNA, 19 nt, Artificial Sequence
  Description of Artificial Sequence: Synthetic oligonucleotide
uucuuaccacuuggacuga

SEQ ID NO: 1513564 - RNA, 19 nt, Artificial Sequence
  Description of Artificial Sequence: Synthetic oligonucleotide
agucugguuuacccuuguu

SEQ ID NO: 1513565 - RNA, 19 nt, Artificial Sequence
  Description of Artificial Sequence: Synthetic oligonucleotide
cuccccgacgggaaaggga

SEQ ID NO: 1513566 - RNA, 19 nt, Artificial Sequence
  Description of Artificial Sequence: Synthetic oligonucleotide
cuaccuccucugugucagc

SEQ ID NO: 1513567 - RNA, 19 nt, Artificial Sequence
  Description of Artificial Sequence: Synthetic oligonucleotide
guaccuugccagcugcggu

SEQ ID NO: 1513568 - RNA, 19 nt, Artificial Sequence
  Description of Artificial Sequence: Synthetic oligonucleotide
aggcgaaacccgguggaaa

SEQ ID NO: 1513569 - RNA, 19 nt, Artificial Sequence
  Description of Artificial Sequence: Synthetic oligonucleotide
cguucauccguuguggguc

SEQ ID NO: 1513570 - RNA, 19 nt, Artificial Sequence
  Description of Artificial Sequence: Synthetic oligonucleotide
gucguguucaagucugguu

SEQ ID NO: 1513571 - RNA, 19 nt, Artificial Sequence
  Description of Artificial Sequence: Synthetic oligonucleotide
gcuguucguucauccguug

SEQ ID NO: 1513572 - RNA, 19 nt, Artificial Sequence
  Description of Artificial Sequence: Synthetic oligonucleotide
gcugcgguuuacuucugaa

SEQ ID NO: 1513573 - RNA, 19 nt, Artificial Sequence
  Description of Artificial Sequence: Synthetic oligonucleotide
ggugacugguugcuugaaa

SEQ ID NO: 1513574 - RNA, 19 nt, Artificial Sequence
  Description of Artificial Sequence: Synthetic oligonucleotide
cacuuggacugaaguagua

SEQ ID NO: 1513575 - RNA, 19 nt, Artificial Sequence
  Description of Artificial Sequence: Synthetic oligonucleotide
auaucucauguaagugcua

SEQ ID NO: 1513576 - RNA, 19 nt, Artificial Sequence
  Description of Artificial Sequence: Synthetic oligonucleotide
guucauccguugugggucu

SEQ ID NO: 1513577 - RNA, 19 nt, Artificial Sequence
  Description of Artificial Sequence: Synthetic oligonucleotide
caucgcucuugccagcacu

SEQ ID NO: 1513578 - RNA, 19 nt, Artificial Sequence
  Description of Artificial Sequence: Synthetic oligonucleotide
caaugucuaccuccucugu

SEQ ID NO: 1513579 - RNA, 19 nt, Artificial Sequence
  Description of Artificial Sequence: Synthetic oligonucleotide
agauugcaccuggcaucag

SEQ ID NO: 1513580 - RNA, 19 nt, Artificial Sequence
  Description of Artificial Sequence: Synthetic oligonucleotide
cuguucguucauccguugu

SEQ ID NO: 1513581 - RNA, 19 nt, Artificial Sequence
  Description of Artificial Sequence: Synthetic oligonucleotide
agcugacguggcuguucgu

SEQ ID NO: 1513582 - RNA, 19 nt, Artificial Sequence
  Description of Artificial Sequence: Synthetic oligonucleotide
cccgacgggaaagggacag

SEQ ID NO: 1513583 - RNA, 19 nt, Artificial Sequence
  Description of Artificial Sequence: Synthetic oligonucleotide
cacuaaguccuugcagucu

SEQ ID NO: 1513584 - RNA, 19 nt, Artificial Sequence
  Description of Artificial Sequence: Synthetic oligonucleotide
gcgaaacccgguggaaaug

SEQ ID NO: 1513585 - RNA, 19 nt, Artificial Sequence
  Description of Artificial Sequence: Synthetic oligonucleotide
cuguuacauccgaugcacu

SEQ ID NO: 1513586 - RNA, 19 nt, Artificial Sequence
  Description of Artificial Sequence: Synthetic oligonucleotide
ggcgaaacccgguggaaau

SEQ ID NO: 1513587 - RNA, 19 nt, Artificial Sequence
  Description of Artificial Sequence: Synthetic oligonucleotide
cauuccgcagucucugcuu

SEQ ID NO: 1513588 - RNA, 19 nt, Artificial Sequence
  Description of Artificial Sequence: Synthetic oligonucleotide
cccaggaccgacuccuuga

SEQ ID NO: 1513589 - RNA, 19 nt, Artificial Sequence
  Description of Artificial Sequence: Synthetic oligonucleotide
cagcugcgguuuacuucug

SEQ ID NO: 1513590 - RNA, 19 nt, Artificial Sequence
  Description of Artificial Sequence: Synthetic oligonucleotide
ggcgacgccgccaccgcug

SEQ ID NO: 1513591 - RNA, 19 nt, Artificial Sequence
  Description of Artificial Sequence: Synthetic oligonucleotide
gcuccccgacgggaaaggg

SEQ ID NO: 1513592 - RNA, 19 nt, Artificial Sequence
  Description of Artificial Sequence: Synthetic oligonucleotide
gacguggcuguucguucau

SEQ ID NO: 1513593 - RNA, 19 nt, Artificial Sequence
  Description of Artificial Sequence: Synthetic oligonucleotide
gcgguuuacuucugaacuu

SEQ ID NO: 1513594 - RNA, 19 nt, Artificial Sequence
  Description of Artificial Sequence: Synthetic oligonucleotide
gaaacccgguggaaauguu

SEQ ID NO: 1513595 - RNA, 19 nt, Artificial Sequence
  Description of Artificial Sequence: Synthetic oligonucleotide
cccgcuuuccguggcccgg

SEQ ID NO: 1513596 - RNA, 19 nt, Artificial Sequence
  Description of Artificial Sequence: Synthetic oligonucleotide
ggggcgacgccgccaccgc

SEQ ID NO: 1513597 - RNA, 19 nt, Artificial Sequence
  Description of Artificial Sequence: Synthetic oligonucleotide
cccgguggaaauguuuuaa

SEQ ID NO: 1513598 - RNA, 19 nt, Artificial Sequence
  Description of Artificial Sequence: Synthetic oligonucleotide
caggcgaaacccgguggaa

SEQ ID NO: 1513599 - RNA, 19 nt, Artificial Sequence
  Description of Artificial Sequence: Synthetic oligonucleotide
gagggucauuccgcagucu

SEQ ID NO: 1513600 - RNA, 19 nt, Artificial Sequence
  Description of Artificial Sequence: Synthetic oligonucleotide
ccacuuggacugaaguagu

SEQ ID NO: 1513601 - RNA, 19 nt, Artificial Sequence
  Description of Artificial Sequence: Synthetic oligonucleotide
cagagggguugagaugugu

SEQ ID NO: 1513602 - RNA, 19 nt, Artificial Sequence
  Description of Artificial Sequence: Synthetic oligonucleotide
ccgaugcacuaaguccuug

SEQ ID NO: 1513603 - RNA, 19 nt, Artificial Sequence
  Description of Artificial Sequence: Synthetic oligonucleotide
gcugacguggcuguucguu

SEQ ID NO: 1513604 - RNA, 19 nt, Artificial Sequence
  Description of Artificial Sequence: Synthetic oligonucleotide
gcgcuccccgacgggaaag

SEQ ID NO: 1513605 - RNA, 19 nt, Artificial Sequence
  Description of Artificial Sequence: Synthetic oligonucleotide
gcucuuggggaaguucagu

SEQ ID NO: 1513606 - RNA, 19 nt, Artificial Sequence
  Description of Artificial Sequence: Synthetic oligonucleotide
cuuuggugacugguugcuu

SEQ ID NO: 1513607 - RNA, 19 nt, Artificial Sequence
  Description of Artificial Sequence: Synthetic oligonucleotide
ccgguggaaauguuuuaau

SEQ ID NO: 1513608 - RNA, 19 nt, Artificial Sequence
  Description of Artificial Sequence: Synthetic oligonucleotide
ggcuguucguucauccguu

SEQ ID NO: 1513609 - RNA, 19 nt, Artificial Sequence
  Description of Artificial Sequence: Synthetic oligonucleotide
cgaaacccgguggaaaugu

SEQ ID NO: 1513610 - RNA, 19 nt, Artificial Sequence
  Description of Artificial Sequence: Synthetic oligonucleotide
gcuuuccguggcccggggu

SEQ ID NO: 1513611 - RNA, 19 nt, Artificial Sequence
  Description of Artificial Sequence: Synthetic oligonucleotide
ggcauugguuagugcuauu

SEQ ID NO: 1513612 - RNA, 19 nt, Artificial Sequence
  Description of Artificial Sequence: Synthetic oligonucleotide
cgcugccgacgccggagcc

SEQ ID NO: 1513613 - RNA, 19 nt, Artificial Sequence
  Description of Artificial Sequence: Synthetic oligonucleotide
cguacuuguuggacucgcu

SEQ ID NO: 1513614 - RNA, 19 nt, Artificial Sequence
  Description of Artificial Sequence: Synthetic oligonucleotide
ccccgacgggaaagggaca

SEQ ID NO: 1513615 - RNA, 19 nt, Artificial Sequence
  Description of Artificial Sequence: Synthetic oligonucleotide
ggccuuuggguagcuccau

SEQ ID NO: 1513616 - RNA, 19 nt, Artificial Sequence
  Description of Artificial Sequence: Synthetic oligonucleotide
cgacgccggagccgcccgc

SEQ ID NO: 1513617 - RNA, 19 nt, Artificial Sequence
  Description of Artificial Sequence: Synthetic oligonucleotide
gggcgacgccgccaccgcu

SEQ ID NO: 1513618 - RNA, 19 nt, Artificial Sequence
  Description of Artificial Sequence: Synthetic oligonucleotide
ccguugugggucugacuuu

SEQ ID NO: 1513619 - RNA, 19 nt, Artificial Sequence
  Description of Artificial Sequence: Synthetic oligonucleotide
ccgcagagacuuguccggu

SEQ ID NO: 1513620 - RNA, 19 nt, Artificial Sequence
  Description of Artificial Sequence: Synthetic oligonucleotide
ccgacuccuugaaggccuu

SEQ ID NO: 1513621 - RNA, 19 nt, Artificial Sequence
  Description of Artificial Sequence: Synthetic oligonucleotide
aaucuuuccaucuggagcg

SEQ ID NO: 1513622 - RNA, 19 nt, Artificial Sequence
  Description of Artificial Sequence: Synthetic oligonucleotide
gaauauguagauuaggggc

SEQ ID NO: 1513623 - RNA, 19 nt, Artificial Sequence
  Description of Artificial Sequence: Synthetic oligonucleotide
aauuacuggagauuaaugu

SEQ ID NO: 1513624 - RNA, 19 nt, Artificial Sequence
  Description of Artificial Sequence: Synthetic oligonucleotide
guaacaucagcucugaagg

SEQ ID NO: 1513625 - RNA, 19 nt, Artificial Sequence
  Description of Artificial Sequence: Synthetic oligonucleotide
uuaauguugguaaacagaa

SEQ ID NO: 1513626 - RNA, 19 nt, Artificial Sequence
  Description of Artificial Sequence: Synthetic oligonucleotide
ugcauggucgcuaagcucg

SEQ ID NO: 1513627 - RNA, 19 nt, Artificial Sequence
  Description of Artificial Sequence: Synthetic oligonucleotide
agaauauguagauuagggg

SEQ ID NO: 1513628 - RNA, 19 nt, Artificial Sequence
  Description of Artificial Sequence: Synthetic oligonucleotide
acgcccuaaacuuuuaucc

SEQ ID NO: 1513629 - RNA, 19 nt, Artificial Sequence
  Description of Artificial Sequence: Synthetic oligonucleotide
uuuagcagaggccauagca

SEQ ID NO: 1513630 - RNA, 19 nt, Artificial Sequence
  Description of Artificial Sequence: Synthetic oligonucleotide
uucauuagaagcccaaggc

SEQ ID NO: 1513631 - RNA, 19 nt, Artificial Sequence
  Description of Artificial Sequence: Synthetic oligonucleotide
auuauuugcccauccauuc

SEQ ID NO: 1513632 - RNA, 19 nt, Artificial Sequence
  Description of Artificial Sequence: Synthetic oligonucleotide
ugaagcauccccaaggaca

SEQ ID NO: 1513633 - RNA, 19 nt, Artificial Sequence
  Description of Artificial Sequence: Synthetic oligonucleotide
aacuuuuauccuccguugg

SEQ ID NO: 1513634 - RNA, 19 nt, Artificial Sequence
  Description of Artificial Sequence: Synthetic oligonucleotide
aaacuuuuauccuccguug

SEQ ID NO: 1513635 - RNA, 19 nt, Artificial Sequence
  Description of Artificial Sequence: Synthetic oligonucleotide
ucucaguccgacaagaccu

SEQ ID NO: 1513636 - RNA, 19 nt, Artificial Sequence
  Description of Artificial Sequence: Synthetic oligonucleotide
ucuagguccuguaauagcu

SEQ ID NO: 1513637 - RNA, 19 nt, Artificial Sequence
  Description of Artificial Sequence: Synthetic oligonucleotide
gaugaggggaagcuggacg

SEQ ID NO: 1513638 - RNA, 19 nt, Artificial Sequence
  Description of Artificial Sequence: Synthetic oligonucleotide
guaauuggcuaauuacugg

SEQ ID NO: 1513639 - RNA, 19 nt, Artificial Sequence
  Description of Artificial Sequence: Synthetic oligonucleotide
uaauuacuggagauuaaug

SEQ ID NO: 1513640 - RNA, 19 nt, Artificial Sequence
  Description of Artificial Sequence: Synthetic oligonucleotide
uggagauuaauguugguaa

SEQ ID NO: 1513641 - RNA, 19 nt, Artificial Sequence
  Description of Artificial Sequence: Synthetic oligonucleotide
ugguaauuggcuaauuacu

SEQ ID NO: 1513642 - RNA, 19 nt, Artificial Sequence
  Description of Artificial Sequence: Synthetic oligonucleotide
aucucaguccgacaagacc

SEQ ID NO: 1513643 - RNA, 19 nt, Artificial Sequence
  Description of Artificial Sequence: Synthetic oligonucleotide
aauauguagauuaggggcu

SEQ ID NO: 1513644 - RNA, 19 nt, Artificial Sequence
  Description of Artificial Sequence: Synthetic oligonucleotide
uacuggagauuaauguugg

SEQ ID NO: 1513645 - RNA, 19 nt, Artificial Sequence
  Description of Artificial Sequence: Synthetic oligonucleotide
ucauuagaagcccaaggcu

SEQ ID NO: 1513646 - RNA, 19 nt, Artificial Sequence
  Description of Artificial Sequence: Synthetic oligonucleotide
guucauuagaagcccaagg

SEQ ID NO: 1513647 - RNA, 19 nt, Artificial Sequence
  Description of Artificial Sequence: Synthetic oligonucleotide
uaauuggcuaauuacugga

SEQ ID NO: 1513648 - RNA, 19 nt, Artificial Sequence
  Description of Artificial Sequence: Synthetic oligonucleotide
cuuaacagagcccagccug

SEQ ID NO: 1513649 - RNA, 19 nt, Artificial Sequence
  Description of Artificial Sequence: Synthetic oligonucleotide
aguucucaaucauuugugg

SEQ ID NO: 1513650 - RNA, 19 nt, Artificial Sequence
  Description of Artificial Sequence: Synthetic oligonucleotide
uauuugcccauccauuccc

SEQ ID NO: 1513651 - RNA, 19 nt, Artificial Sequence
  Description of Artificial Sequence: Synthetic oligonucleotide
uaugcuguucccuggcacg

SEQ ID NO: 1513652 - RNA, 19 nt, Artificial Sequence
  Description of Artificial Sequence: Synthetic oligonucleotide
ugagauaugcuguucccug

SEQ ID NO: 1513653 - RNA, 19 nt, Artificial Sequence
  Description of Artificial Sequence: Synthetic oligonucleotide
gguaacaucagcucugaag

SEQ ID NO: 1513654 - RNA, 19 nt, Artificial Sequence
  Description of Artificial Sequence: Synthetic oligonucleotide
cugguaauuggcuaauuac

SEQ ID NO: 1513655 - RNA, 19 nt, Artificial Sequence
  Description of Artificial Sequence: Synthetic oligonucleotide
agggagaauauguagauua

SEQ ID NO: 1513656 - RNA, 19 nt, Artificial Sequence
  Description of Artificial Sequence: Synthetic oligonucleotide
agauaugcuguucccuggc

SEQ ID NO: 1513657 - RNA, 19 nt, Artificial Sequence
  Description of Artificial Sequence: Synthetic oligonucleotide
uuuauccuccguuggagug

SEQ ID NO: 1513658 - RNA, 19 nt, Artificial Sequence
  Description of Artificial Sequence: Synthetic oligonucleotide
uuauuugcccauccauucc

SEQ ID NO: 1513659 - RNA, 19 nt, Artificial Sequence
  Description of Artificial Sequence: Synthetic oligonucleotide
uguccaggugugaacaaag

SEQ ID NO: 1513660 - RNA, 19 nt, Artificial Sequence
  Description of Artificial Sequence: Synthetic oligonucleotide
auaugcuguucccuggcac

SEQ ID NO: 1513661 - RNA, 19 nt, Artificial Sequence
  Description of Artificial Sequence: Synthetic oligonucleotide
aacugcuuggccgcguacc

SEQ ID NO: 1513662 - RNA, 19 nt, Artificial Sequence
  Description of Artificial Sequence: Synthetic oligonucleotide
ucuggagcgagugaguuca

SEQ ID NO: 1513663 - RNA, 19 nt, Artificial Sequence
  Description of Artificial Sequence: Synthetic oligonucleotide
gaaacuugggccccugccc

SEQ ID NO: 1513664 - RNA, 19 nt, Artificial Sequence
  Description of Artificial Sequence: Synthetic oligonucleotide
aagcuggacgcccuaaacu

SEQ ID NO: 1513665 - RNA, 19 nt, Artificial Sequence
  Description of Artificial Sequence: Synthetic oligonucleotide
uggcuuaguguccaggugu

SEQ ID NO: 1513666 - RNA, 19 nt, Artificial Sequence
  Description of Artificial Sequence: Synthetic oligonucleotide
aacccaggcgcuccugagc

SEQ ID NO: 1513667 - RNA, 19 nt, Artificial Sequence
  Description of Artificial Sequence: Synthetic oligonucleotide
gagauaugcuguucccugg

SEQ ID NO: 1513668 - RNA, 19 nt, Artificial Sequence
  Description of Artificial Sequence: Synthetic oligonucleotide
ucggguaccauucucgcuc

SEQ ID NO: 1513669 - RNA, 19 nt, Artificial Sequence
  Description of Artificial Sequence: Synthetic oligonucleotide
ucugagauaugcuguuccc

SEQ ID NO: 1513670 - RNA, 19 nt, Artificial Sequence
  Description of Artificial Sequence: Synthetic oligonucleotide
uuaacagagcccagccugc

SEQ ID NO: 1513671 - RNA, 19 nt, Artificial Sequence
  Description of Artificial Sequence: Synthetic oligonucleotide
ugggcuuuagcagaggcca

SEQ ID NO: 1513672 - RNA, 19 nt, Artificial Sequence
  Description of Artificial Sequence: Synthetic oligonucleotide
accuuucugaaguggcccc

SEQ ID NO: 1513673 - RNA, 19 nt, Artificial Sequence
  Description of Artificial Sequence: Synthetic oligonucleotide
cagguauuggggaaugagc

SEQ ID NO: 1513674 - RNA, 19 nt, Artificial Sequence
  Description of Artificial Sequence: Synthetic oligonucleotide
uuuaggagcuggcuucccc

SEQ ID NO: 1513675 - RNA, 19 nt, Artificial Sequence
  Description of Artificial Sequence: Synthetic oligonucleotide
auugggcacuccuuggguc

SEQ ID NO: 1513676 - RNA, 19 nt, Artificial Sequence
  Description of Artificial Sequence: Synthetic oligonucleotide
agaggauucuuccacccca

SEQ ID NO: 1513677 - RNA, 19 nt, Artificial Sequence
  Description of Artificial Sequence: Synthetic oligonucleotide
uuauccuccguuggagugg

SEQ ID NO: 1513678 - RNA, 19 nt, Artificial Sequence
  Description of Artificial Sequence: Synthetic oligonucleotide
ccaggugugaacaaagccc

SEQ ID NO: 1513679 - RNA, 19 nt, Artificial Sequence
  Description of Artificial Sequence: Synthetic oligonucleotide
uuuuauccuccguuggagu

SEQ ID NO: 1513680 - RNA, 19 nt, Artificial Sequence
  Description of Artificial Sequence: Synthetic oligonucleotide
ugcugcuucgcgcgcagcg

SEQ ID NO: 1513681 - RNA, 19 nt, Artificial Sequence
  Description of Artificial Sequence: Synthetic oligonucleotide
acaccuaggccagauuccc

SEQ ID NO: 1513682 - RNA, 19 nt, Artificial Sequence
  Description of Artificial Sequence: Synthetic oligonucleotide
aaaccaacaccuaggccag

SEQ ID NO: 1513683 - RNA, 19 nt, Artificial Sequence
  Description of Artificial Sequence: Synthetic oligonucleotide
ugucuagguccuguaauag

SEQ ID NO: 1513684 - RNA, 19 nt, Artificial Sequence
  Description of Artificial Sequence: Synthetic oligonucleotide
gacaugggcaugcugagaa

SEQ ID NO: 1513685 - RNA, 19 nt, Artificial Sequence
  Description of Artificial Sequence: Synthetic oligonucleotide
auucccaucucaguccgac

SEQ ID NO: 1513686 - RNA, 19 nt, Artificial Sequence
  Description of Artificial Sequence: Synthetic oligonucleotide
cauuuguggcaucuuggcc

SEQ ID NO: 1513687 - RNA, 19 nt, Artificial Sequence
  Description of Artificial Sequence: Synthetic oligonucleotide
uuucucccuagucuggccu

SEQ ID NO: 1513688 - RNA, 19 nt, Artificial Sequence
  Description of Artificial Sequence: Synthetic oligonucleotide
gguaauuggcuaauuacug

SEQ ID NO: 1513689 - RNA, 19 nt, Artificial Sequence
  Description of Artificial Sequence: Synthetic oligonucleotide
ccaaggacaacccaccucc

SEQ ID NO: 1513690 - RNA, 19 nt, Artificial Sequence
  Description of Artificial Sequence: Synthetic oligonucleotide
aagaccaggaggugacaga

SEQ ID NO: 1513691 - RNA, 19 nt, Artificial Sequence
  Description of Artificial Sequence: Synthetic oligonucleotide
uuuccaucuggagcgagug

SEQ ID NO: 1513692 - RNA, 19 nt, Artificial Sequence
  Description of Artificial Sequence: Synthetic oligonucleotide
agauuaggggcugucagca

SEQ ID NO: 1513693 - RNA, 19 nt, Artificial Sequence
  Description of Artificial Sequence: Synthetic oligonucleotide
uauuggggaaugagccaag

SEQ ID NO: 1513694 - RNA, 19 nt, Artificial Sequence
  Description of Artificial Sequence: Synthetic oligonucleotide
guaccauucucgcuccucc

SEQ ID NO: 1513695 - RNA, 19 nt, Artificial Sequence
  Description of Artificial Sequence: Synthetic oligonucleotide
ugcguugcugcuugucuag

SEQ ID NO: 1513696 - RNA, 19 nt, Artificial Sequence
  Description of Artificial Sequence: Synthetic oligonucleotide
cugaaguggccccuauucc

SEQ ID NO: 1513697 - RNA, 19 nt, Artificial Sequence
  Description of Artificial Sequence: Synthetic oligonucleotide
agaagcccaaggcuuucuc

SEQ ID NO: 1513698 - RNA, 19 nt, Artificial Sequence
  Description of Artificial Sequence: Synthetic oligonucleotide
uugucuagguccuguaaua

SEQ ID NO: 1513699 - RNA, 19 nt, Artificial Sequence
  Description of Artificial Sequence: Synthetic oligonucleotide
gaacaaagcccagcagagg

SEQ ID NO: 1513700 - RNA, 19 nt, Artificial Sequence
  Description of Artificial Sequence: Synthetic oligonucleotide
gaagcuggacgcccuaaac

SEQ ID NO: 1513701 - RNA, 19 nt, Artificial Sequence
  Description of Artificial Sequence: Synthetic oligonucleotide
uaguguccaggugugaaca

SEQ ID NO: 1513702 - RNA, 19 nt, Artificial Sequence
  Description of Artificial Sequence: Synthetic oligonucleotide
gacgcccuaaacuuuuauc

SEQ ID NO: 1513703 - RNA, 19 nt, Artificial Sequence
  Description of Artificial Sequence: Synthetic oligonucleotide
guugguaaacagaagccuc

SEQ ID NO: 1513704 - RNA, 19 nt, Artificial Sequence
  Description of Artificial Sequence: Synthetic oligonucleotide
agagguaacaucagcucug

SEQ ID NO: 1513705 - RNA, 19 nt, Artificial Sequence
  Description of Artificial Sequence: Synthetic oligonucleotide
ucaaaguugcuggcaagac

SEQ ID NO: 1513706 - RNA, 19 nt, Artificial Sequence
  Description of Artificial Sequence: Synthetic oligonucleotide
agcgacucuugcauggucg

SEQ ID NO: 1513707 - RNA, 19 nt, Artificial Sequence
  Description of Artificial Sequence: Synthetic oligonucleotide
ucagcccuagaaagggcug

SEQ ID NO: 1513708 - RNA, 19 nt, Artificial Sequence
  Description of Artificial Sequence: Synthetic oligonucleotide
agcgucucgcgcuuccuuc

SEQ ID NO: 1513709 - RNA, 19 nt, Artificial Sequence
  Description of Artificial Sequence: Synthetic oligonucleotide
uguaaccgggcccuccgcu

SEQ ID NO: 1513710 - RNA, 19 nt, Artificial Sequence
  Description of Artificial Sequence: Synthetic oligonucleotide
cagauucccaccuuucuga

SEQ ID NO: 1513711 - RNA, 19 nt, Artificial Sequence
  Description of Artificial Sequence: Synthetic oligonucleotide
ggaauugggcacuccuugg

SEQ ID NO: 1513712 - RNA, 19 nt, Artificial Sequence
  Description of Artificial Sequence: Synthetic oligonucleotide
aucuggagcgagugaguuc

SEQ ID NO: 1513713 - RNA, 19 nt, Artificial Sequence
  Description of Artificial Sequence: Synthetic oligonucleotide
agcuugagggagaauaugu

SEQ ID NO: 1513714 - RNA, 19 nt, Artificial Sequence
  Description of Artificial Sequence: Synthetic oligonucleotide
auuugcccauccauucccc

SEQ ID NO: 1513715 - RNA, 19 nt, Artificial Sequence
  Description of Artificial Sequence: Synthetic oligonucleotide
agcagcgucucgcgcuucc

SEQ ID NO: 1513716 - RNA, 19 nt, Artificial Sequence
  Description of Artificial Sequence: Synthetic oligonucleotide
gacccaggaagucacagcu

SEQ ID NO: 1513717 - RNA, 19 nt, Artificial Sequence
  Description of Artificial Sequence: Synthetic oligonucleotide
agcucggguaccauucucg

SEQ ID NO: 1513718 - RNA, 19 nt, Artificial Sequence
  Description of Artificial Sequence: Synthetic oligonucleotide
auggcauggcuuagugucc

SEQ ID NO: 1513719 - RNA, 19 nt, Artificial Sequence
  Description of Artificial Sequence: Synthetic oligonucleotide
cauccccugaagcaucccc

SEQ ID NO: 1513720 - RNA, 19 nt, Artificial Sequence
  Description of Artificial Sequence: Synthetic oligonucleotide
gaguggcccaaaucuuucc

SEQ ID NO: 1513721 - RNA, 19 nt, Artificial Sequence
  Description of Artificial Sequence: Synthetic oligonucleotide
cucccucucaugcagucug

SEQ ID NO: 1513722 - RNA, 19 nt, Artificial Sequence
  Description of Artificial Sequence: Synthetic oligonucleotide
uaagcucggguaccauucu

SEQ ID NO: 1513723 - RNA, 19 nt, Artificial Sequence
  Description of Artificial Sequence: Synthetic oligonucleotide
uccucuuaacagagcccag

SEQ ID NO: 1513724 - RNA, 19 nt, Artificial Sequence
  Description of Artificial Sequence: Synthetic oligonucleotide
gaagcauccccaaggacaa

SEQ ID NO: 1513725 - RNA, 19 nt, Artificial Sequence
  Description of Artificial Sequence: Synthetic oligonucleotide
ugccgcgcgaacugcuugg

SEQ ID NO: 1513726 - RNA, 19 nt, Artificial Sequence
  Description of Artificial Sequence: Synthetic oligonucleotide
aggauucuuccaccccagg

SEQ ID NO: 1513727 - RNA, 19 nt, Artificial Sequence
  Description of Artificial Sequence: Synthetic oligonucleotide
cuagguccuguaauagcuc

SEQ ID NO: 1513728 - RNA, 19 nt, Artificial Sequence
  Description of Artificial Sequence: Synthetic oligonucleotide
uaacccaggcgcuccugag

SEQ ID NO: 1513729 - RNA, 19 nt, Artificial Sequence
  Description of Artificial Sequence: Synthetic oligonucleotide
ucaguccgacaagaccugg

SEQ ID NO: 1513730 - RNA, 19 nt, Artificial Sequence
  Description of Artificial Sequence: Synthetic oligonucleotide
ugucgccaguucucaauca

SEQ ID NO: 1513731 - RNA, 19 nt, Artificial Sequence
  Description of Artificial Sequence: Synthetic oligonucleotide
cagaggauucuuccacccc

SEQ ID NO: 1513732 - RNA, 19 nt, Artificial Sequence
  Description of Artificial Sequence: Synthetic oligonucleotide
auggucgcuaagcucgggu

SEQ ID NO: 1513733 - RNA, 19 nt, Artificial Sequence
  Description of Artificial Sequence: Synthetic oligonucleotide
ucgcgcuuccuucuucugu

SEQ ID NO: 1513734 - RNA, 19 nt, Artificial Sequence
  Description of Artificial Sequence: Synthetic oligonucleotide
caaggcuuucucccuaguc

SEQ ID NO: 1513735 - RNA, 19 nt, Artificial Sequence
  Description of Artificial Sequence: Synthetic oligonucleotide
cuuuagcagaggccauagc

SEQ ID NO: 1513736 - RNA, 19 nt, Artificial Sequence
  Description of Artificial Sequence: Synthetic oligonucleotide
caucucaguccgacaagac

SEQ ID NO: 1513737 - RNA, 19 nt, Artificial Sequence
  Description of Artificial Sequence: Synthetic oligonucleotide
ucggccugcugcuucgcgc

SEQ ID NO: 1513738 - RNA, 19 nt, Artificial Sequence
  Description of Artificial Sequence: Synthetic oligonucleotide
uauccuccguuggaguggc

SEQ ID NO: 1513739 - RNA, 19 nt, Artificial Sequence
  Description of Artificial Sequence: Synthetic oligonucleotide
guccgacaagaccugggcc

SEQ ID NO: 1513740 - RNA, 19 nt, Artificial Sequence
  Description of Artificial Sequence: Synthetic oligonucleotide
cuguucccuggcacgacgc

SEQ ID NO: 1513741 - RNA, 19 nt, Artificial Sequence
  Description of Artificial Sequence: Synthetic oligonucleotide
ggcuuuaggagcuggcuuc

SEQ ID NO: 1513742 - RNA, 19 nt, Artificial Sequence
  Description of Artificial Sequence: Synthetic oligonucleotide
cacagcuugagggagaaua

SEQ ID NO: 1513743 - RNA, 19 nt, Artificial Sequence
  Description of Artificial Sequence: Synthetic oligonucleotide
gacaagaccugggccagac

SEQ ID NO: 1513744 - RNA, 19 nt, Artificial Sequence
  Description of Artificial Sequence: Synthetic oligonucleotide
cucaguccgacaagaccug

SEQ ID NO: 1513745 - RNA, 19 nt, Artificial Sequence
  Description of Artificial Sequence: Synthetic oligonucleotide
uugcguugcugcuugucua

SEQ ID NO: 1513746 - RNA, 19 nt, Artificial Sequence
  Description of Artificial Sequence: Synthetic oligonucleotide
agcggucuccucccucugg

SEQ ID NO: 1513747 - RNA, 19 nt, Artificial Sequence
  Description of Artificial Sequence: Synthetic oligonucleotide
gcagaggauucuuccaccc

SEQ ID NO: 1513748 - RNA, 19 nt, Artificial Sequence
  Description of Artificial Sequence: Synthetic oligonucleotide
ucgcugucucuccuccuug

SEQ ID NO: 1513749 - RNA, 19 nt, Artificial Sequence
  Description of Artificial Sequence: Synthetic oligonucleotide
cugucgccaguucucaauc

SEQ ID NO: 1513750 - RNA, 19 nt, Artificial Sequence
  Description of Artificial Sequence: Synthetic oligonucleotide
cuagucuggccuuggccuc

SEQ ID NO: 1513751 - RNA, 19 nt, Artificial Sequence
  Description of Artificial Sequence: Synthetic oligonucleotide
uggucgcuaagcucgggua

SEQ ID NO: 1513752 - RNA, 19 nt, Artificial Sequence
  Description of Artificial Sequence: Synthetic oligonucleotide
acgccucgccuccucggcc

SEQ ID NO: 1513753 - RNA, 19 nt, Artificial Sequence
  Description of Artificial Sequence: Synthetic oligonucleotide
ccuaaacuuuuauccuccg

SEQ ID NO: 1513754 - RNA, 19 nt, Artificial Sequence
  Description of Artificial Sequence: Synthetic oligonucleotide
gguauuggggaaugagcca

SEQ ID NO: 1513755 - RNA, 19 nt, Artificial Sequence
  Description of Artificial Sequence: Synthetic oligonucleotide
cuggagauuaauguuggua

SEQ ID NO: 1513756 - RNA, 19 nt, Artificial Sequence
  Description of Artificial Sequence: Synthetic oligonucleotide
ugccugcuuccccaucccc

SEQ ID NO: 1513757 - RNA, 19 nt, Artificial Sequence
  Description of Artificial Sequence: Synthetic oligonucleotide
cuuaguguccaggugugaa

SEQ ID NO: 1513758 - RNA, 19 nt, Artificial Sequence
  Description of Artificial Sequence: Synthetic oligonucleotide
gucgcuaagcucggguacc

SEQ ID NO: 1513759 - RNA, 19 nt, Artificial Sequence
  Description of Artificial Sequence: Synthetic oligonucleotide
acucuugcauggucgcuaa

SEQ ID NO: 1513760 - RNA, 19 nt, Artificial Sequence
  Description of Artificial Sequence: Synthetic oligonucleotide
ucgccaguucucaaucauu

SEQ ID NO: 1513761 - RNA, 19 nt, Artificial Sequence
  Description of Artificial Sequence: Synthetic oligonucleotide
gggccuagcugccaccgcg

SEQ ID NO: 1513762 - RNA, 19 nt, Artificial Sequence
  Description of Artificial Sequence: Synthetic oligonucleotide
uggcauggcuuagugucca

SEQ ID NO: 1513763 - RNA, 19 nt, Artificial Sequence
  Description of Artificial Sequence: Synthetic oligonucleotide
uggcuaauuacuggagauu

SEQ ID NO: 1513764 - RNA, 19 nt, Artificial Sequence
  Description of Artificial Sequence: Synthetic oligonucleotide
cuaauuacuggagauuaau

SEQ ID NO: 1513765 - RNA, 19 nt, Artificial Sequence
  Description of Artificial Sequence: Synthetic oligonucleotide
gacgccucgccuccucggc

SEQ ID NO: 1513766 - RNA, 19 nt, Artificial Sequence
  Description of Artificial Sequence: Synthetic oligonucleotide
aggccauagcagcgucucg

SEQ ID NO: 1513767 - RNA, 19 nt, Artificial Sequence
  Description of Artificial Sequence: Synthetic oligonucleotide
gccauagcagcgucucgcg

SEQ ID NO: 1513768 - RNA, 19 nt, Artificial Sequence
  Description of Artificial Sequence: Synthetic oligonucleotide
ucccuagucuggccuuggc

SEQ ID NO: 1513769 - RNA, 19 nt, Artificial Sequence
  Description of Artificial Sequence: Synthetic oligonucleotide
cccuagaaagggcugcugc

SEQ ID NO: 1513770 - RNA, 19 nt, Artificial Sequence
  Description of Artificial Sequence: Synthetic oligonucleotide
cauagcagcgucucgcgcu

SEQ ID NO: 1513771 - RNA, 19 nt, Artificial Sequence
  Description of Artificial Sequence: Synthetic oligonucleotide
ggcuaauuacuggagauua

SEQ ID NO: 1513772 - RNA, 19 nt, Artificial Sequence
  Description of Artificial Sequence: Synthetic oligonucleotide
cuugucuagguccuguaau

SEQ ID NO: 1513773 - RNA, 19 nt, Artificial Sequence
  Description of Artificial Sequence: Synthetic oligonucleotide
guaacccaggcgcuccuga

SEQ ID NO: 1513774 - RNA, 19 nt, Artificial Sequence
  Description of Artificial Sequence: Synthetic oligonucleotide
aagcauccccaaggacaac

SEQ ID NO: 1513775 - RNA, 19 nt, Artificial Sequence
  Description of Artificial Sequence: Synthetic oligonucleotide
ggagcgagugaguucauua

SEQ ID NO: 1513776 - RNA, 19 nt, Artificial Sequence
  Description of Artificial Sequence: Synthetic oligonucleotide
ccagauucccaccuuucug

SEQ ID NO: 1513777 - RNA, 19 nt, Artificial Sequence
  Description of Artificial Sequence: Synthetic oligonucleotide
ucccuggcacgacgccucg

SEQ ID NO: 1513778 - RNA, 19 nt, Artificial Sequence
  Description of Artificial Sequence: Synthetic oligonucleotide
gucccugaagccccaguca

SEQ ID NO: 1513779 - RNA, 19 nt, Artificial Sequence
  Description of Artificial Sequence: Synthetic oligonucleotide
ggucgcuaagcucggguac

SEQ ID NO: 1513780 - RNA, 19 nt, Artificial Sequence
  Description of Artificial Sequence: Synthetic oligonucleotide
auagcagcgucucgcgcuu

SEQ ID NO: 1513781 - RNA, 19 nt, Artificial Sequence
  Description of Artificial Sequence: Synthetic oligonucleotide
gacucuugcauggucgcua

SEQ ID NO: 1513782 - RNA, 19 nt, Artificial Sequence
  Description of Artificial Sequence: Synthetic oligonucleotide
ucucccuagucuggccuug

SEQ ID NO: 1513783 - RNA, 19 nt, Artificial Sequence
  Description of Artificial Sequence: Synthetic oligonucleotide
uugcccauccauuccccuu

SEQ ID NO: 1513784 - RNA, 19 nt, Artificial Sequence
  Description of Artificial Sequence: Synthetic oligonucleotide
uggcacgacgccucgccuc

SEQ ID NO: 1513785 - RNA, 19 nt, Artificial Sequence
  Description of Artificial Sequence: Synthetic oligonucleotide
agucauggcauggcuuagu

SEQ ID NO: 1513786 - RNA, 19 nt, Artificial Sequence
  Description of Artificial Sequence: Synthetic oligonucleotide
cgcgcgaacugcuuggccg

SEQ ID NO: 1513787 - RNA, 19 nt, Artificial Sequence
  Description of Artificial Sequence: Synthetic oligonucleotide
caagggacccaggaaguca

SEQ ID NO: 1513788 - RNA, 19 nt, Artificial Sequence
  Description of Artificial Sequence: Synthetic oligonucleotide
uccccauccccugaagcau

SEQ ID NO: 1513789 - RNA, 19 nt, Artificial Sequence
  Description of Artificial Sequence: Synthetic oligonucleotide
cucagcccuagaaagggcu

SEQ ID NO: 1513790 - RNA, 19 nt, Artificial Sequence
  Description of Artificial Sequence: Synthetic oligonucleotide
ucccucucaugcagucugu

SEQ ID NO: 1513791 - RNA, 19 nt, Artificial Sequence
  Description of Artificial Sequence: Synthetic oligonucleotide
cuugcguugcugcuugucu

SEQ ID NO: 1513792 - RNA, 19 nt, Artificial Sequence
  Description of Artificial Sequence: Synthetic oligonucleotide
uucucccuagucuggccuu

SEQ ID NO: 1513793 - RNA, 19 nt, Artificial Sequence
  Description of Artificial Sequence: Synthetic oligonucleotide
aucagcucugaaggccaag

SEQ ID NO: 1513794 - RNA, 19 nt, Artificial Sequence
  Description of Artificial Sequence: Synthetic oligonucleotide
cugcuucgcgcgcagcgac

SEQ ID NO: 1513795 - RNA, 19 nt, Artificial Sequence
  Description of Artificial Sequence: Synthetic oligonucleotide
ugcuucgcgcgcagcgacu

SEQ ID NO: 1513796 - RNA, 19 nt, Artificial Sequence
  Description of Artificial Sequence: Synthetic oligonucleotide
ccuguaaccgggcccuccg

SEQ ID NO: 1513797 - RNA, 19 nt, Artificial Sequence
  Description of Artificial Sequence: Synthetic oligonucleotide
aggccagauucccaccuuu

SEQ ID NO: 1513798 - RNA, 19 nt, Artificial Sequence
  Description of Artificial Sequence: Synthetic oligonucleotide
gcucggguaccauucucgc

SEQ ID NO: 1513799 - RNA, 19 nt, Artificial Sequence
  Description of Artificial Sequence: Synthetic oligonucleotide
gaggcggcgccgugccgcg

SEQ ID NO: 1513800 - RNA, 19 nt, Artificial Sequence
  Description of Artificial Sequence: Synthetic oligonucleotide
cuguaaccgggcccuccgc

SEQ ID NO: 1513801 - RNA, 19 nt, Artificial Sequence
  Description of Artificial Sequence: Synthetic oligonucleotide
uaggccagauucccaccuu

SEQ ID NO: 1513802 - RNA, 19 nt, Artificial Sequence
  Description of Artificial Sequence: Synthetic oligonucleotide
ccauucucgcuccuccgcc

SEQ ID NO: 1513803 - RNA, 19 nt, Artificial Sequence
  Description of Artificial Sequence: Synthetic oligonucleotide
ccagcguucccgcuucugc

SEQ ID NO: 1513804 - RNA, 19 nt, Artificial Sequence
  Description of Artificial Sequence: Synthetic oligonucleotide
cuggcgagggccacaggga

SEQ ID NO: 1513805 - RNA, 19 nt, Artificial Sequence
  Description of Artificial Sequence: Synthetic oligonucleotide
gcgacucuugcauggucgc

SEQ ID NO: 1513806 - RNA, 19 nt, Artificial Sequence
  Description of Artificial Sequence: Synthetic oligonucleotide
cgcagcgacucuugcaugg

SEQ ID NO: 1513807 - RNA, 19 nt, Artificial Sequence
  Description of Artificial Sequence: Synthetic oligonucleotide
cccuagucuggccuuggcc

SEQ ID NO: 1513808 - RNA, 19 nt, Artificial Sequence
  Description of Artificial Sequence: Synthetic oligonucleotide
uggacgcccuaaacuuuua

SEQ ID NO: 1513809 - RNA, 19 nt, Artificial Sequence
  Description of Artificial Sequence: Synthetic oligonucleotide
uccuggaauugggcacucc

SEQ ID NO: 1513810 - RNA, 19 nt, Artificial Sequence
  Description of Artificial Sequence: Synthetic oligonucleotide
cauggucgcuaagcucggg

SEQ ID NO: 1513811 - RNA, 19 nt, Artificial Sequence
  Description of Artificial Sequence: Synthetic oligonucleotide
uaccgcgggccuagcugcc

SEQ ID NO: 1513812 - RNA, 19 nt, Artificial Sequence
  Description of Artificial Sequence: Synthetic oligonucleotide
gugccgcgcgaacugcuug

SEQ ID NO: 1513813 - RNA, 19 nt, Artificial Sequence
  Description of Artificial Sequence: Synthetic oligonucleotide
cagucauggcauggcuuag

SEQ ID NO: 1513814 - RNA, 19 nt, Artificial Sequence
  Description of Artificial Sequence: Synthetic oligonucleotide
cuuuccaucuggagcgagu

SEQ ID NO: 1513815 - RNA, 19 nt, Artificial Sequence
  Description of Artificial Sequence: Synthetic oligonucleotide
cucgcgcuuccuucuucug

SEQ ID NO: 1513816 - RNA, 19 nt, Artificial Sequence
  Description of Artificial Sequence: Synthetic oligonucleotide
ugcugucgccaguucucaa

SEQ ID NO: 1513817 - RNA, 19 nt, Artificial Sequence
  Description of Artificial Sequence: Synthetic oligonucleotide
agguaacaucagcucugaa

SEQ ID NO: 1513818 - RNA, 19 nt, Artificial Sequence
  Description of Artificial Sequence: Synthetic oligonucleotide
gcgagugaguucauuagaa

SEQ ID NO: 1513819 - RNA, 19 nt, Artificial Sequence
  Description of Artificial Sequence: Synthetic oligonucleotide
gcgagggccacagggaggc

SEQ ID NO: 1513820 - RNA, 19 nt, Artificial Sequence
  Description of Artificial Sequence: Synthetic oligonucleotide
cucuugcauggucgcuaag

SEQ ID NO: 1513821 - RNA, 19 nt, Artificial Sequence
  Description of Artificial Sequence: Synthetic oligonucleotide
ccuagucuggccuuggccu

SEQ ID NO: 1513822 - RNA, 19 nt, Artificial Sequence
  Description of Artificial Sequence: Synthetic oligonucleotide
cucccuagucuggccuugg

SEQ ID NO: 1513823 - RNA, 19 nt, Artificial Sequence
  Description of Artificial Sequence: Synthetic oligonucleotide
agaggccauagcagcgucu

SEQ ID NO: 1513824 - RNA, 19 nt, Artificial Sequence
  Description of Artificial Sequence: Synthetic oligonucleotide
cugagauaugcuguucccu

SEQ ID NO: 1513825 - RNA, 19 nt, Artificial Sequence
  Description of Artificial Sequence: Synthetic oligonucleotide
ggaguggcccaaaucuuuc

SEQ ID NO: 1513826 - RNA, 19 nt, Artificial Sequence
  Description of Artificial Sequence: Synthetic oligonucleotide
cugcuuggccgcguaccgc

SEQ ID NO: 1513827 - RNA, 19 nt, Artificial Sequence
  Description of Artificial Sequence: Synthetic oligonucleotide
ggucuccucccucuggaaa

SEQ ID NO: 1513828 - RNA, 19 nt, Artificial Sequence
  Description of Artificial Sequence: Synthetic oligonucleotide
ccagucauggcauggcuua

SEQ ID NO: 1513829 - RNA, 19 nt, Artificial Sequence
  Description of Artificial Sequence: Synthetic oligonucleotide
guguccaggugugaacaaa

SEQ ID NO: 1513830 - RNA, 19 nt, Artificial Sequence
  Description of Artificial Sequence: Synthetic oligonucleotide
gcgaagcugcucuggcgag

SEQ ID NO: 1513831 - RNA, 19 nt, Artificial Sequence
  Description of Artificial Sequence: Synthetic oligonucleotide
ggccccuauucccaucuca

SEQ ID NO: 1513832 - RNA, 19 nt, Artificial Sequence
  Description of Artificial Sequence: Synthetic oligonucleotide
gggcaugcugagaacugug

SEQ ID NO: 1513833 - RNA, 19 nt, Artificial Sequence
  Description of Artificial Sequence: Synthetic oligonucleotide
gucgccaguucucaaucau

SEQ ID NO: 1513834 - RNA, 19 nt, Artificial Sequence
  Description of Artificial Sequence: Synthetic oligonucleotide
gucucgcgcuuccuucuuc

SEQ ID NO: 1513835 - RNA, 19 nt, Artificial Sequence
  Description of Artificial Sequence: Synthetic oligonucleotide
uggagcgagugaguucauu

SEQ ID NO: 1513836 - RNA, 19 nt, Artificial Sequence
  Description of Artificial Sequence: Synthetic oligonucleotide
cccauccccugaagcaucc

SEQ ID NO: 1513837 - RNA, 19 nt, Artificial Sequence
  Description of Artificial Sequence: Synthetic oligonucleotide
uucgcgcgcagcgacucuu

SEQ ID NO: 1513838 - RNA, 19 nt, Artificial Sequence
  Description of Artificial Sequence: Synthetic oligonucleotide
caccccagguauuggggaa

SEQ ID NO: 1513839 - RNA, 19 nt, Artificial Sequence
  Description of Artificial Sequence: Synthetic oligonucleotide
cccaucucaguccgacaag

SEQ ID NO: 1513840 - RNA, 19 nt, Artificial Sequence
  Description of Artificial Sequence: Synthetic oligonucleotide
caccccagaggcggcgccg

SEQ ID NO: 1513841 - RNA, 19 nt, Artificial Sequence
  Description of Artificial Sequence: Synthetic oligonucleotide
gccuagcugccaccgcggg

SEQ ID NO: 1513842 - RNA, 19 nt, Artificial Sequence
  Description of Artificial Sequence: Synthetic oligonucleotide
caccuaggccagauuccca

SEQ ID NO: 1513843 - RNA, 19 nt, Artificial Sequence
  Description of Artificial Sequence: Synthetic oligonucleotide
ggcauggcuuaguguccag

SEQ ID NO: 1513844 - RNA, 19 nt, Artificial Sequence
  Description of Artificial Sequence: Synthetic oligonucleotide
cguaccgcgggccuagcug

SEQ ID NO: 1513845 - RNA, 19 nt, Artificial Sequence
  Description of Artificial Sequence: Synthetic oligonucleotide
uccguuggaguggcccaaa

SEQ ID NO: 1513846 - RNA, 19 nt, Artificial Sequence
  Description of Artificial Sequence: Synthetic oligonucleotide
accccagguauuggggaau

SEQ ID NO: 1513847 - RNA, 19 nt, Artificial Sequence
  Description of Artificial Sequence: Synthetic oligonucleotide
ccuccaacucgcgaagcug

SEQ ID NO: 1513848 - RNA, 19 nt, Artificial Sequence
  Description of Artificial Sequence: Synthetic oligonucleotide
gcauggucgcuaagcucgg

SEQ ID NO: 1513849 - RNA, 19 nt, Artificial Sequence
  Description of Artificial Sequence: Synthetic oligonucleotide
ccaucucaguccgacaaga

SEQ ID NO: 1513850 - RNA, 19 nt, Artificial Sequence
  Description of Artificial Sequence: Synthetic oligonucleotide
cauucucgcuccuccgccu

SEQ ID NO: 1513851 - RNA, 19 nt, Artificial Sequence
  Description of Artificial Sequence: Synthetic oligonucleotide
cuggacgcccuaaacuuuu

SEQ ID NO: 1513852 - RNA, 19 nt, Artificial Sequence
  Description of Artificial Sequence: Synthetic oligonucleotide
cucuggcgagggccacagg

SEQ ID NO: 1513853 - RNA, 19 nt, Artificial Sequence
  Description of Artificial Sequence: Synthetic oligonucleotide
cugcugucgccaguucuca

SEQ ID NO: 1513854 - RNA, 19 nt, Artificial Sequence
  Description of Artificial Sequence: Synthetic oligonucleotide
agcccagcagaggauucuu

SEQ ID NO: 1513855 - RNA, 19 nt, Artificial Sequence
  Description of Artificial Sequence: Synthetic oligonucleotide
ccuagaaagggcugcugcu

SEQ ID NO: 1513856 - RNA, 19 nt, Artificial Sequence
  Description of Artificial Sequence: Synthetic oligonucleotide
gcgggccuagcugccaccg

SEQ ID NO: 1513857 - RNA, 19 nt, Artificial Sequence
  Description of Artificial Sequence: Synthetic oligonucleotide
cggccugcugcuucgcgcg

SEQ ID NO: 1513858 - RNA, 19 nt, Artificial Sequence
  Description of Artificial Sequence: Synthetic oligonucleotide
cucggguaccauucucgcu

SEQ ID NO: 1513859 - RNA, 19 nt, Artificial Sequence
  Description of Artificial Sequence: Synthetic oligonucleotide
gguaacccaggcgcuccug

SEQ ID NO: 1513860 - RNA, 19 nt, Artificial Sequence
  Description of Artificial Sequence: Synthetic oligonucleotide
gcucagcccuagaaagggc

SEQ ID NO: 1513861 - RNA, 19 nt, Artificial Sequence
  Description of Artificial Sequence: Synthetic oligonucleotide
ucccagcguucccgcuucu

SEQ ID NO: 1513862 - RNA, 19 nt, Artificial Sequence
  Description of Artificial Sequence: Synthetic oligonucleotide
gcggucuccucccucugga

SEQ ID NO: 1513863 - RNA, 19 nt, Artificial Sequence
  Description of Artificial Sequence: Synthetic oligonucleotide
ccgacaagaccugggccag

SEQ ID NO: 1513864 - RNA, 19 nt, Artificial Sequence
  Description of Artificial Sequence: Synthetic oligonucleotide
gccccagcggucuccuccc

SEQ ID NO: 1513865 - RNA, 19 nt, Artificial Sequence
  Description of Artificial Sequence: Synthetic oligonucleotide
cagcggucuccucccucug

SEQ ID NO: 1513866 - RNA, 19 nt, Artificial Sequence
  Description of Artificial Sequence: Synthetic oligonucleotide
ccuggaauugggcacuccu

SEQ ID NO: 1513867 - RNA, 19 nt, Artificial Sequence
  Description of Artificial Sequence: Synthetic oligonucleotide
ccauuccccuuucucuguc

SEQ ID NO: 1513868 - RNA, 19 nt, Artificial Sequence
  Description of Artificial Sequence: Synthetic oligonucleotide
cggguaccauucucgcucc

SEQ ID NO: 1513869 - RNA, 19 nt, Artificial Sequence
  Description of Artificial Sequence: Synthetic oligonucleotide
ggcccuccgcuccuuguca

SEQ ID NO: 1513870 - RNA, 19 nt, Artificial Sequence
  Description of Artificial Sequence: Synthetic oligonucleotide
gccaugcacucugagauau

SEQ ID NO: 1513871 - RNA, 19 nt, Artificial Sequence
  Description of Artificial Sequence: Synthetic oligonucleotide
auccuccguuggaguggcc

SEQ ID NO: 1513872 - RNA, 19 nt, Artificial Sequence
  Description of Artificial Sequence: Synthetic oligonucleotide
cagccuguaaccgggcccu

SEQ ID NO: 1513873 - RNA, 19 nt, Artificial Sequence
  Description of Artificial Sequence: Synthetic oligonucleotide
gcuaagcucggguaccauu

SEQ ID NO: 1513874 - RNA, 19 nt, Artificial Sequence
  Description of Artificial Sequence: Synthetic oligonucleotide
gcgcagcgacucuugcaug

SEQ ID NO: 1513875 - RNA, 19 nt, Artificial Sequence
  Description of Artificial Sequence: Synthetic oligonucleotide
ccaagggacccaggaaguc

SEQ ID NO: 1513876 - RNA, 19 nt, Artificial Sequence
  Description of Artificial Sequence: Synthetic oligonucleotide
ccgccuccaacucgcgaag

SEQ ID NO: 1513877 - RNA, 19 nt, Artificial Sequence
  Description of Artificial Sequence: Synthetic oligonucleotide
ggcuuuagcagaggccaua

SEQ ID NO: 1513878 - RNA, 19 nt, Artificial Sequence
  Description of Artificial Sequence: Synthetic oligonucleotide
ccuccguuggaguggccca

SEQ ID NO: 1513879 - RNA, 19 nt, Artificial Sequence
  Description of Artificial Sequence: Synthetic oligonucleotide
gcccuagaaagggcugcug

SEQ ID NO: 1513880 - RNA, 19 nt, Artificial Sequence
  Description of Artificial Sequence: Synthetic oligonucleotide
gcuucgcgcgcagcgacuc

SEQ ID NO: 1513881 - RNA, 19 nt, Artificial Sequence
  Description of Artificial Sequence: Synthetic oligonucleotide
gcugcuucgcgcgcagcga

SEQ ID NO: 1513882 - RNA, 19 nt, Artificial Sequence
  Description of Artificial Sequence: Synthetic oligonucleotide
cuccguuggaguggcccaa

SEQ ID NO: 1513883 - RNA, 19 nt, Artificial Sequence
  Description of Artificial Sequence: Synthetic oligonucleotide
ggacgcccuaaacuuuuau

SEQ ID NO: 1513884 - RNA, 19 nt, Artificial Sequence
  Description of Artificial Sequence: Synthetic oligonucleotide
ccaacucgcgaagcugcuc

SEQ ID NO: 1513885 - RNA, 19 nt, Artificial Sequence
  Description of Artificial Sequence: Synthetic oligonucleotide
gccaagggacccaggaagu

SEQ ID NO: 1513886 - RNA, 19 nt, Artificial Sequence
  Description of Artificial Sequence: Synthetic oligonucleotide
ggcgccgugccgcgcgaac

SEQ ID NO: 1513887 - RNA, 19 nt, Artificial Sequence
  Description of Artificial Sequence: Synthetic oligonucleotide
cuggcacgacgccucgccu

SEQ ID NO: 1513888 - RNA, 19 nt, Artificial Sequence
  Description of Artificial Sequence: Synthetic oligonucleotide
gccgcgcgaacugcuuggc

SEQ ID NO: 1513889 - RNA, 19 nt, Artificial Sequence
  Description of Artificial Sequence: Synthetic oligonucleotide
ccauccccugaagcauccc

SEQ ID NO: 1513890 - RNA, 19 nt, Artificial Sequence
  Description of Artificial Sequence: Synthetic oligonucleotide
gcgucucgcgcuuccuucu

SEQ ID NO: 1513891 - RNA, 19 nt, Artificial Sequence
  Description of Artificial Sequence: Synthetic oligonucleotide
accgcgggcucagcagguu

SEQ ID NO: 1513892 - RNA, 19 nt, Artificial Sequence
  Description of Artificial Sequence: Synthetic oligonucleotide
ccgcgggcucagcagguuc

SEQ ID NO: 1513893 - RNA, 19 nt, Artificial Sequence
  Description of Artificial Sequence: Synthetic oligonucleotide
gcccagccugcucaaaguu

SEQ ID NO: 1513894 - RNA, 19 nt, Artificial Sequence
  Description of Artificial Sequence: Synthetic oligonucleotide
caccgcgggcucagcaggu

SEQ ID NO: 1513895 - RNA, 19 nt, Artificial Sequence
  Description of Artificial Sequence: Synthetic oligonucleotide
ccgcguaccgcgggccuag

SEQ ID NO: 1513896 - RNA, 19 nt, Artificial Sequence
  Description of Artificial Sequence: Synthetic oligonucleotide
ccccuuucucugucccuga

SEQ ID NO: 1513897 - RNA, 19 nt, Artificial Sequence
  Description of Artificial Sequence: Synthetic oligonucleotide
cuucgcgcgcagcgacucu

SEQ ID NO: 1513898 - RNA, 19 nt, Artificial Sequence
  Description of Artificial Sequence: Synthetic oligonucleotide
cccagcguucccgcuucug

SEQ ID NO: 1513899 - RNA, 19 nt, Artificial Sequence
  Description of Artificial Sequence: Synthetic oligonucleotide
ggagaggcgccugccugcu

SEQ ID NO: 1513900 - RNA, 19 nt, Artificial Sequence
  Description of Artificial Sequence: Synthetic oligonucleotide
cgcgaacugcuuggccgcg

SEQ ID NO: 1513901 - RNA, 19 nt, Artificial Sequence
  Description of Artificial Sequence: Synthetic oligonucleotide
cgcgcagcgacucuugcau

SEQ ID NO: 1513902 - RNA, 19 nt, Artificial Sequence
  Description of Artificial Sequence: Synthetic oligonucleotide
cguugcugcuugucuaggu

SEQ ID NO: 1513903 - RNA, 19 nt, Artificial Sequence
  Description of Artificial Sequence: Synthetic oligonucleotide
gcuggacgcccuaaacuuu

SEQ ID NO: 1513904 - RNA, 19 nt, Artificial Sequence
  Description of Artificial Sequence: Synthetic oligonucleotide
cgcgggccuagcugccacc

SEQ ID NO: 1513905 - RNA, 19 nt, Artificial Sequence
  Description of Artificial Sequence: Synthetic oligonucleotide
cagcgucucgcgcuuccuu

SEQ ID NO: 1513906 - RNA, 19 nt, Artificial Sequence
  Description of Artificial Sequence: Synthetic oligonucleotide
cgggccuagcugccaccgc

SEQ ID NO: 1513907 - RNA, 19 nt, Artificial Sequence
  Description of Artificial Sequence: Synthetic oligonucleotide
cuggagcgagugaguucau

SEQ ID NO: 1513908 - RNA, 19 nt, Artificial Sequence
  Description of Artificial Sequence: Synthetic oligonucleotide
gagaggcgccugccugcuu

SEQ ID NO: 1513909 - RNA, 19 nt, Artificial Sequence
  Description of Artificial Sequence: Synthetic oligonucleotide
cccuggcacgacgccucgc

SEQ ID NO: 1513910 - RNA, 19 nt, Artificial Sequence
  Description of Artificial Sequence: Synthetic oligonucleotide
gcguaccgcgggccuagcu

SEQ ID NO: 1513911 - RNA, 19 nt, Artificial Sequence
  Description of Artificial Sequence: Synthetic oligonucleotide
ggccgcguaccgcgggccu

SEQ ID NO: 1513912 - RNA, 19 nt, Artificial Sequence
  Description of Artificial Sequence: Synthetic oligonucleotide
gggcuuuagcagaggccau

SEQ ID NO: 1513913 - RNA, 19 nt, Artificial Sequence
  Description of Artificial Sequence: Synthetic oligonucleotide
cgcgggcucagcagguucu

SEQ ID NO: 1513914 - RNA, 19 nt, Artificial Sequence
  Description of Artificial Sequence: Synthetic oligonucleotide
gcagucuguuuggcuguau

SEQ ID NO: 1513915 - RNA, 19 nt, Artificial Sequence
  Description of Artificial Sequence: Synthetic oligonucleotide
gcgaacugcuuggccgcgu

SEQ ID NO: 1513916 - RNA, 19 nt, Artificial Sequence
  Description of Artificial Sequence: Synthetic oligonucleotide
gcgccgugccgcgcgaacu

SEQ ID NO: 1513917 - RNA, 19 nt, Artificial Sequence
  Description of Artificial Sequence: Synthetic oligonucleotide
gccgcguaccgcgggccua

SEQ ID NO: 1513918 - RNA, 19 nt, Artificial Sequence
  Description of Artificial Sequence: Synthetic oligonucleotide
ccccugguaauuggcuaau

SEQ ID NO: 1513919 - RNA, 19 nt, Artificial Sequence
  Description of Artificial Sequence: Synthetic oligonucleotide
cgacucuugcauggucgcu

SEQ ID NO: 1513920 - RNA, 19 nt, Artificial Sequence
  Description of Artificial Sequence: Synthetic oligonucleotide
cgcguaccgcgggccuagc

SEQ ID NO: 1513921 - RNA, 19 nt, Artificial Sequence
  Description of Artificial Sequence: Synthetic oligonucleotide
cccucucaugcagucuguu

SEQ ID NO: 1513922 - RNA, 19 nt, Artificial Sequence
  Description of Artificial Sequence: Synthetic oligonucleotide
cgucucgcgcuuccuucuu

SEQ ID NO: 1513923 - RNA, 19 nt, Artificial Sequence
  Description of Artificial Sequence: Synthetic oligonucleotide
ugauauuggaugcuguggg

SEQ ID NO: 1513924 - RNA, 19 nt, Artificial Sequence
  Description of Artificial Sequence: Synthetic oligonucleotide
aagguaguggcauccacac

SEQ ID NO: 1513925 - RNA, 19 nt, Artificial Sequence
  Description of Artificial Sequence: Synthetic oligonucleotide
ucuaaguaagccauuccag

SEQ ID NO: 1513926 - RNA, 19 nt, Artificial Sequence
  Description of Artificial Sequence: Synthetic oligonucleotide
aaagaugggagucagggua

SEQ ID NO: 1513927 - RNA, 19 nt, Artificial Sequence
  Description of Artificial Sequence: Synthetic oligonucleotide
uaggagaaaaggaucuugg

SEQ ID NO: 1513928 - RNA, 19 nt, Artificial Sequence
  Description of Artificial Sequence: Synthetic oligonucleotide
uguugaaauccucagcuga

SEQ ID NO: 1513929 - RNA, 19 nt, Artificial Sequence
  Description of Artificial Sequence: Synthetic oligonucleotide
uccacuugacauuuguagg

SEQ ID NO: 1513930 - RNA, 19 nt, Artificial Sequence
  Description of Artificial Sequence: Synthetic oligonucleotide
cugaaguauaggaagguag

SEQ ID NO: 1513931 - RNA, 19 nt, Artificial Sequence
  Description of Artificial Sequence: Synthetic oligonucleotide
cuaaguaagccauuccagc

SEQ ID NO: 1513932 - RNA, 19 nt, Artificial Sequence
  Description of Artificial Sequence: Synthetic oligonucleotide
aaguaagccauuccagcag

SEQ ID NO: 1513933 - RNA, 19 nt, Artificial Sequence
  Description of Artificial Sequence: Synthetic oligonucleotide
ugaaguauaggaagguagu

SEQ ID NO: 1513934 - RNA, 19 nt, Artificial Sequence
  Description of Artificial Sequence: Synthetic oligonucleotide
uguggugauagccagcacu

SEQ ID NO: 1513935 - RNA, 19 nt, Artificial Sequence
  Description of Artificial Sequence: Synthetic oligonucleotide
cuuggggagaauuaccacc

SEQ ID NO: 1513936 - RNA, 19 nt, Artificial Sequence
  Description of Artificial Sequence: Synthetic oligonucleotide
aucuaaguaagccauucca

SEQ ID NO: 1513937 - RNA, 19 nt, Artificial Sequence
  Description of Artificial Sequence: Synthetic oligonucleotide
aagauguagaaggugauaa

SEQ ID NO: 1513938 - RNA, 19 nt, Artificial Sequence
  Description of Artificial Sequence: Synthetic oligonucleotide
auuaccaccagugaguaga

SEQ ID NO: 1513939 - RNA, 19 nt, Artificial Sequence
  Description of Artificial Sequence: Synthetic oligonucleotide
gguaguggcauccacacag

SEQ ID NO: 1513940 - RNA, 19 nt, Artificial Sequence
  Description of Artificial Sequence: Synthetic oligonucleotide
aauggucgcagcaucagag

SEQ ID NO: 1513941 - RNA, 19 nt, Artificial Sequence
  Description of Artificial Sequence: Synthetic oligonucleotide
aaauccucagcugaaagau

SEQ ID NO: 1513942 - RNA, 19 nt, Artificial Sequence
  Description of Artificial Sequence: Synthetic oligonucleotide
ugagguucgccucgggucg

SEQ ID NO: 1513943 - RNA, 19 nt, Artificial Sequence
  Description of Artificial Sequence: Synthetic oligonucleotide
ugucaucuaaguaagccau

SEQ ID NO: 1513944 - RNA, 19 nt, Artificial Sequence
  Description of Artificial Sequence: Synthetic oligonucleotide
gauacacgcuccuucagug

SEQ ID NO: 1513945 - RNA, 19 nt, Artificial Sequence
  Description of Artificial Sequence: Synthetic oligonucleotide
cuaagggaagcuuccagag

SEQ ID NO: 1513946 - RNA, 19 nt, Artificial Sequence
  Description of Artificial Sequence: Synthetic oligonucleotide
augagcggugcaaagaagc

SEQ ID NO: 1513947 - RNA, 19 nt, Artificial Sequence
  Description of Artificial Sequence: Synthetic oligonucleotide
acacguagaaacuccuccg

SEQ ID NO: 1513948 - RNA, 19 nt, Artificial Sequence
  Description of Artificial Sequence: Synthetic oligonucleotide
uuggggagaauuaccacca

SEQ ID NO: 1513949 - RNA, 19 nt, Artificial Sequence
  Description of Artificial Sequence: Synthetic oligonucleotide
auauuggaugcugugggcg

SEQ ID NO: 1513950 - RNA, 19 nt, Artificial Sequence
  Description of Artificial Sequence: Synthetic oligonucleotide
acucuaugcccucacgccg

SEQ ID NO: 1513951 - RNA, 19 nt, Artificial Sequence
  Description of Artificial Sequence: Synthetic oligonucleotide
ucuaggugaccaaaggcaa

SEQ ID NO: 1513952 - RNA, 19 nt, Artificial Sequence
  Description of Artificial Sequence: Synthetic oligonucleotide
acggaggaaggccacauag

SEQ ID NO: 1513953 - RNA, 19 nt, Artificial Sequence
  Description of Artificial Sequence: Synthetic oligonucleotide
augucaucuaaguaagcca

SEQ ID NO: 1513954 - RNA, 19 nt, Artificial Sequence
  Description of Artificial Sequence: Synthetic oligonucleotide
agccgauauccucauauag

SEQ ID NO: 1513955 - RNA, 19 nt, Artificial Sequence
  Description of Artificial Sequence: Synthetic oligonucleotide
ugacauuuguaggagaaaa

SEQ ID NO: 1513956 - RNA, 19 nt, Artificial Sequence
  Description of Artificial Sequence: Synthetic oligonucleotide
gauauuggaugcugugggc

SEQ ID NO: 1513957 - RNA, 19 nt, Artificial Sequence
  Description of Artificial Sequence: Synthetic oligonucleotide
gacucuaugcccucacgcc

SEQ ID NO: 1513958 - RNA, 19 nt, Artificial Sequence
  Description of Artificial Sequence: Synthetic oligonucleotide
uggccauagauguugaaau

SEQ ID NO: 1513959 - RNA, 19 nt, Artificial Sequence
  Description of Artificial Sequence: Synthetic oligonucleotide
guaucagucugcuuucccc

SEQ ID NO: 1513960 - RNA, 19 nt, Artificial Sequence
  Description of Artificial Sequence: Synthetic oligonucleotide
ucuuggcccgagcuaaggg

SEQ ID NO: 1513961 - RNA, 19 nt, Artificial Sequence
  Description of Artificial Sequence: Synthetic oligonucleotide
acaaacaccaagauguaga

SEQ ID NO: 1513962 - RNA, 19 nt, Artificial Sequence
  Description of Artificial Sequence: Synthetic oligonucleotide
guagaaacuccuccgugag

SEQ ID NO: 1513963 - RNA, 19 nt, Artificial Sequence
  Description of Artificial Sequence: Synthetic oligonucleotide
ucacgcucagcucaauggc

SEQ ID NO: 1513964 - RNA, 19 nt, Artificial Sequence
  Description of Artificial Sequence: Synthetic oligonucleotide
aagaugggagucaggguac

SEQ ID NO: 1513965 - RNA, 19 nt, Artificial Sequence
  Description of Artificial Sequence: Synthetic oligonucleotide
agaauuaccaccagugagu

SEQ ID NO: 1513966 - RNA, 19 nt, Artificial Sequence
  Description of Artificial Sequence: Synthetic oligonucleotide
auagaugagcggugcaaag

SEQ ID NO: 1513967 - RNA, 19 nt, Artificial Sequence
  Description of Artificial Sequence: Synthetic oligonucleotide
uauaggaagguaguggcau

SEQ ID NO: 1513968 - RNA, 19 nt, Artificial Sequence
  Description of Artificial Sequence: Synthetic oligonucleotide
gacauuuguaggagaaaag

SEQ ID NO: 1513969 - RNA, 19 nt, Artificial Sequence
  Description of Artificial Sequence: Synthetic oligonucleotide
agcaaguugaguguggcca

SEQ ID NO: 1513970 - RNA, 19 nt, Artificial Sequence
  Description of Artificial Sequence: Synthetic oligonucleotide
gaaguauaggaagguagug

SEQ ID NO: 1513971 - RNA, 19 nt, Artificial Sequence
  Description of Artificial Sequence: Synthetic oligonucleotide
agugaguagaccaggaaga

SEQ ID NO: 1513972 - RNA, 19 nt, Artificial Sequence
  Description of Artificial Sequence: Synthetic oligonucleotide
aauggcuagcaggaagaag

SEQ ID NO: 1513973 - RNA, 19 nt, Artificial Sequence
  Description of Artificial Sequence: Synthetic oligonucleotide
gugacacggaucuuggccc

SEQ ID NO: 1513974 - RNA, 19 nt, Artificial Sequence
  Description of Artificial Sequence: Synthetic oligonucleotide
uggucgcagcaucagaggc

SEQ ID NO: 1513975 - RNA, 19 nt, Artificial Sequence
  Description of Artificial Sequence: Synthetic oligonucleotide
acucgcuugaugcuggacu

SEQ ID NO: 1513976 - RNA, 19 nt, Artificial Sequence
  Description of Artificial Sequence: Synthetic oligonucleotide
auaggaagguaguggcauc

SEQ ID NO: 1513977 - RNA, 19 nt, Artificial Sequence
  Description of Artificial Sequence: Synthetic oligonucleotide
aagcaagagcugaccagcc

SEQ ID NO: 1513978 - RNA, 19 nt, Artificial Sequence
  Description of Artificial Sequence: Synthetic oligonucleotide
ggugacacggaucuuggcc

SEQ ID NO: 1513979 - RNA, 19 nt, Artificial Sequence
  Description of Artificial Sequence: Synthetic oligonucleotide
agaugagcggugcaaagaa

SEQ ID NO: 1513980 - RNA, 19 nt, Artificial Sequence
  Description of Artificial Sequence: Synthetic oligonucleotide
accaagauguagaagguga

SEQ ID NO: 1513981 - RNA, 19 nt, Artificial Sequence
  Description of Artificial Sequence: Synthetic oligonucleotide
auacacgcuccuucagugg

SEQ ID NO: 1513982 - RNA, 19 nt, Artificial Sequence
  Description of Artificial Sequence: Synthetic oligonucleotide
aguaagccauuccagcaga

SEQ ID NO: 1513983 - RNA, 19 nt, Artificial Sequence
  Description of Artificial Sequence: Synthetic oligonucleotide
gaacuggcgaccaccgugg

SEQ ID NO: 1513984 - RNA, 19 nt, Artificial Sequence
  Description of Artificial Sequence: Synthetic oligonucleotide
caucuaaguaagccauucc

SEQ ID NO: 1513985 - RNA, 19 nt, Artificial Sequence
  Description of Artificial Sequence: Synthetic oligonucleotide
agcuaagggaagcuuccag

SEQ ID NO: 1513986 - RNA, 19 nt, Artificial Sequence
  Description of Artificial Sequence: Synthetic oligonucleotide
cacguggacaccagcagag

SEQ ID NO: 1513987 - RNA, 19 nt, Artificial Sequence
  Description of Artificial Sequence: Synthetic oligonucleotide
ugagcggugcaaagaagcu

SEQ ID NO: 1513988 - RNA, 19 nt, Artificial Sequence
  Description of Artificial Sequence: Synthetic oligonucleotide
aguacuguggugauagcca

SEQ ID NO: 1513989 - RNA, 19 nt, Artificial Sequence
  Description of Artificial Sequence: Synthetic oligonucleotide
aguaccggacccuggagga

SEQ ID NO: 1513990 - RNA, 19 nt, Artificial Sequence
  Description of Artificial Sequence: Synthetic oligonucleotide
auggucgcagcaucagagg

SEQ ID NO: 1513991 - RNA, 19 nt, Artificial Sequence
  Description of Artificial Sequence: Synthetic oligonucleotide
gcuagcaggaagaagcggg

SEQ ID NO: 1513992 - RNA, 19 nt, Artificial Sequence
  Description of Artificial Sequence: Synthetic oligonucleotide
agagcugaccagccagaac

SEQ ID NO: 1513993 - RNA, 19 nt, Artificial Sequence
  Description of Artificial Sequence: Synthetic oligonucleotide
ucgaacugugugcuggagu

SEQ ID NO: 1513994 - RNA, 19 nt, Artificial Sequence
  Description of Artificial Sequence: Synthetic oligonucleotide
ugacacggaucuuggcccg

SEQ ID NO: 1513995 - RNA, 19 nt, Artificial Sequence
  Description of Artificial Sequence: Synthetic oligonucleotide
aagaagcgggugaucuccc

SEQ ID NO: 1513996 - RNA, 19 nt, Artificial Sequence
  Description of Artificial Sequence: Synthetic oligonucleotide
aucagaggcgcugacuguc

SEQ ID NO: 1513997 - RNA, 19 nt, Artificial Sequence
  Description of Artificial Sequence: Synthetic oligonucleotide
ggagggacuggccacgugg

SEQ ID NO: 1513998 - RNA, 19 nt, Artificial Sequence
  Description of Artificial Sequence: Synthetic oligonucleotide
ucuuggggagaauuaccac

SEQ ID NO: 1513999 - RNA, 19 nt, Artificial Sequence
  Description of Artificial Sequence: Synthetic oligonucleotide
caguacuguggugauagcc

SEQ ID NO: 1514000 - RNA, 19 nt, Artificial Sequence
  Description of Artificial Sequence: Synthetic oligonucleotide
gaucacgcucagcucaaug

SEQ ID NO: 1514001 - RNA, 19 nt, Artificial Sequence
  Description of Artificial Sequence: Synthetic oligonucleotide
aagcgggugaucucccaca

SEQ ID NO: 1514002 - RNA, 19 nt, Artificial Sequence
  Description of Artificial Sequence: Synthetic oligonucleotide
acguagaaacuccuccgug

SEQ ID NO: 1514003 - RNA, 19 nt, Artificial Sequence
  Description of Artificial Sequence: Synthetic oligonucleotide
aaaaggaucuugggcucug

SEQ ID NO: 1514004 - RNA, 19 nt, Artificial Sequence
  Description of Artificial Sequence: Synthetic oligonucleotide
cacugcguaggguuguggc

SEQ ID NO: 1514005 - RNA, 19 nt, Artificial Sequence
  Description of Artificial Sequence: Synthetic oligonucleotide
agggauacacgcuccuuca

SEQ ID NO: 1514006 - RNA, 19 nt, Artificial Sequence
  Description of Artificial Sequence: Synthetic oligonucleotide
gaagguaguggcauccaca

SEQ ID NO: 1514007 - RNA, 19 nt, Artificial Sequence
  Description of Artificial Sequence: Synthetic oligonucleotide
uuggcccgagcuaagggaa

SEQ ID NO: 1514008 - RNA, 19 nt, Artificial Sequence
  Description of Artificial Sequence: Synthetic oligonucleotide
ucgggucggucgcaggagg

SEQ ID NO: 1514009 - RNA, 19 nt, Artificial Sequence
  Description of Artificial Sequence: Synthetic oligonucleotide
uccagcagagucgaacugu

SEQ ID NO: 1514010 - RNA, 19 nt, Artificial Sequence
  Description of Artificial Sequence: Synthetic oligonucleotide
acgcugugcucccacuugg

SEQ ID NO: 1514011 - RNA, 19 nt, Artificial Sequence
  Description of Artificial Sequence: Synthetic oligonucleotide
aggugacacggaucuuggc

SEQ ID NO: 1514012 - RNA, 19 nt, Artificial Sequence
  Description of Artificial Sequence: Synthetic oligonucleotide
ucuugucagcaauggucgc

SEQ ID NO: 1514013 - RNA, 19 nt, Artificial Sequence
  Description of Artificial Sequence: Synthetic oligonucleotide
aauccucagcugaaagaug

SEQ ID NO: 1514014 - RNA, 19 nt, Artificial Sequence
  Description of Artificial Sequence: Synthetic oligonucleotide
gaugagcggugcaaagaag

SEQ ID NO: 1514015 - RNA, 19 nt, Artificial Sequence
  Description of Artificial Sequence: Synthetic oligonucleotide
guucgccaguuucagguug

SEQ ID NO: 1514016 - RNA, 19 nt, Artificial Sequence
  Description of Artificial Sequence: Synthetic oligonucleotide
accguggccauagauguug

SEQ ID NO: 1514017 - RNA, 19 nt, Artificial Sequence
  Description of Artificial Sequence: Synthetic oligonucleotide
ugacugaguaggccagaga

SEQ ID NO: 1514018 - RNA, 19 nt, Artificial Sequence
  Description of Artificial Sequence: Synthetic oligonucleotide
acggaucuuggcccgagcu

SEQ ID NO: 1514019 - RNA, 19 nt, Artificial Sequence
  Description of Artificial Sequence: Synthetic oligonucleotide
uucgccaguuucagguugu

SEQ ID NO: 1514020 - RNA, 19 nt, Artificial Sequence
  Description of Artificial Sequence: Synthetic oligonucleotide
uuaccaccagugaguagac

SEQ ID NO: 1514021 - RNA, 19 nt, Artificial Sequence
  Description of Artificial Sequence: Synthetic oligonucleotide
caaacaccaagauguagaa

SEQ ID NO: 1514022 - RNA, 19 nt, Artificial Sequence
  Description of Artificial Sequence: Synthetic oligonucleotide
ggagcgucgcgcaagagcc

SEQ ID NO: 1514023 - RNA, 19 nt, Artificial Sequence
  Description of Artificial Sequence: Synthetic oligonucleotide
uauccucauauagcagcag

SEQ ID NO: 1514024 - RNA, 19 nt, Artificial Sequence
  Description of Artificial Sequence: Synthetic oligonucleotide
gaagcgggugaucucccac

SEQ ID NO: 1514025 - RNA, 19 nt, Artificial Sequence
  Description of Artificial Sequence: Synthetic oligonucleotide
cagggauacacgcuccuuc

SEQ ID NO: 1514026 - RNA, 19 nt, Artificial Sequence
  Description of Artificial Sequence: Synthetic oligonucleotide
agcgucgcgcaagagccgc

SEQ ID NO: 1514027 - RNA, 19 nt, Artificial Sequence
  Description of Artificial Sequence: Synthetic oligonucleotide
auacacguagaaacuccuc

SEQ ID NO: 1514028 - RNA, 19 nt, Artificial Sequence
  Description of Artificial Sequence: Synthetic oligonucleotide
ucagaggcgcugacuguca

SEQ ID NO: 1514029 - RNA, 19 nt, Artificial Sequence
  Description of Artificial Sequence: Synthetic oligonucleotide
gcucacugauauuggaugc

SEQ ID NO: 1514030 - RNA, 19 nt, Artificial Sequence
  Description of Artificial Sequence: Synthetic oligonucleotide
ccauaugucuucacaggcc

SEQ ID NO: 1514031 - RNA, 19 nt, Artificial Sequence
  Description of Artificial Sequence: Synthetic oligonucleotide
ugggaaugagcagcaggag

SEQ ID NO: 1514032 - RNA, 19 nt, Artificial Sequence
  Description of Artificial Sequence: Synthetic oligonucleotide
ugcguaggguuguggcagg

SEQ ID NO: 1514033 - RNA, 19 nt, Artificial Sequence
  Description of Artificial Sequence: Synthetic oligonucleotide
cugcguaggguuguggcag

SEQ ID NO: 1514034 - RNA, 19 nt, Artificial Sequence
  Description of Artificial Sequence: Synthetic oligonucleotide
auauagcagcagcaggcau

SEQ ID NO: 1514035 - RNA, 19 nt, Artificial Sequence
  Description of Artificial Sequence: Synthetic oligonucleotide
ucuaugcccucacgccgag

SEQ ID NO: 1514036 - RNA, 19 nt, Artificial Sequence
  Description of Artificial Sequence: Synthetic oligonucleotide
aucccaccggcaguggccc

SEQ ID NO: 1514037 - RNA, 19 nt, Artificial Sequence
  Description of Artificial Sequence: Synthetic oligonucleotide
uggggagaauuaccaccag

SEQ ID NO: 1514038 - RNA, 19 nt, Artificial Sequence
  Description of Artificial Sequence: Synthetic oligonucleotide
agcgggugaucucccacag

SEQ ID NO: 1514039 - RNA, 19 nt, Artificial Sequence
  Description of Artificial Sequence: Synthetic oligonucleotide
uccccugggugacugagua

SEQ ID NO: 1514040 - RNA, 19 nt, Artificial Sequence
  Description of Artificial Sequence: Synthetic oligonucleotide
cuuggcccgagcuaaggga

SEQ ID NO: 1514041 - RNA, 19 nt, Artificial Sequence
  Description of Artificial Sequence: Synthetic oligonucleotide
gucuuggggagaauuacca

SEQ ID NO: 1514042 - RNA, 19 nt, Artificial Sequence
  Description of Artificial Sequence: Synthetic oligonucleotide
ccgauauccucauauagca

SEQ ID NO: 1514043 - RNA, 19 nt, Artificial Sequence
  Description of Artificial Sequence: Synthetic oligonucleotide
gaauuaccaccagugagua

SEQ ID NO: 1514044 - RNA, 19 nt, Artificial Sequence
  Description of Artificial Sequence: Synthetic oligonucleotide
agcugaaguauaggaaggu

SEQ ID NO: 1514045 - RNA, 19 nt, Artificial Sequence
  Description of Artificial Sequence: Synthetic oligonucleotide
agcaagagcugaccagcca

SEQ ID NO: 1514046 - RNA, 19 nt, Artificial Sequence
  Description of Artificial Sequence: Synthetic oligonucleotide
uggaggcaaugucaucuaa

SEQ ID NO: 1514047 - RNA, 19 nt, Artificial Sequence
  Description of Artificial Sequence: Synthetic oligonucleotide
cccuguagacucuaugccc

SEQ ID NO: 1514048 - RNA, 19 nt, Artificial Sequence
  Description of Artificial Sequence: Synthetic oligonucleotide
gagcggugcaaagaagcug

SEQ ID NO: 1514049 - RNA, 19 nt, Artificial Sequence
  Description of Artificial Sequence: Synthetic oligonucleotide
gcuaagggaagcuuccaga

SEQ ID NO: 1514050 - RNA, 19 nt, Artificial Sequence
  Description of Artificial Sequence: Synthetic oligonucleotide
gccgauauccucauauagc

SEQ ID NO: 1514051 - RNA, 19 nt, Artificial Sequence
  Description of Artificial Sequence: Synthetic oligonucleotide
cagcaaguugaguguggcc

SEQ ID NO: 1514052 - RNA, 19 nt, Artificial Sequence
  Description of Artificial Sequence: Synthetic oligonucleotide
augccuaccagggcuacca

SEQ ID NO: 1514053 - RNA, 19 nt, Artificial Sequence
  Description of Artificial Sequence: Synthetic oligonucleotide
gcaaguugaguguggccag

SEQ ID NO: 1514054 - RNA, 19 nt, Artificial Sequence
  Description of Artificial Sequence: Synthetic oligonucleotide
ucccuugcaggagggacug

SEQ ID NO: 1514055 - RNA, 19 nt, Artificial Sequence
  Description of Artificial Sequence: Synthetic oligonucleotide
agcugaaagaugggaguca

SEQ ID NO: 1514056 - RNA, 19 nt, Artificial Sequence
  Description of Artificial Sequence: Synthetic oligonucleotide
uaccggacccuggaggagc

SEQ ID NO: 1514057 - RNA, 19 nt, Artificial Sequence
  Description of Artificial Sequence: Synthetic oligonucleotide
agagucgaacugugugcug

SEQ ID NO: 1514058 - RNA, 19 nt, Artificial Sequence
  Description of Artificial Sequence: Synthetic oligonucleotide
gugguucgccaguuucagg

SEQ ID NO: 1514059 - RNA, 19 nt, Artificial Sequence
  Description of Artificial Sequence: Synthetic oligonucleotide
caaguugaguguggccagg

SEQ ID NO: 1514060 - RNA, 19 nt, Artificial Sequence
  Description of Artificial Sequence: Synthetic oligonucleotide
gaugggagucaggguacag

SEQ ID NO: 1514061 - RNA, 19 nt, Artificial Sequence
  Description of Artificial Sequence: Synthetic oligonucleotide
uguuggcugagagccgggc

SEQ ID NO: 1514062 - RNA, 19 nt, Artificial Sequence
  Description of Artificial Sequence: Synthetic oligonucleotide
acugaguaggccagagaca

SEQ ID NO: 1514063 - RNA, 19 nt, Artificial Sequence
  Description of Artificial Sequence: Synthetic oligonucleotide
agucgaacugugugcugga

SEQ ID NO: 1514064 - RNA, 19 nt, Artificial Sequence
  Description of Artificial Sequence: Synthetic oligonucleotide
aagagcugaccagccagaa

SEQ ID NO: 1514065 - RNA, 19 nt, Artificial Sequence
  Description of Artificial Sequence: Synthetic oligonucleotide
caccaagauguagaaggug

SEQ ID NO: 1514066 - RNA, 19 nt, Artificial Sequence
  Description of Artificial Sequence: Synthetic oligonucleotide
ucgcgcaagagccgcggcu

SEQ ID NO: 1514067 - RNA, 19 nt, Artificial Sequence
  Description of Artificial Sequence: Synthetic oligonucleotide
uggcccgagcuaagggaag

SEQ ID NO: 1514068 - RNA, 19 nt, Artificial Sequence
  Description of Artificial Sequence: Synthetic oligonucleotide
gggagcgucgcgcaagagc

SEQ ID NO: 1514069 - RNA, 19 nt, Artificial Sequence
  Description of Artificial Sequence: Synthetic oligonucleotide
gcccuguagacucuaugcc

SEQ ID NO: 1514070 - RNA, 19 nt, Artificial Sequence
  Description of Artificial Sequence: Synthetic oligonucleotide
ggucgcagcaucagaggcg

SEQ ID NO: 1514071 - RNA, 19 nt, Artificial Sequence
  Description of Artificial Sequence: Synthetic oligonucleotide
cacgcugugcucccacuug

SEQ ID NO: 1514072 - RNA, 19 nt, Artificial Sequence
  Description of Artificial Sequence: Synthetic oligonucleotide
agaagcgggugaucuccca

SEQ ID NO: 1514073 - RNA, 19 nt, Artificial Sequence
  Description of Artificial Sequence: Synthetic oligonucleotide
aguccccugggugacugag

SEQ ID NO: 1514074 - RNA, 19 nt, Artificial Sequence
  Description of Artificial Sequence: Synthetic oligonucleotide
ggcaaugccuaccagggcu

SEQ ID NO: 1514075 - RNA, 19 nt, Artificial Sequence
  Description of Artificial Sequence: Synthetic oligonucleotide
cucuaugcccucacgccga

SEQ ID NO: 1514076 - RNA, 19 nt, Artificial Sequence
  Description of Artificial Sequence: Synthetic oligonucleotide
cauagaugagcggugcaaa

SEQ ID NO: 1514077 - RNA, 19 nt, Artificial Sequence
  Description of Artificial Sequence: Synthetic oligonucleotide
gcagagugugguucgccag

SEQ ID NO: 1514078 - RNA, 19 nt, Artificial Sequence
  Description of Artificial Sequence: Synthetic oligonucleotide
auuggaugcugugggcggu

SEQ ID NO: 1514079 - RNA, 19 nt, Artificial Sequence
  Description of Artificial Sequence: Synthetic oligonucleotide
ggagccgauauccucauau

SEQ ID NO: 1514080 - RNA, 19 nt, Artificial Sequence
  Description of Artificial Sequence: Synthetic oligonucleotide
uccccgguaggcugcgaga

SEQ ID NO: 1514081 - RNA, 19 nt, Artificial Sequence
  Description of Artificial Sequence: Synthetic oligonucleotide
agagcacauugggaaugag

SEQ ID NO: 1514082 - RNA, 19 nt, Artificial Sequence
  Description of Artificial Sequence: Synthetic oligonucleotide
guaggcugcgagacccggg

SEQ ID NO: 1514083 - RNA, 19 nt, Artificial Sequence
  Description of Artificial Sequence: Synthetic oligonucleotide
ugcccucacgccgagccac

SEQ ID NO: 1514084 - RNA, 19 nt, Artificial Sequence
  Description of Artificial Sequence: Synthetic oligonucleotide
gagccgauauccucauaua

SEQ ID NO: 1514085 - RNA, 19 nt, Artificial Sequence
  Description of Artificial Sequence: Synthetic oligonucleotide
cuccccgguaggcugcgag

SEQ ID NO: 1514086 - RNA, 19 nt, Artificial Sequence
  Description of Artificial Sequence: Synthetic oligonucleotide
cugcauacacguagaaacu

SEQ ID NO: 1514087 - RNA, 19 nt, Artificial Sequence
  Description of Artificial Sequence: Synthetic oligonucleotide
uccagcgcucacugucugu

SEQ ID NO: 1514088 - RNA, 19 nt, Artificial Sequence
  Description of Artificial Sequence: Synthetic oligonucleotide
ccuguuggcugagagccgg

SEQ ID NO: 1514089 - RNA, 19 nt, Artificial Sequence
  Description of Artificial Sequence: Synthetic oligonucleotide
cauugggaaugagcagcag

SEQ ID NO: 1514090 - RNA, 19 nt, Artificial Sequence
  Description of Artificial Sequence: Synthetic oligonucleotide
ucgcuugaugcuggacuug

SEQ ID NO: 1514091 - RNA, 19 nt, Artificial Sequence
  Description of Artificial Sequence: Synthetic oligonucleotide
cagcucccuugcaggaggg

SEQ ID NO: 1514092 - RNA, 19 nt, Artificial Sequence
  Description of Artificial Sequence: Synthetic oligonucleotide
cacauagaugagcggugca

SEQ ID NO: 1514093 - RNA, 19 nt, Artificial Sequence
  Description of Artificial Sequence: Synthetic oligonucleotide
agacccggggagcgucgcg

SEQ ID NO: 1514094 - RNA, 19 nt, Artificial Sequence
  Description of Artificial Sequence: Synthetic oligonucleotide
ccgagcuaagggaagcuuc

SEQ ID NO: 1514095 - RNA, 19 nt, Artificial Sequence
  Description of Artificial Sequence: Synthetic oligonucleotide
gacccggggagcgucgcgc

SEQ ID NO: 1514096 - RNA, 19 nt, Artificial Sequence
  Description of Artificial Sequence: Synthetic oligonucleotide
gugggcgguggccacgcug

SEQ ID NO: 1514097 - RNA, 19 nt, Artificial Sequence
  Description of Artificial Sequence: Synthetic oligonucleotide
aguuucagguugugcccuu

SEQ ID NO: 1514098 - RNA, 19 nt, Artificial Sequence
  Description of Artificial Sequence: Synthetic oligonucleotide
gcaauggucgcagcaucag

SEQ ID NO: 1514099 - RNA, 19 nt, Artificial Sequence
  Description of Artificial Sequence: Synthetic oligonucleotide
gagacaguacuguggugau

SEQ ID NO: 1514100 - RNA, 19 nt, Artificial Sequence
  Description of Artificial Sequence: Synthetic oligonucleotide
gucgaacugugugcuggag

SEQ ID NO: 1514101 - RNA, 19 nt, Artificial Sequence
  Description of Artificial Sequence: Synthetic oligonucleotide
ugccuaccagggcuaccac

SEQ ID NO: 1514102 - RNA, 19 nt, Artificial Sequence
  Description of Artificial Sequence: Synthetic oligonucleotide
uugguggggcucacugaua

SEQ ID NO: 1514103 - RNA, 19 nt, Artificial Sequence
  Description of Artificial Sequence: Synthetic oligonucleotide
ggaucuuggcccgagcuaa

SEQ ID NO: 1514104 - RNA, 19 nt, Artificial Sequence
  Description of Artificial Sequence: Synthetic oligonucleotide
gagccacugcguaggguug

SEQ ID NO: 1514105 - RNA, 19 nt, Artificial Sequence
  Description of Artificial Sequence: Synthetic oligonucleotide
cugcgagacccggggagcg

SEQ ID NO: 1514106 - RNA, 19 nt, Artificial Sequence
  Description of Artificial Sequence: Synthetic oligonucleotide
ggucggucgcaggaggccg

SEQ ID NO: 1514107 - RNA, 19 nt, Artificial Sequence
  Description of Artificial Sequence: Synthetic oligonucleotide
gcaaagaagcugaaguaua

SEQ ID NO: 1514108 - RNA, 19 nt, Artificial Sequence
  Description of Artificial Sequence: Synthetic oligonucleotide
gguaggcugcgagacccgg

SEQ ID NO: 1514109 - RNA, 19 nt, Artificial Sequence
  Description of Artificial Sequence: Synthetic oligonucleotide
gagguucgccucgggucgg

SEQ ID NO: 1514110 - RNA, 19 nt, Artificial Sequence
  Description of Artificial Sequence: Synthetic oligonucleotide
cacucaggcauugauggcu

SEQ ID NO: 1514111 - RNA, 19 nt, Artificial Sequence
  Description of Artificial Sequence: Synthetic oligonucleotide
cgauauccucauauagcag

SEQ ID NO: 1514112 - RNA, 19 nt, Artificial Sequence
  Description of Artificial Sequence: Synthetic oligonucleotide
gagcuaagggaagcuucca

SEQ ID NO: 1514113 - RNA, 19 nt, Artificial Sequence
  Description of Artificial Sequence: Synthetic oligonucleotide
cagcagagugugguucgcc

SEQ ID NO: 1514114 - RNA, 19 nt, Artificial Sequence
  Description of Artificial Sequence: Synthetic oligonucleotide
gcuccgacuccccgguagg

SEQ ID NO: 1514115 - RNA, 19 nt, Artificial Sequence
  Description of Artificial Sequence: Synthetic oligonucleotide
gagcgucgcgcaagagccg

SEQ ID NO: 1514116 - RNA, 19 nt, Artificial Sequence
  Description of Artificial Sequence: Synthetic oligonucleotide
cacggaucuuggcccgagc

SEQ ID NO: 1514117 - RNA, 19 nt, Artificial Sequence
  Description of Artificial Sequence: Synthetic oligonucleotide
ccgguaggcugcgagaccc

SEQ ID NO: 1514118 - RNA, 19 nt, Artificial Sequence
  Description of Artificial Sequence: Synthetic oligonucleotide
ggauacacgcuccuucagu

SEQ ID NO: 1514119 - RNA, 19 nt, Artificial Sequence
  Description of Artificial Sequence: Synthetic oligonucleotide
cacugauauuggaugcugu

SEQ ID NO: 1514120 - RNA, 19 nt, Artificial Sequence
  Description of Artificial Sequence: Synthetic oligonucleotide
guuguggcaggugcauguc

SEQ ID NO: 1514121 - RNA, 19 nt, Artificial Sequence
  Description of Artificial Sequence: Synthetic oligonucleotide
gggcauggaggcaauguca

SEQ ID NO: 1514122 - RNA, 19 nt, Artificial Sequence
  Description of Artificial Sequence: Synthetic oligonucleotide
cuaccacaaacaccaagau

SEQ ID NO: 1514123 - RNA, 19 nt, Artificial Sequence
  Description of Artificial Sequence: Synthetic oligonucleotide
cacguagaaacuccuccgu

SEQ ID NO: 1514124 - RNA, 19 nt, Artificial Sequence
  Description of Artificial Sequence: Synthetic oligonucleotide
gucggucgcaggaggccgg

SEQ ID NO: 1514125 - RNA, 19 nt, Artificial Sequence
  Description of Artificial Sequence: Synthetic oligonucleotide
caaugccuaccagggcuac

SEQ ID NO: 1514126 - RNA, 19 nt, Artificial Sequence
  Description of Artificial Sequence: Synthetic oligonucleotide
gacuccccgguaggcugcg

SEQ ID NO: 1514127 - RNA, 19 nt, Artificial Sequence
  Description of Artificial Sequence: Synthetic oligonucleotide
guaccggacccuggaggag

SEQ ID NO: 1514128 - RNA, 19 nt, Artificial Sequence
  Description of Artificial Sequence: Synthetic oligonucleotide
augaucacgcucagcucaa

SEQ ID NO: 1514129 - RNA, 19 nt, Artificial Sequence
  Description of Artificial Sequence: Synthetic oligonucleotide
acucaggcauugauggcuu

SEQ ID NO: 1514130 - RNA, 19 nt, Artificial Sequence
  Description of Artificial Sequence: Synthetic oligonucleotide
ucgccaguuucagguugug

SEQ ID NO: 1514131 - RNA, 19 nt, Artificial Sequence
  Description of Artificial Sequence: Synthetic oligonucleotide
cugugggcgguggccacgc

SEQ ID NO: 1514132 - RNA, 19 nt, Artificial Sequence
  Description of Artificial Sequence: Synthetic oligonucleotide
cagagucgaacugugugcu

SEQ ID NO: 1514133 - RNA, 19 nt, Artificial Sequence
  Description of Artificial Sequence: Synthetic oligonucleotide
gucgcgcaagagccgcggc

SEQ ID NO: 1514134 - RNA, 19 nt, Artificial Sequence
  Description of Artificial Sequence: Synthetic oligonucleotide
ccacucaggcauugauggc

SEQ ID NO: 1514135 - RNA, 19 nt, Artificial Sequence
  Description of Artificial Sequence: Synthetic oligonucleotide
gggacuggccacguggaca

SEQ ID NO: 1514136 - RNA, 19 nt, Artificial Sequence
  Description of Artificial Sequence: Synthetic oligonucleotide
cucacugauauuggaugcu

SEQ ID NO: 1514137 - RNA, 19 nt, Artificial Sequence
  Description of Artificial Sequence: Synthetic oligonucleotide
caggaagaagcgggugauc

SEQ ID NO: 1514138 - RNA, 19 nt, Artificial Sequence
  Description of Artificial Sequence: Synthetic oligonucleotide
cucgcuugaugcuggacuu

SEQ ID NO: 1514139 - RNA, 19 nt, Artificial Sequence
  Description of Artificial Sequence: Synthetic oligonucleotide
caggccgcggggcuccgac

SEQ ID NO: 1514140 - RNA, 19 nt, Artificial Sequence
  Description of Artificial Sequence: Synthetic oligonucleotide
gagacccggggagcgucgc

SEQ ID NO: 1514141 - RNA, 19 nt, Artificial Sequence
  Description of Artificial Sequence: Synthetic oligonucleotide
gaggccggacgccgccagc

SEQ ID NO: 1514142 - RNA, 19 nt, Artificial Sequence
  Description of Artificial Sequence: Synthetic oligonucleotide
cacucgcuugaugcuggac

SEQ ID NO: 1514143 - RNA, 19 nt, Artificial Sequence
  Description of Artificial Sequence: Synthetic oligonucleotide
gccggacgccgccagcgcg

SEQ ID NO: 1514144 - RNA, 19 nt, Artificial Sequence
  Description of Artificial Sequence: Synthetic oligonucleotide
caauggcuagcaggaagaa

SEQ ID NO: 1514145 - RNA, 19 nt, Artificial Sequence
  Description of Artificial Sequence: Synthetic oligonucleotide
gcgggugaucucccacagg

SEQ ID NO: 1514146 - RNA, 19 nt, Artificial Sequence
  Description of Artificial Sequence: Synthetic oligonucleotide
ugaucacgcucagcucaau

SEQ ID NO: 1514147 - RNA, 19 nt, Artificial Sequence
  Description of Artificial Sequence: Synthetic oligonucleotide
ccaguaccggacccuggag

SEQ ID NO: 1514148 - RNA, 19 nt, Artificial Sequence
  Description of Artificial Sequence: Synthetic oligonucleotide
acccggggagcgucgcgca

SEQ ID NO: 1514149 - RNA, 19 nt, Artificial Sequence
  Description of Artificial Sequence: Synthetic oligonucleotide
agacaguacuguggugaua

SEQ ID NO: 1514150 - RNA, 19 nt, Artificial Sequence
  Description of Artificial Sequence: Synthetic oligonucleotide
caagagccgcggcugaggu

SEQ ID NO: 1514151 - RNA, 19 nt, Artificial Sequence
  Description of Artificial Sequence: Synthetic oligonucleotide
gagggcagggauacacgcu

SEQ ID NO: 1514152 - RNA, 19 nt, Artificial Sequence
  Description of Artificial Sequence: Synthetic oligonucleotide
ggcccgagcuaagggaagc

SEQ ID NO: 1514153 - RNA, 19 nt, Artificial Sequence
  Description of Artificial Sequence: Synthetic oligonucleotide
cuaugcccucacgccgagc

SEQ ID NO: 1514154 - RNA, 19 nt, Artificial Sequence
  Description of Artificial Sequence: Synthetic oligonucleotide
ugcgagacccggggagcgu

SEQ ID NO: 1514155 - RNA, 19 nt, Artificial Sequence
  Description of Artificial Sequence: Synthetic oligonucleotide
gcugcgagacccggggagc

SEQ ID NO: 1514156 - RNA, 19 nt, Artificial Sequence
  Description of Artificial Sequence: Synthetic oligonucleotide
ugugggcgguggccacgcu

SEQ ID NO: 1514157 - RNA, 19 nt, Artificial Sequence
  Description of Artificial Sequence: Synthetic oligonucleotide
cacgccgagccacugcgua

SEQ ID NO: 1514158 - RNA, 19 nt, Artificial Sequence
  Description of Artificial Sequence: Synthetic oligonucleotide
aggcgcugacugucauaga

SEQ ID NO: 1514159 - RNA, 19 nt, Artificial Sequence
  Description of Artificial Sequence: Synthetic oligonucleotide
caucagaggcgcugacugu

SEQ ID NO: 1514160 - RNA, 19 nt, Artificial Sequence
  Description of Artificial Sequence: Synthetic oligonucleotide
ucgcagcaucagaggcgcu

SEQ ID NO: 1514161 - RNA, 19 nt, Artificial Sequence
  Description of Artificial Sequence: Synthetic oligonucleotide
aggugcaugucuggcucuu

SEQ ID NO: 1514162 - RNA, 19 nt, Artificial Sequence
  Description of Artificial Sequence: Synthetic oligonucleotide
gagccgcggcugagguucg

SEQ ID NO: 1514163 - RNA, 19 nt, Artificial Sequence
  Description of Artificial Sequence: Synthetic oligonucleotide
gggcagggauacacgcucc

SEQ ID NO: 1514164 - RNA, 19 nt, Artificial Sequence
  Description of Artificial Sequence: Synthetic oligonucleotide
ggcauggaggcaaugucau

SEQ ID NO: 1514165 - RNA, 19 nt, Artificial Sequence
  Description of Artificial Sequence: Synthetic oligonucleotide
ggugacugaguaggccaga

SEQ ID NO: 1514166 - RNA, 19 nt, Artificial Sequence
  Description of Artificial Sequence: Synthetic oligonucleotide
ucccaccggcaguggccca

SEQ ID NO: 1514167 - RNA, 19 nt, Artificial Sequence
  Description of Artificial Sequence: Synthetic oligonucleotide
gucaucuaaguaagccauu

SEQ ID NO: 1514168 - RNA, 19 nt, Artificial Sequence
  Description of Artificial Sequence: Synthetic oligonucleotide
gccucgggucggucgcagg

SEQ ID NO: 1514169 - RNA, 19 nt, Artificial Sequence
  Description of Artificial Sequence: Synthetic oligonucleotide
ccacugcguaggguugugg

SEQ ID NO: 1514170 - RNA, 19 nt, Artificial Sequence
  Description of Artificial Sequence: Synthetic oligonucleotide
gacccuggaggagccgaua

SEQ ID NO: 1514171 - RNA, 19 nt, Artificial Sequence
  Description of Artificial Sequence: Synthetic oligonucleotide
ccccugggugacugaguag

SEQ ID NO: 1514172 - RNA, 19 nt, Artificial Sequence
  Description of Artificial Sequence: Synthetic oligonucleotide
cccuggaggagccgauauc

SEQ ID NO: 1514173 - RNA, 19 nt, Artificial Sequence
  Description of Artificial Sequence: Synthetic oligonucleotide
cagcagagucgaacugugu

SEQ ID NO: 1514174 - RNA, 19 nt, Artificial Sequence
  Description of Artificial Sequence: Synthetic oligonucleotide
gcgcugacugucauagaaa

SEQ ID NO: 1514175 - RNA, 19 nt, Artificial Sequence
  Description of Artificial Sequence: Synthetic oligonucleotide
gagugugguucgccaguuu

SEQ ID NO: 1514176 - RNA, 19 nt, Artificial Sequence
  Description of Artificial Sequence: Synthetic oligonucleotide
ucgccucgggucggucgca

SEQ ID NO: 1514177 - RNA, 19 nt, Artificial Sequence
  Description of Artificial Sequence: Synthetic oligonucleotide
ggcagggauacacgcuccu

SEQ ID NO: 1514178 - RNA, 19 nt, Artificial Sequence
  Description of Artificial Sequence: Synthetic oligonucleotide
ccucgggucggucgcagga

SEQ ID NO: 1514179 - RNA, 19 nt, Artificial Sequence
  Description of Artificial Sequence: Synthetic oligonucleotide
ggugcaugucuggcucuuc

SEQ ID NO: 1514180 - RNA, 19 nt, Artificial Sequence
  Description of Artificial Sequence: Synthetic oligonucleotide
cgacuccccgguaggcugc

SEQ ID NO: 1514181 - RNA, 19 nt, Artificial Sequence
  Description of Artificial Sequence: Synthetic oligonucleotide
agguucgccucgggucggu

SEQ ID NO: 1514182 - RNA, 19 nt, Artificial Sequence
  Description of Artificial Sequence: Synthetic oligonucleotide
gguucgccaguuucagguu

SEQ ID NO: 1514183 - RNA, 19 nt, Artificial Sequence
  Description of Artificial Sequence: Synthetic oligonucleotide
ccggggagcgucgcgcaag

SEQ ID NO: 1514184 - RNA, 19 nt, Artificial Sequence
  Description of Artificial Sequence: Synthetic oligonucleotide
gcgagacccggggagcguc

SEQ ID NO: 1514185 - RNA, 19 nt, Artificial Sequence
  Description of Artificial Sequence: Synthetic oligonucleotide
gcgucgcgcaagagccgcg

SEQ ID NO: 1514186 - RNA, 19 nt, Artificial Sequence
  Description of Artificial Sequence: Synthetic oligonucleotide
ggggagcgucgcgcaagag

SEQ ID NO: 1514187 - RNA, 19 nt, Artificial Sequence
  Description of Artificial Sequence: Synthetic oligonucleotide
caccggcaguggcccagca

SEQ ID NO: 1514188 - RNA, 19 nt, Artificial Sequence
  Description of Artificial Sequence: Synthetic oligonucleotide
acuccccgguaggcugcga

SEQ ID NO: 1514189 - RNA, 19 nt, Artificial Sequence
  Description of Artificial Sequence: Synthetic oligonucleotide
guccccugggugacugagu

SEQ ID NO: 1514190 - RNA, 19 nt, Artificial Sequence
  Description of Artificial Sequence: Synthetic oligonucleotide
gguucgccucgggucgguc

SEQ ID NO: 1514191 - RNA, 19 nt, Artificial Sequence
  Description of Artificial Sequence: Synthetic oligonucleotide
cgcaagagccgcggcugag

SEQ ID NO: 1514192 - RNA, 19 nt, Artificial Sequence
  Description of Artificial Sequence: Synthetic oligonucleotide
ccuccgugagggcagggau

SEQ ID NO: 1514193 - RNA, 19 nt, Artificial Sequence
  Description of Artificial Sequence: Synthetic oligonucleotide
gccacgcugugcucccacu

SEQ ID NO: 1514194 - RNA, 19 nt, Artificial Sequence
  Description of Artificial Sequence: Synthetic oligonucleotide
caccguggccauagauguu

SEQ ID NO: 1514195 - RNA, 19 nt, Artificial Sequence
  Description of Artificial Sequence: Synthetic oligonucleotide
gguggggcucacugauauu

SEQ ID NO: 1514196 - RNA, 19 nt, Artificial Sequence
  Description of Artificial Sequence: Synthetic oligonucleotide
gcggugcaaagaagcugaa

SEQ ID NO: 1514197 - RNA, 19 nt, Artificial Sequence
  Description of Artificial Sequence: Synthetic oligonucleotide
ccggacccuggaggagccg

SEQ ID NO: 1514198 - RNA, 19 nt, Artificial Sequence
  Description of Artificial Sequence: Synthetic oligonucleotide
cguggccauagauguugaa

SEQ ID NO: 1514199 - RNA, 19 nt, Artificial Sequence
  Description of Artificial Sequence: Synthetic oligonucleotide
cccucacgccgagccacug

SEQ ID NO: 1514200 - RNA, 19 nt, Artificial Sequence
  Description of Artificial Sequence: Synthetic oligonucleotide
gcagggauacacgcuccuu

SEQ ID NO: 1514201 - RNA, 19 nt, Artificial Sequence
  Description of Artificial Sequence: Synthetic oligonucleotide
ccguguggcagggcaugga

SEQ ID NO: 1514202 - RNA, 19 nt, Artificial Sequence
  Description of Artificial Sequence: Synthetic oligonucleotide
ccauuccagcagagucgaa

SEQ ID NO: 1514203 - RNA, 19 nt, Artificial Sequence
  Description of Artificial Sequence: Synthetic oligonucleotide
cggggagcgucgcgcaaga

SEQ ID NO: 1514204 - RNA, 19 nt, Artificial Sequence
  Description of Artificial Sequence: Synthetic oligonucleotide
ccacgcugugcucccacuu

SEQ ID NO: 1514205 - RNA, 19 nt, Artificial Sequence
  Description of Artificial Sequence: Synthetic oligonucleotide
cgccucgggucggucgcag

SEQ ID NO: 1514206 - RNA, 19 nt, Artificial Sequence
  Description of Artificial Sequence: Synthetic oligonucleotide
cccgagcuaagggaagcuu

SEQ ID NO: 1514207 - RNA, 19 nt, Artificial Sequence
  Description of Artificial Sequence: Synthetic oligonucleotide
cccggggagcgucgcgcaa

SEQ ID NO: 1514208 - RNA, 19 nt, Artificial Sequence
  Description of Artificial Sequence: Synthetic oligonucleotide
gcccucacgccgagccacu

SEQ ID NO: 1514209 - RNA, 19 nt, Artificial Sequence
  Description of Artificial Sequence: Synthetic oligonucleotide
cgaccaccguggccauaga

SEQ ID NO: 1514210 - RNA, 19 nt, Artificial Sequence
  Description of Artificial Sequence: Synthetic oligonucleotide
ccgugagggcagggauaca

SEQ ID NO: 1514211 - RNA, 19 nt, Artificial Sequence
  Description of Artificial Sequence: Synthetic oligonucleotide
aaauauauaauauauaaua

SEQ ID NO: 1514212 - RNA, 19 nt, Artificial Sequence
  Description of Artificial Sequence: Synthetic oligonucleotide
uauaauauauaauauauaa

SEQ ID NO: 1514213 - RNA, 19 nt, Artificial Sequence
  Description of Artificial Sequence: Synthetic oligonucleotide
uauauaauauauaauauau

SEQ ID NO: 1514214 - RNA, 19 nt, Artificial Sequence
  Description of Artificial Sequence: Synthetic oligonucleotide
acaaaauugggacaugugc

SEQ ID NO: 1514215 - RNA, 19 nt, Artificial Sequence
  Description of Artificial Sequence: Synthetic oligonucleotide
aaucuauuccuucuuaaag

SEQ ID NO: 1514216 - RNA, 19 nt, Artificial Sequence
  Description of Artificial Sequence: Synthetic oligonucleotide
aacacgaucacauucagaa

SEQ ID NO: 1514217 - RNA, 19 nt, Artificial Sequence
  Description of Artificial Sequence: Synthetic oligonucleotide
aaucucauucacaaaagcc

SEQ ID NO: 1514218 - RNA, 19 nt, Artificial Sequence
  Description of Artificial Sequence: Synthetic oligonucleotide
uauauaaugguaauaaaua

SEQ ID NO: 1514219 - RNA, 19 nt, Artificial Sequence
  Description of Artificial Sequence: Synthetic oligonucleotide
uuuacagcgaaacauugcc

SEQ ID NO: 1514220 - RNA, 19 nt, Artificial Sequence
  Description of Artificial Sequence: Synthetic oligonucleotide
aucacuaugucucuuuuac

SEQ ID NO: 1514221 - RNA, 19 nt, Artificial Sequence
  Description of Artificial Sequence: Synthetic oligonucleotide
aacuuaaugaggucuauga

SEQ ID NO: 1514222 - RNA, 19 nt, Artificial Sequence
  Description of Artificial Sequence: Synthetic oligonucleotide
ucauuuaaagacauaccag

SEQ ID NO: 1514223 - RNA, 19 nt, Artificial Sequence
  Description of Artificial Sequence: Synthetic oligonucleotide
ucaugugaaagucagcuug

SEQ ID NO: 1514224 - RNA, 19 nt, Artificial Sequence
  Description of Artificial Sequence: Synthetic oligonucleotide
uauaaugguaauaaauaaa

SEQ ID NO: 1514225 - RNA, 19 nt, Artificial Sequence
  Description of Artificial Sequence: Synthetic oligonucleotide
uauugacuaaaacaccuag

SEQ ID NO: 1514226 - RNA, 19 nt, Artificial Sequence
  Description of Artificial Sequence: Synthetic oligonucleotide
uacagagaaauuaaaagau

SEQ ID NO: 1514227 - RNA, 19 nt, Artificial Sequence
  Description of Artificial Sequence: Synthetic oligonucleotide
aauauauaauauauaauau

SEQ ID NO: 1514228 - RNA, 19 nt, Artificial Sequence
  Description of Artificial Sequence: Synthetic oligonucleotide
aguauuagcaauacaaguc

SEQ ID NO: 1514229 - RNA, 19 nt, Artificial Sequence
  Description of Artificial Sequence: Synthetic oligonucleotide
aggucuaugacuuugcuga

SEQ ID NO: 1514230 - RNA, 19 nt, Artificial Sequence
  Description of Artificial Sequence: Synthetic oligonucleotide
uuuacagguaccauuuggc

SEQ ID NO: 1514231 - RNA, 19 nt, Artificial Sequence
  Description of Artificial Sequence: Synthetic oligonucleotide
cuaugucucuuuuacagcg

SEQ ID NO: 1514232 - RNA, 19 nt, Artificial Sequence
  Description of Artificial Sequence: Synthetic oligonucleotide
acuucucuuguauuggcgc

SEQ ID NO: 1514233 - RNA, 19 nt, Artificial Sequence
  Description of Artificial Sequence: Synthetic oligonucleotide
ucaaguacucuacagggca

SEQ ID NO: 1514234 - RNA, 19 nt, Artificial Sequence
  Description of Artificial Sequence: Synthetic oligonucleotide
aacuuaauacugccuguac

SEQ ID NO: 1514235 - RNA, 19 nt, Artificial Sequence
  Description of Artificial Sequence: Synthetic oligonucleotide
  modified_base (5)..(5): a, c, u, g, unknown or other
aaagnguccaucuucguua

SEQ ID NO: 1514236 - RNA, 19 nt, Artificial Sequence
  Description of Artificial Sequence: Synthetic oligonucleotide
auauauaauauauaauaua

SEQ ID NO: 1514237 - RNA, 19 nt, Artificial Sequence
  Description of Artificial Sequence: Synthetic oligonucleotide
ucuucguuaagucuuugug

SEQ ID NO: 1514238 - RNA, 19 nt, Artificial Sequence
  Description of Artificial Sequence: Synthetic oligonucleotide
cuuccaaauacuugaaggc

SEQ ID NO: 1514239 - RNA, 19 nt, Artificial Sequence
  Description of Artificial Sequence: Synthetic oligonucleotide
cuuaauccucauuacagag

SEQ ID NO: 1514240 - RNA, 19 nt, Artificial Sequence
  Description of Artificial Sequence: Synthetic oligonucleotide
gaaaacgugguguuccccg

SEQ ID NO: 1514241 - RNA, 19 nt, Artificial Sequence
  Description of Artificial Sequence: Synthetic oligonucleotide
ucuauuccuucuuaaagca

SEQ ID NO: 1514242 - RNA, 19 nt, Artificial Sequence
  Description of Artificial Sequence: Synthetic oligonucleotide
aaaggcaaacuuaauacug

SEQ ID NO: 1514243 - RNA, 19 nt, Artificial Sequence
  Description of Artificial Sequence: Synthetic oligonucleotide
acuaugucucuuuuacagc

SEQ ID NO: 1514244 - RNA, 19 nt, Artificial Sequence
  Description of Artificial Sequence: Synthetic oligonucleotide
uucacugggagcacgagug

SEQ ID NO: 1514245 - RNA, 19 nt, Artificial Sequence
  Description of Artificial Sequence: Synthetic oligonucleotide
uccucuaacauaagaaaga

SEQ ID NO: 1514246 - RNA, 19 nt, Artificial Sequence
  Description of Artificial Sequence: Synthetic oligonucleotide
uccgagaaggauuucagug

SEQ ID NO: 1514247 - RNA, 19 nt, Artificial Sequence
  Description of Artificial Sequence: Synthetic oligonucleotide
uugaaguggucacuaagag

SEQ ID NO: 1514248 - RNA, 19 nt, Artificial Sequence
  Description of Artificial Sequence: Synthetic oligonucleotide
uuugauaucgugaggguau

SEQ ID NO: 1514249 - RNA, 19 nt, Artificial Sequence
  Description of Artificial Sequence: Synthetic oligonucleotide
uucguuaagucuuugugcu

SEQ ID NO: 1514250 - RNA, 19 nt, Artificial Sequence
  Description of Artificial Sequence: Synthetic oligonucleotide
caaaagccaaguuugcagg

SEQ ID NO: 1514251 - RNA, 19 nt, Artificial Sequence
  Description of Artificial Sequence: Synthetic oligonucleotide
acugaguauugacuaaaac

SEQ ID NO: 1514252 - RNA, 19 nt, Artificial Sequence
  Description of Artificial Sequence: Synthetic oligonucleotide
guuuacagguaccauuugg

SEQ ID NO: 1514253 - RNA, 19 nt, Artificial Sequence
  Description of Artificial Sequence: Synthetic oligonucleotide
ucuugaaguggucacuaag

SEQ ID NO: 1514254 - RNA, 19 nt, Artificial Sequence
  Description of Artificial Sequence: Synthetic oligonucleotide
ugacauugugaacuuaaug

SEQ ID NO: 1514255 - RNA, 19 nt, Artificial Sequence
  Description of Artificial Sequence: Synthetic oligonucleotide
cucauuuaaagacauacca

SEQ ID NO: 1514256 - RNA, 19 nt, Artificial Sequence
  Description of Artificial Sequence: Synthetic oligonucleotide
cuucguuaagucuuugugc

SEQ ID NO: 1514257 - RNA, 19 nt, Artificial Sequence
  Description of Artificial Sequence: Synthetic oligonucleotide
auaccagugauuuucauua

SEQ ID NO: 1514258 - RNA, 19 nt, Artificial Sequence
  Description of Artificial Sequence: Synthetic oligonucleotide
aaaacacgaucacauucag

SEQ ID NO: 1514259 - RNA, 19 nt, Artificial Sequence
  Description of Artificial Sequence: Synthetic oligonucleotide
uccaugguaaucaaagaaa

SEQ ID NO: 1514260 - RNA, 19 nt, Artificial Sequence
  Description of Artificial Sequence: Synthetic oligonucleotide
aggcaaacuuaauacugcc

SEQ ID NO: 1514261 - RNA, 19 nt, Artificial Sequence
  Description of Artificial Sequence: Synthetic oligonucleotide
agugcgagaauacuucauc

SEQ ID NO: 1514262 - RNA, 19 nt, Artificial Sequence
  Description of Artificial Sequence: Synthetic oligonucleotide
aaagccaaguuugcaggcc

SEQ ID NO: 1514263 - RNA, 19 nt, Artificial Sequence
  Description of Artificial Sequence: Synthetic oligonucleotide
auauauaaugguaauaaau

SEQ ID NO: 1514264 - RNA, 19 nt, Artificial Sequence
  Description of Artificial Sequence: Synthetic oligonucleotide
acagcaaauauacuucucu

SEQ ID NO: 1514265 - RNA, 19 nt, Artificial Sequence
  Description of Artificial Sequence: Synthetic oligonucleotide
aagagugcgagaauacuuc

SEQ ID NO: 1514266 - RNA, 19 nt, Artificial Sequence
  Description of Artificial Sequence: Synthetic oligonucleotide
cuuuggaacgaucuuuugc

SEQ ID NO: 1514267 - RNA, 19 nt, Artificial Sequence
  Description of Artificial Sequence: Synthetic oligonucleotide
guauuagcaauacaaguca

SEQ ID NO: 1514268 - RNA, 19 nt, Artificial Sequence
  Description of Artificial Sequence: Synthetic oligonucleotide
uugccaugcauggagaagg

SEQ ID NO: 1514269 - RNA, 19 nt, Artificial Sequence
  Description of Artificial Sequence: Synthetic oligonucleotide
agcacuuaauccucauuac

SEQ ID NO: 1514270 - RNA, 19 nt, Artificial Sequence
  Description of Artificial Sequence: Synthetic oligonucleotide
aaaacgugguguuccccgg

SEQ ID NO: 1514271 - RNA, 19 nt, Artificial Sequence
  Description of Artificial Sequence: Synthetic oligonucleotide
uguugcacaucuucacugg

SEQ ID NO: 1514272 - RNA, 19 nt, Artificial Sequence
  Description of Artificial Sequence: Synthetic oligonucleotide
aacgaucuuuugcagauau

SEQ ID NO: 1514273 - RNA, 19 nt, Artificial Sequence
  Description of Artificial Sequence: Synthetic oligonucleotide
uuuagccuccuucauguga

SEQ ID NO: 1514274 - RNA, 19 nt, Artificial Sequence
  Description of Artificial Sequence: Synthetic oligonucleotide
ugacuaaaacaccuaggca

SEQ ID NO: 1514275 - RNA, 19 nt, Artificial Sequence
  Description of Artificial Sequence: Synthetic oligonucleotide
acucauuuaaagacauacc

SEQ ID NO: 1514276 - RNA, 19 nt, Artificial Sequence
  Description of Artificial Sequence: Synthetic oligonucleotide
cuuacaugaacagugugug

SEQ ID NO: 1514277 - RNA, 19 nt, Artificial Sequence
  Description of Artificial Sequence: Synthetic oligonucleotide
uauccgagaaggauuucag

SEQ ID NO: 1514278 - RNA, 19 nt, Artificial Sequence
  Description of Artificial Sequence: Synthetic oligonucleotide
auugugaacuuaaugaggu

SEQ ID NO: 1514279 - RNA, 19 nt, Artificial Sequence
  Description of Artificial Sequence: Synthetic oligonucleotide
ucuuuuacagcgaaacauu

SEQ ID NO: 1514280 - RNA, 19 nt, Artificial Sequence
  Description of Artificial Sequence: Synthetic oligonucleotide
uuguugcacaucuucacug

SEQ ID NO: 1514281 - RNA, 19 nt, Artificial Sequence
  Description of Artificial Sequence: Synthetic oligonucleotide
uguggcacauuaucuuugg

SEQ ID NO: 1514282 - RNA, 19 nt, Artificial Sequence
  Description of Artificial Sequence: Synthetic oligonucleotide
acuuaauacugccuguacu

SEQ ID NO: 1514283 - RNA, 19 nt, Artificial Sequence
  Description of Artificial Sequence: Synthetic oligonucleotide
gaggguaugcaguauuagc

SEQ ID NO: 1514284 - RNA, 19 nt, Artificial Sequence
  Description of Artificial Sequence: Synthetic oligonucleotide
uucaaguacucuacagggc

SEQ ID NO: 1514285 - RNA, 19 nt, Artificial Sequence
  Description of Artificial Sequence: Synthetic oligonucleotide
augaaaacgugguguuccc

SEQ ID NO: 1514286 - RNA, 19 nt, Artificial Sequence
  Description of Artificial Sequence: Synthetic oligonucleotide
caguguguguuugauaucg

SEQ ID NO: 1514287 - RNA, 19 nt, Artificial Sequence
  Description of Artificial Sequence: Synthetic oligonucleotide
uccaucuucguuaagucuu

SEQ ID NO: 1514288 - RNA, 19 nt, Artificial Sequence
  Description of Artificial Sequence: Synthetic oligonucleotide
ucuuguauuggcgccgugg

SEQ ID NO: 1514289 - RNA, 19 nt, Artificial Sequence
  Description of Artificial Sequence: Synthetic oligonucleotide
uggaguacuaacaguggca

SEQ ID NO: 1514290 - RNA, 19 nt, Artificial Sequence
  Description of Artificial Sequence: Synthetic oligonucleotide
agucuuugugcugagcugg

SEQ ID NO: 1514291 - RNA, 19 nt, Artificial Sequence
  Description of Artificial Sequence: Synthetic oligonucleotide
auugacuaaaacaccuagg

SEQ ID NO: 1514292 - RNA, 19 nt, Artificial Sequence
  Description of Artificial Sequence: Synthetic oligonucleotide
uaucgugaggguaugcagu

SEQ ID NO: 1514293 - RNA, 19 nt, Artificial Sequence
  Description of Artificial Sequence: Synthetic oligonucleotide
auaucgugaggguaugcag

SEQ ID NO: 1514294 - RNA, 19 nt, Artificial Sequence
  Description of Artificial Sequence: Synthetic oligonucleotide
ugacugggacccuacagag

SEQ ID NO: 1514295 - RNA, 19 nt, Artificial Sequence
  Description of Artificial Sequence: Synthetic oligonucleotide
aagucuuugugcugagcug

SEQ ID NO: 1514296 - RNA, 19 nt, Artificial Sequence
  Description of Artificial Sequence: Synthetic oligonucleotide
auaauauauaauauauaau

SEQ ID NO: 1514297 - RNA, 19 nt, Artificial Sequence
  Description of Artificial Sequence: Synthetic oligonucleotide
uaagagugcgagaauacuu

SEQ ID NO: 1514298 - RNA, 19 nt, Artificial Sequence
  Description of Artificial Sequence: Synthetic oligonucleotide
uacagcgaaacauugccau

SEQ ID NO: 1514299 - RNA, 19 nt, Artificial Sequence
  Description of Artificial Sequence: Synthetic oligonucleotide
ugaaguggucacuaagagu

SEQ ID NO: 1514300 - RNA, 19 nt, Artificial Sequence
  Description of Artificial Sequence: Synthetic oligonucleotide
uggcacauuaucuuuggaa

SEQ ID NO: 1514301 - RNA, 19 nt, Artificial Sequence
  Description of Artificial Sequence: Synthetic oligonucleotide
agaauacuucaucacuaug

SEQ ID NO: 1514302 - RNA, 19 nt, Artificial Sequence
  Description of Artificial Sequence: Synthetic oligonucleotide
uucacuuguggcuucccug

SEQ ID NO: 1514303 - RNA, 19 nt, Artificial Sequence
  Description of Artificial Sequence: Synthetic oligonucleotide
acuaagagugcgagaauac

SEQ ID NO: 1514304 - RNA, 19 nt, Artificial Sequence
  Description of Artificial Sequence: Synthetic oligonucleotide
cuugaaguggucacuaaga

SEQ ID NO: 1514305 - RNA, 19 nt, Artificial Sequence
  Description of Artificial Sequence: Synthetic oligonucleotide
aaggccuuaaggacguggg

SEQ ID NO: 1514306 - RNA, 19 nt, Artificial Sequence
  Description of Artificial Sequence: Synthetic oligonucleotide
uguauuggcgccgugguau

SEQ ID NO: 1514307 - RNA, 19 nt, Artificial Sequence
  Description of Artificial Sequence: Synthetic oligonucleotide
uauuagcaauacaagucau

SEQ ID NO: 1514308 - RNA, 19 nt, Artificial Sequence
  Description of Artificial Sequence: Synthetic oligonucleotide
uuacagcgaaacauugcca

SEQ ID NO: 1514309 - RNA, 19 nt, Artificial Sequence
  Description of Artificial Sequence: Synthetic oligonucleotide
aacaaaauugggacaugug

SEQ ID NO: 1514310 - RNA, 19 nt, Artificial Sequence
  Description of Artificial Sequence: Synthetic oligonucleotide
gaguauugacuaaaacacc

SEQ ID NO: 1514311 - RNA, 19 nt, Artificial Sequence
  Description of Artificial Sequence: Synthetic oligonucleotide
ugcgagaauacuucaucac

SEQ ID NO: 1514312 - RNA, 19 nt, Artificial Sequence
  Description of Artificial Sequence: Synthetic oligonucleotide
agaaggauuucagugacau

SEQ ID NO: 1514313 - RNA, 19 nt, Artificial Sequence
  Description of Artificial Sequence: Synthetic oligonucleotide
aaggacgugggaugugaug

SEQ ID NO: 1514314 - RNA, 19 nt, Artificial Sequence
  Description of Artificial Sequence: Synthetic oligonucleotide
gauuucagugacauuguga

SEQ ID NO: 1514315 - RNA, 19 nt, Artificial Sequence
  Description of Artificial Sequence: Synthetic oligonucleotide
acaucauuccaugguaauc

SEQ ID NO: 1514316 - RNA, 19 nt, Artificial Sequence
  Description of Artificial Sequence: Synthetic oligonucleotide
cuugacugggacccuacag

SEQ ID NO: 1514317 - RNA, 19 nt, Artificial Sequence
  Description of Artificial Sequence: Synthetic oligonucleotide
uacaugaacaguguguguu

SEQ ID NO: 1514318 - RNA, 19 nt, Artificial Sequence
  Description of Artificial Sequence: Synthetic oligonucleotide
uguacugaguauugacuaa

SEQ ID NO: 1514319 - RNA, 19 nt, Artificial Sequence
  Description of Artificial Sequence: Synthetic oligonucleotide
ggaagaacucuugaagugg

SEQ ID NO: 1514320 - RNA, 19 nt, Artificial Sequence
  Description of Artificial Sequence: Synthetic oligonucleotide
uagcaauacaagucauggc

SEQ ID NO: 1514321 - RNA, 19 nt, Artificial Sequence
  Description of Artificial Sequence: Synthetic oligonucleotide
uggaacgaucuuuugcaga

SEQ ID NO: 1514322 - RNA, 19 nt, Artificial Sequence
  Description of Artificial Sequence: Synthetic oligonucleotide
acaaucuauuccuucuuaa

SEQ ID NO: 1514323 - RNA, 19 nt, Artificial Sequence
  Description of Artificial Sequence: Synthetic oligonucleotide
uaaaagaucuguggcacau

SEQ ID NO: 1514324 - RNA, 19 nt, Artificial Sequence
  Description of Artificial Sequence: Synthetic oligonucleotide
ugucugucagacuucacuu

SEQ ID NO: 1514325 - RNA, 19 nt, Artificial Sequence
  Description of Artificial Sequence: Synthetic oligonucleotide
gcacauuaucuuuggaacg

SEQ ID NO: 1514326 - RNA, 19 nt, Artificial Sequence
  Description of Artificial Sequence: Synthetic oligonucleotide
uggcacaucauuccauggu

SEQ ID NO: 1514327 - RNA, 19 nt, Artificial Sequence
  Description of Artificial Sequence: Synthetic oligonucleotide
ugcuuaccaaagcacugug

SEQ ID NO: 1514328 - RNA, 19 nt, Artificial Sequence
  Description of Artificial Sequence: Synthetic oligonucleotide
  modified_base (4)..(4): a, c, u, g, unknown or other
aagnguccaucuucguuaa

SEQ ID NO: 1514329 - RNA, 19 nt, Artificial Sequence
  Description of Artificial Sequence: Synthetic oligonucleotide
gguaucauccaaaacacga

SEQ ID NO: 1514330 - RNA, 19 nt, Artificial Sequence
  Description of Artificial Sequence: Synthetic oligonucleotide
ccaugcauggagaaggugc

SEQ ID NO: 1514331 - RNA, 19 nt, Artificial Sequence
  Description of Artificial Sequence: Synthetic oligonucleotide
uuuccuagccuuguccacc

SEQ ID NO: 1514332 - RNA, 19 nt, Artificial Sequence
  Description of Artificial Sequence: Synthetic oligonucleotide
aaaaggcaacccugcucag

SEQ ID NO: 1514333 - RNA, 19 nt, Artificial Sequence
  Description of Artificial Sequence: Synthetic oligonucleotide
aaacuuaauacugccugua

SEQ ID NO: 1514334 - RNA, 19 nt, Artificial Sequence
  Description of Artificial Sequence: Synthetic oligonucleotide
ugaggguaugcaguauuag

SEQ ID NO: 1514335 - RNA, 19 nt, Artificial Sequence
  Description of Artificial Sequence: Synthetic oligonucleotide
accccuuacaugaacagug

SEQ ID NO: 1514336 - RNA, 19 nt, Artificial Sequence
  Description of Artificial Sequence: Synthetic oligonucleotide
auauaauauauaauauaua

SEQ ID NO: 1514337 - RNA, 19 nt, Artificial Sequence
  Description of Artificial Sequence: Synthetic oligonucleotide
gauaucgugaggguaugca

SEQ ID NO: 1514338 - RNA, 19 nt, Artificial Sequence
  Description of Artificial Sequence: Synthetic oligonucleotide
caaguuugcaggccacugc

SEQ ID NO: 1514339 - RNA, 19 nt, Artificial Sequence
  Description of Artificial Sequence: Synthetic oligonucleotide
aaauugggacaugugccca

SEQ ID NO: 1514340 - RNA, 19 nt, Artificial Sequence
  Description of Artificial Sequence: Synthetic oligonucleotide
uggucacuaagagugcgag

SEQ ID NO: 1514341 - RNA, 19 nt, Artificial Sequence
  Description of Artificial Sequence: Synthetic oligonucleotide
ucucacagaucaugucugc

SEQ ID NO: 1514342 - RNA, 19 nt, Artificial Sequence
  Description of Artificial Sequence: Synthetic oligonucleotide
ugaggucuaugacuuugcu

SEQ ID NO: 1514343 - RNA, 19 nt, Artificial Sequence
  Description of Artificial Sequence: Synthetic oligonucleotide
gaacuuaaugaggucuaug

SEQ ID NO: 1514344 - RNA, 19 nt, Artificial Sequence
  Description of Artificial Sequence: Synthetic oligonucleotide
ugguauccgagaaggauuu

SEQ ID NO: 1514345 - RNA, 19 nt, Artificial Sequence
  Description of Artificial Sequence: Synthetic oligonucleotide
uacugaguauugacuaaaa

SEQ ID NO: 1514346 - RNA, 19 nt, Artificial Sequence
  Description of Artificial Sequence: Synthetic oligonucleotide
  modified_base (15)..(15): a, c, u, g, unknown or other
acaccuaggcaaagngucc

SEQ ID NO: 1514347 - RNA, 19 nt, Artificial Sequence
  Description of Artificial Sequence: Synthetic oligonucleotide
augaaagacagaauggcuu

SEQ ID NO: 1514348 - RNA, 19 nt, Artificial Sequence
  Description of Artificial Sequence: Synthetic oligonucleotide
acaccccuuacaugaacag

SEQ ID NO: 1514349 - RNA, 19 nt, Artificial Sequence
  Description of Artificial Sequence: Synthetic oligonucleotide
cuuaccaaagcacugugcu

SEQ ID NO: 1514350 - RNA, 19 nt, Artificial Sequence
  Description of Artificial Sequence: Synthetic oligonucleotide
cagcacuugacugggaccc

SEQ ID NO: 1514351 - RNA, 19 nt, Artificial Sequence
  Description of Artificial Sequence: Synthetic oligonucleotide
ggucaaaggccuuaaggac

SEQ ID NO: 1514352 - RNA, 19 nt, Artificial Sequence
  Description of Artificial Sequence: Synthetic oligonucleotide
ugcucagguaucauccaaa

SEQ ID NO: 1514353 - RNA, 19 nt, Artificial Sequence
  Description of Artificial Sequence: Synthetic oligonucleotide
acaguguguguuugauauc

SEQ ID NO: 1514354 - RNA, 19 nt, Artificial Sequence
  Description of Artificial Sequence: Synthetic oligonucleotide
  modified_base (8)..(8): a, c, u, g, unknown or other
ggcaaagnguccaucuucg

SEQ ID NO: 1514355 - RNA, 19 nt, Artificial Sequence
  Description of Artificial Sequence: Synthetic oligonucleotide
agcacgagugccucccuag

SEQ ID NO: 1514356 - RNA, 19 nt, Artificial Sequence
  Description of Artificial Sequence: Synthetic oligonucleotide
ugggacaugugcccacacc

SEQ ID NO: 1514357 - RNA, 19 nt, Artificial Sequence
  Description of Artificial Sequence: Synthetic oligonucleotide
agagugcgagaauacuuca

SEQ ID NO: 1514358 - RNA, 19 nt, Artificial Sequence
  Description of Artificial Sequence: Synthetic oligonucleotide
gcagcuaaaucucauucac

SEQ ID NO: 1514359 - RNA, 19 nt, Artificial Sequence
  Description of Artificial Sequence: Synthetic oligonucleotide
aucuucguuaagucuuugu

SEQ ID NO: 1514360 - RNA, 19 nt, Artificial Sequence
  Description of Artificial Sequence: Synthetic oligonucleotide
ggaguacuaacaguggcag

SEQ ID NO: 1514361 - RNA, 19 nt, Artificial Sequence
  Description of Artificial Sequence: Synthetic oligonucleotide
agugacauugugaacuuaa

SEQ ID NO: 1514362 - RNA, 19 nt, Artificial Sequence
  Description of Artificial Sequence: Synthetic oligonucleotide
ccaaaacacgaucacauuc

SEQ ID NO: 1514363 - RNA, 19 nt, Artificial Sequence
  Description of Artificial Sequence: Synthetic oligonucleotide
guuaagucuuugugcugag

SEQ ID NO: 1514364 - RNA, 19 nt, Artificial Sequence
  Description of Artificial Sequence: Synthetic oligonucleotide
acagcgaaacauugccaug

SEQ ID NO: 1514365 - RNA, 19 nt, Artificial Sequence
  Description of Artificial Sequence: Synthetic oligonucleotide
cuguggcacauuaucuuug

SEQ ID NO: 1514366 - RNA, 19 nt, Artificial Sequence
  Description of Artificial Sequence: Synthetic oligonucleotide
gugcgagaauacuucauca

SEQ ID NO: 1514367 - RNA, 19 nt, Artificial Sequence
  Description of Artificial Sequence: Synthetic oligonucleotide
uaagcacuuaauccucauu

SEQ ID NO: 1514368 - RNA, 19 nt, Artificial Sequence
  Description of Artificial Sequence: Synthetic oligonucleotide
cacagaucaugucugccuc

SEQ ID NO: 1514369 - RNA, 19 nt, Artificial Sequence
  Description of Artificial Sequence: Synthetic oligonucleotide
ucguuaagucuuugugcug

SEQ ID NO: 1514370 - RNA, 19 nt, Artificial Sequence
  Description of Artificial Sequence: Synthetic oligonucleotide
acuaaaacaccuaggcaaa

SEQ ID NO: 1514371 - RNA, 19 nt, Artificial Sequence
  Description of Artificial Sequence: Synthetic oligonucleotide
ugaaaacgugguguucccc

SEQ ID NO: 1514372 - RNA, 19 nt, Artificial Sequence
  Description of Artificial Sequence: Synthetic oligonucleotide
gacaaucuauuccuucuua

SEQ ID NO: 1514373 - RNA, 19 nt, Artificial Sequence
  Description of Artificial Sequence: Synthetic oligonucleotide
uuaagucuuugugcugagc

SEQ ID NO: 1514374 - RNA, 19 nt, Artificial Sequence
  Description of Artificial Sequence: Synthetic oligonucleotide
uguaagggccucugcuugu

SEQ ID NO: 1514375 - RNA, 19 nt, Artificial Sequence
  Description of Artificial Sequence: Synthetic oligonucleotide
acgagugccucccuagccu

SEQ ID NO: 1514376 - RNA, 19 nt, Artificial Sequence
  Description of Artificial Sequence: Synthetic oligonucleotide
acccugcucagguaucauc

SEQ ID NO: 1514377 - RNA, 19 nt, Artificial Sequence
  Description of Artificial Sequence: Synthetic oligonucleotide
cacauuaucuuuggaacga

SEQ ID NO: 1514378 - RNA, 19 nt, Artificial Sequence
  Description of Artificial Sequence: Synthetic oligonucleotide
cuacuccccagacugccag

SEQ ID NO: 1514379 - RNA, 19 nt, Artificial Sequence
  Description of Artificial Sequence: Synthetic oligonucleotide
uugugaacuuaaugagguc

SEQ ID NO: 1514380 - RNA, 19 nt, Artificial Sequence
  Description of Artificial Sequence: Synthetic oligonucleotide
aaacacgaucacauucaga

SEQ ID NO: 1514381 - RNA, 19 nt, Artificial Sequence
  Description of Artificial Sequence: Synthetic oligonucleotide
auccgagaaggauuucagu

SEQ ID NO: 1514382 - RNA, 19 nt, Artificial Sequence
  Description of Artificial Sequence: Synthetic oligonucleotide
uugauaucgugaggguaug

SEQ ID NO: 1514383 - RNA, 19 nt, Artificial Sequence
  Description of Artificial Sequence: Synthetic oligonucleotide
agguaucauccaaaacacg

SEQ ID NO: 1514384 - RNA, 19 nt, Artificial Sequence
  Description of Artificial Sequence: Synthetic oligonucleotide
gccgugguauccgagaagg

SEQ ID NO: 1514385 - RNA, 19 nt, Artificial Sequence
  Description of Artificial Sequence: Synthetic oligonucleotide
acaugaacaguguguguuu

SEQ ID NO: 1514386 - RNA, 19 nt, Artificial Sequence
  Description of Artificial Sequence: Synthetic oligonucleotide
guauccgagaaggauuuca

SEQ ID NO: 1514387 - RNA, 19 nt, Artificial Sequence
  Description of Artificial Sequence: Synthetic oligonucleotide
auuggcgccgugguauccg

SEQ ID NO: 1514388 - RNA, 19 nt, Artificial Sequence
  Description of Artificial Sequence: Synthetic oligonucleotide
cgaaacauugccauguuca

SEQ ID NO: 1514389 - RNA, 19 nt, Artificial Sequence
  Description of Artificial Sequence: Synthetic oligonucleotide
uggcagcgcaagcauaaaa

SEQ ID NO: 1514390 - RNA, 19 nt, Artificial Sequence
  Description of Artificial Sequence: Synthetic oligonucleotide
acagaucaugucugccucu

SEQ ID NO: 1514391 - RNA, 19 nt, Artificial Sequence
  Description of Artificial Sequence: Synthetic oligonucleotide
gucauguuguggaugguga

SEQ ID NO: 1514392 - RNA, 19 nt, Artificial Sequence
  Description of Artificial Sequence: Synthetic oligonucleotide
cacgagugccucccuagcc

SEQ ID NO: 1514393 - RNA, 19 nt, Artificial Sequence
  Description of Artificial Sequence: Synthetic oligonucleotide
  modified_base (2)..(2): a, c, u, g, unknown or other
gnguccaucuucguuaagu

SEQ ID NO: 1514394 - RNA, 19 nt, Artificial Sequence
  Description of Artificial Sequence: Synthetic oligonucleotide
aucgugaggguaugcagua

SEQ ID NO: 1514395 - RNA, 19 nt, Artificial Sequence
  Description of Artificial Sequence: Synthetic oligonucleotide
  modified_base (11)..(11): a, c, u, g, unknown or other
cuaggcaaagnguccaucu

SEQ ID NO: 1514396 - RNA, 19 nt, Artificial Sequence
  Description of Artificial Sequence: Synthetic oligonucleotide
ugauaucgugaggguaugc

SEQ ID NO: 1514397 - RNA, 19 nt, Artificial Sequence
  Description of Artificial Sequence: Synthetic oligonucleotide
ugaacuuaaugaggucuau

SEQ ID NO: 1514398 - RNA, 19 nt, Artificial Sequence
  Description of Artificial Sequence: Synthetic oligonucleotide
caaauauacuucucuugua

SEQ ID NO: 1514399 - RNA, 19 nt, Artificial Sequence
  Description of Artificial Sequence: Synthetic oligonucleotide
ucccugguuuacagguacc

SEQ ID NO: 1514400 - RNA, 19 nt, Artificial Sequence
  Description of Artificial Sequence: Synthetic oligonucleotide
ucacuaagagugcgagaau

SEQ ID NO: 1514401 - RNA, 19 nt, Artificial Sequence
  Description of Artificial Sequence: Synthetic oligonucleotide
cucuaacauaagaaagaaa

SEQ ID NO: 1514402 - RNA, 19 nt, Artificial Sequence
  Description of Artificial Sequence: Synthetic oligonucleotide
gacauaccagugauuuuca

SEQ ID NO: 1514403 - RNA, 19 nt, Artificial Sequence
  Description of Artificial Sequence: Synthetic oligonucleotide
ggcagcgcaagcauaaaac

SEQ ID NO: 1514404 - RNA, 19 nt, Artificial Sequence
  Description of Artificial Sequence: Synthetic oligonucleotide
cagucaccccgcuacuccc

SEQ ID NO: 1514405 - RNA, 19 nt, Artificial Sequence
  Description of Artificial Sequence: Synthetic oligonucleotide
ggcagcuaaaucucauuca

SEQ ID NO: 1514406 - RNA, 19 nt, Artificial Sequence
  Description of Artificial Sequence: Synthetic oligonucleotide
gcacuuaauccucauuaca

SEQ ID NO: 1514407 - RNA, 19 nt, Artificial Sequence
  Description of Artificial Sequence: Synthetic oligonucleotide
gcccacaccccuuacauga

SEQ ID NO: 1514408 - RNA, 19 nt, Artificial Sequence
  Description of Artificial Sequence: Synthetic oligonucleotide
ucuuugugcugagcugggc

SEQ ID NO: 1514409 - RNA, 19 nt, Artificial Sequence
  Description of Artificial Sequence: Synthetic oligonucleotide
gggcagcuaaaucucauuc

SEQ ID NO: 1514410 - RNA, 19 nt, Artificial Sequence
  Description of Artificial Sequence: Synthetic oligonucleotide
uuguauuggcgccguggua

SEQ ID NO: 1514411 - RNA, 19 nt, Artificial Sequence
  Description of Artificial Sequence: Synthetic oligonucleotide
gacgggacgccugugcuuc

SEQ ID NO: 1514412 - RNA, 19 nt, Artificial Sequence
  Description of Artificial Sequence: Synthetic oligonucleotide
aguacucuacagggcagcu

SEQ ID NO: 1514413 - RNA, 19 nt, Artificial Sequence
  Description of Artificial Sequence: Synthetic oligonucleotide
agucaccccgcuacucccc

SEQ ID NO: 1514414 - RNA, 19 nt, Artificial Sequence
  Description of Artificial Sequence: Synthetic oligonucleotide
cacugggagcacgagugcc

SEQ ID NO: 1514415 - RNA, 19 nt, Artificial Sequence
  Description of Artificial Sequence: Synthetic oligonucleotide
accccgcuacuccccagac

SEQ ID NO: 1514416 - RNA, 19 nt, Artificial Sequence
  Description of Artificial Sequence: Synthetic oligonucleotide
gccuuuccuagccuugucc

SEQ ID NO: 1514417 - RNA, 19 nt, Artificial Sequence
  Description of Artificial Sequence: Synthetic oligonucleotide
gucuuugugcugagcuggg

SEQ ID NO: 1514418 - RNA, 19 nt, Artificial Sequence
  Description of Artificial Sequence: Synthetic oligonucleotide
cacuaagagugcgagaaua

SEQ ID NO: 1514419 - RNA, 19 nt, Artificial Sequence
  Description of Artificial Sequence: Synthetic oligonucleotide
cacuugacugggacccuac

SEQ ID NO: 1514420 - RNA, 19 nt, Artificial Sequence
  Description of Artificial Sequence: Synthetic oligonucleotide
  modified_base (3)..(3): a, c, u, g, unknown or other
agnguccaucuucguuaag

SEQ ID NO: 1514421 - RNA, 19 nt, Artificial Sequence
  Description of Artificial Sequence: Synthetic oligonucleotide
uauuggcgccgugguaucc

SEQ ID NO: 1514422 - RNA, 19 nt, Artificial Sequence
  Description of Artificial Sequence: Synthetic oligonucleotide
ggaggaggucauguugugg

SEQ ID NO: 1514423 - RNA, 19 nt, Artificial Sequence
  Description of Artificial Sequence: Synthetic oligonucleotide
ggaacgaucuuuugcagau

SEQ ID NO: 1514424 - RNA, 19 nt, Artificial Sequence
  Description of Artificial Sequence: Synthetic oligonucleotide
aggccuuaaggacguggga

SEQ ID NO: 1514425 - RNA, 19 nt, Artificial Sequence
  Description of Artificial Sequence: Synthetic oligonucleotide
ugggccacuuuggaagaac

SEQ ID NO: 1514426 - RNA, 19 nt, Artificial Sequence
  Description of Artificial Sequence: Synthetic oligonucleotide
guauugacuaaaacaccua

SEQ ID NO: 1514427 - RNA, 19 nt, Artificial Sequence
  Description of Artificial Sequence: Synthetic oligonucleotide
cuuguauuggcgccguggu

SEQ ID NO: 1514428 - RNA, 19 nt, Artificial Sequence
  Description of Artificial Sequence: Synthetic oligonucleotide
aggaggucauguuguggau

SEQ ID NO: 1514429 - RNA, 19 nt, Artificial Sequence
  Description of Artificial Sequence: Synthetic oligonucleotide
gugaacuuaaugaggucua

SEQ ID NO: 1514430 - RNA, 19 nt, Artificial Sequence
  Description of Artificial Sequence: Synthetic oligonucleotide
gagaaggauuucagugaca

SEQ ID NO: 1514431 - RNA, 19 nt, Artificial Sequence
  Description of Artificial Sequence: Synthetic oligonucleotide
agcgaaacauugccauguu

SEQ ID NO: 1514432 - RNA, 19 nt, Artificial Sequence
  Description of Artificial Sequence: Synthetic oligonucleotide
ccgagaaggauuucaguga

SEQ ID NO: 1514433 - RNA, 19 nt, Artificial Sequence
  Description of Artificial Sequence: Synthetic oligonucleotide
guauuggcgccgugguauc

SEQ ID NO: 1514434 - RNA, 19 nt, Artificial Sequence
  Description of Artificial Sequence: Synthetic oligonucleotide
ggcacugggaaaggguuug

SEQ ID NO: 1514435 - RNA, 19 nt, Artificial Sequence
  Description of Artificial Sequence: Synthetic oligonucleotide
gcuuaccaaagcacugugc

SEQ ID NO: 1514436 - RNA, 19 nt, Artificial Sequence
  Description of Artificial Sequence: Synthetic oligonucleotide
caucacuaugucucuuuua

SEQ ID NO: 1514437 - RNA, 19 nt, Artificial Sequence
  Description of Artificial Sequence: Synthetic oligonucleotide
aagcacugugcuggugaga

SEQ ID NO: 1514438 - RNA, 19 nt, Artificial Sequence
  Description of Artificial Sequence: Synthetic oligonucleotide
gcuaaaucucauucacaaa

SEQ ID NO: 1514439 - RNA, 19 nt, Artificial Sequence
  Description of Artificial Sequence: Synthetic oligonucleotide
ccuucaugugaaagucagc

SEQ ID NO: 1514440 - RNA, 19 nt, Artificial Sequence
  Description of Artificial Sequence: Synthetic oligonucleotide
ccuuacaugaacagugugu

SEQ ID NO: 1514441 - RNA, 19 nt, Artificial Sequence
  Description of Artificial Sequence: Synthetic oligonucleotide
uuggcgccgugguauccga

SEQ ID NO: 1514442 - RNA, 19 nt, Artificial Sequence
  Description of Artificial Sequence: Synthetic oligonucleotide
  modified_base (6)..(6): a, c, u, g, unknown or other
caaagnguccaucuucguu

SEQ ID NO: 1514443 - RNA, 19 nt, Artificial Sequence
  Description of Artificial Sequence: Synthetic oligonucleotide
acgugggaugugaugguga

SEQ ID NO: 1514444 - RNA, 19 nt, Artificial Sequence
  Description of Artificial Sequence: Synthetic oligonucleotide
cagguaccauuuggcaaag

SEQ ID NO: 1514445 - RNA, 19 nt, Artificial Sequence
  Description of Artificial Sequence: Synthetic oligonucleotide
ggugacauaggaggagguc

SEQ ID NO: 1514446 - RNA, 19 nt, Artificial Sequence
  Description of Artificial Sequence: Synthetic oligonucleotide
uggcgccgugguauccgag

SEQ ID NO: 1514447 - RNA, 19 nt, Artificial Sequence
  Description of Artificial Sequence: Synthetic oligonucleotide
gguaugcaguauuagcaau

SEQ ID NO: 1514448 - RNA, 19 nt, Artificial Sequence
  Description of Artificial Sequence: Synthetic oligonucleotide
ggccugaacaaaggcaaac

SEQ ID NO: 1514449 - RNA, 19 nt, Artificial Sequence
  Description of Artificial Sequence: Synthetic oligonucleotide
aguuugcaggccacugcga

SEQ ID NO: 1514450 - RNA, 19 nt, Artificial Sequence
  Description of Artificial Sequence: Synthetic oligonucleotide
cagcgaaacauugccaugu

SEQ ID NO: 1514451 - RNA, 19 nt, Artificial Sequence
  Description of Artificial Sequence: Synthetic oligonucleotide
ggacgccugugcuucuugc

SEQ ID NO: 1514452 - RNA, 19 nt, Artificial Sequence
  Description of Artificial Sequence: Synthetic oligonucleotide
cucuugaaguggucacuaa

SEQ ID NO: 1514453 - RNA, 19 nt, Artificial Sequence
  Description of Artificial Sequence: Synthetic oligonucleotide
cccuuacaugaacagugug

SEQ ID NO: 1514454 - RNA, 19 nt, Artificial Sequence
  Description of Artificial Sequence: Synthetic oligonucleotide
gcgcaagcauaaaacagca

SEQ ID NO: 1514455 - RNA, 19 nt, Artificial Sequence
  Description of Artificial Sequence: Synthetic oligonucleotide
gggagcacgagugccuccc

SEQ ID NO: 1514456 - RNA, 19 nt, Artificial Sequence
  Description of Artificial Sequence: Synthetic oligonucleotide
cgagaauacuucaucacua

SEQ ID NO: 1514457 - RNA, 19 nt, Artificial Sequence
  Description of Artificial Sequence: Synthetic oligonucleotide
cuucacugggagcacgagu

SEQ ID NO: 1514458 - RNA, 19 nt, Artificial Sequence
  Description of Artificial Sequence: Synthetic oligonucleotide
aacccugcucagguaucau

SEQ ID NO: 1514459 - RNA, 19 nt, Artificial Sequence
  Description of Artificial Sequence: Synthetic oligonucleotide
ggucacuaagagugcgaga

SEQ ID NO: 1514460 - RNA, 19 nt, Artificial Sequence
  Description of Artificial Sequence: Synthetic oligonucleotide
ggggacgggacgccugugc

SEQ ID NO: 1514461 - RNA, 19 nt, Artificial Sequence
  Description of Artificial Sequence: Synthetic oligonucleotide
ucgugaggguaugcaguau

SEQ ID NO: 1514462 - RNA, 19 nt, Artificial Sequence
  Description of Artificial Sequence: Synthetic oligonucleotide
cuuguucccaaaggucaaa

SEQ ID NO: 1514463 - RNA, 19 nt, Artificial Sequence
  Description of Artificial Sequence: Synthetic oligonucleotide
cguuaagucuuugugcuga

SEQ ID NO: 1514464 - RNA, 19 nt, Artificial Sequence
  Description of Artificial Sequence: Synthetic oligonucleotide
gcacgagugccucccuagc

SEQ ID NO: 1514465 - RNA, 19 nt, Artificial Sequence
  Description of Artificial Sequence: Synthetic oligonucleotide
gagcacgagugccucccua

SEQ ID NO: 1514466 - RNA, 19 nt, Artificial Sequence
  Description of Artificial Sequence: Synthetic oligonucleotide
agcacuugacugggacccu

SEQ ID NO: 1514467 - RNA, 19 nt, Artificial Sequence
  Description of Artificial Sequence: Synthetic oligonucleotide
ggcaacccugcucagguau

SEQ ID NO: 1514468 - RNA, 19 nt, Artificial Sequence
  Description of Artificial Sequence: Synthetic oligonucleotide
gagugcgagaauacuucau

SEQ ID NO: 1514469 - RNA, 19 nt, Artificial Sequence
  Description of Artificial Sequence: Synthetic oligonucleotide
  modified_base (13)..(13): a, c, u, g, unknown or other
accuaggcaaagnguccau

SEQ ID NO: 1514470 - RNA, 19 nt, Artificial Sequence
  Description of Artificial Sequence: Synthetic oligonucleotide
ccaucccacacucaaugaa

SEQ ID NO: 1514471 - RNA, 19 nt, Artificial Sequence
  Description of Artificial Sequence: Synthetic oligonucleotide
  modified_base (7)..(7): a, c, u, g, unknown or other
gcaaagnguccaucuucgu

SEQ ID NO: 1514472 - RNA, 19 nt, Artificial Sequence
  Description of Artificial Sequence: Synthetic oligonucleotide
gugacauugugaacuuaau

SEQ ID NO: 1514473 - RNA, 19 nt, Artificial Sequence
  Description of Artificial Sequence: Synthetic oligonucleotide
gggacgccugugcuucuug

SEQ ID NO: 1514474 - RNA, 19 nt, Artificial Sequence
  Description of Artificial Sequence: Synthetic oligonucleotide
ggccacuuuggaagaacuc

SEQ ID NO: 1514475 - RNA, 19 nt, Artificial Sequence
  Description of Artificial Sequence: Synthetic oligonucleotide
  modified_base (12)..(12): a, c, u, g, unknown or other
ccuaggcaaagnguccauc

SEQ ID NO: 1514476 - RNA, 19 nt, Artificial Sequence
  Description of Artificial Sequence: Synthetic oligonucleotide
guacucuacagggcagcua

SEQ ID NO: 1514477 - RNA, 19 nt, Artificial Sequence
  Description of Artificial Sequence: Synthetic oligonucleotide
aggcacugggaaaggguuu

SEQ ID NO: 1514478 - RNA, 19 nt, Artificial Sequence
  Description of Artificial Sequence: Synthetic oligonucleotide
agguaccauuuggcaaaga

SEQ ID NO: 1514479 - RNA, 19 nt, Artificial Sequence
  Description of Artificial Sequence: Synthetic oligonucleotide
ggccuuaaggacgugggau

SEQ ID NO: 1514480 - RNA, 19 nt, Artificial Sequence
  Description of Artificial Sequence: Synthetic oligonucleotide
gccucccuagccugcuuac

SEQ ID NO: 1514481 - RNA, 19 nt, Artificial Sequence
  Description of Artificial Sequence: Synthetic oligonucleotide
gccugcuuaccaaagcacu

SEQ ID NO: 1514482 - RNA, 19 nt, Artificial Sequence
  Description of Artificial Sequence: Synthetic oligonucleotide
acucuacagggcagcuaaa

SEQ ID NO: 1514483 - RNA, 19 nt, Artificial Sequence
  Description of Artificial Sequence: Synthetic oligonucleotide
acgggacgccugugcuucu

SEQ ID NO: 1514484 - RNA, 19 nt, Artificial Sequence
  Description of Artificial Sequence: Synthetic oligonucleotide
caccccuuacaugaacagu

SEQ ID NO: 1514485 - RNA, 19 nt, Artificial Sequence
  Description of Artificial Sequence: Synthetic oligonucleotide
ggccuuuccuagccuuguc

SEQ ID NO: 1514486 - RNA, 19 nt, Artificial Sequence
  Description of Artificial Sequence: Synthetic oligonucleotide
ggcagucaccccgcuacuc

SEQ ID NO: 1514487 - RNA, 19 nt, Artificial Sequence
  Description of Artificial Sequence: Synthetic oligonucleotide
gaaggugccugggccacuu

SEQ ID NO: 1514488 - RNA, 19 nt, Artificial Sequence
  Description of Artificial Sequence: Synthetic oligonucleotide
ccaaaggucaaaggccuua

SEQ ID NO: 1514489 - RNA, 19 nt, Artificial Sequence
  Description of Artificial Sequence: Synthetic oligonucleotide
ccucccuagccugcuuacc

SEQ ID NO: 1514490 - RNA, 19 nt, Artificial Sequence
  Description of Artificial Sequence: Synthetic oligonucleotide
ggacuggcagcgcaagcau

SEQ ID NO: 1514491 - RNA, 19 nt, Artificial Sequence
  Description of Artificial Sequence: Synthetic oligonucleotide
cagugacauugugaacuua

SEQ ID NO: 1514492 - RNA, 19 nt, Artificial Sequence
  Description of Artificial Sequence: Synthetic oligonucleotide
gcgccgugguauccgagaa

SEQ ID NO: 1514493 - RNA, 19 nt, Artificial Sequence
  Description of Artificial Sequence: Synthetic oligonucleotide
gggccacuuuggaagaacu

SEQ ID NO: 1514494 - RNA, 19 nt, Artificial Sequence
  Description of Artificial Sequence: Synthetic oligonucleotide
cccuagccugcuuaccaaa

SEQ ID NO: 1514495 - RNA, 19 nt, Artificial Sequence
  Description of Artificial Sequence: Synthetic oligonucleotide
cuggcagcgcaagcauaaa

SEQ ID NO: 1514496 - RNA, 19 nt, Artificial Sequence
  Description of Artificial Sequence: Synthetic oligonucleotide
cgccgugguauccgagaag

SEQ ID NO: 1514497 - RNA, 19 nt, Artificial Sequence
  Description of Artificial Sequence: Synthetic oligonucleotide
ccccuuacaugaacagugu

SEQ ID NO: 1514498 - RNA, 19 nt, Artificial Sequence
  Description of Artificial Sequence: Synthetic oligonucleotide
cugggccacuuuggaagaa

SEQ ID NO: 1514499 - RNA, 19 nt, Artificial Sequence
  Description of Artificial Sequence: Synthetic oligonucleotide
cgcaagcauaaaacagcaa

SEQ ID NO: 1514500 - RNA, 19 nt, Artificial Sequence
  Description of Artificial Sequence: Synthetic oligonucleotide
cccacaccccuuacaugaa

SEQ ID NO: 1514501 - RNA, 19 nt, Artificial Sequence
  Description of Artificial Sequence: Synthetic oligonucleotide
cgugaggguaugcaguauu

SEQ ID NO: 1514502 - RNA, 19 nt, Artificial Sequence
  Description of Artificial Sequence: Synthetic oligonucleotide
ggacgggacgccugugcuu

SEQ ID NO: 1514503 - RNA, 19 nt, Artificial Sequence
  Description of Artificial Sequence: Synthetic oligonucleotide
ccugguuuacagguaccau

SEQ ID NO: 1514504 - RNA, 19 nt, Artificial Sequence
  Description of Artificial Sequence: Synthetic oligonucleotide
ccccgcuacuccccagacu

SEQ ID NO: 1514505 - RNA, 19 nt, Artificial Sequence
  Description of Artificial Sequence: Synthetic oligonucleotide
cgggacgccugugcuucuu

SEQ ID NO: 1514506 - RNA, 19 nt, Artificial Sequence
  Description of Artificial Sequence: Synthetic oligonucleotide
aaaagaugaagucuggccc

SEQ ID NO: 1514507 - RNA, 19 nt, Artificial Sequence
  Description of Artificial Sequence: Synthetic oligonucleotide
uguuuuaugagcaauagcu

SEQ ID NO: 1514508 - RNA, 19 nt, Artificial Sequence
  Description of Artificial Sequence: Synthetic oligonucleotide
ucuacuacaacauuucccg

SEQ ID NO: 1514509 - RNA, 19 nt, Artificial Sequence
  Description of Artificial Sequence: Synthetic oligonucleotide
ugaauauucaucaaagugu

SEQ ID NO: 1514510 - RNA, 19 nt, Artificial Sequence
  Description of Artificial Sequence: Synthetic oligonucleotide
uuaacuugcacauaaaccu

SEQ ID NO: 1514511 - RNA, 19 nt, Artificial Sequence
  Description of Artificial Sequence: Synthetic oligonucleotide
auaaaccucaaagagaugc

SEQ ID NO: 1514512 - RNA, 19 nt, Artificial Sequence
  Description of Artificial Sequence: Synthetic oligonucleotide
ugaacugauagucagauaa

SEQ ID NO: 1514513 - RNA, 19 nt, Artificial Sequence
  Description of Artificial Sequence: Synthetic oligonucleotide
uuuauagaguaccucgucg

SEQ ID NO: 1514514 - RNA, 19 nt, Artificial Sequence
  Description of Artificial Sequence: Synthetic oligonucleotide
aaagcuacaugcuggcacc

SEQ ID NO: 1514515 - RNA, 19 nt, Artificial Sequence
  Description of Artificial Sequence: Synthetic oligonucleotide
aaacaagcaacguugacgu

SEQ ID NO: 1514516 - RNA, 19 nt, Artificial Sequence
  Description of Artificial Sequence: Synthetic oligonucleotide
cauuguaucaaaauuguac

SEQ ID NO: 1514517 - RNA, 19 nt, Artificial Sequence
  Description of Artificial Sequence: Synthetic oligonucleotide
ucuuccaaacuauagaggc

SEQ ID NO: 1514518 - RNA, 19 nt, Artificial Sequence
  Description of Artificial Sequence: Synthetic oligonucleotide
uugcacauaaaccucaaag

SEQ ID NO: 1514519 - RNA, 19 nt, Artificial Sequence
  Description of Artificial Sequence: Synthetic oligonucleotide
uuacauucuauauacaggu

SEQ ID NO: 1514520 - RNA, 19 nt, Artificial Sequence
  Description of Artificial Sequence: Synthetic oligonucleotide
uaaacaagcaacguugacg

SEQ ID NO: 1514521 - RNA, 19 nt, Artificial Sequence
  Description of Artificial Sequence: Synthetic oligonucleotide
uuuuaaccauauuugagcc

SEQ ID NO: 1514522 - RNA, 19 nt, Artificial Sequence
  Description of Artificial Sequence: Synthetic oligonucleotide
aaaaugauucuccugaaua

SEQ ID NO: 1514523 - RNA, 19 nt, Artificial Sequence
  Description of Artificial Sequence: Synthetic oligonucleotide
auuguaucaaaauuguacu

SEQ ID NO: 1514524 - RNA, 19 nt, Artificial Sequence
  Description of Artificial Sequence: Synthetic oligonucleotide
uuuacuaucccaaaagcua

SEQ ID NO: 1514525 - RNA, 19 nt, Artificial Sequence
  Description of Artificial Sequence: Synthetic oligonucleotide
agaggauuuauagaguacc

SEQ ID NO: 1514526 - RNA, 19 nt, Artificial Sequence
  Description of Artificial Sequence: Synthetic oligonucleotide
ggagaauugaaacagacug

SEQ ID NO: 1514527 - RNA, 19 nt, Artificial Sequence
  Description of Artificial Sequence: Synthetic oligonucleotide
uguagcuucuuuauuaacu

SEQ ID NO: 1514528 - RNA, 19 nt, Artificial Sequence
  Description of Artificial Sequence: Synthetic oligonucleotide
uuucacgauaaaaugauuc

SEQ ID NO: 1514529 - RNA, 19 nt, Artificial Sequence
  Description of Artificial Sequence: Synthetic oligonucleotide
cugauagucagauaagagc

SEQ ID NO: 1514530 - RNA, 19 nt, Artificial Sequence
  Description of Artificial Sequence: Synthetic oligonucleotide
uuuagguuugcuauaaaau

SEQ ID NO: 1514531 - RNA, 19 nt, Artificial Sequence
  Description of Artificial Sequence: Synthetic oligonucleotide
aaaauuuccuaugauggug

SEQ ID NO: 1514532 - RNA, 19 nt, Artificial Sequence
  Description of Artificial Sequence: Synthetic oligonucleotide
ugcaaggugacuuagaguu

SEQ ID NO: 1514533 - RNA, 19 nt, Artificial Sequence
  Description of Artificial Sequence: Synthetic oligonucleotide
uauuaacuugcacauaaac

SEQ ID NO: 1514534 - RNA, 19 nt, Artificial Sequence
  Description of Artificial Sequence: Synthetic oligonucleotide
aggacugucuuuuacuugg

SEQ ID NO: 1514535 - RNA, 19 nt, Artificial Sequence
  Description of Artificial Sequence: Synthetic oligonucleotide
aaauuuccuaugauggugg

SEQ ID NO: 1514536 - RNA, 19 nt, Artificial Sequence
  Description of Artificial Sequence: Synthetic oligonucleotide
auugaaccucauuuaagac

SEQ ID NO: 1514537 - RNA, 19 nt, Artificial Sequence
  Description of Artificial Sequence: Synthetic oligonucleotide
aaaugauucuccugaauau

SEQ ID NO: 1514538 - RNA, 19 nt, Artificial Sequence
  Description of Artificial Sequence: Synthetic oligonucleotide
gauugaaccucauuuaaga

SEQ ID NO: 1514539 - RNA, 19 nt, Artificial Sequence
  Description of Artificial Sequence: Synthetic oligonucleotide
uuccaaacuauagaggcgg

SEQ ID NO: 1514540 - RNA, 19 nt, Artificial Sequence
  Description of Artificial Sequence: Synthetic oligonucleotide
uuuccuaugaugguggagc

SEQ ID NO: 1514541 - RNA, 19 nt, Artificial Sequence
  Description of Artificial Sequence: Synthetic oligonucleotide
uuguucaugcgaucgauag

SEQ ID NO: 1514542 - RNA, 19 nt, Artificial Sequence
  Description of Artificial Sequence: Synthetic oligonucleotide
auuacauucuauauacagg

SEQ ID NO: 1514543 - RNA, 19 nt, Artificial Sequence
  Description of Artificial Sequence: Synthetic oligonucleotide
uugaaccucauuuaagaca

SEQ ID NO: 1514544 - RNA, 19 nt, Artificial Sequence
  Description of Artificial Sequence: Synthetic oligonucleotide
aauucgugugccaauuucg

SEQ ID NO: 1514545 - RNA, 19 nt, Artificial Sequence
  Description of Artificial Sequence: Synthetic oligonucleotide
aacugcaugccccaaucuc

SEQ ID NO: 1514546 - RNA, 19 nt, Artificial Sequence
  Description of Artificial Sequence: Synthetic oligonucleotide
uuuaaccauauuugagccg

SEQ ID NO: 1514547 - RNA, 19 nt, Artificial Sequence
  Description of Artificial Sequence: Synthetic oligonucleotide
ucagauaagagcaaaccuu

SEQ ID NO: 1514548 - RNA, 19 nt, Artificial Sequence
  Description of Artificial Sequence: Synthetic oligonucleotide
aagucccgaaaucuuugcc

SEQ ID NO: 1514549 - RNA, 19 nt, Artificial Sequence
  Description of Artificial Sequence: Synthetic oligonucleotide
auggguauacuguaggaag

SEQ ID NO: 1514550 - RNA, 19 nt, Artificial Sequence
  Description of Artificial Sequence: Synthetic oligonucleotide
cuuagaguuaaaagguagc

SEQ ID NO: 1514551 - RNA, 19 nt, Artificial Sequence
  Description of Artificial Sequence: Synthetic oligonucleotide
uuuuagguuugcuauaaaa

SEQ ID NO: 1514552 - RNA, 19 nt, Artificial Sequence
  Description of Artificial Sequence: Synthetic oligonucleotide
aucacuucgcuucacagug

SEQ ID NO: 1514553 - RNA, 19 nt, Artificial Sequence
  Description of Artificial Sequence: Synthetic oligonucleotide
aaaauuguacuuguucaug

SEQ ID NO: 1514554 - RNA, 19 nt, Artificial Sequence
  Description of Artificial Sequence: Synthetic oligonucleotide
uccaauguaauuuauucuu

SEQ ID NO: 1514555 - RNA, 19 nt, Artificial Sequence
  Description of Artificial Sequence: Synthetic oligonucleotide
auuuauagaguaccucguc

SEQ ID NO: 1514556 - RNA, 19 nt, Artificial Sequence
  Description of Artificial Sequence: Synthetic oligonucleotide
ugaacugaauucuaccaca

SEQ ID NO: 1514557 - RNA, 19 nt, Artificial Sequence
  Description of Artificial Sequence: Synthetic oligonucleotide
gauggaagaauucgugugc

SEQ ID NO: 1514558 - RNA, 19 nt, Artificial Sequence
  Description of Artificial Sequence: Synthetic oligonucleotide
uuacuaucccaaaagcuac

SEQ ID NO: 1514559 - RNA, 19 nt, Artificial Sequence
  Description of Artificial Sequence: Synthetic oligonucleotide
agcagaccaaacugcaugc

SEQ ID NO: 1514560 - RNA, 19 nt, Artificial Sequence
  Description of Artificial Sequence: Synthetic oligonucleotide
acgucauugagguaaccac

SEQ ID NO: 1514561 - RNA, 19 nt, Artificial Sequence
  Description of Artificial Sequence: Synthetic oligonucleotide
gagaacacgaucccaacug

SEQ ID NO: 1514562 - RNA, 19 nt, Artificial Sequence
  Description of Artificial Sequence: Synthetic oligonucleotide
uagaguaccucgucgaacc

SEQ ID NO: 1514563 - RNA, 19 nt, Artificial Sequence
  Description of Artificial Sequence: Synthetic oligonucleotide
cucuuguaaacaagcaacg

SEQ ID NO: 1514564 - RNA, 19 nt, Artificial Sequence
  Description of Artificial Sequence: Synthetic oligonucleotide
aucuacuacaacauuuccc

SEQ ID NO: 1514565 - RNA, 19 nt, Artificial Sequence
  Description of Artificial Sequence: Synthetic oligonucleotide
uuauagaguaccucgucga

SEQ ID NO: 1514566 - RNA, 19 nt, Artificial Sequence
  Description of Artificial Sequence: Synthetic oligonucleotide
uuuugcaacauuaggugaa

SEQ ID NO: 1514567 - RNA, 19 nt, Artificial Sequence
  Description of Artificial Sequence: Synthetic oligonucleotide
aacguugacgucauugagg

SEQ ID NO: 1514568 - RNA, 19 nt, Artificial Sequence
  Description of Artificial Sequence: Synthetic oligonucleotide
agcuuuacaacaucucgag

SEQ ID NO: 1514569 - RNA, 19 nt, Artificial Sequence
  Description of Artificial Sequence: Synthetic oligonucleotide
auuuauucuuguuacucga

SEQ ID NO: 1514570 - RNA, 19 nt, Artificial Sequence
  Description of Artificial Sequence: Synthetic oligonucleotide
cauuaggugaacugaauuc

SEQ ID NO: 1514571 - RNA, 19 nt, Artificial Sequence
  Description of Artificial Sequence: Synthetic oligonucleotide
agaauugaaacagacugug

SEQ ID NO: 1514572 - RNA, 19 nt, Artificial Sequence
  Description of Artificial Sequence: Synthetic oligonucleotide
uuacucgauguccuaaagc

SEQ ID NO: 1514573 - RNA, 19 nt, Artificial Sequence
  Description of Artificial Sequence: Synthetic oligonucleotide
gauaagagcaaaccuuuga

SEQ ID NO: 1514574 - RNA, 19 nt, Artificial Sequence
  Description of Artificial Sequence: Synthetic oligonucleotide
aaugcucaagucccgaaau

SEQ ID NO: 1514575 - RNA, 19 nt, Artificial Sequence
  Description of Artificial Sequence: Synthetic oligonucleotide
uccaagaagcuucauucca

SEQ ID NO: 1514576 - RNA, 19 nt, Artificial Sequence
  Description of Artificial Sequence: Synthetic oligonucleotide
ugaauucuaccacaauccu

SEQ ID NO: 1514577 - RNA, 19 nt, Artificial Sequence
  Description of Artificial Sequence: Synthetic oligonucleotide
uucaguauuuggaacacuu

SEQ ID NO: 1514578 - RNA, 19 nt, Artificial Sequence
  Description of Artificial Sequence: Synthetic oligonucleotide
ucauaucccaugaucuuca

SEQ ID NO: 1514579 - RNA, 19 nt, Artificial Sequence
  Description of Artificial Sequence: Synthetic oligonucleotide
ucuucauucccuuuacuau

SEQ ID NO: 1514580 - RNA, 19 nt, Artificial Sequence
  Description of Artificial Sequence: Synthetic oligonucleotide
aacacgaucccaacugaac

SEQ ID NO: 1514581 - RNA, 19 nt, Artificial Sequence
  Description of Artificial Sequence: Synthetic oligonucleotide
auguaauuuauucuuguua

SEQ ID NO: 1514582 - RNA, 19 nt, Artificial Sequence
  Description of Artificial Sequence: Synthetic oligonucleotide
ugguggagcgcaaaugucc

SEQ ID NO: 1514583 - RNA, 19 nt, Artificial Sequence
  Description of Artificial Sequence: Synthetic oligonucleotide
ucuuguuacucgauguccu

SEQ ID NO: 1514584 - RNA, 19 nt, Artificial Sequence
  Description of Artificial Sequence: Synthetic oligonucleotide
auaagagcaaaccuuugaa

SEQ ID NO: 1514585 - RNA, 19 nt, Artificial Sequence
  Description of Artificial Sequence: Synthetic oligonucleotide
uuuacuuggaguguuuuau

SEQ ID NO: 1514586 - RNA, 19 nt, Artificial Sequence
  Description of Artificial Sequence: Synthetic oligonucleotide
uguaaaucuggauguacuc

SEQ ID NO: 1514587 - RNA, 19 nt, Artificial Sequence
  Description of Artificial Sequence: Synthetic oligonucleotide
aguuaaaagguagcugacg

SEQ ID NO: 1514588 - RNA, 19 nt, Artificial Sequence
  Description of Artificial Sequence: Synthetic oligonucleotide
uacuuggaguguuuuauga

SEQ ID NO: 1514589 - RNA, 19 nt, Artificial Sequence
  Description of Artificial Sequence: Synthetic oligonucleotide
aacugauagucagauaaga

SEQ ID NO: 1514590 - RNA, 19 nt, Artificial Sequence
  Description of Artificial Sequence: Synthetic oligonucleotide
ucuucgagucuucauuccc

SEQ ID NO: 1514591 - RNA, 19 nt, Artificial Sequence
  Description of Artificial Sequence: Synthetic oligonucleotide
acagguguaauuccaagaa

SEQ ID NO: 1514592 - RNA, 19 nt, Artificial Sequence
  Description of Artificial Sequence: Synthetic oligonucleotide
caacugaacugauagucag

SEQ ID NO: 1514593 - RNA, 19 nt, Artificial Sequence
  Description of Artificial Sequence: Synthetic oligonucleotide
ugcuguaaaggguuggacu

SEQ ID NO: 1514594 - RNA, 19 nt, Artificial Sequence
  Description of Artificial Sequence: Synthetic oligonucleotide
agaucuacuacaacauuuc

SEQ ID NO: 1514595 - RNA, 19 nt, Artificial Sequence
  Description of Artificial Sequence: Synthetic oligonucleotide
cucuuccaaacuauagagg

SEQ ID NO: 1514596 - RNA, 19 nt, Artificial Sequence
  Description of Artificial Sequence: Synthetic oligonucleotide
uccaguguccccacgauuc

SEQ ID NO: 1514597 - RNA, 19 nt, Artificial Sequence
  Description of Artificial Sequence: Synthetic oligonucleotide
guaaccacauccaaaaguc

SEQ ID NO: 1514598 - RNA, 19 nt, Artificial Sequence
  Description of Artificial Sequence: Synthetic oligonucleotide
uacagguguaauuccaaga

SEQ ID NO: 1514599 - RNA, 19 nt, Artificial Sequence
  Description of Artificial Sequence: Synthetic oligonucleotide
gaucuacuacaacauuucc

SEQ ID NO: 1514600 - RNA, 19 nt, Artificial Sequence
  Description of Artificial Sequence: Synthetic oligonucleotide
cauuuaagacaucuuccag

SEQ ID NO: 1514601 - RNA, 19 nt, Artificial Sequence
  Description of Artificial Sequence: Synthetic oligonucleotide
gagguaaccacauccaaaa

SEQ ID NO: 1514602 - RNA, 19 nt, Artificial Sequence
  Description of Artificial Sequence: Synthetic oligonucleotide
uguggcucuuguaaacaag

SEQ ID NO: 1514603 - RNA, 19 nt, Artificial Sequence
  Description of Artificial Sequence: Synthetic oligonucleotide
cucgauguccuaaagcuuc

SEQ ID NO: 1514604 - RNA, 19 nt, Artificial Sequence
  Description of Artificial Sequence: Synthetic oligonucleotide
guccugagaggauuuauag

SEQ ID NO: 1514605 - RNA, 19 nt, Artificial Sequence
  Description of Artificial Sequence: Synthetic oligonucleotide
auuugagccgucuucagua

SEQ ID NO: 1514606 - RNA, 19 nt, Artificial Sequence
  Description of Artificial Sequence: Synthetic oligonucleotide
gaacggacagcucugaaaa

SEQ ID NO: 1514607 - RNA, 19 nt, Artificial Sequence
  Description of Artificial Sequence: Synthetic oligonucleotide
aagaucccugguugcauag

SEQ ID NO: 1514608 - RNA, 19 nt, Artificial Sequence
  Description of Artificial Sequence: Synthetic oligonucleotide
uucuuguuacucgaugucc

SEQ ID NO: 1514609 - RNA, 19 nt, Artificial Sequence
  Description of Artificial Sequence: Synthetic oligonucleotide
cagugcagauagaagagag

SEQ ID NO: 1514610 - RNA, 19 nt, Artificial Sequence
  Description of Artificial Sequence: Synthetic oligonucleotide
guacuuguucaugcgaucg

SEQ ID NO: 1514611 - RNA, 19 nt, Artificial Sequence
  Description of Artificial Sequence: Synthetic oligonucleotide
uaaaaugauucuccugaau

SEQ ID NO: 1514612 - RNA, 19 nt, Artificial Sequence
  Description of Artificial Sequence: Synthetic oligonucleotide
gaucccugguugcauagag

SEQ ID NO: 1514613 - RNA, 19 nt, Artificial Sequence
  Description of Artificial Sequence: Synthetic oligonucleotide
agguuugcuauaaaauuuc

SEQ ID NO: 1514614 - RNA, 19 nt, Artificial Sequence
  Description of Artificial Sequence: Synthetic oligonucleotide
uauuugagccgucuucagu

SEQ ID NO: 1514615 - RNA, 19 nt, Artificial Sequence
  Description of Artificial Sequence: Synthetic oligonucleotide
uuguacuuguucaugcgau

SEQ ID NO: 1514616 - RNA, 19 nt, Artificial Sequence
  Description of Artificial Sequence: Synthetic oligonucleotide
aagaccggagaaaaguuca

SEQ ID NO: 1514617 - RNA, 19 nt, Artificial Sequence
  Description of Artificial Sequence: Synthetic oligonucleotide
uuccuaugaugguggagcg

SEQ ID NO: 1514618 - RNA, 19 nt, Artificial Sequence
  Description of Artificial Sequence: Synthetic oligonucleotide
guucaugcgaucgauagca

SEQ ID NO: 1514619 - RNA, 19 nt, Artificial Sequence
  Description of Artificial Sequence: Synthetic oligonucleotide
accucgucgaaccugagaa

SEQ ID NO: 1514620 - RNA, 19 nt, Artificial Sequence
  Description of Artificial Sequence: Synthetic oligonucleotide
agucccgaaaucuuugcca

SEQ ID NO: 1514621 - RNA, 19 nt, Artificial Sequence
  Description of Artificial Sequence: Synthetic oligonucleotide
uguucaugcgaucgauagc

SEQ ID NO: 1514622 - RNA, 19 nt, Artificial Sequence
  Description of Artificial Sequence: Synthetic oligonucleotide
agugaaagugccugagugu

SEQ ID NO: 1514623 - RNA, 19 nt, Artificial Sequence
  Description of Artificial Sequence: Synthetic oligonucleotide
acacgaucccaacugaacu

SEQ ID NO: 1514624 - RNA, 19 nt, Artificial Sequence
  Description of Artificial Sequence: Synthetic oligonucleotide
aaagugccugagugucacc

SEQ ID NO: 1514625 - RNA, 19 nt, Artificial Sequence
  Description of Artificial Sequence: Synthetic oligonucleotide
uuacuuggaguguuuuaug

SEQ ID NO: 1514626 - RNA, 19 nt, Artificial Sequence
  Description of Artificial Sequence: Synthetic oligonucleotide
gaauucgugugccaauuuc

SEQ ID NO: 1514627 - RNA, 19 nt, Artificial Sequence
  Description of Artificial Sequence: Synthetic oligonucleotide
uuuauucuuguuacucgau

SEQ ID NO: 1514628 - RNA, 19 nt, Artificial Sequence
  Description of Artificial Sequence: Synthetic oligonucleotide
auagaguaccucgucgaac

SEQ ID NO: 1514629 - RNA, 19 nt, Artificial Sequence
  Description of Artificial Sequence: Synthetic oligonucleotide
ugccaauuucgcaauauuu

SEQ ID NO: 1514630 - RNA, 19 nt, Artificial Sequence
  Description of Artificial Sequence: Synthetic oligonucleotide
guugcauagagagaaguuc

SEQ ID NO: 1514631 - RNA, 19 nt, Artificial Sequence
  Description of Artificial Sequence: Synthetic oligonucleotide
guauacuguaggaagacuc

SEQ ID NO: 1514632 - RNA, 19 nt, Artificial Sequence
  Description of Artificial Sequence: Synthetic oligonucleotide
gaucgauagcagcugcaag

SEQ ID NO: 1514633 - RNA, 19 nt, Artificial Sequence
  Description of Artificial Sequence: Synthetic oligonucleotide
ucgugugccaauuucgcaa

SEQ ID NO: 1514634 - RNA, 19 nt, Artificial Sequence
  Description of Artificial Sequence: Synthetic oligonucleotide
ucaugcgaucgauagcagc

SEQ ID NO: 1514635 - RNA, 19 nt, Artificial Sequence
  Description of Artificial Sequence: Synthetic oligonucleotide
aauuuccuaugauggugga

SEQ ID NO: 1514636 - RNA, 19 nt, Artificial Sequence
  Description of Artificial Sequence: Synthetic oligonucleotide
uuauuaacuugcacauaaa

SEQ ID NO: 1514637 - RNA, 19 nt, Artificial Sequence
  Description of Artificial Sequence: Synthetic oligonucleotide
caggcgauggaagaauucg

SEQ ID NO: 1514638 - RNA, 19 nt, Artificial Sequence
  Description of Artificial Sequence: Synthetic oligonucleotide
acauuaggugaacugaauu

SEQ ID NO: 1514639 - RNA, 19 nt, Artificial Sequence
  Description of Artificial Sequence: Synthetic oligonucleotide
uuucccguuacuguuuucu

SEQ ID NO: 1514640 - RNA, 19 nt, Artificial Sequence
  Description of Artificial Sequence: Synthetic oligonucleotide
uccaaacuauagaggcggg

SEQ ID NO: 1514641 - RNA, 19 nt, Artificial Sequence
  Description of Artificial Sequence: Synthetic oligonucleotide
uacaacauuucccguuacu

SEQ ID NO: 1514642 - RNA, 19 nt, Artificial Sequence
  Description of Artificial Sequence: Synthetic oligonucleotide
uuaaaagguagcugacgau

SEQ ID NO: 1514643 - RNA, 19 nt, Artificial Sequence
  Description of Artificial Sequence: Synthetic oligonucleotide
agcaacguugacgucauug

SEQ ID NO: 1514644 - RNA, 19 nt, Artificial Sequence
  Description of Artificial Sequence: Synthetic oligonucleotide
uccugagaggauuuauaga

SEQ ID NO: 1514645 - RNA, 19 nt, Artificial Sequence
  Description of Artificial Sequence: Synthetic oligonucleotide
uauagaguaccucgucgaa

SEQ ID NO: 1514646 - RNA, 19 nt, Artificial Sequence
  Description of Artificial Sequence: Synthetic oligonucleotide
ugccacguaaaucauugua

SEQ ID NO: 1514647 - RNA, 19 nt, Artificial Sequence
  Description of Artificial Sequence: Synthetic oligonucleotide
aacggacagcucugaaaag

SEQ ID NO: 1514648 - RNA, 19 nt, Artificial Sequence
  Description of Artificial Sequence: Synthetic oligonucleotide
ugcccauucauaucccaug

SEQ ID NO: 1514649 - RNA, 19 nt, Artificial Sequence
  Description of Artificial Sequence: Synthetic oligonucleotide
auauuugagccgucuucag

SEQ ID NO: 1514650 - RNA, 19 nt, Artificial Sequence
  Description of Artificial Sequence: Synthetic oligonucleotide
guuacucgauguccuaaag

SEQ ID NO: 1514651 - RNA, 19 nt, Artificial Sequence
  Description of Artificial Sequence: Synthetic oligonucleotide
gugacauccccucuucgag

SEQ ID NO: 1514652 - RNA, 19 nt, Artificial Sequence
  Description of Artificial Sequence: Synthetic oligonucleotide
gaugaugagagcggcgagc

SEQ ID NO: 1514653 - RNA, 19 nt, Artificial Sequence
  Description of Artificial Sequence: Synthetic oligonucleotide
gaacugauagucagauaag

SEQ ID NO: 1514654 - RNA, 19 nt, Artificial Sequence
  Description of Artificial Sequence: Synthetic oligonucleotide
uaaccacauccaaaagucu

SEQ ID NO: 1514655 - RNA, 19 nt, Artificial Sequence
  Description of Artificial Sequence: Synthetic oligonucleotide
uucuauauacagguguaau

SEQ ID NO: 1514656 - RNA, 19 nt, Artificial Sequence
  Description of Artificial Sequence: Synthetic oligonucleotide
agcaggacugucuuuuacu

SEQ ID NO: 1514657 - RNA, 19 nt, Artificial Sequence
  Description of Artificial Sequence: Synthetic oligonucleotide
uacuacaacauuucccguu

SEQ ID NO: 1514658 - RNA, 19 nt, Artificial Sequence
  Description of Artificial Sequence: Synthetic oligonucleotide
gucucuuccaaacuauaga

SEQ ID NO: 1514659 - RNA, 19 nt, Artificial Sequence
  Description of Artificial Sequence: Synthetic oligonucleotide
ugacgaugugcuuggguug

SEQ ID NO: 1514660 - RNA, 19 nt, Artificial Sequence
  Description of Artificial Sequence: Synthetic oligonucleotide
aaagucucuuccaaacuau

SEQ ID NO: 1514661 - RNA, 19 nt, Artificial Sequence
  Description of Artificial Sequence: Synthetic oligonucleotide
aauguccaacaugaaauuu

SEQ ID NO: 1514662 - RNA, 19 nt, Artificial Sequence
  Description of Artificial Sequence: Synthetic oligonucleotide
gaugguggagcgcaaaugu

SEQ ID NO: 1514663 - RNA, 19 nt, Artificial Sequence
  Description of Artificial Sequence: Synthetic oligonucleotide
acguaaaucauuguaucaa

SEQ ID NO: 1514664 - RNA, 19 nt, Artificial Sequence
  Description of Artificial Sequence: Synthetic oligonucleotide
acuacaacauuucccguua

SEQ ID NO: 1514665 - RNA, 19 nt, Artificial Sequence
  Description of Artificial Sequence: Synthetic oligonucleotide
uuuuacuuggaguguuuua

SEQ ID NO: 1514666 - RNA, 19 nt, Artificial Sequence
  Description of Artificial Sequence: Synthetic oligonucleotide
augcucaagucccgaaauc

SEQ ID NO: 1514667 - RNA, 19 nt, Artificial Sequence
  Description of Artificial Sequence: Synthetic oligonucleotide
uguuacucgauguccuaaa

SEQ ID NO: 1514668 - RNA, 19 nt, Artificial Sequence
  Description of Artificial Sequence: Synthetic oligonucleotide
augcuggagaauugaaaca

SEQ ID NO: 1514669 - RNA, 19 nt, Artificial Sequence
  Description of Artificial Sequence: Synthetic oligonucleotide
agaacggacagcucugaaa

SEQ ID NO: 1514670 - RNA, 19 nt, Artificial Sequence
  Description of Artificial Sequence: Synthetic oligonucleotide
gcuaggacagaacggacag

SEQ ID NO: 1514671 - RNA, 19 nt, Artificial Sequence
  Description of Artificial Sequence: Synthetic oligonucleotide
ugaaagugccugaguguca

SEQ ID NO: 1514672 - RNA, 19 nt, Artificial Sequence
  Description of Artificial Sequence: Synthetic oligonucleotide
cagguguaauuccaagaag

SEQ ID NO: 1514673 - RNA, 19 nt, Artificial Sequence
  Description of Artificial Sequence: Synthetic oligonucleotide
uguauuccaaggcgcuugu

SEQ ID NO: 1514674 - RNA, 19 nt, Artificial Sequence
  Description of Artificial Sequence: Synthetic oligonucleotide
gaaagugccugagugucac

SEQ ID NO: 1514675 - RNA, 19 nt, Artificial Sequence
  Description of Artificial Sequence: Synthetic oligonucleotide
ugcgaucgauagcagcugc

SEQ ID NO: 1514676 - RNA, 19 nt, Artificial Sequence
  Description of Artificial Sequence: Synthetic oligonucleotide
agaacacgaucccaacuga

SEQ ID NO: 1514677 - RNA, 19 nt, Artificial Sequence
  Description of Artificial Sequence: Synthetic oligonucleotide
uuugcccuuugucugccac

SEQ ID NO: 1514678 - RNA, 19 nt, Artificial Sequence
  Description of Artificial Sequence: Synthetic oligonucleotide
cacgauucuggagaacacg

SEQ ID NO: 1514679 - RNA, 19 nt, Artificial Sequence
  Description of Artificial Sequence: Synthetic oligonucleotide
ggcauggguauacuguagg

SEQ ID NO: 1514680 - RNA, 19 nt, Artificial Sequence
  Description of Artificial Sequence: Synthetic oligonucleotide
cacgaucccaacugaacug

SEQ ID NO: 1514681 - RNA, 19 nt, Artificial Sequence
  Description of Artificial Sequence: Synthetic oligonucleotide
guggcucuuguaaacaagc

SEQ ID NO: 1514682 - RNA, 19 nt, Artificial Sequence
  Description of Artificial Sequence: Synthetic oligonucleotide
caagucccgaaaucuuugc

SEQ ID NO: 1514683 - RNA, 19 nt, Artificial Sequence
  Description of Artificial Sequence: Synthetic oligonucleotide
ucccuuuacuaucccaaaa

SEQ ID NO: 1514684 - RNA, 19 nt, Artificial Sequence
  Description of Artificial Sequence: Synthetic oligonucleotide
caaacugcaugccccaauc

SEQ ID NO: 1514685 - RNA, 19 nt, Artificial Sequence
  Description of Artificial Sequence: Synthetic oligonucleotide
gcuucauuccauuggcuag

SEQ ID NO: 1514686 - RNA, 19 nt, Artificial Sequence
  Description of Artificial Sequence: Synthetic oligonucleotide
gcucuuguaaacaagcaac

SEQ ID NO: 1514687 - RNA, 19 nt, Artificial Sequence
  Description of Artificial Sequence: Synthetic oligonucleotide
ugaugguggagcgcaaaug

SEQ ID NO: 1514688 - RNA, 19 nt, Artificial Sequence
  Description of Artificial Sequence: Synthetic oligonucleotide
aaguguauuccaaggcgcu

SEQ ID NO: 1514689 - RNA, 19 nt, Artificial Sequence
  Description of Artificial Sequence: Synthetic oligonucleotide
guaaacaagcaacguugac

SEQ ID NO: 1514690 - RNA, 19 nt, Artificial Sequence
  Description of Artificial Sequence: Synthetic oligonucleotide
uucgugugccaauuucgca

SEQ ID NO: 1514691 - RNA, 19 nt, Artificial Sequence
  Description of Artificial Sequence: Synthetic oligonucleotide
aagaauucgugugccaauu

SEQ ID NO: 1514692 - RNA, 19 nt, Artificial Sequence
  Description of Artificial Sequence: Synthetic oligonucleotide
caacguugacgucauugag

SEQ ID NO: 1514693 - RNA, 19 nt, Artificial Sequence
  Description of Artificial Sequence: Synthetic oligonucleotide
cacguaaaucauuguauca

SEQ ID NO: 1514694 - RNA, 19 nt, Artificial Sequence
  Description of Artificial Sequence: Synthetic oligonucleotide
uguaaaggguuggacugga

SEQ ID NO: 1514695 - RNA, 19 nt, Artificial Sequence
  Description of Artificial Sequence: Synthetic oligonucleotide
uugcccuuugucugccacg

SEQ ID NO: 1514696 - RNA, 19 nt, Artificial Sequence
  Description of Artificial Sequence: Synthetic oligonucleotide
uuugcaacauuaggugaac

SEQ ID NO: 1514697 - RNA, 19 nt, Artificial Sequence
  Description of Artificial Sequence: Synthetic oligonucleotide
uucaugcgaucgauagcag

SEQ ID NO: 1514698 - RNA, 19 nt, Artificial Sequence
  Description of Artificial Sequence: Synthetic oligonucleotide
guccccacgauucuggaga

SEQ ID NO: 1514699 - RNA, 19 nt, Artificial Sequence
  Description of Artificial Sequence: Synthetic oligonucleotide
ugguugcauagagagaagu

SEQ ID NO: 1514700 - RNA, 19 nt, Artificial Sequence
  Description of Artificial Sequence: Synthetic oligonucleotide
gcgcuuguaaaucuggaug

SEQ ID NO: 1514701 - RNA, 19 nt, Artificial Sequence
  Description of Artificial Sequence: Synthetic oligonucleotide
ucccguuacuguuuucugu

SEQ ID NO: 1514702 - RNA, 19 nt, Artificial Sequence
  Description of Artificial Sequence: Synthetic oligonucleotide
gucagauaagagcaaaccu

SEQ ID NO: 1514703 - RNA, 19 nt, Artificial Sequence
  Description of Artificial Sequence: Synthetic oligonucleotide
gacgucauugagguaacca

SEQ ID NO: 1514704 - RNA, 19 nt, Artificial Sequence
  Description of Artificial Sequence: Synthetic oligonucleotide
guacucuucaaugcucaag

SEQ ID NO: 1514705 - RNA, 19 nt, Artificial Sequence
  Description of Artificial Sequence: Synthetic oligonucleotide
gucccgaaaucuuugccac

SEQ ID NO: 1514706 - RNA, 19 nt, Artificial Sequence
  Description of Artificial Sequence: Synthetic oligonucleotide
agguaaccacauccaaaag

SEQ ID NO: 1514707 - RNA, 19 nt, Artificial Sequence
  Description of Artificial Sequence: Synthetic oligonucleotide
cauucuauauacaggugua

SEQ ID NO: 1514708 - RNA, 19 nt, Artificial Sequence
  Description of Artificial Sequence: Synthetic oligonucleotide
agagaugcuguaaaggguu

SEQ ID NO: 1514709 - RNA, 19 nt, Artificial Sequence
  Description of Artificial Sequence: Synthetic oligonucleotide
aacauuaggugaacugaau

SEQ ID NO: 1514710 - RNA, 19 nt, Artificial Sequence
  Description of Artificial Sequence: Synthetic oligonucleotide
cagacuguggcucuuguaa

SEQ ID NO: 1514711 - RNA, 19 nt, Artificial Sequence
  Description of Artificial Sequence: Synthetic oligonucleotide
cuggaugaugagagcggcg

SEQ ID NO: 1514712 - RNA, 19 nt, Artificial Sequence
  Description of Artificial Sequence: Synthetic oligonucleotide
auagucagauaagagcaaa

SEQ ID NO: 1514713 - RNA, 19 nt, Artificial Sequence
  Description of Artificial Sequence: Synthetic oligonucleotide
gacgaugugcuuggguugc

SEQ ID NO: 1514714 - RNA, 19 nt, Artificial Sequence
  Description of Artificial Sequence: Synthetic oligonucleotide
guugcagguccugagagga

SEQ ID NO: 1514715 - RNA, 19 nt, Artificial Sequence
  Description of Artificial Sequence: Synthetic oligonucleotide
ugucuuuuacuuggagugu

SEQ ID NO: 1514716 - RNA, 19 nt, Artificial Sequence
  Description of Artificial Sequence: Synthetic oligonucleotide
uucccguuacuguuuucug

SEQ ID NO: 1514717 - RNA, 19 nt, Artificial Sequence
  Description of Artificial Sequence: Synthetic oligonucleotide
gagaggauuuauagaguac

SEQ ID NO: 1514718 - RNA, 19 nt, Artificial Sequence
  Description of Artificial Sequence: Synthetic oligonucleotide
acggacagcucugaaaaga

SEQ ID NO: 1514719 - RNA, 19 nt, Artificial Sequence
  Description of Artificial Sequence: Synthetic oligonucleotide
auuuccuaugaugguggag

SEQ ID NO: 1514720 - RNA, 19 nt, Artificial Sequence
  Description of Artificial Sequence: Synthetic oligonucleotide
cuguaaaggguuggacugg

SEQ ID NO: 1514721 - RNA, 19 nt, Artificial Sequence
  Description of Artificial Sequence: Synthetic oligonucleotide
ucgaaccugagaagaugcu

SEQ ID NO: 1514722 - RNA, 19 nt, Artificial Sequence
  Description of Artificial Sequence: Synthetic oligonucleotide
cccuuuacuaucccaaaag

SEQ ID NO: 1514723 - RNA, 19 nt, Artificial Sequence
  Description of Artificial Sequence: Synthetic oligonucleotide
uugacgucauugagguaac

SEQ ID NO: 1514724 - RNA, 19 nt, Artificial Sequence
  Description of Artificial Sequence: Synthetic oligonucleotide
ucgauguccuaaagcuucu

SEQ ID NO: 1514725 - RNA, 19 nt, Artificial Sequence
  Description of Artificial Sequence: Synthetic oligonucleotide
gacagaacggacagcucug

SEQ ID NO: 1514726 - RNA, 19 nt, Artificial Sequence
  Description of Artificial Sequence: Synthetic oligonucleotide
uggagaacacgaucccaac

SEQ ID NO: 1514727 - RNA, 19 nt, Artificial Sequence
  Description of Artificial Sequence: Synthetic oligonucleotide
uucaaugcucaagucccga

SEQ ID NO: 1514728 - RNA, 19 nt, Artificial Sequence
  Description of Artificial Sequence: Synthetic oligonucleotide
guguauuccaaggcgcuug

SEQ ID NO: 1514729 - RNA, 19 nt, Artificial Sequence
  Description of Artificial Sequence: Synthetic oligonucleotide
cuaucccaaaagcuacaug

SEQ ID NO: 1514730 - RNA, 19 nt, Artificial Sequence
  Description of Artificial Sequence: Synthetic oligonucleotide
ugugccaauuucgcaauau

SEQ ID NO: 1514731 - RNA, 19 nt, Artificial Sequence
  Description of Artificial Sequence: Synthetic oligonucleotide
gguaaccacauccaaaagu

SEQ ID NO: 1514732 - RNA, 19 nt, Artificial Sequence
  Description of Artificial Sequence: Synthetic oligonucleotide
acgauucuggagaacacga

SEQ ID NO: 1514733 - RNA, 19 nt, Artificial Sequence
  Description of Artificial Sequence: Synthetic oligonucleotide
caugcgaucgauagcagcu

SEQ ID NO: 1514734 - RNA, 19 nt, Artificial Sequence
  Description of Artificial Sequence: Synthetic oligonucleotide
aauauucaucaaaguguau

SEQ ID NO: 1514735 - RNA, 19 nt, Artificial Sequence
  Description of Artificial Sequence: Synthetic oligonucleotide
ugcaagaucccugguugca

SEQ ID NO: 1514736 - RNA, 19 nt, Artificial Sequence
  Description of Artificial Sequence: Synthetic oligonucleotide
uccaaggcgcuuguaaauc

SEQ ID NO: 1514737 - RNA, 19 nt, Artificial Sequence
  Description of Artificial Sequence: Synthetic oligonucleotide
uaccucgucgaaccugaga

SEQ ID NO: 1514738 - RNA, 19 nt, Artificial Sequence
  Description of Artificial Sequence: Synthetic oligonucleotide
uucgcuucacagugcagau

SEQ ID NO: 1514739 - RNA, 19 nt, Artificial Sequence
  Description of Artificial Sequence: Synthetic oligonucleotide
auagcugcaaggugacuua

SEQ ID NO: 1514740 - RNA, 19 nt, Artificial Sequence
  Description of Artificial Sequence: Synthetic oligonucleotide
uggagcgcaaauguccaac

SEQ ID NO: 1514741 - RNA, 19 nt, Artificial Sequence
  Description of Artificial Sequence: Synthetic oligonucleotide
gaugcuguaaaggguugga

SEQ ID NO: 1514742 - RNA, 19 nt, Artificial Sequence
  Description of Artificial Sequence: Synthetic oligonucleotide
uugagccgucuucaguaac

SEQ ID NO: 1514743 - RNA, 19 nt, Artificial Sequence
  Description of Artificial Sequence: Synthetic oligonucleotide
aguaccucgucgaaccuga

SEQ ID NO: 1514744 - RNA, 19 nt, Artificial Sequence
  Description of Artificial Sequence: Synthetic oligonucleotide
cauaaaccucaaagagaug

SEQ ID NO: 1514745 - RNA, 19 nt, Artificial Sequence
  Description of Artificial Sequence: Synthetic oligonucleotide
cauccuugauugaaccuca

SEQ ID NO: 1514746 - RNA, 19 nt, Artificial Sequence
  Description of Artificial Sequence: Synthetic oligonucleotide
auguccaacaugaaauuuu

SEQ ID NO: 1514747 - RNA, 19 nt, Artificial Sequence
  Description of Artificial Sequence: Synthetic oligonucleotide
cugcaagaucccugguugc

SEQ ID NO: 1514748 - RNA, 19 nt, Artificial Sequence
  Description of Artificial Sequence: Synthetic oligonucleotide
uuguuacucgauguccuaa

SEQ ID NO: 1514749 - RNA, 19 nt, Artificial Sequence
  Description of Artificial Sequence: Synthetic oligonucleotide
auucuauauacagguguaa

SEQ ID NO: 1514750 - RNA, 19 nt, Artificial Sequence
  Description of Artificial Sequence: Synthetic oligonucleotide
agacuguggcucuuguaaa

SEQ ID NO: 1514751 - RNA, 19 nt, Artificial Sequence
  Description of Artificial Sequence: Synthetic oligonucleotide
aaucuccaauguaauuuau

SEQ ID NO: 1514752 - RNA, 19 nt, Artificial Sequence
  Description of Artificial Sequence: Synthetic oligonucleotide
uguacucuucaaugcucaa

SEQ ID NO: 1514753 - RNA, 19 nt, Artificial Sequence
  Description of Artificial Sequence: Synthetic oligonucleotide
acuguggcucuuguaaaca

SEQ ID NO: 1514754 - RNA, 19 nt, Artificial Sequence
  Description of Artificial Sequence: Synthetic oligonucleotide
gcaacauuaggugaacuga

SEQ ID NO: 1514755 - RNA, 19 nt, Artificial Sequence
  Description of Artificial Sequence: Synthetic oligonucleotide
cauaucccaugaucuucag

SEQ ID NO: 1514756 - RNA, 19 nt, Artificial Sequence
  Description of Artificial Sequence: Synthetic oligonucleotide
auuucccguuacuguuuuc

SEQ ID NO: 1514757 - RNA, 19 nt, Artificial Sequence
  Description of Artificial Sequence: Synthetic oligonucleotide
gagaucuacuacaacauuu

SEQ ID NO: 1514758 - RNA, 19 nt, Artificial Sequence
  Description of Artificial Sequence: Synthetic oligonucleotide
gugccugagugucacccag

SEQ ID NO: 1514759 - RNA, 19 nt, Artificial Sequence
  Description of Artificial Sequence: Synthetic oligonucleotide
gagaauugaaacagacugu

SEQ ID NO: 1514760 - RNA, 19 nt, Artificial Sequence
  Description of Artificial Sequence: Synthetic oligonucleotide
agccacgucagcaggacug

SEQ ID NO: 1514761 - RNA, 19 nt, Artificial Sequence
  Description of Artificial Sequence: Synthetic oligonucleotide
gaaguccuuugcuguccag

SEQ ID NO: 1514762 - RNA, 19 nt, Artificial Sequence
  Description of Artificial Sequence: Synthetic oligonucleotide
ugaugagagcggcgagccc

SEQ ID NO: 1514763 - RNA, 19 nt, Artificial Sequence
  Description of Artificial Sequence: Synthetic oligonucleotide
cucgucgaaccugagaaga

SEQ ID NO: 1514764 - RNA, 19 nt, Artificial Sequence
  Description of Artificial Sequence: Synthetic oligonucleotide
guaaaucuggauguacucu

SEQ ID NO: 1514765 - RNA, 19 nt, Artificial Sequence
  Description of Artificial Sequence: Synthetic oligonucleotide
gaaaagugacauccccucu

SEQ ID NO: 1514766 - RNA, 19 nt, Artificial Sequence
  Description of Artificial Sequence: Synthetic oligonucleotide
acgaucccaacugaacuga

SEQ ID NO: 1514767 - RNA, 19 nt, Artificial Sequence
  Description of Artificial Sequence: Synthetic oligonucleotide
ggaagccauguucuguagc

SEQ ID NO: 1514768 - RNA, 19 nt, Artificial Sequence
  Description of Artificial Sequence: Synthetic oligonucleotide
cagucucagagagaucuac

SEQ ID NO: 1514769 - RNA, 19 nt, Artificial Sequence
  Description of Artificial Sequence: Synthetic oligonucleotide
cuccaauguaauuuauucu

SEQ ID NO: 1514770 - RNA, 19 nt, Artificial Sequence
  Description of Artificial Sequence: Synthetic oligonucleotide
ccacguaaaucauuguauc

SEQ ID NO: 1514771 - RNA, 19 nt, Artificial Sequence
  Description of Artificial Sequence: Synthetic oligonucleotide
gaguaccucgucgaaccug

SEQ ID NO: 1514772 - RNA, 19 nt, Artificial Sequence
  Description of Artificial Sequence: Synthetic oligonucleotide
ucgucgaaccugagaagau

SEQ ID NO: 1514773 - RNA, 19 nt, Artificial Sequence
  Description of Artificial Sequence: Synthetic oligonucleotide
uucgagucuucauucccuu

SEQ ID NO: 1514774 - RNA, 19 nt, Artificial Sequence
  Description of Artificial Sequence: Synthetic oligonucleotide
agaugcuggagaauugaaa

SEQ ID NO: 1514775 - RNA, 19 nt, Artificial Sequence
  Description of Artificial Sequence: Synthetic oligonucleotide
gacuuagaguuaaaaggua

SEQ ID NO: 1514776 - RNA, 19 nt, Artificial Sequence
  Description of Artificial Sequence: Synthetic oligonucleotide
accauauuugagccgucuu

SEQ ID NO: 1514777 - RNA, 19 nt, Artificial Sequence
  Description of Artificial Sequence: Synthetic oligonucleotide
cugguugcauagagagaag

SEQ ID NO: 1514778 - RNA, 19 nt, Artificial Sequence
  Description of Artificial Sequence: Synthetic oligonucleotide
ugcccuuugucugccacgu

SEQ ID NO: 1514779 - RNA, 19 nt, Artificial Sequence
  Description of Artificial Sequence: Synthetic oligonucleotide
cauucccuuuacuauccca

SEQ ID NO: 1514780 - RNA, 19 nt, Artificial Sequence
  Description of Artificial Sequence: Synthetic oligonucleotide
acuaucccaaaagcuacau

SEQ ID NO: 1514781 - RNA, 19 nt, Artificial Sequence
  Description of Artificial Sequence: Synthetic oligonucleotide
ucauuccauuggcuaggac

SEQ ID NO: 1514782 - RNA, 19 nt, Artificial Sequence
  Description of Artificial Sequence: Synthetic oligonucleotide
aucccaugaucuucaguau

SEQ ID NO: 1514783 - RNA, 19 nt, Artificial Sequence
  Description of Artificial Sequence: Synthetic oligonucleotide
aaguuccaucacuucgcuu

SEQ ID NO: 1514784 - RNA, 19 nt, Artificial Sequence
  Description of Artificial Sequence: Synthetic oligonucleotide
aaacagcuggaaaccaguu

SEQ ID NO: 1514785 - RNA, 19 nt, Artificial Sequence
  Description of Artificial Sequence: Synthetic oligonucleotide
uccuaugaugguggagcgc

SEQ ID NO: 1514786 - RNA, 19 nt, Artificial Sequence
  Description of Artificial Sequence: Synthetic oligonucleotide
uagcugcaaggugacuuag

SEQ ID NO: 1514787 - RNA, 19 nt, Artificial Sequence
  Description of Artificial Sequence: Synthetic oligonucleotide
cuacaacauuucccguuac

SEQ ID NO: 1514788 - RNA, 19 nt, Artificial Sequence
  Description of Artificial Sequence: Synthetic oligonucleotide
uccaggcgauggaagaauu

SEQ ID NO: 1514789 - RNA, 19 nt, Artificial Sequence
  Description of Artificial Sequence: Synthetic oligonucleotide
uugcaacauuaggugaacu

SEQ ID NO: 1514790 - RNA, 19 nt, Artificial Sequence
  Description of Artificial Sequence: Synthetic oligonucleotide
ugcagucuccuguggguuc

SEQ ID NO: 1514791 - RNA, 19 nt, Artificial Sequence
  Description of Artificial Sequence: Synthetic oligonucleotide
caaggugacuuagaguuaa

SEQ ID NO: 1514792 - RNA, 19 nt, Artificial Sequence
  Description of Artificial Sequence: Synthetic oligonucleotide
gaaguuccaucacuucgcu

SEQ ID NO: 1514793 - RNA, 19 nt, Artificial Sequence
  Description of Artificial Sequence: Synthetic oligonucleotide
cagauaagagcaaaccuuu

SEQ ID NO: 1514794 - RNA, 19 nt, Artificial Sequence
  Description of Artificial Sequence: Synthetic oligonucleotide
agaguaccucgucgaaccu

SEQ ID NO: 1514795 - RNA, 19 nt, Artificial Sequence
  Description of Artificial Sequence: Synthetic oligonucleotide
ugucugccacguaaaucau

SEQ ID NO: 1514796 - RNA, 19 nt, Artificial Sequence
  Description of Artificial Sequence: Synthetic oligonucleotide
aggugacuuagaguuaaaa

SEQ ID NO: 1514797 - RNA, 19 nt, Artificial Sequence
  Description of Artificial Sequence: Synthetic oligonucleotide
cauggguauacuguaggaa

SEQ ID NO: 1514798 - RNA, 19 nt, Artificial Sequence
  Description of Artificial Sequence: Synthetic oligonucleotide
acgucagcaggacugucuu

SEQ ID NO: 1514799 - RNA, 19 nt, Artificial Sequence
  Description of Artificial Sequence: Synthetic oligonucleotide
gucacccaguuccaggcga

SEQ ID NO: 1514800 - RNA, 19 nt, Artificial Sequence
  Description of Artificial Sequence: Synthetic oligonucleotide
aagucucuuccaaacuaua

SEQ ID NO: 1514801 - RNA, 19 nt, Artificial Sequence
  Description of Artificial Sequence: Synthetic oligonucleotide
ggcgauggaagaauucgug

SEQ ID NO: 1514802 - RNA, 19 nt, Artificial Sequence
  Description of Artificial Sequence: Synthetic oligonucleotide
ggacagaacggacagcucu

SEQ ID NO: 1514803 - RNA, 19 nt, Artificial Sequence
  Description of Artificial Sequence: Synthetic oligonucleotide
gauguccuaaagcuucuuu

SEQ ID NO: 1514804 - RNA, 19 nt, Artificial Sequence
  Description of Artificial Sequence: Synthetic oligonucleotide
cuaggacagaacggacagc

SEQ ID NO: 1514805 - RNA, 19 nt, Artificial Sequence
  Description of Artificial Sequence: Synthetic oligonucleotide
caaugcucaagucccgaaa

SEQ ID NO: 1514806 - RNA, 19 nt, Artificial Sequence
  Description of Artificial Sequence: Synthetic oligonucleotide
ccugguugcauagagagaa

SEQ ID NO: 1514807 - RNA, 19 nt, Artificial Sequence
  Description of Artificial Sequence: Synthetic oligonucleotide
ggaugaugagagcggcgag

SEQ ID NO: 1514808 - RNA, 19 nt, Artificial Sequence
  Description of Artificial Sequence: Synthetic oligonucleotide
aagcuacaugcuggcaccu

SEQ ID NO: 1514809 - RNA, 19 nt, Artificial Sequence
  Description of Artificial Sequence: Synthetic oligonucleotide
gaacacgaucccaacugaa

SEQ ID NO: 1514810 - RNA, 19 nt, Artificial Sequence
  Description of Artificial Sequence: Synthetic oligonucleotide
cugacgaugugcuuggguu

SEQ ID NO: 1514811 - RNA, 19 nt, Artificial Sequence
  Description of Artificial Sequence: Synthetic oligonucleotide
ugccugagugucacccagu

SEQ ID NO: 1514812 - RNA, 19 nt, Artificial Sequence
  Description of Artificial Sequence: Synthetic oligonucleotide
aucuccaauguaauuuauu

SEQ ID NO: 1514813 - RNA, 19 nt, Artificial Sequence
  Description of Artificial Sequence: Synthetic oligonucleotide
augcgaucgauagcagcug

SEQ ID NO: 1514814 - RNA, 19 nt, Artificial Sequence
  Description of Artificial Sequence: Synthetic oligonucleotide
cugcaugccccaaucucca

SEQ ID NO: 1514815 - RNA, 19 nt, Artificial Sequence
  Description of Artificial Sequence: Synthetic oligonucleotide
ggguauacuguaggaagac

SEQ ID NO: 1514816 - RNA, 19 nt, Artificial Sequence
  Description of Artificial Sequence: Synthetic oligonucleotide
cuucgagucuucauucccu

SEQ ID NO: 1514817 - RNA, 19 nt, Artificial Sequence
  Description of Artificial Sequence: Synthetic oligonucleotide
caucacuucgcuucacagu

SEQ ID NO: 1514818 - RNA, 19 nt, Artificial Sequence
  Description of Artificial Sequence: Synthetic oligonucleotide
cugagaggauuuauagagu

SEQ ID NO: 1514819 - RNA, 19 nt, Artificial Sequence
  Description of Artificial Sequence: Synthetic oligonucleotide
aggcgauggaagaauucgu

SEQ ID NO: 1514820 - RNA, 19 nt, Artificial Sequence
  Description of Artificial Sequence: Synthetic oligonucleotide
uccccacgauucuggagaa

SEQ ID NO: 1514821 - RNA, 19 nt, Artificial Sequence
  Description of Artificial Sequence: Synthetic oligonucleotide
ggagcgcaaauguccaaca

SEQ ID NO: 1514822 - RNA, 19 nt, Artificial Sequence
  Description of Artificial Sequence: Synthetic oligonucleotide
gcauggguauacuguagga

SEQ ID NO: 1514823 - RNA, 19 nt, Artificial Sequence
  Description of Artificial Sequence: Synthetic oligonucleotide
cuguggcucuuguaaacaa

SEQ ID NO: 1514824 - RNA, 19 nt, Artificial Sequence
  Description of Artificial Sequence: Synthetic oligonucleotide
cuuuuagguuugcuauaaa

SEQ ID NO: 1514825 - RNA, 19 nt, Artificial Sequence
  Description of Artificial Sequence: Synthetic oligonucleotide
gguguaauuccaagaagcu

SEQ ID NO: 1514826 - RNA, 19 nt, Artificial Sequence
  Description of Artificial Sequence: Synthetic oligonucleotide
aguguauuccaaggcgcuu

SEQ ID NO: 1514827 - RNA, 19 nt, Artificial Sequence
  Description of Artificial Sequence: Synthetic oligonucleotide
gggaagaccggagaaaagu

SEQ ID NO: 1514828 - RNA, 19 nt, Artificial Sequence
  Description of Artificial Sequence: Synthetic oligonucleotide
gcccauucauaucccauga

SEQ ID NO: 1514829 - RNA, 19 nt, Artificial Sequence
  Description of Artificial Sequence: Synthetic oligonucleotide
caagaucccugguugcaua

SEQ ID NO: 1514830 - RNA, 19 nt, Artificial Sequence
  Description of Artificial Sequence: Synthetic oligonucleotide
ccuggaugaugagagcggc

SEQ ID NO: 1514831 - RNA, 19 nt, Artificial Sequence
  Description of Artificial Sequence: Synthetic oligonucleotide
gaucccaacugaacugaua

SEQ ID NO: 1514832 - RNA, 19 nt, Artificial Sequence
  Description of Artificial Sequence: Synthetic oligonucleotide
acauccccucuucgagucu

SEQ ID NO: 1514833 - RNA, 19 nt, Artificial Sequence
  Description of Artificial Sequence: Synthetic oligonucleotide
gguggagcgcaaaugucca

SEQ ID NO: 1514834 - RNA, 19 nt, Artificial Sequence
  Description of Artificial Sequence: Synthetic oligonucleotide
acucgauguccuaaagcuu

SEQ ID NO: 1514835 - RNA, 19 nt, Artificial Sequence
  Description of Artificial Sequence: Synthetic oligonucleotide
agaucccugguugcauaga

SEQ ID NO: 1514836 - RNA, 19 nt, Artificial Sequence
  Description of Artificial Sequence: Synthetic oligonucleotide
ggcuaggacagaacggaca

SEQ ID NO: 1514837 - RNA, 19 nt, Artificial Sequence
  Description of Artificial Sequence: Synthetic oligonucleotide
ccguuacuguuuucuguag

SEQ ID NO: 1514838 - RNA, 19 nt, Artificial Sequence
  Description of Artificial Sequence: Synthetic oligonucleotide
gaccggagaaaaguucacu

SEQ ID NO: 1514839 - RNA, 19 nt, Artificial Sequence
  Description of Artificial Sequence: Synthetic oligonucleotide
accucauuuaagacaucuu

SEQ ID NO: 1514840 - RNA, 19 nt, Artificial Sequence
  Description of Artificial Sequence: Synthetic oligonucleotide
gccccaaucuccaauguaa

SEQ ID NO: 1514841 - RNA, 19 nt, Artificial Sequence
  Description of Artificial Sequence: Synthetic oligonucleotide
cguaaaucauuguaucaaa

SEQ ID NO: 1514842 - RNA, 19 nt, Artificial Sequence
  Description of Artificial Sequence: Synthetic oligonucleotide
cacgucagcaggacugucu

SEQ ID NO: 1514843 - RNA, 19 nt, Artificial Sequence
  Description of Artificial Sequence: Synthetic oligonucleotide
agcugcaaggugacuuaga

SEQ ID NO: 1514844 - RNA, 19 nt, Artificial Sequence
  Description of Artificial Sequence: Synthetic oligonucleotide
cugcaaggugacuuagagu

SEQ ID NO: 1514845 - RNA, 19 nt, Artificial Sequence
  Description of Artificial Sequence: Synthetic oligonucleotide
cuacuacaacauuucccgu

SEQ ID NO: 1514846 - RNA, 19 nt, Artificial Sequence
  Description of Artificial Sequence: Synthetic oligonucleotide
caguguccccacgauucug

SEQ ID NO: 1514847 - RNA, 19 nt, Artificial Sequence
  Description of Artificial Sequence: Synthetic oligonucleotide
ccagcagcuuuacaacauc

SEQ ID NO: 1514848 - RNA, 19 nt, Artificial Sequence
  Description of Artificial Sequence: Synthetic oligonucleotide
gcagaccaaacugcaugcc

SEQ ID NO: 1514849 - RNA, 19 nt, Artificial Sequence
  Description of Artificial Sequence: Synthetic oligonucleotide
ccauuggcuaggacagaac

SEQ ID NO: 1514850 - RNA, 19 nt, Artificial Sequence
  Description of Artificial Sequence: Synthetic oligonucleotide
caagcaacguugacgucau

SEQ ID NO: 1514851 - RNA, 19 nt, Artificial Sequence
  Description of Artificial Sequence: Synthetic oligonucleotide
ccucgucgaaccugagaag

SEQ ID NO: 1514852 - RNA, 19 nt, Artificial Sequence
  Description of Artificial Sequence: Synthetic oligonucleotide
ccaggcgauggaagaauuc

SEQ ID NO: 1514853 - RNA, 19 nt, Artificial Sequence
  Description of Artificial Sequence: Synthetic oligonucleotide
gccacguaaaucauuguau

SEQ ID NO: 1514854 - RNA, 19 nt, Artificial Sequence
  Description of Artificial Sequence: Synthetic oligonucleotide
gugccaauuucgcaauauu

SEQ ID NO: 1514855 - RNA, 19 nt, Artificial Sequence
  Description of Artificial Sequence: Synthetic oligonucleotide
gguauacuguaggaagacu

SEQ ID NO: 1514856 - RNA, 19 nt, Artificial Sequence
  Description of Artificial Sequence: Synthetic oligonucleotide
cagaacggacagcucugaa

SEQ ID NO: 1514857 - RNA, 19 nt, Artificial Sequence
  Description of Artificial Sequence: Synthetic oligonucleotide
caccagucucagagagauc

SEQ ID NO: 1514858 - RNA, 19 nt, Artificial Sequence
  Description of Artificial Sequence: Synthetic oligonucleotide
guucuguagcauccuugau

SEQ ID NO: 1514859 - RNA, 19 nt, Artificial Sequence
  Description of Artificial Sequence: Synthetic oligonucleotide
cgagccccacucuuucugc

SEQ ID NO: 1514860 - RNA, 19 nt, Artificial Sequence
  Description of Artificial Sequence: Synthetic oligonucleotide
cgucgaaccugagaagaug

SEQ ID NO: 1514861 - RNA, 19 nt, Artificial Sequence
  Description of Artificial Sequence: Synthetic oligonucleotide
cauuucccguuacuguuuu

SEQ ID NO: 1514862 - RNA, 19 nt, Artificial Sequence
  Description of Artificial Sequence: Synthetic oligonucleotide
agcuacaugcuggcaccuu

SEQ ID NO: 1514863 - RNA, 19 nt, Artificial Sequence
  Description of Artificial Sequence: Synthetic oligonucleotide
ccugagugucacccaguuc

SEQ ID NO: 1514864 - RNA, 19 nt, Artificial Sequence
  Description of Artificial Sequence: Synthetic oligonucleotide
gguugcauagagagaaguu

SEQ ID NO: 1514865 - RNA, 19 nt, Artificial Sequence
  Description of Artificial Sequence: Synthetic oligonucleotide
auccuugauugaaccucau

SEQ ID NO: 1514866 - RNA, 19 nt, Artificial Sequence
  Description of Artificial Sequence: Synthetic oligonucleotide
ggaagaccggagaaaaguu

SEQ ID NO: 1514867 - RNA, 19 nt, Artificial Sequence
  Description of Artificial Sequence: Synthetic oligonucleotide
gcugacgaugugcuugggu

SEQ ID NO: 1514868 - RNA, 19 nt, Artificial Sequence
  Description of Artificial Sequence: Synthetic oligonucleotide
gugugccaauuucgcaaua

SEQ ID NO: 1514869 - RNA, 19 nt, Artificial Sequence
  Description of Artificial Sequence: Synthetic oligonucleotide
gcuacaugcuggcaccuuu

SEQ ID NO: 1514870 - RNA, 19 nt, Artificial Sequence
  Description of Artificial Sequence: Synthetic oligonucleotide
ccaaggcgcuuguaaaucu

SEQ ID NO: 1514871 - RNA, 19 nt, Artificial Sequence
  Description of Artificial Sequence: Synthetic oligonucleotide
cugccacguaaaucauugu

SEQ ID NO: 1514872 - RNA, 19 nt, Artificial Sequence
  Description of Artificial Sequence: Synthetic oligonucleotide
gcgaucgauagcagcugca

SEQ ID NO: 1514873 - RNA, 19 nt, Artificial Sequence
  Description of Artificial Sequence: Synthetic oligonucleotide
gcaaggugacuuagaguua

SEQ ID NO: 1514874 - RNA, 19 nt, Artificial Sequence
  Description of Artificial Sequence: Synthetic oligonucleotide
gucugccacguaaaucauu

SEQ ID NO: 1514875 - RNA, 19 nt, Artificial Sequence
  Description of Artificial Sequence: Synthetic oligonucleotide
caauagcugcaaggugacu

SEQ ID NO: 1514876 - RNA, 19 nt, Artificial Sequence
  Description of Artificial Sequence: Synthetic oligonucleotide
gccugagugucacccaguu

SEQ ID NO: 1514877 - RNA, 19 nt, Artificial Sequence
  Description of Artificial Sequence: Synthetic oligonucleotide
gagcggcgagccccacucu

SEQ ID NO: 1514878 - RNA, 19 nt, Artificial Sequence
  Description of Artificial Sequence: Synthetic oligonucleotide
cccaaucuccaauguaauu

SEQ ID NO: 1514879 - RNA, 19 nt, Artificial Sequence
  Description of Artificial Sequence: Synthetic oligonucleotide
cagccacgucagcaggacu

SEQ ID NO: 1514880 - RNA, 19 nt, Artificial Sequence
  Description of Artificial Sequence: Synthetic oligonucleotide
ccaguguccccacgauucu

SEQ ID NO: 1514881 - RNA, 19 nt, Artificial Sequence
  Description of Artificial Sequence: Synthetic oligonucleotide
ccacgucagcaggacuguc

SEQ ID NO: 1514882 - RNA, 19 nt, Artificial Sequence
  Description of Artificial Sequence: Synthetic oligonucleotide
ccccacgauucuggagaac

SEQ ID NO: 1514883 - RNA, 19 nt, Artificial Sequence
  Description of Artificial Sequence: Synthetic oligonucleotide
gcccuuugucugccacgua

SEQ ID NO: 1514884 - RNA, 19 nt, Artificial Sequence
  Description of Artificial Sequence: Synthetic oligonucleotide
uuuauguccaaucaggagg

SEQ ID NO: 1514885 - RNA, 19 nt, Artificial Sequence
  Description of Artificial Sequence: Synthetic oligonucleotide
auagucgggaagcagaucc

SEQ ID NO: 1514886 - RNA, 19 nt, Artificial Sequence
  Description of Artificial Sequence: Synthetic oligonucleotide
ucaaccagggaauucaagg

SEQ ID NO: 1514887 - RNA, 19 nt, Artificial Sequence
  Description of Artificial Sequence: Synthetic oligonucleotide
uuuaguuagggccucucgg

SEQ ID NO: 1514888 - RNA, 19 nt, Artificial Sequence
  Description of Artificial Sequence: Synthetic oligonucleotide
uaaucgcucgcacugaacg

SEQ ID NO: 1514889 - RNA, 19 nt, Artificial Sequence
  Description of Artificial Sequence: Synthetic oligonucleotide
agaagacgcauuuauucgc

SEQ ID NO: 1514890 - RNA, 19 nt, Artificial Sequence
  Description of Artificial Sequence: Synthetic oligonucleotide
ugaguaacuggucugaggu

SEQ ID NO: 1514891 - RNA, 19 nt, Artificial Sequence
  Description of Artificial Sequence: Synthetic oligonucleotide
gaaaucuuugaagaggcgg

SEQ ID NO: 1514892 - RNA, 19 nt, Artificial Sequence
  Description of Artificial Sequence: Synthetic oligonucleotide
aauauccuucgcuuuguuc

SEQ ID NO: 1514893 - RNA, 19 nt, Artificial Sequence
  Description of Artificial Sequence: Synthetic oligonucleotide
auauccuucgcuuuguucu

SEQ ID NO: 1514894 - RNA, 19 nt, Artificial Sequence
  Description of Artificial Sequence: Synthetic oligonucleotide
aaugccauagaaugugugu

SEQ ID NO: 1514895 - RNA, 19 nt, Artificial Sequence
  Description of Artificial Sequence: Synthetic oligonucleotide
uugaccucgaugaagucag

SEQ ID NO: 1514896 - RNA, 19 nt, Artificial Sequence
  Description of Artificial Sequence: Synthetic oligonucleotide
cacugaacgucuuugagcc

SEQ ID NO: 1514897 - RNA, 19 nt, Artificial Sequence
  Description of Artificial Sequence: Synthetic oligonucleotide
cuuccaaucaacugguacc

SEQ ID NO: 1514898 - RNA, 19 nt, Artificial Sequence
  Description of Artificial Sequence: Synthetic oligonucleotide
ucaaaacugucuaggaagc

SEQ ID NO: 1514899 - RNA, 19 nt, Artificial Sequence
  Description of Artificial Sequence: Synthetic oligonucleotide
uuuuauguccaaucaggag

SEQ ID NO: 1514900 - RNA, 19 nt, Artificial Sequence
  Description of Artificial Sequence: Synthetic oligonucleotide
gaagcuuugcccuugggac

SEQ ID NO: 1514901 - RNA, 19 nt, Artificial Sequence
  Description of Artificial Sequence: Synthetic oligonucleotide
auccuuaacucagauaagc

SEQ ID NO: 1514902 - RNA, 19 nt, Artificial Sequence
  Description of Artificial Sequence: Synthetic oligonucleotide
uucaaaagucgguugaucu

SEQ ID NO: 1514903 - RNA, 19 nt, Artificial Sequence
  Description of Artificial Sequence: Synthetic oligonucleotide
uuggagauccuuaacucag

SEQ ID NO: 1514904 - RNA, 19 nt, Artificial Sequence
  Description of Artificial Sequence: Synthetic oligonucleotide
aacucagauaagcucagca

SEQ ID NO: 1514905 - RNA, 19 nt, Artificial Sequence
  Description of Artificial Sequence: Synthetic oligonucleotide
cuguaaucgauccacgucc

SEQ ID NO: 1514906 - RNA, 19 nt, Artificial Sequence
  Description of Artificial Sequence: Synthetic oligonucleotide
agugcucguguucacacgc

SEQ ID NO: 1514907 - RNA, 19 nt, Artificial Sequence
  Description of Artificial Sequence: Synthetic oligonucleotide
uccaccgccauucagugcc

SEQ ID NO: 1514908 - RNA, 19 nt, Artificial Sequence
  Description of Artificial Sequence: Synthetic oligonucleotide
uucauagucgggaagcaga

SEQ ID NO: 1514909 - RNA, 19 nt, Artificial Sequence
  Description of Artificial Sequence: Synthetic oligonucleotide
aaucgauccacguccacca

SEQ ID NO: 1514910 - RNA, 19 nt, Artificial Sequence
  Description of Artificial Sequence: Synthetic oligonucleotide
uccacguccaccauucucc

SEQ ID NO: 1514911 - RNA, 19 nt, Artificial Sequence
  Description of Artificial Sequence: Synthetic oligonucleotide
caagugacaaugcacagug

SEQ ID NO: 1514912 - RNA, 19 nt, Artificial Sequence
  Description of Artificial Sequence: Synthetic oligonucleotide
augaaauacagcugugaag

SEQ ID NO: 1514913 - RNA, 19 nt, Artificial Sequence
  Description of Artificial Sequence: Synthetic oligonucleotide
cuuaaggcuuucaaaacug

SEQ ID NO: 1514914 - RNA, 19 nt, Artificial Sequence
  Description of Artificial Sequence: Synthetic oligonucleotide
aagucgguugaucucuggg

SEQ ID NO: 1514915 - RNA, 19 nt, Artificial Sequence
  Description of Artificial Sequence: Synthetic oligonucleotide
auagaauguguguuuguag

SEQ ID NO: 1514916 - RNA, 19 nt, Artificial Sequence
  Description of Artificial Sequence: Synthetic oligonucleotide
agaaauauccuucgcuuug

SEQ ID NO: 1514917 - RNA, 19 nt, Artificial Sequence
  Description of Artificial Sequence: Synthetic oligonucleotide
ugccagaaaucuuugaaga

SEQ ID NO: 1514918 - RNA, 19 nt, Artificial Sequence
  Description of Artificial Sequence: Synthetic oligonucleotide
agugacaaugcacagugcu

SEQ ID NO: 1514919 - RNA, 19 nt, Artificial Sequence
  Description of Artificial Sequence: Synthetic oligonucleotide
uucgcacaugccaagcugg

SEQ ID NO: 1514920 - RNA, 19 nt, Artificial Sequence
  Description of Artificial Sequence: Synthetic oligonucleotide
aagcggcuguaaucgaucc

SEQ ID NO: 1514921 - RNA, 19 nt, Artificial Sequence
  Description of Artificial Sequence: Synthetic oligonucleotide
ucaggguuccccaaggaca

SEQ ID NO: 1514922 - RNA, 19 nt, Artificial Sequence
  Description of Artificial Sequence: Synthetic oligonucleotide
uuaaucauguucugguggu

SEQ ID NO: 1514923 - RNA, 19 nt, Artificial Sequence
  Description of Artificial Sequence: Synthetic oligonucleotide
agcuuaaggcuuucaaaac

SEQ ID NO: 1514924 - RNA, 19 nt, Artificial Sequence
  Description of Artificial Sequence: Synthetic oligonucleotide
uuuggagauccuuaacuca

SEQ ID NO: 1514925 - RNA, 19 nt, Artificial Sequence
  Description of Artificial Sequence: Synthetic oligonucleotide
uuuguagcaaccucccucu

SEQ ID NO: 1514926 - RNA, 19 nt, Artificial Sequence
  Description of Artificial Sequence: Synthetic oligonucleotide
gacaaagcguaccacuucc

SEQ ID NO: 1514927 - RNA, 19 nt, Artificial Sequence
  Description of Artificial Sequence: Synthetic oligonucleotide
cauguaaucgcucgcacug

SEQ ID NO: 1514928 - RNA, 19 nt, Artificial Sequence
  Description of Artificial Sequence: Synthetic oligonucleotide
cucuucauacugcaggacg

SEQ ID NO: 1514929 - RNA, 19 nt, Artificial Sequence
  Description of Artificial Sequence: Synthetic oligonucleotide
uuuauucgcacaugccaag

SEQ ID NO: 1514930 - RNA, 19 nt, Artificial Sequence
  Description of Artificial Sequence: Synthetic oligonucleotide
ucuuccacauuccaacacu

SEQ ID NO: 1514931 - RNA, 19 nt, Artificial Sequence
  Description of Artificial Sequence: Synthetic oligonucleotide
aagacgcauuuauucgcac

SEQ ID NO: 1514932 - RNA, 19 nt, Artificial Sequence
  Description of Artificial Sequence: Synthetic oligonucleotide
uccccaacaagugacaaug

SEQ ID NO: 1514933 - RNA, 19 nt, Artificial Sequence
  Description of Artificial Sequence: Synthetic oligonucleotide
uuaguuagggccucucgga

SEQ ID NO: 1514934 - RNA, 19 nt, Artificial Sequence
  Description of Artificial Sequence: Synthetic oligonucleotide
cuuuggagauccuuaacuc

SEQ ID NO: 1514935 - RNA, 19 nt, Artificial Sequence
  Description of Artificial Sequence: Synthetic oligonucleotide
cauuuauucgcacaugcca

SEQ ID NO: 1514936 - RNA, 19 nt, Artificial Sequence
  Description of Artificial Sequence: Synthetic oligonucleotide
aagcguaccacuuccucgu

SEQ ID NO: 1514937 - RNA, 19 nt, Artificial Sequence
  Description of Artificial Sequence: Synthetic oligonucleotide
uccuuaacucagauaagcu

SEQ ID NO: 1514938 - RNA, 19 nt, Artificial Sequence
  Description of Artificial Sequence: Synthetic oligonucleotide
uaugggcuccccaacaagu

SEQ ID NO: 1514939 - RNA, 19 nt, Artificial Sequence
  Description of Artificial Sequence: Synthetic oligonucleotide
cuggccauguaaucgcucg

SEQ ID NO: 1514940 - RNA, 19 nt, Artificial Sequence
  Description of Artificial Sequence: Synthetic oligonucleotide
aacgucuuugagccuccac

SEQ ID NO: 1514941 - RNA, 19 nt, Artificial Sequence
  Description of Artificial Sequence: Synthetic oligonucleotide
aacugguacccuuguuuag

SEQ ID NO: 1514942 - RNA, 19 nt, Artificial Sequence
  Description of Artificial Sequence: Synthetic oligonucleotide
gguacccuuguuuaguuag

SEQ ID NO: 1514943 - RNA, 19 nt, Artificial Sequence
  Description of Artificial Sequence: Synthetic oligonucleotide
guaggucacacccuugacc

SEQ ID NO: 1514944 - RNA, 19 nt, Artificial Sequence
  Description of Artificial Sequence: Synthetic oligonucleotide
ucucaaugccauagaaugu

SEQ ID NO: 1514945 - RNA, 19 nt, Artificial Sequence
  Description of Artificial Sequence: Synthetic oligonucleotide
ugguaucacccuaugaaau

SEQ ID NO: 1514946 - RNA, 19 nt, Artificial Sequence
  Description of Artificial Sequence: Synthetic oligonucleotide
uuaugggcuccccaacaag

SEQ ID NO: 1514947 - RNA, 19 nt, Artificial Sequence
  Description of Artificial Sequence: Synthetic oligonucleotide
uuccaaucaacugguaccc

SEQ ID NO: 1514948 - RNA, 19 nt, Artificial Sequence
  Description of Artificial Sequence: Synthetic oligonucleotide
ugaucauagcucuuccuuc

SEQ ID NO: 1514949 - RNA, 19 nt, Artificial Sequence
  Description of Artificial Sequence: Synthetic oligonucleotide
aguggcuuccaaucaacug

SEQ ID NO: 1514950 - RNA, 19 nt, Artificial Sequence
  Description of Artificial Sequence: Synthetic oligonucleotide
ucaaaagucgguugaucuc

SEQ ID NO: 1514951 - RNA, 19 nt, Artificial Sequence
  Description of Artificial Sequence: Synthetic oligonucleotide
uaaucgauccacguccacc

SEQ ID NO: 1514952 - RNA, 19 nt, Artificial Sequence
  Description of Artificial Sequence: Synthetic oligonucleotide
cucugauaauccugggucc

SEQ ID NO: 1514953 - RNA, 19 nt, Artificial Sequence
  Description of Artificial Sequence: Synthetic oligonucleotide
acucucaccacaguagguc

SEQ ID NO: 1514954 - RNA, 19 nt, Artificial Sequence
  Description of Artificial Sequence: Synthetic oligonucleotide
gaucauagcucuuccuuca

SEQ ID NO: 1514955 - RNA, 19 nt, Artificial Sequence
  Description of Artificial Sequence: Synthetic oligonucleotide
acgucuuugagccuccacu

SEQ ID NO: 1514956 - RNA, 19 nt, Artificial Sequence
  Description of Artificial Sequence: Synthetic oligonucleotide
ucacccuaugaaauacagc

SEQ ID NO: 1514957 - RNA, 19 nt, Artificial Sequence
  Description of Artificial Sequence: Synthetic oligonucleotide
uaucucguguccuugggau

SEQ ID NO: 1514958 - RNA, 19 nt, Artificial Sequence
  Description of Artificial Sequence: Synthetic oligonucleotide
caaugcacagugcuugacc

SEQ ID NO: 1514959 - RNA, 19 nt, Artificial Sequence
  Description of Artificial Sequence: Synthetic oligonucleotide
gcagcauugacuuugucca

SEQ ID NO: 1514960 - RNA, 19 nt, Artificial Sequence
  Description of Artificial Sequence: Synthetic oligonucleotide
cacaggauugguguggugc

SEQ ID NO: 1514961 - RNA, 19 nt, Artificial Sequence
  Description of Artificial Sequence: Synthetic oligonucleotide
acuucacaagugucagucg

SEQ ID NO: 1514962 - RNA, 19 nt, Artificial Sequence
  Description of Artificial Sequence: Synthetic oligonucleotide
cugaguaacuggucugagg

SEQ ID NO: 1514963 - RNA, 19 nt, Artificial Sequence
  Description of Artificial Sequence: Synthetic oligonucleotide
uauucgcacaugccaagcu

SEQ ID NO: 1514964 - RNA, 19 nt, Artificial Sequence
  Description of Artificial Sequence: Synthetic oligonucleotide
cccuuguuuaguuagggcc

SEQ ID NO: 1514965 - RNA, 19 nt, Artificial Sequence
  Description of Artificial Sequence: Synthetic oligonucleotide
auucgcacaugccaagcug

SEQ ID NO: 1514966 - RNA, 19 nt, Artificial Sequence
  Description of Artificial Sequence: Synthetic oligonucleotide
uacccuuguuuaguuaggg

SEQ ID NO: 1514967 - RNA, 19 nt, Artificial Sequence
  Description of Artificial Sequence: Synthetic oligonucleotide
aaucgcucgcacugaacgu

SEQ ID NO: 1514968 - RNA, 19 nt, Artificial Sequence
  Description of Artificial Sequence: Synthetic oligonucleotide
caaucaacugguacccuug

SEQ ID NO: 1514969 - RNA, 19 nt, Artificial Sequence
  Description of Artificial Sequence: Synthetic oligonucleotide
uaucacccuaugaaauaca

SEQ ID NO: 1514970 - RNA, 19 nt, Artificial Sequence
  Description of Artificial Sequence: Synthetic oligonucleotide
uccacugauuuuaaacuuu

SEQ ID NO: 1514971 - RNA, 19 nt, Artificial Sequence
  Description of Artificial Sequence: Synthetic oligonucleotide
uuucauagucgggaagcag

SEQ ID NO: 1514972 - RNA, 19 nt, Artificial Sequence
  Description of Artificial Sequence: Synthetic oligonucleotide
caauuucauagucgggaag

SEQ ID NO: 1514973 - RNA, 19 nt, Artificial Sequence
  Description of Artificial Sequence: Synthetic oligonucleotide
ugguaucucguguccuugg

SEQ ID NO: 1514974 - RNA, 19 nt, Artificial Sequence
  Description of Artificial Sequence: Synthetic oligonucleotide
gguggagcagcuucaaaag

SEQ ID NO: 1514975 - RNA, 19 nt, Artificial Sequence
  Description of Artificial Sequence: Synthetic oligonucleotide
ggugcuagcauccacgcuc

SEQ ID NO: 1514976 - RNA, 19 nt, Artificial Sequence
  Description of Artificial Sequence: Synthetic oligonucleotide
gagugaucauagcucuucc

SEQ ID NO: 1514977 - RNA, 19 nt, Artificial Sequence
  Description of Artificial Sequence: Synthetic oligonucleotide
cucucggagagcaggagug

SEQ ID NO: 1514978 - RNA, 19 nt, Artificial Sequence
  Description of Artificial Sequence: Synthetic oligonucleotide
ucauagucgggaagcagau

SEQ ID NO: 1514979 - RNA, 19 nt, Artificial Sequence
  Description of Artificial Sequence: Synthetic oligonucleotide
auccacguccaccauucuc

SEQ ID NO: 1514980 - RNA, 19 nt, Artificial Sequence
  Description of Artificial Sequence: Synthetic oligonucleotide
uucacaagugucagucggu

SEQ ID NO: 1514981 - RNA, 19 nt, Artificial Sequence
  Description of Artificial Sequence: Synthetic oligonucleotide
acuggagaucccaugcugg

SEQ ID NO: 1514982 - RNA, 19 nt, Artificial Sequence
  Description of Artificial Sequence: Synthetic oligonucleotide
ggaucaaagccucuuuccc

SEQ ID NO: 1514983 - RNA, 19 nt, Artificial Sequence
  Description of Artificial Sequence: Synthetic oligonucleotide
ggugguaucacccuaugaa

SEQ ID NO: 1514984 - RNA, 19 nt, Artificial Sequence
  Description of Artificial Sequence: Synthetic oligonucleotide
cucgaugaagucaggguuc

SEQ ID NO: 1514985 - RNA, 19 nt, Artificial Sequence
  Description of Artificial Sequence: Synthetic oligonucleotide
ucacacgcaauuucauagu

SEQ ID NO: 1514986 - RNA, 19 nt, Artificial Sequence
  Description of Artificial Sequence: Synthetic oligonucleotide
uuauucgcacaugccaagc

SEQ ID NO: 1514987 - RNA, 19 nt, Artificial Sequence
  Description of Artificial Sequence: Synthetic oligonucleotide
ucucguguccuugggauca

SEQ ID NO: 1514988 - RNA, 19 nt, Artificial Sequence
  Description of Artificial Sequence: Synthetic oligonucleotide
auuuauucgcacaugccaa

SEQ ID NO: 1514989 - RNA, 19 nt, Artificial Sequence
  Description of Artificial Sequence: Synthetic oligonucleotide
aucacccuaugaaauacag

SEQ ID NO: 1514990 - RNA, 19 nt, Artificial Sequence
  Description of Artificial Sequence: Synthetic oligonucleotide
aagugacaaugcacagugc

SEQ ID NO: 1514991 - RNA, 19 nt, Artificial Sequence
  Description of Artificial Sequence: Synthetic oligonucleotide
agcauugacuuuguccauc

SEQ ID NO: 1514992 - RNA, 19 nt, Artificial Sequence
  Description of Artificial Sequence: Synthetic oligonucleotide
caacacuucacaaguguca

SEQ ID NO: 1514993 - RNA, 19 nt, Artificial Sequence
  Description of Artificial Sequence: Synthetic oligonucleotide
aaucauguucuggugguuu

SEQ ID NO: 1514994 - RNA, 19 nt, Artificial Sequence
  Description of Artificial Sequence: Synthetic oligonucleotide
ucgcacaugccaagcuggg

SEQ ID NO: 1514995 - RNA, 19 nt, Artificial Sequence
  Description of Artificial Sequence: Synthetic oligonucleotide
guaucacccuaugaaauac

SEQ ID NO: 1514996 - RNA, 19 nt, Artificial Sequence
  Description of Artificial Sequence: Synthetic oligonucleotide
gacugggacccuucugggg

SEQ ID NO: 1514997 - RNA, 19 nt, Artificial Sequence
  Description of Artificial Sequence: Synthetic oligonucleotide
aggauugguguggugccgc

SEQ ID NO: 1514998 - RNA, 19 nt, Artificial Sequence
  Description of Artificial Sequence: Synthetic oligonucleotide
guccucgacaucaaccagg

SEQ ID NO: 1514999 - RNA, 19 nt, Artificial Sequence
  Description of Artificial Sequence: Synthetic oligonucleotide
acuguccgcacucuucucu

SEQ ID NO: 1515000 - RNA, 19 nt, Artificial Sequence
  Description of Artificial Sequence: Synthetic oligonucleotide
auuaugggcuccccaacaa

SEQ ID NO: 1515001 - RNA, 19 nt, Artificial Sequence
  Description of Artificial Sequence: Synthetic oligonucleotide
caaaacugucuaggaagcg

SEQ ID NO: 1515002 - RNA, 19 nt, Artificial Sequence
  Description of Artificial Sequence: Synthetic oligonucleotide
cuuccaccgccauucagug

SEQ ID NO: 1515003 - RNA, 19 nt, Artificial Sequence
  Description of Artificial Sequence: Synthetic oligonucleotide
uguuuguagcaaccucccu

SEQ ID NO: 1515004 - RNA, 19 nt, Artificial Sequence
  Description of Artificial Sequence: Synthetic oligonucleotide
uggagauccuuaacucaga

SEQ ID NO: 1515005 - RNA, 19 nt, Artificial Sequence
  Description of Artificial Sequence: Synthetic oligonucleotide
auucagugcccacaggauu

SEQ ID NO: 1515006 - RNA, 19 nt, Artificial Sequence
  Description of Artificial Sequence: Synthetic oligonucleotide
aucucguguccuugggauc

SEQ ID NO: 1515007 - RNA, 19 nt, Artificial Sequence
  Description of Artificial Sequence: Synthetic oligonucleotide
uggugguaucacccuauga

SEQ ID NO: 1515008 - RNA, 19 nt, Artificial Sequence
  Description of Artificial Sequence: Synthetic oligonucleotide
cucgugccaaggcacauug

SEQ ID NO: 1515009 - RNA, 19 nt, Artificial Sequence
  Description of Artificial Sequence: Synthetic oligonucleotide
gcccuugggacugugaugg

SEQ ID NO: 1515010 - RNA, 19 nt, Artificial Sequence
  Description of Artificial Sequence: Synthetic oligonucleotide
cacacgcaauuucauaguc

SEQ ID NO: 1515011 - RNA, 19 nt, Artificial Sequence
  Description of Artificial Sequence: Synthetic oligonucleotide
acaaugcacagugcuugac

SEQ ID NO: 1515012 - RNA, 19 nt, Artificial Sequence
  Description of Artificial Sequence: Synthetic oligonucleotide
gaagacgcauuuauucgca

SEQ ID NO: 1515013 - RNA, 19 nt, Artificial Sequence
  Description of Artificial Sequence: Synthetic oligonucleotide
uggcacaccuuugaacugc

SEQ ID NO: 1515014 - RNA, 19 nt, Artificial Sequence
  Description of Artificial Sequence: Synthetic oligonucleotide
acgagcuccuggaagcggc

SEQ ID NO: 1515015 - RNA, 19 nt, Artificial Sequence
  Description of Artificial Sequence: Synthetic oligonucleotide
gcacugaacgucuuugagc

SEQ ID NO: 1515016 - RNA, 19 nt, Artificial Sequence
  Description of Artificial Sequence: Synthetic oligonucleotide
uguccgcacucuucucugg

SEQ ID NO: 1515017 - RNA, 19 nt, Artificial Sequence
  Description of Artificial Sequence: Synthetic oligonucleotide
uagacuguucgcuguugcu

SEQ ID NO: 1515018 - RNA, 19 nt, Artificial Sequence
  Description of Artificial Sequence: Synthetic oligonucleotide
uggugguuuucaauggcuu

SEQ ID NO: 1515019 - RNA, 19 nt, Artificial Sequence
  Description of Artificial Sequence: Synthetic oligonucleotide
uguucgcuguugcuuugca

SEQ ID NO: 1515020 - RNA, 19 nt, Artificial Sequence
  Description of Artificial Sequence: Synthetic oligonucleotide
cugaacgucuuugagccuc

SEQ ID NO: 1515021 - RNA, 19 nt, Artificial Sequence
  Description of Artificial Sequence: Synthetic oligonucleotide
cacgcucacauacagcuga

SEQ ID NO: 1515022 - RNA, 19 nt, Artificial Sequence
  Description of Artificial Sequence: Synthetic oligonucleotide
caggacgagcuccuggaag

SEQ ID NO: 1515023 - RNA, 19 nt, Artificial Sequence
  Description of Artificial Sequence: Synthetic oligonucleotide
gucgguagacuguucgcug

SEQ ID NO: 1515024 - RNA, 19 nt, Artificial Sequence
  Description of Artificial Sequence: Synthetic oligonucleotide
gguaucucguguccuuggg

SEQ ID NO: 1515025 - RNA, 19 nt, Artificial Sequence
  Description of Artificial Sequence: Synthetic oligonucleotide
gcuuccaaucaacugguac

SEQ ID NO: 1515026 - RNA, 19 nt, Artificial Sequence
  Description of Artificial Sequence: Synthetic oligonucleotide
gcacucucaccacaguagg

SEQ ID NO: 1515027 - RNA, 19 nt, Artificial Sequence
  Description of Artificial Sequence: Synthetic oligonucleotide
cauacugcaggacgagcuc

SEQ ID NO: 1515028 - RNA, 19 nt, Artificial Sequence
  Description of Artificial Sequence: Synthetic oligonucleotide
aggaagcgcugccagaaau

SEQ ID NO: 1515029 - RNA, 19 nt, Artificial Sequence
  Description of Artificial Sequence: Synthetic oligonucleotide
ugccauagaauguguguuu

SEQ ID NO: 1515030 - RNA, 19 nt, Artificial Sequence
  Description of Artificial Sequence: Synthetic oligonucleotide
accacuuccucgugccaag

SEQ ID NO: 1515031 - RNA, 19 nt, Artificial Sequence
  Description of Artificial Sequence: Synthetic oligonucleotide
cagcgauggcucucaaugc

SEQ ID NO: 1515032 - RNA, 19 nt, Artificial Sequence
  Description of Artificial Sequence: Synthetic oligonucleotide
agucgguagacuguucgcu

SEQ ID NO: 1515033 - RNA, 19 nt, Artificial Sequence
  Description of Artificial Sequence: Synthetic oligonucleotide
gacgcauuuauucgcacau

SEQ ID NO: 1515034 - RNA, 19 nt, Artificial Sequence
  Description of Artificial Sequence: Synthetic oligonucleotide
cagcuucaaaagucgguug

SEQ ID NO: 1515035 - RNA, 19 nt, Artificial Sequence
  Description of Artificial Sequence: Synthetic oligonucleotide
gacaaugcacagugcuuga

SEQ ID NO: 1515036 - RNA, 19 nt, Artificial Sequence
  Description of Artificial Sequence: Synthetic oligonucleotide
cuucauacugcaggacgag

SEQ ID NO: 1515037 - RNA, 19 nt, Artificial Sequence
  Description of Artificial Sequence: Synthetic oligonucleotide
ucgugccaaggcacauugg

SEQ ID NO: 1515038 - RNA, 19 nt, Artificial Sequence
  Description of Artificial Sequence: Synthetic oligonucleotide
uucuggccauguaaucgcu

SEQ ID NO: 1515039 - RNA, 19 nt, Artificial Sequence
  Description of Artificial Sequence: Synthetic oligonucleotide
uggccauguaaucgcucgc

SEQ ID NO: 1515040 - RNA, 19 nt, Artificial Sequence
  Description of Artificial Sequence: Synthetic oligonucleotide
cagucgguagacuguucgc

SEQ ID NO: 1515041 - RNA, 19 nt, Artificial Sequence
  Description of Artificial Sequence: Synthetic oligonucleotide
ccugauuuccucagggaac

SEQ ID NO: 1515042 - RNA, 19 nt, Artificial Sequence
  Description of Artificial Sequence: Synthetic oligonucleotide
ugcucguguucacacgcaa

SEQ ID NO: 1515043 - RNA, 19 nt, Artificial Sequence
  Description of Artificial Sequence: Synthetic oligonucleotide
ucgcacugaacgucuuuga

SEQ ID NO: 1515044 - RNA, 19 nt, Artificial Sequence
  Description of Artificial Sequence: Synthetic oligonucleotide
gaagcggcuguaaucgauc

SEQ ID NO: 1515045 - RNA, 19 nt, Artificial Sequence
  Description of Artificial Sequence: Synthetic oligonucleotide
uuccucgugccaaggcaca

SEQ ID NO: 1515046 - RNA, 19 nt, Artificial Sequence
  Description of Artificial Sequence: Synthetic oligonucleotide
guccgcacucuucucuggg

SEQ ID NO: 1515047 - RNA, 19 nt, Artificial Sequence
  Description of Artificial Sequence: Synthetic oligonucleotide
cucgcacugaacgucuuug

SEQ ID NO: 1515048 - RNA, 19 nt, Artificial Sequence
  Description of Artificial Sequence: Synthetic oligonucleotide
ggcuuucaaaacugucuag

SEQ ID NO: 1515049 - RNA, 19 nt, Artificial Sequence
  Description of Artificial Sequence: Synthetic oligonucleotide
cuagcauccacgcucacau

SEQ ID NO: 1515050 - RNA, 19 nt, Artificial Sequence
  Description of Artificial Sequence: Synthetic oligonucleotide
ugaccucgaugaagucagg

SEQ ID NO: 1515051 - RNA, 19 nt, Artificial Sequence
  Description of Artificial Sequence: Synthetic oligonucleotide
aucauguucuggugguuuu

SEQ ID NO: 1515052 - RNA, 19 nt, Artificial Sequence
  Description of Artificial Sequence: Synthetic oligonucleotide
ucggagagcaggagugauc

SEQ ID NO: 1515053 - RNA, 19 nt, Artificial Sequence
  Description of Artificial Sequence: Synthetic oligonucleotide
aucaaccagggaauucaag

SEQ ID NO: 1515054 - RNA, 19 nt, Artificial Sequence
  Description of Artificial Sequence: Synthetic oligonucleotide
accgccauucagugcccac

SEQ ID NO: 1515055 - RNA, 19 nt, Artificial Sequence
  Description of Artificial Sequence: Synthetic oligonucleotide
uccaucugcaaagcuucac

SEQ ID NO: 1515056 - RNA, 19 nt, Artificial Sequence
  Description of Artificial Sequence: Synthetic oligonucleotide
guaacuggucugagguucc

SEQ ID NO: 1515057 - RNA, 19 nt, Artificial Sequence
  Description of Artificial Sequence: Synthetic oligonucleotide
uguuuaguuagggccucuc

SEQ ID NO: 1515058 - RNA, 19 nt, Artificial Sequence
  Description of Artificial Sequence: Synthetic oligonucleotide
acuguucgcuguugcuuug

SEQ ID NO: 1515059 - RNA, 19 nt, Artificial Sequence
  Description of Artificial Sequence: Synthetic oligonucleotide
caccacaguaggucacacc

SEQ ID NO: 1515060 - RNA, 19 nt, Artificial Sequence
  Description of Artificial Sequence: Synthetic oligonucleotide
uggcucucaaugccauaga

SEQ ID NO: 1515061 - RNA, 19 nt, Artificial Sequence
  Description of Artificial Sequence: Synthetic oligonucleotide
ucgcucgcacugaacgucu

SEQ ID NO: 1515062 - RNA, 19 nt, Artificial Sequence
  Description of Artificial Sequence: Synthetic oligonucleotide
caaagcuucacaccagagu

SEQ ID NO: 1515063 - RNA, 19 nt, Artificial Sequence
  Description of Artificial Sequence: Synthetic oligonucleotide
agcugaguaacuggucuga

SEQ ID NO: 1515064 - RNA, 19 nt, Artificial Sequence
  Description of Artificial Sequence: Synthetic oligonucleotide
gagauccuuaacucagaua

SEQ ID NO: 1515065 - RNA, 19 nt, Artificial Sequence
  Description of Artificial Sequence: Synthetic oligonucleotide
uggagaucccaugcuggug

SEQ ID NO: 1515066 - RNA, 19 nt, Artificial Sequence
  Description of Artificial Sequence: Synthetic oligonucleotide
cacacccuugaccucgaug

SEQ ID NO: 1515067 - RNA, 19 nt, Artificial Sequence
  Description of Artificial Sequence: Synthetic oligonucleotide
guaucucguguccuuggga

SEQ ID NO: 1515068 - RNA, 19 nt, Artificial Sequence
  Description of Artificial Sequence: Synthetic oligonucleotide
gggcucaugauguugccca

SEQ ID NO: 1515069 - RNA, 19 nt, Artificial Sequence
  Description of Artificial Sequence: Synthetic oligonucleotide
ucgcuuuguucuuccucug

SEQ ID NO: 1515070 - RNA, 19 nt, Artificial Sequence
  Description of Artificial Sequence: Synthetic oligonucleotide
gugccaaggcacauuggcc

SEQ ID NO: 1515071 - RNA, 19 nt, Artificial Sequence
  Description of Artificial Sequence: Synthetic oligonucleotide
cuggcacaccuuugaacug

SEQ ID NO: 1515072 - RNA, 19 nt, Artificial Sequence
  Description of Artificial Sequence: Synthetic oligonucleotide
ucgauccacguccaccauu

SEQ ID NO: 1515073 - RNA, 19 nt, Artificial Sequence
  Description of Artificial Sequence: Synthetic oligonucleotide
gcuuaaggcuuucaaaacu

SEQ ID NO: 1515074 - RNA, 19 nt, Artificial Sequence
  Description of Artificial Sequence: Synthetic oligonucleotide
gagcaggagugaucauagc

SEQ ID NO: 1515075 - RNA, 19 nt, Artificial Sequence
  Description of Artificial Sequence: Synthetic oligonucleotide
gguaucacccuaugaaaua

SEQ ID NO: 1515076 - RNA, 19 nt, Artificial Sequence
  Description of Artificial Sequence: Synthetic oligonucleotide
ugucagucgguagacuguu

SEQ ID NO: 1515077 - RNA, 19 nt, Artificial Sequence
  Description of Artificial Sequence: Synthetic oligonucleotide
gugaucauagcucuuccuu

SEQ ID NO: 1515078 - RNA, 19 nt, Artificial Sequence
  Description of Artificial Sequence: Synthetic oligonucleotide
gcauuuauucgcacaugcc

SEQ ID NO: 1515079 - RNA, 19 nt, Artificial Sequence
  Description of Artificial Sequence: Synthetic oligonucleotide
ggacugggacccuucuggg

SEQ ID NO: 1515080 - RNA, 19 nt, Artificial Sequence
  Description of Artificial Sequence: Synthetic oligonucleotide
agacuguucgcuguugcuu

SEQ ID NO: 1515081 - RNA, 19 nt, Artificial Sequence
  Description of Artificial Sequence: Synthetic oligonucleotide
cgaagagugcccacugugg

SEQ ID NO: 1515082 - RNA, 19 nt, Artificial Sequence
  Description of Artificial Sequence: Synthetic oligonucleotide
cuggcaccgaagagugccc

SEQ ID NO: 1515083 - RNA, 19 nt, Artificial Sequence
  Description of Artificial Sequence: Synthetic oligonucleotide
guaaucgauccacguccac

SEQ ID NO: 1515084 - RNA, 19 nt, Artificial Sequence
  Description of Artificial Sequence: Synthetic oligonucleotide
cuaggaagcgcugccagaa

SEQ ID NO: 1515085 - RNA, 19 nt, Artificial Sequence
  Description of Artificial Sequence: Synthetic oligonucleotide
accgaagagugcccacugu

SEQ ID NO: 1515086 - RNA, 19 nt, Artificial Sequence
  Description of Artificial Sequence: Synthetic oligonucleotide
acgcaauuucauagucggg

SEQ ID NO: 1515087 - RNA, 19 nt, Artificial Sequence
  Description of Artificial Sequence: Synthetic oligonucleotide
acugaacgucuuugagccu

SEQ ID NO: 1515088 - RNA, 19 nt, Artificial Sequence
  Description of Artificial Sequence: Synthetic oligonucleotide
gcaauuucauagucgggaa

SEQ ID NO: 1515089 - RNA, 19 nt, Artificial Sequence
  Description of Artificial Sequence: Synthetic oligonucleotide
uuccaccgccauucagugc

SEQ ID NO: 1515090 - RNA, 19 nt, Artificial Sequence
  Description of Artificial Sequence: Synthetic oligonucleotide
gccauagaauguguguuug

SEQ ID NO: 1515091 - RNA, 19 nt, Artificial Sequence
  Description of Artificial Sequence: Synthetic oligonucleotide
caccgaagagugcccacug

SEQ ID NO: 1515092 - RNA, 19 nt, Artificial Sequence
  Description of Artificial Sequence: Synthetic oligonucleotide
ccauccccucuucaaaccg

SEQ ID NO: 1515093 - RNA, 19 nt, Artificial Sequence
  Description of Artificial Sequence: Synthetic oligonucleotide
cguaccacuuccucgugcc

SEQ ID NO: 1515094 - RNA, 19 nt, Artificial Sequence
  Description of Artificial Sequence: Synthetic oligonucleotide
caggauugguguggugccg

SEQ ID NO: 1515095 - RNA, 19 nt, Artificial Sequence
  Description of Artificial Sequence: Synthetic oligonucleotide
ugguacccuuguuuaguua

SEQ ID NO: 1515096 - RNA, 19 nt, Artificial Sequence
  Description of Artificial Sequence: Synthetic oligonucleotide
cuggugguaucacccuaug

SEQ ID NO: 1515097 - RNA, 19 nt, Artificial Sequence
  Description of Artificial Sequence: Synthetic oligonucleotide
aucaacugguacccuuguu

SEQ ID NO: 1515098 - RNA, 19 nt, Artificial Sequence
  Description of Artificial Sequence: Synthetic oligonucleotide
accauucuccacugauuuu

SEQ ID NO: 1515099 - RNA, 19 nt, Artificial Sequence
  Description of Artificial Sequence: Synthetic oligonucleotide
uccaaucaacugguacccu

SEQ ID NO: 1515100 - RNA, 19 nt, Artificial Sequence
  Description of Artificial Sequence: Synthetic oligonucleotide
aggcgggcggucaaucuuc

SEQ ID NO: 1515101 - RNA, 19 nt, Artificial Sequence
  Description of Artificial Sequence: Synthetic oligonucleotide
ggacaaagcguaccacuuc

SEQ ID NO: 1515102 - RNA, 19 nt, Artificial Sequence
  Description of Artificial Sequence: Synthetic oligonucleotide
auguaaucgcucgcacuga

SEQ ID NO: 1515103 - RNA, 19 nt, Artificial Sequence
  Description of Artificial Sequence: Synthetic oligonucleotide
acgcauuuauucgcacaug

SEQ ID NO: 1515104 - RNA, 19 nt, Artificial Sequence
  Description of Artificial Sequence: Synthetic oligonucleotide
gguccucgacaucaaccag

SEQ ID NO: 1515105 - RNA, 19 nt, Artificial Sequence
  Description of Artificial Sequence: Synthetic oligonucleotide
gcggcuguaaucgauccac

SEQ ID NO: 1515106 - RNA, 19 nt, Artificial Sequence
  Description of Artificial Sequence: Synthetic oligonucleotide
gacuguucgcuguugcuuu

SEQ ID NO: 1515107 - RNA, 19 nt, Artificial Sequence
  Description of Artificial Sequence: Synthetic oligonucleotide
gguacauuaugggcucccc

SEQ ID NO: 1515108 - RNA, 19 nt, Artificial Sequence
  Description of Artificial Sequence: Synthetic oligonucleotide
uaaucauguucuggugguu

SEQ ID NO: 1515109 - RNA, 19 nt, Artificial Sequence
  Description of Artificial Sequence: Synthetic oligonucleotide
cuguucgcuguugcuuugc

SEQ ID NO: 1515110 - RNA, 19 nt, Artificial Sequence
  Description of Artificial Sequence: Synthetic oligonucleotide
gagaucccaugcuggugga

SEQ ID NO: 1515111 - RNA, 19 nt, Artificial Sequence
  Description of Artificial Sequence: Synthetic oligonucleotide
acaaagcguaccacuuccu

SEQ ID NO: 1515112 - RNA, 19 nt, Artificial Sequence
  Description of Artificial Sequence: Synthetic oligonucleotide
uggguacauuaugggcucc

SEQ ID NO: 1515113 - RNA, 19 nt, Artificial Sequence
  Description of Artificial Sequence: Synthetic oligonucleotide
ccuggcacaccuuugaacu

SEQ ID NO: 1515114 - RNA, 19 nt, Artificial Sequence
  Description of Artificial Sequence: Synthetic oligonucleotide
ccgaagagugcccacugug

SEQ ID NO: 1515115 - RNA, 19 nt, Artificial Sequence
  Description of Artificial Sequence: Synthetic oligonucleotide
cagaguggcuuccaaucaa

SEQ ID NO: 1515116 - RNA, 19 nt, Artificial Sequence
  Description of Artificial Sequence: Synthetic oligonucleotide
ggcuuccaugcagcgaugg

SEQ ID NO: 1515117 - RNA, 19 nt, Artificial Sequence
  Description of Artificial Sequence: Synthetic oligonucleotide
agcguaccacuuccucgug

SEQ ID NO: 1515118 - RNA, 19 nt, Artificial Sequence
  Description of Artificial Sequence: Synthetic oligonucleotide
acugugcauuggugacaag

SEQ ID NO: 1515119 - RNA, 19 nt, Artificial Sequence
  Description of Artificial Sequence: Synthetic oligonucleotide
uggcaccgaagagugccca

SEQ ID NO: 1515120 - RNA, 19 nt, Artificial Sequence
  Description of Artificial Sequence: Synthetic oligonucleotide
caugcagcgauggcucuca

SEQ ID NO: 1515121 - RNA, 19 nt, Artificial Sequence
  Description of Artificial Sequence: Synthetic oligonucleotide
aggcggcucuugucuuugg

SEQ ID NO: 1515122 - RNA, 19 nt, Artificial Sequence
  Description of Artificial Sequence: Synthetic oligonucleotide
cauagucgggaagcagauc

SEQ ID NO: 1515123 - RNA, 19 nt, Artificial Sequence
  Description of Artificial Sequence: Synthetic oligonucleotide
ggcucaugauguugcccag

SEQ ID NO: 1515124 - RNA, 19 nt, Artificial Sequence
  Description of Artificial Sequence: Synthetic oligonucleotide
cugcacucucaccacagua

SEQ ID NO: 1515125 - RNA, 19 nt, Artificial Sequence
  Description of Artificial Sequence: Synthetic oligonucleotide
cgauccacguccaccauuc

SEQ ID NO: 1515126 - RNA, 19 nt, Artificial Sequence
  Description of Artificial Sequence: Synthetic oligonucleotide
cgcaauuucauagucggga

SEQ ID NO: 1515127 - RNA, 19 nt, Artificial Sequence
  Description of Artificial Sequence: Synthetic oligonucleotide
cucguguucacacgcaauu

SEQ ID NO: 1515128 - RNA, 19 nt, Artificial Sequence
  Description of Artificial Sequence: Synthetic oligonucleotide
gcccacaggauuggugugg

SEQ ID NO: 1515129 - RNA, 19 nt, Artificial Sequence
  Description of Artificial Sequence: Synthetic oligonucleotide
aucgauccacguccaccau

SEQ ID NO: 1515130 - RNA, 19 nt, Artificial Sequence
  Description of Artificial Sequence: Synthetic oligonucleotide
cacguccaccauucuccac

SEQ ID NO: 1515131 - RNA, 19 nt, Artificial Sequence
  Description of Artificial Sequence: Synthetic oligonucleotide
cagcauaggccuggaguuc

SEQ ID NO: 1515132 - RNA, 19 nt, Artificial Sequence
  Description of Artificial Sequence: Synthetic oligonucleotide
cgcacugaacgucuuugag

SEQ ID NO: 1515133 - RNA, 19 nt, Artificial Sequence
  Description of Artificial Sequence: Synthetic oligonucleotide
acgcucacauacagcugag

SEQ ID NO: 1515134 - RNA, 19 nt, Artificial Sequence
  Description of Artificial Sequence: Synthetic oligonucleotide
ggguucuggccauguaauc

SEQ ID NO: 1515135 - RNA, 19 nt, Artificial Sequence
  Description of Artificial Sequence: Synthetic oligonucleotide
cuugagcccuggcacaccu

SEQ ID NO: 1515136 - RNA, 19 nt, Artificial Sequence
  Description of Artificial Sequence: Synthetic oligonucleotide
gcguaccacuuccucgugc

SEQ ID NO: 1515137 - RNA, 19 nt, Artificial Sequence
  Description of Artificial Sequence: Synthetic oligonucleotide
gagcccuggcacaccuuug

SEQ ID NO: 1515138 - RNA, 19 nt, Artificial Sequence
  Description of Artificial Sequence: Synthetic oligonucleotide
gggcuccccaacaagugac

SEQ ID NO: 1515139 - RNA, 19 nt, Artificial Sequence
  Description of Artificial Sequence: Synthetic oligonucleotide
ggcuguaaucgauccacgu

SEQ ID NO: 1515140 - RNA, 19 nt, Artificial Sequence
  Description of Artificial Sequence: Synthetic oligonucleotide
cacaguaggucacacccuu

SEQ ID NO: 1515141 - RNA, 19 nt, Artificial Sequence
  Description of Artificial Sequence: Synthetic oligonucleotide
ggccauguaaucgcucgca

SEQ ID NO: 1515142 - RNA, 19 nt, Artificial Sequence
  Description of Artificial Sequence: Synthetic oligonucleotide
ggagauccuuaacucagau

SEQ ID NO: 1515143 - RNA, 19 nt, Artificial Sequence
  Description of Artificial Sequence: Synthetic oligonucleotide
uccucgugccaaggcacau

SEQ ID NO: 1515144 - RNA, 19 nt, Artificial Sequence
  Description of Artificial Sequence: Synthetic oligonucleotide
gcuagcauccacgcucaca

SEQ ID NO: 1515145 - RNA, 19 nt, Artificial Sequence
  Description of Artificial Sequence: Synthetic oligonucleotide
ccccgcagcauugacuuug

SEQ ID NO: 1515146 - RNA, 19 nt, Artificial Sequence
  Description of Artificial Sequence: Synthetic oligonucleotide
ucacacccuugaccucgau

SEQ ID NO: 1515147 - RNA, 19 nt, Artificial Sequence
  Description of Artificial Sequence: Synthetic oligonucleotide
ccuggacaaagcguaccac

SEQ ID NO: 1515148 - RNA, 19 nt, Artificial Sequence
  Description of Artificial Sequence: Synthetic oligonucleotide
ggcaccgaagagugcccac

SEQ ID NO: 1515149 - RNA, 19 nt, Artificial Sequence
  Description of Artificial Sequence: Synthetic oligonucleotide
cacucucaccacaguaggu

SEQ ID NO: 1515150 - RNA, 19 nt, Artificial Sequence
  Description of Artificial Sequence: Synthetic oligonucleotide
gugacaaugcacagugcuu

SEQ ID NO: 1515151 - RNA, 19 nt, Artificial Sequence
  Description of Artificial Sequence: Synthetic oligonucleotide
gaggcgggcggucaaucuu

SEQ ID NO: 1515152 - RNA, 19 nt, Artificial Sequence
  Description of Artificial Sequence: Synthetic oligonucleotide
gaacgucuuugagccucca

SEQ ID NO: 1515153 - RNA, 19 nt, Artificial Sequence
  Description of Artificial Sequence: Synthetic oligonucleotide
gcagcuucaaaagucgguu

SEQ ID NO: 1515154 - RNA, 19 nt, Artificial Sequence
  Description of Artificial Sequence: Synthetic oligonucleotide
ucguguccuugggaucaaa

SEQ ID NO: 1515155 - RNA, 19 nt, Artificial Sequence
  Description of Artificial Sequence: Synthetic oligonucleotide
gcgauggcucucaaugcca

SEQ ID NO: 1515156 - RNA, 19 nt, Artificial Sequence
  Description of Artificial Sequence: Synthetic oligonucleotide
gucagucgguagacuguuc

SEQ ID NO: 1515157 - RNA, 19 nt, Artificial Sequence
  Description of Artificial Sequence: Synthetic oligonucleotide
gauccacguccaccauucu

SEQ ID NO: 1515158 - RNA, 19 nt, Artificial Sequence
  Description of Artificial Sequence: Synthetic oligonucleotide
cugguacccuuguuuaguu

SEQ ID NO: 1515159 - RNA, 19 nt, Artificial Sequence
  Description of Artificial Sequence: Synthetic oligonucleotide
gugcucguguucacacgca

SEQ ID NO: 1515160 - RNA, 19 nt, Artificial Sequence
  Description of Artificial Sequence: Synthetic oligonucleotide
aggagugaucauagcucuu

SEQ ID NO: 1515161 - RNA, 19 nt, Artificial Sequence
  Description of Artificial Sequence: Synthetic oligonucleotide
gccucucggagagcaggag

SEQ ID NO: 1515162 - RNA, 19 nt, Artificial Sequence
  Description of Artificial Sequence: Synthetic oligonucleotide
gggguucuggccauguaau

SEQ ID NO: 1515163 - RNA, 19 nt, Artificial Sequence
  Description of Artificial Sequence: Synthetic oligonucleotide
ccaaucaacugguacccuu

SEQ ID NO: 1515164 - RNA, 19 nt, Artificial Sequence
  Description of Artificial Sequence: Synthetic oligonucleotide
ccaaggcacauuggccaug

SEQ ID NO: 1515165 - RNA, 19 nt, Artificial Sequence
  Description of Artificial Sequence: Synthetic oligonucleotide
ggaagcggcuguaaucgau

SEQ ID NO: 1515166 - RNA, 19 nt, Artificial Sequence
  Description of Artificial Sequence: Synthetic oligonucleotide
gauggggacugggacccuu

SEQ ID NO: 1515167 - RNA, 19 nt, Artificial Sequence
  Description of Artificial Sequence: Synthetic oligonucleotide
gcuccccaacaagugacaa

SEQ ID NO: 1515168 - RNA, 19 nt, Artificial Sequence
  Description of Artificial Sequence: Synthetic oligonucleotide
gucaggcggcucuugucuu

SEQ ID NO: 1515169 - RNA, 19 nt, Artificial Sequence
  Description of Artificial Sequence: Synthetic oligonucleotide
gcaggacgagcuccuggaa

SEQ ID NO: 1515170 - RNA, 19 nt, Artificial Sequence
  Description of Artificial Sequence: Synthetic oligonucleotide
ccacguccaccauucucca

SEQ ID NO: 1515171 - RNA, 19 nt, Artificial Sequence
  Description of Artificial Sequence: Synthetic oligonucleotide
caguuggagugcucguguu

SEQ ID NO: 1515172 - RNA, 19 nt, Artificial Sequence
  Description of Artificial Sequence: Synthetic oligonucleotide
caugccaagcuggguggcu

SEQ ID NO: 1515173 - RNA, 19 nt, Artificial Sequence
  Description of Artificial Sequence: Synthetic oligonucleotide
ccaugcagcgauggcucuc

SEQ ID NO: 1515174 - RNA, 19 nt, Artificial Sequence
  Description of Artificial Sequence: Synthetic oligonucleotide
cccuggcaccgaagagugc

SEQ ID NO: 1515175 - RNA, 19 nt, Artificial Sequence
  Description of Artificial Sequence: Synthetic oligonucleotide
gcaccgaagagugcccacu

SEQ ID NO: 1515176 - RNA, 19 nt, Artificial Sequence
  Description of Artificial Sequence: Synthetic oligonucleotide
gggacccuucuggggucag

SEQ ID NO: 1515177 - RNA, 19 nt, Artificial Sequence
  Description of Artificial Sequence: Synthetic oligonucleotide
ccacaguaggucacacccu

SEQ ID NO: 1515178 - RNA, 19 nt, Artificial Sequence
  Description of Artificial Sequence: Synthetic oligonucleotide
cucguguccuugggaucaa

SEQ ID NO: 1515179 - RNA, 19 nt, Artificial Sequence
  Description of Artificial Sequence: Synthetic oligonucleotide
cgaugaagucaggguuccc

SEQ ID NO: 1515180 - RNA, 19 nt, Artificial Sequence
  Description of Artificial Sequence: Synthetic oligonucleotide
caugcugguggagcagcuu

SEQ ID NO: 1515181 - RNA, 19 nt, Artificial Sequence
  Description of Artificial Sequence: Synthetic oligonucleotide
gcucguguucacacgcaau

SEQ ID NO: 1515182 - RNA, 19 nt, Artificial Sequence
  Description of Artificial Sequence: Synthetic oligonucleotide
cuucuggggucaggcggcu

SEQ ID NO: 1515183 - RNA, 19 nt, Artificial Sequence
  Description of Artificial Sequence: Synthetic oligonucleotide
ccgcagcauugacuuuguc

SEQ ID NO: 1515184 - RNA, 19 nt, Artificial Sequence
  Description of Artificial Sequence: Synthetic oligonucleotide
gcucgcacugaacgucuuu

SEQ ID NO: 1515185 - RNA, 19 nt, Artificial Sequence
  Description of Artificial Sequence: Synthetic oligonucleotide
cgauggcucucaaugccau

SEQ ID NO: 1515186 - RNA, 19 nt, Artificial Sequence
  Description of Artificial Sequence: Synthetic oligonucleotide
ccgcacucuucucuggguu

SEQ ID NO: 1515187 - RNA, 19 nt, Artificial Sequence
  Description of Artificial Sequence: Synthetic oligonucleotide
ggcgggcggucaaucuucu

SEQ ID NO: 1515188 - RNA, 19 nt, Artificial Sequence
  Description of Artificial Sequence: Synthetic oligonucleotide
ccgcucugccuugagcccu

SEQ ID NO: 1515189 - RNA, 19 nt, Artificial Sequence
  Description of Artificial Sequence: Synthetic oligonucleotide
cgcacaugccaagcugggu

SEQ ID NO: 1515190 - RNA, 19 nt, Artificial Sequence
  Description of Artificial Sequence: Synthetic oligonucleotide
ccucgugccaaggcacauu

SEQ ID NO: 1515191 - RNA, 19 nt, Artificial Sequence
  Description of Artificial Sequence: Synthetic oligonucleotide
gcgggcggucaaucuucuu

SEQ ID NO: 1515192 - RNA, 19 nt, Artificial Sequence
  Description of Artificial Sequence: Synthetic oligonucleotide
cgcucgcacugaacgucuu

SEQ ID NO: 1515193 - RNA, 19 nt, Artificial Sequence
  Description of Artificial Sequence: Synthetic oligonucleotide
aauacuaugucuuauuucc

SEQ ID NO: 1515194 - RNA, 19 nt, Artificial Sequence
  Description of Artificial Sequence: Synthetic oligonucleotide
aauugaauaaacuagugca

SEQ ID NO: 1515195 - RNA, 19 nt, Artificial Sequence
  Description of Artificial Sequence: Synthetic oligonucleotide
gauuucauaaucuauauca

SEQ ID NO: 1515196 - RNA, 19 nt, Artificial Sequence
  Description of Artificial Sequence: Synthetic oligonucleotide
uuaaauacugacaaccccg

SEQ ID NO: 1515197 - RNA, 19 nt, Artificial Sequence
  Description of Artificial Sequence: Synthetic oligonucleotide
cagauauaaaguaugaugg

SEQ ID NO: 1515198 - RNA, 19 nt, Artificial Sequence
  Description of Artificial Sequence: Synthetic oligonucleotide
aaagcuguaauuuaaucug

SEQ ID NO: 1515199 - RNA, 19 nt, Artificial Sequence
  Description of Artificial Sequence: Synthetic oligonucleotide
uuaaauauaaaaugaaguc

SEQ ID NO: 1515200 - RNA, 19 nt, Artificial Sequence
  Description of Artificial Sequence: Synthetic oligonucleotide
ucuuguaagucauuaaacg

SEQ ID NO: 1515201 - RNA, 19 nt, Artificial Sequence
  Description of Artificial Sequence: Synthetic oligonucleotide
uuaauuagaauauaaugac

SEQ ID NO: 1515202 - RNA, 19 nt, Artificial Sequence
  Description of Artificial Sequence: Synthetic oligonucleotide
auuugaaaugcauccaugc

SEQ ID NO: 1515203 - RNA, 19 nt, Artificial Sequence
  Description of Artificial Sequence: Synthetic oligonucleotide
aaaaggucaauaugaaauc

SEQ ID NO: 1515204 - RNA, 19 nt, Artificial Sequence
  Description of Artificial Sequence: Synthetic oligonucleotide
uaaucugacaguaaaacac

SEQ ID NO: 1515205 - RNA, 19 nt, Artificial Sequence
  Description of Artificial Sequence: Synthetic oligonucleotide
aaucauuugauuauaguag

SEQ ID NO: 1515206 - RNA, 19 nt, Artificial Sequence
  Description of Artificial Sequence: Synthetic oligonucleotide
aauacugacaaccccgcgg

SEQ ID NO: 1515207 - RNA, 19 nt, Artificial Sequence
  Description of Artificial Sequence: Synthetic oligonucleotide
uguuuaaauacugacaacc

SEQ ID NO: 1515208 - RNA, 19 nt, Artificial Sequence
  Description of Artificial Sequence: Synthetic oligonucleotide
aaugacagaugauauuuuc

SEQ ID NO: 1515209 - RNA, 19 nt, Artificial Sequence
  Description of Artificial Sequence: Synthetic oligonucleotide
aaaucauuugauuauagua

SEQ ID NO: 1515210 - RNA, 19 nt, Artificial Sequence
  Description of Artificial Sequence: Synthetic oligonucleotide
acagauauaaaguaugaug

SEQ ID NO: 1515211 - RNA, 19 nt, Artificial Sequence
  Description of Artificial Sequence: Synthetic oligonucleotide
ugaucuuugacuuugcaga

SEQ ID NO: 1515212 - RNA, 19 nt, Artificial Sequence
  Description of Artificial Sequence: Synthetic oligonucleotide
aaaggagaaauacuauguc

SEQ ID NO: 1515213 - RNA, 19 nt, Artificial Sequence
  Description of Artificial Sequence: Synthetic oligonucleotide
uguaauugaauaaacuagu

SEQ ID NO: 1515214 - RNA, 19 nt, Artificial Sequence
  Description of Artificial Sequence: Synthetic oligonucleotide
uauaucauuacagauauaa

SEQ ID NO: 1515215 - RNA, 19 nt, Artificial Sequence
  Description of Artificial Sequence: Synthetic oligonucleotide
gcugcaaugaguuugaagg

SEQ ID NO: 1515216 - RNA, 19 nt, Artificial Sequence
  Description of Artificial Sequence: Synthetic oligonucleotide
auauuuuagcuuugaaagc

SEQ ID NO: 1515217 - RNA, 19 nt, Artificial Sequence
  Description of Artificial Sequence: Synthetic oligonucleotide
ucuauaucauuacagauau

SEQ ID NO: 1515218 - RNA, 19 nt, Artificial Sequence
  Description of Artificial Sequence: Synthetic oligonucleotide
auuugauuauaguaguaac

SEQ ID NO: 1515219 - RNA, 19 nt, Artificial Sequence
  Description of Artificial Sequence: Synthetic oligonucleotide
aaacugaacugucagagca

SEQ ID NO: 1515220 - RNA, 19 nt, Artificial Sequence
  Description of Artificial Sequence: Synthetic oligonucleotide
agaauauaaugacagauga

SEQ ID NO: 1515221 - RNA, 19 nt, Artificial Sequence
  Description of Artificial Sequence: Synthetic oligonucleotide
aauuguauuagagucaagu

SEQ ID NO: 1515222 - RNA, 19 nt, Artificial Sequence
  Description of Artificial Sequence: Synthetic oligonucleotide
uuugauuauaguaguaaca

SEQ ID NO: 1515223 - RNA, 19 nt, Artificial Sequence
  Description of Artificial Sequence: Synthetic oligonucleotide
cuguaauuuaaucugacag

SEQ ID NO: 1515224 - RNA, 19 nt, Artificial Sequence
  Description of Artificial Sequence: Synthetic oligonucleotide
uguauuagagucaaguauc

SEQ ID NO: 1515225 - RNA, 19 nt, Artificial Sequence
  Description of Artificial Sequence: Synthetic oligonucleotide
uuuaaauacugacaacccc

SEQ ID NO: 1515226 - RNA, 19 nt, Artificial Sequence
  Description of Artificial Sequence: Synthetic oligonucleotide
aguaucuuauuucacaucu

SEQ ID NO: 1515227 - RNA, 19 nt, Artificial Sequence
  Description of Artificial Sequence: Synthetic oligonucleotide
uuuaaucauccauaaaagc

SEQ ID NO: 1515228 - RNA, 19 nt, Artificial Sequence
  Description of Artificial Sequence: Synthetic oligonucleotide
cuguaauugaauaaacuag

SEQ ID NO: 1515229 - RNA, 19 nt, Artificial Sequence
  Description of Artificial Sequence: Synthetic oligonucleotide
ugugcaaaccaauauaaga

SEQ ID NO: 1515230 - RNA, 19 nt, Artificial Sequence
  Description of Artificial Sequence: Synthetic oligonucleotide
uauaguaguaacaucuaac

SEQ ID NO: 1515231 - RNA, 19 nt, Artificial Sequence
  Description of Artificial Sequence: Synthetic oligonucleotide
uuuucccuauaaaagaccc

SEQ ID NO: 1515232 - RNA, 19 nt, Artificial Sequence
  Description of Artificial Sequence: Synthetic oligonucleotide
acaucuaacauuugaaaug

SEQ ID NO: 1515233 - RNA, 19 nt, Artificial Sequence
  Description of Artificial Sequence: Synthetic oligonucleotide
ucuguaaucuggcucagag

SEQ ID NO: 1515234 - RNA, 19 nt, Artificial Sequence
  Description of Artificial Sequence: Synthetic oligonucleotide
uuugaaaauguacuaaaau

SEQ ID NO: 1515235 - RNA, 19 nt, Artificial Sequence
  Description of Artificial Sequence: Synthetic oligonucleotide
uuuagugcuugauagggag

SEQ ID NO: 1515236 - RNA, 19 nt, Artificial Sequence
  Description of Artificial Sequence: Synthetic oligonucleotide
uagaauauaaugacagaug

SEQ ID NO: 1515237 - RNA, 19 nt, Artificial Sequence
  Description of Artificial Sequence: Synthetic oligonucleotide
auauaaaacaggagaagcc

SEQ ID NO: 1515238 - RNA, 19 nt, Artificial Sequence
  Description of Artificial Sequence: Synthetic oligonucleotide
uguuauaacugcuauugca

SEQ ID NO: 1515239 - RNA, 19 nt, Artificial Sequence
  Description of Artificial Sequence: Synthetic oligonucleotide
aguuacaccacugucuugc

SEQ ID NO: 1515240 - RNA, 19 nt, Artificial Sequence
  Description of Artificial Sequence: Synthetic oligonucleotide
auaguaguaacaucuaaca

SEQ ID NO: 1515241 - RNA, 19 nt, Artificial Sequence
  Description of Artificial Sequence: Synthetic oligonucleotide
uauaagaucuaaauucuuc

SEQ ID NO: 1515242 - RNA, 19 nt, Artificial Sequence
  Description of Artificial Sequence: Synthetic oligonucleotide
aaggagaaauacuaugucu

SEQ ID NO: 1515243 - RNA, 19 nt, Artificial Sequence
  Description of Artificial Sequence: Synthetic oligonucleotide
aggagauauacacagagca

SEQ ID NO: 1515244 - RNA, 19 nt, Artificial Sequence
  Description of Artificial Sequence: Synthetic oligonucleotide
augugcucuguuuaaauac

SEQ ID NO: 1515245 - RNA, 19 nt, Artificial Sequence
  Description of Artificial Sequence: Synthetic oligonucleotide
acaagaagcaauauuagag

SEQ ID NO: 1515246 - RNA, 19 nt, Artificial Sequence
  Description of Artificial Sequence: Synthetic oligonucleotide
aaucuguucucucaagucu

SEQ ID NO: 1515247 - RNA, 19 nt, Artificial Sequence
  Description of Artificial Sequence: Synthetic oligonucleotide
aaucuauaucauuacagau

SEQ ID NO: 1515248 - RNA, 19 nt, Artificial Sequence
  Description of Artificial Sequence: Synthetic oligonucleotide
uguaauuguauuagaguca

SEQ ID NO: 1515249 - RNA, 19 nt, Artificial Sequence
  Description of Artificial Sequence: Synthetic oligonucleotide
ucaaguaucuuauuucaca

SEQ ID NO: 1515250 - RNA, 19 nt, Artificial Sequence
  Description of Artificial Sequence: Synthetic oligonucleotide
uaaauucuggccuuguucu

SEQ ID NO: 1515251 - RNA, 19 nt, Artificial Sequence
  Description of Artificial Sequence: Synthetic oligonucleotide
auaagaucuaaauucuuca

SEQ ID NO: 1515252 - RNA, 19 nt, Artificial Sequence
  Description of Artificial Sequence: Synthetic oligonucleotide
uuguauuagagucaaguau

SEQ ID NO: 1515253 - RNA, 19 nt, Artificial Sequence
  Description of Artificial Sequence: Synthetic oligonucleotide
uagaaaucaguuaucccag

SEQ ID NO: 1515254 - RNA, 19 nt, Artificial Sequence
  Description of Artificial Sequence: Synthetic oligonucleotide
aguaguaacaucuaacauu

SEQ ID NO: 1515255 - RNA, 19 nt, Artificial Sequence
  Description of Artificial Sequence: Synthetic oligonucleotide
uguucuuugccaacuaccc

SEQ ID NO: 1515256 - RNA, 19 nt, Artificial Sequence
  Description of Artificial Sequence: Synthetic oligonucleotide
uguguaauuguauuagagu

SEQ ID NO: 1515257 - RNA, 19 nt, Artificial Sequence
  Description of Artificial Sequence: Synthetic oligonucleotide
auauaaaguaugaugguuc

SEQ ID NO: 1515258 - RNA, 19 nt, Artificial Sequence
  Description of Artificial Sequence: Synthetic oligonucleotide
accaauauaagaucuaaau

SEQ ID NO: 1515259 - RNA, 19 nt, Artificial Sequence
  Description of Artificial Sequence: Synthetic oligonucleotide
auacugacaaccccgcggc

SEQ ID NO: 1515260 - RNA, 19 nt, Artificial Sequence
  Description of Artificial Sequence: Synthetic oligonucleotide
aauauuagaguugguuuag

SEQ ID NO: 1515261 - RNA, 19 nt, Artificial Sequence
  Description of Artificial Sequence: Synthetic oligonucleotide
uaucuuauuucacaucugu

SEQ ID NO: 1515262 - RNA, 19 nt, Artificial Sequence
  Description of Artificial Sequence: Synthetic oligonucleotide
guguaauuguauuagaguc

SEQ ID NO: 1515263 - RNA, 19 nt, Artificial Sequence
  Description of Artificial Sequence: Synthetic oligonucleotide
uauaacugcuauugcaaag

SEQ ID NO: 1515264 - RNA, 19 nt, Artificial Sequence
  Description of Artificial Sequence: Synthetic oligonucleotide
uauaaaacaggagaagccu

SEQ ID NO: 1515265 - RNA, 19 nt, Artificial Sequence
  Description of Artificial Sequence: Synthetic oligonucleotide
ucccugaacaaacugaacu

SEQ ID NO: 1515266 - RNA, 19 nt, Artificial Sequence
  Description of Artificial Sequence: Synthetic oligonucleotide
aaguaucuuauuucacauc

SEQ ID NO: 1515267 - RNA, 19 nt, Artificial Sequence
  Description of Artificial Sequence: Synthetic oligonucleotide
uuagaguugguuuaguaua

SEQ ID NO: 1515268 - RNA, 19 nt, Artificial Sequence
  Description of Artificial Sequence: Synthetic oligonucleotide
gauuauaguaguaacaucu

SEQ ID NO: 1515269 - RNA, 19 nt, Artificial Sequence
  Description of Artificial Sequence: Synthetic oligonucleotide
ucgacuugcuuucuguagg

SEQ ID NO: 1515270 - RNA, 19 nt, Artificial Sequence
  Description of Artificial Sequence: Synthetic oligonucleotide
aacccguaaaaucuguucu

SEQ ID NO: 1515271 - RNA, 19 nt, Artificial Sequence
  Description of Artificial Sequence: Synthetic oligonucleotide
acauaauauauaaaacagg

SEQ ID NO: 1515272 - RNA, 19 nt, Artificial Sequence
  Description of Artificial Sequence: Synthetic oligonucleotide
uuugaagucuggaaugcug

SEQ ID NO: 1515273 - RNA, 19 nt, Artificial Sequence
  Description of Artificial Sequence: Synthetic oligonucleotide
uuacagauauaaaguauga

SEQ ID NO: 1515274 - RNA, 19 nt, Artificial Sequence
  Description of Artificial Sequence: Synthetic oligonucleotide
aaucaguuaucccaguuuu

SEQ ID NO: 1515275 - RNA, 19 nt, Artificial Sequence
  Description of Artificial Sequence: Synthetic oligonucleotide
uuuccaauuaggcaacagu

SEQ ID NO: 1515276 - RNA, 19 nt, Artificial Sequence
  Description of Artificial Sequence: Synthetic oligonucleotide
uauugcaaaggagaaauac

SEQ ID NO: 1515277 - RNA, 19 nt, Artificial Sequence
  Description of Artificial Sequence: Synthetic oligonucleotide
uuagagucaaguaucuuau

SEQ ID NO: 1515278 - RNA, 19 nt, Artificial Sequence
  Description of Artificial Sequence: Synthetic oligonucleotide
uugguuuaguauauuauau

SEQ ID NO: 1515279 - RNA, 19 nt, Artificial Sequence
  Description of Artificial Sequence: Synthetic oligonucleotide
ucauuaaacguagacugag

SEQ ID NO: 1515280 - RNA, 19 nt, Artificial Sequence
  Description of Artificial Sequence: Synthetic oligonucleotide
cugacuucaagucuagagc

SEQ ID NO: 1515281 - RNA, 19 nt, Artificial Sequence
  Description of Artificial Sequence: Synthetic oligonucleotide
uuguucuuugccaacuacc

SEQ ID NO: 1515282 - RNA, 19 nt, Artificial Sequence
  Description of Artificial Sequence: Synthetic oligonucleotide
uacacuguuggcaaucuac

SEQ ID NO: 1515283 - RNA, 19 nt, Artificial Sequence
  Description of Artificial Sequence: Synthetic oligonucleotide
ucuuauuuccaggagauau

SEQ ID NO: 1515284 - RNA, 19 nt, Artificial Sequence
  Description of Artificial Sequence: Synthetic oligonucleotide
uucuguguaauuguauuag

SEQ ID NO: 1515285 - RNA, 19 nt, Artificial Sequence
  Description of Artificial Sequence: Synthetic oligonucleotide
acuaugucuuauuuccagg

SEQ ID NO: 1515286 - RNA, 19 nt, Artificial Sequence
  Description of Artificial Sequence: Synthetic oligonucleotide
caucuaacauuugaaaugc

SEQ ID NO: 1515287 - RNA, 19 nt, Artificial Sequence
  Description of Artificial Sequence: Synthetic oligonucleotide
auauauaaaacaggagaag

SEQ ID NO: 1515288 - RNA, 19 nt, Artificial Sequence
  Description of Artificial Sequence: Synthetic oligonucleotide
agucaaguaucuuauuuca

SEQ ID NO: 1515289 - RNA, 19 nt, Artificial Sequence
  Description of Artificial Sequence: Synthetic oligonucleotide
ucuagagcagcagacauga

SEQ ID NO: 1515290 - RNA, 19 nt, Artificial Sequence
  Description of Artificial Sequence: Synthetic oligonucleotide
uaaauacugacaaccccgc

SEQ ID NO: 1515291 - RNA, 19 nt, Artificial Sequence
  Description of Artificial Sequence: Synthetic oligonucleotide
uugcaaaggagaaauacua

SEQ ID NO: 1515292 - RNA, 19 nt, Artificial Sequence
  Description of Artificial Sequence: Synthetic oligonucleotide
cuguguaauuguauuagag

SEQ ID NO: 1515293 - RNA, 19 nt, Artificial Sequence
  Description of Artificial Sequence: Synthetic oligonucleotide
auuagaguugguuuaguau

SEQ ID NO: 1515294 - RNA, 19 nt, Artificial Sequence
  Description of Artificial Sequence: Synthetic oligonucleotide
uaacauugaucuuugacuu

SEQ ID NO: 1515295 - RNA, 19 nt, Artificial Sequence
  Description of Artificial Sequence: Synthetic oligonucleotide
ugucuugcuaaauucuggc

SEQ ID NO: 1515296 - RNA, 19 nt, Artificial Sequence
  Description of Artificial Sequence: Synthetic oligonucleotide
aaagccauagaaaucaguu

SEQ ID NO: 1515297 - RNA, 19 nt, Artificial Sequence
  Description of Artificial Sequence: Synthetic oligonucleotide
aaauacugacaaccccgcg

SEQ ID NO: 1515298 - RNA, 19 nt, Artificial Sequence
  Description of Artificial Sequence: Synthetic oligonucleotide
uuauaguaguaacaucuaa

SEQ ID NO: 1515299 - RNA, 19 nt, Artificial Sequence
  Description of Artificial Sequence: Synthetic oligonucleotide
aaaucaguuaucccaguuu

SEQ ID NO: 1515300 - RNA, 19 nt, Artificial Sequence
  Description of Artificial Sequence: Synthetic oligonucleotide
agccauagaaaucaguuau

SEQ ID NO: 1515301 - RNA, 19 nt, Artificial Sequence
  Description of Artificial Sequence: Synthetic oligonucleotide
uuccaauuaggcaacaguu

SEQ ID NO: 1515302 - RNA, 19 nt, Artificial Sequence
  Description of Artificial Sequence: Synthetic oligonucleotide
uaaacuagugcaaacccuu

SEQ ID NO: 1515303 - RNA, 19 nt, Artificial Sequence
  Description of Artificial Sequence: Synthetic oligonucleotide
uaagaucuaaauucuucac

SEQ ID NO: 1515304 - RNA, 19 nt, Artificial Sequence
  Description of Artificial Sequence: Synthetic oligonucleotide
uugaagggcgauuucauaa

SEQ ID NO: 1515305 - RNA, 19 nt, Artificial Sequence
  Description of Artificial Sequence: Synthetic oligonucleotide
ucucaagucuuguaaguca

SEQ ID NO: 1515306 - RNA, 19 nt, Artificial Sequence
  Description of Artificial Sequence: Synthetic oligonucleotide
auaaugacagaugauauuu

SEQ ID NO: 1515307 - RNA, 19 nt, Artificial Sequence
  Description of Artificial Sequence: Synthetic oligonucleotide
acugcuauugcaaaggaga

SEQ ID NO: 1515308 - RNA, 19 nt, Artificial Sequence
  Description of Artificial Sequence: Synthetic oligonucleotide
aauugcucuguuccugcag

SEQ ID NO: 1515309 - RNA, 19 nt, Artificial Sequence
  Description of Artificial Sequence: Synthetic oligonucleotide
cauagaaaucaguuauccc

SEQ ID NO: 1515310 - RNA, 19 nt, Artificial Sequence
  Description of Artificial Sequence: Synthetic oligonucleotide
ucaagucuagagcagcaga

SEQ ID NO: 1515311 - RNA, 19 nt, Artificial Sequence
  Description of Artificial Sequence: Synthetic oligonucleotide
ugacagaugauauuuucau

SEQ ID NO: 1515312 - RNA, 19 nt, Artificial Sequence
  Description of Artificial Sequence: Synthetic oligonucleotide
aacuugugcaaaccaauau

SEQ ID NO: 1515313 - RNA, 19 nt, Artificial Sequence
  Description of Artificial Sequence: Synthetic oligonucleotide
cuaaauucuggccuuguuc

SEQ ID NO: 1515314 - RNA, 19 nt, Artificial Sequence
  Description of Artificial Sequence: Synthetic oligonucleotide
uauacacagagcaacuuuu

SEQ ID NO: 1515315 - RNA, 19 nt, Artificial Sequence
  Description of Artificial Sequence: Synthetic oligonucleotide
uuagugcuugauagggagg

SEQ ID NO: 1515316 - RNA, 19 nt, Artificial Sequence
  Description of Artificial Sequence: Synthetic oligonucleotide
cuguaggaaucuucuaucg

SEQ ID NO: 1515317 - RNA, 19 nt, Artificial Sequence
  Description of Artificial Sequence: Synthetic oligonucleotide
acuucaagucuagagcagc

SEQ ID NO: 1515318 - RNA, 19 nt, Artificial Sequence
  Description of Artificial Sequence: Synthetic oligonucleotide
uguuaucugcugcaaugag

SEQ ID NO: 1515319 - RNA, 19 nt, Artificial Sequence
  Description of Artificial Sequence: Synthetic oligonucleotide
uaaaguaugaugguucaau

SEQ ID NO: 1515320 - RNA, 19 nt, Artificial Sequence
  Description of Artificial Sequence: Synthetic oligonucleotide
uagggaggagucaugauaa

SEQ ID NO: 1515321 - RNA, 19 nt, Artificial Sequence
  Description of Artificial Sequence: Synthetic oligonucleotide
uugugcaaaccaauauaag

SEQ ID NO: 1515322 - RNA, 19 nt, Artificial Sequence
  Description of Artificial Sequence: Synthetic oligonucleotide
guuuaaauacugacaaccc

SEQ ID NO: 1515323 - RNA, 19 nt, Artificial Sequence
  Description of Artificial Sequence: Synthetic oligonucleotide
uauuuaucugucugaccag

SEQ ID NO: 1515324 - RNA, 19 nt, Artificial Sequence
  Description of Artificial Sequence: Synthetic oligonucleotide
ucuauuuaucugucugacc

SEQ ID NO: 1515325 - RNA, 19 nt, Artificial Sequence
  Description of Artificial Sequence: Synthetic oligonucleotide
uacaccacugucuugcuaa

SEQ ID NO: 1515326 - RNA, 19 nt, Artificial Sequence
  Description of Artificial Sequence: Synthetic oligonucleotide
ugugucuuuaacccguaaa

SEQ ID NO: 1515327 - RNA, 19 nt, Artificial Sequence
  Description of Artificial Sequence: Synthetic oligonucleotide
ucuguaggaaucuucuauc

SEQ ID NO: 1515328 - RNA, 19 nt, Artificial Sequence
  Description of Artificial Sequence: Synthetic oligonucleotide
ugugcucuguuuaaauacu

SEQ ID NO: 1515329 - RNA, 19 nt, Artificial Sequence
  Description of Artificial Sequence: Synthetic oligonucleotide
aaaccaauauaagaucuaa

SEQ ID NO: 1515330 - RNA, 19 nt, Artificial Sequence
  Description of Artificial Sequence: Synthetic oligonucleotide
uucgacuugcuuucuguag

SEQ ID NO: 1515331 - RNA, 19 nt, Artificial Sequence
  Description of Artificial Sequence: Synthetic oligonucleotide
auuuaucugucugaccagg

SEQ ID NO: 1515332 - RNA, 19 nt, Artificial Sequence
  Description of Artificial Sequence: Synthetic oligonucleotide
uauaaugacagaugauauu

SEQ ID NO: 1515333 - RNA, 19 nt, Artificial Sequence
  Description of Artificial Sequence: Synthetic oligonucleotide
uuuuagugcuugauaggga

SEQ ID NO: 1515334 - RNA, 19 nt, Artificial Sequence
  Description of Artificial Sequence: Synthetic oligonucleotide
auuguauuagagucaagua

SEQ ID NO: 1515335 - RNA, 19 nt, Artificial Sequence
  Description of Artificial Sequence: Synthetic oligonucleotide
uguaggaaucuucuaucgu

SEQ ID NO: 1515336 - RNA, 19 nt, Artificial Sequence
  Description of Artificial Sequence: Synthetic oligonucleotide
caguaaaacacaagaagca

SEQ ID NO: 1515337 - RNA, 19 nt, Artificial Sequence
  Description of Artificial Sequence: Synthetic oligonucleotide
uuauaacugcuauugcaaa

SEQ ID NO: 1515338 - RNA, 19 nt, Artificial Sequence
  Description of Artificial Sequence: Synthetic oligonucleotide
ugcaaugaguuugaagggc

SEQ ID NO: 1515339 - RNA, 19 nt, Artificial Sequence
  Description of Artificial Sequence: Synthetic oligonucleotide
cauuucuguaaucuggcuc

SEQ ID NO: 1515340 - RNA, 19 nt, Artificial Sequence
  Description of Artificial Sequence: Synthetic oligonucleotide
uaguaguaacaucuaacau

SEQ ID NO: 1515341 - RNA, 19 nt, Artificial Sequence
  Description of Artificial Sequence: Synthetic oligonucleotide
caagucuagagcagcagac

SEQ ID NO: 1515342 - RNA, 19 nt, Artificial Sequence
  Description of Artificial Sequence: Synthetic oligonucleotide
cuugugcaaaccaauauaa

SEQ ID NO: 1515343 - RNA, 19 nt, Artificial Sequence
  Description of Artificial Sequence: Synthetic oligonucleotide
ucuguguaauuguauuaga

SEQ ID NO: 1515344 - RNA, 19 nt, Artificial Sequence
  Description of Artificial Sequence: Synthetic oligonucleotide
ugauuauaguaguaacauc

SEQ ID NO: 1515345 - RNA, 19 nt, Artificial Sequence
  Description of Artificial Sequence: Synthetic oligonucleotide
uaauuuaaucugacaguaa

SEQ ID NO: 1515346 - RNA, 19 nt, Artificial Sequence
  Description of Artificial Sequence: Synthetic oligonucleotide
guagacugagcuguaauug

SEQ ID NO: 1515347 - RNA, 19 nt, Artificial Sequence
  Description of Artificial Sequence: Synthetic oligonucleotide
uucuauuuaucugucugac

SEQ ID NO: 1515348 - RNA, 19 nt, Artificial Sequence
  Description of Artificial Sequence: Synthetic oligonucleotide
ugguuuaguauauuauaua

SEQ ID NO: 1515349 - RNA, 19 nt, Artificial Sequence
  Description of Artificial Sequence: Synthetic oligonucleotide
uauuagaguugguuuagua

SEQ ID NO: 1515350 - RNA, 19 nt, Artificial Sequence
  Description of Artificial Sequence: Synthetic oligonucleotide
guugguuuaguauauuaua

SEQ ID NO: 1515351 - RNA, 19 nt, Artificial Sequence
  Description of Artificial Sequence: Synthetic oligonucleotide
uuaggcaacaguucuucau

SEQ ID NO: 1515352 - RNA, 19 nt, Artificial Sequence
  Description of Artificial Sequence: Synthetic oligonucleotide
ugaccaggucauaaaauau

SEQ ID NO: 1515353 - RNA, 19 nt, Artificial Sequence
  Description of Artificial Sequence: Synthetic oligonucleotide
acuugugcaaaccaauaua

SEQ ID NO: 1515354 - RNA, 19 nt, Artificial Sequence
  Description of Artificial Sequence: Synthetic oligonucleotide
ugcaaaggagaaauacuau

SEQ ID NO: 1515355 - RNA, 19 nt, Artificial Sequence
  Description of Artificial Sequence: Synthetic oligonucleotide
uaacccguaaaaucuguuc

SEQ ID NO: 1515356 - RNA, 19 nt, Artificial Sequence
  Description of Artificial Sequence: Synthetic oligonucleotide
cuucugugucuuuaacccg

SEQ ID NO: 1515357 - RNA, 19 nt, Artificial Sequence
  Description of Artificial Sequence: Synthetic oligonucleotide
guaauuuaaucugacagua

SEQ ID NO: 1515358 - RNA, 19 nt, Artificial Sequence
  Description of Artificial Sequence: Synthetic oligonucleotide
acugacaaccccgcggccc

SEQ ID NO: 1515359 - RNA, 19 nt, Artificial Sequence
  Description of Artificial Sequence: Synthetic oligonucleotide
aguaaaacacaagaagcaa

SEQ ID NO: 1515360 - RNA, 19 nt, Artificial Sequence
  Description of Artificial Sequence: Synthetic oligonucleotide
ucauccauaaaagcuguaa

SEQ ID NO: 1515361 - RNA, 19 nt, Artificial Sequence
  Description of Artificial Sequence: Synthetic oligonucleotide
auagggaggagucaugaua

SEQ ID NO: 1515362 - RNA, 19 nt, Artificial Sequence
  Description of Artificial Sequence: Synthetic oligonucleotide
aauaucucauuaacauuga

SEQ ID NO: 1515363 - RNA, 19 nt, Artificial Sequence
  Description of Artificial Sequence: Synthetic oligonucleotide
aagccauagaaaucaguua

SEQ ID NO: 1515364 - RNA, 19 nt, Artificial Sequence
  Description of Artificial Sequence: Synthetic oligonucleotide
acccguaaaaucuguucuc

SEQ ID NO: 1515365 - RNA, 19 nt, Artificial Sequence
  Description of Artificial Sequence: Synthetic oligonucleotide
ugcuugauagggaggaguc

SEQ ID NO: 1515366 - RNA, 19 nt, Artificial Sequence
  Description of Artificial Sequence: Synthetic oligonucleotide
cucuguuuaaauacugaca

SEQ ID NO: 1515367 - RNA, 19 nt, Artificial Sequence
  Description of Artificial Sequence: Synthetic oligonucleotide
uuuaucugucugaccaggu

SEQ ID NO: 1515368 - RNA, 19 nt, Artificial Sequence
  Description of Artificial Sequence: Synthetic oligonucleotide
auauaaugacagaugauau

SEQ ID NO: 1515369 - RNA, 19 nt, Artificial Sequence
  Description of Artificial Sequence: Synthetic oligonucleotide
uucccuauaaaagacccau

SEQ ID NO: 1515370 - RNA, 19 nt, Artificial Sequence
  Description of Artificial Sequence: Synthetic oligonucleotide
guuauaacugcuauugcaa

SEQ ID NO: 1515371 - RNA, 19 nt, Artificial Sequence
  Description of Artificial Sequence: Synthetic oligonucleotide
uuucccuauaaaagaccca

SEQ ID NO: 1515372 - RNA, 19 nt, Artificial Sequence
  Description of Artificial Sequence: Synthetic oligonucleotide
aucugcugcaaugaguuug

SEQ ID NO: 1515373 - RNA, 19 nt, Artificial Sequence
  Description of Artificial Sequence: Synthetic oligonucleotide
uguacucacgcaugaugug

SEQ ID NO: 1515374 - RNA, 19 nt, Artificial Sequence
  Description of Artificial Sequence: Synthetic oligonucleotide
caggagauauacacagagc

SEQ ID NO: 1515375 - RNA, 19 nt, Artificial Sequence
  Description of Artificial Sequence: Synthetic oligonucleotide
aacugcuauugcaaaggag

SEQ ID NO: 1515376 - RNA, 19 nt, Artificial Sequence
  Description of Artificial Sequence: Synthetic oligonucleotide
ugaagucuggaaugcuggc

SEQ ID NO: 1515377 - RNA, 19 nt, Artificial Sequence
  Description of Artificial Sequence: Synthetic oligonucleotide
uagugcuugauagggagga

SEQ ID NO: 1515378 - RNA, 19 nt, Artificial Sequence
  Description of Artificial Sequence: Synthetic oligonucleotide
agcaauauuagaguugguu

SEQ ID NO: 1515379 - RNA, 19 nt, Artificial Sequence
  Description of Artificial Sequence: Synthetic oligonucleotide
acaguuacaccacugucuu

SEQ ID NO: 1515380 - RNA, 19 nt, Artificial Sequence
  Description of Artificial Sequence: Synthetic oligonucleotide
cacaagcuuguacucacgc

SEQ ID NO: 1515381 - RNA, 19 nt, Artificial Sequence
  Description of Artificial Sequence: Synthetic oligonucleotide
uggcaaucuacuucgacuu

SEQ ID NO: 1515382 - RNA, 19 nt, Artificial Sequence
  Description of Artificial Sequence: Synthetic oligonucleotide
aaauugcucuguuccugca

SEQ ID NO: 1515383 - RNA, 19 nt, Artificial Sequence
  Description of Artificial Sequence: Synthetic oligonucleotide
auugaucuuugacuuugca

SEQ ID NO: 1515384 - RNA, 19 nt, Artificial Sequence
  Description of Artificial Sequence: Synthetic oligonucleotide
acugagcuguaauugaaua

SEQ ID NO: 1515385 - RNA, 19 nt, Artificial Sequence
  Description of Artificial Sequence: Synthetic oligonucleotide
uaucguugggucauauuuu

SEQ ID NO: 1515386 - RNA, 19 nt, Artificial Sequence
  Description of Artificial Sequence: Synthetic oligonucleotide
agcuguaauuuaaucugac

SEQ ID NO: 1515387 - RNA, 19 nt, Artificial Sequence
  Description of Artificial Sequence: Synthetic oligonucleotide
ucuucuaucguugggucau

SEQ ID NO: 1515388 - RNA, 19 nt, Artificial Sequence
  Description of Artificial Sequence: Synthetic oligonucleotide
aucuauaucauuacagaua

SEQ ID NO: 1515389 - RNA, 19 nt, Artificial Sequence
  Description of Artificial Sequence: Synthetic oligonucleotide
aggauuuccagcauacacu

SEQ ID NO: 1515390 - RNA, 19 nt, Artificial Sequence
  Description of Artificial Sequence: Synthetic oligonucleotide
uucaagucuagagcagcag

SEQ ID NO: 1515391 - RNA, 19 nt, Artificial Sequence
  Description of Artificial Sequence: Synthetic oligonucleotide
cuggcacuuuccaauuagg

SEQ ID NO: 1515392 - RNA, 19 nt, Artificial Sequence
  Description of Artificial Sequence: Synthetic oligonucleotide
uacucacgcaugaugugcu

SEQ ID NO: 1515393 - RNA, 19 nt, Artificial Sequence
  Description of Artificial Sequence: Synthetic oligonucleotide
cacaagaagcaauauuaga

SEQ ID NO: 1515394 - RNA, 19 nt, Artificial Sequence
  Description of Artificial Sequence: Synthetic oligonucleotide
aaggucaauaugaaaucau

SEQ ID NO: 1515395 - RNA, 19 nt, Artificial Sequence
  Description of Artificial Sequence: Synthetic oligonucleotide
cuguuuaaauacugacaac

SEQ ID NO: 1515396 - RNA, 19 nt, Artificial Sequence
  Description of Artificial Sequence: Synthetic oligonucleotide
gucuugcuaaauucuggcc

SEQ ID NO: 1515397 - RNA, 19 nt, Artificial Sequence
  Description of Artificial Sequence: Synthetic oligonucleotide
uaaugacagaugauauuuu

SEQ ID NO: 1515398 - RNA, 19 nt, Artificial Sequence
  Description of Artificial Sequence: Synthetic oligonucleotide
aaaaucauuggaacaucuu

SEQ ID NO: 1515399 - RNA, 19 nt, Artificial Sequence
  Description of Artificial Sequence: Synthetic oligonucleotide
gguuuaguauauuauauau

SEQ ID NO: 1515400 - RNA, 19 nt, Artificial Sequence
  Description of Artificial Sequence: Synthetic oligonucleotide
aagggcgauuucauaaucu

SEQ ID NO: 1515401 - RNA, 19 nt, Artificial Sequence
  Description of Artificial Sequence: Synthetic oligonucleotide
guucucucaagucuuguaa

SEQ ID NO: 1515402 - RNA, 19 nt, Artificial Sequence
  Description of Artificial Sequence: Synthetic oligonucleotide
gaugugcucuguuuaaaua

SEQ ID NO: 1515403 - RNA, 19 nt, Artificial Sequence
  Description of Artificial Sequence: Synthetic oligonucleotide
ucuuugccaacuacccgcu

SEQ ID NO: 1515404 - RNA, 19 nt, Artificial Sequence
  Description of Artificial Sequence: Synthetic oligonucleotide
gcacuuuccaauuaggcaa

SEQ ID NO: 1515405 - RNA, 19 nt, Artificial Sequence
  Description of Artificial Sequence: Synthetic oligonucleotide
ucacgcaugaugugcucug

SEQ ID NO: 1515406 - RNA, 19 nt, Artificial Sequence
  Description of Artificial Sequence: Synthetic oligonucleotide
caagaagcaauauuagagu

SEQ ID NO: 1515407 - RNA, 19 nt, Artificial Sequence
  Description of Artificial Sequence: Synthetic oligonucleotide
agcuguaauugaauaaacu

SEQ ID NO: 1515408 - RNA, 19 nt, Artificial Sequence
  Description of Artificial Sequence: Synthetic oligonucleotide
uuugaagggcgauuucaua

SEQ ID NO: 1515409 - RNA, 19 nt, Artificial Sequence
  Description of Artificial Sequence: Synthetic oligonucleotide
aaacuagugcaaacccuug

SEQ ID NO: 1515410 - RNA, 19 nt, Artificial Sequence
  Description of Artificial Sequence: Synthetic oligonucleotide
guacucacgcaugaugugc

SEQ ID NO: 1515411 - RNA, 19 nt, Artificial Sequence
  Description of Artificial Sequence: Synthetic oligonucleotide
uuaacccguaaaaucuguu

SEQ ID NO: 1515412 - RNA, 19 nt, Artificial Sequence
  Description of Artificial Sequence: Synthetic oligonucleotide
cauugaucuuugacuuugc

SEQ ID NO: 1515413 - RNA, 19 nt, Artificial Sequence
  Description of Artificial Sequence: Synthetic oligonucleotide
gauauaaaguaugaugguu

SEQ ID NO: 1515414 - RNA, 19 nt, Artificial Sequence
  Description of Artificial Sequence: Synthetic oligonucleotide
gaagggcgauuucauaauc

SEQ ID NO: 1515415 - RNA, 19 nt, Artificial Sequence
  Description of Artificial Sequence: Synthetic oligonucleotide
aacugucagagcagacuuc

SEQ ID NO: 1515416 - RNA, 19 nt, Artificial Sequence
  Description of Artificial Sequence: Synthetic oligonucleotide
gcaaugaguuugaagggcg

SEQ ID NO: 1515417 - RNA, 19 nt, Artificial Sequence
  Description of Artificial Sequence: Synthetic oligonucleotide
guaguaacaucuaacauuu

SEQ ID NO: 1515418 - RNA, 19 nt, Artificial Sequence
  Description of Artificial Sequence: Synthetic oligonucleotide
gacuucaagucuagagcag

SEQ ID NO: 1515419 - RNA, 19 nt, Artificial Sequence
  Description of Artificial Sequence: Synthetic oligonucleotide
cacuuuccaauuaggcaac

SEQ ID NO: 1515420 - RNA, 19 nt, Artificial Sequence
  Description of Artificial Sequence: Synthetic oligonucleotide
cacgccuccugaaccaagg

SEQ ID NO: 1515421 - RNA, 19 nt, Artificial Sequence
  Description of Artificial Sequence: Synthetic oligonucleotide
cugaccaggucauaaaaua

SEQ ID NO: 1515422 - RNA, 19 nt, Artificial Sequence
  Description of Artificial Sequence: Synthetic oligonucleotide
ggcacuuuccaauuaggca

SEQ ID NO: 1515423 - RNA, 19 nt, Artificial Sequence
  Description of Artificial Sequence: Synthetic oligonucleotide
auguuaucugcugcaauga

SEQ ID NO: 1515424 - RNA, 19 nt, Artificial Sequence
  Description of Artificial Sequence: Synthetic oligonucleotide
ugucugaccaggucauaaa

SEQ ID NO: 1515425 - RNA, 19 nt, Artificial Sequence
  Description of Artificial Sequence: Synthetic oligonucleotide
caguucuucauuucuguaa

SEQ ID NO: 1515426 - RNA, 19 nt, Artificial Sequence
  Description of Artificial Sequence: Synthetic oligonucleotide
uccccacgccuccugaacc

SEQ ID NO: 1515427 - RNA, 19 nt, Artificial Sequence
  Description of Artificial Sequence: Synthetic oligonucleotide
cauuacagauauaaaguau

SEQ ID NO: 1515428 - RNA, 19 nt, Artificial Sequence
  Description of Artificial Sequence: Synthetic oligonucleotide
cugacaaccccgcggcccg

SEQ ID NO: 1515429 - RNA, 19 nt, Artificial Sequence
  Description of Artificial Sequence: Synthetic oligonucleotide
uaguaacaucuaacauuug

SEQ ID NO: 1515430 - RNA, 19 nt, Artificial Sequence
  Description of Artificial Sequence: Synthetic oligonucleotide
cuaucguugggucauauuu

SEQ ID NO: 1515431 - RNA, 19 nt, Artificial Sequence
  Description of Artificial Sequence: Synthetic oligonucleotide
agggcgauuucauaaucua

SEQ ID NO: 1515432 - RNA, 19 nt, Artificial Sequence
  Description of Artificial Sequence: Synthetic oligonucleotide
gcauccaugcucuucugug

SEQ ID NO: 1515433 - RNA, 19 nt, Artificial Sequence
  Description of Artificial Sequence: Synthetic oligonucleotide
auuauaguaguaacaucua

SEQ ID NO: 1515434 - RNA, 19 nt, Artificial Sequence
  Description of Artificial Sequence: Synthetic oligonucleotide
cucucaagucuuguaaguc

SEQ ID NO: 1515435 - RNA, 19 nt, Artificial Sequence
  Description of Artificial Sequence: Synthetic oligonucleotide
auucccugaacaaacugaa

SEQ ID NO: 1515436 - RNA, 19 nt, Artificial Sequence
  Description of Artificial Sequence: Synthetic oligonucleotide
cuucaagucuagagcagca

SEQ ID NO: 1515437 - RNA, 19 nt, Artificial Sequence
  Description of Artificial Sequence: Synthetic oligonucleotide
auaucauuacagauauaaa

SEQ ID NO: 1515438 - RNA, 19 nt, Artificial Sequence
  Description of Artificial Sequence: Synthetic oligonucleotide
cuuauuuccaggagauaua

SEQ ID NO: 1515439 - RNA, 19 nt, Artificial Sequence
  Description of Artificial Sequence: Synthetic oligonucleotide
guaggaaucuucuaucguu

SEQ ID NO: 1515440 - RNA, 19 nt, Artificial Sequence
  Description of Artificial Sequence: Synthetic oligonucleotide
gugcaaaccaauauaagau

SEQ ID NO: 1515441 - RNA, 19 nt, Artificial Sequence
  Description of Artificial Sequence: Synthetic oligonucleotide
guaucuuauuucacaucug

SEQ ID NO: 1515442 - RNA, 19 nt, Artificial Sequence
  Description of Artificial Sequence: Synthetic oligonucleotide
caacuacccgcucaucuuc

SEQ ID NO: 1515443 - RNA, 19 nt, Artificial Sequence
  Description of Artificial Sequence: Synthetic oligonucleotide
uggccuuguucuuugccaa

SEQ ID NO: 1515444 - RNA, 19 nt, Artificial Sequence
  Description of Artificial Sequence: Synthetic oligonucleotide
acguagacugagcuguaau

SEQ ID NO: 1515445 - RNA, 19 nt, Artificial Sequence
  Description of Artificial Sequence: Synthetic oligonucleotide
cccugaacaaacugaacug

SEQ ID NO: 1515446 - RNA, 19 nt, Artificial Sequence
  Description of Artificial Sequence: Synthetic oligonucleotide
gccuccugaaccaaggacc

SEQ ID NO: 1515447 - RNA, 19 nt, Artificial Sequence
  Description of Artificial Sequence: Synthetic oligonucleotide
caaaccaauauaagaucua

SEQ ID NO: 1515448 - RNA, 19 nt, Artificial Sequence
  Description of Artificial Sequence: Synthetic oligonucleotide
acacuguuggcaaucuacu

SEQ ID NO: 1515449 - RNA, 19 nt, Artificial Sequence
  Description of Artificial Sequence: Synthetic oligonucleotide
uguuggcaaucuacuucga

SEQ ID NO: 1515450 - RNA, 19 nt, Artificial Sequence
  Description of Artificial Sequence: Synthetic oligonucleotide
auauuagaguugguuuagu

SEQ ID NO: 1515451 - RNA, 19 nt, Artificial Sequence
  Description of Artificial Sequence: Synthetic oligonucleotide
gcuguaauuuaaucugaca

SEQ ID NO: 1515452 - RNA, 19 nt, Artificial Sequence
  Description of Artificial Sequence: Synthetic oligonucleotide
auauaagaucuaaauucuu

SEQ ID NO: 1515453 - RNA, 19 nt, Artificial Sequence
  Description of Artificial Sequence: Synthetic oligonucleotide
gcaaucuacuucgacuugc

SEQ ID NO: 1515454 - RNA, 19 nt, Artificial Sequence
  Description of Artificial Sequence: Synthetic oligonucleotide
ucuaucguugggucauauu

SEQ ID NO: 1515455 - RNA, 19 nt, Artificial Sequence
  Description of Artificial Sequence: Synthetic oligonucleotide
cagggaacuugugcaaacc

SEQ ID NO: 1515456 - RNA, 19 nt, Artificial Sequence
  Description of Artificial Sequence: Synthetic oligonucleotide
agcagacaugauuucuuuu

SEQ ID NO: 1515457 - RNA, 19 nt, Artificial Sequence
  Description of Artificial Sequence: Synthetic oligonucleotide
uuccccacgccuccugaac

SEQ ID NO: 1515458 - RNA, 19 nt, Artificial Sequence
  Description of Artificial Sequence: Synthetic oligonucleotide
uuacaccacugucuugcua

SEQ ID NO: 1515459 - RNA, 19 nt, Artificial Sequence
  Description of Artificial Sequence: Synthetic oligonucleotide
aggucaauaugaaaucauu

SEQ ID NO: 1515460 - RNA, 19 nt, Artificial Sequence
  Description of Artificial Sequence: Synthetic oligonucleotide
gaacuugugcaaaccaaua

SEQ ID NO: 1515461 - RNA, 19 nt, Artificial Sequence
  Description of Artificial Sequence: Synthetic oligonucleotide
uccucuccgccgcggcucg

SEQ ID NO: 1515462 - RNA, 19 nt, Artificial Sequence
  Description of Artificial Sequence: Synthetic oligonucleotide
auaaaguaugaugguucaa

SEQ ID NO: 1515463 - RNA, 19 nt, Artificial Sequence
  Description of Artificial Sequence: Synthetic oligonucleotide
uugcuaaauucuggccuug

SEQ ID NO: 1515464 - RNA, 19 nt, Artificial Sequence
  Description of Artificial Sequence: Synthetic oligonucleotide
ucccuauaaaagacccauu

SEQ ID NO: 1515465 - RNA, 19 nt, Artificial Sequence
  Description of Artificial Sequence: Synthetic oligonucleotide
gaguuugaagggcgauuuc

SEQ ID NO: 1515466 - RNA, 19 nt, Artificial Sequence
  Description of Artificial Sequence: Synthetic oligonucleotide
caaugaguuugaagggcga

SEQ ID NO: 1515467 - RNA, 19 nt, Artificial Sequence
  Description of Artificial Sequence: Synthetic oligonucleotide
gaccacaagcuuguacuca

SEQ ID NO: 1515468 - RNA, 19 nt, Artificial Sequence
  Description of Artificial Sequence: Synthetic oligonucleotide
aacguagacugagcuguaa

SEQ ID NO: 1515469 - RNA, 19 nt, Artificial Sequence
  Description of Artificial Sequence: Synthetic oligonucleotide
cagcauacacuguuggcaa

SEQ ID NO: 1515470 - RNA, 19 nt, Artificial Sequence
  Description of Artificial Sequence: Synthetic oligonucleotide
uacugacaaccccgcggcc

SEQ ID NO: 1515471 - RNA, 19 nt, Artificial Sequence
  Description of Artificial Sequence: Synthetic oligonucleotide
ugcuaaauucuggccuugu

SEQ ID NO: 1515472 - RNA, 19 nt, Artificial Sequence
  Description of Artificial Sequence: Synthetic oligonucleotide
cugcugacuucaagucuag

SEQ ID NO: 1515473 - RNA, 19 nt, Artificial Sequence
  Description of Artificial Sequence: Synthetic oligonucleotide
uagagucaaguaucuuauu

SEQ ID NO: 1515474 - RNA, 19 nt, Artificial Sequence
  Description of Artificial Sequence: Synthetic oligonucleotide
guauuagagucaaguaucu

SEQ ID NO: 1515475 - RNA, 19 nt, Artificial Sequence
  Description of Artificial Sequence: Synthetic oligonucleotide
cucgggcucgggcacugcg

SEQ ID NO: 1515476 - RNA, 19 nt, Artificial Sequence
  Description of Artificial Sequence: Synthetic oligonucleotide
ggcgauuucauaaucuaua

SEQ ID NO: 1515477 - RNA, 19 nt, Artificial Sequence
  Description of Artificial Sequence: Synthetic oligonucleotide
cugaaccaaggaccacaag

SEQ ID NO: 1515478 - RNA, 19 nt, Artificial Sequence
  Description of Artificial Sequence: Synthetic oligonucleotide
gcuuugaaagccauagaaa

SEQ ID NO: 1515479 - RNA, 19 nt, Artificial Sequence
  Description of Artificial Sequence: Synthetic oligonucleotide
augaugugcucuguuuaaa

SEQ ID NO: 1515480 - RNA, 19 nt, Artificial Sequence
  Description of Artificial Sequence: Synthetic oligonucleotide
ugcuggcacuuuccaauua

SEQ ID NO: 1515481 - RNA, 19 nt, Artificial Sequence
  Description of Artificial Sequence: Synthetic oligonucleotide
uucuguaaucuggcucaga

SEQ ID NO: 1515482 - RNA, 19 nt, Artificial Sequence
  Description of Artificial Sequence: Synthetic oligonucleotide
cucaagucuuguaagucau

SEQ ID NO: 1515483 - RNA, 19 nt, Artificial Sequence
  Description of Artificial Sequence: Synthetic oligonucleotide
ggcaaucuacuucgacuug

SEQ ID NO: 1515484 - RNA, 19 nt, Artificial Sequence
  Description of Artificial Sequence: Synthetic oligonucleotide
uucuaucguugggucauau

SEQ ID NO: 1515485 - RNA, 19 nt, Artificial Sequence
  Description of Artificial Sequence: Synthetic oligonucleotide
aucuaacauuugaaaugca

SEQ ID NO: 1515486 - RNA, 19 nt, Artificial Sequence
  Description of Artificial Sequence: Synthetic oligonucleotide
gcauuaugcacaaacaauu

SEQ ID NO: 1515487 - RNA, 19 nt, Artificial Sequence
  Description of Artificial Sequence: Synthetic oligonucleotide
caguuacaccacugucuug

SEQ ID NO: 1515488 - RNA, 19 nt, Artificial Sequence
  Description of Artificial Sequence: Synthetic oligonucleotide
ggagauauacacagagcaa

SEQ ID NO: 1515489 - RNA, 19 nt, Artificial Sequence
  Description of Artificial Sequence: Synthetic oligonucleotide
aagcaauauuagaguuggu

SEQ ID NO: 1515490 - RNA, 19 nt, Artificial Sequence
  Description of Artificial Sequence: Synthetic oligonucleotide
auacacuguuggcaaucua

SEQ ID NO: 1515491 - RNA, 19 nt, Artificial Sequence
  Description of Artificial Sequence: Synthetic oligonucleotide
ccagcauacacuguuggca

SEQ ID NO: 1515492 - RNA, 19 nt, Artificial Sequence
  Description of Artificial Sequence: Synthetic oligonucleotide
acuuuccaauuaggcaaca

SEQ ID NO: 1515493 - RNA, 19 nt, Artificial Sequence
  Description of Artificial Sequence: Synthetic oligonucleotide
gcucuguuccugcaguauc

SEQ ID NO: 1515494 - RNA, 19 nt, Artificial Sequence
  Description of Artificial Sequence: Synthetic oligonucleotide
cagaugauauuuucauaau

SEQ ID NO: 1515495 - RNA, 19 nt, Artificial Sequence
  Description of Artificial Sequence: Synthetic oligonucleotide
agggaggagucaugauaaa

SEQ ID NO: 1515496 - RNA, 19 nt, Artificial Sequence
  Description of Artificial Sequence: Synthetic oligonucleotide
cugucugaccaggucauaa

SEQ ID NO: 1515497 - RNA, 19 nt, Artificial Sequence
  Description of Artificial Sequence: Synthetic oligonucleotide
ugcgcggcggcggcggcgg

SEQ ID NO: 1515498 - RNA, 19 nt, Artificial Sequence
  Description of Artificial Sequence: Synthetic oligonucleotide
aaacguagacugagcugua

SEQ ID NO: 1515499 - RNA, 19 nt, Artificial Sequence
  Description of Artificial Sequence: Synthetic oligonucleotide
ccacaagcuuguacucacg

SEQ ID NO: 1515500 - RNA, 19 nt, Artificial Sequence
  Description of Artificial Sequence: Synthetic oligonucleotide
ggucaauaugaaaucauuu

SEQ ID NO: 1515501 - RNA, 19 nt, Artificial Sequence
  Description of Artificial Sequence: Synthetic oligonucleotide
gcgauuucauaaucuauau

SEQ ID NO: 1515502 - RNA, 19 nt, Artificial Sequence
  Description of Artificial Sequence: Synthetic oligonucleotide
guuugaagggcgauuucau

SEQ ID NO: 1515503 - RNA, 19 nt, Artificial Sequence
  Description of Artificial Sequence: Synthetic oligonucleotide
gcauacacuguuggcaauc

SEQ ID NO: 1515504 - RNA, 19 nt, Artificial Sequence
  Description of Artificial Sequence: Synthetic oligonucleotide
cuuugccaacuacccgcuc

SEQ ID NO: 1515505 - RNA, 19 nt, Artificial Sequence
  Description of Artificial Sequence: Synthetic oligonucleotide
gcugcugacuucaagucua

SEQ ID NO: 1515506 - RNA, 19 nt, Artificial Sequence
  Description of Artificial Sequence: Synthetic oligonucleotide
cuauaucauuacagauaua

SEQ ID NO: 1515507 - RNA, 19 nt, Artificial Sequence
  Description of Artificial Sequence: Synthetic oligonucleotide
gccaacuacccgcucaucu

SEQ ID NO: 1515508 - RNA, 19 nt, Artificial Sequence
  Description of Artificial Sequence: Synthetic oligonucleotide
ccuccugaaccaaggacca

SEQ ID NO: 1515509 - RNA, 19 nt, Artificial Sequence
  Description of Artificial Sequence: Synthetic oligonucleotide
gugcuugauagggaggagu

SEQ ID NO: 1515510 - RNA, 19 nt, Artificial Sequence
  Description of Artificial Sequence: Synthetic oligonucleotide
gggaggagucaugauaaaa

SEQ ID NO: 1515511 - RNA, 19 nt, Artificial Sequence
  Description of Artificial Sequence: Synthetic oligonucleotide
ugacaaccccgcggcccgg

SEQ ID NO: 1515512 - RNA, 19 nt, Artificial Sequence
  Description of Artificial Sequence: Synthetic oligonucleotide
ucugucugaccaggucaua

SEQ ID NO: 1515513 - RNA, 19 nt, Artificial Sequence
  Description of Artificial Sequence: Synthetic oligonucleotide
caaccccgcggcccggcgc

SEQ ID NO: 1515514 - RNA, 19 nt, Artificial Sequence
  Description of Artificial Sequence: Synthetic oligonucleotide
gacaaccccgcggcccggc

SEQ ID NO: 1515515 - RNA, 19 nt, Artificial Sequence
  Description of Artificial Sequence: Synthetic oligonucleotide
cuccugaaccaaggaccac

SEQ ID NO: 1515516 - RNA, 19 nt, Artificial Sequence
  Description of Artificial Sequence: Synthetic oligonucleotide
agaagccucuucagauuua

SEQ ID NO: 1515517 - RNA, 19 nt, Artificial Sequence
  Description of Artificial Sequence: Synthetic oligonucleotide
cacuguuggcaaucuacuu

SEQ ID NO: 1515518 - RNA, 19 nt, Artificial Sequence
  Description of Artificial Sequence: Synthetic oligonucleotide
cucgggcacugcgcggcgg

SEQ ID NO: 1515519 - RNA, 19 nt, Artificial Sequence
  Description of Artificial Sequence: Synthetic oligonucleotide
ccuauaaaagacccauuuu

SEQ ID NO: 1515520 - RNA, 19 nt, Artificial Sequence
  Description of Artificial Sequence: Synthetic oligonucleotide
ggcacugcgcggcggcggc

SEQ ID NO: 1515521 - RNA, 19 nt, Artificial Sequence
  Description of Artificial Sequence: Synthetic oligonucleotide
ggagaagccucuucagauu

SEQ ID NO: 1515522 - RNA, 19 nt, Artificial Sequence
  Description of Artificial Sequence: Synthetic oligonucleotide
ugccaacuacccgcucauc

SEQ ID NO: 1515523 - RNA, 19 nt, Artificial Sequence
  Description of Artificial Sequence: Synthetic oligonucleotide
cuuggccauucuucauaua

SEQ ID NO: 1515524 - RNA, 19 nt, Artificial Sequence
  Description of Artificial Sequence: Synthetic oligonucleotide
cucacgcaugaugugcucu

SEQ ID NO: 1515525 - RNA, 19 nt, Artificial Sequence
  Description of Artificial Sequence: Synthetic oligonucleotide
gaaaugcauccaugcucuu

SEQ ID NO: 1515526 - RNA, 19 nt, Artificial Sequence
  Description of Artificial Sequence: Synthetic oligonucleotide
caugcucuucuguguaauu

SEQ ID NO: 1515527 - RNA, 19 nt, Artificial Sequence
  Description of Artificial Sequence: Synthetic oligonucleotide
ccacgccuccugaaccaag

SEQ ID NO: 1515528 - RNA, 19 nt, Artificial Sequence
  Description of Artificial Sequence: Synthetic oligonucleotide
cgggcucgggcacugcgcg

SEQ ID NO: 1515529 - RNA, 19 nt, Artificial Sequence
  Description of Artificial Sequence: Synthetic oligonucleotide
cuccuccuccucccuccuc

SEQ ID NO: 1515530 - RNA, 19 nt, Artificial Sequence
  Description of Artificial Sequence: Synthetic oligonucleotide
gggcacugcgcggcggcgg

SEQ ID NO: 1515531 - RNA, 19 nt, Artificial Sequence
  Description of Artificial Sequence: Synthetic oligonucleotide
cgacuugcuuucuguagga

SEQ ID NO: 1515532 - RNA, 19 nt, Artificial Sequence
  Description of Artificial Sequence: Synthetic oligonucleotide
gggcgauuucauaaucuau

SEQ ID NO: 1515533 - RNA, 19 nt, Artificial Sequence
  Description of Artificial Sequence: Synthetic oligonucleotide
cuucuaucguugggucaua

SEQ ID NO: 1515534 - RNA, 19 nt, Artificial Sequence
  Description of Artificial Sequence: Synthetic oligonucleotide
ccaacuacccgcucaucuu

SEQ ID NO: 1515535 - RNA, 19 nt, Artificial Sequence
  Description of Artificial Sequence: Synthetic oligonucleotide
cacgcaugaugugcucugu

SEQ ID NO: 1515536 - RNA, 19 nt, Artificial Sequence
  Description of Artificial Sequence: Synthetic oligonucleotide
gcggcggcggcggcggcgg

SEQ ID NO: 1515537 - RNA, 19 nt, Artificial Sequence
  Description of Artificial Sequence: Synthetic oligonucleotide
ggcggcggcggcggcggcg

SEQ ID NO: 1515538 - RNA, 19 nt, Artificial Sequence
  Description of Artificial Sequence: Synthetic oligonucleotide
cugcugcaaugaguuugaa

SEQ ID NO: 1515539 - RNA, 19 nt, Artificial Sequence
  Description of Artificial Sequence: Synthetic oligonucleotide
ggcccggcgccuccuccac

SEQ ID NO: 1515540 - RNA, 19 nt, Artificial Sequence
  Description of Artificial Sequence: Synthetic oligonucleotide
gcacugcgcggcggcggcg

SEQ ID NO: 1515541 - RNA, 19 nt, Artificial Sequence
  Description of Artificial Sequence: Synthetic oligonucleotide
cgcaugaugugcucuguuu

SEQ ID NO: 1515542 - RNA, 19 nt, Artificial Sequence
  Description of Artificial Sequence: Synthetic oligonucleotide
ggcggcggcggcggcggcc

SEQ ID NO: 1515543 - RNA, 19 nt, Artificial Sequence
  Description of Artificial Sequence: Synthetic oligonucleotide
ccaugcucuucuguguaau

SEQ ID NO: 1515544 - RNA, 19 nt, Artificial Sequence
  Description of Artificial Sequence: Synthetic oligonucleotide
gcucgggcucgggcacugc

SEQ ID NO: 1515545 - RNA, 19 nt, Artificial Sequence
  Description of Artificial Sequence: Synthetic oligonucleotide
cccacgccuccugaaccaa

SEQ ID NO: 1515546 - RNA, 19 nt, Artificial Sequence
  Description of Artificial Sequence: Synthetic oligonucleotide
cgcggcggcggcggcggcg

SEQ ID NO: 1515547 - RNA, 19 nt, Artificial Sequence
  Description of Artificial Sequence: Synthetic oligonucleotide
ccuccuccuccucccuccu

SEQ ID NO: 1515548 - RNA, 19 nt, Artificial Sequence
  Description of Artificial Sequence: Synthetic oligonucleotide
gcggcggcggcggcggccu

SEQ ID NO: 1515549 - RNA, 19 nt, Artificial Sequence
  Description of Artificial Sequence: Synthetic oligonucleotide
gcgcggcggcggcggcggc

SEQ ID NO: 1515550 - RNA, 19 nt, Artificial Sequence
  Description of Artificial Sequence: Synthetic oligonucleotide
cggcggcggcggcggcggc

SEQ ID NO: 1515551 - RNA, 19 nt, Artificial Sequence
  Description of Artificial Sequence: Synthetic oligonucleotide
ucggaagucauaaauaucc

SEQ ID NO: 1515552 - RNA, 19 nt, Artificial Sequence
  Description of Artificial Sequence: Synthetic oligonucleotide
aguaaggagagucaaacuc

SEQ ID NO: 1515553 - RNA, 19 nt, Artificial Sequence
  Description of Artificial Sequence: Synthetic oligonucleotide
auagaugucauccagggcu

SEQ ID NO: 1515554 - RNA, 19 nt, Artificial Sequence
  Description of Artificial Sequence: Synthetic oligonucleotide
agaaggaacaauaaaauag

SEQ ID NO: 1515555 - RNA, 19 nt, Artificial Sequence
  Description of Artificial Sequence: Synthetic oligonucleotide
uuucaucguagaaaggugg

SEQ ID NO: 1515556 - RNA, 19 nt, Artificial Sequence
  Description of Artificial Sequence: Synthetic oligonucleotide
ucggagaucaugauuuugg

SEQ ID NO: 1515557 - RNA, 19 nt, Artificial Sequence
  Description of Artificial Sequence: Synthetic oligonucleotide
auaaauaucccuaaugucu

SEQ ID NO: 1515558 - RNA, 19 nt, Artificial Sequence
  Description of Artificial Sequence: Synthetic oligonucleotide
uguucaaagaguuuggcau

SEQ ID NO: 1515559 - RNA, 19 nt, Artificial Sequence
  Description of Artificial Sequence: Synthetic oligonucleotide
uuuaucuucccuuuauuac

SEQ ID NO: 1515560 - RNA, 19 nt, Artificial Sequence
  Description of Artificial Sequence: Synthetic oligonucleotide
cuugacagcauccagcacc

SEQ ID NO: 1515561 - RNA, 19 nt, Artificial Sequence
  Description of Artificial Sequence: Synthetic oligonucleotide
aggauaaccucugagaagg

SEQ ID NO: 1515562 - RNA, 19 nt, Artificial Sequence
  Description of Artificial Sequence: Synthetic oligonucleotide
gauauucuuauccagagcu

SEQ ID NO: 1515563 - RNA, 19 nt, Artificial Sequence
  Description of Artificial Sequence: Synthetic oligonucleotide
cuugagaucucgaugcacg

SEQ ID NO: 1515564 - RNA, 19 nt, Artificial Sequence
  Description of Artificial Sequence: Synthetic oligonucleotide
auuuguauggaaaaugcag

SEQ ID NO: 1515565 - RNA, 19 nt, Artificial Sequence
  Description of Artificial Sequence: Synthetic oligonucleotide
uuaucuucccuuuauuaca

SEQ ID NO: 1515566 - RNA, 19 nt, Artificial Sequence
  Description of Artificial Sequence: Synthetic oligonucleotide
uccagggcuacaauguugg

SEQ ID NO: 1515567 - RNA, 19 nt, Artificial Sequence
  Description of Artificial Sequence: Synthetic oligonucleotide
aucccuaaugucuucugcc

SEQ ID NO: 1515568 - RNA, 19 nt, Artificial Sequence
  Description of Artificial Sequence: Synthetic oligonucleotide
cuugcuauagggcuucugg

SEQ ID NO: 1515569 - RNA, 19 nt, Artificial Sequence
  Description of Artificial Sequence: Synthetic oligonucleotide
aaucuugugcaagacggcg

SEQ ID NO: 1515570 - RNA, 19 nt, Artificial Sequence
  Description of Artificial Sequence: Synthetic oligonucleotide
aaugcauuugauggccacc

SEQ ID NO: 1515571 - RNA, 19 nt, Artificial Sequence
  Description of Artificial Sequence: Synthetic oligonucleotide
uuuucaucguagaaaggug

SEQ ID NO: 1515572 - RNA, 19 nt, Artificial Sequence
  Description of Artificial Sequence: Synthetic oligonucleotide
auagcuccccaccugaaac

SEQ ID NO: 1515573 - RNA, 19 nt, Artificial Sequence
  Description of Artificial Sequence: Synthetic oligonucleotide
augcacgauacccaggucg

SEQ ID NO: 1515574 - RNA, 19 nt, Artificial Sequence
  Description of Artificial Sequence: Synthetic oligonucleotide
aucucgaugcacgauaccc

SEQ ID NO: 1515575 - RNA, 19 nt, Artificial Sequence
  Description of Artificial Sequence: Synthetic oligonucleotide
augaaaggaacccugauuu

SEQ ID NO: 1515576 - RNA, 19 nt, Artificial Sequence
  Description of Artificial Sequence: Synthetic oligonucleotide
auuuucaucguagaaaggu

SEQ ID NO: 1515577 - RNA, 19 nt, Artificial Sequence
  Description of Artificial Sequence: Synthetic oligonucleotide
caugaugagguagaggugg

SEQ ID NO: 1515578 - RNA, 19 nt, Artificial Sequence
  Description of Artificial Sequence: Synthetic oligonucleotide
uucaucguagaaagguggg

SEQ ID NO: 1515579 - RNA, 19 nt, Artificial Sequence
  Description of Artificial Sequence: Synthetic oligonucleotide
ucgugcaaguacuugacag

SEQ ID NO: 1515580 - RNA, 19 nt, Artificial Sequence
  Description of Artificial Sequence: Synthetic oligonucleotide
gagucaaacucauacucag

SEQ ID NO: 1515581 - RNA, 19 nt, Artificial Sequence
  Description of Artificial Sequence: Synthetic oligonucleotide
uacucagccuucaaaaucu

SEQ ID NO: 1515582 - RNA, 19 nt, Artificial Sequence
  Description of Artificial Sequence: Synthetic oligonucleotide
aggauauaggcaaugacuc

SEQ ID NO: 1515583 - RNA, 19 nt, Artificial Sequence
  Description of Artificial Sequence: Synthetic oligonucleotide
acuccuauggaccagcagu

SEQ ID NO: 1515584 - RNA, 19 nt, Artificial Sequence
  Description of Artificial Sequence: Synthetic oligonucleotide
aaauaucccuaaugucuuc

SEQ ID NO: 1515585 - RNA, 19 nt, Artificial Sequence
  Description of Artificial Sequence: Synthetic oligonucleotide
cugguggauauucuuaucc

SEQ ID NO: 1515586 - RNA, 19 nt, Artificial Sequence
  Description of Artificial Sequence: Synthetic oligonucleotide
cacaaugcggucaaauagc

SEQ ID NO: 1515587 - RNA, 19 nt, Artificial Sequence
  Description of Artificial Sequence: Synthetic oligonucleotide
ugguguucaguccauggcc

SEQ ID NO: 1515588 - RNA, 19 nt, Artificial Sequence
  Description of Artificial Sequence: Synthetic oligonucleotide
agucucggcagcaacagcc

SEQ ID NO: 1515589 - RNA, 19 nt, Artificial Sequence
  Description of Artificial Sequence: Synthetic oligonucleotide
gaaggaacaauaaaauaga

SEQ ID NO: 1515590 - RNA, 19 nt, Artificial Sequence
  Description of Artificial Sequence: Synthetic oligonucleotide
gaaaggaacccugauuucc

SEQ ID NO: 1515591 - RNA, 19 nt, Artificial Sequence
  Description of Artificial Sequence: Synthetic oligonucleotide
ugccguaugaagucuuugg

SEQ ID NO: 1515592 - RNA, 19 nt, Artificial Sequence
  Description of Artificial Sequence: Synthetic oligonucleotide
gagaugucgucccaguaag

SEQ ID NO: 1515593 - RNA, 19 nt, Artificial Sequence
  Description of Artificial Sequence: Synthetic oligonucleotide
ugggguaagaaacucccca

SEQ ID NO: 1515594 - RNA, 19 nt, Artificial Sequence
  Description of Artificial Sequence: Synthetic oligonucleotide
uguagaauccuuucuccac

SEQ ID NO: 1515595 - RNA, 19 nt, Artificial Sequence
  Description of Artificial Sequence: Synthetic oligonucleotide
auaaccucugagaaggcac

SEQ ID NO: 1515596 - RNA, 19 nt, Artificial Sequence
  Description of Artificial Sequence: Synthetic oligonucleotide
ugucgucccaguaaggaga

SEQ ID NO: 1515597 - RNA, 19 nt, Artificial Sequence
  Description of Artificial Sequence: Synthetic oligonucleotide
aaacuccccaguucugggg

SEQ ID NO: 1515598 - RNA, 19 nt, Artificial Sequence
  Description of Artificial Sequence: Synthetic oligonucleotide
ucucggaagucauaaauau

SEQ ID NO: 1515599 - RNA, 19 nt, Artificial Sequence
  Description of Artificial Sequence: Synthetic oligonucleotide
uuacaagaaggaacaauaa

SEQ ID NO: 1515600 - RNA, 19 nt, Artificial Sequence
  Description of Artificial Sequence: Synthetic oligonucleotide
ggauguuuaaucuugugca

SEQ ID NO: 1515601 - RNA, 19 nt, Artificial Sequence
  Description of Artificial Sequence: Synthetic oligonucleotide
uugcuauagggcuucuggg

SEQ ID NO: 1515602 - RNA, 19 nt, Artificial Sequence
  Description of Artificial Sequence: Synthetic oligonucleotide
aagagugagaggaaggggu

SEQ ID NO: 1515603 - RNA, 19 nt, Artificial Sequence
  Description of Artificial Sequence: Synthetic oligonucleotide
uaugaagucuuuggcagag

SEQ ID NO: 1515604 - RNA, 19 nt, Artificial Sequence
  Description of Artificial Sequence: Synthetic oligonucleotide
cuugguguucaguccaugg

SEQ ID NO: 1515605 - RNA, 19 nt, Artificial Sequence
  Description of Artificial Sequence: Synthetic oligonucleotide
aagacggcgaucucauucu

SEQ ID NO: 1515606 - RNA, 19 nt, Artificial Sequence
  Description of Artificial Sequence: Synthetic oligonucleotide
ugcuauagggcuucugggc

SEQ ID NO: 1515607 - RNA, 19 nt, Artificial Sequence
  Description of Artificial Sequence: Synthetic oligonucleotide
ucugcucgcucacugacug

SEQ ID NO: 1515608 - RNA, 19 nt, Artificial Sequence
  Description of Artificial Sequence: Synthetic oligonucleotide
uauucuuauccagagcugu

SEQ ID NO: 1515609 - RNA, 19 nt, Artificial Sequence
  Description of Artificial Sequence: Synthetic oligonucleotide
ucuacggccuugcuauagg

SEQ ID NO: 1515610 - RNA, 19 nt, Artificial Sequence
  Description of Artificial Sequence: Synthetic oligonucleotide
aaagucggagaucaugauu

SEQ ID NO: 1515611 - RNA, 19 nt, Artificial Sequence
  Description of Artificial Sequence: Synthetic oligonucleotide
aucguagaaagguggguag

SEQ ID NO: 1515612 - RNA, 19 nt, Artificial Sequence
  Description of Artificial Sequence: Synthetic oligonucleotide
gaaacuccccaguucuggg

SEQ ID NO: 1515613 - RNA, 19 nt, Artificial Sequence
  Description of Artificial Sequence: Synthetic oligonucleotide
agggcuacaauguugggau

SEQ ID NO: 1515614 - RNA, 19 nt, Artificial Sequence
  Description of Artificial Sequence: Synthetic oligonucleotide
agcaacagccagcugcugg

SEQ ID NO: 1515615 - RNA, 19 nt, Artificial Sequence
  Description of Artificial Sequence: Synthetic oligonucleotide
aauaucccuaaugucuucu

SEQ ID NO: 1515616 - RNA, 19 nt, Artificial Sequence
  Description of Artificial Sequence: Synthetic oligonucleotide
uaucuccugcaauccaugg

SEQ ID NO: 1515617 - RNA, 19 nt, Artificial Sequence
  Description of Artificial Sequence: Synthetic oligonucleotide
caucaagugccguaugaag

SEQ ID NO: 1515618 - RNA, 19 nt, Artificial Sequence
  Description of Artificial Sequence: Synthetic oligonucleotide
ugugccgaaccacagcugu

SEQ ID NO: 1515619 - RNA, 19 nt, Artificial Sequence
  Description of Artificial Sequence: Synthetic oligonucleotide
uauccagagcuguaucucc

SEQ ID NO: 1515620 - RNA, 19 nt, Artificial Sequence
  Description of Artificial Sequence: Synthetic oligonucleotide
uugaucugcucgcucacug

SEQ ID NO: 1515621 - RNA, 19 nt, Artificial Sequence
  Description of Artificial Sequence: Synthetic oligonucleotide
gaagagugagaggaagggg

SEQ ID NO: 1515622 - RNA, 19 nt, Artificial Sequence
  Description of Artificial Sequence: Synthetic oligonucleotide
gggauguuuaaucuugugc

SEQ ID NO: 1515623 - RNA, 19 nt, Artificial Sequence
  Description of Artificial Sequence: Synthetic oligonucleotide
uccaucaagugccguauga

SEQ ID NO: 1515624 - RNA, 19 nt, Artificial Sequence
  Description of Artificial Sequence: Synthetic oligonucleotide
guauccuggagucccacag

SEQ ID NO: 1515625 - RNA, 19 nt, Artificial Sequence
  Description of Artificial Sequence: Synthetic oligonucleotide
agaaacuccccaguucugg

SEQ ID NO: 1515626 - RNA, 19 nt, Artificial Sequence
  Description of Artificial Sequence: Synthetic oligonucleotide
ucaaacucauacucagccu

SEQ ID NO: 1515627 - RNA, 19 nt, Artificial Sequence
  Description of Artificial Sequence: Synthetic oligonucleotide
guauggaaaaugcagugaa

SEQ ID NO: 1515628 - RNA, 19 nt, Artificial Sequence
  Description of Artificial Sequence: Synthetic oligonucleotide
caaaauucuucuugaucug

SEQ ID NO: 1515629 - RNA, 19 nt, Artificial Sequence
  Description of Artificial Sequence: Synthetic oligonucleotide
ucucgaugcacgauaccca

SEQ ID NO: 1515630 - RNA, 19 nt, Artificial Sequence
  Description of Artificial Sequence: Synthetic oligonucleotide
auguugggauguuuaaucu

SEQ ID NO: 1515631 - RNA, 19 nt, Artificial Sequence
  Description of Artificial Sequence: Synthetic oligonucleotide
uaaggagagucaaacucau

SEQ ID NO: 1515632 - RNA, 19 nt, Artificial Sequence
  Description of Artificial Sequence: Synthetic oligonucleotide
augcagugaagagugagag

SEQ ID NO: 1515633 - RNA, 19 nt, Artificial Sequence
  Description of Artificial Sequence: Synthetic oligonucleotide
aaugcagugaagagugaga

SEQ ID NO: 1515634 - RNA, 19 nt, Artificial Sequence
  Description of Artificial Sequence: Synthetic oligonucleotide
caagacggcgaucucauuc

SEQ ID NO: 1515635 - RNA, 19 nt, Artificial Sequence
  Description of Artificial Sequence: Synthetic oligonucleotide
ggcagagucagagaugucg

SEQ ID NO: 1515636 - RNA, 19 nt, Artificial Sequence
  Description of Artificial Sequence: Synthetic oligonucleotide
gucuuuggcagagucagag

SEQ ID NO: 1515637 - RNA, 19 nt, Artificial Sequence
  Description of Artificial Sequence: Synthetic oligonucleotide
aacuccccaguucuggggu

SEQ ID NO: 1515638 - RNA, 19 nt, Artificial Sequence
  Description of Artificial Sequence: Synthetic oligonucleotide
cuauggaccagcagucuac

SEQ ID NO: 1515639 - RNA, 19 nt, Artificial Sequence
  Description of Artificial Sequence: Synthetic oligonucleotide
ucccguucuguguagaauc

SEQ ID NO: 1515640 - RNA, 19 nt, Artificial Sequence
  Description of Artificial Sequence: Synthetic oligonucleotide
agagaugucgucccaguaa

SEQ ID NO: 1515641 - RNA, 19 nt, Artificial Sequence
  Description of Artificial Sequence: Synthetic oligonucleotide
aggugaaccucuucuccgg

SEQ ID NO: 1515642 - RNA, 19 nt, Artificial Sequence
  Description of Artificial Sequence: Synthetic oligonucleotide
acccugauuuccuuggugu

SEQ ID NO: 1515643 - RNA, 19 nt, Artificial Sequence
  Description of Artificial Sequence: Synthetic oligonucleotide
auaggcaaugacuccuaug

SEQ ID NO: 1515644 - RNA, 19 nt, Artificial Sequence
  Description of Artificial Sequence: Synthetic oligonucleotide
ucaugugccgaaccacagc

SEQ ID NO: 1515645 - RNA, 19 nt, Artificial Sequence
  Description of Artificial Sequence: Synthetic oligonucleotide
agguucucuggcuugagau

SEQ ID NO: 1515646 - RNA, 19 nt, Artificial Sequence
  Description of Artificial Sequence: Synthetic oligonucleotide
acggccuugcuauagggcu

SEQ ID NO: 1515647 - RNA, 19 nt, Artificial Sequence
  Description of Artificial Sequence: Synthetic oligonucleotide
uguuggugucagcugcucc

SEQ ID NO: 1515648 - RNA, 19 nt, Artificial Sequence
  Description of Artificial Sequence: Synthetic oligonucleotide
uauggaccagcagucuacg

SEQ ID NO: 1515649 - RNA, 19 nt, Artificial Sequence
  Description of Artificial Sequence: Synthetic oligonucleotide
agucaaacucauacucagc

SEQ ID NO: 1515650 - RNA, 19 nt, Artificial Sequence
  Description of Artificial Sequence: Synthetic oligonucleotide
aaaggaacccugauuuccu

SEQ ID NO: 1515651 - RNA, 19 nt, Artificial Sequence
  Description of Artificial Sequence: Synthetic oligonucleotide
ggaacccugauuuccuugg

SEQ ID NO: 1515652 - RNA, 19 nt, Artificial Sequence
  Description of Artificial Sequence: Synthetic oligonucleotide
cucgaugcacgauacccag

SEQ ID NO: 1515653 - RNA, 19 nt, Artificial Sequence
  Description of Artificial Sequence: Synthetic oligonucleotide
ugcacgauacccaggucgu

SEQ ID NO: 1515654 - RNA, 19 nt, Artificial Sequence
  Description of Artificial Sequence: Synthetic oligonucleotide
augucgucccaguaaggag

SEQ ID NO: 1515655 - RNA, 19 nt, Artificial Sequence
  Description of Artificial Sequence: Synthetic oligonucleotide
guaaggagagucaaacuca

SEQ ID NO: 1515656 - RNA, 19 nt, Artificial Sequence
  Description of Artificial Sequence: Synthetic oligonucleotide
aaggaacaauaaaauagaa

SEQ ID NO: 1515657 - RNA, 19 nt, Artificial Sequence
  Description of Artificial Sequence: Synthetic oligonucleotide
cugaagcuuccucaugugc

SEQ ID NO: 1515658 - RNA, 19 nt, Artificial Sequence
  Description of Artificial Sequence: Synthetic oligonucleotide
augacuccuauggaccagc

SEQ ID NO: 1515659 - RNA, 19 nt, Artificial Sequence
  Description of Artificial Sequence: Synthetic oligonucleotide
acugccuggguccuccauc

SEQ ID NO: 1515660 - RNA, 19 nt, Artificial Sequence
  Description of Artificial Sequence: Synthetic oligonucleotide
ugacugguggauauucuua

SEQ ID NO: 1515661 - RNA, 19 nt, Artificial Sequence
  Description of Artificial Sequence: Synthetic oligonucleotide
ugccgaaccacagcugugg

SEQ ID NO: 1515662 - RNA, 19 nt, Artificial Sequence
  Description of Artificial Sequence: Synthetic oligonucleotide
guagaauccuuucuccaca

SEQ ID NO: 1515663 - RNA, 19 nt, Artificial Sequence
  Description of Artificial Sequence: Synthetic oligonucleotide
ugaaccucuucuccggguc

SEQ ID NO: 1515664 - RNA, 19 nt, Artificial Sequence
  Description of Artificial Sequence: Synthetic oligonucleotide
uguggcguugaaagcuugc

SEQ ID NO: 1515665 - RNA, 19 nt, Artificial Sequence
  Description of Artificial Sequence: Synthetic oligonucleotide
gauauaggcaaugacuccu

SEQ ID NO: 1515666 - RNA, 19 nt, Artificial Sequence
  Description of Artificial Sequence: Synthetic oligonucleotide
uggcaaugcauuugauggc

SEQ ID NO: 1515667 - RNA, 19 nt, Artificial Sequence
  Description of Artificial Sequence: Synthetic oligonucleotide
aaugacuccuauggaccag

SEQ ID NO: 1515668 - RNA, 19 nt, Artificial Sequence
  Description of Artificial Sequence: Synthetic oligonucleotide
gauacccaggucgugcaag

SEQ ID NO: 1515669 - RNA, 19 nt, Artificial Sequence
  Description of Artificial Sequence: Synthetic oligonucleotide
ggcaaugacuccuauggac

SEQ ID NO: 1515670 - RNA, 19 nt, Artificial Sequence
  Description of Artificial Sequence: Synthetic oligonucleotide
agaucucgaugcacgauac

SEQ ID NO: 1515671 - RNA, 19 nt, Artificial Sequence
  Description of Artificial Sequence: Synthetic oligonucleotide
ucccuaaugucuucugccu

SEQ ID NO: 1515672 - RNA, 19 nt, Artificial Sequence
  Description of Artificial Sequence: Synthetic oligonucleotide
gaugucgucccaguaagga

SEQ ID NO: 1515673 - RNA, 19 nt, Artificial Sequence
  Description of Artificial Sequence: Synthetic oligonucleotide
aggucgugcaaguacuuga

SEQ ID NO: 1515674 - RNA, 19 nt, Artificial Sequence
  Description of Artificial Sequence: Synthetic oligonucleotide
ugcaagacggcgaucucau

SEQ ID NO: 1515675 - RNA, 19 nt, Artificial Sequence
  Description of Artificial Sequence: Synthetic oligonucleotide
uacggccuugcuauagggc

SEQ ID NO: 1515676 - RNA, 19 nt, Artificial Sequence
  Description of Artificial Sequence: Synthetic oligonucleotide
uuauccagagcuguaucuc

SEQ ID NO: 1515677 - RNA, 19 nt, Artificial Sequence
  Description of Artificial Sequence: Synthetic oligonucleotide
ugaaagcuugcuuccacuu

SEQ ID NO: 1515678 - RNA, 19 nt, Artificial Sequence
  Description of Artificial Sequence: Synthetic oligonucleotide
ggucaaauagcuccccacc

SEQ ID NO: 1515679 - RNA, 19 nt, Artificial Sequence
  Description of Artificial Sequence: Synthetic oligonucleotide
agucauaaauaucccuaau

SEQ ID NO: 1515680 - RNA, 19 nt, Artificial Sequence
  Description of Artificial Sequence: Synthetic oligonucleotide
cuacggccuugcuauaggg

SEQ ID NO: 1515681 - RNA, 19 nt, Artificial Sequence
  Description of Artificial Sequence: Synthetic oligonucleotide
uccugcaauccaugggugc

SEQ ID NO: 1515682 - RNA, 19 nt, Artificial Sequence
  Description of Artificial Sequence: Synthetic oligonucleotide
ucgaugcacgauacccagg

SEQ ID NO: 1515683 - RNA, 19 nt, Artificial Sequence
  Description of Artificial Sequence: Synthetic oligonucleotide
auaucccuaaugucuucug

SEQ ID NO: 1515684 - RNA, 19 nt, Artificial Sequence
  Description of Artificial Sequence: Synthetic oligonucleotide
ccacaaugcggucaaauag

SEQ ID NO: 1515685 - RNA, 19 nt, Artificial Sequence
  Description of Artificial Sequence: Synthetic oligonucleotide
uguugggauguuuaaucuu

SEQ ID NO: 1515686 - RNA, 19 nt, Artificial Sequence
  Description of Artificial Sequence: Synthetic oligonucleotide
acggcgaucucauucucca

SEQ ID NO: 1515687 - RNA, 19 nt, Artificial Sequence
  Description of Artificial Sequence: Synthetic oligonucleotide
ggcguugaaagcuugcuuc

SEQ ID NO: 1515688 - RNA, 19 nt, Artificial Sequence
  Description of Artificial Sequence: Synthetic oligonucleotide
ugcaaggcuugcucacagg

SEQ ID NO: 1515689 - RNA, 19 nt, Artificial Sequence
  Description of Artificial Sequence: Synthetic oligonucleotide
cauuugauggccaccagcu

SEQ ID NO: 1515690 - RNA, 19 nt, Artificial Sequence
  Description of Artificial Sequence: Synthetic oligonucleotide
gcuauagggcuucugggcc

SEQ ID NO: 1515691 - RNA, 19 nt, Artificial Sequence
  Description of Artificial Sequence: Synthetic oligonucleotide
cucggaagucauaaauauc

SEQ ID NO: 1515692 - RNA, 19 nt, Artificial Sequence
  Description of Artificial Sequence: Synthetic oligonucleotide
cucaugugccgaaccacag

SEQ ID NO: 1515693 - RNA, 19 nt, Artificial Sequence
  Description of Artificial Sequence: Synthetic oligonucleotide
gagaucucgaugcacgaua

SEQ ID NO: 1515694 - RNA, 19 nt, Artificial Sequence
  Description of Artificial Sequence: Synthetic oligonucleotide
gcugcgagggccaaggagg

SEQ ID NO: 1515695 - RNA, 19 nt, Artificial Sequence
  Description of Artificial Sequence: Synthetic oligonucleotide
gauaaccucugagaaggca

SEQ ID NO: 1515696 - RNA, 19 nt, Artificial Sequence
  Description of Artificial Sequence: Synthetic oligonucleotide
guaugggguaagaaacucc

SEQ ID NO: 1515697 - RNA, 19 nt, Artificial Sequence
  Description of Artificial Sequence: Synthetic oligonucleotide
ugcauuugauggccaccag

SEQ ID NO: 1515698 - RNA, 19 nt, Artificial Sequence
  Description of Artificial Sequence: Synthetic oligonucleotide
ggauauaggcaaugacucc

SEQ ID NO: 1515699 - RNA, 19 nt, Artificial Sequence
  Description of Artificial Sequence: Synthetic oligonucleotide
agggccuucuuggcaaugc

SEQ ID NO: 1515700 - RNA, 19 nt, Artificial Sequence
  Description of Artificial Sequence: Synthetic oligonucleotide
uuccacuuccccuggcaug

SEQ ID NO: 1515701 - RNA, 19 nt, Artificial Sequence
  Description of Artificial Sequence: Synthetic oligonucleotide
ggaccagcagucuacggcc

SEQ ID NO: 1515702 - RNA, 19 nt, Artificial Sequence
  Description of Artificial Sequence: Synthetic oligonucleotide
cuccuauggaccagcaguc

SEQ ID NO: 1515703 - RNA, 19 nt, Artificial Sequence
  Description of Artificial Sequence: Synthetic oligonucleotide
guuuaaucuugugcaagac

SEQ ID NO: 1515704 - RNA, 19 nt, Artificial Sequence
  Description of Artificial Sequence: Synthetic oligonucleotide
auggcccuagagcuugggg

SEQ ID NO: 1515705 - RNA, 19 nt, Artificial Sequence
  Description of Artificial Sequence: Synthetic oligonucleotide
uagcuccccaccugaaacc

SEQ ID NO: 1515706 - RNA, 19 nt, Artificial Sequence
  Description of Artificial Sequence: Synthetic oligonucleotide
cuuccucaugugccgaacc

SEQ ID NO: 1515707 - RNA, 19 nt, Artificial Sequence
  Description of Artificial Sequence: Synthetic oligonucleotide
uagaauccuuucuccacaa

SEQ ID NO: 1515708 - RNA, 19 nt, Artificial Sequence
  Description of Artificial Sequence: Synthetic oligonucleotide
accuggaagaugaggcggc

SEQ ID NO: 1515709 - RNA, 19 nt, Artificial Sequence
  Description of Artificial Sequence: Synthetic oligonucleotide
gcaaugacuccuauggacc

SEQ ID NO: 1515710 - RNA, 19 nt, Artificial Sequence
  Description of Artificial Sequence: Synthetic oligonucleotide
aacucauacucagccuuca

SEQ ID NO: 1515711 - RNA, 19 nt, Artificial Sequence
  Description of Artificial Sequence: Synthetic oligonucleotide
ugaucugcucgcucacuga

SEQ ID NO: 1515712 - RNA, 19 nt, Artificial Sequence
  Description of Artificial Sequence: Synthetic oligonucleotide
uauaggcaaugacuccuau

SEQ ID NO: 1515713 - RNA, 19 nt, Artificial Sequence
  Description of Artificial Sequence: Synthetic oligonucleotide
ugcucacaggugaaccucu

SEQ ID NO: 1515714 - RNA, 19 nt, Artificial Sequence
  Description of Artificial Sequence: Synthetic oligonucleotide
guagccacagagcaggaua

SEQ ID NO: 1515715 - RNA, 19 nt, Artificial Sequence
  Description of Artificial Sequence: Synthetic oligonucleotide
augcauuugauggccacca

SEQ ID NO: 1515716 - RNA, 19 nt, Artificial Sequence
  Description of Artificial Sequence: Synthetic oligonucleotide
uccgggucuuucuccauca

SEQ ID NO: 1515717 - RNA, 19 nt, Artificial Sequence
  Description of Artificial Sequence: Synthetic oligonucleotide
uccaucuuggagaggccaa

SEQ ID NO: 1515718 - RNA, 19 nt, Artificial Sequence
  Description of Artificial Sequence: Synthetic oligonucleotide
ugccacguauccuggaguc

SEQ ID NO: 1515719 - RNA, 19 nt, Artificial Sequence
  Description of Artificial Sequence: Synthetic oligonucleotide
auauucuuauccagagcug

SEQ ID NO: 1515720 - RNA, 19 nt, Artificial Sequence
  Description of Artificial Sequence: Synthetic oligonucleotide
ggauauucuuauccagagc

SEQ ID NO: 1515721 - RNA, 19 nt, Artificial Sequence
  Description of Artificial Sequence: Synthetic oligonucleotide
cccaccugaaaccagcugc

SEQ ID NO: 1515722 - RNA, 19 nt, Artificial Sequence
  Description of Artificial Sequence: Synthetic oligonucleotide
ccuaaugucuucugccugc

SEQ ID NO: 1515723 - RNA, 19 nt, Artificial Sequence
  Description of Artificial Sequence: Synthetic oligonucleotide
ucguagaaagguggguagc

SEQ ID NO: 1515724 - RNA, 19 nt, Artificial Sequence
  Description of Artificial Sequence: Synthetic oligonucleotide
cacgauacccaggucgugc

SEQ ID NO: 1515725 - RNA, 19 nt, Artificial Sequence
  Description of Artificial Sequence: Synthetic oligonucleotide
aagagcucccgccgcgucu

SEQ ID NO: 1515726 - RNA, 19 nt, Artificial Sequence
  Description of Artificial Sequence: Synthetic oligonucleotide
ucaucguagaaaggugggu

SEQ ID NO: 1515727 - RNA, 19 nt, Artificial Sequence
  Description of Artificial Sequence: Synthetic oligonucleotide
gggguaugggguaagaaac

SEQ ID NO: 1515728 - RNA, 19 nt, Artificial Sequence
  Description of Artificial Sequence: Synthetic oligonucleotide
cucggcagcaacagccagc

SEQ ID NO: 1515729 - RNA, 19 nt, Artificial Sequence
  Description of Artificial Sequence: Synthetic oligonucleotide
gaucucgaugcacgauacc

SEQ ID NO: 1515730 - RNA, 19 nt, Artificial Sequence
  Description of Artificial Sequence: Synthetic oligonucleotide
gggguaagaaacuccccag

SEQ ID NO: 1515731 - RNA, 19 nt, Artificial Sequence
  Description of Artificial Sequence: Synthetic oligonucleotide
caaggcuugcucacaggug

SEQ ID NO: 1515732 - RNA, 19 nt, Artificial Sequence
  Description of Artificial Sequence: Synthetic oligonucleotide
caaccccucccaugaaagg

SEQ ID NO: 1515733 - RNA, 19 nt, Artificial Sequence
  Description of Artificial Sequence: Synthetic oligonucleotide
guggauauucuuauccaga

SEQ ID NO: 1515734 - RNA, 19 nt, Artificial Sequence
  Description of Artificial Sequence: Synthetic oligonucleotide
ucggcagcaacagccagcu

SEQ ID NO: 1515735 - RNA, 19 nt, Artificial Sequence
  Description of Artificial Sequence: Synthetic oligonucleotide
gcaaguacuugacagcauc

SEQ ID NO: 1515736 - RNA, 19 nt, Artificial Sequence
  Description of Artificial Sequence: Synthetic oligonucleotide
ggcaaugcauuugauggcc

SEQ ID NO: 1515737 - RNA, 19 nt, Artificial Sequence
  Description of Artificial Sequence: Synthetic oligonucleotide
auggaccagcagucuacgg

SEQ ID NO: 1515738 - RNA, 19 nt, Artificial Sequence
  Description of Artificial Sequence: Synthetic oligonucleotide
gcauuugauggccaccagc

SEQ ID NO: 1515739 - RNA, 19 nt, Artificial Sequence
  Description of Artificial Sequence: Synthetic oligonucleotide
gugcaaguacuugacagca

SEQ ID NO: 1515740 - RNA, 19 nt, Artificial Sequence
  Description of Artificial Sequence: Synthetic oligonucleotide
caaugacuccuauggacca

SEQ ID NO: 1515741 - RNA, 19 nt, Artificial Sequence
  Description of Artificial Sequence: Synthetic oligonucleotide
uucuggggugaggaggaag

SEQ ID NO: 1515742 - RNA, 19 nt, Artificial Sequence
  Description of Artificial Sequence: Synthetic oligonucleotide
auacccaggucgugcaagu

SEQ ID NO: 1515743 - RNA, 19 nt, Artificial Sequence
  Description of Artificial Sequence: Synthetic oligonucleotide
gccguaugaagucuuuggc

SEQ ID NO: 1515744 - RNA, 19 nt, Artificial Sequence
  Description of Artificial Sequence: Synthetic oligonucleotide
ugcaaguacuugacagcau

SEQ ID NO: 1515745 - RNA, 19 nt, Artificial Sequence
  Description of Artificial Sequence: Synthetic oligonucleotide
gcgaucucauucuccaugc

SEQ ID NO: 1515746 - RNA, 19 nt, Artificial Sequence
  Description of Artificial Sequence: Synthetic oligonucleotide
cccuuuauuacaagaagga

SEQ ID NO: 1515747 - RNA, 19 nt, Artificial Sequence
  Description of Artificial Sequence: Synthetic oligonucleotide
acgauacccaggucgugca

SEQ ID NO: 1515748 - RNA, 19 nt, Artificial Sequence
  Description of Artificial Sequence: Synthetic oligonucleotide
agagugagaggaaggggug

SEQ ID NO: 1515749 - RNA, 19 nt, Artificial Sequence
  Description of Artificial Sequence: Synthetic oligonucleotide
ugacuccuauggaccagca

SEQ ID NO: 1515750 - RNA, 19 nt, Artificial Sequence
  Description of Artificial Sequence: Synthetic oligonucleotide
uggagucuucauccaggcu

SEQ ID NO: 1515751 - RNA, 19 nt, Artificial Sequence
  Description of Artificial Sequence: Synthetic oligonucleotide
cuggcugcgagggccaagg

SEQ ID NO: 1515752 - RNA, 19 nt, Artificial Sequence
  Description of Artificial Sequence: Synthetic oligonucleotide
ucgcucacugacuggugga

SEQ ID NO: 1515753 - RNA, 19 nt, Artificial Sequence
  Description of Artificial Sequence: Synthetic oligonucleotide
agacggcgaucucauucuc

SEQ ID NO: 1515754 - RNA, 19 nt, Artificial Sequence
  Description of Artificial Sequence: Synthetic oligonucleotide
uccucaugugccgaaccac

SEQ ID NO: 1515755 - RNA, 19 nt, Artificial Sequence
  Description of Artificial Sequence: Synthetic oligonucleotide
guaucuccugcaauccaug

SEQ ID NO: 1515756 - RNA, 19 nt, Artificial Sequence
  Description of Artificial Sequence: Synthetic oligonucleotide
cugcaugaugagguagagg

SEQ ID NO: 1515757 - RNA, 19 nt, Artificial Sequence
  Description of Artificial Sequence: Synthetic oligonucleotide
gguguucaguccauggccc

SEQ ID NO: 1515758 - RNA, 19 nt, Artificial Sequence
  Description of Artificial Sequence: Synthetic oligonucleotide
aggcaaugacuccuaugga

SEQ ID NO: 1515759 - RNA, 19 nt, Artificial Sequence
  Description of Artificial Sequence: Synthetic oligonucleotide
uuggugucagcugcucccc

SEQ ID NO: 1515760 - RNA, 19 nt, Artificial Sequence
  Description of Artificial Sequence: Synthetic oligonucleotide
cagucuacggccuugcuau

SEQ ID NO: 1515761 - RNA, 19 nt, Artificial Sequence
  Description of Artificial Sequence: Synthetic oligonucleotide
ggugaaccucuucuccggg

SEQ ID NO: 1515762 - RNA, 19 nt, Artificial Sequence
  Description of Artificial Sequence: Synthetic oligonucleotide
gacggcgaucucauucucc

SEQ ID NO: 1515763 - RNA, 19 nt, Artificial Sequence
  Description of Artificial Sequence: Synthetic oligonucleotide
guucaguccauggcccuag

SEQ ID NO: 1515764 - RNA, 19 nt, Artificial Sequence
  Description of Artificial Sequence: Synthetic oligonucleotide
gacugguggauauucuuau

SEQ ID NO: 1515765 - RNA, 19 nt, Artificial Sequence
  Description of Artificial Sequence: Synthetic oligonucleotide
cuccugcaauccaugggug

SEQ ID NO: 1515766 - RNA, 19 nt, Artificial Sequence
  Description of Artificial Sequence: Synthetic oligonucleotide
cacugacugguggauauuc

SEQ ID NO: 1515767 - RNA, 19 nt, Artificial Sequence
  Description of Artificial Sequence: Synthetic oligonucleotide
ccaaccccucccaugaaag

SEQ ID NO: 1515768 - RNA, 19 nt, Artificial Sequence
  Description of Artificial Sequence: Synthetic oligonucleotide
caaugcggucaaauagcuc

SEQ ID NO: 1515769 - RNA, 19 nt, Artificial Sequence
  Description of Artificial Sequence: Synthetic oligonucleotide
cuauagggcuucugggcca

SEQ ID NO: 1515770 - RNA, 19 nt, Artificial Sequence
  Description of Artificial Sequence: Synthetic oligonucleotide
gucggagaucaugauuuug

SEQ ID NO: 1515771 - RNA, 19 nt, Artificial Sequence
  Description of Artificial Sequence: Synthetic oligonucleotide
ggaagucauaaauaucccu

SEQ ID NO: 1515772 - RNA, 19 nt, Artificial Sequence
  Description of Artificial Sequence: Synthetic oligonucleotide
aaccacagcuguggcguug

SEQ ID NO: 1515773 - RNA, 19 nt, Artificial Sequence
  Description of Artificial Sequence: Synthetic oligonucleotide
gucuacggccuugcuauag

SEQ ID NO: 1515774 - RNA, 19 nt, Artificial Sequence
  Description of Artificial Sequence: Synthetic oligonucleotide
agucagagaugucguccca

SEQ ID NO: 1515775 - RNA, 19 nt, Artificial Sequence
  Description of Artificial Sequence: Synthetic oligonucleotide
auuugauggccaccagcuu

SEQ ID NO: 1515776 - RNA, 19 nt, Artificial Sequence
  Description of Artificial Sequence: Synthetic oligonucleotide
ugugcaagacggcgaucuc

SEQ ID NO: 1515777 - RNA, 19 nt, Artificial Sequence
  Description of Artificial Sequence: Synthetic oligonucleotide
agaugucgucccaguaagg

SEQ ID NO: 1515778 - RNA, 19 nt, Artificial Sequence
  Description of Artificial Sequence: Synthetic oligonucleotide
agcugcaugaugagguaga

SEQ ID NO: 1515779 - RNA, 19 nt, Artificial Sequence
  Description of Artificial Sequence: Synthetic oligonucleotide
caucucggaagucauaaau

SEQ ID NO: 1515780 - RNA, 19 nt, Artificial Sequence
  Description of Artificial Sequence: Synthetic oligonucleotide
gucgucccaguaaggagag

SEQ ID NO: 1515781 - RNA, 19 nt, Artificial Sequence
  Description of Artificial Sequence: Synthetic oligonucleotide
uccccaccugaaaccagcu

SEQ ID NO: 1515782 - RNA, 19 nt, Artificial Sequence
  Description of Artificial Sequence: Synthetic oligonucleotide
aucuugugcaagacggcga

SEQ ID NO: 1515783 - RNA, 19 nt, Artificial Sequence
  Description of Artificial Sequence: Synthetic oligonucleotide
gguaugggguaagaaacuc

SEQ ID NO: 1515784 - RNA, 19 nt, Artificial Sequence
  Description of Artificial Sequence: Synthetic oligonucleotide
acaucucggaagucauaaa

SEQ ID NO: 1515785 - RNA, 19 nt, Artificial Sequence
  Description of Artificial Sequence: Synthetic oligonucleotide
caguuccgagccuggcucc

SEQ ID NO: 1515786 - RNA, 19 nt, Artificial Sequence
  Description of Artificial Sequence: Synthetic oligonucleotide
gaugcacgauacccagguc

SEQ ID NO: 1515787 - RNA, 19 nt, Artificial Sequence
  Description of Artificial Sequence: Synthetic oligonucleotide
ccucccaugaaaggaaccc

SEQ ID NO: 1515788 - RNA, 19 nt, Artificial Sequence
  Description of Artificial Sequence: Synthetic oligonucleotide
cgugcaaguacuugacagc

SEQ ID NO: 1515789 - RNA, 19 nt, Artificial Sequence
  Description of Artificial Sequence: Synthetic oligonucleotide
uuccgagccuggcuccaca

SEQ ID NO: 1515790 - RNA, 19 nt, Artificial Sequence
  Description of Artificial Sequence: Synthetic oligonucleotide
caucguagaaaggugggua

SEQ ID NO: 1515791 - RNA, 19 nt, Artificial Sequence
  Description of Artificial Sequence: Synthetic oligonucleotide
uggggccuuccacuucccc

SEQ ID NO: 1515792 - RNA, 19 nt, Artificial Sequence
  Description of Artificial Sequence: Synthetic oligonucleotide
gccugcuuccaccuggggc

SEQ ID NO: 1515793 - RNA, 19 nt, Artificial Sequence
  Description of Artificial Sequence: Synthetic oligonucleotide
guccucugccaggauaacc

SEQ ID NO: 1515794 - RNA, 19 nt, Artificial Sequence
  Description of Artificial Sequence: Synthetic oligonucleotide
uucaguccauggcccuaga

SEQ ID NO: 1515795 - RNA, 19 nt, Artificial Sequence
  Description of Artificial Sequence: Synthetic oligonucleotide
gucgugcaaguacuugaca

SEQ ID NO: 1515796 - RNA, 19 nt, Artificial Sequence
  Description of Artificial Sequence: Synthetic oligonucleotide
cuguggcguugaaagcuug

SEQ ID NO: 1515797 - RNA, 19 nt, Artificial Sequence
  Description of Artificial Sequence: Synthetic oligonucleotide
cacucucauagaugucauc

SEQ ID NO: 1515798 - RNA, 19 nt, Artificial Sequence
  Description of Artificial Sequence: Synthetic oligonucleotide
acccgugcccagaacaucu

SEQ ID NO: 1515799 - RNA, 19 nt, Artificial Sequence
  Description of Artificial Sequence: Synthetic oligonucleotide
cauacucagccuucaaaau

SEQ ID NO: 1515800 - RNA, 19 nt, Artificial Sequence
  Description of Artificial Sequence: Synthetic oligonucleotide
uggugucagcugcucccca

SEQ ID NO: 1515801 - RNA, 19 nt, Artificial Sequence
  Description of Artificial Sequence: Synthetic oligonucleotide
cacuuccccuggcauggcc

SEQ ID NO: 1515802 - RNA, 19 nt, Artificial Sequence
  Description of Artificial Sequence: Synthetic oligonucleotide
agcuccccaccugaaacca

SEQ ID NO: 1515803 - RNA, 19 nt, Artificial Sequence
  Description of Artificial Sequence: Synthetic oligonucleotide
gugcaagacggcgaucuca

SEQ ID NO: 1515804 - RNA, 19 nt, Artificial Sequence
  Description of Artificial Sequence: Synthetic oligonucleotide
uggcuguccuugccccucc

SEQ ID NO: 1515805 - RNA, 19 nt, Artificial Sequence
  Description of Artificial Sequence: Synthetic oligonucleotide
ggcacccgugcccagaaca

SEQ ID NO: 1515806 - RNA, 19 nt, Artificial Sequence
  Description of Artificial Sequence: Synthetic oligonucleotide
ccguaugaagucuuuggca

SEQ ID NO: 1515807 - RNA, 19 nt, Artificial Sequence
  Description of Artificial Sequence: Synthetic oligonucleotide
agucggagaucaugauuuu

SEQ ID NO: 1515808 - RNA, 19 nt, Artificial Sequence
  Description of Artificial Sequence: Synthetic oligonucleotide
cuggcuccacacagcaguc

SEQ ID NO: 1515809 - RNA, 19 nt, Artificial Sequence
  Description of Artificial Sequence: Synthetic oligonucleotide
cccguucuguguagaaucc

SEQ ID NO: 1515810 - RNA, 19 nt, Artificial Sequence
  Description of Artificial Sequence: Synthetic oligonucleotide
uuucuccaucaagugccgu

SEQ ID NO: 1515811 - RNA, 19 nt, Artificial Sequence
  Description of Artificial Sequence: Synthetic oligonucleotide
ccacguauccuggaguccc

SEQ ID NO: 1515812 - RNA, 19 nt, Artificial Sequence
  Description of Artificial Sequence: Synthetic oligonucleotide
caggucgugcaaguacuug

SEQ ID NO: 1515813 - RNA, 19 nt, Artificial Sequence
  Description of Artificial Sequence: Synthetic oligonucleotide
cugcucgcucacugacugg

SEQ ID NO: 1515814 - RNA, 19 nt, Artificial Sequence
  Description of Artificial Sequence: Synthetic oligonucleotide
uguucaguccauggcccua

SEQ ID NO: 1515815 - RNA, 19 nt, Artificial Sequence
  Description of Artificial Sequence: Synthetic oligonucleotide
cuccaucaagugccguaug

SEQ ID NO: 1515816 - RNA, 19 nt, Artificial Sequence
  Description of Artificial Sequence: Synthetic oligonucleotide
cucacugacugguggauau

SEQ ID NO: 1515817 - RNA, 19 nt, Artificial Sequence
  Description of Artificial Sequence: Synthetic oligonucleotide
cgugcccagaacaucucgg

SEQ ID NO: 1515818 - RNA, 19 nt, Artificial Sequence
  Description of Artificial Sequence: Synthetic oligonucleotide
auucuuauccagagcugua

SEQ ID NO: 1515819 - RNA, 19 nt, Artificial Sequence
  Description of Artificial Sequence: Synthetic oligonucleotide
aagugccguaugaagucuu

SEQ ID NO: 1515820 - RNA, 19 nt, Artificial Sequence
  Description of Artificial Sequence: Synthetic oligonucleotide
ccgaaccacagcuguggcg

SEQ ID NO: 1515821 - RNA, 19 nt, Artificial Sequence
  Description of Artificial Sequence: Synthetic oligonucleotide
cuggaagaugaggcggcug

SEQ ID NO: 1515822 - RNA, 19 nt, Artificial Sequence
  Description of Artificial Sequence: Synthetic oligonucleotide
caauccaugggugcugcaa

SEQ ID NO: 1515823 - RNA, 19 nt, Artificial Sequence
  Description of Artificial Sequence: Synthetic oligonucleotide
ggucgugcaaguacuugac

SEQ ID NO: 1515824 - RNA, 19 nt, Artificial Sequence
  Description of Artificial Sequence: Synthetic oligonucleotide
cauggcccuagagcuuggg

SEQ ID NO: 1515825 - RNA, 19 nt, Artificial Sequence
  Description of Artificial Sequence: Synthetic oligonucleotide
aucccguucuguguagaau

SEQ ID NO: 1515826 - RNA, 19 nt, Artificial Sequence
  Description of Artificial Sequence: Synthetic oligonucleotide
caguaaggagagucaaacu

SEQ ID NO: 1515827 - RNA, 19 nt, Artificial Sequence
  Description of Artificial Sequence: Synthetic oligonucleotide
ccaugcugcccucuuugcc

SEQ ID NO: 1515828 - RNA, 19 nt, Artificial Sequence
  Description of Artificial Sequence: Synthetic oligonucleotide
agcagucuacggccuugcu

SEQ ID NO: 1515829 - RNA, 19 nt, Artificial Sequence
  Description of Artificial Sequence: Synthetic oligonucleotide
agcuuccucaugugccgaa

SEQ ID NO: 1515830 - RNA, 19 nt, Artificial Sequence
  Description of Artificial Sequence: Synthetic oligonucleotide
agagcaggauauaggcaau

SEQ ID NO: 1515831 - RNA, 19 nt, Artificial Sequence
  Description of Artificial Sequence: Synthetic oligonucleotide
gcaaggcuugcucacaggu

SEQ ID NO: 1515832 - RNA, 19 nt, Artificial Sequence
  Description of Artificial Sequence: Synthetic oligonucleotide
aaggagagucaaacucaua

SEQ ID NO: 1515833 - RNA, 19 nt, Artificial Sequence
  Description of Artificial Sequence: Synthetic oligonucleotide
gccuucaaaaucuguucaa

SEQ ID NO: 1515834 - RNA, 19 nt, Artificial Sequence
  Description of Artificial Sequence: Synthetic oligonucleotide
aggcacccgugcccagaac

SEQ ID NO: 1515835 - RNA, 19 nt, Artificial Sequence
  Description of Artificial Sequence: Synthetic oligonucleotide
cccuaaugucuucugccug

SEQ ID NO: 1515836 - RNA, 19 nt, Artificial Sequence
  Description of Artificial Sequence: Synthetic oligonucleotide
cagcagucuacggccuugc

SEQ ID NO: 1515837 - RNA, 19 nt, Artificial Sequence
  Description of Artificial Sequence: Synthetic oligonucleotide
ggcaucccguucuguguag

SEQ ID NO: 1515838 - RNA, 19 nt, Artificial Sequence
  Description of Artificial Sequence: Synthetic oligonucleotide
aggugccacguauccugga

SEQ ID NO: 1515839 - RNA, 19 nt, Artificial Sequence
  Description of Artificial Sequence: Synthetic oligonucleotide
cagugaagagugagaggaa

SEQ ID NO: 1515840 - RNA, 19 nt, Artificial Sequence
  Description of Artificial Sequence: Synthetic oligonucleotide
gaacccugauuuccuuggu

SEQ ID NO: 1515841 - RNA, 19 nt, Artificial Sequence
  Description of Artificial Sequence: Synthetic oligonucleotide
ccucaugugccgaaccaca

SEQ ID NO: 1515842 - RNA, 19 nt, Artificial Sequence
  Description of Artificial Sequence: Synthetic oligonucleotide
uccccaguucuggggugag

SEQ ID NO: 1515843 - RNA, 19 nt, Artificial Sequence
  Description of Artificial Sequence: Synthetic oligonucleotide
caucccguucuguguagaa

SEQ ID NO: 1515844 - RNA, 19 nt, Artificial Sequence
  Description of Artificial Sequence: Synthetic oligonucleotide
augugccgaaccacagcug

SEQ ID NO: 1515845 - RNA, 19 nt, Artificial Sequence
  Description of Artificial Sequence: Synthetic oligonucleotide
cccucccaugaaaggaacc

SEQ ID NO: 1515846 - RNA, 19 nt, Artificial Sequence
  Description of Artificial Sequence: Synthetic oligonucleotide
gucccacaggcuguggaga

SEQ ID NO: 1515847 - RNA, 19 nt, Artificial Sequence
  Description of Artificial Sequence: Synthetic oligonucleotide
aguuccgagccuggcucca

SEQ ID NO: 1515848 - RNA, 19 nt, Artificial Sequence
  Description of Artificial Sequence: Synthetic oligonucleotide
cucagccuucaaaaucugu

SEQ ID NO: 1515849 - RNA, 19 nt, Artificial Sequence
  Description of Artificial Sequence: Synthetic oligonucleotide
accccucccaugaaaggaa

SEQ ID NO: 1515850 - RNA, 19 nt, Artificial Sequence
  Description of Artificial Sequence: Synthetic oligonucleotide
cuugugcaagacggcgauc

SEQ ID NO: 1515851 - RNA, 19 nt, Artificial Sequence
  Description of Artificial Sequence: Synthetic oligonucleotide
gucucggcagcaacagcca

SEQ ID NO: 1515852 - RNA, 19 nt, Artificial Sequence
  Description of Artificial Sequence: Synthetic oligonucleotide
ccgugcccagaacaucucg

SEQ ID NO: 1515853 - RNA, 19 nt, Artificial Sequence
  Description of Artificial Sequence: Synthetic oligonucleotide
gcagucuacggccuugcua

SEQ ID NO: 1515854 - RNA, 19 nt, Artificial Sequence
  Description of Artificial Sequence: Synthetic oligonucleotide
uccugcggcugccccgcgu

SEQ ID NO: 1515855 - RNA, 19 nt, Artificial Sequence
  Description of Artificial Sequence: Synthetic oligonucleotide
ggauaaccucugagaaggc

SEQ ID NO: 1515856 - RNA, 19 nt, Artificial Sequence
  Description of Artificial Sequence: Synthetic oligonucleotide
uggcagagucagagauguc

SEQ ID NO: 1515857 - RNA, 19 nt, Artificial Sequence
  Description of Artificial Sequence: Synthetic oligonucleotide
caaagucggagaucaugau

SEQ ID NO: 1515858 - RNA, 19 nt, Artificial Sequence
  Description of Artificial Sequence: Synthetic oligonucleotide
cuggggccuuccacuuccc

SEQ ID NO: 1515859 - RNA, 19 nt, Artificial Sequence
  Description of Artificial Sequence: Synthetic oligonucleotide
caauguugggauguuuaau

SEQ ID NO: 1515860 - RNA, 19 nt, Artificial Sequence
  Description of Artificial Sequence: Synthetic oligonucleotide
agugccguaugaagucuuu

SEQ ID NO: 1515861 - RNA, 19 nt, Artificial Sequence
  Description of Artificial Sequence: Synthetic oligonucleotide
gugaaccucuucuccgggu

SEQ ID NO: 1515862 - RNA, 19 nt, Artificial Sequence
  Description of Artificial Sequence: Synthetic oligonucleotide
cccaugaaaggaacccuga

SEQ ID NO: 1515863 - RNA, 19 nt, Artificial Sequence
  Description of Artificial Sequence: Synthetic oligonucleotide
cacguauccuggaguccca

SEQ ID NO: 1515864 - RNA, 19 nt, Artificial Sequence
  Description of Artificial Sequence: Synthetic oligonucleotide
agucuuuggcagagucaga

SEQ ID NO: 1515865 - RNA, 19 nt, Artificial Sequence
  Description of Artificial Sequence: Synthetic oligonucleotide
gugccacguauccuggagu

SEQ ID NO: 1515866 - RNA, 19 nt, Artificial Sequence
  Description of Artificial Sequence: Synthetic oligonucleotide
gugccgaaccacagcugug

SEQ ID NO: 1515867 - RNA, 19 nt, Artificial Sequence
  Description of Artificial Sequence: Synthetic oligonucleotide
gccgaaccacagcuguggc

SEQ ID NO: 1515868 - RNA, 19 nt, Artificial Sequence
  Description of Artificial Sequence: Synthetic oligonucleotide
ugccccgcgucggggcugg

SEQ ID NO: 1515869 - RNA, 19 nt, Artificial Sequence
  Description of Artificial Sequence: Synthetic oligonucleotide
guguucaguccauggcccu

SEQ ID NO: 1515870 - RNA, 19 nt, Artificial Sequence
  Description of Artificial Sequence: Synthetic oligonucleotide
agucuacggccuugcuaua

SEQ ID NO: 1515871 - RNA, 19 nt, Artificial Sequence
  Description of Artificial Sequence: Synthetic oligonucleotide
ugcgagggccaaggaggcu

SEQ ID NO: 1515872 - RNA, 19 nt, Artificial Sequence
  Description of Artificial Sequence: Synthetic oligonucleotide
cacccgugcccagaacauc

SEQ ID NO: 1515873 - RNA, 19 nt, Artificial Sequence
  Description of Artificial Sequence: Synthetic oligonucleotide
caagugccguaugaagucu

SEQ ID NO: 1515874 - RNA, 19 nt, Artificial Sequence
  Description of Artificial Sequence: Synthetic oligonucleotide
ccccaugacuggcuggcug

SEQ ID NO: 1515875 - RNA, 19 nt, Artificial Sequence
  Description of Artificial Sequence: Synthetic oligonucleotide
uccccaugacuggcuggcu

SEQ ID NO: 1515876 - RNA, 19 nt, Artificial Sequence
  Description of Artificial Sequence: Synthetic oligonucleotide
ggggcaguuccgagccugg

SEQ ID NO: 1515877 - RNA, 19 nt, Artificial Sequence
  Description of Artificial Sequence: Synthetic oligonucleotide
gccacguauccuggagucc

SEQ ID NO: 1515878 - RNA, 19 nt, Artificial Sequence
  Description of Artificial Sequence: Synthetic oligonucleotide
ccuauggaccagcagucua

SEQ ID NO: 1515879 - RNA, 19 nt, Artificial Sequence
  Description of Artificial Sequence: Synthetic oligonucleotide
cggagaucaugauuuugga

SEQ ID NO: 1515880 - RNA, 19 nt, Artificial Sequence
  Description of Artificial Sequence: Synthetic oligonucleotide
ccagcuguuggugucagcu

SEQ ID NO: 1515881 - RNA, 19 nt, Artificial Sequence
  Description of Artificial Sequence: Synthetic oligonucleotide
ggcaguuccgagccuggcu

SEQ ID NO: 1515882 - RNA, 19 nt, Artificial Sequence
  Description of Artificial Sequence: Synthetic oligonucleotide
ggguaugggguaagaaacu

SEQ ID NO: 1515883 - RNA, 19 nt, Artificial Sequence
  Description of Artificial Sequence: Synthetic oligonucleotide
ucccgccgcgucugugccu

SEQ ID NO: 1515884 - RNA, 19 nt, Artificial Sequence
  Description of Artificial Sequence: Synthetic oligonucleotide
cacugcccuccagccacag

SEQ ID NO: 1515885 - RNA, 19 nt, Artificial Sequence
  Description of Artificial Sequence: Synthetic oligonucleotide
guuccgagccuggcuccac

SEQ ID NO: 1515886 - RNA, 19 nt, Artificial Sequence
  Description of Artificial Sequence: Synthetic oligonucleotide
ucgucccaguaaggagagu

SEQ ID NO: 1515887 - RNA, 19 nt, Artificial Sequence
  Description of Artificial Sequence: Synthetic oligonucleotide
ggcauggcccacugcccuc

SEQ ID NO: 1515888 - RNA, 19 nt, Artificial Sequence
  Description of Artificial Sequence: Synthetic oligonucleotide
aggcuugcucacaggugaa

SEQ ID NO: 1515889 - RNA, 19 nt, Artificial Sequence
  Description of Artificial Sequence: Synthetic oligonucleotide
ccaucaagugccguaugaa

SEQ ID NO: 1515890 - RNA, 19 nt, Artificial Sequence
  Description of Artificial Sequence: Synthetic oligonucleotide
cccgcgucggggcuggcug

SEQ ID NO: 1515891 - RNA, 19 nt, Artificial Sequence
  Description of Artificial Sequence: Synthetic oligonucleotide
ccagcagucuacggccuug

SEQ ID NO: 1515892 - RNA, 19 nt, Artificial Sequence
  Description of Artificial Sequence: Synthetic oligonucleotide
gaggcggcuggcaucccgu

SEQ ID NO: 1515893 - RNA, 19 nt, Artificial Sequence
  Description of Artificial Sequence: Synthetic oligonucleotide
ggccaggaccucaggugcc

SEQ ID NO: 1515894 - RNA, 19 nt, Artificial Sequence
  Description of Artificial Sequence: Synthetic oligonucleotide
gcuccugcggcugccccgc

SEQ ID NO: 1515895 - RNA, 19 nt, Artificial Sequence
  Description of Artificial Sequence: Synthetic oligonucleotide
cccaggucgugcaaguacu

SEQ ID NO: 1515896 - RNA, 19 nt, Artificial Sequence
  Description of Artificial Sequence: Synthetic oligonucleotide
ccuugguguucaguccaug

SEQ ID NO: 1515897 - RNA, 19 nt, Artificial Sequence
  Description of Artificial Sequence: Synthetic oligonucleotide
gcggcugccccgcgucggg

SEQ ID NO: 1515898 - RNA, 19 nt, Artificial Sequence
  Description of Artificial Sequence: Synthetic oligonucleotide
cgaugcacgauacccaggu

SEQ ID NO: 1515899 - RNA, 19 nt, Artificial Sequence
  Description of Artificial Sequence: Synthetic oligonucleotide
ggcggcuggcaucccguuc

SEQ ID NO: 1515900 - RNA, 19 nt, Artificial Sequence
  Description of Artificial Sequence: Synthetic oligonucleotide
aggcggcuggcaucccguu

SEQ ID NO: 1515901 - RNA, 19 nt, Artificial Sequence
  Description of Artificial Sequence: Synthetic oligonucleotide
cgaaccacagcuguggcgu

SEQ ID NO: 1515902 - RNA, 19 nt, Artificial Sequence
  Description of Artificial Sequence: Synthetic oligonucleotide
gcacgauacccaggucgug

SEQ ID NO: 1515903 - RNA, 19 nt, Artificial Sequence
  Description of Artificial Sequence: Synthetic oligonucleotide
cugaguccucuuguccucu

SEQ ID NO: 1515904 - RNA, 19 nt, Artificial Sequence
  Description of Artificial Sequence: Synthetic oligonucleotide
gaaccacagcuguggcguu

SEQ ID NO: 1515905 - RNA, 19 nt, Artificial Sequence
  Description of Artificial Sequence: Synthetic oligonucleotide
gggcaguuccgagccuggc

SEQ ID NO: 1515906 - RNA, 19 nt, Artificial Sequence
  Description of Artificial Sequence: Synthetic oligonucleotide
cccaugacuggcuggcugu

SEQ ID NO: 1515907 - RNA, 19 nt, Artificial Sequence
  Description of Artificial Sequence: Synthetic oligonucleotide
cccaaccccucccaugaaa

SEQ ID NO: 1515908 - RNA, 19 nt, Artificial Sequence
  Description of Artificial Sequence: Synthetic oligonucleotide
cauggcccacugcccucca

SEQ ID NO: 1515909 - RNA, 19 nt, Artificial Sequence
  Description of Artificial Sequence: Synthetic oligonucleotide
cccgugcccagaacaucuc

SEQ ID NO: 1515910 - RNA, 19 nt, Artificial Sequence
  Description of Artificial Sequence: Synthetic oligonucleotide
gcuggcugcgagggccaag

SEQ ID NO: 1515911 - RNA, 19 nt, Artificial Sequence
  Description of Artificial Sequence: Synthetic oligonucleotide
cguauccuggagucccaca

SEQ ID NO: 1515912 - RNA, 19 nt, Artificial Sequence
  Description of Artificial Sequence: Synthetic oligonucleotide
cccgccgcgucugugccug

SEQ ID NO: 1515913 - RNA, 19 nt, Artificial Sequence
  Description of Artificial Sequence: Synthetic oligonucleotide
cguugaaagcuugcuucca

SEQ ID NO: 1515914 - RNA, 19 nt, Artificial Sequence
  Description of Artificial Sequence: Synthetic oligonucleotide
ccccacucucauagauguc

SEQ ID NO: 1515915 - RNA, 19 nt, Artificial Sequence
  Description of Artificial Sequence: Synthetic oligonucleotide
gccgcgucugugccugguc

SEQ ID NO: 1515916 - RNA, 19 nt, Artificial Sequence
  Description of Artificial Sequence: Synthetic oligonucleotide
ccaugacuggcuggcuguc

SEQ ID NO: 1515917 - RNA, 19 nt, Artificial Sequence
  Description of Artificial Sequence: Synthetic oligonucleotide
ggcuguaguacagcagguu

SEQ ID NO: 1515918 - RNA, 19 nt, Artificial Sequence
  Description of Artificial Sequence: Synthetic oligonucleotide
ccgcgucggggcuggcugc

SEQ ID NO: 1515919 - RNA, 19 nt, Artificial Sequence
  Description of Artificial Sequence: Synthetic oligonucleotide
cugccccgcgucggggcug

SEQ ID NO: 1515920 - RNA, 19 nt, Artificial Sequence
  Description of Artificial Sequence: Synthetic oligonucleotide
ggccuucuuggcaaugcau

SEQ ID NO: 1515921 - RNA, 19 nt, Artificial Sequence
  Description of Artificial Sequence: Synthetic oligonucleotide
cgucggggcuggcugcgag

SEQ ID NO: 1515922 - RNA, 19 nt, Artificial Sequence
  Description of Artificial Sequence: Synthetic oligonucleotide
ccacucucauagaugucau

SEQ ID NO: 1515923 - RNA, 19 nt, Artificial Sequence
  Description of Artificial Sequence: Synthetic oligonucleotide
cccuggcauggcccacugc

SEQ ID NO: 1515924 - RNA, 19 nt, Artificial Sequence
  Description of Artificial Sequence: Synthetic oligonucleotide
ccgagccuggcuccacaca

SEQ ID NO: 1515925 - RNA, 19 nt, Artificial Sequence
  Description of Artificial Sequence: Synthetic oligonucleotide
gcuguggcguugaaagcuu

SEQ ID NO: 1515926 - RNA, 19 nt, Artificial Sequence
  Description of Artificial Sequence: Synthetic oligonucleotide
caccugaaaccagcugcau

SEQ ID NO: 1515927 - RNA, 19 nt, Artificial Sequence
  Description of Artificial Sequence: Synthetic oligonucleotide
ccccuccuggcuggugccc

SEQ ID NO: 1515928 - RNA, 19 nt, Artificial Sequence
  Description of Artificial Sequence: Synthetic oligonucleotide
gcacccgugcccagaacau

SEQ ID NO: 1515929 - RNA, 19 nt, Artificial Sequence
  Description of Artificial Sequence: Synthetic oligonucleotide
cgcgucggggcuggcugcg

SEQ ID NO: 1515930 - RNA, 19 nt, Artificial Sequence
  Description of Artificial Sequence: Synthetic oligonucleotide
ccguucuguguagaauccu

SEQ ID NO: 1515931 - RNA, 19 nt, Artificial Sequence
  Description of Artificial Sequence: Synthetic oligonucleotide
gcaagacggcgaucucauu

SEQ ID NO: 1515932 - RNA, 19 nt, Artificial Sequence
  Description of Artificial Sequence: Synthetic oligonucleotide
ccuggaagaugaggcggcu

SEQ ID NO: 1515933 - RNA, 19 nt, Artificial Sequence
  Description of Artificial Sequence: Synthetic oligonucleotide
ccgggucuuucuccaucaa

SEQ ID NO: 1515934 - RNA, 19 nt, Artificial Sequence
  Description of Artificial Sequence: Synthetic oligonucleotide
cgauacccaggucgugcaa

SEQ ID NO: 1515935 - RNA, 19 nt, Artificial Sequence
  Description of Artificial Sequence: Synthetic oligonucleotide
ccaggucgugcaaguacuu

SEQ ID NO: 1515936 - RNA, 19 nt, Artificial Sequence
  Description of Artificial Sequence: Synthetic oligonucleotide
gcucacaggugaaccucuu

SEQ ID NO: 1515937 - RNA, 19 nt, Artificial Sequence
  Description of Artificial Sequence: Synthetic oligonucleotide
ccgccgcgucugugccugg

SEQ ID NO: 1515938 - RNA, 19 nt, Artificial Sequence
  Description of Artificial Sequence: Synthetic oligonucleotide
ccccaaccccucccaugaa

SEQ ID NO: 1515939 - RNA, 19 nt, Artificial Sequence
  Description of Artificial Sequence: Synthetic oligonucleotide
gcgucggggcuggcugcga

SEQ ID NO: 1515940 - RNA, 19 nt, Artificial Sequence
  Description of Artificial Sequence: Synthetic oligonucleotide
ccccgcgucggggcuggcu

SEQ ID NO: 1515941 - RNA, 19 nt, Artificial Sequence
  Description of Artificial Sequence: Synthetic oligonucleotide
gccccgcgucggggcuggc

SEQ ID NO: 1515942 - RNA, 19 nt, Artificial Sequence
  Description of Artificial Sequence: Synthetic oligonucleotide
cgccgcgucugugccuggu

SEQ ID NO: 1515943 - RNA, 19 nt, Artificial Sequence
  Description of Artificial Sequence: Synthetic oligonucleotide
gaaugauugauagagaggg

SEQ ID NO: 1515944 - RNA, 19 nt, Artificial Sequence
  Description of Artificial Sequence: Synthetic oligonucleotide
aaauuguagauguaaaggu

SEQ ID NO: 1515945 - RNA, 19 nt, Artificial Sequence
  Description of Artificial Sequence: Synthetic oligonucleotide
aacacuagagagcugauug

SEQ ID NO: 1515946 - RNA, 19 nt, Artificial Sequence
  Description of Artificial Sequence: Synthetic oligonucleotide
guuggaaugauugauagag

SEQ ID NO: 1515947 - RNA, 19 nt, Artificial Sequence
  Description of Artificial Sequence: Synthetic oligonucleotide
uauagauggauucuuccag

SEQ ID NO: 1515948 - RNA, 19 nt, Artificial Sequence
  Description of Artificial Sequence: Synthetic oligonucleotide
aacaaucucgccuguaguc

SEQ ID NO: 1515949 - RNA, 19 nt, Artificial Sequence
  Description of Artificial Sequence: Synthetic oligonucleotide
uccucgacgaaacucauag

SEQ ID NO: 1515950 - RNA, 19 nt, Artificial Sequence
  Description of Artificial Sequence: Synthetic oligonucleotide
uuccccuccauccugaggg

SEQ ID NO: 1515951 - RNA, 19 nt, Artificial Sequence
  Description of Artificial Sequence: Synthetic oligonucleotide
uuuugugugacugacgacc

SEQ ID NO: 1515952 - RNA, 19 nt, Artificial Sequence
  Description of Artificial Sequence: Synthetic oligonucleotide
gaccuguuggguuugaggg

SEQ ID NO: 1515953 - RNA, 19 nt, Artificial Sequence
  Description of Artificial Sequence: Synthetic oligonucleotide
ucauagagaacaaucucgc

SEQ ID NO: 1515954 - RNA, 19 nt, Artificial Sequence
  Description of Artificial Sequence: Synthetic oligonucleotide
acugauugcacuccguuuc

SEQ ID NO: 1515955 - RNA, 19 nt, Artificial Sequence
  Description of Artificial Sequence: Synthetic oligonucleotide
agcuucauaucuuuaaugu

SEQ ID NO: 1515956 - RNA, 19 nt, Artificial Sequence
  Description of Artificial Sequence: Synthetic oligonucleotide
uccauacugaacacuagag

SEQ ID NO: 1515957 - RNA, 19 nt, Artificial Sequence
  Description of Artificial Sequence: Synthetic oligonucleotide
cucgacgaaacucauagag

SEQ ID NO: 1515958 - RNA, 19 nt, Artificial Sequence
  Description of Artificial Sequence: Synthetic oligonucleotide
auagauggauucuuccagg

SEQ ID NO: 1515959 - RNA, 19 nt, Artificial Sequence
  Description of Artificial Sequence: Synthetic oligonucleotide
uggaauaacuucuccucgg

SEQ ID NO: 1515960 - RNA, 19 nt, Artificial Sequence
  Description of Artificial Sequence: Synthetic oligonucleotide
aucgcuaggggacagccac

SEQ ID NO: 1515961 - RNA, 19 nt, Artificial Sequence
  Description of Artificial Sequence: Synthetic oligonucleotide
uucauugcuuccauggacu

SEQ ID NO: 1515962 - RNA, 19 nt, Artificial Sequence
  Description of Artificial Sequence: Synthetic oligonucleotide
auauagauggauucuucca

SEQ ID NO: 1515963 - RNA, 19 nt, Artificial Sequence
  Description of Artificial Sequence: Synthetic oligonucleotide
uacacguucaucugccgag

SEQ ID NO: 1515964 - RNA, 19 nt, Artificial Sequence
  Description of Artificial Sequence: Synthetic oligonucleotide
uguggguuuugauuaagac

SEQ ID NO: 1515965 - RNA, 19 nt, Artificial Sequence
  Description of Artificial Sequence: Synthetic oligonucleotide
accuuuucauuccucgacg

SEQ ID NO: 1515966 - RNA, 19 nt, Artificial Sequence
  Description of Artificial Sequence: Synthetic oligonucleotide
caguugcugcguaagaugg

SEQ ID NO: 1515967 - RNA, 19 nt, Artificial Sequence
  Description of Artificial Sequence: Synthetic oligonucleotide
gucacauaccuuuucauuc

SEQ ID NO: 1515968 - RNA, 19 nt, Artificial Sequence
  Description of Artificial Sequence: Synthetic oligonucleotide
guaggaguuggaaugauug

SEQ ID NO: 1515969 - RNA, 19 nt, Artificial Sequence
  Description of Artificial Sequence: Synthetic oligonucleotide
agcugauugucacauaccu

SEQ ID NO: 1515970 - RNA, 19 nt, Artificial Sequence
  Description of Artificial Sequence: Synthetic oligonucleotide
aucgucaagacacacuggu

SEQ ID NO: 1515971 - RNA, 19 nt, Artificial Sequence
  Description of Artificial Sequence: Synthetic oligonucleotide
aggaacugcgaguccauac

SEQ ID NO: 1515972 - RNA, 19 nt, Artificial Sequence
  Description of Artificial Sequence: Synthetic oligonucleotide
ugccgguucagccguaugg

SEQ ID NO: 1515973 - RNA, 19 nt, Artificial Sequence
  Description of Artificial Sequence: Synthetic oligonucleotide
aguaaccuggcacagugga

SEQ ID NO: 1515974 - RNA, 19 nt, Artificial Sequence
  Description of Artificial Sequence: Synthetic oligonucleotide
acaauguacacgucgggga

SEQ ID NO: 1515975 - RNA, 19 nt, Artificial Sequence
  Description of Artificial Sequence: Synthetic oligonucleotide
aaguucaggcguccugugg

SEQ ID NO: 1515976 - RNA, 19 nt, Artificial Sequence
  Description of Artificial Sequence: Synthetic oligonucleotide
ugauugauagagagggcac

SEQ ID NO: 1515977 - RNA, 19 nt, Artificial Sequence
  Description of Artificial Sequence: Synthetic oligonucleotide
uucguuuugcccuucugac

SEQ ID NO: 1515978 - RNA, 19 nt, Artificial Sequence
  Description of Artificial Sequence: Synthetic oligonucleotide
guacagauguucuucugcc

SEQ ID NO: 1515979 - RNA, 19 nt, Artificial Sequence
  Description of Artificial Sequence: Synthetic oligonucleotide
gagcccgaggaguugaagg

SEQ ID NO: 1515980 - RNA, 19 nt, Artificial Sequence
  Description of Artificial Sequence: Synthetic oligonucleotide
agauguaaagguguccauc

SEQ ID NO: 1515981 - RNA, 19 nt, Artificial Sequence
  Description of Artificial Sequence: Synthetic oligonucleotide
aucggaggaggccacuagc

SEQ ID NO: 1515982 - RNA, 19 nt, Artificial Sequence
  Description of Artificial Sequence: Synthetic oligonucleotide
uuugugugacugacgacca

SEQ ID NO: 1515983 - RNA, 19 nt, Artificial Sequence
  Description of Artificial Sequence: Synthetic oligonucleotide
uguggcgaaagcccugucc

SEQ ID NO: 1515984 - RNA, 19 nt, Artificial Sequence
  Description of Artificial Sequence: Synthetic oligonucleotide
cuagagagcugauugucac

SEQ ID NO: 1515985 - RNA, 19 nt, Artificial Sequence
  Description of Artificial Sequence: Synthetic oligonucleotide
uagauggauucuuccaggc

SEQ ID NO: 1515986 - RNA, 19 nt, Artificial Sequence
  Description of Artificial Sequence: Synthetic oligonucleotide
ucgacgaaacucauagagu

SEQ ID NO: 1515987 - RNA, 19 nt, Artificial Sequence
  Description of Artificial Sequence: Synthetic oligonucleotide
ugcccuucugacuuccgcg

SEQ ID NO: 1515988 - RNA, 19 nt, Artificial Sequence
  Description of Artificial Sequence: Synthetic oligonucleotide
agcacuugcuaguuuggag

SEQ ID NO: 1515989 - RNA, 19 nt, Artificial Sequence
  Description of Artificial Sequence: Synthetic oligonucleotide
caucauagagaacaaucuc

SEQ ID NO: 1515990 - RNA, 19 nt, Artificial Sequence
  Description of Artificial Sequence: Synthetic oligonucleotide
gugacugacgaccaccacc

SEQ ID NO: 1515991 - RNA, 19 nt, Artificial Sequence
  Description of Artificial Sequence: Synthetic oligonucleotide
agccguauggacaaaaugu

SEQ ID NO: 1515992 - RNA, 19 nt, Artificial Sequence
  Description of Artificial Sequence: Synthetic oligonucleotide
uagagagggcacauagacc

SEQ ID NO: 1515993 - RNA, 19 nt, Artificial Sequence
  Description of Artificial Sequence: Synthetic oligonucleotide
uguagauguaaaggugucc

SEQ ID NO: 1515994 - RNA, 19 nt, Artificial Sequence
  Description of Artificial Sequence: Synthetic oligonucleotide
acgucggggauuucauugc

SEQ ID NO: 1515995 - RNA, 19 nt, Artificial Sequence
  Description of Artificial Sequence: Synthetic oligonucleotide
augaccgugccuuucucag

SEQ ID NO: 1515996 - RNA, 19 nt, Artificial Sequence
  Description of Artificial Sequence: Synthetic oligonucleotide
uauggacaaaauguugcug

SEQ ID NO: 1515997 - RNA, 19 nt, Artificial Sequence
  Description of Artificial Sequence: Synthetic oligonucleotide
agccacuccagguggaagg

SEQ ID NO: 1515998 - RNA, 19 nt, Artificial Sequence
  Description of Artificial Sequence: Synthetic oligonucleotide
gucagguacagagaacacg

SEQ ID NO: 1515999 - RNA, 19 nt, Artificial Sequence
  Description of Artificial Sequence: Synthetic oligonucleotide
auagcuucauaucuuuaau

SEQ ID NO: 1516000 - RNA, 19 nt, Artificial Sequence
  Description of Artificial Sequence: Synthetic oligonucleotide
ugguucaucaugcccgaca

SEQ ID NO: 1516001 - RNA, 19 nt, Artificial Sequence
  Description of Artificial Sequence: Synthetic oligonucleotide
uaagacacauuccccucca

SEQ ID NO: 1516002 - RNA, 19 nt, Artificial Sequence
  Description of Artificial Sequence: Synthetic oligonucleotide
caaaauguugcuggaguag

SEQ ID NO: 1516003 - RNA, 19 nt, Artificial Sequence
  Description of Artificial Sequence: Synthetic oligonucleotide
ucaggauugcuucguuuug

SEQ ID NO: 1516004 - RNA, 19 nt, Artificial Sequence
  Description of Artificial Sequence: Synthetic oligonucleotide
cacaauguacacgucgggg

SEQ ID NO: 1516005 - RNA, 19 nt, Artificial Sequence
  Description of Artificial Sequence: Synthetic oligonucleotide
caucaugcccgacaccugg

SEQ ID NO: 1516006 - RNA, 19 nt, Artificial Sequence
  Description of Artificial Sequence: Synthetic oligonucleotide
uucccauguagccacucca

SEQ ID NO: 1516007 - RNA, 19 nt, Artificial Sequence
  Description of Artificial Sequence: Synthetic oligonucleotide
uuucccauguagccacucc

SEQ ID NO: 1516008 - RNA, 19 nt, Artificial Sequence
  Description of Artificial Sequence: Synthetic oligonucleotide
auguaaagguguccaucgg

SEQ ID NO: 1516009 - RNA, 19 nt, Artificial Sequence
  Description of Artificial Sequence: Synthetic oligonucleotide
cacuugcuaguuuggagcc

SEQ ID NO: 1516010 - RNA, 19 nt, Artificial Sequence
  Description of Artificial Sequence: Synthetic oligonucleotide
guagauguaaaggugucca

SEQ ID NO: 1516011 - RNA, 19 nt, Artificial Sequence
  Description of Artificial Sequence: Synthetic oligonucleotide
ucccguugcaaacucgugu

SEQ ID NO: 1516012 - RNA, 19 nt, Artificial Sequence
  Description of Artificial Sequence: Synthetic oligonucleotide
cauuccucgacgaaacuca

SEQ ID NO: 1516013 - RNA, 19 nt, Artificial Sequence
  Description of Artificial Sequence: Synthetic oligonucleotide
acacaacugauugcacucc

SEQ ID NO: 1516014 - RNA, 19 nt, Artificial Sequence
  Description of Artificial Sequence: Synthetic oligonucleotide
ucgucuguuguuccugagc

SEQ ID NO: 1516015 - RNA, 19 nt, Artificial Sequence
  Description of Artificial Sequence: Synthetic oligonucleotide
cacgucggggauuucauug

SEQ ID NO: 1516016 - RNA, 19 nt, Artificial Sequence
  Description of Artificial Sequence: Synthetic oligonucleotide
ucuccaaaaccacccgaca

SEQ ID NO: 1516017 - RNA, 19 nt, Artificial Sequence
  Description of Artificial Sequence: Synthetic oligonucleotide
agucggguguuccagcuug

SEQ ID NO: 1516018 - RNA, 19 nt, Artificial Sequence
  Description of Artificial Sequence: Synthetic oligonucleotide
aacugauugcacuccguuu

SEQ ID NO: 1516019 - RNA, 19 nt, Artificial Sequence
  Description of Artificial Sequence: Synthetic oligonucleotide
acaaaauguugcuggagua

SEQ ID NO: 1516020 - RNA, 19 nt, Artificial Sequence
  Description of Artificial Sequence: Synthetic oligonucleotide
cugcguaagauggagguac

SEQ ID NO: 1516021 - RNA, 19 nt, Artificial Sequence
  Description of Artificial Sequence: Synthetic oligonucleotide
ggaaugauugauagagagg

SEQ ID NO: 1516022 - RNA, 19 nt, Artificial Sequence
  Description of Artificial Sequence: Synthetic oligonucleotide
uaccgaaggucugagguca

SEQ ID NO: 1516023 - RNA, 19 nt, Artificial Sequence
  Description of Artificial Sequence: Synthetic oligonucleotide
ucagaguaaccuggcacag

SEQ ID NO: 1516024 - RNA, 19 nt, Artificial Sequence
  Description of Artificial Sequence: Synthetic oligonucleotide
cucagaguaaccuggcaca

SEQ ID NO: 1516025 - RNA, 19 nt, Artificial Sequence
  Description of Artificial Sequence: Synthetic oligonucleotide
guugcugcguaagauggag

SEQ ID NO: 1516026 - RNA, 19 nt, Artificial Sequence
  Description of Artificial Sequence: Synthetic oligonucleotide
guaagauggagguaccgaa

SEQ ID NO: 1516027 - RNA, 19 nt, Artificial Sequence
  Description of Artificial Sequence: Synthetic oligonucleotide
guuccaaucgcuaggggac

SEQ ID NO: 1516028 - RNA, 19 nt, Artificial Sequence
  Description of Artificial Sequence: Synthetic oligonucleotide
cacaacugauugcacuccg

SEQ ID NO: 1516029 - RNA, 19 nt, Artificial Sequence
  Description of Artificial Sequence: Synthetic oligonucleotide
gcacuugcuaguuuggagc

SEQ ID NO: 1516030 - RNA, 19 nt, Artificial Sequence
  Description of Artificial Sequence: Synthetic oligonucleotide
cuucaauagcuucauaucu

SEQ ID NO: 1516031 - RNA, 19 nt, Artificial Sequence
  Description of Artificial Sequence: Synthetic oligonucleotide
gguggaaggcucuucuggg

SEQ ID NO: 1516032 - RNA, 19 nt, Artificial Sequence
  Description of Artificial Sequence: Synthetic oligonucleotide
gagaaguucaggcguccug

SEQ ID NO: 1516033 - RNA, 19 nt, Artificial Sequence
  Description of Artificial Sequence: Synthetic oligonucleotide
gcggcacaagauuauaggg

SEQ ID NO: 1516034 - RNA, 19 nt, Artificial Sequence
  Description of Artificial Sequence: Synthetic oligonucleotide
uaguugguagcugccauga

SEQ ID NO: 1516035 - RNA, 19 nt, Artificial Sequence
  Description of Artificial Sequence: Synthetic oligonucleotide
uggaucguggacagcguac

SEQ ID NO: 1516036 - RNA, 19 nt, Artificial Sequence
  Description of Artificial Sequence: Synthetic oligonucleotide
ucauuccucgacgaaacuc

SEQ ID NO: 1516037 - RNA, 19 nt, Artificial Sequence
  Description of Artificial Sequence: Synthetic oligonucleotide
uccucggagugccccaccg

SEQ ID NO: 1516038 - RNA, 19 nt, Artificial Sequence
  Description of Artificial Sequence: Synthetic oligonucleotide
gaaagcccuguccugguuc

SEQ ID NO: 1516039 - RNA, 19 nt, Artificial Sequence
  Description of Artificial Sequence: Synthetic oligonucleotide
guagcugccaugaacaucu

SEQ ID NO: 1516040 - RNA, 19 nt, Artificial Sequence
  Description of Artificial Sequence: Synthetic oligonucleotide
uguccaucggaggaggcca

SEQ ID NO: 1516041 - RNA, 19 nt, Artificial Sequence
  Description of Artificial Sequence: Synthetic oligonucleotide
cugaacacuagagagcuga

SEQ ID NO: 1516042 - RNA, 19 nt, Artificial Sequence
  Description of Artificial Sequence: Synthetic oligonucleotide
auaccuuuucauuccucga

SEQ ID NO: 1516043 - RNA, 19 nt, Artificial Sequence
  Description of Artificial Sequence: Synthetic oligonucleotide
gugguacacguucaucugc

SEQ ID NO: 1516044 - RNA, 19 nt, Artificial Sequence
  Description of Artificial Sequence: Synthetic oligonucleotide
ggaguagcuguaauuacag

SEQ ID NO: 1516045 - RNA, 19 nt, Artificial Sequence
  Description of Artificial Sequence: Synthetic oligonucleotide
gcagcgauggugcacacug

SEQ ID NO: 1516046 - RNA, 19 nt, Artificial Sequence
  Description of Artificial Sequence: Synthetic oligonucleotide
uucucaucgucaagacaca

SEQ ID NO: 1516047 - RNA, 19 nt, Artificial Sequence
  Description of Artificial Sequence: Synthetic oligonucleotide
ugcguaagauggagguacc

SEQ ID NO: 1516048 - RNA, 19 nt, Artificial Sequence
  Description of Artificial Sequence: Synthetic oligonucleotide
acauagaccuguuggguuu

SEQ ID NO: 1516049 - RNA, 19 nt, Artificial Sequence
  Description of Artificial Sequence: Synthetic oligonucleotide
gaugugcacggucuccgug

SEQ ID NO: 1516050 - RNA, 19 nt, Artificial Sequence
  Description of Artificial Sequence: Synthetic oligonucleotide
gauugauagagagggcaca

SEQ ID NO: 1516051 - RNA, 19 nt, Artificial Sequence
  Description of Artificial Sequence: Synthetic oligonucleotide
acaaucucgccuguagucu

SEQ ID NO: 1516052 - RNA, 19 nt, Artificial Sequence
  Description of Artificial Sequence: Synthetic oligonucleotide
agacacacuggucccguug

SEQ ID NO: 1516053 - RNA, 19 nt, Artificial Sequence
  Description of Artificial Sequence: Synthetic oligonucleotide
uugcccuucugacuuccgc

SEQ ID NO: 1516054 - RNA, 19 nt, Artificial Sequence
  Description of Artificial Sequence: Synthetic oligonucleotide
gcuaguuuggagcccgagg

SEQ ID NO: 1516055 - RNA, 19 nt, Artificial Sequence
  Description of Artificial Sequence: Synthetic oligonucleotide
caucgucaagacacacugg

SEQ ID NO: 1516056 - RNA, 19 nt, Artificial Sequence
  Description of Artificial Sequence: Synthetic oligonucleotide
ugacuuccgcggcacaaga

SEQ ID NO: 1516057 - RNA, 19 nt, Artificial Sequence
  Description of Artificial Sequence: Synthetic oligonucleotide
guaguugguagcugccaug

SEQ ID NO: 1516058 - RNA, 19 nt, Artificial Sequence
  Description of Artificial Sequence: Synthetic oligonucleotide
aaucucgccuguagucugg

SEQ ID NO: 1516059 - RNA, 19 nt, Artificial Sequence
  Description of Artificial Sequence: Synthetic oligonucleotide
ucguuuugcccuucugacu

SEQ ID NO: 1516060 - RNA, 19 nt, Artificial Sequence
  Description of Artificial Sequence: Synthetic oligonucleotide
ugucagucggguguuccag

SEQ ID NO: 1516061 - RNA, 19 nt, Artificial Sequence
  Description of Artificial Sequence: Synthetic oligonucleotide
ucagucggguguuccagcu

SEQ ID NO: 1516062 - RNA, 19 nt, Artificial Sequence
  Description of Artificial Sequence: Synthetic oligonucleotide
gauggugcacacuguuuuc

SEQ ID NO: 1516063 - RNA, 19 nt, Artificial Sequence
  Description of Artificial Sequence: Synthetic oligonucleotide
acuugcuaguuuggagccc

SEQ ID NO: 1516064 - RNA, 19 nt, Artificial Sequence
  Description of Artificial Sequence: Synthetic oligonucleotide
uggauauagauggauucuu

SEQ ID NO: 1516065 - RNA, 19 nt, Artificial Sequence
  Description of Artificial Sequence: Synthetic oligonucleotide
acugcgaguccauacugaa

SEQ ID NO: 1516066 - RNA, 19 nt, Artificial Sequence
  Description of Artificial Sequence: Synthetic oligonucleotide
augugcacggucuccgugu

SEQ ID NO: 1516067 - RNA, 19 nt, Artificial Sequence
  Description of Artificial Sequence: Synthetic oligonucleotide
cagguacagagaacacgcg

SEQ ID NO: 1516068 - RNA, 19 nt, Artificial Sequence
  Description of Artificial Sequence: Synthetic oligonucleotide
ugcacuccguuucuuccac

SEQ ID NO: 1516069 - RNA, 19 nt, Artificial Sequence
  Description of Artificial Sequence: Synthetic oligonucleotide
ucagccguauggacaaaau

SEQ ID NO: 1516070 - RNA, 19 nt, Artificial Sequence
  Description of Artificial Sequence: Synthetic oligonucleotide
gguucaucaugcccgacac

SEQ ID NO: 1516071 - RNA, 19 nt, Artificial Sequence
  Description of Artificial Sequence: Synthetic oligonucleotide
uugcacuccguuucuucca

SEQ ID NO: 1516072 - RNA, 19 nt, Artificial Sequence
  Description of Artificial Sequence: Synthetic oligonucleotide
gaucguggacagcguacag

SEQ ID NO: 1516073 - RNA, 19 nt, Artificial Sequence
  Description of Artificial Sequence: Synthetic oligonucleotide
cagccguauggacaaaaug

SEQ ID NO: 1516074 - RNA, 19 nt, Artificial Sequence
  Description of Artificial Sequence: Synthetic oligonucleotide
gaacacgcggaugaccgug

SEQ ID NO: 1516075 - RNA, 19 nt, Artificial Sequence
  Description of Artificial Sequence: Synthetic oligonucleotide
ucaucaugcccgacaccug

SEQ ID NO: 1516076 - RNA, 19 nt, Artificial Sequence
  Description of Artificial Sequence: Synthetic oligonucleotide
uacagagaacacgcggaug

SEQ ID NO: 1516077 - RNA, 19 nt, Artificial Sequence
  Description of Artificial Sequence: Synthetic oligonucleotide
ugauugucacauaccuuuu

SEQ ID NO: 1516078 - RNA, 19 nt, Artificial Sequence
  Description of Artificial Sequence: Synthetic oligonucleotide
uacacgucggggauuucau

SEQ ID NO: 1516079 - RNA, 19 nt, Artificial Sequence
  Description of Artificial Sequence: Synthetic oligonucleotide
caaaaccacccgacagggg

SEQ ID NO: 1516080 - RNA, 19 nt, Artificial Sequence
  Description of Artificial Sequence: Synthetic oligonucleotide
acuuccgcggcacaagauu

SEQ ID NO: 1516081 - RNA, 19 nt, Artificial Sequence
  Description of Artificial Sequence: Synthetic oligonucleotide
uguucccucgugggcagcg

SEQ ID NO: 1516082 - RNA, 19 nt, Artificial Sequence
  Description of Artificial Sequence: Synthetic oligonucleotide
gauagagagggcacauaga

SEQ ID NO: 1516083 - RNA, 19 nt, Artificial Sequence
  Description of Artificial Sequence: Synthetic oligonucleotide
uagauguaaagguguccau

SEQ ID NO: 1516084 - RNA, 19 nt, Artificial Sequence
  Description of Artificial Sequence: Synthetic oligonucleotide
ucggagugccccaccgucc

SEQ ID NO: 1516085 - RNA, 19 nt, Artificial Sequence
  Description of Artificial Sequence: Synthetic oligonucleotide
acuagagagcugauuguca

SEQ ID NO: 1516086 - RNA, 19 nt, Artificial Sequence
  Description of Artificial Sequence: Synthetic oligonucleotide
ucgucaagacacacugguc

SEQ ID NO: 1516087 - RNA, 19 nt, Artificial Sequence
  Description of Artificial Sequence: Synthetic oligonucleotide
uggagguaccgaaggucug

SEQ ID NO: 1516088 - RNA, 19 nt, Artificial Sequence
  Description of Artificial Sequence: Synthetic oligonucleotide
aacugcgaguccauacuga

SEQ ID NO: 1516089 - RNA, 19 nt, Artificial Sequence
  Description of Artificial Sequence: Synthetic oligonucleotide
uucucgucuguuguuccug

SEQ ID NO: 1516090 - RNA, 19 nt, Artificial Sequence
  Description of Artificial Sequence: Synthetic oligonucleotide
gcugccaugaacaucuuuc

SEQ ID NO: 1516091 - RNA, 19 nt, Artificial Sequence
  Description of Artificial Sequence: Synthetic oligonucleotide
aagcacuugcuaguuugga

SEQ ID NO: 1516092 - RNA, 19 nt, Artificial Sequence
  Description of Artificial Sequence: Synthetic oligonucleotide
acacgcggaugaccgugcc

SEQ ID NO: 1516093 - RNA, 19 nt, Artificial Sequence
  Description of Artificial Sequence: Synthetic oligonucleotide
gagcugauugucacauacc

SEQ ID NO: 1516094 - RNA, 19 nt, Artificial Sequence
  Description of Artificial Sequence: Synthetic oligonucleotide
gaguaaccuggcacagugg

SEQ ID NO: 1516095 - RNA, 19 nt, Artificial Sequence
  Description of Artificial Sequence: Synthetic oligonucleotide
cacuagagagcugauuguc

SEQ ID NO: 1516096 - RNA, 19 nt, Artificial Sequence
  Description of Artificial Sequence: Synthetic oligonucleotide
ccaggauaggcuagguagg

SEQ ID NO: 1516097 - RNA, 19 nt, Artificial Sequence
  Description of Artificial Sequence: Synthetic oligonucleotide
ugugacugacgaccaccac

SEQ ID NO: 1516098 - RNA, 19 nt, Artificial Sequence
  Description of Artificial Sequence: Synthetic oligonucleotide
guacacguucaucugccga

SEQ ID NO: 1516099 - RNA, 19 nt, Artificial Sequence
  Description of Artificial Sequence: Synthetic oligonucleotide
guauggacaaaauguugcu

SEQ ID NO: 1516100 - RNA, 19 nt, Artificial Sequence
  Description of Artificial Sequence: Synthetic oligonucleotide
ucucaucgucaagacacac

SEQ ID NO: 1516101 - RNA, 19 nt, Artificial Sequence
  Description of Artificial Sequence: Synthetic oligonucleotide
cggcacaagauuauagggg

SEQ ID NO: 1516102 - RNA, 19 nt, Artificial Sequence
  Description of Artificial Sequence: Synthetic oligonucleotide
ucugacuuccgcggcacaa

SEQ ID NO: 1516103 - RNA, 19 nt, Artificial Sequence
  Description of Artificial Sequence: Synthetic oligonucleotide
gaacaaucucgccuguagu

SEQ ID NO: 1516104 - RNA, 19 nt, Artificial Sequence
  Description of Artificial Sequence: Synthetic oligonucleotide
ugagcaaacuguggguuuu

SEQ ID NO: 1516105 - RNA, 19 nt, Artificial Sequence
  Description of Artificial Sequence: Synthetic oligonucleotide
ggaaggcucuucugggcgg

SEQ ID NO: 1516106 - RNA, 19 nt, Artificial Sequence
  Description of Artificial Sequence: Synthetic oligonucleotide
guaccgaaggucugagguc

SEQ ID NO: 1516107 - RNA, 19 nt, Artificial Sequence
  Description of Artificial Sequence: Synthetic oligonucleotide
aguccauacugaacacuag

SEQ ID NO: 1516108 - RNA, 19 nt, Artificial Sequence
  Description of Artificial Sequence: Synthetic oligonucleotide
acagcguacagauguucuu

SEQ ID NO: 1516109 - RNA, 19 nt, Artificial Sequence
  Description of Artificial Sequence: Synthetic oligonucleotide
acacuggucccguugcaaa

SEQ ID NO: 1516110 - RNA, 19 nt, Artificial Sequence
  Description of Artificial Sequence: Synthetic oligonucleotide
agguuuugugugacugacg

SEQ ID NO: 1516111 - RNA, 19 nt, Artificial Sequence
  Description of Artificial Sequence: Synthetic oligonucleotide
uccaaucgcuaggggacag

SEQ ID NO: 1516112 - RNA, 19 nt, Artificial Sequence
  Description of Artificial Sequence: Synthetic oligonucleotide
agcgauggugcacacuguu

SEQ ID NO: 1516113 - RNA, 19 nt, Artificial Sequence
  Description of Artificial Sequence: Synthetic oligonucleotide
gagguaccgaaggucugag

SEQ ID NO: 1516114 - RNA, 19 nt, Artificial Sequence
  Description of Artificial Sequence: Synthetic oligonucleotide
ugcuaguuuggagcccgag

SEQ ID NO: 1516115 - RNA, 19 nt, Artificial Sequence
  Description of Artificial Sequence: Synthetic oligonucleotide
gguacacguucaucugccg

SEQ ID NO: 1516116 - RNA, 19 nt, Artificial Sequence
  Description of Artificial Sequence: Synthetic oligonucleotide
uuuugcccgucagguacag

SEQ ID NO: 1516117 - RNA, 19 nt, Artificial Sequence
  Description of Artificial Sequence: Synthetic oligonucleotide
caucugccgagguuuugug

SEQ ID NO: 1516118 - RNA, 19 nt, Artificial Sequence
  Description of Artificial Sequence: Synthetic oligonucleotide
uucagccguauggacaaaa

SEQ ID NO: 1516119 - RNA, 19 nt, Artificial Sequence
  Description of Artificial Sequence: Synthetic oligonucleotide
caucggaggaggccacuag

SEQ ID NO: 1516120 - RNA, 19 nt, Artificial Sequence
  Description of Artificial Sequence: Synthetic oligonucleotide
cacuggucccguugcaaac

SEQ ID NO: 1516121 - RNA, 19 nt, Artificial Sequence
  Description of Artificial Sequence: Synthetic oligonucleotide
gguuugaggggauguccag

SEQ ID NO: 1516122 - RNA, 19 nt, Artificial Sequence
  Description of Artificial Sequence: Synthetic oligonucleotide
agagggcacauagaccugu

SEQ ID NO: 1516123 - RNA, 19 nt, Artificial Sequence
  Description of Artificial Sequence: Synthetic oligonucleotide
cucggagugccccaccguc

SEQ ID NO: 1516124 - RNA, 19 nt, Artificial Sequence
  Description of Artificial Sequence: Synthetic oligonucleotide
aacucguguucuggaauaa

SEQ ID NO: 1516125 - RNA, 19 nt, Artificial Sequence
  Description of Artificial Sequence: Synthetic oligonucleotide
ggcgaaagcccuguccugg

SEQ ID NO: 1516126 - RNA, 19 nt, Artificial Sequence
  Description of Artificial Sequence: Synthetic oligonucleotide
ggauugcuucguuuugccc

SEQ ID NO: 1516127 - RNA, 19 nt, Artificial Sequence
  Description of Artificial Sequence: Synthetic oligonucleotide
cucgugggcagcgauggug

SEQ ID NO: 1516128 - RNA, 19 nt, Artificial Sequence
  Description of Artificial Sequence: Synthetic oligonucleotide
ggacaaaauguugcuggag

SEQ ID NO: 1516129 - RNA, 19 nt, Artificial Sequence
  Description of Artificial Sequence: Synthetic oligonucleotide
gucagucggguguuccagc

SEQ ID NO: 1516130 - RNA, 19 nt, Artificial Sequence
  Description of Artificial Sequence: Synthetic oligonucleotide
uguuggguuugaggggaug

SEQ ID NO: 1516131 - RNA, 19 nt, Artificial Sequence
  Description of Artificial Sequence: Synthetic oligonucleotide
gcucacacaacugauugca

SEQ ID NO: 1516132 - RNA, 19 nt, Artificial Sequence
  Description of Artificial Sequence: Synthetic oligonucleotide
ccuugguuccaaucgcuag

SEQ ID NO: 1516133 - RNA, 19 nt, Artificial Sequence
  Description of Artificial Sequence: Synthetic oligonucleotide
ugaccgugccuuucucaga

SEQ ID NO: 1516134 - RNA, 19 nt, Artificial Sequence
  Description of Artificial Sequence: Synthetic oligonucleotide
cugcgaguccauacugaac

SEQ ID NO: 1516135 - RNA, 19 nt, Artificial Sequence
  Description of Artificial Sequence: Synthetic oligonucleotide
cagcguacagauguucuuc

SEQ ID NO: 1516136 - RNA, 19 nt, Artificial Sequence
  Description of Artificial Sequence: Synthetic oligonucleotide
uggcgaaagcccuguccug

SEQ ID NO: 1516137 - RNA, 19 nt, Artificial Sequence
  Description of Artificial Sequence: Synthetic oligonucleotide
agccgcggcaguuucugga

SEQ ID NO: 1516138 - RNA, 19 nt, Artificial Sequence
  Description of Artificial Sequence: Synthetic oligonucleotide
ucccucgugggcagcgaug

SEQ ID NO: 1516139 - RNA, 19 nt, Artificial Sequence
  Description of Artificial Sequence: Synthetic oligonucleotide
uuccaaucgcuaggggaca

SEQ ID NO: 1516140 - RNA, 19 nt, Artificial Sequence
  Description of Artificial Sequence: Synthetic oligonucleotide
guggcgaaagcccuguccu

SEQ ID NO: 1516141 - RNA, 19 nt, Artificial Sequence
  Description of Artificial Sequence: Synthetic oligonucleotide
acuggucccguugcaaacu

SEQ ID NO: 1516142 - RNA, 19 nt, Artificial Sequence
  Description of Artificial Sequence: Synthetic oligonucleotide
ccguauggacaaaauguug

SEQ ID NO: 1516143 - RNA, 19 nt, Artificial Sequence
  Description of Artificial Sequence: Synthetic oligonucleotide
ggauauagauggauucuuc

SEQ ID NO: 1516144 - RNA, 19 nt, Artificial Sequence
  Description of Artificial Sequence: Synthetic oligonucleotide
gaugugcugggccucgcua

SEQ ID NO: 1516145 - RNA, 19 nt, Artificial Sequence
  Description of Artificial Sequence: Synthetic oligonucleotide
cucgucuguuguuccugag

SEQ ID NO: 1516146 - RNA, 19 nt, Artificial Sequence
  Description of Artificial Sequence: Synthetic oligonucleotide
cagagaaguucaggcgucc

SEQ ID NO: 1516147 - RNA, 19 nt, Artificial Sequence
  Description of Artificial Sequence: Synthetic oligonucleotide
cgcggcacaagauuauagg

SEQ ID NO: 1516148 - RNA, 19 nt, Artificial Sequence
  Description of Artificial Sequence: Synthetic oligonucleotide
ucgcuaggggacagccacc

SEQ ID NO: 1516149 - RNA, 19 nt, Artificial Sequence
  Description of Artificial Sequence: Synthetic oligonucleotide
ggauaggcuagguaggagu

SEQ ID NO: 1516150 - RNA, 19 nt, Artificial Sequence
  Description of Artificial Sequence: Synthetic oligonucleotide
cauagaccuguuggguuug

SEQ ID NO: 1516151 - RNA, 19 nt, Artificial Sequence
  Description of Artificial Sequence: Synthetic oligonucleotide
guacacgucggggauuuca

SEQ ID NO: 1516152 - RNA, 19 nt, Artificial Sequence
  Description of Artificial Sequence: Synthetic oligonucleotide
guguccaucggaggaggcc

SEQ ID NO: 1516153 - RNA, 19 nt, Artificial Sequence
  Description of Artificial Sequence: Synthetic oligonucleotide
uuccgcggcacaagauuau

SEQ ID NO: 1516154 - RNA, 19 nt, Artificial Sequence
  Description of Artificial Sequence: Synthetic oligonucleotide
uugauagagagggcacaua

SEQ ID NO: 1516155 - RNA, 19 nt, Artificial Sequence
  Description of Artificial Sequence: Synthetic oligonucleotide
ucaggcguccuguggcgaa

SEQ ID NO: 1516156 - RNA, 19 nt, Artificial Sequence
  Description of Artificial Sequence: Synthetic oligonucleotide
auggauucuuccaggcaga

SEQ ID NO: 1516157 - RNA, 19 nt, Artificial Sequence
  Description of Artificial Sequence: Synthetic oligonucleotide
cuuccgcggcacaagauua

SEQ ID NO: 1516158 - RNA, 19 nt, Artificial Sequence
  Description of Artificial Sequence: Synthetic oligonucleotide
ccucgcuacaguugcugcg

SEQ ID NO: 1516159 - RNA, 19 nt, Artificial Sequence
  Description of Artificial Sequence: Synthetic oligonucleotide
gacagcguacagauguucu

SEQ ID NO: 1516160 - RNA, 19 nt, Artificial Sequence
  Description of Artificial Sequence: Synthetic oligonucleotide
agagaaguucaggcguccu

SEQ ID NO: 1516161 - RNA, 19 nt, Artificial Sequence
  Description of Artificial Sequence: Synthetic oligonucleotide
uucugacuuccgcggcaca

SEQ ID NO: 1516162 - RNA, 19 nt, Artificial Sequence
  Description of Artificial Sequence: Synthetic oligonucleotide
gcggggagguaguugguag

SEQ ID NO: 1516163 - RNA, 19 nt, Artificial Sequence
  Description of Artificial Sequence: Synthetic oligonucleotide
ugugcacggucuccguguu

SEQ ID NO: 1516164 - RNA, 19 nt, Artificial Sequence
  Description of Artificial Sequence: Synthetic oligonucleotide
aagacacacuggucccguu

SEQ ID NO: 1516165 - RNA, 19 nt, Artificial Sequence
  Description of Artificial Sequence: Synthetic oligonucleotide
ccgugccuuucucagaagc

SEQ ID NO: 1516166 - RNA, 19 nt, Artificial Sequence
  Description of Artificial Sequence: Synthetic oligonucleotide
uccauccugaggguccaaa

SEQ ID NO: 1516167 - RNA, 19 nt, Artificial Sequence
  Description of Artificial Sequence: Synthetic oligonucleotide
ccacaauguacacgucggg

SEQ ID NO: 1516168 - RNA, 19 nt, Artificial Sequence
  Description of Artificial Sequence: Synthetic oligonucleotide
gacuucuggggugcgcuuc

SEQ ID NO: 1516169 - RNA, 19 nt, Artificial Sequence
  Description of Artificial Sequence: Synthetic oligonucleotide
acguucaucugccgagguu

SEQ ID NO: 1516170 - RNA, 19 nt, Artificial Sequence
  Description of Artificial Sequence: Synthetic oligonucleotide
cucaucgucaagacacacu

SEQ ID NO: 1516171 - RNA, 19 nt, Artificial Sequence
  Description of Artificial Sequence: Synthetic oligonucleotide
ggaacugcgaguccauacu

SEQ ID NO: 1516172 - RNA, 19 nt, Artificial Sequence
  Description of Artificial Sequence: Synthetic oligonucleotide
guuuugcccuucugacuuc

SEQ ID NO: 1516173 - RNA, 19 nt, Artificial Sequence
  Description of Artificial Sequence: Synthetic oligonucleotide
acgcggaugaccgugccuu

SEQ ID NO: 1516174 - RNA, 19 nt, Artificial Sequence
  Description of Artificial Sequence: Synthetic oligonucleotide
uucccucgugggcagcgau

SEQ ID NO: 1516175 - RNA, 19 nt, Artificial Sequence
  Description of Artificial Sequence: Synthetic oligonucleotide
caaacucguguucuggaau

SEQ ID NO: 1516176 - RNA, 19 nt, Artificial Sequence
  Description of Artificial Sequence: Synthetic oligonucleotide
gcguaagauggagguaccg

SEQ ID NO: 1516177 - RNA, 19 nt, Artificial Sequence
  Description of Artificial Sequence: Synthetic oligonucleotide
gagugccccaccguccuca

SEQ ID NO: 1516178 - RNA, 19 nt, Artificial Sequence
  Description of Artificial Sequence: Synthetic oligonucleotide
agcugccaugaacaucuuu

SEQ ID NO: 1516179 - RNA, 19 nt, Artificial Sequence
  Description of Artificial Sequence: Synthetic oligonucleotide
guacagagaacacgcggau

SEQ ID NO: 1516180 - RNA, 19 nt, Artificial Sequence
  Description of Artificial Sequence: Synthetic oligonucleotide
ugcuggagaagaggcgcuc

SEQ ID NO: 1516181 - RNA, 19 nt, Artificial Sequence
  Description of Artificial Sequence: Synthetic oligonucleotide
cgcggcaguuucuggaucg

SEQ ID NO: 1516182 - RNA, 19 nt, Artificial Sequence
  Description of Artificial Sequence: Synthetic oligonucleotide
gcaaacucguguucuggaa

SEQ ID NO: 1516183 - RNA, 19 nt, Artificial Sequence
  Description of Artificial Sequence: Synthetic oligonucleotide
ccuuuucauuccucgacga

SEQ ID NO: 1516184 - RNA, 19 nt, Artificial Sequence
  Description of Artificial Sequence: Synthetic oligonucleotide
ucgcuacaguugcugcgua

SEQ ID NO: 1516185 - RNA, 19 nt, Artificial Sequence
  Description of Artificial Sequence: Synthetic oligonucleotide
acacgucggggauuucauu

SEQ ID NO: 1516186 - RNA, 19 nt, Artificial Sequence
  Description of Artificial Sequence: Synthetic oligonucleotide
ugauugcacuccguuucuu

SEQ ID NO: 1516187 - RNA, 19 nt, Artificial Sequence
  Description of Artificial Sequence: Synthetic oligonucleotide
ccgucagguacagagaaca

SEQ ID NO: 1516188 - RNA, 19 nt, Artificial Sequence
  Description of Artificial Sequence: Synthetic oligonucleotide
gcguccuguggcgaaagcc

SEQ ID NO: 1516189 - RNA, 19 nt, Artificial Sequence
  Description of Artificial Sequence: Synthetic oligonucleotide
caccguccucagaguaacc

SEQ ID NO: 1516190 - RNA, 19 nt, Artificial Sequence
  Description of Artificial Sequence: Synthetic oligonucleotide
gcguacagauguucuucug

SEQ ID NO: 1516191 - RNA, 19 nt, Artificial Sequence
  Description of Artificial Sequence: Synthetic oligonucleotide
ggggugcgcuucuugucag

SEQ ID NO: 1516192 - RNA, 19 nt, Artificial Sequence
  Description of Artificial Sequence: Synthetic oligonucleotide
ccgcggcacaagauuauag

SEQ ID NO: 1516193 - RNA, 19 nt, Artificial Sequence
  Description of Artificial Sequence: Synthetic oligonucleotide
ggaucguggacagcguaca

SEQ ID NO: 1516194 - RNA, 19 nt, Artificial Sequence
  Description of Artificial Sequence: Synthetic oligonucleotide
cugccgagguuuuguguga

SEQ ID NO: 1516195 - RNA, 19 nt, Artificial Sequence
  Description of Artificial Sequence: Synthetic oligonucleotide
uggagcccgaggaguugaa

SEQ ID NO: 1516196 - RNA, 19 nt, Artificial Sequence
  Description of Artificial Sequence: Synthetic oligonucleotide
uccgcggcacaagauuaua

SEQ ID NO: 1516197 - RNA, 19 nt, Artificial Sequence
  Description of Artificial Sequence: Synthetic oligonucleotide
gcugucagucggguguucc

SEQ ID NO: 1516198 - RNA, 19 nt, Artificial Sequence
  Description of Artificial Sequence: Synthetic oligonucleotide
guaaccuggcacaguggaa

SEQ ID NO: 1516199 - RNA, 19 nt, Artificial Sequence
  Description of Artificial Sequence: Synthetic oligonucleotide
ggguuugaggggaugucca

SEQ ID NO: 1516200 - RNA, 19 nt, Artificial Sequence
  Description of Artificial Sequence: Synthetic oligonucleotide
ggagguaccgaaggucuga

SEQ ID NO: 1516201 - RNA, 19 nt, Artificial Sequence
  Description of Artificial Sequence: Synthetic oligonucleotide
agguaggaguuggaaugau

SEQ ID NO: 1516202 - RNA, 19 nt, Artificial Sequence
  Description of Artificial Sequence: Synthetic oligonucleotide
guucucgucuguuguuccu

SEQ ID NO: 1516203 - RNA, 19 nt, Artificial Sequence
  Description of Artificial Sequence: Synthetic oligonucleotide
gcgaguccauacugaacac

SEQ ID NO: 1516204 - RNA, 19 nt, Artificial Sequence
  Description of Artificial Sequence: Synthetic oligonucleotide
cacccgggauuccugccuc

SEQ ID NO: 1516205 - RNA, 19 nt, Artificial Sequence
  Description of Artificial Sequence: Synthetic oligonucleotide
cagccgcggcaguuucugg

SEQ ID NO: 1516206 - RNA, 19 nt, Artificial Sequence
  Description of Artificial Sequence: Synthetic oligonucleotide
uuugcccgucagguacaga

SEQ ID NO: 1516207 - RNA, 19 nt, Artificial Sequence
  Description of Artificial Sequence: Synthetic oligonucleotide
ucggguguuccagcuugaa

SEQ ID NO: 1516208 - RNA, 19 nt, Artificial Sequence
  Description of Artificial Sequence: Synthetic oligonucleotide
ggcgcuccacaauguacac

SEQ ID NO: 1516209 - RNA, 19 nt, Artificial Sequence
  Description of Artificial Sequence: Synthetic oligonucleotide
uccaucggaggaggccacu

SEQ ID NO: 1516210 - RNA, 19 nt, Artificial Sequence
  Description of Artificial Sequence: Synthetic oligonucleotide
auagaccuguuggguuuga

SEQ ID NO: 1516211 - RNA, 19 nt, Artificial Sequence
  Description of Artificial Sequence: Synthetic oligonucleotide
gacgaaacucauagaguuu

SEQ ID NO: 1516212 - RNA, 19 nt, Artificial Sequence
  Description of Artificial Sequence: Synthetic oligonucleotide
gcccgucagguacagagaa

SEQ ID NO: 1516213 - RNA, 19 nt, Artificial Sequence
  Description of Artificial Sequence: Synthetic oligonucleotide
cuggaucguggacagcgua

SEQ ID NO: 1516214 - RNA, 19 nt, Artificial Sequence
  Description of Artificial Sequence: Synthetic oligonucleotide
cugauugcacuccguuucu

SEQ ID NO: 1516215 - RNA, 19 nt, Artificial Sequence
  Description of Artificial Sequence: Synthetic oligonucleotide
aggcguccuguggcgaaag

SEQ ID NO: 1516216 - RNA, 19 nt, Artificial Sequence
  Description of Artificial Sequence: Synthetic oligonucleotide
gaacacuagagagcugauu

SEQ ID NO: 1516217 - RNA, 19 nt, Artificial Sequence
  Description of Artificial Sequence: Synthetic oligonucleotide
ggacagcguacagauguuc

SEQ ID NO: 1516218 - RNA, 19 nt, Artificial Sequence
  Description of Artificial Sequence: Synthetic oligonucleotide
gcgcuccacaauguacacg

SEQ ID NO: 1516219 - RNA, 19 nt, Artificial Sequence
  Description of Artificial Sequence: Synthetic oligonucleotide
ggugcgcuucuugucagga

SEQ ID NO: 1516220 - RNA, 19 nt, Artificial Sequence
  Description of Artificial Sequence: Synthetic oligonucleotide
cucgccuguagucuggcuu

SEQ ID NO: 1516221 - RNA, 19 nt, Artificial Sequence
  Description of Artificial Sequence: Synthetic oligonucleotide
gugcacggucuccguguug

SEQ ID NO: 1516222 - RNA, 19 nt, Artificial Sequence
  Description of Artificial Sequence: Synthetic oligonucleotide
ggaugaccgugccuuucuc

SEQ ID NO: 1516223 - RNA, 19 nt, Artificial Sequence
  Description of Artificial Sequence: Synthetic oligonucleotide
cucgcuacaguugcugcgu

SEQ ID NO: 1516224 - RNA, 19 nt, Artificial Sequence
  Description of Artificial Sequence: Synthetic oligonucleotide
ggcggccaguguucccucg

SEQ ID NO: 1516225 - RNA, 19 nt, Artificial Sequence
  Description of Artificial Sequence: Synthetic oligonucleotide
ggagcccgaggaguugaag

SEQ ID NO: 1516226 - RNA, 19 nt, Artificial Sequence
  Description of Artificial Sequence: Synthetic oligonucleotide
ccgguucagccguauggac

SEQ ID NO: 1516227 - RNA, 19 nt, Artificial Sequence
  Description of Artificial Sequence: Synthetic oligonucleotide
cgacgaaacucauagaguu

SEQ ID NO: 1516228 - RNA, 19 nt, Artificial Sequence
  Description of Artificial Sequence: Synthetic oligonucleotide
cgaaggucugaggucauuc

SEQ ID NO: 1516229 - RNA, 19 nt, Artificial Sequence
  Description of Artificial Sequence: Synthetic oligonucleotide
cguaagauggagguaccga

SEQ ID NO: 1516230 - RNA, 19 nt, Artificial Sequence
  Description of Artificial Sequence: Synthetic oligonucleotide
cggggagguaguugguagc

SEQ ID NO: 1516231 - RNA, 19 nt, Artificial Sequence
  Description of Artificial Sequence: Synthetic oligonucleotide
gccgguucagccguaugga

SEQ ID NO: 1516232 - RNA, 19 nt, Artificial Sequence
  Description of Artificial Sequence: Synthetic oligonucleotide
cgugccuuucucagaagca

SEQ ID NO: 1516233 - RNA, 19 nt, Artificial Sequence
  Description of Artificial Sequence: Synthetic oligonucleotide
cccgucagguacagagaac

SEQ ID NO: 1516234 - RNA, 19 nt, Artificial Sequence
  Description of Artificial Sequence: Synthetic oligonucleotide
uguacacgucggggauuuc

SEQ ID NO: 1516235 - RNA, 19 nt, Artificial Sequence
  Description of Artificial Sequence: Synthetic oligonucleotide
cuguggcgaaagcccuguc

SEQ ID NO: 1516236 - RNA, 19 nt, Artificial Sequence
  Description of Artificial Sequence: Synthetic oligonucleotide
ggcguccuguggcgaaagc

SEQ ID NO: 1516237 - RNA, 19 nt, Artificial Sequence
  Description of Artificial Sequence: Synthetic oligonucleotide
guccaucggaggaggccac

SEQ ID NO: 1516238 - RNA, 19 nt, Artificial Sequence
  Description of Artificial Sequence: Synthetic oligonucleotide
ggucccguugcaaacucgu

SEQ ID NO: 1516239 - RNA, 19 nt, Artificial Sequence
  Description of Artificial Sequence: Synthetic oligonucleotide
uagcugccaugaacaucuu

SEQ ID NO: 1516240 - RNA, 19 nt, Artificial Sequence
  Description of Artificial Sequence: Synthetic oligonucleotide
ccguugcaaacucguguuc

SEQ ID NO: 1516241 - RNA, 19 nt, Artificial Sequence
  Description of Artificial Sequence: Synthetic oligonucleotide
ccaaucgcuaggggacagc

SEQ ID NO: 1516242 - RNA, 19 nt, Artificial Sequence
  Description of Artificial Sequence: Synthetic oligonucleotide
gccguauggacaaaauguu

SEQ ID NO: 1516243 - RNA, 19 nt, Artificial Sequence
  Description of Artificial Sequence: Synthetic oligonucleotide
cgagguuuugugugacuga

SEQ ID NO: 1516244 - RNA, 19 nt, Artificial Sequence
  Description of Artificial Sequence: Synthetic oligonucleotide
cacguucaucugccgaggu

SEQ ID NO: 1516245 - RNA, 19 nt, Artificial Sequence
  Description of Artificial Sequence: Synthetic oligonucleotide
ggggagguaguugguagcu

SEQ ID NO: 1516246 - RNA, 19 nt, Artificial Sequence
  Description of Artificial Sequence: Synthetic oligonucleotide
gucggguguuccagcuuga

SEQ ID NO: 1516247 - RNA, 19 nt, Artificial Sequence
  Description of Artificial Sequence: Synthetic oligonucleotide
cuucugggcggcugucagu

SEQ ID NO: 1516248 - RNA, 19 nt, Artificial Sequence
  Description of Artificial Sequence: Synthetic oligonucleotide
cguuuugcccuucugacuu

SEQ ID NO: 1516249 - RNA, 19 nt, Artificial Sequence
  Description of Artificial Sequence: Synthetic oligonucleotide
gacuuccgcggcacaagau

SEQ ID NO: 1516250 - RNA, 19 nt, Artificial Sequence
  Description of Artificial Sequence: Synthetic oligonucleotide
ccugaggguccaaauugua

SEQ ID NO: 1516251 - RNA, 19 nt, Artificial Sequence
  Description of Artificial Sequence: Synthetic oligonucleotide
ccucgacgaaacucauaga

SEQ ID NO: 1516252 - RNA, 19 nt, Artificial Sequence
  Description of Artificial Sequence: Synthetic oligonucleotide
guucccucgugggcagcga

SEQ ID NO: 1516253 - RNA, 19 nt, Artificial Sequence
  Description of Artificial Sequence: Synthetic oligonucleotide
cagaguaaccuggcacagu

SEQ ID NO: 1516254 - RNA, 19 nt, Artificial Sequence
  Description of Artificial Sequence: Synthetic oligonucleotide
accgaaggucugaggucau

SEQ ID NO: 1516255 - RNA, 19 nt, Artificial Sequence
  Description of Artificial Sequence: Synthetic oligonucleotide
cguggacagcguacagaug

SEQ ID NO: 1516256 - RNA, 19 nt, Artificial Sequence
  Description of Artificial Sequence: Synthetic oligonucleotide
gcugcguaagauggaggua

SEQ ID NO: 1516257 - RNA, 19 nt, Artificial Sequence
  Description of Artificial Sequence: Synthetic oligonucleotide
cccgggauuccugccuccc

SEQ ID NO: 1516258 - RNA, 19 nt, Artificial Sequence
  Description of Artificial Sequence: Synthetic oligonucleotide
cccaccguccucagaguaa

SEQ ID NO: 1516259 - RNA, 19 nt, Artificial Sequence
  Description of Artificial Sequence: Synthetic oligonucleotide
gcuaggggacagccaccuc

SEQ ID NO: 1516260 - RNA, 19 nt, Artificial Sequence
  Description of Artificial Sequence: Synthetic oligonucleotide
cccguugcaaacucguguu

SEQ ID NO: 1516261 - RNA, 19 nt, Artificial Sequence
  Description of Artificial Sequence: Synthetic oligonucleotide
gcggaugaccgugccuuuc

SEQ ID NO: 1516262 - RNA, 19 nt, Artificial Sequence
  Description of Artificial Sequence: Synthetic oligonucleotide
gcugauugucacauaccuu

SEQ ID NO: 1516263 - RNA, 19 nt, Artificial Sequence
  Description of Artificial Sequence: Synthetic oligonucleotide
gcacccgggauuccugccu

SEQ ID NO: 1516264 - RNA, 19 nt, Artificial Sequence
  Description of Artificial Sequence: Synthetic oligonucleotide
cacgcggaugaccgugccu

SEQ ID NO: 1516265 - RNA, 19 nt, Artificial Sequence
  Description of Artificial Sequence: Synthetic oligonucleotide
ccgacaccugggcggggag

SEQ ID NO: 1516266 - RNA, 19 nt, Artificial Sequence
  Description of Artificial Sequence: Synthetic oligonucleotide
gucggggauuucauugcuu

SEQ ID NO: 1516267 - RNA, 19 nt, Artificial Sequence
  Description of Artificial Sequence: Synthetic oligonucleotide
cgauggugcacacuguuuu

SEQ ID NO: 1516268 - RNA, 19 nt, Artificial Sequence
  Description of Artificial Sequence: Synthetic oligonucleotide
cguugcaaacucguguucu

SEQ ID NO: 1516269 - RNA, 19 nt, Artificial Sequence
  Description of Artificial Sequence: Synthetic oligonucleotide
ggagugccccaccguccuc

SEQ ID NO: 1516270 - RNA, 19 nt, Artificial Sequence
  Description of Artificial Sequence: Synthetic oligonucleotide
ggcggggagguaguuggua

SEQ ID NO: 1516271 - RNA, 19 nt, Artificial Sequence
  Description of Artificial Sequence: Synthetic oligonucleotide
caggcguccuguggcgaaa

SEQ ID NO: 1516272 - RNA, 19 nt, Artificial Sequence
  Description of Artificial Sequence: Synthetic oligonucleotide
ccgcggcaguuucuggauc

SEQ ID NO: 1516273 - RNA, 19 nt, Artificial Sequence
  Description of Artificial Sequence: Synthetic oligonucleotide
gccgcggcaguuucuggau

SEQ ID NO: 1516274 - RNA, 19 nt, Artificial Sequence
  Description of Artificial Sequence: Synthetic oligonucleotide
ccccaccguccucagagua

SEQ ID NO: 1516275 - RNA, 19 nt, Artificial Sequence
  Description of Artificial Sequence: Synthetic oligonucleotide
gcacuccguuucuuccacu

SEQ ID NO: 1516276 - RNA, 19 nt, Artificial Sequence
  Description of Artificial Sequence: Synthetic oligonucleotide
gcggccaguguucccucgu

SEQ ID NO: 1516277 - RNA, 19 nt, Artificial Sequence
  Description of Artificial Sequence: Synthetic oligonucleotide
ggcugucagucggguguuc

SEQ ID NO: 1516278 - RNA, 19 nt, Artificial Sequence
  Description of Artificial Sequence: Synthetic oligonucleotide
cgcuacaguugcugcguaa

SEQ ID NO: 1516279 - RNA, 19 nt, Artificial Sequence
  Description of Artificial Sequence: Synthetic oligonucleotide
cagucggguguuccagcuu

SEQ ID NO: 1516280 - RNA, 19 nt, Artificial Sequence
  Description of Artificial Sequence: Synthetic oligonucleotide
cucugccgguucagccgua

SEQ ID NO: 1516281 - RNA, 19 nt, Artificial Sequence
  Description of Artificial Sequence: Synthetic oligonucleotide
ccuguggcgaaagcccugu

SEQ ID NO: 1516282 - RNA, 19 nt, Artificial Sequence
  Description of Artificial Sequence: Synthetic oligonucleotide
gcgauggugcacacuguuu

SEQ ID NO: 1516283 - RNA, 19 nt, Artificial Sequence
  Description of Artificial Sequence: Synthetic oligonucleotide
ggcagcgauggugcacacu

SEQ ID NO: 1516284 - RNA, 19 nt, Artificial Sequence
  Description of Artificial Sequence: Synthetic oligonucleotide
cuccauccugaggguccaa

SEQ ID NO: 1516285 - RNA, 19 nt, Artificial Sequence
  Description of Artificial Sequence: Synthetic oligonucleotide
cgucggggauuucauugcu

SEQ ID NO: 1516286 - RNA, 19 nt, Artificial Sequence
  Description of Artificial Sequence: Synthetic oligonucleotide
ccgaggaguugaaggugau

SEQ ID NO: 1516287 - RNA, 19 nt, Artificial Sequence
  Description of Artificial Sequence: Synthetic oligonucleotide
cgcuaggggacagccaccu

SEQ ID NO: 1516288 - RNA, 19 nt, Artificial Sequence
  Description of Artificial Sequence: Synthetic oligonucleotide
ccucggagugccccaccgu

SEQ ID NO: 1516289 - RNA, 19 nt, Artificial Sequence
  Description of Artificial Sequence: Synthetic oligonucleotide
cuucuggggugcgcuucuu

SEQ ID NO: 1516290 - RNA, 19 nt, Artificial Sequence
  Description of Artificial Sequence: Synthetic oligonucleotide
ccgggauuccugccucccu

SEQ ID NO: 1516291 - RNA, 19 nt, Artificial Sequence
  Description of Artificial Sequence: Synthetic oligonucleotide
ccucgugggcagcgauggu

SEQ ID NO: 1516292 - RNA, 19 nt, Artificial Sequence
  Description of Artificial Sequence: Synthetic oligonucleotide
cgcggaugaccgugccuuu

SEQ ID NO: 1516293 - RNA, 19 nt, Artificial Sequence
  Description of Artificial Sequence: Synthetic oligonucleotide
guuacaacaaaauagcucc

SEQ ID NO: 1516294 - RNA, 19 nt, Artificial Sequence
  Description of Artificial Sequence: Synthetic oligonucleotide
aucaucauaaguuacaaca

SEQ ID NO: 1516295 - RNA, 19 nt, Artificial Sequence
  Description of Artificial Sequence: Synthetic oligonucleotide
agaagagaagaguacaccc

SEQ ID NO: 1516296 - RNA, 19 nt, Artificial Sequence
  Description of Artificial Sequence: Synthetic oligonucleotide
cuggaauuaacguugaagg

SEQ ID NO: 1516297 - RNA, 19 nt, Artificial Sequence
  Description of Artificial Sequence: Synthetic oligonucleotide
aaaagaggcacauuuucuc

SEQ ID NO: 1516298 - RNA, 19 nt, Artificial Sequence
  Description of Artificial Sequence: Synthetic oligonucleotide
uuauuauugauagugagug

SEQ ID NO: 1516299 - RNA, 19 nt, Artificial Sequence
  Description of Artificial Sequence: Synthetic oligonucleotide
acugaagcaccauaaauac

SEQ ID NO: 1516300 - RNA, 19 nt, Artificial Sequence
  Description of Artificial Sequence: Synthetic oligonucleotide
gaugcuuugccuuggagcg

SEQ ID NO: 1516301 - RNA, 19 nt, Artificial Sequence
  Description of Artificial Sequence: Synthetic oligonucleotide
aaucauaaacauuauucca

SEQ ID NO: 1516302 - RNA, 19 nt, Artificial Sequence
  Description of Artificial Sequence: Synthetic oligonucleotide
agauuuauuauugauagug

SEQ ID NO: 1516303 - RNA, 19 nt, Artificial Sequence
  Description of Artificial Sequence: Synthetic oligonucleotide
ucuuuuauucauuuguggc

SEQ ID NO: 1516304 - RNA, 19 nt, Artificial Sequence
  Description of Artificial Sequence: Synthetic oligonucleotide
uuuuaugucagaagcuggg

SEQ ID NO: 1516305 - RNA, 19 nt, Artificial Sequence
  Description of Artificial Sequence: Synthetic oligonucleotide
caaucauaaacauuauucc

SEQ ID NO: 1516306 - RNA, 19 nt, Artificial Sequence
  Description of Artificial Sequence: Synthetic oligonucleotide
acuggaauacugcugagac

SEQ ID NO: 1516307 - RNA, 19 nt, Artificial Sequence
  Description of Artificial Sequence: Synthetic oligonucleotide
ucuuacuaggaaaagaaaa

SEQ ID NO: 1516308 - RNA, 19 nt, Artificial Sequence
  Description of Artificial Sequence: Synthetic oligonucleotide
uauaaugagagaagagaag

SEQ ID NO: 1516309 - RNA, 19 nt, Artificial Sequence
  Description of Artificial Sequence: Synthetic oligonucleotide
cuggaugauauucauaccg

SEQ ID NO: 1516310 - RNA, 19 nt, Artificial Sequence
  Description of Artificial Sequence: Synthetic oligonucleotide
gacuggaugauauucauac

SEQ ID NO: 1516311 - RNA, 19 nt, Artificial Sequence
  Description of Artificial Sequence: Synthetic oligonucleotide
uuuauuauugauagugagu

SEQ ID NO: 1516312 - RNA, 19 nt, Artificial Sequence
  Description of Artificial Sequence: Synthetic oligonucleotide
uacuugaaacaguuuaucg

SEQ ID NO: 1516313 - RNA, 19 nt, Artificial Sequence
  Description of Artificial Sequence: Synthetic oligonucleotide
gucaguauucacuacagag

SEQ ID NO: 1516314 - RNA, 19 nt, Artificial Sequence
  Description of Artificial Sequence: Synthetic oligonucleotide
uauucauaccgcuugaacu

SEQ ID NO: 1516315 - RNA, 19 nt, Artificial Sequence
  Description of Artificial Sequence: Synthetic oligonucleotide
aaaauagauuuauuauuga

SEQ ID NO: 1516316 - RNA, 19 nt, Artificial Sequence
  Description of Artificial Sequence: Synthetic oligonucleotide
ucaaaacauguuaugauuc

SEQ ID NO: 1516317 - RNA, 19 nt, Artificial Sequence
  Description of Artificial Sequence: Synthetic oligonucleotide
accgcuugaacuuggauuc

SEQ ID NO: 1516318 - RNA, 19 nt, Artificial Sequence
  Description of Artificial Sequence: Synthetic oligonucleotide
ucacauuuucugaaagccg

SEQ ID NO: 1516319 - RNA, 19 nt, Artificial Sequence
  Description of Artificial Sequence: Synthetic oligonucleotide
auauucauaccgcuugaac

SEQ ID NO: 1516320 - RNA, 19 nt, Artificial Sequence
  Description of Artificial Sequence: Synthetic oligonucleotide
uccaccucuggaauuaacg

SEQ ID NO: 1516321 - RNA, 19 nt, Artificial Sequence
  Description of Artificial Sequence: Synthetic oligonucleotide
guuaugauucuguagaguc

SEQ ID NO: 1516322 - RNA, 19 nt, Artificial Sequence
  Description of Artificial Sequence: Synthetic oligonucleotide
uccuauauaaugagagaag

SEQ ID NO: 1516323 - RNA, 19 nt, Artificial Sequence
  Description of Artificial Sequence: Synthetic oligonucleotide
cuugaaacaguuuaucguc

SEQ ID NO: 1516324 - RNA, 19 nt, Artificial Sequence
  Description of Artificial Sequence: Synthetic oligonucleotide
aacuuuauccucccuucuc

SEQ ID NO: 1516325 - RNA, 19 nt, Artificial Sequence
  Description of Artificial Sequence: Synthetic oligonucleotide
aacguugaaggaguuuugc

SEQ ID NO: 1516326 - RNA, 19 nt, Artificial Sequence
  Description of Artificial Sequence: Synthetic oligonucleotide
aacaguuuaucguccccac

SEQ ID NO: 1516327 - RNA, 19 nt, Artificial Sequence
  Description of Artificial Sequence: Synthetic oligonucleotide
aguuacaacaaaauagcuc

SEQ ID NO: 1516328 - RNA, 19 nt, Artificial Sequence
  Description of Artificial Sequence: Synthetic oligonucleotide
acuugaaacaguuuaucgu

SEQ ID NO: 1516329 - RNA, 19 nt, Artificial Sequence
  Description of Artificial Sequence: Synthetic oligonucleotide
aauagauuuauuauugaua

SEQ ID NO: 1516330 - RNA, 19 nt, Artificial Sequence
  Description of Artificial Sequence: Synthetic oligonucleotide
auaaugagagaagagaaga

SEQ ID NO: 1516331 - RNA, 19 nt, Artificial Sequence
  Description of Artificial Sequence: Synthetic oligonucleotide
auuuguggcuuucauuaac

SEQ ID NO: 1516332 - RNA, 19 nt, Artificial Sequence
  Description of Artificial Sequence: Synthetic oligonucleotide
ucgcuuuauauuaauaaaa

SEQ ID NO: 1516333 - RNA, 19 nt, Artificial Sequence
  Description of Artificial Sequence: Synthetic oligonucleotide
aagaggcacauuuucucuc

SEQ ID NO: 1516334 - RNA, 19 nt, Artificial Sequence
  Description of Artificial Sequence: Synthetic oligonucleotide
uuauugauagugagugaag

SEQ ID NO: 1516335 - RNA, 19 nt, Artificial Sequence
  Description of Artificial Sequence: Synthetic oligonucleotide
uuaugauucuguagagucc

SEQ ID NO: 1516336 - RNA, 19 nt, Artificial Sequence
  Description of Artificial Sequence: Synthetic oligonucleotide
ugucugucuuucaugauca

SEQ ID NO: 1516337 - RNA, 19 nt, Artificial Sequence
  Description of Artificial Sequence: Synthetic oligonucleotide
uucugauacuccucggugg

SEQ ID NO: 1516338 - RNA, 19 nt, Artificial Sequence
  Description of Artificial Sequence: Synthetic oligonucleotide
aguuuaucguccccacucc

SEQ ID NO: 1516339 - RNA, 19 nt, Artificial Sequence
  Description of Artificial Sequence: Synthetic oligonucleotide
cuacagucgacccagcccg

SEQ ID NO: 1516340 - RNA, 19 nt, Artificial Sequence
  Description of Artificial Sequence: Synthetic oligonucleotide
aaaggugcgguggacugcc

SEQ ID NO: 1516341 - RNA, 19 nt, Artificial Sequence
  Description of Artificial Sequence: Synthetic oligonucleotide
auagcuccuauauaaugag

SEQ ID NO: 1516342 - RNA, 19 nt, Artificial Sequence
  Description of Artificial Sequence: Synthetic oligonucleotide
uuuguggcuuucauuaaca

SEQ ID NO: 1516343 - RNA, 19 nt, Artificial Sequence
  Description of Artificial Sequence: Synthetic oligonucleotide
agaggcacauuuucucucc

SEQ ID NO: 1516344 - RNA, 19 nt, Artificial Sequence
  Description of Artificial Sequence: Synthetic oligonucleotide
uggaugauauucauaccgc

SEQ ID NO: 1516345 - RNA, 19 nt, Artificial Sequence
  Description of Artificial Sequence: Synthetic oligonucleotide
gacuuuguagaacucugag

SEQ ID NO: 1516346 - RNA, 19 nt, Artificial Sequence
  Description of Artificial Sequence: Synthetic oligonucleotide
uugaucaaaacauguuaug

SEQ ID NO: 1516347 - RNA, 19 nt, Artificial Sequence
  Description of Artificial Sequence: Synthetic oligonucleotide
uuuucuuacuaggaaaaga

SEQ ID NO: 1516348 - RNA, 19 nt, Artificial Sequence
  Description of Artificial Sequence: Synthetic oligonucleotide
uugcauaagccaaggcucg

SEQ ID NO: 1516349 - RNA, 19 nt, Artificial Sequence
  Description of Artificial Sequence: Synthetic oligonucleotide
acggauaccugaucuagac

SEQ ID NO: 1516350 - RNA, 19 nt, Artificial Sequence
  Description of Artificial Sequence: Synthetic oligonucleotide
aagaguacacccaggcccc

SEQ ID NO: 1516351 - RNA, 19 nt, Artificial Sequence
  Description of Artificial Sequence: Synthetic oligonucleotide
uugaaacaguuuaucgucc

SEQ ID NO: 1516352 - RNA, 19 nt, Artificial Sequence
  Description of Artificial Sequence: Synthetic oligonucleotide
aaguggaggucacuaagug

SEQ ID NO: 1516353 - RNA, 19 nt, Artificial Sequence
  Description of Artificial Sequence: Synthetic oligonucleotide
gucacuaagugcuggagcc

SEQ ID NO: 1516354 - RNA, 19 nt, Artificial Sequence
  Description of Artificial Sequence: Synthetic oligonucleotide
guggucuucucuuuaauug

SEQ ID NO: 1516355 - RNA, 19 nt, Artificial Sequence
  Description of Artificial Sequence: Synthetic oligonucleotide
acauguuaugauucuguag

SEQ ID NO: 1516356 - RNA, 19 nt, Artificial Sequence
  Description of Artificial Sequence: Synthetic oligonucleotide
acuggaugauauucauacc

SEQ ID NO: 1516357 - RNA, 19 nt, Artificial Sequence
  Description of Artificial Sequence: Synthetic oligonucleotide
aaaacauguuaugauucug

SEQ ID NO: 1516358 - RNA, 19 nt, Artificial Sequence
  Description of Artificial Sequence: Synthetic oligonucleotide
guaaaagaggcacauuuuc

SEQ ID NO: 1516359 - RNA, 19 nt, Artificial Sequence
  Description of Artificial Sequence: Synthetic oligonucleotide
cauugcauguacuggcugg

SEQ ID NO: 1516360 - RNA, 19 nt, Artificial Sequence
  Description of Artificial Sequence: Synthetic oligonucleotide
ugacacauugcauguacug

SEQ ID NO: 1516361 - RNA, 19 nt, Artificial Sequence
  Description of Artificial Sequence: Synthetic oligonucleotide
uacagagguugcauaagcc

SEQ ID NO: 1516362 - RNA, 19 nt, Artificial Sequence
  Description of Artificial Sequence: Synthetic oligonucleotide
aucaaaacauguuaugauu

SEQ ID NO: 1516363 - RNA, 19 nt, Artificial Sequence
  Description of Artificial Sequence: Synthetic oligonucleotide
ggaauuaacguugaaggag

SEQ ID NO: 1516364 - RNA, 19 nt, Artificial Sequence
  Description of Artificial Sequence: Synthetic oligonucleotide
aaacauguuaugauucugu

SEQ ID NO: 1516365 - RNA, 19 nt, Artificial Sequence
  Description of Artificial Sequence: Synthetic oligonucleotide
uuucccgaaggauagcucu

SEQ ID NO: 1516366 - RNA, 19 nt, Artificial Sequence
  Description of Artificial Sequence: Synthetic oligonucleotide
ugggucauuuucuuacuag

SEQ ID NO: 1516367 - RNA, 19 nt, Artificial Sequence
  Description of Artificial Sequence: Synthetic oligonucleotide
agaacucugagcuccucuc

SEQ ID NO: 1516368 - RNA, 19 nt, Artificial Sequence
  Description of Artificial Sequence: Synthetic oligonucleotide
caucagaaacugaagcacc

SEQ ID NO: 1516369 - RNA, 19 nt, Artificial Sequence
  Description of Artificial Sequence: Synthetic oligonucleotide
aacugaagcaccauaaaua

SEQ ID NO: 1516370 - RNA, 19 nt, Artificial Sequence
  Description of Artificial Sequence: Synthetic oligonucleotide
ugucucucuacuugaaaca

SEQ ID NO: 1516371 - RNA, 19 nt, Artificial Sequence
  Description of Artificial Sequence: Synthetic oligonucleotide
uuaacguugaaggaguuuu

SEQ ID NO: 1516372 - RNA, 19 nt, Artificial Sequence
  Description of Artificial Sequence: Synthetic oligonucleotide
aaauacuggaauacugcug

SEQ ID NO: 1516373 - RNA, 19 nt, Artificial Sequence
  Description of Artificial Sequence: Synthetic oligonucleotide
agcuccuauauaaugagag

SEQ ID NO: 1516374 - RNA, 19 nt, Artificial Sequence
  Description of Artificial Sequence: Synthetic oligonucleotide
acaguguucuuugaugacg

SEQ ID NO: 1516375 - RNA, 19 nt, Artificial Sequence
  Description of Artificial Sequence: Synthetic oligonucleotide
acuauugaucaaaacaugu

SEQ ID NO: 1516376 - RNA, 19 nt, Artificial Sequence
  Description of Artificial Sequence: Synthetic oligonucleotide
gauagcucuggugagcugc

SEQ ID NO: 1516377 - RNA, 19 nt, Artificial Sequence
  Description of Artificial Sequence: Synthetic oligonucleotide
aaaaggugcgguggacugc

SEQ ID NO: 1516378 - RNA, 19 nt, Artificial Sequence
  Description of Artificial Sequence: Synthetic oligonucleotide
auuuuaugucagaagcugg

SEQ ID NO: 1516379 - RNA, 19 nt, Artificial Sequence
  Description of Artificial Sequence: Synthetic oligonucleotide
cugucucucuacuugaaac

SEQ ID NO: 1516380 - RNA, 19 nt, Artificial Sequence
  Description of Artificial Sequence: Synthetic oligonucleotide
cacuggauauccuuucccg

SEQ ID NO: 1516381 - RNA, 19 nt, Artificial Sequence
  Description of Artificial Sequence: Synthetic oligonucleotide
agugaaguugucaguauuc

SEQ ID NO: 1516382 - RNA, 19 nt, Artificial Sequence
  Description of Artificial Sequence: Synthetic oligonucleotide
uaucacucggucuuucucu

SEQ ID NO: 1516383 - RNA, 19 nt, Artificial Sequence
  Description of Artificial Sequence: Synthetic oligonucleotide
aacauguuaugauucugua

SEQ ID NO: 1516384 - RNA, 19 nt, Artificial Sequence
  Description of Artificial Sequence: Synthetic oligonucleotide
auuuucugaaagccggaug

SEQ ID NO: 1516385 - RNA, 19 nt, Artificial Sequence
  Description of Artificial Sequence: Synthetic oligonucleotide
auucauaccgcuugaacuu

SEQ ID NO: 1516386 - RNA, 19 nt, Artificial Sequence
  Description of Artificial Sequence: Synthetic oligonucleotide
uuuaucguccccacuccca

SEQ ID NO: 1516387 - RNA, 19 nt, Artificial Sequence
  Description of Artificial Sequence: Synthetic oligonucleotide
aaacaguuuaucgucccca

SEQ ID NO: 1516388 - RNA, 19 nt, Artificial Sequence
  Description of Artificial Sequence: Synthetic oligonucleotide
uguggcuuucauuaacacu

SEQ ID NO: 1516389 - RNA, 19 nt, Artificial Sequence
  Description of Artificial Sequence: Synthetic oligonucleotide
ugauauucauaccgcuuga

SEQ ID NO: 1516390 - RNA, 19 nt, Artificial Sequence
  Description of Artificial Sequence: Synthetic oligonucleotide
auggcucccgcuucugucc

SEQ ID NO: 1516391 - RNA, 19 nt, Artificial Sequence
  Description of Artificial Sequence: Synthetic oligonucleotide
ucugaaagccggaugcccu

SEQ ID NO: 1516392 - RNA, 19 nt, Artificial Sequence
  Description of Artificial Sequence: Synthetic oligonucleotide
uguacuggcuggcuagagc

SEQ ID NO: 1516393 - RNA, 19 nt, Artificial Sequence
  Description of Artificial Sequence: Synthetic oligonucleotide
uggauauccuuucccgaag

SEQ ID NO: 1516394 - RNA, 19 nt, Artificial Sequence
  Description of Artificial Sequence: Synthetic oligonucleotide
guugcauaagccaaggcuc

SEQ ID NO: 1516395 - RNA, 19 nt, Artificial Sequence
  Description of Artificial Sequence: Synthetic oligonucleotide
aggauuuuggucugcagau

SEQ ID NO: 1516396 - RNA, 19 nt, Artificial Sequence
  Description of Artificial Sequence: Synthetic oligonucleotide
uucuuacuaggaaaagaaa

SEQ ID NO: 1516397 - RNA, 19 nt, Artificial Sequence
  Description of Artificial Sequence: Synthetic oligonucleotide
gagacucuacagucgaccc

SEQ ID NO: 1516398 - RNA, 19 nt, Artificial Sequence
  Description of Artificial Sequence: Synthetic oligonucleotide
ugagacuuagagccagaug

SEQ ID NO: 1516399 - RNA, 19 nt, Artificial Sequence
  Description of Artificial Sequence: Synthetic oligonucleotide
uuuauccucccuucuccag

SEQ ID NO: 1516400 - RNA, 19 nt, Artificial Sequence
  Description of Artificial Sequence: Synthetic oligonucleotide
ucucguucuaggucccugg

SEQ ID NO: 1516401 - RNA, 19 nt, Artificial Sequence
  Description of Artificial Sequence: Synthetic oligonucleotide
agucgacccagcccggugc

SEQ ID NO: 1516402 - RNA, 19 nt, Artificial Sequence
  Description of Artificial Sequence: Synthetic oligonucleotide
augccagcuccucagcuac

SEQ ID NO: 1516403 - RNA, 19 nt, Artificial Sequence
  Description of Artificial Sequence: Synthetic oligonucleotide
aguugucaguauucacuac

SEQ ID NO: 1516404 - RNA, 19 nt, Artificial Sequence
  Description of Artificial Sequence: Synthetic oligonucleotide
accugaucuagaccuuggc

SEQ ID NO: 1516405 - RNA, 19 nt, Artificial Sequence
  Description of Artificial Sequence: Synthetic oligonucleotide
ugacggauaccugaucuag

SEQ ID NO: 1516406 - RNA, 19 nt, Artificial Sequence
  Description of Artificial Sequence: Synthetic oligonucleotide
aacucugagcuccucuccu

SEQ ID NO: 1516407 - RNA, 19 nt, Artificial Sequence
  Description of Artificial Sequence: Synthetic oligonucleotide
ucauaccgcuugaacuugg

SEQ ID NO: 1516408 - RNA, 19 nt, Artificial Sequence
  Description of Artificial Sequence: Synthetic oligonucleotide
aaguuacaacaaaauagcu

SEQ ID NO: 1516409 - RNA, 19 nt, Artificial Sequence
  Description of Artificial Sequence: Synthetic oligonucleotide
ugaaguugucaguauucac

SEQ ID NO: 1516410 - RNA, 19 nt, Artificial Sequence
  Description of Artificial Sequence: Synthetic oligonucleotide
agaguccgagcguggaccc

SEQ ID NO: 1516411 - RNA, 19 nt, Artificial Sequence
  Description of Artificial Sequence: Synthetic oligonucleotide
aaagccggaugcccuucac

SEQ ID NO: 1516412 - RNA, 19 nt, Artificial Sequence
  Description of Artificial Sequence: Synthetic oligonucleotide
caguuuaucguccccacuc

SEQ ID NO: 1516413 - RNA, 19 nt, Artificial Sequence
  Description of Artificial Sequence: Synthetic oligonucleotide
uaccugaucuagaccuugg

SEQ ID NO: 1516414 - RNA, 19 nt, Artificial Sequence
  Description of Artificial Sequence: Synthetic oligonucleotide
gggucauuuucuuacuagg

SEQ ID NO: 1516415 - RNA, 19 nt, Artificial Sequence
  Description of Artificial Sequence: Synthetic oligonucleotide
aagccugucugucuuuagu

SEQ ID NO: 1516416 - RNA, 19 nt, Artificial Sequence
  Description of Artificial Sequence: Synthetic oligonucleotide
gaugacggauaccugaucu

SEQ ID NO: 1516417 - RNA, 19 nt, Artificial Sequence
  Description of Artificial Sequence: Synthetic oligonucleotide
auauuuuaugucagaagcu

SEQ ID NO: 1516418 - RNA, 19 nt, Artificial Sequence
  Description of Artificial Sequence: Synthetic oligonucleotide
acuuggauuccaccucuuc

SEQ ID NO: 1516419 - RNA, 19 nt, Artificial Sequence
  Description of Artificial Sequence: Synthetic oligonucleotide
auugauagugagugaaguu

SEQ ID NO: 1516420 - RNA, 19 nt, Artificial Sequence
  Description of Artificial Sequence: Synthetic oligonucleotide
uaacguugaaggaguuuug

SEQ ID NO: 1516421 - RNA, 19 nt, Artificial Sequence
  Description of Artificial Sequence: Synthetic oligonucleotide
gaucaaaacauguuaugau

SEQ ID NO: 1516422 - RNA, 19 nt, Artificial Sequence
  Description of Artificial Sequence: Synthetic oligonucleotide
gaaguugucaguauucacu

SEQ ID NO: 1516423 - RNA, 19 nt, Artificial Sequence
  Description of Artificial Sequence: Synthetic oligonucleotide
accucuggaauuaacguug

SEQ ID NO: 1516424 - RNA, 19 nt, Artificial Sequence
  Description of Artificial Sequence: Synthetic oligonucleotide
uuuaugucagaagcuggga

SEQ ID NO: 1516425 - RNA, 19 nt, Artificial Sequence
  Description of Artificial Sequence: Synthetic oligonucleotide
uuccguaucacucggucuu

SEQ ID NO: 1516426 - RNA, 19 nt, Artificial Sequence
  Description of Artificial Sequence: Synthetic oligonucleotide
uaccgcuugaacuuggauu

SEQ ID NO: 1516427 - RNA, 19 nt, Artificial Sequence
  Description of Artificial Sequence: Synthetic oligonucleotide
cucuacuugaaacaguuua

SEQ ID NO: 1516428 - RNA, 19 nt, Artificial Sequence
  Description of Artificial Sequence: Synthetic oligonucleotide
uccccgcagaguccgagcg

SEQ ID NO: 1516429 - RNA, 19 nt, Artificial Sequence
  Description of Artificial Sequence: Synthetic oligonucleotide
agguugcauaagccaaggc

SEQ ID NO: 1516430 - RNA, 19 nt, Artificial Sequence
  Description of Artificial Sequence: Synthetic oligonucleotide
cugucugucuuucaugauc

SEQ ID NO: 1516431 - RNA, 19 nt, Artificial Sequence
  Description of Artificial Sequence: Synthetic oligonucleotide
gaagagaagaguacaccca

SEQ ID NO: 1516432 - RNA, 19 nt, Artificial Sequence
  Description of Artificial Sequence: Synthetic oligonucleotide
guagaacgcauccugcuuc

SEQ ID NO: 1516433 - RNA, 19 nt, Artificial Sequence
  Description of Artificial Sequence: Synthetic oligonucleotide
agugagugaaguugucagu

SEQ ID NO: 1516434 - RNA, 19 nt, Artificial Sequence
  Description of Artificial Sequence: Synthetic oligonucleotide
uugaugacggauaccugau

SEQ ID NO: 1516435 - RNA, 19 nt, Artificial Sequence
  Description of Artificial Sequence: Synthetic oligonucleotide
acuggauauccuuucccga

SEQ ID NO: 1516436 - RNA, 19 nt, Artificial Sequence
  Description of Artificial Sequence: Synthetic oligonucleotide
ugauacuccucggugguga

SEQ ID NO: 1516437 - RNA, 19 nt, Artificial Sequence
  Description of Artificial Sequence: Synthetic oligonucleotide
accgugauguucucguucu

SEQ ID NO: 1516438 - RNA, 19 nt, Artificial Sequence
  Description of Artificial Sequence: Synthetic oligonucleotide
ucucucuacuugaaacagu

SEQ ID NO: 1516439 - RNA, 19 nt, Artificial Sequence
  Description of Artificial Sequence: Synthetic oligonucleotide
uagaacgcauccugcuucc

SEQ ID NO: 1516440 - RNA, 19 nt, Artificial Sequence
  Description of Artificial Sequence: Synthetic oligonucleotide
gaacucugagcuccucucc

SEQ ID NO: 1516441 - RNA, 19 nt, Artificial Sequence
  Description of Artificial Sequence: Synthetic oligonucleotide
cagcugccgagccagaugc

SEQ ID NO: 1516442 - RNA, 19 nt, Artificial Sequence
  Description of Artificial Sequence: Synthetic oligonucleotide
uguagaacgcauccugcuu

SEQ ID NO: 1516443 - RNA, 19 nt, Artificial Sequence
  Description of Artificial Sequence: Synthetic oligonucleotide
cucgcuuuauauuaauaaa

SEQ ID NO: 1516444 - RNA, 19 nt, Artificial Sequence
  Description of Artificial Sequence: Synthetic oligonucleotide
ugcuuaaggcgucucuggu

SEQ ID NO: 1516445 - RNA, 19 nt, Artificial Sequence
  Description of Artificial Sequence: Synthetic oligonucleotide
accaccgugauguucucgu

SEQ ID NO: 1516446 - RNA, 19 nt, Artificial Sequence
  Description of Artificial Sequence: Synthetic oligonucleotide
uauucauuuguggcuuuca

SEQ ID NO: 1516447 - RNA, 19 nt, Artificial Sequence
  Description of Artificial Sequence: Synthetic oligonucleotide
gucucucuacuugaaacag

SEQ ID NO: 1516448 - RNA, 19 nt, Artificial Sequence
  Description of Artificial Sequence: Synthetic oligonucleotide
gaauuaacguugaaggagu

SEQ ID NO: 1516449 - RNA, 19 nt, Artificial Sequence
  Description of Artificial Sequence: Synthetic oligonucleotide
ucgucggccucgaagguga

SEQ ID NO: 1516450 - RNA, 19 nt, Artificial Sequence
  Description of Artificial Sequence: Synthetic oligonucleotide
ucggucuuucucuuccagc

SEQ ID NO: 1516451 - RNA, 19 nt, Artificial Sequence
  Description of Artificial Sequence: Synthetic oligonucleotide
aacgcauccugcuuccgua

SEQ ID NO: 1516452 - RNA, 19 nt, Artificial Sequence
  Description of Artificial Sequence: Synthetic oligonucleotide
uucacuacagagguugcau

SEQ ID NO: 1516453 - RNA, 19 nt, Artificial Sequence
  Description of Artificial Sequence: Synthetic oligonucleotide
ucgaucacauuuucugaaa

SEQ ID NO: 1516454 - RNA, 19 nt, Artificial Sequence
  Description of Artificial Sequence: Synthetic oligonucleotide
uauccucccuucuccagca

SEQ ID NO: 1516455 - RNA, 19 nt, Artificial Sequence
  Description of Artificial Sequence: Synthetic oligonucleotide
acucccagcuuucuccaag

SEQ ID NO: 1516456 - RNA, 19 nt, Artificial Sequence
  Description of Artificial Sequence: Synthetic oligonucleotide
uagcuccuauauaaugaga

SEQ ID NO: 1516457 - RNA, 19 nt, Artificial Sequence
  Description of Artificial Sequence: Synthetic oligonucleotide
acguugaaggaguuuugca

SEQ ID NO: 1516458 - RNA, 19 nt, Artificial Sequence
  Description of Artificial Sequence: Synthetic oligonucleotide
cucacuggauauccuuucc

SEQ ID NO: 1516459 - RNA, 19 nt, Artificial Sequence
  Description of Artificial Sequence: Synthetic oligonucleotide
cuacuugaaacaguuuauc

SEQ ID NO: 1516460 - RNA, 19 nt, Artificial Sequence
  Description of Artificial Sequence: Synthetic oligonucleotide
uuucacuugcaaucauaaa

SEQ ID NO: 1516461 - RNA, 19 nt, Artificial Sequence
  Description of Artificial Sequence: Synthetic oligonucleotide
cuugcuuaaggcgucucug

SEQ ID NO: 1516462 - RNA, 19 nt, Artificial Sequence
  Description of Artificial Sequence: Synthetic oligonucleotide
cuccuauauaaugagagaa

SEQ ID NO: 1516463 - RNA, 19 nt, Artificial Sequence
  Description of Artificial Sequence: Synthetic oligonucleotide
uucucaaggggaacuuuau

SEQ ID NO: 1516464 - RNA, 19 nt, Artificial Sequence
  Description of Artificial Sequence: Synthetic oligonucleotide
ggauauccuuucccgaagg

SEQ ID NO: 1516465 - RNA, 19 nt, Artificial Sequence
  Description of Artificial Sequence: Synthetic oligonucleotide
uguagaacucugagcuccu

SEQ ID NO: 1516466 - RNA, 19 nt, Artificial Sequence
  Description of Artificial Sequence: Synthetic oligonucleotide
guuuaucguccccacuccc

SEQ ID NO: 1516467 - RNA, 19 nt, Artificial Sequence
  Description of Artificial Sequence: Synthetic oligonucleotide
gauauccuuucccgaagga

SEQ ID NO: 1516468 - RNA, 19 nt, Artificial Sequence
  Description of Artificial Sequence: Synthetic oligonucleotide
uuugccuuggagcgcuccu

SEQ ID NO: 1516469 - RNA, 19 nt, Artificial Sequence
  Description of Artificial Sequence: Synthetic oligonucleotide
gaguggagagaauauuuua

SEQ ID NO: 1516470 - RNA, 19 nt, Artificial Sequence
  Description of Artificial Sequence: Synthetic oligonucleotide
caaggcucgcuuuauauua

SEQ ID NO: 1516471 - RNA, 19 nt, Artificial Sequence
  Description of Artificial Sequence: Synthetic oligonucleotide
ggaacuuuauccucccuuc

SEQ ID NO: 1516472 - RNA, 19 nt, Artificial Sequence
  Description of Artificial Sequence: Synthetic oligonucleotide
uacuggaauacugcugaga

SEQ ID NO: 1516473 - RNA, 19 nt, Artificial Sequence
  Description of Artificial Sequence: Synthetic oligonucleotide
ugagugaaguugucaguau

SEQ ID NO: 1516474 - RNA, 19 nt, Artificial Sequence
  Description of Artificial Sequence: Synthetic oligonucleotide
caaggggaacuuuauccuc

SEQ ID NO: 1516475 - RNA, 19 nt, Artificial Sequence
  Description of Artificial Sequence: Synthetic oligonucleotide
gaugcccuucaccaccgug

SEQ ID NO: 1516476 - RNA, 19 nt, Artificial Sequence
  Description of Artificial Sequence: Synthetic oligonucleotide
uucccgaaggauagcucug

SEQ ID NO: 1516477 - RNA, 19 nt, Artificial Sequence
  Description of Artificial Sequence: Synthetic oligonucleotide
caugcucugcuuggcaugg

SEQ ID NO: 1516478 - RNA, 19 nt, Artificial Sequence
  Description of Artificial Sequence: Synthetic oligonucleotide
agcacggcaggacgcgcgc

SEQ ID NO: 1516479 - RNA, 19 nt, Artificial Sequence
  Description of Artificial Sequence: Synthetic oligonucleotide
ucccgaaggauagcucugg

SEQ ID NO: 1516480 - RNA, 19 nt, Artificial Sequence
  Description of Artificial Sequence: Synthetic oligonucleotide
uggacugcccuucucuuuu

SEQ ID NO: 1516481 - RNA, 19 nt, Artificial Sequence
  Description of Artificial Sequence: Synthetic oligonucleotide
auacuggaauacugcugag

SEQ ID NO: 1516482 - RNA, 19 nt, Artificial Sequence
  Description of Artificial Sequence: Synthetic oligonucleotide
cucgaaggugacccggcgg

SEQ ID NO: 1516483 - RNA, 19 nt, Artificial Sequence
  Description of Artificial Sequence: Synthetic oligonucleotide
ggucacuaagugcuggagc

SEQ ID NO: 1516484 - RNA, 19 nt, Artificial Sequence
  Description of Artificial Sequence: Synthetic oligonucleotide
cacuggaggauuuuggucu

SEQ ID NO: 1516485 - RNA, 19 nt, Artificial Sequence
  Description of Artificial Sequence: Synthetic oligonucleotide
ucguucuaggucccuggcu

SEQ ID NO: 1516486 - RNA, 19 nt, Artificial Sequence
  Description of Artificial Sequence: Synthetic oligonucleotide
aucguccccacucccagcu

SEQ ID NO: 1516487 - RNA, 19 nt, Artificial Sequence
  Description of Artificial Sequence: Synthetic oligonucleotide
cucuacagucgacccagcc

SEQ ID NO: 1516488 - RNA, 19 nt, Artificial Sequence
  Description of Artificial Sequence: Synthetic oligonucleotide
uguuccaccucuggaauua

SEQ ID NO: 1516489 - RNA, 19 nt, Artificial Sequence
  Description of Artificial Sequence: Synthetic oligonucleotide
ccugcuuccguaucacucg

SEQ ID NO: 1516490 - RNA, 19 nt, Artificial Sequence
  Description of Artificial Sequence: Synthetic oligonucleotide
guaucacucggucuuucuc

SEQ ID NO: 1516491 - RNA, 19 nt, Artificial Sequence
  Description of Artificial Sequence: Synthetic oligonucleotide
gcucgcuuuauauuaauaa

SEQ ID NO: 1516492 - RNA, 19 nt, Artificial Sequence
  Description of Artificial Sequence: Synthetic oligonucleotide
uugcaaucauaaacauuau

SEQ ID NO: 1516493 - RNA, 19 nt, Artificial Sequence
  Description of Artificial Sequence: Synthetic oligonucleotide
uccaaguggaggucacuaa

SEQ ID NO: 1516494 - RNA, 19 nt, Artificial Sequence
  Description of Artificial Sequence: Synthetic oligonucleotide
uccucacuggauauccuuu

SEQ ID NO: 1516495 - RNA, 19 nt, Artificial Sequence
  Description of Artificial Sequence: Synthetic oligonucleotide
acuuagagccagauggaga

SEQ ID NO: 1516496 - RNA, 19 nt, Artificial Sequence
  Description of Artificial Sequence: Synthetic oligonucleotide
aguaaaagaggcacauuuu

SEQ ID NO: 1516497 - RNA, 19 nt, Artificial Sequence
  Description of Artificial Sequence: Synthetic oligonucleotide
acaguuuaucguccccacu

SEQ ID NO: 1516498 - RNA, 19 nt, Artificial Sequence
  Description of Artificial Sequence: Synthetic oligonucleotide
uggacccacgagcacggca

SEQ ID NO: 1516499 - RNA, 19 nt, Artificial Sequence
  Description of Artificial Sequence: Synthetic oligonucleotide
cugucugucuuuagugguc

SEQ ID NO: 1516500 - RNA, 19 nt, Artificial Sequence
  Description of Artificial Sequence: Synthetic oligonucleotide
ugaugacggauaccugauc

SEQ ID NO: 1516501 - RNA, 19 nt, Artificial Sequence
  Description of Artificial Sequence: Synthetic oligonucleotide
auaccugaucuagaccuug

SEQ ID NO: 1516502 - RNA, 19 nt, Artificial Sequence
  Description of Artificial Sequence: Synthetic oligonucleotide
ggagacucuacagucgacc

SEQ ID NO: 1516503 - RNA, 19 nt, Artificial Sequence
  Description of Artificial Sequence: Synthetic oligonucleotide
uggaggucacuaagugcug

SEQ ID NO: 1516504 - RNA, 19 nt, Artificial Sequence
  Description of Artificial Sequence: Synthetic oligonucleotide
uacagucgacccagcccgg

SEQ ID NO: 1516505 - RNA, 19 nt, Artificial Sequence
  Description of Artificial Sequence: Synthetic oligonucleotide
aguccgagcguggacccac

SEQ ID NO: 1516506 - RNA, 19 nt, Artificial Sequence
  Description of Artificial Sequence: Synthetic oligonucleotide
ccuauauaaugagagaaga

SEQ ID NO: 1516507 - RNA, 19 nt, Artificial Sequence
  Description of Artificial Sequence: Synthetic oligonucleotide
cuuucccgaaggauagcuc

SEQ ID NO: 1516508 - RNA, 19 nt, Artificial Sequence
  Description of Artificial Sequence: Synthetic oligonucleotide
uucauccggucgaucacau

SEQ ID NO: 1516509 - RNA, 19 nt, Artificial Sequence
  Description of Artificial Sequence: Synthetic oligonucleotide
cauggcucccgcuucuguc

SEQ ID NO: 1516510 - RNA, 19 nt, Artificial Sequence
  Description of Artificial Sequence: Synthetic oligonucleotide
cacuacagagguugcauaa

SEQ ID NO: 1516511 - RNA, 19 nt, Artificial Sequence
  Description of Artificial Sequence: Synthetic oligonucleotide
gauauucauaccgcuugaa

SEQ ID NO: 1516512 - RNA, 19 nt, Artificial Sequence
  Description of Artificial Sequence: Synthetic oligonucleotide
cuggauauccuuucccgaa

SEQ ID NO: 1516513 - RNA, 19 nt, Artificial Sequence
  Description of Artificial Sequence: Synthetic oligonucleotide
uguucucguucucgucggc

SEQ ID NO: 1516514 - RNA, 19 nt, Artificial Sequence
  Description of Artificial Sequence: Synthetic oligonucleotide
gcuagagcagagcagcuga

SEQ ID NO: 1516515 - RNA, 19 nt, Artificial Sequence
  Description of Artificial Sequence: Synthetic oligonucleotide
gauacuccucgguggugac

SEQ ID NO: 1516516 - RNA, 19 nt, Artificial Sequence
  Description of Artificial Sequence: Synthetic oligonucleotide
guucuggcgguaacacugg

SEQ ID NO: 1516517 - RNA, 19 nt, Artificial Sequence
  Description of Artificial Sequence: Synthetic oligonucleotide
ccaaguggaggucacuaag

SEQ ID NO: 1516518 - RNA, 19 nt, Artificial Sequence
  Description of Artificial Sequence: Synthetic oligonucleotide
cucguucuaggucccuggc

SEQ ID NO: 1516519 - RNA, 19 nt, Artificial Sequence
  Description of Artificial Sequence: Synthetic oligonucleotide
caacaaaauagcuccuaua

SEQ ID NO: 1516520 - RNA, 19 nt, Artificial Sequence
  Description of Artificial Sequence: Synthetic oligonucleotide
aauuaacguugaaggaguu

SEQ ID NO: 1516521 - RNA, 19 nt, Artificial Sequence
  Description of Artificial Sequence: Synthetic oligonucleotide
auaagccaaggcucgcuuu

SEQ ID NO: 1516522 - RNA, 19 nt, Artificial Sequence
  Description of Artificial Sequence: Synthetic oligonucleotide
uccucgguggugacuuugu

SEQ ID NO: 1516523 - RNA, 19 nt, Artificial Sequence
  Description of Artificial Sequence: Synthetic oligonucleotide
uucuaggucccuggcuugc

SEQ ID NO: 1516524 - RNA, 19 nt, Artificial Sequence
  Description of Artificial Sequence: Synthetic oligonucleotide
uccggucgaucacauuuuc

SEQ ID NO: 1516525 - RNA, 19 nt, Artificial Sequence
  Description of Artificial Sequence: Synthetic oligonucleotide
agcguggacccacgagcac

SEQ ID NO: 1516526 - RNA, 19 nt, Artificial Sequence
  Description of Artificial Sequence: Synthetic oligonucleotide
cacuaagugcuggagccug

SEQ ID NO: 1516527 - RNA, 19 nt, Artificial Sequence
  Description of Artificial Sequence: Synthetic oligonucleotide
cagaugcuuugccuuggag

SEQ ID NO: 1516528 - RNA, 19 nt, Artificial Sequence
  Description of Artificial Sequence: Synthetic oligonucleotide
auuaacguugaaggaguuu

SEQ ID NO: 1516529 - RNA, 19 nt, Artificial Sequence
  Description of Artificial Sequence: Synthetic oligonucleotide
uacuccucgguggugacuu

SEQ ID NO: 1516530 - RNA, 19 nt, Artificial Sequence
  Description of Artificial Sequence: Synthetic oligonucleotide
ugcauaagccaaggcucgc

SEQ ID NO: 1516531 - RNA, 19 nt, Artificial Sequence
  Description of Artificial Sequence: Synthetic oligonucleotide
caccgugauguucucguuc

SEQ ID NO: 1516532 - RNA, 19 nt, Artificial Sequence
  Description of Artificial Sequence: Synthetic oligonucleotide
ggaguuuugcauguucuca

SEQ ID NO: 1516533 - RNA, 19 nt, Artificial Sequence
  Description of Artificial Sequence: Synthetic oligonucleotide
ucugucugucuuucaugau

SEQ ID NO: 1516534 - RNA, 19 nt, Artificial Sequence
  Description of Artificial Sequence: Synthetic oligonucleotide
acuaagugcuggagccugg

SEQ ID NO: 1516535 - RNA, 19 nt, Artificial Sequence
  Description of Artificial Sequence: Synthetic oligonucleotide
augacggauaccugaucua

SEQ ID NO: 1516536 - RNA, 19 nt, Artificial Sequence
  Description of Artificial Sequence: Synthetic oligonucleotide
auaccgcuugaacuuggau

SEQ ID NO: 1516537 - RNA, 19 nt, Artificial Sequence
  Description of Artificial Sequence: Synthetic oligonucleotide
ggucgaucacauuuucuga

SEQ ID NO: 1516538 - RNA, 19 nt, Artificial Sequence
  Description of Artificial Sequence: Synthetic oligonucleotide
cuuggagcgcuccuccuca

SEQ ID NO: 1516539 - RNA, 19 nt, Artificial Sequence
  Description of Artificial Sequence: Synthetic oligonucleotide
gaacuuuauccucccuucu

SEQ ID NO: 1516540 - RNA, 19 nt, Artificial Sequence
  Description of Artificial Sequence: Synthetic oligonucleotide
cucucuacuugaaacaguu

SEQ ID NO: 1516541 - RNA, 19 nt, Artificial Sequence
  Description of Artificial Sequence: Synthetic oligonucleotide
gagcacggcaggacgcgcg

SEQ ID NO: 1516542 - RNA, 19 nt, Artificial Sequence
  Description of Artificial Sequence: Synthetic oligonucleotide
cuggcuugcuuaaggcguc

SEQ ID NO: 1516543 - RNA, 19 nt, Artificial Sequence
  Description of Artificial Sequence: Synthetic oligonucleotide
cuuaaggcgucucugguuu

SEQ ID NO: 1516544 - RNA, 19 nt, Artificial Sequence
  Description of Artificial Sequence: Synthetic oligonucleotide
gacccacgagcacggcagg

SEQ ID NO: 1516545 - RNA, 19 nt, Artificial Sequence
  Description of Artificial Sequence: Synthetic oligonucleotide
ggacccacgagcacggcag

SEQ ID NO: 1516546 - RNA, 19 nt, Artificial Sequence
  Description of Artificial Sequence: Synthetic oligonucleotide
uggcucccgcuucuguccc

SEQ ID NO: 1516547 - RNA, 19 nt, Artificial Sequence
  Description of Artificial Sequence: Synthetic oligonucleotide
gcuccuauauaaugagaga

SEQ ID NO: 1516548 - RNA, 19 nt, Artificial Sequence
  Description of Artificial Sequence: Synthetic oligonucleotide
uguucucaaggggaacuuu

SEQ ID NO: 1516549 - RNA, 19 nt, Artificial Sequence
  Description of Artificial Sequence: Synthetic oligonucleotide
gguguucuggcgguaacac

SEQ ID NO: 1516550 - RNA, 19 nt, Artificial Sequence
  Description of Artificial Sequence: Synthetic oligonucleotide
cuuugccuuggagcgcucc

SEQ ID NO: 1516551 - RNA, 19 nt, Artificial Sequence
  Description of Artificial Sequence: Synthetic oligonucleotide
uguccccgcagaguccgag

SEQ ID NO: 1516552 - RNA, 19 nt, Artificial Sequence
  Description of Artificial Sequence: Synthetic oligonucleotide
ugcuuccguaucacucggu

SEQ ID NO: 1516553 - RNA, 19 nt, Artificial Sequence
  Description of Artificial Sequence: Synthetic oligonucleotide
cccuggcuugcuuaaggcg

SEQ ID NO: 1516554 - RNA, 19 nt, Artificial Sequence
  Description of Artificial Sequence: Synthetic oligonucleotide
gacggauaccugaucuaga

SEQ ID NO: 1516555 - RNA, 19 nt, Artificial Sequence
  Description of Artificial Sequence: Synthetic oligonucleotide
aggagacucuacagucgac

SEQ ID NO: 1516556 - RNA, 19 nt, Artificial Sequence
  Description of Artificial Sequence: Synthetic oligonucleotide
cauccugcuuccguaucac

SEQ ID NO: 1516557 - RNA, 19 nt, Artificial Sequence
  Description of Artificial Sequence: Synthetic oligonucleotide
agaacgcauccugcuuccg

SEQ ID NO: 1516558 - RNA, 19 nt, Artificial Sequence
  Description of Artificial Sequence: Synthetic oligonucleotide
auguuccaccucuggaauu

SEQ ID NO: 1516559 - RNA, 19 nt, Artificial Sequence
  Description of Artificial Sequence: Synthetic oligonucleotide
guucucaaggggaacuuua

SEQ ID NO: 1516560 - RNA, 19 nt, Artificial Sequence
  Description of Artificial Sequence: Synthetic oligonucleotide
cgagcguggacccacgagc

SEQ ID NO: 1516561 - RNA, 19 nt, Artificial Sequence
  Description of Artificial Sequence: Synthetic oligonucleotide
ggcuggcuagagcagagca

SEQ ID NO: 1516562 - RNA, 19 nt, Artificial Sequence
  Description of Artificial Sequence: Synthetic oligonucleotide
gagcguggacccacgagca

SEQ ID NO: 1516563 - RNA, 19 nt, Artificial Sequence
  Description of Artificial Sequence: Synthetic oligonucleotide
ugaaagccggaugcccuuc

SEQ ID NO: 1516564 - RNA, 19 nt, Artificial Sequence
  Description of Artificial Sequence: Synthetic oligonucleotide
aggugcgguggacugcccu

SEQ ID NO: 1516565 - RNA, 19 nt, Artificial Sequence
  Description of Artificial Sequence: Synthetic oligonucleotide
aggcucgcuuuauauuaau

SEQ ID NO: 1516566 - RNA, 19 nt, Artificial Sequence
  Description of Artificial Sequence: Synthetic oligonucleotide
cauaccgcuugaacuugga

SEQ ID NO: 1516567 - RNA, 19 nt, Artificial Sequence
  Description of Artificial Sequence: Synthetic oligonucleotide
aaggugcgguggacugccc

SEQ ID NO: 1516568 - RNA, 19 nt, Artificial Sequence
  Description of Artificial Sequence: Synthetic oligonucleotide
gcaugcucugcuuggcaug

SEQ ID NO: 1516569 - RNA, 19 nt, Artificial Sequence
  Description of Artificial Sequence: Synthetic oligonucleotide
cacggcaggacgcgcgcgc

SEQ ID NO: 1516570 - RNA, 19 nt, Artificial Sequence
  Description of Artificial Sequence: Synthetic oligonucleotide
gaacgcauccugcuuccgu

SEQ ID NO: 1516571 - RNA, 19 nt, Artificial Sequence
  Description of Artificial Sequence: Synthetic oligonucleotide
cgugauguucucguucucg

SEQ ID NO: 1516572 - RNA, 19 nt, Artificial Sequence
  Description of Artificial Sequence: Synthetic oligonucleotide
uccgagcguggacccacga

SEQ ID NO: 1516573 - RNA, 19 nt, Artificial Sequence
  Description of Artificial Sequence: Synthetic oligonucleotide
ggcaugguugacacauugc

SEQ ID NO: 1516574 - RNA, 19 nt, Artificial Sequence
  Description of Artificial Sequence: Synthetic oligonucleotide
uuaaggcgucucugguuuu

SEQ ID NO: 1516575 - RNA, 19 nt, Artificial Sequence
  Description of Artificial Sequence: Synthetic oligonucleotide
acucuacagucgacccagc

SEQ ID NO: 1516576 - RNA, 19 nt, Artificial Sequence
  Description of Artificial Sequence: Synthetic oligonucleotide
ugcgguggacugcccuucu

SEQ ID NO: 1516577 - RNA, 19 nt, Artificial Sequence
  Description of Artificial Sequence: Synthetic oligonucleotide
gcguggacccacgagcacg

SEQ ID NO: 1516578 - RNA, 19 nt, Artificial Sequence
  Description of Artificial Sequence: Synthetic oligonucleotide
ugaaggaguuuugcauguu

SEQ ID NO: 1516579 - RNA, 19 nt, Artificial Sequence
  Description of Artificial Sequence: Synthetic oligonucleotide
cacauugcauguacuggcu

SEQ ID NO: 1516580 - RNA, 19 nt, Artificial Sequence
  Description of Artificial Sequence: Synthetic oligonucleotide
uccucuccuccagucuggc

SEQ ID NO: 1516581 - RNA, 19 nt, Artificial Sequence
  Description of Artificial Sequence: Synthetic oligonucleotide
ccgaaggauagcucuggug

SEQ ID NO: 1516582 - RNA, 19 nt, Artificial Sequence
  Description of Artificial Sequence: Synthetic oligonucleotide
gacccggcgggugcuggcg

SEQ ID NO: 1516583 - RNA, 19 nt, Artificial Sequence
  Description of Artificial Sequence: Synthetic oligonucleotide
cuuccguaucacucggucu

SEQ ID NO: 1516584 - RNA, 19 nt, Artificial Sequence
  Description of Artificial Sequence: Synthetic oligonucleotide
auagcucuggugagcugcu

SEQ ID NO: 1516585 - RNA, 19 nt, Artificial Sequence
  Description of Artificial Sequence: Synthetic oligonucleotide
acgcauccugcuuccguau

SEQ ID NO: 1516586 - RNA, 19 nt, Artificial Sequence
  Description of Artificial Sequence: Synthetic oligonucleotide
ccucacuggauauccuuuc

SEQ ID NO: 1516587 - RNA, 19 nt, Artificial Sequence
  Description of Artificial Sequence: Synthetic oligonucleotide
cuggaggauuuuggucugc

SEQ ID NO: 1516588 - RNA, 19 nt, Artificial Sequence
  Description of Artificial Sequence: Synthetic oligonucleotide
agacuggaugauauucaua

SEQ ID NO: 1516589 - RNA, 19 nt, Artificial Sequence
  Description of Artificial Sequence: Synthetic oligonucleotide
caccaccgugauguucucg

SEQ ID NO: 1516590 - RNA, 19 nt, Artificial Sequence
  Description of Artificial Sequence: Synthetic oligonucleotide
cugauacuccucgguggug

SEQ ID NO: 1516591 - RNA, 19 nt, Artificial Sequence
  Description of Artificial Sequence: Synthetic oligonucleotide
guccccgcagaguccgagc

SEQ ID NO: 1516592 - RNA, 19 nt, Artificial Sequence
  Description of Artificial Sequence: Synthetic oligonucleotide
cagacuggaugauauucau

SEQ ID NO: 1516593 - RNA, 19 nt, Artificial Sequence
  Description of Artificial Sequence: Synthetic oligonucleotide
cagucgacccagcccggug

SEQ ID NO: 1516594 - RNA, 19 nt, Artificial Sequence
  Description of Artificial Sequence: Synthetic oligonucleotide
cuaagugcuggagccugga

SEQ ID NO: 1516595 - RNA, 19 nt, Artificial Sequence
  Description of Artificial Sequence: Synthetic oligonucleotide
uggcggucccgcccauggc

SEQ ID NO: 1516596 - RNA, 19 nt, Artificial Sequence
  Description of Artificial Sequence: Synthetic oligonucleotide
ccuucauccggucgaucac

SEQ ID NO: 1516597 - RNA, 19 nt, Artificial Sequence
  Description of Artificial Sequence: Synthetic oligonucleotide
ggccucgaaggugacccgg

SEQ ID NO: 1516598 - RNA, 19 nt, Artificial Sequence
  Description of Artificial Sequence: Synthetic oligonucleotide
cguggacccacgagcacgg

SEQ ID NO: 1516599 - RNA, 19 nt, Artificial Sequence
  Description of Artificial Sequence: Synthetic oligonucleotide
gcucuuuguagaacgcauc

SEQ ID NO: 1516600 - RNA, 19 nt, Artificial Sequence
  Description of Artificial Sequence: Synthetic oligonucleotide
gaggcacauuuucucuccu

SEQ ID NO: 1516601 - RNA, 19 nt, Artificial Sequence
  Description of Artificial Sequence: Synthetic oligonucleotide
ucauccggucgaucacauu

SEQ ID NO: 1516602 - RNA, 19 nt, Artificial Sequence
  Description of Artificial Sequence: Synthetic oligonucleotide
cagcccucucucguucuag

SEQ ID NO: 1516603 - RNA, 19 nt, Artificial Sequence
  Description of Artificial Sequence: Synthetic oligonucleotide
gggaacuuuauccucccuu

SEQ ID NO: 1516604 - RNA, 19 nt, Artificial Sequence
  Description of Artificial Sequence: Synthetic oligonucleotide
ucaccaccgugauguucuc

SEQ ID NO: 1516605 - RNA, 19 nt, Artificial Sequence
  Description of Artificial Sequence: Synthetic oligonucleotide
cauguacuggcuggcuaga

SEQ ID NO: 1516606 - RNA, 19 nt, Artificial Sequence
  Description of Artificial Sequence: Synthetic oligonucleotide
cggauaccugaucuagacc

SEQ ID NO: 1516607 - RNA, 19 nt, Artificial Sequence
  Description of Artificial Sequence: Synthetic oligonucleotide
uccguaucacucggucuuu

SEQ ID NO: 1516608 - RNA, 19 nt, Artificial Sequence
  Description of Artificial Sequence: Synthetic oligonucleotide
guguucuggcgguaacacu

SEQ ID NO: 1516609 - RNA, 19 nt, Artificial Sequence
  Description of Artificial Sequence: Synthetic oligonucleotide
acagucgacccagcccggu

SEQ ID NO: 1516610 - RNA, 19 nt, Artificial Sequence
  Description of Artificial Sequence: Synthetic oligonucleotide
caaagccugucugucuuua

SEQ ID NO: 1516611 - RNA, 19 nt, Artificial Sequence
  Description of Artificial Sequence: Synthetic oligonucleotide
cauuuucugaaagccggau

SEQ ID NO: 1516612 - RNA, 19 nt, Artificial Sequence
  Description of Artificial Sequence: Synthetic oligonucleotide
agcugggaagagaguacaa

SEQ ID NO: 1516613 - RNA, 19 nt, Artificial Sequence
  Description of Artificial Sequence: Synthetic oligonucleotide
gauaccugaucuagaccuu

SEQ ID NO: 1516614 - RNA, 19 nt, Artificial Sequence
  Description of Artificial Sequence: Synthetic oligonucleotide
uccccacucccagcuuucu

SEQ ID NO: 1516615 - RNA, 19 nt, Artificial Sequence
  Description of Artificial Sequence: Synthetic oligonucleotide
gugcuggcggucccgccca

SEQ ID NO: 1516616 - RNA, 19 nt, Artificial Sequence
  Description of Artificial Sequence: Synthetic oligonucleotide
ccugaucuagaccuuggcu

SEQ ID NO: 1516617 - RNA, 19 nt, Artificial Sequence
  Description of Artificial Sequence: Synthetic oligonucleotide
gucggccucgaaggugacc

SEQ ID NO: 1516618 - RNA, 19 nt, Artificial Sequence
  Description of Artificial Sequence: Synthetic oligonucleotide
guccgagcguggacccacg

SEQ ID NO: 1516619 - RNA, 19 nt, Artificial Sequence
  Description of Artificial Sequence: Synthetic oligonucleotide
ccaccucuggaauuaacgu

SEQ ID NO: 1516620 - RNA, 19 nt, Artificial Sequence
  Description of Artificial Sequence: Synthetic oligonucleotide
gcuugcuuaaggcgucucu

SEQ ID NO: 1516621 - RNA, 19 nt, Artificial Sequence
  Description of Artificial Sequence: Synthetic oligonucleotide
ucccgcccauggcucccgc

SEQ ID NO: 1516622 - RNA, 19 nt, Artificial Sequence
  Description of Artificial Sequence: Synthetic oligonucleotide
ccgagcguggacccacgag

SEQ ID NO: 1516623 - RNA, 19 nt, Artificial Sequence
  Description of Artificial Sequence: Synthetic oligonucleotide
ccauaaauacuggaauacu

SEQ ID NO: 1516624 - RNA, 19 nt, Artificial Sequence
  Description of Artificial Sequence: Synthetic oligonucleotide
ggguguucuggcgguaaca

SEQ ID NO: 1516625 - RNA, 19 nt, Artificial Sequence
  Description of Artificial Sequence: Synthetic oligonucleotide
cucccgcuucuguccccgc

SEQ ID NO: 1516626 - RNA, 19 nt, Artificial Sequence
  Description of Artificial Sequence: Synthetic oligonucleotide
ggcucgcuuuauauuaaua

SEQ ID NO: 1516627 - RNA, 19 nt, Artificial Sequence
  Description of Artificial Sequence: Synthetic oligonucleotide
cugaaagccggaugcccuu

SEQ ID NO: 1516628 - RNA, 19 nt, Artificial Sequence
  Description of Artificial Sequence: Synthetic oligonucleotide
guccccacucccagcuuuc

SEQ ID NO: 1516629 - RNA, 19 nt, Artificial Sequence
  Description of Artificial Sequence: Synthetic oligonucleotide
cuggaguggagagaauauu

SEQ ID NO: 1516630 - RNA, 19 nt, Artificial Sequence
  Description of Artificial Sequence: Synthetic oligonucleotide
gaguccgagcguggaccca

SEQ ID NO: 1516631 - RNA, 19 nt, Artificial Sequence
  Description of Artificial Sequence: Synthetic oligonucleotide
gcuuaaggcgucucugguu

SEQ ID NO: 1516632 - RNA, 19 nt, Artificial Sequence
  Description of Artificial Sequence: Synthetic oligonucleotide
gguugacacauugcaugua

SEQ ID NO: 1516633 - RNA, 19 nt, Artificial Sequence
  Description of Artificial Sequence: Synthetic oligonucleotide
ggcggucccgcccauggcu

SEQ ID NO: 1516634 - RNA, 19 nt, Artificial Sequence
  Description of Artificial Sequence: Synthetic oligonucleotide
gcgucucugguuuucugau

SEQ ID NO: 1516635 - RNA, 19 nt, Artificial Sequence
  Description of Artificial Sequence: Synthetic oligonucleotide
gucgacccagcccggugcu

SEQ ID NO: 1516636 - RNA, 19 nt, Artificial Sequence
  Description of Artificial Sequence: Synthetic oligonucleotide
ccuggaguggagagaauau

SEQ ID NO: 1516637 - RNA, 19 nt, Artificial Sequence
  Description of Artificial Sequence: Synthetic oligonucleotide
ccgcagaguccgagcgugg

SEQ ID NO: 1516638 - RNA, 19 nt, Artificial Sequence
  Description of Artificial Sequence: Synthetic oligonucleotide
gcauaagccaaggcucgcu

SEQ ID NO: 1516639 - RNA, 19 nt, Artificial Sequence
  Description of Artificial Sequence: Synthetic oligonucleotide
guggacccacgagcacggc

SEQ ID NO: 1516640 - RNA, 19 nt, Artificial Sequence
  Description of Artificial Sequence: Synthetic oligonucleotide
agcugccgagccagaugcu

SEQ ID NO: 1516641 - RNA, 19 nt, Artificial Sequence
  Description of Artificial Sequence: Synthetic oligonucleotide
ccuuucccgaaggauagcu

SEQ ID NO: 1516642 - RNA, 19 nt, Artificial Sequence
  Description of Artificial Sequence: Synthetic oligonucleotide
gcacggcaggacgcgcgcg

SEQ ID NO: 1516643 - RNA, 19 nt, Artificial Sequence
  Description of Artificial Sequence: Synthetic oligonucleotide
ggcuugcuuaaggcgucuc

SEQ ID NO: 1516644 - RNA, 19 nt, Artificial Sequence
  Description of Artificial Sequence: Synthetic oligonucleotide
ccaaggcucgcuuuauauu

SEQ ID NO: 1516645 - RNA, 19 nt, Artificial Sequence
  Description of Artificial Sequence: Synthetic oligonucleotide
gcgggugcuggcggucccg

SEQ ID NO: 1516646 - RNA, 19 nt, Artificial Sequence
  Description of Artificial Sequence: Synthetic oligonucleotide
cguucuaggucccuggcuu

SEQ ID NO: 1516647 - RNA, 19 nt, Artificial Sequence
  Description of Artificial Sequence: Synthetic oligonucleotide
ggugcgguggacugcccuu

SEQ ID NO: 1516648 - RNA, 19 nt, Artificial Sequence
  Description of Artificial Sequence: Synthetic oligonucleotide
gucugucuuuaguggucuu

SEQ ID NO: 1516649 - RNA, 19 nt, Artificial Sequence
  Description of Artificial Sequence: Synthetic oligonucleotide
cuaggucccuggcuugcuu

SEQ ID NO: 1516650 - RNA, 19 nt, Artificial Sequence
  Description of Artificial Sequence: Synthetic oligonucleotide
ggacugcccuucucuuuua

SEQ ID NO: 1516651 - RNA, 19 nt, Artificial Sequence
  Description of Artificial Sequence: Synthetic oligonucleotide
ccguaucacucggucuuuc

SEQ ID NO: 1516652 - RNA, 19 nt, Artificial Sequence
  Description of Artificial Sequence: Synthetic oligonucleotide
ggggaacuuuauccucccu

SEQ ID NO: 1516653 - RNA, 19 nt, Artificial Sequence
  Description of Artificial Sequence: Synthetic oligonucleotide
ccccacucccagcuuucuc

SEQ ID NO: 1516654 - RNA, 19 nt, Artificial Sequence
  Description of Artificial Sequence: Synthetic oligonucleotide
ccggugcuuucuuccuguc

SEQ ID NO: 1516655 - RNA, 19 nt, Artificial Sequence
  Description of Artificial Sequence: Synthetic oligonucleotide
gcgguggacugcccuucuc

SEQ ID NO: 1516656 - RNA, 19 nt, Artificial Sequence
  Description of Artificial Sequence: Synthetic oligonucleotide
gcgguaacacuggaggauu

SEQ ID NO: 1516657 - RNA, 19 nt, Artificial Sequence
  Description of Artificial Sequence: Synthetic oligonucleotide
cgcauccugcuuccguauc

SEQ ID NO: 1516658 - RNA, 19 nt, Artificial Sequence
  Description of Artificial Sequence: Synthetic oligonucleotide
cccggugcuuucuuccugu

SEQ ID NO: 1516659 - RNA, 19 nt, Artificial Sequence
  Description of Artificial Sequence: Synthetic oligonucleotide
cuguccccgcagaguccga

SEQ ID NO: 1516660 - RNA, 19 nt, Artificial Sequence
  Description of Artificial Sequence: Synthetic oligonucleotide
ccggucgaucacauuuucu

SEQ ID NO: 1516661 - RNA, 19 nt, Artificial Sequence
  Description of Artificial Sequence: Synthetic oligonucleotide
cguaucacucggucuuucu

SEQ ID NO: 1516662 - RNA, 19 nt, Artificial Sequence
  Description of Artificial Sequence: Synthetic oligonucleotide
gcagcccucucucguucua

SEQ ID NO: 1516663 - RNA, 19 nt, Artificial Sequence
  Description of Artificial Sequence: Synthetic oligonucleotide
cccauggcucccgcuucug

SEQ ID NO: 1516664 - RNA, 19 nt, Artificial Sequence
  Description of Artificial Sequence: Synthetic oligonucleotide
gcugccgagccagaugcuu

SEQ ID NO: 1516665 - RNA, 19 nt, Artificial Sequence
  Description of Artificial Sequence: Synthetic oligonucleotide
cgguggacugcccuucucu

SEQ ID NO: 1516666 - RNA, 19 nt, Artificial Sequence
  Description of Artificial Sequence: Synthetic oligonucleotide
ccucgguggugacuuugua

SEQ ID NO: 1516667 - RNA, 19 nt, Artificial Sequence
  Description of Artificial Sequence: Synthetic oligonucleotide
cccgaaggauagcucuggu
